United States Patent Application Publication US 2020/0095579 A1 - sequence listing, part 2

SEQ ID NO: 5303 - DNA, 633429 bp, Homo sapiens
ttccccagcagctgctgctcgctcagctcacaagccaaggccaggggacagggcggcagcgactcctctggctcccgagaagtggatccggtcgcggccactacgatgccgggagccgccggggtcctcctccttctgctgctctccggaggcctcgggggcgtacaggcgcagcggccgcagcagcagcggcagtcacaggcacatcagcaaagaggtacagtcgaggcatgggcttgggttgcatcctttgccgggaccgagattcctcacttcttccactcttccgagagttgctgtctgtggactgccgtcttgcttcgccttcagagagtgcgctctggggcaagaggaacttgaagcaagttcaagttcaatgccatgagagcgtagtgtagggggaattacctaagtcctgcaaaaggaacggggagtgcttttcattgttctttagtttcgaagaggtcttgctatcacgatacatcccgtaaattgatttctgaaatctttccaagaggaaaactttttccaattggaaaaaaaagaatttcttcaaatcagagcccatcctgcagagaaaggcttcccaagctgtgtggttcatcctgggactttatggagggtagctgatgcatcaaaaaaaaattatatatatatatatacacacacacacacacacacacacacacacacacatatatatatatataaagttttacagaactttgttttcaacttttaaaacaggatttctaaagaagttatgtggttttttttctttcatggcaatggcgcctccagcctcacctttttcaaacccacatcttatcttcatatcctattttattgtagtgaaatcgtgaaatttctccttttgcttaaatacagaggagacttctatgtcatgtgtactttaaggccacagtgactagatatacactttggaggactttggaagatggctgtatttaatgtaacttaaataacttattctcctcagagcctcttagtgtttatgtatatatagctctcatttctgaaactttggggagtctttgaagagttattttattatcatgaattttacaggaagcacatgtgcagcattgtaagacatactttgtaacacattatttcagcaaacaattctttaagttggaaaacctgtatcaaagtaaaaaaaaaagaaatatttattattcggttttaaatatgaaaatgtttaacctaagagtacaaaatctgtaggttagaagcttttaaaagttttaatgaggctgaatctgcttaagttttgaagtatacttatccttcttccagttaacttctagccaagtcaatagttctgatatttgttcttataatctagcatttttagcagtactattttttaaggagtaaagagatatcccaagctctttctataataataactccctgattaaaattcttggaataaaaatgaccttgcattcactatataacttttttccttctatttttgcttttgcttctctgagaggtaaaatggggccaatatgacttaattaatataatttacgagagtgattttaagagtatctctggccacttatttttaaaaattctacttttaactattaaactttgctcaattacaaggtgtgtttaaacaagacataatactttaataatgttaggcagctgggagaaatgaggggccaggggcaccaatccttatgtccacttggaatggggcagaaactcaaagcatgcagagtaaggatcaagtaaattgttgctaagaattatcctgaacacacacaggatttctcttttttcctctcccttcttatttactctcttttcaaataaggtaatattaactctgatttctatgacccaggcacaagatgaagtgaattcaggaggaagggtttatactaccattctgtcaagataccacttaaatgctacatacaataaggaattttattcaaaatagctacaacatacaatctactataggctgctataatctgcattctagtatatattattgtctttgtcatagaccatttacaatatatctggaggttggctcaaggataaatgacttaaacctgttaatgttgaaagtatgtaaaattcatgaaactttaaaattggatagtgatttatgatttaaaaatgccttatgtacacgatctttattcaccttcagatattattattctcaaaggacaaatttagaacttaggcttccagtagttgtaatttaagtttacataataataactttatttcaacaactaaaacacttccggtattgtttgtgctgaattcccttttttatggttccaaggtttctttccattaattgtttaggccatgttttctttttagtgttgttccattgaagcaagccctctgtgaaaatcacgggatatgagtttgactggagaagggttttcctggctatgatcaacttttctgttttcgattatactagcactgacctttctaggcaagcgctaattgtgtagaagttctatttccccttataattcgataccactttattaagaatttttgacatgaatcaaccatttttagatgttgcagttgagttagaaacataaccagactttttgttttttactttttctttgaaatcttatgtggtttctatagcatactcgattgtagtatgaatagcattgattcagcaagaatgatattccaaggaaattctttagctatatttaaaattgacgaaatagaatgatgcaatcaaaatgattctgcatttcagcaaggcagtgtctaaaatgttttctgatattcttgtgaataatatgtggaaactgaagcataatggcaggtaaattgcaactgattgaaaaatagttcacaaagaatattgcatagtggattaaggtcaatccggaaagaagtctctagcagtgcaacagaggttttcttatactcaactatcttggtaatggcttgatggaaaatgtaaaatccaagcttatcagaactgcatgtggtccaaaattgatagaggtggctaagctggttactaacaagttcagaaattttaaaggtctctatagccttgaccatgaatggcacctacatgaagttgcttttattattcatatccacatgttaaaaaaaaaaagtccatttgtgctcttctggaaattagttacattgtttatatgtttaggaatgaatatgaagacaggaagagaaaggccactctgaattgcagcaagttcgatatgaacatatagtgtaatatggtgacaaaaaaggttggctcacttttacacaaaactcatagaagcacataggtctgttgcttaacacacatttgggtatttcattgacaaatgggtgtagatgcagagaagggagagcagaatggttaagagtctgagaagattttcagaagaggaatgtcccaagtaaaatctttccatctgaacaaggaaagatttagggaaggcaatcataaggactgtcctcaaattttcagaagagtcgttatgttaaagagggactattctaaaggctgaaggtggatccatagaagaacatgacaaacaaccaggtttgaattttataatatggagaaaatagctcctctcctcacttcctccccatgccattttgagttgttcagaaatagctgaattgtgtttgagcaacttgcttctggaaatgaccatgcagtgatcagatgtacagttagtgagggatgctttatgagggaatgcctctactgagaggaagttaagactcatcaactgtctagccatttgtcagttctaagattctaatattatagtctattgcttttagagtgcatacttgcatttaaatttctgaattcttaaaatgtcaagaaaatgttaaatatataaaaatgtgtttttaaatcccttctgggatttaaaataaaaacatgtttgagacaatcctcacacatttttggcaagaatacttagatatttagcatggattttccacatcatcgtcaattgcacagttctaaaacatcttgtgttataacacgcaagaatactttataaattacctgagaaattttcaggggattcatagtggccataaacctggaattaatttttttaaatatttttctttgctgcatatgttaactttttggcttgtttgccatatactgacctaatcatttagtaaaaatgattcataacagataaaatgcatggcatttcaacatattcaaaatatttatatgaacatattcaacactgaatattatagatgtgatagaattaataaaatttatataaattttatattatgttatatttcacatatcaatgtgtacagatttctggtctatcttaagatttttctaccctaggatttcatgcaaactaatgaactgaatctatatcaagggatgctgggggctgggcaaggtggctcactcctgtaatcgcagcactttgggaggcctaggtgggtggatcaccttaggtcaggagttcaagaccagcctgaccaacataacggaaaccgtgtctctactaaaaatacaaaaattagccaggcgtggtggcatgtgcctgtaatcccagctactcaggaggctgaggcaggagaatcacttgaaccctggaggcagaggttgcagtgagccgagatcgtgtcattgcactccagcctgggcaacagagggagactctatctcaaacaaaacaaaacaaaacaaaacaaaaatttaaaaagatttgcaacttatcatctatccagtttgcagtagggccttatttagcatctagaaaccatgtgaaaaagatcaggaagaaattattgtaaataattattgtaaatggttgcacaagtggtttaacttctaatctagaagattcgggtttaggatttgtttacagttgcaacttgagcctcgatagctaaacaggaatttaggcagaagctccgtttcagtaaatgagaaaacaagacagagtttagagaaagataaaagtagattttccaggcttagtatataccaagcagatagaaataaaactaattctaggctttccccattggtaagactgaatttagaggtcagaagttgtgaaggaaattggtggggttgggcctatatgcattggaatgtggtaaatgaatgaatgtttacagtgagtaaagaagataaaaaaattcctgctcttgtggaactaatatttagttgggatggagatgagcagacaggactatgatgaatatatgatgaagcaacaaaagaacacctatattgtataaaatgtagttgatgaaaaatgtcctggacaaacaaatacaacggggtaaggacagtcaggagttctaggaatggagggaggttgatggctattttgttggtaaaggttggtaaaggttgacctctttgagaggatctcactttggcaaacacttgaagatgacgtgggagtgatttgtgcagttatcagggggaagagtactctctgtacagggagcaggcctatgaggatctaagcttggagcatggtgagaaggctcagaggagaaatgggaaactggaacacatagcattgttgaccttaattttaaagattttgcctttttgtctgagtgagatgaggaggcatcggtgagttttaacagagttaaataaatgaataaaatcacaggtttttttgtctcaaatacgcactaatccatgggactagaccaacagtccaagcatagaattattttagatttatctcttgtcccaaacactccactgatagaacacatttaagtgattctacattcaagagcattccacttcaaccatcttatcatggtgaagctcagatgtgtctttgtaacactcttttcttccctttggcaactcagtgctattccattattcaaaatatatcagtacctcagaaacaatttgtgtgcagggaacttccgcagcttttaaaaattttgctccagtgtagttagaaatatgacagatttttaagggtaattttaaatagtatgcactttaaaacaaaaatgaattattcacaatcccacatggacatataggtactttggagttcccttttttattatctatttcaatctcagacgctaaagtttagacacaattgttgaaaatgacatagtgatgtattgatctgatgatttcttttatgatatgaaatttgaaatgctacctgttttacattcagaaacttattctatgttctgtttccatttttgttactgttttaagaatcacttgtaagctttaacaataacgttttggactatagtaatgcaattttggcctaatttaattctgtcatttagaacaaaaaaggtaaaaaaattggatagcttttccttctctctccctctcttctctttctcccttcctttcttccttcctccctttctttattttccttttcccttagtattcttcctgtgaataaaataaggtaattaaaatagataattctaacaaatataacatttaggaagatagtaaggcaaaactttacttaaatcttccttattaaaagccacaggtaattactatctaaagatagtttgagacatattttcagggtgagttaaagctaaagacatttgcttgtcaaagatgtataatatgggtttaaaaatgtttttctcctaagtaatcttgagtgtggatcttaatatgggaactttatgctatttggattttatttggacacgtgacatttacaaaagatcattgaggattgcctattaatgggttattattcataatatcggcctctgtgacatgcctaatctagttcaaacaacaagttaatctatgcaaattcctgatgatgaaaacctcaggagctatttagtgcctggcacttaggaaatgtaccttgtgcaatgttaagtatgtctctgtatgtgtagtccactcaactgacccccgaactgtgtacctccccaaggctcttcatttagctgcgtcttgagtgccagatggtttagattggtataataatatgtagtgcattgtgagcattaacacatttacttacgtagcagagctgtttagtagattaatataattatcctcagtttgtagaaggaaaatatgcccagcaacttgtcaaggacaaacaaaaattccaatgcttattttagaattagaaattaaattacggtcctgctcttgactttgtagatgctaactatcacctcttttggacttttatatatttatctttcataaaataccctgaggaaaaaaaaatccatttctaagttatgttagtctatcatatccagagattcatttggtattatggaagaacaaaaaataaaatgtgtagtcttgaagggtctttttcatttaaatacacacacacacacacacacacacacatgctgcttattactatgtagacatatacacacatgtattacttaaaactatgcattaattcaaatgcattcatcaaattttagtgtttacattcttggaactttgattactggacactaggctataagaaaatattaattgattctttattggcttttctgaagtaactttacagaagttacttcagcaagctagaaacaacggtatttattatactgtataatgaaccctttaagaatagtcaatgtgtaaatgtcagtgaatgaaaagaacaagaaccaaacagatatacctaagaatcagagcaagattaatctcaaaattccttctgaaaagatgaaaaaccttgacatcttcataaaaacatttaaagactttcatttgaagttgaactcagttaagacaaaagtcttccaatctcccagattttgagagggtgtatttgtgtatgtatgtgattgcagcaccagtgcacatgtaccatttacagcctagcactcacaggacctaatttgtatatttagtatgttttctgtttgatttttgttgtcttaaggtattagattttgtttatcaaaatctttgaataagaaaatctaaaaattgaatttctagaaaactctagttgccttgacaaatgattatggaccaaagaataaattataaatgagacaattataatattccatccagtagctatactgttaaaattccaaggtataatccctttcgagttgcttgtaacttagaaggtcctattctatagaagaaatagagttagtagagtttgctgcatcaaatatattttttcaaatgcctacatattatagttgacacaatttcctggctttattgccttctgtgcaattttcaattattggatgaggctgaaagtttgaaagagaatatgaagcagtgcaattgtcatttcagtgagctacctcatctcattggtttgtcgtggtacatatgtaaaacactgaatataaaacatgaaacatctagtaaggcctcaataaatgttcattttcaaaatgcctcaaaaaatgaattaaacctaacaacctaacatgacattctctggctgaaagaaacactcttctccaacatcatgtggtataccaaattcagttgagactgtttgtgaaggaaggaatttgcttatatacttaaacacacaagtatttgaattctaattagaatttgtgctgcagtatttctttattctcaactttatagcttagcctacaataaaaactcttatcaatacgtacctctttatacctttagtttccacatacagtactcttctttggaggtaactgaatcgtagaaaacgtatggacttaggagaaggctagactcggatccatagccaagtcaccactttactaagatcaaaagcctgagtcaacggagttaaattttctattcgtaagataggtttaggttagataataaatgtgaaaatacttgccagctaatcagtaaatactagctcttttcttctttattttatgagcataaaactaaaaaaaaagatttgctttgcatatagcatatcctttttgcttaagaacagcaaaatattctaaaaatttctttgaggagaccctaagagactatagatggcaaactatttatctcattgccaagagattgaataattctgtcgaggttacacagcaagtcagtaacagagataagaagaaacacaagttcctataattagctaacagttatgttagtagctctgtgtgagaagtgatttaaaacaggcaacatgatggaaatttttgcaataatttgtagttattcatacttcaaatgtggtacaataaacgttttttctaggaatctcattgttgaatatgtatttattttgttgataaactattttttaaaaacttctttaatacttataatatgtttagataaatatatggcatatagtaagcacttcataaaggttagttattattcttagtctatgaagtatatgttttcattgacatctgcttgggtagagatgacaatgtggcgtgtttgacacacaatgtaagttaatttcagcatggccttcagtggaaagtctaattggattgcagaaaatctctcaatatagattgtctttatttggactctccctaattactatagtaaaaaaaattcttggaatacattatttaatacaactctggatagggaggattcttagtgtgtctacttgtgtattaaatttttagtgtgtctattttgtattaaatctactattaaaaaaaccaccaaaaaacaaaaccaaaaaacctacttcagaaaatcatatagtactctaacaaatctctagagaaaactgcttttctaaacttgggaacgctggattttgaaaatatttcagacaaaacacttcttaaaggcccgtttaccatcaaaaagtttcaatcttgcctaacacataatgtgcaaatattcattttttcattctgatacattagaaaagtcactggatttgtaattggaattccaaaatataaattttccctctagctcttcctaaagagattaccttaaacatggataagtcacttaactattctgaaattcaattttccatctaaaaaatgacaatgtaatgttcgaatctatttcatggggttgttataagggttaaataaggcagaccatacaaataccattattaatactatttgttattataataaatgacagagttggtcttaggcatcattggttatgaagttttgctccaccccctttctttgttttttttccccagtggctcctaaccatttgttattaattaataatgttatgtattaatatacatatatgtattaataatgttgttaataatgttatgtattaatatacttagttctcctgttttcaaggacccatgacacatagctttcaaacatggcacaaattatttgtttagtaaacatatacatactactgcataagaagaaaatatggtatctgaaagtgtacatcagcttcctacaaacaagtagcaaagagtaagtattcagtgaaattataaaactatcataaaaatagcctaagggctctgaaacattctatgtcaagattcctttttatcctcttaaaaataattgaaactttgatttatggtatatctactatttgattgtattaaaattaaaattgggaaatttaaaaatgtttactaattaatttaaaataccagtaataaaacaattacatgttgacaaaaagaacataactttatgaaaaataattttatatccaaaataaaactcttcaatgtctggcttaatagaagagaactggattctcatttctgcctctgcgttcaaattattacatgttattttagtttaaattattttggtttaagcatattaagaaatatataacaacaaacatagataagctattggaaaaaagaggagtctgtcagtgccttttaagatagctgtaaatattctttgattctataccaaaactcagtaagtggtagttttcaaaagattggctgcagtgtggtatctgaaactgcatcaacgatatttttgtacgcttttatattaaaatctacggatctatcttacacctggaaagaattttacccatgtgtgatgttatagtatcattcatagatcatttggaagatactgatttactagttatgcagatcagccacaacttgacagattttcttataaaatattttaattacattttttatgactattgatctcaccagaaaagtccctaaatattagaagctgttaatctcacaatggtagagacaaatttttcagaatttttattttcatttgtaagtttctgtagttattgacaaattttgttatttttcttgaaatagttactttattcattcttaagaaaatgtttatcaaacaaatgagtcttaaaaaccatagttagatcctttttgtagtacatagggtattccacgaaaaaagtggctagtttagcttgcagctgaaaacaactgtacaaatgcttttcctcaaatcaaccatcatgcttcagtatacagttgatgttaaaaagatgtacccaagatttaataaatttaatcattgttactacttcatcaagtacattcatctgtgaaactagttgtttttttcttctgggagtgtgtggtggtgaaaactaaactgaccactagcatggtttagtacccctgccttgatttgtgctaatgtaccatcagtgtttcccaccactattgcttttgcaccatcagtgcacatgtcaacacaatgaaaaggcagataataattaaatcttgttactaaaaggatttttgaacttgtgtacctatggataatgtattgtggactcccagggattcacagatctttctttgagctctacagggttggactacagttaagttcctcactgcctgcctcttcaccaattctacaaaatctatagccatatgaaggtaaattttgcaatcagaaaaagccaaaaccacttcagtttttacctcaggtctagtctaggagagtgataccatttctttttaagggggaagaaatccagaaaagcttcttctgtggaaaaagcaggaagtgttaaaaccagccagacatacatatagaaatcaaaatctctgccatatcatctgcccttcttaatttcctttcacttgcccaaactatagtagagatagtgtacttacccacagttggacatatgatgttattcctaatagacttaaaaagtgaactcatggcggggcgcggtggctcacgcctgtaatcccagcactttgggaggccggggcgggtggatcacgaggtcaggagatcgagaccatcctggctaacatggtgaaaccctgtctctactaaaaaaaaaaaaaaaaaaaaaaagcaaaaattagccgggcgtggtggcgggcgcttgtagtgccaggtactctggaggctgaggcaggagaatggcgtgaatccgggaggaggagcttgcagtgagccgagattgcgccactgcactccagcttgggcaacagagcgagactccgtgaactcatgagcaaggtttagtacaaaggaaacatactaatatctgtaattctgaatattagcagaagagatttttattccttgctgagctcctgaactcacatcaggaggggtcctttgttcttttcatagaaagaattcctgttggaagcactggatatcgtatttctcaaaatatggaatttccttcatttatttctagcctttgaagttttgtgatttctaaagcatttaaaaggttttgtaatgttgagaacctaaaacgtgattcttttctctgtgcccatctcataccattgtatgtgtgtcatatgatggatctggtttctttttcttatttgttgggagatgtccagagactcaaggatctatcctttgaccaaatttttcactcttcaagggcctcatactgctctgatttcagatgtatagatatattgcttatcaaacactgatgggtctgaacatgagtggtagtaagatatttccagattaagtagacaaattgtgcagaactttttagtatcactatttaaatgactaaatttttgaggtttatgtgtatccagcccaatatgtcctctccttatctagtataatttatctttaaaaattagactggcttggcatatgtcagattttgtatttaacagactttttatatatttctttgttaggaggtgttcaatgttagacaaagtgaacagattactttggaatccatgtcctggtcctgctgaataacatgtcctcaccctccttccatttttttttttttctgccatacacattccagtaacactgaaagagttaattgatgtgtcccatctttattgcttttgtaaatagctatagatacactttatatgtagataatggtatgttttaaaattctgcaaaaatagcttttcaattctctttattctctttctcaagctttgataaaatatttttcattcaacttttagggactgattttctccatagagttcctgatgtggtgctactggagtgatgctgagaaaacattattctaaatgttttttagaaacattttttagaaaacatcattcacccagaatctgaaattttatctttatttatttattcctttggataaaacattgccctcacaggctattcttttctaaaatgtttgctgtgctgttattattcactttaatggaaattaatttatctgctgacctcctttttgacagtttaggactgtattaagttttcagatctgctcggtgagaaatagtgaaataaaactagttaacatctatggaatacctaactatgggccagcactgctgtaagcatgtctcatgccttaatttatcaaaggtagatgctattaatctcatttaacagaagagaaaactgaaatgcaaaatgttaagtaactttccaaaagtaaaacaaccagtgaactggtagagaccaagatttggacctaggtagttctactttgtggcccattcacctacccatggcagcgtgtgacctcaaccctgaaagagtacaaattagtaagtaaagggcttcctttagtgacatacttcagaggtgattttatttcccttttttgtgagatttcctatgaaaagattaacaatttaaacaatatttgccatttagattcagcactatgtcctgatatatcagaagagtctatgaactttttttttttaaagactccttggagatagcaatgaatgaattcttaactgtgtcaggcatgcctgaattttttgagtcatataagagtttgtagcactcctagaattgttaacttaattggtaagaatgtgctttttttctctttgttgttgtatgaagtgttaaaccaaaaataatcaaggcccagggcttttcctggtccattaatggatatatgacaagtgatggcaaaaggatagttacagttattaacttaatcattaattggctcagggtatccccaaaaccgcagttggaactgaagtgctacaaaaatgaccattttgttgttatagcttttcttcacataaggaaataaataagcaaaaagagggagtgtcttatctatttgttgatcaaagatcttgtaattctgcttatggtaactcccagagtagagaatatcatccagttggccccctttatgaacttggattgcaatggaagtcctatcggccagtttactagttaacaggagctgtagtactagagctatgactgcatcagaagtccagcagtgtgggcacaaagcagcgcagcacttttgaagttagacatcgagagtttgagtcctagattcacaccttgctggctgagtgctgttgcaatagtgctgttgagtgagttatttaacttctttaaacctgatcatcctcacctttaagagaatgaaaatagtagtgcctttttaaggattaaatggaattaagtatttaatttgtattcagaagaggatggaatcatcattcaaagactttacaatcagtggtgttttcagcatggacaactggagctttaacttaaaagatctagaaactgggcttgttggccacagttttagtgtgattagaggtggtcatagggtagtcaaagttgccactatcctggttatggatggtaatagaactgcctatttatttgatgtcttcacttagttgtctcctaggtccttcacagcgaacatttgccaggattgaacataggtactctgcatttcctcaactcttttcccatcagcttttcccaactcagaaaatggtaccatcattcaccccttgaatcaaatttgacatctagaagttactattaacttctctctttccttcacctcccagattgaaataatcagcatgtctgtcatccacaccaccagagtttattccataaatatccacatctttttgtccctattgccttctagaccacagcactctttttttgcctatgcaacttcagcagcctcccagctgctctcccttcttttctcttttccattttacaatcaattttccatgcaataggcaaagtgaactctgaaaatagtaaatcagattagatctttcctctgcttaaaacctttcaatgcatttctattataagaataaattctaaattcattagattttaagtctattcatgacagctcttgtatttttctctgatttcaaattattctctttttctgttatttaccagcaacagtaaagactttttttccgtctcaaggcctttgtccttgctgttcctctgtccagagcattgttccattagatccctgatggctgtctccttctcaatattccaatctcatgtcaaatgtcacctcttacagaggcctttccagaggaccactttaaattagcttctgtcaggcactcatctccctgttgtaatttctttgaacaattaaatgtttatcttgaatacccttgtttatttacttttcttctttgttgtttgtctccccagactgttggaatataaattttgttataaaatggccttcatctccagagctgaggagatacataaatattttttattttgaattaacacatggctgtgttcaggctcttctgaatgtaattccatggaggaggtcaaaattggattcctgtatgtagtgaatctgtcccgtttatgattttcagttatataattagttagaagaccaatccaatcatatttcagataaacctcaagagcaattgctatggcagagaactagaagggtatttaatcaactagttccttttccaagatctttagctctttaacagttataaattaataaagtatgttatataatgctaggactttttgtctttcattgtttctgttgctttatctccagcttctagtctgacatatggtaggcactcaaaaattggatgaagaagcagctctttttggacagaccaagagtgttgccttttaaaacattttatgtgtactttttccccctgatccttttatagtatgaatgaatgtttgtataagacataaatttctacaaatactgaaacacagtatggacagatatgagttattattattaatatcacctagataatagataaaatattttagaaagtgaggctaccttaaattatcttgcttcttgagttttttttttcccctctaaggatattccagtaagagttgagcagtatttaagctttggataaggaatgcatatttcttggcttagtcagaacttttctggatggaaggtctttttggatgagaattatactacataagattaaaatgcccatttaagatgtaaattatagggataaaatatagataactcacatggggtgatttgattggcatctgttttcatttttctttgtttctttttagataccaccaaagtccttcctatttcaggcaaaaagatatgttttaaaaaccactcacaaggcctctacaatatgtcagataatgcatgtgcgtgaatgtccttggatgtgtatggtctcttgcttgaagttatcagccagcaaaatggtgaaatacttagaattaatcaaacatctggaggtcaagaaacgcagtacctatattcttctccttactttaagaatgaaactaataaaaaataaggcggagctggcccttcagcaaaggagggatttttattatatgagtgaatttgagagaaagggggacaagaaaagacctttgagatcagggcccaggtctgttttgttactactgtatccttactgcatagcacagtgcctggcacctagcatggtcacagtaaagattgaatgatagaaaaatagaaaaggaagagctaacttttaggaaggaacacttacttcccacttacagttattgaaaaaactatgaagatggttaacatcatgatactgtcggatgtaggcagttacaatttctactcaacgatagaaaaaagaactaaagagaatttaccaggacatgaaagaaaggtgtaagatcatggattcctgaaacaggatgttccaattaaatatttaaatttaagtgaggattgtaggagtttaacagctatttaaaatacgccctgctgctttccttcctaggttctccacaccttcaaagctcatcacttggataagattgcctctttactttttccaaatcaatctggttcatccattttttgcaaaaatgaaaactcccctctttcactaaggtatttgagccatcaagaacaccctcctgtctaggcatggtggctcacagctataatcccagctctttggaaggccaaggcaggaggatggcttgaggccaggagttcaagaccagcttaggcaaaatagtgagatccctgcctctacaaaaataaaatgaaaaaattagctgcgtgtggtggcacatgccagtggtcccagctactcaggaggctgagatgggaagattacttgaacccgggaggtcgaggctgcagtgacccatgatcacaccactgcactttagcctgggcaacagagcaagaccttatctaggaacaataaaaaattcattattcattatttgatccaaaacaaaaacatgttatagactatctatagattcaattttcaaaaatcctatgcttctcatctctaaatattgttataatactgcaattttcaaattagctttcacctttaagaaatgctactttccatattggaatgaataattaatatagaaccaaaatgcatgtctgggatttagaaaatcttgggattctgtttccatccttgcttattttttattaagctaagtcattcattttaagaaatgatcccctttaccccaactatagaggtatatactaccttatatactaccatacttaaaaggttagtgaagaggcatagaaagagtagtgaaacagtgaaaccttctagatgccagatgctatacaaatgtgaagcatatgacaccagcatggtgaaaaaggaagctaattaagaccatcagatagtatttgattttatctctccatagaaatcatgataactatgttacatagttactgaaatttagacattaagtttgtggaatctctctgacagttatattagctaatcactaaacagaaattttaaaagaagtatttaatattaattctcaagtcttaggagaatatttagctaataattctacagttgactgcagagtttattcattatttaattcataatgtcttttcaatcactttactgtttcttgattcatgaagaatacatgccaagtgtattagtctgttctcacactgctgtaaagaactggccaagactgggcaatttacaaagaggtttaattgactcagttccacctggctggggaggcctcaggaaacttacaatcatgacagaagggaaagcaaacacattcttcttcatgatgtcaggaaggagaagtgcagagcgaagtgggggaaaagccccttataaaaccatcagacctcatgagactactcactatcctgagaacagcatgggggaatcactctcatgatctaatcaccttccaggaggtccctcccccaacacatggggattacaatttggattacaattcaagatgagattttgtgaggacactgagccagaccatatcactaagagaataaaaatggacacagaatgccactttcctattccctttaaatatttccagttgaaagtatttccatgacctagtgagttcttagagaattcaatcactattgatgtcccaactggtataataaaagaagaaaacacataattttgagacaaattccacctttctcacactctcagcatataaacacataatcgaagcaagaaaaatgagaaaaaatcaaatatataatatgatgaagaattttacactattcattatgacatgtggggccaaagtgacaaaagtaattggacaaaggtagactcagcaatgaggacttggaagaaatgagctttcagtcccattttaaagtagaagagaaggtagggtatcaaaagtagggtgcgctacgcaaagtggagggtgtttttgttgttgttgtttttagagacagggtctccctctgtcacccatctttgcccactgcagccttgaactactgggctcaagtgatcctcctgcctcagtctccctcagtgctgggattacaaatgtgagctacccaacacccaatgttttcttgattgtaaaagaaaattgatggtttctcatgttcaccagagggaaacatccattcattttatcaatgtgtttaaaataattcttactccttctttcactttaaagtgtttaactcatttttgcattctattcataaatatgaccagtcacaacttagaatatgtatactgtattatttcatattaacacacacattttgttcttctataatagatttgtgtatggtttcatatattagagtgttaaatattgaatttattgtaatttacttagtgaaatactgatgttaacatctagtatgtttatttgagggatataggaggcttacagtgaaatcatcctttcaccaagatttctttgtaagacactgttactggaattgtgctttgtgcattacatttcattgacgtaattttaaacttccattctacttcactacaaatggaatttcattatatctgactccacaataagtgggttccagaatcgttgacatttagtagaattacagatcttagtgtctttgtacattctgtattaaaatgcattatgtgtgctttcaattctgttttaaagaaattgccattgatttacatggttgtatggaagagttttgtttaaatgccattgcctgatttcctggtggcttttattttccttctgaaatcatttacaaatatttcttagggtattggctactgttggtttgaaatgagatacaacttatggattataaatatgtttgtgcaaattttctctagcagtaattctaaaacctttgtggacattaagctgtaattgtagctttctcttgcaagcttctttatcctctgctttattattcccttgtaggaaattaagtattttatataataatgcttagaacatctttctcttttaaagagggaaattaagataaagagcttggcaaatataggatctttcctggattgtatgtttctgagatttggtgacagagcgtctgctgtggaggatggggaaggacggatctgggctgaagaagtagacagagacagtggactttggttttaagaggcctgctgctgggatcttctcacccatccctagcagagctcagaagtaggcatccagctgcaggtaattgtgttttgggctcaaaggagcccttagagtgccagacctaaagaggcaactcccgataagagtttcaatagttttatccattctagaaccgccatttccttaagagtctgaggcccagggaccaacgcccaggacatatatacactttgataggaggaacatttcaaattcatccaggtcaagatcactcactaggtcttgtgcacctcctccgcctcttttctgtctggagttagtaaccacctcaaaagacagctttctgactcgtcattataccacctacagtcttacttttagcttggtttgagggtgtcctgttcattacttacagaaacagatttggagtgtgaatgcccttaacaccagttttaataagcatttttaattctacaataatgtgattcagagaatttttttttcctttgtctctatctccctagatagaaatatgtggaggttggatttcctgctgagtttctttatttttttcctttcttttttttttttttttttttaagatggagtctcaccctgttgcccaggctggagtgcaatggcgtgatcttggctcactgcaacctccgcctcccgggttcaagtgattctcctgcctcagcctcctgagtagctgggattacaggcgagcgccaccatgcctggctaatttattcttgtatttttagtagggatggggtttcactatgttggccaggctggtctcgaactcatgaccttgtgatctgcctgccttggcctcccaaagttctgggattacaggtgtgaaccacagtgcccagccttcctgctgagtttcttagcattattgccaggtcggaacttaggcatagtaacatgaaacatgttctgcatctgaaggccagaatataataagcattgttaatttagttaaaggaaaaggctgctgttgaaggttagacttcttgtgtatgtgtgggagataacagaataacgtctcttttccaagatgcatatggttttcttttgcttatgtgccaattttaatcaatggagaaattaatatgttaaatgaaataattaaccattttataattttagtcggatattggttgaccagtacttatatgatggtataaagttctagaaactggataactttaaaaatctttccatataatgcattatattctgggtcatagtttcctatattataactgctaaacaacataaaccaattttattttcaaaatcaatctttggggtaacttctacttagagccctgacctaataaatgatgtacgtgtttatttctgacacgtattttgataatcatttagattagtcttatttatgtggatatgtgtaataaaatttctttggaaaatatggtttattgagtttaaacctcttacctccatttcactttcctaaattttaactatttttttctgttccattgcaggcatagtaccaattctgtgtcaggcattttattcactttgtttcaactgttcttgagatcccggaggattaggactattgcagttataagtctataactgaggaaaggaagcttatctggacaggaagatatttagagtatgatataaagacagtctctttttaaaaacagcattttaaaggtataatttcttttttgtttgtttttttcgtttttttattttttatttttatttttttcttttattattatactttaagttttagggtacatgtgcacattgtgcaggttagttacatatgtatacatgtgccatgctggtgcgctgcacccactaactcgtcatctagcattaggtatatctcccaatgctatccctccccactccccccaccccacaacagtccccagagtgtgatgttccccttcctgtgtccatgtgatctcattgttcaattcccacctatgattgagaacatgcggtgtttggttttttattcttgtgatagtttgctgagaatgatgatttccaatttcatccatgtccctacaaaggacatgaactcatcattttttatggctgcatagtattccatggtgtatatgtgccacattttcttaatccagtctatcgttgttggacatttgggttggttccaagtctttgctattgtgaatagtgccgcaataaacatatgtgtgcatgtgtctttatagcagcatgatttatagtcctttgggtatatacccagtaatgggatggctgggtcaaatggtatttctagttctagatccctgaggaatcgccacactgacttccacaatggttgaactagtttacagtcccaccaacagtgtaaaagtgttcctatttctccacatcctctccagcacctgttgtttcctgactttttaatgactgccattctaactggtgtgagatggtatctcattgtggttttgatttgcatttctctgatggccagtgatgatgagcattttttcatgtgttttttggctgcataaatgtcttcttttgagaagtgtctgttcatgtccttcgcccactttttgatggggttgtttgtttttttcttgtaaatttgtttgagttcattgtagattctggatattagccctttgtcagatgagtaggttgcgaaaattttctcccattttgtaggttgcctgttcactctgatggtagtttcttttgctgcacagaagctctttagtttaattagatcccatttgtccattttggcttttgttgccattgcttttggtgttttagacatgaagtccttacccatgcctatgtcctgaatggtactgcctaggttttcttctagggtttttatggttttaggtctaacgtttaagtctttaatccatcttgaattgatttttgtataaggtgtaaggaagggatccagtttcagctttctacatatggctagccagtttccccagcaccatttattaaatagggaatcctttccccattgcttgtttttctcaggtttgtcaaagatcagatagttgtagatatgcagtgttatttctgagggctctgttctgttccattgatctatatctctgttttggtaccagtaccatgctgttttggttactgtagacttgtagtatagtttgaagtcaggtagtgtgatgcctccagctttgttcttttggcttaggattgacttggcgatgcgggctcttttttggttccatatgaactttaaagtagttttttccaattctgtgaagaaaggcattggtagcttgatggggatggcattgaatctgtaaattaccttgggcagtatggccattttcacgatattgattcttcctacccatgagcatggaatgttcttccatttgtttgtatcctcttttatttccttgagcagtggtttgtagttctccttgaagaggtccttcacatcccttgtaagttggattcctaggtattttattctctttgaagcaattgtgaatgggagttcactcatgatttggctctgtttgtctgttgttggtgtataagaatgcttgtgatttttgcacattgattttgtatcctgagactttgctgaagttgcttatcagcttaaggagattttggactgagacaatggggttttctagatatacaatcatgtcgtctgcaaagagggacaatttgacttcctcttttcctaattgaataccctttatttccttctcctgcctaattgccctggccagaacttccaacactatattgaataggagtggtgagagagggcatccctgtcttgtgccagttttcaaagggaatgcttccagtttttgccaattcagtatgatattcgctgtgggtttgtcatagatagctcttattattttgaaatatgtcccatcaatacctaatttattgagagtttttagcatgaagtgtggttgaattttgtcaacggccttttctgcatctattgagataatcatgtggtttttgtctttggccctgtttatatgctggattacatttactgatttgcgtatattgaaccagccttgcatcccagggatgaagcccacttgatcatggtggataagctttttgatgtgctgctggatttgttttgccagtattttattgaggatttttgcatcaatgttcatcaaggatattggtctaaaattctcttttttggttgtgtctctgcctggctttggtatcagaatgatgctggcctcataaaatgagttagggaggattccctctttttctattgattggaatagtttcagaaggaatggtaccagttcctccttgtacctctggtagaattcggctgtgaatccatctggtcctggactctttttggttggtaagctattgattattgtcacaatttcagatcctgttatttgtctattcagagattcaacttcttcctggtttagtcttgggagagtgtatgtgtcgaggaatttatccatttcttctagattttctagtttatttgcgtagaggtgtttatagtattctctgatggtagtttgtatttctgtgggatcggtggtgatatcccctttatcattttttattgcgtctatttgattcttctctctttttttctttattagtcttgctagcggtctatcaattttgttgatcctttcaaaaaaccagctcctggattcattaattttttgaagggttttttgtgtctctatttccttcagttctgctctgattttagttatttcttgccttctgctagcttttgaatgtgtttgctcttgcttttctagttcttttaattgtgatgttagggtgtcaattttggatctttcctgctgtctcttgtgggcatttagtgctataaatttccctctacacactgctttgaatgtgtcccagagattctggtatgttgtgtctttgttcttgtcggtttcaaagaacatctttatttctgccttcatttcgttatgtacccagtagtcattcaggagcaggttgttcagtttccatgtagttgagcagttttgagtgagattcttaatcctgagttctagtttgattgcactgtggtctgagagatagtttgttataatttctgttcttttacatttgctgaggagagctttacttccaagtatgtggtcaattttggaataggtgtggtgtggtgctgaaaaaaatgtatattctgttgatttggggtggagagttctgtagatgtctatcaggtccgcttggtgcagagctgagttcaattcctgggtatccttgttgactttctgtctcgttgatctgtctagtgttgacagtggggtattaaagtctcccattattaatgtgtgggagtctaagtctctttgtaggtcactcaggacttgctttatgaatctgggtgctcctgtgttgggtgcgtatatatttaggttagttagctcttcttgttgaattgatccctttaccattatgtaatggccttctttgtctcttttgatctttgttggtttaaaatctgttttatcagagactaggattgcaacccctgcctttttttgttttccatttgcttggtagatcttcctccatccttttattttgagcctatgtgtgtctctgcacgtgagatgggtttcctgaatacagcacactgatgggtcttgactctttatccaatttgccagtctgtgtcttttaattggagcatttagtccatttacatttaaagttaatattgttatgtgtgaatttgatcctgtcatgatgatgttagctggttattttgctcgttagttgatgcagtttcttcctagtctcgatggtctttacattttggcatgattttgcagtggcttgtactggttgttcctttccatgtttagtgcttccttcaggagctcttttagggcaggcctggtggtgacaaaatctctcagcatttgcttgtctgtaaagtattttatttctccttcgcttatgaagcttagtttggctggatatgaaattctgggttgaaaattcttttctttaagaatgttgaatattggcccccactctcttctggcttgtagggtttctgccgagagatctgctgttagtctgatgggcttcccttccagggtaacccgtgctttctctctggctgcccttaacattttttccttcatttcaactttggtgaatctgacaattatgtgtcttggagttgcttttctcgagaagtatctttgtggccttctctgtatttcctgaatctgaacgttggcctgccttgctagattggggaagttctcctggataatatcctgcagagtgttttccaacttggtttcattctccccgtcactttcaggtacaccaatcagacgtggatttggtcttttcacatagtcccatatttcttggaggctttgctcatttctttttattcttttttctctaaacttcccttcttgcttcatttcattcatttcgtcttccattgctgataccctttcttccagttgatcgcatcggctcctgaggcttctgcattcttcacgtagttctcgagccttggttttcagctccatcagctcctttaagcatttctctgtattggttattctagttatacattcttctaaatttttttcaaagttttcaacttctttgcctttggtttgaatgtcctcccgtagctcagagtaatttgatcatctgaagccttcttctctcagctcgtcaaagtcgttctccgtctagcttcgttctgttgttggtgaggaactgcgttcctttggaggaggagaggcgctctgctttttagagtttccagtttttctgttctgttttttccccatctttgtggttttatctacttttggtctttgatgatggtgatgtacagatgggttcttggtgtggatgtcctttctgtttattagttttccttctaacagacaggaccctcaactgcaggtctgttggagtaccctgccatgtgaggtgtcagtgtgcccctgctggggggtgcctcccagttaggctgctcgggggtcaggggtcagggacccacttgaggaggcagtctgcccgttcttagatctccagctgcgtactgggagaaccactgctctcttcaaagctgtcagacagggacatttaagtctgcagaggttactgctgtctttttgtttgtctgtgccctgcccccagaggtggagcctacaaaggcaggcaggcctccttgagctgtggtgggctacacccagttcgagcttcccggctgctttgtttacctaatcaagcctgggcaatggcagacgcccctcccccagcctcgctgccgccttgcagtttgatctcagactgctgtgctagcaatcagtgagactccgtgggcgtagtaccttcccagccaggtgcaggatataatctcgtggttcgccgttttttaagcccgtcggaaaggcgcagtattcgggtgggagtgaccagattttccaggtgccgcccatcacccctttctttgactaggaaagggaactccctgaccccttgcgcttcccgagtgaggcaatgcctcaccctgcttcggctcacgcacggtgcgcgcacccactgacctgcgcccactgtctggcattccttagtgagatgaacccggtacctcagatggaaaagcagaaatcacctgtcttctgcgtcgctcacgctgggagctgtagaccggagctgttcctattcggccatcttggctcctcccctaaaggtataatttctataaaataaagtttttttacacataagaaatgtatgtgacatttgacaaatatatatatacccatataaccgtcagcccaacaacaacaaaaaatagaacatttctcctttcccagaaggccctcactgtttttttgctgtcttcttccacagccctgaaactcttatctgattagtttcatctgtcttagaatttcctttatatgaaacaccaactaagtacttttttctgtctgccttctttcacccagtctactgtctgtaaaaatcattcatgtttttgcatccatcaatattttgctccttttaatcgctaacattttccgttgaatgaatgtacctccatttttattttattggcctgttgatgacattaagactgtttccagtttttaattatcatgaataaagttgctatatacaagtcatgtacaagcttttttatggacatatgttttcatttgtcatgtttatctgggagtaaaattcctgggttgcatggaaaaaatgttcgtttaattttataatagacaaattgttttctaaatgaaggcatgatcttagtctagtaatgtttatttacttctatcaacatatgtgtttggtaagttaattttttggataatgaatgataccgtaatggatatttttttctcactacttcttcctttctccctctttttacacaattaaaaaactaaagataaaagttggctctatagggaaaggttttattttttacatttctggcaaatttgagatttctataaaattcttcataggtatataaaacagagtaagtatattttgtttaacttttaaagcagggtattattcatttgttagttgtttaaaatctactataattatgggtaaggcagtgatacaaaaggaagaaaagaaaaatcccaatttattcattaaataagaatgtgtcaatgcattttgaatgagaagtcattttaaactccaaatacaaagatgagcaagacgattttttaacctcaggaatggcatagtagggaaaaaagtaagtgtatgtatatcattagattcatacagtcaggctgaatgtggaaagggctttaagaaagttattaaaattgtttttacattctggggaagtagaaacatttccatctaacaggaacagggcagtttcacagaggagttggaatttggactgagttttgaacagaagagaatttcgatgggcagatcaggaaaagagcagttcaggaggagggaatggtgggctgtggagcatgggcgaccagaaaggcagattaagttaaaacagggttgacaaattgggagaacacaggattaagggactggaatttaagtttagatttgctttaataaagaaaaatgttactttgtgatgagagaaaataagctaaaaattaaaaatttaaaaaccaatccactctgagagattaattaaagtgaagatggggtctgctaatgtgttactgaagtgaactgcagagtacagtcactggcattgatgagtctagatgctgtgagaaagatcattagcgcattgacaattctaagtagctggagaccttttaaactttcaacttccatatttttagtaatttttcaaatgtgattaatttagcccatgaaaacacaccccatcattgatataaccaatcattataattatttattcgactggtgtactttgtctctaaatgacacatttctatgaaaaaaagatcagtttcactaactcctcaggcttctggctgtgacttttcataaatgtctgtatgaacgtaagctataactttgcttcattgttgtttagatgacattaataattggttttacttactgactatgggcattttaatacaagattccattttaaaagtgtgtacttgtagcttattgcaacacagtgaccaaagacaccatattcttacttctggaatcaatttgtgggcattgttaacagtatcttcacaactgcactagtcaagcaatcagagctaagctttcaaagcagattagaggaagcttattagcaataaaatatagtcaaaatataccaggcataatcatatttttatgtagtggaattacctcagcacatggagaatctaaattaaatgagtttataattgaggtttgtgtgcaagggaaaagaaaattcgtctgttatggaaacgctctatattttttacattatagccaaagtcttagttaccttttgagggtatctgtaggtgccattaaattcagctatcctcttctgctgtgggtataagcacatggcaaacccaggcaaaaattagaaaaataaaaaggattgtagagaaatggagatataaaaaattaataagagaagaggcaagctaactcccttatccatttttttcctcaaggttattaacagaaattatttccaacataaatgtccataaataattttgaaaatctagaaagaaattgcatttctactttaaaaatagctttctatggctgaaggtttgcttcagttgttttactgtcacaactcccaaaaaccagctggttctgggatgtcgtaacaatttgatacttcaaaccaatggtttgtgctcattggctccctggtgcaaacagggagataaatgctacttaaatagtaggtgaatgtaattttgcactttagaaaatgtctgcatgtttattagagaagtgaatgctgaaatcagcgaacaaaatgtaaagtgagcaactaagaaatacttataagggctcacttgtattatttaactgtgtaatcctctatctcatatatatgtaatactttcttcaagttcattatagctcccgggcccagtacatcctagtccagttccaaccatgtctaattttaaaatagctatgctcacttcaaacgaagatgttgctatagctttattttattttataggcttcaattttaaagttgtatcacctatagataacaaagacagctttcatggacacctcaatttagaagagtcttataggcactttgtgagataaactgtaagtgtatgtgctaatcagataattcttttactagagactttaggtgaagatagcaaatcttctaaaacagactgataattaaactgggttgatcattattgggttcattattatcaaattgaaatatgctttattttgtaatgtttaaaatgtgttcttaaattcagtagaatattaatattatattatacttttccatttttaaatcatattaaaaatagcaaaaatattacttcttcaaaaatgctttatacttcatgtatattactgattttaagtaaaagtacaattaagacaattagccagacctatttatgagtagctctaattggagcagcttgttgctggaccctattcagtggtagagataaggttgagatggctgaatagttcatctaatttgaaatactttggtgtcacatggaccttttcctgaataccatggctatgtactcactatttggccaaatgctgaaaatgaacatatatttgcctccgtcaaaatgttttgtaaatgttcactcagacattgacataaacaaggcagaaaggttaatggataaaaaattctttttctttaaaaaaatacatacacatacgaattttctctcttttagttgctaacctgctttttagattagtccatggttatcttggaagaggtgtgggagaacaaggtgagagctaaggaaggaattctatgcaaagcgtttctgattctcttagtattttgtggaacagcatgagacatgtcttccagttgtgtaggataagtacagcccactgaacactgcttaccagcagtttaccacaagccagttataacatcaaaaacatcggaaccctttcttttcttctatatttgaataatgataaatgccttcatgctgtgtgagcactattgaagtgtgtttctctgcaggtaaacttggcagtgtcttatataactacactcgatgggagtattacttaaacagtgtgaaatacattgtctgataaaaattgtatcacaatttggaatgacgtttatgcaagtggatagtctgccagttattttatagtctaaaaaaatgaacctgtaaggctacagtataaaatccaagtctttatagttgtatatttgtagtgaaaacaaccgtgggggaataatataagcttaatcatttggtgattagtctaccaactattaatgatgagagataacctatctgttctttatttctaaaataagatgtgtaatacagctaattagtcactattttaaaaggaatttaaatatagttttcattgaaattcaaatatttaattgcatgtgtacctaatgcctaattatttacatgttggctgatgttctctattatctaactgctgtgctgttcttaattgctgctagttcatctccgcccatctcccttggtgatgatagtcctgcatttcatggcaattttcaatagcagtttaatggtcttaagtgggtagcataatagccaggtgaacaacaaaaaaaacaaaaacaaaaacaaaaaaactatttggcaaattgggatatgagaattgaggccaaaacttttagtccttgccaattttttttaaaacttcaattatcttgattcatattcccatttgttgggttggtaggcactccaaaataaatataataatcagagagaacaccaactgtaggtactagttttagcaactgaaacaactggcgttaaaatcactgagcttctgttacatgaatacctgagtattatgtggctacttctgaaatggagtatgcagtgctcttataattgggcatttcagttgaacactgcttcagtaaagtaactggcatttcaagtcttccttctgtagtgattgctttgtctttattcaatgattgcttttttaagttagaatctggttgcatagtgctccatggttctttcctatgcagtggtgtttctcagtgttgatgtggagaagccaggagacatcctacaactctgagaagcatttgatgttggcagcagtggctgtgaggttagcccatgaacttagggctagaggtgagtcttaaccttccaattcagcatcttttccatctgaacattcaagtcaaatgggaaacctgttggccctccagctggatctttccactgttttaactggaatgaattggataagttataaggcagatggtaagattggatctgatgggatggagtttggtgaagtggaaacttttaagcattaggtttgagatagctagggagtgttgacctctctttccccctgacattatcctcacatttgtttttattccaccatatctaccttgatccacctgattcttttcatttttttctttcattctctttgtgctggctttctttccttttttaaaatcccatggtatctcatcatctcttcttgtcctcccattctacaaatagaacatgaaattgaagccttttttaaaaaaaaaaaaaactaattacagaattaatatatgtttactatgtacttactacaattagaaactatatataaacaaaaaagagagcttgcccatcaatccacatgcaaaattggttgagtaccttgaagatttgtaatagtatatagagaagaacattatttttcttaactatttaaaagtgtattctgcattctcaattaaaagtcattttatcttttactttttcttttattcctttttaagcaacaaatgaattaaatttcctttgttttatatatgacctattaacctcaatggagaaagaggctccctttgtttgcttcaggacttacatattgttacagttagtccttaggtaaatgaaatgagaagagcttcacatcagcactagttcttccccatggaattttagtttctccacaaccactttactgaatgtgtataattataagaattatttcattttcttacaactttttctctttattttatactctcaccctattatctgtcctttttcttttttttttctttctttctttctttctttctttctttttttttttttttttgagacaggctcttactccgttgcccaggctgaagtgcagtggcaggatcatggcttattgtgcccttgacatctcagtttcaagtgatactcccacttcagcctcttcactagctgggactacaggctcttgccaccccacctggctaatttttctattttttttgtaaagatggtactttgccatgttgctcagactgaactcctgggctcaaacaatcctccccacctcggcctcccatagtgctaggattataggcatgagccactgcacctggcttttatattcttaatatttcttgtttcttctatttattttctttactttaaactcgttgttataaagtggtatgggttaatcaagagtgatggaaagattagctctgtttttctgtgtgtgagtgaaagatttagaagtaagaaaatataattattcttcttcccaaagtaatgatgtttaccaaaacactggtaacattactttaaatttcctaaatttataattcaatttagtaaagtaggacttctgaaatggatttttagatatattggggaaaaacaattcaggatctaaggtaaactttttaggatgtatatatatttgcatgccattcatggttgtgtttatctgaaaacctaatacatttttatcataaaaatctacataattctaaatcatctcaagtgaaattagaattaatataaagaaataaacaaatattggaagttaaaattttcagatttattaggtgttaaactgaatttttcgtcttctactcctatcctcccgtaaacactatctagaaaattgtcacccaacctattgtagaactaaaaacctagtggtcttcctcatcttcattgtcttcattatttccactacacgaaacattcccttgtaacaaatataatattcacagcattgtgcaaaaaatgtacattttaaatttctagtataaaatttgatttgtgactctgagcccccagtttccttagggcaaacaatatgggtgctttcagttaattttagtccaatccagtaatttttcagttacttttccatttaaaacaagtagttcgaggttcagccttctgatcattttcctgatatggaatctgggagcagcagggaacataagtaatgtcacggtgtcaggattgggaggtgtgcattttggatcctgattaaatgtatcaacgtaggtaatatattgtgattgtttcaaatagtggagatcaggaatccttcctggtacaaattcagttccccacagtaacctcaaaattgacttcaaacctactgacttcaaatctgactcatgatgtttctcctctcccatcacttttcactgtgttctgctgatctccatactgtttcctcaatgatgggcccaaaaaatgctggaagttttcttctatttctctctttgagaatcatgaggcactcattgggattgtggttcttggattgtttccctctttgtatgtatttatgtatgagccatatacaatcaactgttctctcaatatcaagaggtagcaattttaaatgttctgtgttttaaactttaatgtataacttacgtcagtcaatcctgataataccactattctcactagtcatcaacatcattatcatcattgtcatcatcatgtaacaattatataatggttaatattggccacaaatcaatcctagttccttaaaatctattagttgagccttatgaaactgccctttttgtcggttcaaatggtgagtagaagcaatttcatatggttcaacttattattacttcaatttccttacaggcttacagccaacacagtgattcaggccaccatcatctcacaactagaaatcatcactgtggccttctaatggatattcttgcttgcaatttagccctcccccatttgtttgttgtacttcagctaggttaagctttataaaacacaatagtattgagctattcctctctctaaaatgctgtcatggcatctgattgaccttagtataaaatccaagctctgttaatgtgatttataagtcatgtagccgtacatcccagttagtctctgacagccctggtttacaactgctgccccagcctaattaatagtggtgttccctttattctcagaagtggactggtttagatgatgaattacatgaccaccttatttataatgtacctcatgctctgccctgtgcagttctctccagcctcatctctcaccactttttaaatcataaaaatgagctgtatccattctgaattcctttggatttatggaatatatcactgtctctttcagttcaaagcctgtgcccataatgttgtcactgcctaaaatatctctctgttaacctgactaatgcataccaattttcatgctcatttttcttttcttttttttttttttgacggagtcctgctctgtcacccaggctggagtgcagtgctgcgatctcagctcactgcaacctccacctcccgggttcaagcgattctccttcctcagcctctagagtagctgggactacaggcgtgtgccaccacgcccagctaatttttgtatttttagtagagacaggatttcaccatgttggccatgttggtctcgatctctcgacctcgcaattcgcccgcctcaggctcccaaagtgctgggattacaggcgtgagccaccgtgccggtccctcatgctccatttttatagtttctccaagaagcactttctgacctctagactagtttgaattttcctatttctgtacccatattggctctattcttcccctaatcaaacccttttcccaattaaccatgtttatatcctagtttatgtgcttccttttagcatgtaccattgtttctctagggccttataagtatttgttatacagacattacatatatatatatattatatatacatgtgtgtatatatatgcatatatatgcacacatgtatatgagagtatgtgtgtgcacatgttgaacaaattcatgagacaaaatacaactttaggttgcttttggactttgacatctgctcttgactttttatgttgagaaagggatgttgagagtatgaagcactatagcaagggagaagaaaagaaagagagaccagaaaagggctgattattgaatatcaagaaaggaacacatagaaaacaagtaagaggctttgaactgacaatttggatggacaactacattccatttctgatcatcgatcctgtctttgcactattgcttgcacttatcttagcaggggcacttaaaaagcctgaaacgcgtatcttgcctgcaatgtacaaacttatcagaacatctcatatagtaacataattttcagtataagtatagataggaattacgtttaaatttgagtaagtattggactaagattatctctccttttttaaaagttggtaagttatgttaaacaaaaacaaaacaatttctaaaatgatgactaaaagtaagggttgtttaaatccattttataagatttacttccagaagatgaaagtgggaagctgaagtggcatatcatttctaagctatttttgtaggttgaattgcatccttcaaaaagaaatgttgaagtcttaaccccaggtaactatgaatgtgaccttatttgcaaatagggtctttgcaaatataattaagttaaggtgatgtcatactggtttagggtggaccctgatccaatatgactggtatcatagaagaggggaggagatacagaaatacagggagaaagctgtgtaaagatggaggcagagatgggagtggtgcatccacaagccaagcaatgccaaggaaagaagcatggacattttttcttactgtgtctagaaggaaccaactaggctgacattttggtttcagagttacagcctcctgaactgtgaaatgaatgtctgttttttttttttttttattattattatactttaagttttagggtacatgtgcacaatgtgccgattagttacatatgtatacatgtgtcatgcttgtgcgctgcacccactaactcgtcatctagcattaggtatatctcccaatgctatcccttccccctccccccaccccacaacagtccccagagtgtgatgttccccttcctgtgtccatgtgttctcattgttcaattcccacctatgagtgagaatatgcggtgtttggttttttgtccttgtgatagtttactgagaatgatgatttccagtttcatccatggccctacaaagcacatgaactcatcattttttatggctgcatagtattccatggtgtatatgtgccacattttcttaatctagtctatctttgttggacatttgggttggttccaagtctttgctattgtgaaaaatgccacaataaacatacctgtgtatgtgtctttatagcagcatgatttatagtcctttgggtatatacccagtaatgggatggctgggtcaaatggtatttctagttctagatccctgaggaatcgccacactgacttccacaatggttgaactagtttacagtcccaccaacagtgtaaaagtgttcctatttctccacatcctctccagcccctgttgtttcctgactttttaatgattgccattctaactggtgtgagatggtatctcattgtggttttgatttgcatttctctgatggccagtgatggtgagcattttttcatgtgtcttttggctgcataaatgtcttcttttgagaagtgtctgttcatgtccttcgcccacttgttgatggggttgtttgtttttttcttgtaaatttgtttgagttcattgtagattctggatattagccctttgtcagatgagcaggttgcgaaaattttctcccattttgtcggttgcctgttcactctgctggtagtttcttttgctgtgcagaagctctttagtttaattagatcccatttgtccattttggcttttgttgccattgcttttggtgttttagacatgaagtctttgcccatgcctatgtcctgaatggtaatgcctaggttttcttctagtgtttttatggttttaggtctaacgtttaattctttaatccatcttgaattgatttttgtataaggtgtaaggaagggatccagtttcagctttctacatatggctagccagttttcccagcaccatttattaaatagggaatcctttccgcattgcttgtttttctcaggtttgtcaaagatcagatagttgtagatatgcggcattatttctgagggctctgttctgttccattgatctatatctctgttttggtaccagtaccatgctgttttggttactgtagccttgtagtatagtttgaagtcaggtagtgtgatgcctccagctttgttcttttggcttaggattgacttggcgatgcgggctcttttttggttccatatgaactttaaagtagttttttccaactctgtgaagaaagtcattggtagcttgatgggaatggcattgaatctgtaaattaccttgggcagtatggccattttcacgatattgattcttcctacccatgagcatggaatgttcttccatttgtttgtatcctcttttatttccttgagcagtggtttgtagttctccttgaagaggtccttcacatcccttgtaagttggattcctaggtattttagaatgtctgttgttttaagccacctagtttgtggtcatttattatggcagtcctagaaaactaagatacctaaattaggaaacaaatataactatattaaaaggggatagtatatccaatatatttaatacagaaaggatgaagatatagatagtagaatgatcagaggaataataatttttttcccactgttctcaatatcactgctaattcctataagaacacaattactcaatcactaatctgctgtagtagtctgattgatgctaagccatgctgcaggaatgaataaacccccaaatcttaaaatcttagcattatagaggtttatttctcaatgatgcaatgacaaatacaggtccatctggtgactcagggtcccagttgtcctccgcttatgatgtttccaactcaggaaatgccttttatggttgctatggcagaggaagagaggagtggggagctggcacctaggtcttcagtgcttcagctaggaagtcatagtcatgactctgctccacatttttacaatctaagaatagtcagatgcccctcttaactgcaaggggctgagaagtgtagggaacacaagaatattttttgagagctactatctctgcttacatataatggcagaagaaatatcctcctaaatctattaaaatcatactatgctctcaaagattctagctgctcccttaatttgatattttatccctgctataatttttacaagcttcttttcatatatatatacacacacacacatatgtatttatgtgtgatgtatgtatacatagctattacccaagtctttccattaacatggtgttatatttgtccttaccagaactactgactgctaacaacataaaactcttttccatccaaaatcattcctatttaaacatttattagtgttcaattctaataccattcaactgctcataaaggagaaagaggaagagaaggaagaggaggagaaattttccaggtaagtttatagagtaaaggaaacaacctgccattttgattgttttgagtatcaattaaattatcagttaataattcaagaaaatatatcccaggaaaaaaaaaatcccctgtataataaactaaagcttttttaacatccttcttaatccctcatatgaaaaatttatactcccctcttagatattaataaaagctcaatgtacaggtagctagggtgccccccgtcttccctgctggatttgtaggtcctgctcatgcagaggggttatttcccagcatgtggatgctctatttgactccactgtaggccaaccaccccttctcatcaatcatgttgcaattattttttacacaattacgtcttcttttagagaagagaattatttaaccagaaataacatcaacaagccttttacagaatatacatgcttaagtttcacaccatattgttgagatattttaagtgtttaaaaaatagtatgtgaatatatttcggttgtaaaaaattcaaaggaagctttatacccattaggatggctgccataattttaaaaatggaaggtagaaattggtgaggatgtgaaggaattagaagccttatgcattgttgatgggaatataaaatggtgtgacaatcatggaaaacagtatggagggtcctcaaaacattacaaatagaattacaataggatccaacaattccacttctgggaatatgccccaaataattaaaagcagggtcctgaaaagatatttatacatctctgtcatagtagcattatttacaatggccaaaaggtgggagaaacctggctgttgacagacgaatagataaataaaatgttgtgcatgtatacgatggaacattattccgtctgtaaaagagaggaaattctgacacatgctaccatatgaatggaccttgaggacattctgctaagtgaaatataccagtcacaaaaagacaaatgctgttatgattctacttacctagagtagtcagaatcatagagacagaaagtataatggtgattactagcggctgcagggagagaggaatagggagttattatttaatgagtaccgagtttcagttttgcaagatgaaaagcattctggatgtgaatggtgttgatggttgcacaacaatgtgaaggtactaatactactgaactgtatacttaaaaatggttacaatgatgaattttatgttatgtgtattttacaatactttaaaataattcaaaagtaacatcctcactcccagtgctctatacagagaaaaccaatgtctttattctttagttctgcgtttacatagacacaaattctcacatagcaatatatggtttattctttgattcatttttttttcacataaatgctatcttaatgcatatcttgttctgcatgttcaacaatgtctcagtcttgccatgagaaacggagcagggaaacttcctgggcctaaactgaataggccattttattctcttctctgccacattctttgtggttctgtctccactggactgggactctccattggtcctttaccaatgagccattctattctcatgaaatattcatgagaatgtttcaccagatctaggatttctacatattacttctaacatttccatatttctttgcctaaaattttccattctatttgaaagttgtgtgccttttttctttttctttttatcacctacatggggaggtagagtgttggctttcaaaggtgaaattgcatctttccacaactctgagttttctgagttttgagtctgttcttgacttcttttaaaaaaaaactctttggtcatggtggcaatagaggttagagtatgaataccaactcctctcgtttaggcctctgttctttagatatggtcattttaccgcttcaaggatcagaacatatcatatcccaaatttataatccccagaggtaactcagatatgtataattctttaataacaatctgatttgttctcaatatttaaagtgaacccaagatgaagagttggaaaggaaatttttaaaactctaatgctttagtaggctctcaaactgctgacagctcaagtgttctgtctctttggcaacatataaaaatccagaataacagttaaatattccacagctaactattatttaatactaatattatgtcttggttaatggaagacaccatagaccacattttgaatatttgtgctcctttttaatattggtaatcctccttctgagataaattcaggaaatctgacctttctcctcagcccttttgaaataaagaccacttttccaattaggaatatctaatgtagtgttaaagctcagagttgaaaagatgttttagtattcatcagatataacgttgtagtattattggtaacattgtgaaacaaattccagtacacttcagctctgctaacaaagatgaaatagagaataaagtaggtgtatgctgaatcttattaaggttgacatccagtttgaatacattcatcctctaaggtatagttttgggtataaaccatcgagcaagcacaaaacagtgaagctgagagctgcagaacatagagatctggtggattctaaaggactgagaatgatcgatggctactgaaatgaagtgtgaaatggtatccatagctgatatttgtctttaactgataaaatggctaaagcatttcctggtcaacacaccactctccctcctctcttctcattcctctagaacagtggccttcaaactcttttcttgataacaaatgcacttaaattggagaatatctctctttctaacacacacataacaaaaatgtcatgagatgtcttaaatacttagacattttacattcagtgtactccaatatttctattttatattcttttttaaatactggttttgacctattaaatggacttcaagaaatttttcagtctcatctaggcacacagatttaaatattacttctatgttagtgacctcttctgtgagtaagctccgtctctaactttctatctcctttggatatccttattcgcatattccttccagaacgtacaacttaacgtggcttaaacttaacagctaaacattctccctctgaagtatcccattctttccacagtcctcacccacctccatcaagttattttcctcctgtttccaaatttctgctgagggtcccatcagtcttccaggtgtaaaccattagattcctactagatccctatctttcttcccgttactatatcagtgagcaaggtcttgattctatttcgttttttgtcacaattaattattattaatagaaaataaacacttattccagtttcaaagttgttataattgaagttgctaattttaaaaaatgaattttaaataatcacttaataatccttctttgactaagacaatgaaatgtggctttaaaaaaagtaatcagcaccatttgcttataggtctttcagaatttgttcttaaagtttctggaactttcctctctgtaaagtacaggaaatactgagctacactggaaagcctctctgggacaggcaatggggagttaagcagtcatcataaaggaatcaatgtacattcagcatagtgacttggactacacaacaattccttctcctctacggtagctcaagagagacatgcttctaagcacagaggtatgagaagtctcagactgttatttgctgttagaattggtctccccatctaataacagtaaatctctggcacagatgctattggtccttaatgtcctgtgattttaggaaatagtttggatttagtttaatttattcagaaatcaaacatgtttaattaggttcactgctctggcagagtaagggtatgctggtttagtatctttataatatatatataatgagtaggtaaatcatagtcttaaatcatacttagaatactatattatttaaaccaatatctatttcaacaaaatgtttataaataaaaacagctgatgaaactaaatccaaaggtatgacaaagacgactcagctctatgttgcttaaagaactttaaaaagcatgtgcccataaagccgttcaaggagagggaaggaggtccccttctccttattcttacgatagaattcctattggggctgtgccagaaatgagcacttctaagtatttcagagaagtccaaagtgttaaaaagtcttttatgcaaaagaacgtctttctgaatcagtgaatagtaatgctcatcagaattttctaataacacaaaaacaaagccaagtccatacatttgatcagttgtcaaagtaatgggaggtggactattatgtcaaccttagtcagagctcctgctggcttctttgtatacactgttcaccaatttgagtaaagtggactttgtgagagaatagtgtttgatggccaggacctcttttgggcatttcttcctaagtggaatacacaacagataagggagtagaggaggtaatacagggaagctactcattccagctcagaaggagcagaaggagttagatgaagcccatatatgcattcaagaagccaatggtatcctctagctgtggatagtggctaatgtggtcatccagaatccacactgtggaccgcagcagcgttttcccgtacagatccaaaaactctggatagggatttacaggatccaatggccggtagataaaatgaatggggatagttacagaggcaagagctcccacccagcgccttctgagcttcttcctctgattgatgtactgtaagagaccgtcaatggctaagttcccgtcattgatgcggatccctgcccacatgtcccacagctcactctcacagagccaagtacacggcccaaagactggggtgagacctcgagagaatacaaagaagttcatcagtcatgtgaggatgagtgatagcacacctccatctttgagtagcttttggagaaggagtggacggtgagtctcaggaaagatacctccatttgacagacagactctttatggtatgccgaccagatcgattctgcttgtacctgtagagaaactcctgagcgacaattatctccatagtcatgagacttgatcctgcagttctggagccccagatgccgcaaaagcgcttccacgatgctgacctgctcaaatatggaatagtgatgcggtctcggtttgtcactgaagccaacgccaagaaatcaagggcaatcacccgatgaaacctcaaggtcagaccttcccaattcttgtaccaatcgtagctggatattggaaaacgtgtaaaaccacaactgtctcctgacttccaaccacacccacagagtcttggtagaagatacgcagtcccttgtaagtgaaaaacttgcctgaagacttccacgagtgaagatcaggtgacagctgagtgtatgggatgtgcaggtacgcagcaagcaggagcgcggcccacagccccacctggacccaccactccctcatcctgcggaggcgatctttgcgcacggcggcgttatcccacgctgccagcctcggcgttgcagagcacggggcgccgtggcgcccgcagccctgcagggccggccggcagcggggtctcaatcagcagcccacagcccgcacagggcggcgccgcgcccggcagctacagccactctgacgtgcacggcggcactgcgtttgctaggcgcgactgccacaagggaagtgcccgggtgtgctggttgccgtggcctctatttctaaagtatttcttatattttcctatttcttttcattcctactgcttacaccctcattgactgaactattgcaaccgcctcttgaggtgactgaaatattcatagatattgcagttattctccttttgggcatatagtaggattacatttgctcacccctgaaattaggcatagacaccgtcaatgaaatgtgaacagaactgacatgctttactcttagattgaatacgagttttacaagccagtgcataattcgccatgctatagagacagatgatcttccagatggatgcctgagtgtagaatatatagatcagttccccccacccttcacacatgggcccaaaatgtacacggagcaggagcaagaaatacacgtccttgctatctttgttagtttaatccacagagactttggagtctgcagttatacagcatcctagcctgtcctgactgatatgatcccttaactgatttttctactcaaagtctcttctccctccgattattctacatcactatcatattaatctttctgaaatagaactctaattatataaattccttatgaaaatctttgaatatttccctgttatcttcactggctttcaagaccatcacagtgtgcatctcaacttccttttaaaacacccacggtttccctacgtgtacacacacactttctaacacgttcgcttttctgttcctatgattctaagatgctctctgctagtcctgtctaagtgctacctattcttaagtaacagttcaaatgccagtatctctatgaggctttttctggatctctgcaaaaaaaaagggacaagaaacaccttcctcccaaaggaacaaagaatggcaattacttataagtaagccagattttagcaattggaccatttttgtcttaaatataactaacctgtctctatagcttacaaggtattcataaattcttcaaacaaaagaaatttatcataaaggatacaggtaaaagttctgtgaaattgtttaaaaaataactaaataaatgaattcccaaatgattttgagtctttattgtagttcttatcacactttgcagtggccatttctagcacttttcaggcaataaatggtcttctttcacttccatattattgaaaattcttttgcataatgcctagcaaatatcttaatgttgaatatctgaatgaatgaatgaatgaatgaacgaatgaaattaaggttgcattttattttaaaactaccgtttttttcttcagaaatcacaacgaggcaaatgttgccaataaaatagttattaagttaaaaaacataaatatctgagaaatgaactgagaaaaggagaaatccttacaggacatgaatggtacaggagaatagtacatatcaaagggtgaactctgggtcacagcttgtgggatcaggcaagaacatgtctagtcatagtctttcaaataatcttattaaaaattattttttctaagatccacttttactcttttctctgactaattttatttagctttcaagcatttctttgtggcttcagttttgacttcagtttttaaacaatttaaacaaataaaaattacattacagaattgttacttttaaactcttactttccacggggactgttattgtaaaatctgttcttattcttttaatttaactccattattttgttttaaatgtaatgattgttcattatatttttctccaactgctttaaaagcaccaatccttctttgctgtatatgtatcaaagtccataaatattctttgacattatcctagccttgaataataaaaggaaaaaaacctctcacaactttttattctacaaaataatattaaaatatgcccctatttttactgtaaatgtaatcttcacagcaacagtcaagagaacaagactgagtcattcttcatcacacattgcaagggctatgtctcctctgttgtgaggagaatattgccctgcagcaatattctcacaagtggagctctgggtcattgactgcacttttgctaataagaaatcttcagtaggagtgactgggccttgtgcaaatctctccagtagtttcttccactagtgacgcattagagcctcagaatcaatcactcaacaagtgtttactgaaagcttactgatacccagaccttaaactgttaccaaacagaatgccagatatgggatataattccagcctgaagagtttatgctcaagacaagacttacatatattacagagaagcgtaacagagcaaatgattaagttctaagtttcactgtacaccctaaaaaaaaggagaaattgatatggaacatgaatagtataggaaaatggtccttaggaaggccagacatgagagggtgagctctaggtgaccacctgtaggatcaggaaagaacatatctagtcctggagttaagatttctattttttctagatttatagaggtataattgacaattaaaaattgtgtatattctagatatgcatgacgatttaatatacatatacattgtgaaatgattaccacaaccaaattaattaatacgtgtatcacctcacatagttatcactttgtgtgtgcgtgtttgtttatgcatggaggacatttaagatctgtgtttggaaaattccaaataaacagtacaatattattaactatagttactattctgtacattagatccctagaacttattcatcttataactgaaactgtgtaccctttgacccaaacctctcatttaccccaattcctggcaaccaccattcattccaccattctactctctgcttctatgagttcaactttttagattccacatgtgagtgagatcatactgtatttgtttttctatgtgtggcttatctcacctagcacaatgcccttcaggcttatccatgtcattgcaaatagcaggatttccttctcttttatggctgaataatattcctctatctccctctctccctctctttctgtgtgtgtgtgtgtgtgtgtgtgtgtgtgtgtgtctgtgtgtctgtgtatgtgtgtatactatatttactttatccattcattcactgatggatacttaggccatttatttatcttgactgttgtgaatgatgctgctatgaacatgtggatgcagatatctccttgagatactgatatcaccttttaaaatatatagctagaaatgggattgctgggtcatattgtagtactattttcatttttggaagaatctctatgcttaatgctgttttccatagtggctatgcctatttacattcccaccaaaagtgtagaagggtttctttttctctgtttcctcaccaacatgtgttatcttttgtcttttatataatagccatgctaataggtatgaggtgatatctcactgtggttttgatttgtatttccctgatgattaatgatgttgaacactttttaatatacctgttggccatttgtatgtctctttttggaaacatgtctattttttagatatgtttaggtcctttgtccattttgaaattggcttattttgtgttttcttgctattgagttgtatgaattccttatatattttgaatattaactcctgatcatatatatggtttgccaatatattatcccataccacaacttgcctttttattttgttgattgtatcctctgctgtagaagtttttagtttgctgcagttacacttctttgtttttgctttcattgcctgtgcttcgggtgtcgtaccccaaaaatcatgaccaagactgatggcaaggagccttttctttatatttattttagaagctttatggtttcaggtcatacatttcagtcttgaatccattttcagttgatttttgtatatggaataagataaacatccaaaatcattcttttgcatgtggatatctagtttccccaatacagtttattgaaaagactatttgttccccattgtgtagttttaatggcctagtcaaagattagttggccatatatttgtgggtttatttctgggctattccgtttcattggtctatatgtctgtttttatagcactatcacactgttttgattaccatggctttgtatatagtttgaaatcaggacccatggtgcttctggctttgtccttctttcttaagattgctttggatattttgggtcatttgtgatttcatatgaattttaattattaaaattcttattcttttttttagaactgttttttctacattttctttctttttttctttcttttttttctgaggtggaatttccctcttttcgctcaaggtggagtgcaatggtgcaatctcagctcactgcaacctccgtctcctgggttcaagtgattctcctgcctcagcctcctgagtagctgagattacaggtgcacaccaccatgcccagccaattttattttttgtatttcttagtagagatggggttttgctatgttggacaggctggtctcaaactcctgacctcaggtaatctgcccacctcagcctcccaaagtgctgggattacaggcataagccactacacccggccattttttctacattttctaaaaaattgccattgaaatgttgagtgactgcattgactctgtagatcattttgggtaatgtggacattttaacaatattagttcttccaattcatgaacacagaaagtctttccatttatttgtgttgtcttccatttctttcttcaatgtcttatagttttcagtgtacagatctttcacctccttggttaaatttattcgtatatatttcattatttttgacgctattgctttggtttcttattattattatactttgagttctagggtacttgtgcacaatgtgcaggtttgttacataggtatacatgtgccatgttggtttgccgcacccgtcaactcatcatttacattaggtatttatcctaatgctatccctcccccagccccacaccccccccaacagaccccaatgtgtaatgttcccctccctgtgtccatgtgttctcattgttcaactcccacttatgagtgagaacacacactgtttggttttctgtccttgtgatattttgctgagaatgttggtttccagcttcatccatgtccctgcaaaggacataaactcatcttttttatgactctgtagtattccatggtgtatatgtgccacattttctttatccagtctattattgatggacatttgggttggttccaagtctttgctattgtgaatagtgctgcagtaaacatacatgtacatgtgtctttatagtagcatgatttataatcctttgggtacttaattcttttttggataatttgttgttaatatagatgcacgactgattttcatatgttgatttcatatcctgcaactttattgaatttctttattagcttctaatagcactttagatggagtttagggtttccttcatataagatcatgtcatctgcaaacagagacaatttaccttcttcctttccaatttagatgaatgttatatctttttcttgccgaattgctctgactaggactcatagtactatgttgattgggagtggtaagactgggcacctgataaggttaggctttatgtccccacccaaatctcatcttcagttgtaaccctcatcatccccataatccccaaatgtcaaaggaaaccagatgaaggtaattgaatcatggaggccagtttccccgatgcttttcttgtgatagtgagtgagttctcatgagctctgatagttttataaggggctcttcccccttcgcttggcacttcttcttcctgctgccttgtgaggaaggtaccttgcttccccttggccttctgccacggttgtaagcttcctgaggtctccccagccgtgctgaactgtgattcaattaaaactttttcctttataaatcacccagtttcgggcagttctttatagccttgtgaaaacgactaatacagcacccttatcttattcctaatctcagaaaagctttcaacttttcactattcagtatgacatcagctgtagacttgtcatatatgtcctttattatgttcagatacatttttctatacctaatttgttgggagcttttatcatgacaggatgttgaattttttcaaatgctttttctacatctgagatgataatatgatttttattctttattctgtgaaagtggtatacagtagtccccctttatgcatgggggatacattccaggacccccagagtatgtctgaaactgcagattgtactgacacctacatatagtatgctttttattctatgtatatacctatgaaaaagtttaatttatgttaggcacagcaagagattaacaacaatagagcaattataacaatttactataataagagttatgtgaatgttgtctctctcactccccctcaaaatatcttattgtattatactcatctttctccttgtgatgatgtgagatgataaaaggccaccatgattagatgaaatatggtgaacgacataggcattgtaacataaagttaggttattattgattttctgatgatgcatcagaaggaagaccatctgctttgagcgacccttgattattgagctatgacaatgttgatggttggatgccaggtgcatatgatatcaatgtccaacaggtcggttgtgatacagtttggataccctagaaaaaggaatggttcatctcctgggtgggaggaaacaggacagtgtaagatttaatcctgctactcaaaatgcacaattcaaaacttatgaattgtttttctgaaattttccacttaatattttcagaccatgattgagtacaggtaactgaaaccatggaaagtgaaacaaagcataagtgagaatactatatcacatttatcgactcatgtatgttgaattatccatttattccaaggataaatccctcttaatcatggtgaatgttccttttgatatgccgttgaatttgatttgctagtatttttttgaggatttttatatctgtgttcttcagagatattggcctgtaattttctttatttgtagtgtccttatctgggttagcattgtataatagttacctcatataatgagattggaagtgttccctccaagtgtctggtcttgaacttttctttattgggagatttttttttctgatttattctccttactcattatcaggtactcattacccaaatttgttcagattttctatttcttcatcattcagtcttggtcgattctatgtgtctagcctttatcaacttcttgtaggttattgtatttattggtgtataattgttcatagcagtctctatgatccttttttatttctgttgcaatgtctcctctttaatttataattttatttagttgaatcctcattccttttttcttagtttggctgaaggtttgtcaattttgtttatctttaaaaaaacaattcttacttatattgatcttttctattctctttctagtcacaatttcatttatttatgctctaatatgtattattcccttcccttttctatctttgtcttagttttttttttcctatttccttgaggtataaagttaagttgttcattttagatctttttttttaatataggcatttatcaatgtaaacttctctcttagaacgtcttttgctgcatcccagaagttttggtgtgttgtattgttattttcatttgtctcaagatacttttgatttctctttggatttcttctttgacccattggtcattttggagtgtgttgcttactttccatatatctgtgctgggattaatatttctgactttttagccaggctgcctgtattctaattacaacttcaccacttacaaggtatttagctttaggtaagccatttaaactctcagtgcctcagtccccttatctgtaaaaatgagtaatacagtgatattaataataataatgagagtatctacctccctgactgattgtgaagatgaaatgaaatagtcagtagaaagtagttagaatagttcacagcatacagtatttattatttttatgattaactaatgttttatgaggtccttagagtgctagacactgtttgcatgaattattttatatgatctcaccacaaccttataaaaaagtttttattgtccgatgttttagacggcgtagttataggagttagtttcagccaccagttgtatatagagaagctgctaggcaaacataagatttttttaaatctagcacaaggacctgaactttaccacatctgtctcccctgttgactatcaattcaatgcctaggtcccatgagggaagggtcaaagcatttgatgttaaaatgtacttctcagaggatgtccttcggagaagtattctttctcttacttatgttttgttaatttttgcttggttttgattgtagacatcagtttgtaatcagaaatgaagggaaggtcctgggagtaccaacatttaagagtgaccaaaagaatggaagccagcaaaagggatagaattctatcatcttgactcccaaacctactccatgttgatagtcttaatcttagttaatgatccctgctgcttgatccaaaaacctaacaatgacttcactcatttccctccttctgcactgttgttacctcttcagggacaaaatttcaatactttccacttagactttcactactgacttctaactcatctttttgctttctcttatttggaacagttattcagcttaccctaagtccagagtgaatttccaaaaaatcaaaggttctgcaacttttcatttctcttcaattccaactcaggttcacacgtttatcacctagtgtagaagggctttcctccacagttttgcttggcaaactccttttcatccttcaagactcaacaaaattgttgccttttcatgaaaaaggatactcttccatccttctgatattaataattttttgttcttgtgtccatgatagactttgtcataatgtattacagtttatcctggaggaaagcaccacaagaccaagagtttcctttttttttttcatcccaatgcttgatacatagtagccatttgataagtacatgttgaatgaaagcatgaatttataacatatataccttcacctgacttggagtttcataaggaatgcaacagcttccaattcatttactttctttttgcttaacaaagtatctgacacatagtacaaaagttaaatattataaataaaagattaattgcacagatatttttaaaggagacagaaaagatttgaatatccaggaattccacccaacgatgaaagacctataggcggttacaagtaggtaagcagagtccaaaatgtagggtcattttcaatggcagagaggaataggagagtcaataagaagcaaatgctcaaggagcttgagtagagacgggaataggcatctctttattatcttattggctgatttatacttcttgtaaaataattagcttaagctaattatctaagaaacaagaatctctcctaggcagattcagttgcctttcctggttctccctgagtgctctgagtaagccccaccattgccttctagaaaaactttctttcttctttcttgcccactcccatctgatcccttcacggcatccagaatgatgatccaaaagtttgggtccaaatgtgatgcaaaagtttacagtggtctaccatggttcctttacaaaaaaagaccaaaaatgttctgccattcttgctcatcatgattttgcctcagtttttcaagttatgttttgttcataatggatttttttttgtttgttttctgaatgtgttctgttccttctactgccttaaaaagccctcatcactgagtcttcctactacttccctcacctccacttaccctactgaattttcaaactgcaagtcaaatattacttccttaggggaatctcatcagactgtctccctagaccaccacaccccacccaacaactagatcacatccctttattaggggtactatgttttcagtataattgcaattataattattgacccattgaatgagttgattcatgtcccttccttctttattataagctttaagagggcaaaaactatttctgtttttcttaccatctttccctctttagtgcttccacattgtctggtacattgcagacatctaataaatatttgtcggaaggaataaatattagtgagagaataaatgggtaatgcattcatgagtgaataaagattatatcatatttttgtggtaaatattttgtttaccttcaatgactgaaacaaagagttccatatcctgaaatatgacctgaaagccatggaatgaaaggtttgataaagctggacgtggtagctcacacctgtgatcccagcatttctagagaccagggtgagagaatcgcttgagctcagaagttcaaggccagcctgggtagcacaataccttgtctctacaaaaaaagaaacaaaattagttgagcatggtagtacacacctgtagtcccacctactccaaaggctgaagtgggaggattgcatgagcccaggagttccaggctgcagcgtgctgagatcatgccactgtgctccaggctgggtgacagagcaagagcctgtcccccccaaaatttttttaaataagaaagttttaataagcagaatattagtttaattatgaatgagaagagatgtatagcatttgtaggggtacagaaccatgtattccataaaggaagaagttaagagcaatgatgtggaataagcatggggcttttaagaacttgtctgaaaagaggatattctttggtcaatagttgaaaaaataaaataagccttgctggagtggagcaagtcaatggaaagccttcacagttaggtggagcatttacactaaatgactttatttcgaacattcaacaaacactgactgattgtctattggttacccgccatataatgttaggtgctggggaaatagaagtaagtagaatgaggtgggggaggttcactgtggctcttggaaaggaaaatacataatcaaagtttgtgttagaagggtcaatctgaaggcttttgaaaaatggatctgggatagggaggatgtttgttgaatgaatgaatcaatcaatccaattaattcaataaactaatcatgattttagtgagtattctatgaaccctcacttagtttgattaccttgactgtgacatttaactttgtatttcactacttctttgcttctcttacattcagttaaaaatatttttaaaatacaattttcaaggttcagaaacaaaaaaaataaatgacattctggaaaaaatagatgtgctcagaactaaaaaataaaaataatggagatggtaaatatataagtgagaaatatgatgatgattttcattaacaagatacaccattaaatatattctcacgtgatccaaagtaatttcgttctctgtgcccagcgagttggtatctactgatggtggtttttcaaatgcaccgtgcagttagacgtcatcactgagacctcaataatagacctccatcactgagaagttcagaggtagaagatgcagggggacaatgttggcctgcattaatcttagcttgaaaagaggatctttagataacactatctaaatttagctgtgttcaaaatgctccaccacagaagagcagcaaaaagcaatctcattaaaacaagctcagaaaacaattccaagatatatgagtaaaagcaaactaaacaacggaagcacaaatagtatgaccttctcttgacttctacttgcacagctctacttattcaagctctgtttcggacattaagcttttttcatagccataactttcgtgttttttccatcatcctgtctattatatttccccttttatcttttattgagttcttttaggagaaacttgaaaaaaaaatctctataaatggaggttttttactcaagagcttttaaaataacagtacatcaccagatcatttttaaaaagtgttctattgtagttaagtgaatatttattgaaatttttctcgtcttcccattgaagactacagaaatctctttcttccagttgagctcaaaaggaaaagcaaaaaaagatggacagaagccagaaatgctgaataaattagtgtcctttttatttactttttaaaaactatgaattggctcatttaaatagattctaaaagtatttgtatgtgggtctgaacactgttgtcatggagattaaaacatttttgttgttgttgtgtacagtggagatggcagttttcttctagttgatgcttctgtagaataaaaaaaaaagtttagctgagaaaggtaggtcttaatggaattgttaatatgtagtcttattttggatgacattttaaaatcacttacgtatttaatctgtggattgtagagcatgctgggaagttatcaattccattggtacctgcctcagttgcagttcagccttaagtacttaccaaagggagctcatttggggtggcaggggtaaccgaaaagtgtgggagctgaggtattgtttgagagcctgtgggcagtgtgactgctccaatcgtagtttcagtgaggaagagcaccatctgtgcaagattttctcagatgtcctctataagactttcattgtcatcagttctatgtgctctcaaatcattgctttttcttctttattttgcacataagctataagctattttttaagacatataggttttatttctgtgtgatcaaaaactatgtctcgggcaacttctactttttggaattaacaattattttctttgtggtcttgtgtgtgtgtgtatatatataaacacatacgcacaagaagactgtctctctgtttgtatatatacatacacgcacatataaatacacagagagagtgtgtgtgtatatatacacagagagagagagagagagagagagagagagagagagagtcagtcttgctctgttaaccagctggggtgctgtggtgcaattatggctcactggagcctccacctcccagactcaagcaattctcatgcctcagccttctgagtggctgggactcccagcattcaccaccacacccagttagttattgtactttttttttttttgaagagacagggttttgctgtgttgcccaagctgatcttgaactcctggacctccagcaattctcctggcttggcttctcaatatgctgaaattataggcgtaagccaccttgcctgaccatcgtccatatatttttgaaaatgacctaggaacaatgagactttttgaagttttttccgtttgctaacttatcagagaaaactagtggaaataatatcaaaaagaaatcatcaaatgctacccatggataatgtacaagaaaactcagcaaaattatttggcacagatgaagaagacaagaaaaatgtctgctttgtgagaataccatagtaggtccttcagacaggaggtactttattaagaaggagcaattctcattaataaagatttagagagatcacttataagatgtatttatggcagcaagctcatttggtacatgtatgtatgagggaatcaagatctgaaaagattttcatcggttagagtgatacgtctgttatgatgcaattaattgtgatatactgtctactggagatttgttctccaaaacctgacaatctagtactttgtaggaactaatgtgtataatcttagggggcttagtggacagaaagttcattagccgttggtactgtgataggggaaaaagcaaatgggaccttaaacaatatgaatagacatggtttctcaaagaatagtctatggttcacctgagcacacatcacaaaggatgctgacaatgcacagttaaggtaccccacctagattaaatgaattaattttggacttgggtttagatatttacatttttatcaggacttcttatgttcaccccaaagtttgcaaaatgctcatctaaaataagaaagatgataggcctgatccatcttctgtttactaggttaaatctggaaaatataaacctcaggtgccagacttcagagggatatagaaaaacaattactttttgcattagtccattcttgcattgctaaaatcctaaagactggataatttctaaagaaaagatgattaaggcgggatgcagtggctcacgcctgtaatcccaggattttgggaggccgaggtgagcagaccacgatgtcaggagttcaagaccagcctggccaacatggtgaaacctcgtctctgctaaaagtagaaaaaaaaaaaaaagaagaaagaaagaaaagacgattaagtggttctagattctacaggctgtacaggaagcacaacagcatctgcctctggggaggcctcaggaagcttccaatcatggcagaaggttaaggaggagcaggcatgccacactgcataaacaggagcaagagagagtgggaaggtgctacatactttaaaatgacctcatgagaactcactgtcatgaggacagttccaagggggatggtgctaaaccacttatgagaaatcagcccctattctccaatcatctcccaccaggcccctcccctaacattggagattacatttcaatacgagatttgggtaggatcacacatcctatatcacttttggagaaagagtggaggtagctctgaaggtttgttacatcacagcatttgaggaatggctggggtgatggcaaatatcatacagaagagcaggcgtagacaagatataccagttgttttcaaatatctgagaaaatatcagtaagaagaagtatagtcatgagtgtgcctcacttgcctaaacattttgattaaaaatgcattttagtagatttaattatgcctttttcctctggtgaccatctgttaaaaatttttaaaaccttgacctatgaaaaaatttgtcagtaagatgcatttgttgtaccaaacttctcagttctggactttttaatcagtgtagttgccatcggactcacccaccagcttgcctgctaatccatctgatctgtgtcactcaaatacagcaggcagtgaagaacagctgctttttcttatttcattctccttctatctgtcataaaatccaggtaccaataactagggataagtgttttaccaagagcagttatttcaatagcttgaacttaaataccagattaattttcacagaataaaaataatgtttagtataagttttaataatggcatgtagatgaaatatttggacttggtgacttttaagttgtggttgctttttaaatgacttctctgtttgaggactttgtgtatacacatttcctatcacatttgtggtaggaagattctaagatgaccctcaagattcacaacctctggggtacacatcctatatgatcccctcctgttgagtgtgattggagcctgtgaatatgatgggacatcattcccatgattaggtaacattttacaacaaagtagaagatataattcggatataactcaggtggctaaattagttttcttcaagctactcaaaaggaagattattctgagggcacccaacttaatcaagtgaactcctaaaagagtgtctagttctcagagagcttttcctgctcttgaagaagcaaataatcatgtgagaaggccacacagcaagaggcttaggaggcctctagaagctgagagcagcactggattgataatcagcaagaaagcacagctgagctaacatggagactgcagcctctctaggtcgacaggaactgattatcaatgaatgttgttttaagtcactacgtttgtgataatttattatacagtaataaaaaccaaatacaaaagattaaaaagaaatctaagttgaagatatcttaaaccgaattgcatttaatacacctaacctactgaacatcatagtttagcctagcctacctttaacatactcagaacactcacattagcccacagttggacaaaattacctggcaacacagtacactgtggaatattgttggttcaccctcatgaacatgtggtggactgggatcctcagcttgctgcccctgcccagcatcacagagagaaatgtgcttcatatcactagcctggaaaaatatcaaaattcaaaatttgaagtatgatttatattgactatgtattgctttggcactatcacaaaatcgaaaaatacgaagttcaaccgtcataaattgatgactatctgtaccaccaaatagcccattactcaaatcctcaactttttctcttcaatgtatgtgacctctatttatatagtcaatacttcttgatttgaaaaaggattggatgataatagaagtgaaaagtttgaatgattatactcatttttctttttctttatctataaaccagcgcccagttggaacatttccatattttagttctaaggttgtaaattgctgaaagtttaggttttcttattgatgattctctgctaacatttgataagtaggtcccattgaatatcacaattaatctatttaagaaggttgagagatatactgttaaaccaaagggaaaatggtaaatgaaattacaatttatatttttcccctaattcatgggcattgaatattaacttagtggtctgcacttgtagcttgttaattgtttgacatctagctgaaaagtaaagtgttatatcacagatagcttttctaattgcaaacacatcaccctgtttattcattggttcactaagccttaattaggtatctatcctgtaccaaatggtatgccaggggtgaggatacaaagatagaatagaactttttagtacaatgtgaagaaagaaacataaagaaataagactgctgaagtattttaactaccaggtttgcacgttgacttctttatgcttcatttggattttctgaggctttaacgttttccgtttttaagactaagctcaagggtcaactctttcatgaaaattaattgctatttatgtttccatctataagaagagtgaaataaacaatgaaatctaatgacactgaaaagtgctttcaatgtactgttgagtgggaaaagccacatttttaacttgtatattcagtgtgatcccaattttataattttactctcaatccatatatgtgaatataatacataggaaagaggttggaagtaattcaatcatgaggttaacaagttttatctcagatgagattgtgtgtgatttttaaaaattatatttattctacctaataagcatttattacttttataacctgagagataaacattattgaaaaagaagagcatggatttaaagcgaggatgtgagactgtggctgttacatatttttttggtttggaccttggttaagaaggcaaagagggatagagattgtgggacatagagggagacgcaggcctgaggacagttacagtgttataaagggagaggcttaagtatcattataatatgagcagaaattgcaaagagtgagaagctaaaatggaagggagacgataaatagctcagcaaggtttttagggaagcagaaatgactcagatttgaaatataggtgacagaattagccttaaggaggagaaagaaaagatcttttgagactataagaaaggaggtgagagttgatgtagccataaaaaatacagagatgaaagggtggggagttaaaagagcctgtgtatgtagcctaaattcttgctatgaactagaaagccaggtcattagccgaaattgacaatgggataggggtggtcttggggaggttaaggctagaaaaatccaagcaaagcaggtaacaagaggacttgattccagactgtgaacagatttgaggcagggtcagaaagccaccctgaaatttcagtgctataaacctgtagtgggaactctataggaatactaatttctcccttcatcaacaaagatattatactggtcctgtgaagaggcttagtcacttcccagtttatgtatttcaagattatattcctaaaacacagaagtttttcagtttgttccctaacctgaccccagtctacctgtttccatccaagactatcactaccacttctaaaccacctccagccacacaaaaaacacacactatgcttgagtcattccaaattacacaccttcctctaaacattagtgtgaaattaggacatttgggaaatgtgattgatatgatttgcatgtttgcccccttcaaatcgcatgttgaaatggtattcccagtattggacgtggggactggtgggaggtgattggatcatggggacagatccctcatgaatggtgtagcaccatccccttggtgataagtgagttctcccttagttcccatgagatctggttgtttaaaagaaattgggatctccccctgctctctcttgctcccactccctccatgtgacatgtgtgctccagctttatcttctgccatgactggaagcttcctgaggccctcaccagaatcagatgtctgcaccatggttcctgtacagcctgcagaacagagaaccaattaaatatcttttctttataaattacccagcctcagatgtttcttaaaagcagtgcaaaaaatggcttaacactgtgatatttggtattttctagtccattagtgcacatccccccgatgtaggataaatatggtatgaatatttgaatatttttatgagtaataattaagcttattgaattatcacaactccagtgagataagtctaattttaatatcattagaaaggtgaagaagacaagaccagcgagggctactaatttctcaaggacacgctcatcctcatgtgagagctggaactcaaaaccagaccttgactttgtcaaaatgcacttttggttcccaatctgatattaggtgcagattcttctcttctttaaccaagggccaaataatacagccacccaccccaccctgccccagctctccttttagaaccaaactgttgctctctcactttagtgaggtggaaggaagactatttcaaattgactgatgaattaaccctatcgaaggtcagaaaaatgttagataacttaagggggaaaaaaagaaaataaatatcaaaatgtggaaatgtttgaaaaagaaagacaagaaggataggggaaaatagagaagaatagagagagaaaggaagaaagaaaggaggagagaagggaaggaaggagaatgtttgatgagcttatgaaggatgtctctttgcaactgagtgtgaatttagatgggattacataacatgaaacaaaatgaaaagaagaaaaaacagatacattcagtgatttaaaaatggggtaattctttctgtttttatttcacaagtcttttgtaacttattttagagttttaaaactttgtagacatatttaaaatgttcaattttcactaaaacaatcacatttttaaacataagggcatatatttggtgtgacaacctaacatttgccaccaagtgttaaagatgaaccagttttaattttaactagacgatttgaaacttttttgatatacttgagaatttgggactaccaaaaaacccctaaatatgatcctttatattttttattacttctaaaatattttgattctaaacaaatatatgtaaatactatgtggagaatttagatactaaaaatttaagtcaaatattgtttaagtacttacaatatgcccgggactgtacatgatgctaaaagtagccagatgcaatggttactgacttcgagtggcatctttttgaaacagagggcagaaatgaataaatctgagataacatgatgtgagcttgttccatactggagaatggggcactcagagaaaagagtgtgtgcaactgcaggtggggagaagctttgggtttggcactccaggaagatatgttcaaagcagaagggtaaagggcactgattgttcaagaaaagtgagtagtctggaaagggtcattatttcagaagcaacataccaagaaggaggcaggaaaagagaagacaaaacagcagcatggaagatgggtgaggagccaggccacgtgggtagaacttgagtatcataatatttctccatctaaattctactaggactagaagtcttatggacattttatttactctacaaagtgcccacgtcagtgacagataaagagtcaacatctgggagtagcttaggtgggttccacatggcccaggattgaacctctttctctcccttcttagctgtttgacctcagtcaagttatgtcacctctcatgcctctgttttcttgtctgtaaattgggaataataaggtaataataagtattgtgaggattatatatacatgtatataataatacatcatatataacattaatatttattaacacacatatataatctgcacatatgtttattatgtatgcccatatatatattacattatatattcatgtatacatatacatgtaaggtgcttaacagagtccctggtaccaaataagcactgaatcaacattaactattattatttggtttatctgaaacattcaaatggtatagcactaaggccatgtaaaaatatcatgtatttcaattattgaaactttttcacatttttgggtatccaggatagagaaggggaggaaggatctagtcacataatatttgagagtcagcaaattctttcaacaataatgtgattgtatttgtctgtgtgagatttctatgatggtcattttcatggagccagtcaagcattgactttgaaattaggcagatatgaatttgaaaagtagttttccctccactagccgtttgaccttgtacaagtgactttaactcattttttattattaaaaaaatagggattttttctttgtaagatttttcaagaggattcaatgtggtaacaggtataagtgcctgttagagggcctgtcatagataaatcctcaatgaagggtaactgttactaaaaggaagatataaggagagatatgacactacttccaaataaaaaccctggttcaatattggagcatggggaccccctttaagagaagcatcctcccagcataatgtccaaaatgaaaatatttcatttgtaagcataagaaaggggtcattttaagtgaaatgaccgacttatcaagccagtccactgaactgtagcttggagtctgagttacaaagtaatctatagtgatctgagggagtaatacaaactccaagttaatgactgtagaataaattctactgatatttgcagtctagtgtcatcaaggctaattctcctttaaagaggcaaaagcttcttattgtccccaaaactgttgatatagtatgtaactcagcatgtcacagaaatgttgtttatccactttggctattttgtttaaaaaaaacttttctaccctttttatttatttatttttaaatttctatatttcataagtaaaccaagcctcaacactcggcatttcaggccaggtatggtggctcacacaggtgtgtggtaatcacagcactttgggaggcttgtgcaggaggatcgcttgaggccaggagttcgaggctaacctgtgcaacatggggagaccctgcctctagagaaaatgaaaaataattaggcaggcatagtggcacatgtctgtagtccctgatactcgagaggctgaggtgggagaattgcttgagtccaggagtttgaggctgcagtgagccatgatcttgccactgtgctccagcctgggcaatggagcaagaccctgtcttgaaaaaagaaaacaaaaacaaaccatttcaaattcaaacatatttttctgaattaaaaaagaaaaaatactctctttaagtatatgaaaaagcaaatatctttcctagagtatattacattttaacagctcttgaaaattcagttaagtggtctagtgcttgtggtaatctggatgttagctaacaagaataaaaattaattccatacgttatcaacagcaaagaattttggagcagctaccataaataagaaactgctttagatgctggagatctaaatttggtaagatataatttcagccctcaaggatctagtttgttaagaaacataggcatcataacaaataaatgttcttgaattcaaaaaaaattaaagcttgattgttcagaaagcaatttcatctatatttaggagatgtttacaggtgttatattttataatgcagatctgagttcactttttgtacaagtagaagagtcacacttttatattaatagtgataatattattaacactgttggatttcttccatgtactgtcctagatattttacttattcctagaattttatagaataggtcattttgcttatgttagccttcagttgcaggtgatagaaatccaaattgagcatctattgacacctctattgatctgtccagggaagtacagaggagacctgccttagccatctgttgaccagaggaccaatcacatcaacaggactctcccctctctcttctaagctttcctctttgttgtctttattttcactagggttttctctgtaaggtgcctaaaatggctactagtagctacaggtttaggacctggtccttagcagtttaaatcggaggaggaaaaatacctcctgttcttaaagtccctattaatctctgttggccttgcatgggtgatgggcccaaccatgtaggaacacagggcagcttaggtcacatttccataaatatcagagaagtggtattgcctgatatgtatttcatagctagcaaatgacaactggaattgaagtccatgcttcttccgagtgatcactgtccctctaattgagtacctttcaattgaacctgtttcctggcgttactttaattttgtgtgaaaaactatcttcttgattttaagtaaaagcaatgaaaaaaggccctctaacattttctgctcacaaaaaaattagctttacagatagtagacttcatcagtagatacagtctttaaggaagaaaaacatagtttgtataaaatattactataccctttactatgtaatgtctcctggattctataataattggtgggctgtgtggtctgcttgccatcttccaagatgtgccccttattgaaaaaacaaaaacaaaacctatgtctgtagtatgtatatttgtgcatttaaatgtttgtgcccatggacttgtgtgtgtgtgtgtgtgtgtgtgtgtgaatgtatgtctatatatatatgtatggtgtttgtgtgagaggcaaagagaagagaaaaaagaatgacgttagcttatcaatatattataataaaattgtgttgactagtttctttatcgttctcttccaaactgataaaaggacaatttttggtgtgcggtttaaaagaaatgaacttttccccctatactgagggcaattttaaaagaaggtagtttctcaggtgtttctagtcaaaatgacaaacctacaaagtacatttgcattattttatgtatactttactgatagagtcctttaaatgttgagttcaagctaatttttcttaatcttcaaaaagtttagggatcaaattgtatcctgcagatttttgttatgctaaatttcatttcatctcttcttctttagttctacagagaagttaggtcaagattgtttgaaagtagacttgagtccagaaacttgtctcttcgaccagtggattatctaccaatttgaaaaaatatagcatgcatgtggaagaaaatgttacttttgcatgtcagcatgttgtcattattattagaagaacacatctttcaaagaaaggaaacataaactccataatgctgtctgatattattcttgaagacggctatcattttagctgttataaaacaggaaggaacatcatggagcattagattataatatctatagtcccactagcacaccattaaataaagtgaaggtatgaatatttaaattagaatttgttttttatactatattatgtcaggaagaaattgcaagctctggaaattctttgtgtcttaggaaaatgagattctattttttatagctctttaaaaaaaatacctgcatcagcagacaattggtaacagtcatcatatttggtgttatttagcatttctcaaaaacatggcagttgtttttatgtgggtgtggcatgttggcatttttacattatcgattccttgattcaatttctactctgtgctgacctgtcatatgggataaatctaactacagcaaagctctgttattcttcagtacagtacaacagataagtaagccagatataatacatttgggtgaaaaaactacaaaatcatagagggggatctttttaagagcttttaaaacaatcttttggtttaaggcagagaagtattctacaatgaaacactagattgcataagataagcctgtgcctgttccaacttaattttctttgttactctaagaactccccatatatatgtaaatttcagcagtgttaatgggctttctttggtatgtcagaagaagaatgtaatttgtgaactagataaatctataaggcacaggtgtgagcaaaaaaaaaaataataagaatcactcctcacaaggaaatactaaataacaattattattgagatgtttcatgcattttttttatccatagtagtaagtactactatctctataaagaggaaaaattcaatccaacagtcattaaagttgttctattaaatgtagtgataaatcttcagtttgtatttttaatataagatctgagggataatcaaagcaaaggcttatgtggatagggcatttattacataccaggaaatgtcctgaactctttacacatgattcattaattttctgaattacacttgtagataggaactattgttatcctcattttatagacaaagacacagagatagaggttaagtatctttactggggccacacagctaggaattggcagaaccaggatttaggcactaaaatctgtttatttaaccactagcctacatggccattggaaatgaattatacagagatgaaaagttttcgttatagattccctcgttgaaactcaaaaacagaaggcaaaatatgtaaaagaactcaaaactgagaatatttttaaaaatagaataaaatgtcatagaaaaaaatcacatttaagagtttctttcttctattacttttaccattgcagttatgggcgtttggatacagtttgggtttaataaaacccccaagtttggtttttattaaaataagtcaatctatcattggtcaatacatcacatttatctctcttttctagtagtgtcaaatctgaggagcaaatatatagctactatacaaaaatcaaagatttaaaagttttagcattgcattgagctattaatcattgtaaaaacattttaaatgcctccattttttagatgatagctacacattaaagatggggtgtaggtagggtggttgatcagtgtatctaaatagactatagtatgcaaaaacattcagtaaaaaatgttccttgagcaagaagaaaaaataaagacagctgatcaaaacacatgaatttatatgactcagtaattcttacattatcataaatttcgctaccacttttatgaaagcaattcacacaattcacaatgtgaggagcaattaccatcaaagatacataataatatgccatgtggtatatggagccacaggatgaagatggcaggttttcttgggccatcaattttactcaagggcattttaaaataatattttaatattaaaggaagcatatgatactgtagaataaaatttatttgcatttttaaaatctccaacctgactcttctgtgaaatttcagagctgtggctgttaaattggaactatgccaccagaccctggggtatgtctatttattcttctctgcctttagggaatttttttaaaaagttcaagaagccgtgagataatgcagccttcatagttattctgtttgtagattggtagtaaatttttgatacttattatgaatccaagagtggaggtgaaacatagcactggatatttttatatgtgttggtctatgtcaatcaaataggagagataaaatgatagtcttgttagtgaaagaaaatagggacaattaatgtataataaacttaaagttacatgatatgacagcatagaattaaaaatatgtctgtctagtaatttttttctccttcgcaattattgctttcttcataggcttttcctattgttctctgtcaagacactgcagtctgttttaatcattatcatctactgcttctattttacttgttatgtcatacaaattcatgtttggttctccactaatactgtttcaagaggtcacgaagaaggtatttttttttttaaaggaacaccaaaatcgaatgatggtatgatggattttatgtgtgactgagcttgtgtggagtgaagaaaaattcaaaataaattcctctctgagacacactgcatggaaatatcaaagcagtgcaattctttcataaattaaaggttatactctcattctgttttgggtccatccagaagatgataatgtttcgagagcagcagtttctcaggacactcttctgtgtttcactatggtaccaagaaatttgccagggaaagaaatgatttgcctttattctgtcaatattatcaaattaagaatgtttttccaaaaattcttttaaattattgagtgtttattatgagtatttatgatgtgcaaggtgctaggctaattgctggttgtatataaaggtatttggactccagtactattctatttttattttgtagtctgtgtgaatttataaaccactaaatcttacaggtttaatactcaaaactcctcttgtcttcaatatacctaccatagactgtaagggattatttcgagtagtcagttggggtttgatatggtgttaattctttatgcatttacatcattctatcaatttcaagtgtgttcttttattctttttcttttttctttaatttttccaggctgaaatagttatcttttaaagtctgttctacagcagctgctccaccccagtcattgcctttagctttctctagattgccattaggccttcttgaagtcgtgcttattacagatatgtgaggagtgctttttttagggggggaaggggagaaacagatgtagaataatccttttttgttgttgtttttaacacccttttctatgatggccagtgtttcactgatgatcttgttggctgtctccgtggctggatgagttgtctcgaagagcagtttacactcagtagtgaccaggtccttgagagctcttagctcatcatcctttaagtatagtttggagtattcttcccaggctgtactacttcatgcatttttttttttttttttttttttgcctattgtatttagagtttttcctgaaatgaatttctcactatgtatttgactatcaagaagagttgtatcatctgcaagtttgaggtttcacttgaaaatcctattagcccatacagggaataattcattccagtaggttcttaatagcccttccctgttccctgtttctaatccatttattgctctttaaagattaccatgtactcctttttcttattataaaatattgcatattcatattaaaatctggaaaattcatagaagcagaaataagtaatctaatgaatcaaaaacaatgtcaagtagtgtttcttaatcattacaattatttatgaattttggttttaatttttcaacatttggtctacttgatgtgtggcacacattgttctatgaaatccaaacagtgttattgtaaagtctctgggcttcttagagcaaaagttttaaaaccatcatttatatgtttaatatatttttatctatttctagatttattttaaaggcagtaaaataatctaacaggctcctgggtacccatggtgtttattatattatgaagaaataaaatattactcatacagtcgaaaccctacaattaaattcctttccctcccttcagagggaacctattataatgtgtgatttgtgatcatgaatgatttcaactagtttttctgatatttatatttattctgcaccttcaccctcatcatcatccttacaataggctttatcttttggaaatacatataatattgatgtgctctggttttaatcatcacctgcctcttgcctcagcaagctctaggttgtattttaaaggagattaaatatattttcactgaatttaattgtatctaagtaatacctttcgaagagtcaaataatacagaaaagctcataacaaaaagttgcaattcttccatccctccttcactctcagagacatgactgatctatctcagctgtttcttctagcatttacccccggatttaaaaataatatatttaaacaactataacttaatttaaacattttagacattatctcttcctttcctagtatggaagacaaagattgagcactctcatctgaccctcacacatttctgcctacatcctgcaacatatacttaaaataaatatataatgctaacattgttaaaaccatataaatattactcacagctgagctctgtggtgcactgtgtctctcttttcttttttgtacatcgttgcctggcattaataattgctttgttttgaaaaattagtcttagtttactacatacattttactaattttaaactacactttctgacagaattattaaactcccttcagtatgtttcatcacatttggaaatctattaattgatgatttttgttattatttgtgtttcattgttaagaaaaccatcctgatgcttttctctcccacatttttgtagcttccttagaaagagtgaagaaaaggtaaatgtttttaataaattatgtgtctgaagatgccttaattcccccctcttttagatatcagctggctctagaattctaggtagaaagcatctcttctcagaattttgaagatattgcttcatggctctcaattcttcactcaccttactctatgaaccccagggtctttacatcccttgaggactgaagtgtgtttccacttcaggtgctttgcactggctggtcttctatctggaatgcttctccccaagatatcttctggctaactctcttttcttcttagaaaactgctaagatttaccattcccaatgagccgcctcttgtccttttatttatttttgcaaactgcccctgcccactgccattcctggtctccctaaacaagtcttagtatttcttccctttctcttttcatgttgaaatacactatatagtttacttatgtattaggtaaactttttattgcctctctctgtactccccaagctacttcttgacccttgaaaaaatgtagattccatgatcgtataaaatttttattactttaaaaacttttctaaattaataaattataaaaaattaatatattcaaagcaactagatgtatgcctaaacacctagaaaagtgcctggcgcatgttagaaattagaaagtatttcttatgaacagttttatgatttttcacattgaagttgaagagtcttgccaatttcccctatcttatatatgtgatcagatttttgcctctgtaaacttttaggattttatcttgaccccaaatgttctgtagtttgatcacaatatgacctgtgctatgaattttttgacccgggaaattcatacacctaacttaaggattttaatttttcattattaattatttaacaatgtgttatttatctatggaactcttctttgttagatattgaatttcatggattaatcccctagctttttgtctttggtttattttgattactctttttttttttttccttttttttttttgagacaaagtctcgctcttgtcccccaggctggagtgcaatggcatgatcttggctcactgcagcctctgcctcccaggttccagcgattctccggccttggccccaccccgcccccgccgacccccatgagtagctgggatttcaggtgcctgccaccaaacccggctaatttttgtatttttagtagagatggggtttcaccatgtgggccaggctggtctggaacgcctgacctcgggtgatccacccgcctggtcctcccaaagtgctgggattacaggcgtgagccaccacgcccagccgatttctcttttcttttatttccttttctttatattctattgtttcccctggggagacctcctcacctttatcttacaacattttaaatattaccataatttaataattcttttgtgctttgagtagtcttttaaaaattaatatctcatcctgttcttgttttgtgcatgccatatgttttgctagttctccgagaatattgactcatttttgaagtttttaatattatttttgcctttgtttcctctgttttgttttctttcatgggagatacaaaatttctgggaaaattttgctgtccaataatgtttagctgagacactaaaattgttaaatctctgtatgtcacgaaagcatgttaactcaaatatgaacaaggtatcatttcattggaagactcccaaatatcctctcggtaggctatttttatggacaggtattttccaatctttgtctgctagcatttttgttgagaacggagtatgagctaaggatgagaataatcacactctacaatatgtagattttcactttttcatttttagtatgaattcttatcctcacccctcatccttcactgcatggtaattggacactttcttattaaatttccctagagaattgtattagggttctgtagagggacagaactaatatgatatatatatatatatatatatatatatatatatatatatatatatatattagtttattaagtattaacttatacgactgcatatatatacatatatatatgtatatatcatgggagtttattaagtgttaacttactcgatcacaaggtcccacaataggctgtctgcaagctgaggagcaaggagagccagtctgggtcccaaaactgaagaacttggagtctgatgtttgaggacaggaagcatccagcaagggagaaagatgtagactgggaggctatgccagtctctccttttcacattttctgcctgctttatatttgctggcggctgattagattgtgcccaccagattaagggtgggtctgcctttcccagcccactgactcaaatgttaatttcctttggcaacaccctcacagatacacccacgatcaatactttgtattcttcaatccaatcaagttgacacttgtattaaccatcacaagaataaattcccagtggtctcttgccaggtcagcaatgggatagtaacgaggtttatagggttggcagggggatctggatacctaactaagattttgcagcctcaacacttactctagccttgtaaattatttggtacttaaaatttcagagacattctggggatcagcagctcaaataacacttcttgctgtggtttgctcctccccttggcagacacatcctatccccagcttcctctgctctgggctagtaccactcactccatccactttccttccatcctatattaatttgttgacacttcttttctgatgtcatcctctggaccatatatatatatatatatatatatatatatatatatatatatatatacacacatacacacacacatacacatatttatgacttaactcttattttagaagatttgtaggttataatagcatttaagtgtgtgtgttcatggtcaggtttaaccaaagtcctaggcctgagtatttcaatgtgaagaacaaacagaatatgatattactttcatacctctatttttgatagtctgtgattctgagccctatctatgctttcagtcaaattaccaatggtatgaaactctttaattttgtgtgtctcacgtttagagggtagcttaagaggttctttaactgcatgactattgtgaggaggatacttatgagttgttcttcatttccatggggacaaggacaatgaaaatacagtataatacattcagagtgttattagaagttaggtagtaccttttaattgttaaacaataaagtaataacattgctcattaggcatgtgcttatgaagacaaaaaggcctgatttactgatttagtgatttagtccaaggctttgacatccatatgatgtggacctctgggtactaaagaagtctataaatcccaatcacaactgtgattaattacaaatatcttatgcatgtatttctttagctaaagacagaggtagaatcaaataaaaattactccaagtttactggctctatttctcttcatttgaaaacagaattttctcaaaaggcaaaggaaaagtttgtcatccacatctcttattaatgaaagtgtaacaatcatatactcacatttctccttctgaataaaacaaactactgatgagagataaagataattatttttagtacctctgttgtcttttaaatattccttttttggaaaagcaaaacaagacatgattatattgggagaagaatggtgacccaagaactagatggccttcttctggtacggttctttcactatctggtgtatctctgaagtgtgatcaaaggtaactgatcataactagataatcgttaaagcccctatcctccctccctttctgtatttttacctttcttcccttattgatactaagaccttgatactaagttgttcacaactggcccacattctaggttgaaatgatggtgcatgttggagacaaatgtacaaataaataccatatggttatattactactgtgaaaatgtatgtagaaaatgctggggtaatatggactattttcttaataatctaatttcttacctagtagacagtcaacatttccaatcatggaaatgaactagtgtccacataactgaaatccttcacatctggctatctttaggccctaaattatgtgaaattcactgagtattttccacagagttgtttactgttgtaaaatcttaaatcaaaatgttacatcaaaggaagagttgcatcaaaagaacctcagcaaaacctcaaaacaaccaaacactccacttgtctgtttaaattattagcaaaagcagctctgttatcccagcttctaagctaaccagactcatcattttggcctttcatgtatgcttttcctatggccaaaacgtccacaaattactaataaatgctgacaaggagagaggttaaaaccaggaagccatgccttttagctgacaaaacattcattgaaatgctatctgggtgaagcactgagaaattaatcatctgaatagtctaaattatagtacatgaagaatgcaacttgctagggagacataccttcagcattattcgaggttaatttaaaccaacatgtaaatgtttgtatgcttcatgtgtggtatcccaaaaggttgtgttttctcttttgatctttgaatatgctgatcgcctttcatgaacagtggcattcaatgcactttgaaaaaaacacagtctttttctttgaaggtaagttgtaagaaagagaaatcattaaagcctggagtgcagaattgttgtcgactgaaatggtatcaagtgagttgaatgcctcatattttaaaaatgggcatgatctctattattactaacaaaaaaatctgcattttatgtgatatctgacatgggaaagggatgcttgatgagtagccaatgatgttgaactggctgtattttccgactgacttgtttttcttatgaaggcagcattttagtaaaattgtgtttgtctttctttctgataggctctaattgaagtttgaaggttcattacacaatgcctgggaatatgttgtcaaatacaattcacctctcccacagtgaatattggcatgattttataggacagggtactctagagctcagctgtcataatatttggctccaatttcattcataatggacagaatatctacaatgttttgaatccctactttcaaatgtcagcacactggaacaaatattaaagaatgggtttgaatctaagtagatgagtatttccttgaagcaacatgttatagcctaaatgttgtttccttcaattatgtttaaacaatgtaaccttaaatgtttcacagatgtatcacttgaaatccaaaacacatactactcatcaaagtcatctttatttaagcttaggaagaaaaatagaaatctgaaatgtttgctcttagtccacacacacttctcatctggcaggacatttctgaatttatttgggaaattgaatatatgtcaggtaggtttgggttgctgggtaaatgagtgtacttcagtgtcaggactgtttttattaacagattttataaactggcttggtagtttccagttctgtggcaagaacaatctatcataataaacctgtaacataaaagtacagaatacattcctgtttcaagagtctgtaagaggagtcccctcatgaacagtttatatgagaggattataaaatgaagttcagcagtagcacaagcaactgcagtgaatggtgtgttgttaaggttctttaaatcatgaaaaaaatatactttcaaggatttattaatcttactccaaatatatatattttggtaaatagcaattggaaagaagggtttgtatttcttagaagcactgagctgaccaatatattggaaaactaagtaaagcaggccagtgatctctattctgagtgaaatattttgctctgtttgacatctgggtgcaatgatggctatgtcagtgtcactttatttttctcttgtgcaagtttgataaaactctttaaatactaatgtgtattttagaaaacacaaattctgttatattccaggaggaaggaaattgccttaggatatgaatcagatttgataacatgaactatcttatttaattattctaaattgaaaacatcatgaaagataattgggatttttccatttttattttcctcttgtttcttgcttatttgaatcattcgttttattcttctttctacttaggctaagctctcaaaaggaaaggagatgtaattcaatgtatgtaagtttctaagtgtaggtatttttcaacaaacacataaacaatcatcgatgacattattacttatgtcacataaaaactgtgtttaaacagattaaaaatattttctggagagttttatttattttacaatgtttacaagtgaattgtcaagatgtctcccaatattatttcctttccagacagcaatctttaaatcctgcttgagtcatcttttattccagttttcctttttttgagtgtaaaggcaataaattataacaataaaagacttatactctttgtcccatagtttctcttttctgttgaaatatagcttgctctttggaatattaacatgtaaaccagaggtttttttttttttttttttttgaacaatctgactattctaaaacactttttaggatatcactaattgtcaataaggaattgagatccacagataaacttatcaggaacagaaaattgttttgaatacatttttaatatttaaatagtcacagatcaaaactaaatttttttttaaagattctgttgaataggtaggacttcacattggattcaacctggtatttaaaatgcaaatactttttgatttctctttttgctaagtaatattctaagagattagccatacattttaaaatgttgtgactgtttttgtgtttcatgtttgtataaatgtagagattagacacttgtttaagatccttaaagatctgaggtaaattatttttgggaaatacaaatttctttctgtaatttctaccttctgtgaacaacttcttgaagactgttctgttgctcttggtttatacgcaggtcccttaaaataacaaaataaaaaataagaaacaatacataaggacaaagactggaaataaaagaaaaataatttaaactcaagggattttcttgggtaaggcctcagagaatgttccagctgttcttaagaaagacattgtatataaaggccacatttagctgaatagactgaaaaattcttattatttgagaaatgattcaattgttgtctcaatgctaaatattcataaaaactatccattcattaatcctttttaaactgaagtaattagaaaaagcaggtcaatgtgcaaagaaatgggcttttcttcatcaaatggttaattctttattaaatggttattctttaaaatgagcaaagatgagctcagcaaataaggtacttgtaataatgaaagtactatatgcaggaatactggctttttgtttttaatctgcaattagttaattaaatttcattgtagatgtattgcataaaatacatttgaaaggcaccattcttcctcataatacagctagtgaaggtccaaatttcagtgactcaagtgtaggtgggaaaaagtcctcacaaactttacgcaaattgttagaaaagcttatgtaaacatgactactatgaatacagaccagggatgtgccccagagtcaatgagttcaattcacttgctgccacaatgctttcaggcctaggctctttgcagacagagagcagcatcagggaatgattattacctgtgcccagcagggtttgttcaactgctaatggtcaaggtagattcaagccctctatcattcccagagacatacaaaatcaaatactgacttaaagagaaatataaatgaaataagttctaaaaggaaaagaaaacaaagaaatgtcttttacaaggcactaaagaaagacacaagggaacattcatatagattattttattaaatatttattgagcaaaatatttgtgccaggcactgttagattggcctcatgagctttgcatgggcacccacttgctatacatcaggcttggaaacatactcctgaccagcatttatgctagacatgatttatgtctcatactgtgctaagggggtgactaaaatctatattgaccaatacttgatgagtatatttgacagatgtttaaaagttaaccctgctcaaaaatgtaacgggatctttactaatcaggatcataggtttgcatgggttcctaggaggaaaagaatgagtgggaccagtttatacaccaagcatcaaaggactccattctcaccctagggaaacacggattttactgctcaggggatgatgaaaattggattccgacttttacacctcagattatttctattaattacacctcagattatttctattacacctcagattattatctcagattattatctattacacctcagattatttctattattcagtcttagccgaagattcccagccccaggtccatcgttgctcaagggtaagatcacagacctagtgcctgcattatttcccttctgtgcaaatcgtgagggccaattttgctctctaaaaatttgcattaaacagaccaatcactagattccttctacagatcaaaatgcatttattcaatcaaacaaaagggaatccatgtgaggcaactaaggaagggctttccctccagtctggtgagcagtggctgtggctctgctggctctattttgtgaggtctttataaatgaccacaattaagctgtagatgtactcatgccctagatgtaaccatccgttctggggaatatggcttgataaacccattggtgtctaacacttattcatgtcactcattcattcattcatttattcaaacaaatatttttgagctcttatgaggtgccaggcactgttctaagcaatgggaaaacaggagtaaacaagtccccattcttatgatgtttttattttagaggggataggaagaaggagaaaaagccaatgaataaggaaagaaataaatcaacaagataatttcatataatgctaaggatgggaagaaatgaaaacaggtgttggaatagatcatggggtgggagttaattgaaggggtagtcaagaaaggccctgctaaagaagtgttgggttggttagagcccagcaagggacttttcagctctggagatgcttgtagagaaatgcagaggtcctaatatgggaatgaacatctcatgtagggtatagcttctcatgtttgaggaacagaaacaaggccctaaaggctctaatattgtgagccaggataagggcagccagggtaagggcagatgacatctggagacaggtaggggccaggtaggaccttgtactgtgtacgtaggaccttgtacatgtaggagtcagatcacgtgggaccttgtgcttcgtttgaattttattctaaatgttgggaattgattagatgattttaaaaataatactttcttaatactgtgtcactctgcctactctctgagaaacagatcataaggagacaagggttggaggcaagcaatgcttctacagaagactttggtaggttcggtttctataatttccaagctctgcaggagaccactacagcttcctcctcagttactcttatttacttatgggcccaaacccctgagcagttaaaatctggcatcaataacactatcaattctggctaacaccttggccagtgagaagggttaatataacaggagggaagatgacagacggaaaaccatttcttttacctcttttttggtctccacaggttgacaataacatgttgtaataatcacatgtatgcaatttaccagaagttttgaaatcttagattaccactaacattccaatttctaaagacagtggacatgaattcctgcagctctctgagaatagattttagctgttaatattatattacaacttcctacatagttgtaaaaatttaggttaatgattcctgtgaatttatttttatttttttgaaatggggtctcactctgttgcccaggctggagtgtagtggtgtgatctcagctcattgcaactttgcctcccaggctcaagcgatcctcctgcctcagccacgagagtagctgggattacagattcacgccactacacccagcaaacttttgtatttttagtagatatgaggtttcaccatgttgtccaggctgttctcaaactcctgagctcaagtgatccacccacctagacctcccaaagtgctgggactacaggcatgagccacctgtgaatttaaagtaaattaatattatgtacacagaagttacaataaaaatgcttctatttggataaaacaaaaaaattaaaactactgtaaaagtgaaagatactacatactttaggaacaactggtatttgtatgcaagtgggcctaaatctaatgttgtgtgaagatcaaagccaagtacaattgtagctcatgttgcagttatttcgaggtctcaaaagggataacaacaaaaatctataatagaaaacagaatctgggttaaaatcagtggaaataatttttatttcagaattaaataaattgagtgaaatgaagtatctggctcttggaggaaaatatggtatcttattctttaaatgtctttaaatttataagtcataagctgcaagtcagtagcatcattatgttgatgaattacccagtttaattcttataaaaattgaaattatcttctgaactctaagtcatattttagccacaggtatttttttgttttgtttaatcaataattcctgaaagaatgaaacttattcgacttttattacgtgacaaggtttaaaaaaatttgcttgaataaaacattatggagtctgaattcaaagcataaaggcagaaagtaaagtatgaagatctttcaaacgtctgtcacttttaataattttgttctatgttatatgacctacgaatgttaagagtctgtaagagtttcttcagctgcatttgattttaccaacaccttgtgggtacagttaagaagatgacttatttgaggctttataactgaaattggatatggttcaaacgttcaacagatataaacatattttaattaagaataaatatttttataagattgctgaaatgacttctctcaaaaatttatgccggaacatcaacaaataaatttgcattacaaaatagaaaattcaattgtggaaaatcatattctaacttattctgatgaagtagttcccttgtcaggaagctttttcttaaagtgtgttttatgatttgtgatagaattaccatcactaagtcgatcattgcccattggttagtctacatgtactgccttttagtgacatgagttcaattctaattaagaatgagaatagcctataactatgaacacagatagctacatgtgtctctagtgagaggtactagtcctctttgacatttctcttaaagcggaatttatttggggtagtgatggttttactggtagccataggggaagataagaaaagggggccaagatattcatttctactgctggcatgtggaatgctcttttcctgctccatgccagtctctcacttgatttagaaagatttgtgcgtccttagctttgaccatcaagaagagtccatctcctttgccttcctgtgcctggtacctgaaagacctagtgaagactgaaagaaaagtttttattttcttacatagtgaaagcactttgaagcattttgttacacatatctataatttaacatgataattatattgatcatttacaattctacacattattttagcaagtaatgaacgttcttaagtgcctagtgttgtcataggtataaatcaagtaggatacctgccctcaagaaagtgtataattttatgcgtagagataagagatgagtactttcgcagaaacaaatgaataattatataccaacatggagaacttaagctcataggtgaatgtgggaatatggaggagaatgaaaatcattgccaggtgagtgatcaaagagtgcattctagaaaaggtggtacctgtacaggggtttggaggatgcattggtattaaataagagagaaattagagggaagacacatcttccaggcagagtgtctagaagcagagccagcagcagattttagtgtaagcaatttattgaaaaagtcctctcagaagatatctatgagatggtaagaaaagctgaaaaaggtaggggagaaagtggacaaagatgtgatctctaaagttgagcctcagactgatacatggcatggtctggagggaaaattgcaccacagaaagaggtaccccttaaggaacaggatgccaggattttacccctcatatctgtcagttatcggctacaagtccaaggggcagggggaagtgcaagtgatgtatcttgctggaagtctcagggtcaggaggctctcattcaaagaggcaggtctctggaatgatgcagctgcaagccattagcagccaacccttgcctcagctgagagatgggtaccaggatgaaaggcctggtaaagggttatggctgtgccaccagtggaatttcctacactgggaatatacatgctaggtgcatagaatgttaggtgtgagaggggagaccagcctgttggaaagtattcattaatgcatatttgtcaagaattctagctggtaacactttattaaacattagatattgctattttatgtgctttgaagcaattacactgtttgaaaaaccttattttgtaaaaaaaaatctgttctattcactgtctcacagatttaggacagtttattaattaagaacactagatttcaagtcaaacagacctgaccttaaaccttgaccttgttctttgctgtataaatggttttgtatgagttacttaaccacactgagcctcaaattcccatcagttatatgtggattataatgtctgcctcatgcttgttgtgaacattcaatgtaatcattcatatgaagaagcaatgaacacagggtctggtgcacataaatgttcaacaaatgatagacattacttccttctggatgagcaaaaccttgatgctttcagtagaaggtatttggaactatggttgaatcttttctgggggtattgatgggactagagtcaggatgaggtggatgaaatgccaggtactttcatctgtatgacttgagagtgtatgcatcaaattttgcaccctcgagcacctctctcacctccacattgaaaaaaatacatgccagattaaaaaaaatgaaattggaaaggatggtttgtagaactgttagagcatccataaaactcattacaaagtaaaatatattagtaataaaatgattttagtaatacctcgggaaccactctaattccaaatcatctctctgtctcttgtaatggctttccaatattctttgaaaaatattgaggttattttagttatgatattggtactttgatttggtttaaatatccttttattcttgagatatacaatttcaactgaatggcaactatgacagagttgaaaatgtacagaaaaataaattatagattagacaacgtattaatttaaaagcagttgcaagcaagttactatattgcaatgaaaaaaaagttcctaaaattggtaattcaactattgctgtcctaatagctgaagtcatttttatgtatggcaatcctaaatcaaagccatcataagatgctgcagacctcttaatagcttggctccagtgataatgagcccaggacattagagctcatttgagagcaggattcataattttttttactgtgcaattttcctacctctggctttgtctcaaagacatagccacacatggagaaggacactgataataagagagtttgacattctttataatttttcttttgccaggatccttataatccttgaatcaaaatgattgaagcagttatttttaaaaatagaagctagatttaaaatgtattattttgtgcctcttttgacattattttgtttagagcacctttaaaaactctactggtgattaaaatattgaaactataacagtatttttggcatgatttttaaatacttctttcagctatatacttctctaacttattggcttattatttgatttaattgtccttaggcagtgttaattatgagagtttgccgagtttcttcttgggaatttgagaataaaggatgcgggaaagaggaggtgggtggaggatggatataaactgttttttcaatgtactgaaggcatttcagattaccagaagaatcacagagacaagggaccatttagccatagggttaaacctgtcactttacctaccccacaaataagtaactatggcaactcactgaaagtgcttagctaccatgggagtggatggagttcgtgctttgtggggacaatgctgtgggacctctatgcccccatccataagggaccctgggaattgccttctagcagagaggccaactcacatttcaaataagtatttttccctcctcaactgcttttctaagctttgcacattaacactgacctagtgcaccatttaaaagtcctaaatatatcacacagtcgccagcccaatcaaggtgagtggtcagacaccagcatgctgtgcacagtatgctagttggccttagagtaatacagggtacaccatttatgtccagttaaccaggtgaccctctagttgctttattaagcacaggcttgactgtcaaacaggtcacaaggaggacaaaaagtgtccttgcatcgtatgaaaagagttgcttgaaatcacagaataccctctattaattgctaaaatccaatttccacctgaagacatgcctccatgactcgtgagaaaaatcaattatttaggtaaataggatctgcaactcaaacactcagacctattagagtatctagcagcatgccaggagatagactgagctgcaagataaatatggaaccatcttgtggaatataaatttcagttaaaggttttaaggagtatataataaggaaagcattgttttatattaaaatgtattcaattatattatgggatggaactgaaagttcacatgcagttttcagatgtgtcccccaaagttaatatatttcctgggtactcattcacactcttctgccaatagtattaatgctttgggaaatgtttgagaagtgttgttccagtggaaatgagcctgtgggttcactgattcatttatccattcattcatttattccttcatacagtatatagctttcaagccacttttatggactattttattaactttgaatatcaaaaccaataaaatagactttgtgtctgctttgtgacacaatttaatgagtaacaattttttttttttttttgagaaggagtctcactctgttgcccaggctggagtgcagtggcacgatcttggttcactgcaagctccgcctcacgggttcacgccattctcctgcctcggcctccggagtagctgggactacaggcgcccaccaccatgcccagctaatttttttgtatttttagtagagacgaggtttcactgtgttagccaggatggtcttgatctcctgacctcgtgatccgcctgcctctgcctcccaaagtgctgggattacaggcctgagccatcgcgcctggccatgagtaacaatttttaaaataaaaataaatagcaaatgatgagtaaagtacaacaataaatcaaacaaaatgctattaggaccatatggcagaaaaacaacagaatcttagaagagttagggaagacttcccaaaggaagtggcaattaacctgagatttttaaagatgagcaggagaatttcaggcaaataaaacttgcagtggggttgggagtaggtggatggaccatgatattccaggtgaataattgagcactttagcttgggaggagggccctaaatgagaaagtatatgacctatttcaggaactgaaagaaatttggaatgcttggaatataaagtgtggggcaaatgatggaggacaaagaggcagcagggataatatagtttggctgtgtctccacccagatctcatcttgaattgcagttcccacaattcccaagggtcatgggagggacctggagggaggcaattcaatcataggggcaggtctttcccatgcttttctcatgatagtgaataagtctcacgagatctgatgattttataaaggagagttcccctgcacatgccctcttgcctgccaccatgtaagacgtgactttgctcttcaagtactttctgccatgattgtgaggcctccccagccatgtggaattgtgagtcaattaaacctctttcctttataaattaccctgtcttgggtatttctttattagcagcatgagaatggattaatacaaggcattagagggaaagagtggggagaggtaaagttgaaagacaagcaagaagcagatcatgaaacgctttgtgagccttgttagtgagtttcagggaaatccctctaactgcaatgtggaaaatgaattggaaaagtcagaagaggaaaattcattaaaaggatgtgaagtaattaaagggatttaggataatggcctgaactaagatggtggcagtgggaatgaataatatgaatggactgacaggattttttttgtattttgactcagcaggtgttggtagcattagatatagagagtggggaggaagaaggctctaggcatgatgctcagattgctgatttggttaaaggaagcagagaaagatacatctggagaggaaacaagaatccccactttttgttttgttttttccagttcctgatagatagccatgctcaagtgtcccagtggcagttgagtatttagagtcaaagctcaggggagaactctagctggtgataatgatttgggaattttggcataaaaatactcatttgaacccagggaaatgggaggtaacatccaggataagcttgtagaaggaagagactgtgtagtaggaacacagggaaagatatcaacaccagagaggaagagatgctttgcttgagggtgtactctacatttaaatttttctctttgagagaagaatcatgacaataagaaatttgatttattccatatttcagattgttttgaaagtggtatgtcactaatgaaaggagtgtgaagtgaatactgttgacattcctgagaaatgtatctggggggccttaaaatctgtaaatatcataaatatcatacgaatcctaagaaattctgggatttaaggatgagtgggagacttaggttcttggttctgtgttgtaagtcattctccaagtgtagcaggaccatagcactgatgaaaatgatttatacagtagtcttatgatccaatgcccatgtatgaacaaaggttactgttcctgtcttctaaattggggttcccagtgtaatacaggaagactactgtgtgctagtaaacagaaagcacaatccacatttgaccatattttcctcgttggatgtgtttatggatatattttattctgcttttatctttctgagattaatgccttatctggccttttttcctatgagtacctttggttataaagaacttcgcattgctacattatcaattttcagcctctcttttttatttttaatttctttgccacctcttcttaatacataatgctctttcttccttcgttcctccccctctctgtttcttccttcctcctttctttcttgctttcttctttcttttctttattctttctttttttttttttttcaaggtcttgacgtgttgcccaggctggagtgcagtagtgaaatcatggctcactgcagcctcaacctcctgggctcaagcaatccttccacctccgcacccccaagcagctgggactacaggcaagggccaccatgcccaactaatttatttttgtttttcatagagatgaggtctcactatgttgcccaggctgctctcaaactcctgggccaagtgatccttctgcctcagcctttcaaagtgctgggattacagacatgagccacctcacccaaacttttctttttttttgagagattcttaaactagattgtacttacgataaatgttgactgattcattaccttcaacagtgctttcagcctctgatggttcagagaaatgattgtgtatactttatatttcacctgaatcaggtttcggttgagacaataattttctgagtatgtctccacttcacaaaattaatttattttcaacttttctctagttttaccactgttttgataaataatcttacagtggaggaagacttattgaaacaatttcatcacttttttttctcttgtttgcctcagagtatggttgattcattctctccctaggttggagccattgcagaatcaatattttacttttaactgactccaaaatatatacattctagctaagtactttcagcactatgagttgtccttcttttaaagagaaatttttttaaaatgatatcattaaaaacaagccattccatgatttattgtataagagaagataagtacggagttgtaaacctgcaatagaataataccctggatatccaccttcactgatgagtttaactgactcattcttacctgttaaccaaatgcttttgagagtcaaaggcagggtctgagaggaattatcaatgaatatttgtaatgaatcattgaggtcgcttgtgaatagttgaaacttccaatattaaggctgtgtaggccaagaatctagttatcctttcagaaatttttttttctgaccacctactctgtgccttaagcaaaagtacctgcccttctttctttcttttttttttttttttttgagagcatggtgtggtctcggctcactgcaacattcgcctcccgggttcaagcgattcacttgcctcagcctcctgagtagctgggattacaggcgcctgccaccaagctgggctaatttttgtatttttagtagagacaaggtttcaccatgttggccagactggtcttgaactcttgacctcatgatctgcatgcctgagcctcccaaagtgctgggattacaagcgtgagccaccatgcccggtcagtacctgcccttctctaaaggcacttgcttgcagtctttggaggagataagctttgatcaactcatcaacctaatggcaagtatcatttgacttgagaaaagataagaaacagggttctcaatagtgtgatctacaagatagacagcagtcagtagacgcttgcttctctgaggaagtgactcttggaagaattagtaagagctaggtgggcaaattcgggtaagacagaaggttgagaaagatgttttcagagaaggctccacaggaacatagttcctctcctgctgtattatggagagaacatggagccttcagagatataaaaatgtcattgtggctggaatgcaaagatgaagggaaagagtttgaattgaggaagggatcagagcatgcaaggatttaaagattactttaagaatttggtgcattatactcattaaatgatgtttgccacttgggtcaacaaacattctgtaaaggcttagatagtaagtattataaatattgcaggtgatatggtctctgttgcaattactcaactctgctgttgtaagggagaagcagatataaacaatatgtatgtgtgagtagatgtttccataaagctttatttacagaaacaagccatgacagtatctggcatatctcctgatcagataaatcctcatgttgctgccttatttcccaatgtctccgtttgaactagtgcagggatattttggagactttagcaatgcctagtcagcaagcatcagtgtactttagacattgaaaatcgggttaggaaaaaaaaaatatggactgctttgattttcctttgaagtaatgtcacaagaagaaaacagcaagctggttcatttgccaaggaaggaagagcatgaaagacaaaatgaaatgccagtaactaggtactagaggaaaggagtgctaagaaaatgttcaaaagggatcttgaaaagcaaagatcacttggtagatgaacttgttcaaagtgttcgctaactcacctcttgcaagaacaaactatcttgcaaggctctactgcaacatgtctgatacacagcacctgcagtcaacagactctgtagttgcaaagtattgagttttgtgctcaagctatagaagttaatggactgtcataacattgttcagatgaaacccagcaaagcttaacagactaaggtggattttgcctccccttttaatccagtgctaatttctttgagtaatctcagaaaacttttttatgctaaagtgattcatttataaagttcttgtcaaaacaaccagtgtatttaaaatattttggaattataatacaggacacaaatgaaagaagatatttatactaggcagatgggctaggttatgctgcaataatgaacaaccccaaaatcttagtggttgcaaacaacaaacttttttctcccactcacaatacaggttcatcatagtcagcagggggctccaggaatcataattgctgatatagccacctgacagatcagtaacctcagtgtagctggtggccatgagaaaaggcgataatcatctttcatatcaaatattagaacaatgcaagagaaatatggtgattttactctctatatcaatatcacacacactaacacttggtgtgcattttagaatatcttgctggttcccagtaaatatgtcaactttttgcactatataccgcttgaaatgtcaatactgcacaaatacgcgtagtctgctgacagtaacctgccaggttctagacttccatattgattactgttagcaaaatgtgtaggtgaaatttttgtagggtacgcacgtgaccattcacagaaggcaagaggttctctttggaatttaattttctgtgtgaaaaataaatcacttttttgtgtgtgtggaacatttctcatggaataatgggtcatattaggttaagtttaggaaactgatgtttattgagctgtgcacatatctgctaaaggaatttcacatctataaataaataagcttatttttccatggtgtcagagagataatgagactttcatataaaactatttttgccagctgaaatatcatgattgttattctaatatttcctccacaaagacttagtgaactgcatgtccattttagaaagtaggagtagatattttaattttttcttgcttcttgagaactactatcaacaataaaaaaagctttgattttaacgtgtatatcttaagatttcttttgatcaatactaatgaaaataaacctgaaacgcgaatcattggacaaatgtgagatttttcctttaatttatacattaattgatgtaagatagtatttagaaagtttcaatcctttccagttacaattgtaattgtcacttacctcaaactaaacaaacggactctttcccatatttttctacttggtgaaggacattctaatcatctagatgcctaagtcagaaacctaggcatcatcccttcattctttctgttcctcacagtcacacttaattaattgaacgattttcggtccctacatacttcctgatttcctcccctgtgccctactgcttctctccctaactcagataatgatttctcgactatcctattttaagatcaggctattttgtctccttgcaatgatctctctataacctagtaatatcaagccctaatgaaaagtctttggtcggcttctgtcacccaggataaacgtgaaactcctgagagttggatctacttcctttcagcatctcacccttgcctgcacttctagcctccactctcaaaactctttcacacatcatttgaacctgagacattaaaaatgccttccagggcttggtgcagtggcacacacctgtaatcccagcactttgggaggccaaggccagcagatcacttgagctcaggagttcgagaccagcctgggcaatatgcgaaaccccatctctaccaaaaaaaaaaaaaaaaaaaaaaattgctgggcttggtggttgagcctgtcgtcccagctactcaggaggctgaggtgggaggatcccttgagttcagaagttcaaggctgcagtgagcagagattgagccactgcactccagcataggtgacagagccagagcctgtctcaaaaagaaaataataataataatactgccttccagttcctccaaaataacatgtctttccttggtaaatactcttcttactgctttcagcagacattcaacccacaggtcccaggtcgttgactcattctcatctcttaattgctagccaggcctttgggaagccgttctctagttcctactcagttaggcacccaacctctctgctctcatagcacataggctgtccctctaacatagcatgagtcacacgctttccaaactggtgtttacctgcttgtcttctttactgcattgctccttgaggtagcaaggatgtcttctttattagcttttttatactgagaaaattttaaaatacaggaaaagaaacatgataaaatatatacccacattcctaactcatagaaataactgttgacattttgtcatgttttcttttcttactagagaaagaaaatgagataaaactaacctgcatttctatcctacttttctgcctgtcttagaggcaaacaccaacacaggtttgttgtcaatttccttcccattaaaaatacttttacatacctactgtgtatctatagccaacagatcttatatttatgtggtgtttgcgtttttccaattttagaaatggtttcctacctttcttaacctacgacttctgacaattttatttcaaaattatgccaatatgtatagatctcaaaaacataacattgagtgaatatgccaataggtagaatgtcatgtaaagtttaatttttgtcaattttatgagtgaaaattgtatatcactgttgtttttatttacctttttttaccagtttttttccagttttgttttattattattttattttattttattatactttaagttttagggtacatgtgcacaatgtgcaggttagttacatatgtatacatgtgcctgctggtgtgctgcacccattaactcgtcatttagcattaggtatatctcctaatgctatccctcccccctccccccaccccaccccacaacagtccccagagtgtgatgttccccttcttgtgtccatgtgttctcattgttcaattcccacctatgagtgagaacatgcggtgtttggttttttgtccttgtgatagtttactgagaatgatgatttccagtatcgtccatgtccctacaaaggacaggaactcatcatttttttatggctgcatagtattccatggtgtatatgtgccacattttcttaatccagtctatcattgttgtacatttgggttggttccaagtctttgctattgtgaatagtgccgcaataaacatacgtgtgcatgtgtctttatagcagcatgatttatagtcctttgggtacatacccagtaatgggatggctgggtcaaagggtatttctagttctagatccctgaggaatcgccacactgacttccacaatggttgaactagtttacagtcccaccaacagtgtaaaagtgttcctatttctccatatcctctccagcccctgttgtttcctgactttttaatgattgccattctaactggtgtgagatggtatctcattgtggttttggtttgcatttctctgatggccagtgatggtgagcattttttcatgtgttttttggctgcataaatgtcttctttgatgaataatgagatttaactttttcccattgaccattcacatgttcccaactctgaatttctagtaaattcatgtttttccagagaatgaaagagtgaatggccactgtcttgaggaaatgggagtattctagatgcatagtcaggcagtgtgattagtatagtgcaagaatggtaggaaaggatggagaggacaatgggaaaacaccttgctaaaaagtttggattttgtcttctagtgatagaaatgtactgatggtccctgacatgggtaacagctgctttagagctgaatttcaagaatcagcttgtgaacaatgctttggagattaagacagtaggaaggagaagatttgaagcagtaaagtgatttagaaaactatttcaatggaccagacaagaaatggtaatggcctgaaatgagtggagggagtggaaatgaagtcacatggctgcagttgccatttattggagaaactgaatttcagggatttggatcaggtcaaggtatgttatgcacataaaccaaatattaatgatatttatttagtgtgcaccagtgatatttgttttttccttcgctaaactgaagattaaggcaatcagaacctagtaaacattgctgaattcaccattgtatcccccagtgctaatacacaaaaagtatacaatgaattctactacctacctttcgcagtgtggctatccttgcaaatttcaccctttcccttcctttcagtcattcttgtttccccatgctccatagatcatttagccaccacatctttttgtgttattttgttttctgcaatgatgctggtataattcagaactactagcaaaatctcatctctagcttcatgtgatattttcctgcttataaactacccatattcttgctgtgctatagtcaatatgtgtaactcttctgaggcctcctcattcattgcagatgtttgcaaacttacctctcttcttaagggcccattcgtatgtacttaaataggaagatcatcagagacaagtatccacatgtgaactcccttagctactgttcttttctctaaatttctctttttctctgttcaaaaaatttccaactttcaactttgtggacacttctggaaaaaaagaaagtcgtgtcttaccaattttgcagaattgaattacaagtttctcatactaagacatttttctatggaagaaacaaggttcttttgtagagatgagaatttaaatgatttttttttttttttgcaatgggaagagagatttctcactagtcttactggttttcatctgactttatagtttaaaattgatagccattttgatggcaacacacatggtttagttaaattttactccgtcctcagttttcctgagggagtgtcagctactgtgttttctttacaaaacaacataaattccatgtatccaccctgggaatcacttcactgcgttgaatctggataggaaataaagattcatgaatatttcacaatttactaggaaccatcactttcttgctcttccgtgtggattttctactaattagttacttggtatgtctaagatacgttatttttattatacaaagactgtatcactttttattcctttgatataaatcataatacagtgtctgataagtacagctttttaaaaactcttttcatagactgtcttattctttttagatttatgcccatgatgtgcatggtcctgaatgtggaatgggtctctctgaagaaaagtgggtcagatggttgcttgtgcatattggaaagaaactgatagcttcctggtctcttttgaagggtgctgttgtaaaatacagattagtcaaggtttacagtgctgttactagcctgaacacttcaaaccaccatgcagtttaaaactattcagtgcttatggcaaaattcaggtcttttgatgttggggcaggagtagacattttattggaatgtaaggcaaaaatagagatgaaaacattgaatcatttttggtggggggattgacttaccttaataataattttttatacctttaaatccagaaatgtcaagaaaatgacacacaagaacaaaacaaaagaaaaattcagtttagagcctgcttaaaaatctgacattgatcttccaatgccttaaaaatgtttttattatgaaaaaatttgaacatataaaaaatggaagatatggtataaggaaccctcaagtacacattacttgcttcaataattatcacccatcaactaattttttttttcatctgtaaccctaccaactgttctcctttcccactggaatattttgaagcaaatcatcatatcatataatctgtaatctgcaaatatttaagtatgcatatctaaaagttagaattctttttaaaatcataatctcagtataatgacacactaaaaaatgaacaataattatttcatcccatcaaatattgacaagctattattcttttactatatattggctagaattttatgtaaagaaaagcttttcaccattgactcttatttacctacaggtagaattcaaacaggaaagcagatcaaatacttgattctttctttttatttcccagtttttagaaaaaatgagttggtttactagtatcctttaatgataaccagtttgctttttgtatctctatgaactcatagattttaaatatatttgatatgtttcgattcattgcagttatgattcttttcaataatcaaattgtctcatctttggttggtaagagtgtcttcaacttggctttctagtcctttaaactcagttttccttaatgattctcatgcttttcagtgttaagatgtggtaggattgttttgcatatttcctgtcctggttttagaaacagtcatttcttggaggagccctggttccttatagtgaaaaagggtatttcaagaccacaggtcggtagggctgttcactgttaatatgtaggttgtttctaggtcttttcagtggatcaggtgggaaatatatatttcaaatagagaaaatacattatagtttattctgacatgcccatttaggaatatgaggcttatagttaaattcattaatttcatatttgtatcttttttctcatccactgaaagttttgattcctaataacttatttgctctatcatagctctctatatatcatttcataataataatagaaatattatcatatacaacatagtggctgaaatgactttgaaagatttcttagccacgattttatatttataaagcatcccactaggcatctacaatcaaattacctttttttaaaaaaaaatcacttgaaaaaattattttatggttaagccaccaaacaacttcatttgcttcatttgactttttgcctgaaagtattttaaatatttgttttataatgatgtaaaaacttttacatagtttcaaggtcaaatttgcaaaataagttatattcagagactagactctctagatccattcatcctgttttcttcctcactaatgtgtaaccattttatttagggttatctttccatttgttagaaatattatatatataaatagtttgtttaaacagtccgcttaagaatatttttctagtcttttgctgctacaaataatcttgcaatcagttgttttgtgcacgtgtcttttgctttttgtcattgcatctttaggatagtttgtttttttttttttgttttttttttttttttgaggcagagtctctctctgtcacccaggctggagtgcagtggcaggatctcagctcactgtaaactcttgcttcccaggttcaagtgagtcttctgcttcagcctccctagtagctaagactacaggcgtgtgccccacacctggcttttctttttttcgcatttttggtagagacgggtttcaccattttggcgaggctggtctcaaagtcctgaccttgggatccaaccgcctcggcctcccaaactgctgggattacagttgtgagctaccgtgccctgccaggatagatttctaaaagtgtgattactcagtcaaaaggtaaaagtagataaatttattagatgttgtcaaattcttctttgggagtaatgccattttccaatcctaagatcagcatgtgagaatgtgttctgtttccataggttctccaacaaattatattgccaaactttatgttccaaagctttgtggggatatgtctggtagttgattggggcagagaaaatgagaaaaacttagtatgaagaaaagagtcttaggcttgaaattaagacacaggtttaattcttgaccattgctgatcacttgtttcaccttagacaagtcagccaacttttttcatctgctccacagatctgtggtaaggattaaatgagatgacatccatgaaacatatgacagaataccttgccatagtggctactcagcatgtaagttttttgtttgtttctttgagacagagtctccctctgtcaccaggctggagtgcagtggcgagatctctgctcactgcaacctctgcctgctggattcaagtgattctcctcccaaatagctgggattacaggcatccggcaccaggcccagctaattttttgtatttttagtagagacggggtttcaccatgttggccaggctggtctcgaactcctgacctcgggtaatctgctcgtcttggcctcccaaagtgctgggattataggcatgaaccactgtgcccggcctagcatgtagtttttaaaaggcaaagcaattgaaatttgtaaagcatttggatatctacaaaagttatttgacgagaacatacaaggggacatctcttatggactggtaattttaggattgtctacttgatgttaactaaatatccttcctaatgccaaaccaacacatggggtaagaataagtgatgctggactaaaaaaaaaatttgatttctctatcaaatgtacttttaggtaaaaaaaaatatgcaaagtataaaatatttgtatgggcaaatgttttactaagggtgtttgggttattttctattgaacaaaacctgctaaaccagcataagatgcactgaactaaagtgcagcagagatgctactgtcagcaagagaaggattcaaagagaggaagcccaatccgagcattacctggacaattaaacagtcagttattgggattttcacaattcttagcttttttaactttcacaattcttagcttttttaactttgagttttaaaaatcatgatggagagaaatttagttcttaacttttattttctgggcttgatgaagattgaatttcatcagagatgagctaaacaaattaaaactgaagcatttaatttagaaaactcaaatttcttcagcctaaaattgttcatttaaacaagtttgttagattctcaaattaataggatactgaataaatatgaaattattctttcctggaaagttaaatggaaaaacaggacagaatcgctattttataactaatacatattaagtcaagaaatagtaaaggattatttgtcttcaagaaaacatcctgtaaagaatggcaatgttggtggtatatagatgtaaaatgcttaaaaagaatgattatctagaagatgttatacatgttataattatctttaagtctgccttctctaattctgtaagttaaacacaaatattgatactttaatttttaaaatatttttaaaagtagctgaaaatggggctccatccttcaaagttctaacaatacaatttatagtaaagaatatgtatgagaaacatttgttcttagaagttcagaaaaatcaaatatataatatgaagatagaataatgtagagaagttaaagaggagaaaggggtgactgattctgaatcaagtgagttttagcttcttttaagtgaaatcatgcatgctcctcacatatgctaatgtataaaacatcaatttatagaatagtatttgaattacctgcctaggctttgcaagcctagacctttgaatttgcattcaaattcttgatgtacattttctagctgggggactagaaagcaagacactttcctttcagtaccttgggctccccatctattaagtggagatcattaaaatctgccttgcaccgctgtcctaaggatttgagataaagcatacaaagggcttggcacatagtaggtgctcctaaatggtaactttattcttcacatcaggctttgcttatacttataaaagccagttttgtagataatttgctgaatagaactaagaatagttataaatattgggttagtttatttgagctgctatgataacataccataaactggatggattataagcaaagataatttatttctcacagtctggaggctgggaagtccaagaccacagcagtggcaaattcagtgtccagtgagtacctgctttcctgtttatagacagcacgttttttttctgtagcctcgcatgatgaaagggagcaagagggacctctttcagacgctggtcacctccctaaagccccacctcctgatatcctcacattggagattaggtttcaacatatgaattttagggggacacaaacattcataacatagaaaatacatattattttaaaatgctttcttattctttattatgaccactattaaaaccaaacagaaaactgtagaactagccaaggtatcttacagagatatgtttcagaggagtgtttattagattctgttgtatacactatttgtttagctttttctgttttttaggtcctcggcctatgctattacagaaagaatattactctcttttgtatttactattggtttcctgagggaagcaattattttaattattgattatttatggtttaatggggaaccattgtattctaactcacaggaataaaacaataacaaataggatgcatgcaaaatatctcataaatgtgtacctaacaaataaaacatacatcttcaaatacgaatatgcatttagagcctggcttgctgtctgaggtcttaacttgttctgtgcttcaactccctattataatggatgctacacatggaagctcttgggtcaccattggaggtaatagcgccctatagagttttgtgtctgggaagaagtggactttgtagttaggcgattaaatatttaccagcttgccttaagccaagtacatgttaaaggactattttgtattattattttgtttttaaataggcccctttctctcatatttatcttgccttaattagggagtttattgtttattaaaaagctttaatctgaactactttcattgtgtgggtgtgtgtgtgtgctgtttgaaacaaatgaactaaaaatgtttttaattgagctgcaagtgaagacttgtcaatacataaattatacagtattatatatctctatatatgcataaagaggatattttaatcagcacatgtccctgtatttaaaagttaaaagaaccgctctacagagctaagaatacaggtattttaattttttaaatgattataacgggggaaattccactgttgtttctttagtgtttgatgagggattgtaatctaatcagtttaaacgactataaacacagcgatgatcatttaagttggattttgattcgaaaagtaagttcttggaatttagggtattgcacaatctgtcccatacaggggaaaaaaaaatcacctacttgtgatttttactaatttttttccgtgagaatagaatcctgctgggaagcttattttattctcttagatttgcttcctcctttttttccccctccggagaacgatgactggtttacaaatagcaatttatatcaactgacacagtcctttttccttatactgttgatctcagaactgttctgcagtcctgaagtatgaaacactattgccattttttggtacagccagtgctctaaaaaatgtaaatggatgaaagcgattcaatctattatggaagcagaaacatcttcctatttgctttacaaatttttccgagtaaaatgcagtcaggtttgtaacattgcataaaaacttgttttagaattctttacactaaattaaagatgataaagcaatctgcttttcatactaaacagtgaagtgaaaagcattattttaaagaaatatttctgttttgttagtgtacgaaattctgtaatagtggctaacttctttaggaacctttttaggtgaaacttatgattgactatgaaatctattctaggacaaaataaaatgagaatagaattatatgtctaattaaatgatatatctaggcaaactaaccattcaagttttaatttttatgaaaactttctatgtgcccctgacatctgtacatgtgtttaatttccagtgagctcaaaatacttcaagtgatctcatttgagtattaactagggaaatacattcacagtccagcaattttcttttatgtctacattattttaaatcatagcatagattttccactgtgctttatgaccagaacacatttatttgcaaagtattttcacttaccttatattgtagtatgtagtataggacaattgatacggtcaactgtttaaaacgtcagatgcaatgatagagccttagcatttatagatgtagcattcacagttgcaactctttcagtttcagacatttgtgaggaatctcataggtgtgtaatatggtttgaaatttgtgaggacagcaattcgtgctctgactctagtcattggcggccagtgagcaagcgcaactgatcacccagtatcaacttcacaatgtggtttccactaatcggcaccttatattaatttttatgaaataataaaaaccttatttcatagcaggagcgggtacccaaaaagtagttaaatggctaatcctttacagtttttatgtttttggaaatttgtgatctcaagactatccctcaagaatgtcaaggttttgctgaagttaaagacatttgttattctgtggtcagattatttcagtagttgagatgtagtctcacattaagggagaaatctgcaaactagaaatggtttgcaaatggcaaggcaaagcattcaaataactgttacatgtgataaaaatctcttttgggtttcaggatgacaaggtacagggcccagggactggcatttaaagagaactcctatacacacacttaaattcaacaaaaaagtctgtattctataatatccaattaccttaattgtgtagtggggaaaatgaagagttgaatttctggttagctagactagggtaggaagacaccagctctttgtttgttttgtgctttgacatttcaattttcccgcttggctttgtccttctgtcttcccttgacattgatgattttgttgtaggtacgtcacctccttgaatctactgatatgaagagaaagctataactaaagttaagacaatgttaaagtaaggtccaattctcagttatctacagggctatccaaaagaaaaatggaaatttcatttaaaatagctgcatcttttaagtaggaatattttgggctattatatgccagactcatcactggtgctatttaatttctcctcccatcaatgagagctctccctgagacacattgtgagatctttctgaggatgaaatcacttaaccccagcaacgccactgattattttcagctacaacaaccacacttctatgcacacacatcaatcacgccaaaaaacattctgactaaaaagctcaaaagaaaataattaagcattctcttttccatatgaagatattactgaccagcagaaagtggaaaaatgtatacataatgtttatagatactgacttaacaatgagtgaacagttgcgtctcacaaatttcagcagcgttgtcttgacagtggatcatggtgcttctgtgttgctaggcaacccgaggggatggaaaatttaaactcaaatttacttatgtatgttagattttagacatattatattgagagtgtattacacatgtcattacaggctagttgtacatttctattctgtcttttatgtgagtttctcagtatatacatgaaagacactctgcctgtatccttgctcctctatttttgaaaattaacatagtcctaatatgcatttttatggttgacagtcgtggtatatgagagaaaatatgtagcctttgatgtaaaaagattgtttttaaaaaaacataaactttacaatatatgcttgtgtgtgtcagtcagagggggaggtggagagaggcagtgtttctgaaacaagagatctatgaaagaagggaacagtctgttagttccacctggttcttctcatttaattactataattaatatatgcagaagaaaaattaatagggttcttaaatccagggagatattaaatgtcaaaaatgtggatatttgaattaaagactaatcaacttgaacaatacattataatgttaaagaactggtagcatattaatttcaagtgagagttttaaacttgataactgcagtggttttgtgaatccaattttaagagttaaatgttgtgtcaatgccatgaatcagagaatagatatttataacaaaagatctgtatgaaatgatgcataatagatggtgatggctgaagctgctgaaaattgatggtctaaatcaaaaggatggattaggaatctttgcggaattattacagacctgtagttttgtgagaaaagcagagaatgtcaaggtcttttacttcaaggaggatttgaagtatttgggggtatacattattgcattagcttagtcagtttacagctagctagacagtgcaaacttgtgaaggaggatgttttcagtatatcacactaggatcatggcaccagtcctgaagaaatagggggaacttttgatctccatcataccatatacacacctatgtgtgggaatgctaatgggatagaatctgatacagttagggtctgaaacactacgagttcttatggtactttgattcaatatttagttgagtaattcttgttcacttatttgtattatcctcattagattgaacctgtataggtttatctttgaaactaaagattaaattgaatttaagttctactgtattttttatcaagattatttttaaaatagcttgtatcacaggaatcctgagtacatacctaatactatcctctactgtatagaaatttagtaataatgaaaaagtatactcctggatttggttttctgggcagagaaaattaaaaactttaagcaggtatcatgtagaataacatactcaacagatattattttgtgggtgacaatttttatagacattatatgtcagatgaaatagctaattaacattaattctattatatttaacataacaccctatatacctcggtgaataaagaagatttctaaaggatgagtttaagaggtattgataaggaccagatatttagtaaagaaatcccatgattccctagatttgtgactcttcagtgacacatttaattagttaatgctttgtgaatcccagaattctttgtatatactgtgatataccatatttttgtcatagtaacaacaatttaattctgattctcctatagatgaatctctgcgttctatctttcatgctactttgaattcggtttttaaaactgaatttaaatatcacagtacttatcatatgatattcaacaacctgactgttttccattttattttattttatcaacttttattttagaatcagggagtacatgtgcaggtatatatcacacaagatatattgtgtgatgctgaggtttggagtacaaatgaatctgtcattcaggtagtgggtatagtacctgataggcagttttgttttgagacaaagtctcactctgtaacccaggctggagtgcagtggcacgatctcggctcactgcaacctccacctcctgggttcaagcacttctcctgcttcagcctccatagtagctgggattacaggtgcctgccaccacgcctggataacttttttgtatttttagtagagacagggtttcgccgtgttggccgggctggtcttgaactcctgacctcaggtgatccgcctgccttggccttccaaagtgctgggattacaggcatgaaccaccgcacctggccccagtaggtggtttaaaccctttctccttctctctctcccctctgttgtattgcccagtgtctgttgttcccacttttatgaccttatatttttcttctttaaatcagtaattttttatgttgttaaaatcaatttttgcagagattagaatgtatttggcctaatttctcattcttaagtaaaacaaaataaggacataatttatagacttgacatatactgattttttggtatagatcactaaataagtactgaacttttttctttaggacgtttagagtttttgacaggtatatagtcaagccctgctctcttttacttcctttttattctctctgatgatttgtatatgaattcattctttattgatagtatcaacatgacaaaacatacaaggcctttgtcctaatggatcttataaatctaatgcaggaggcagacagtaactaaacaatataattgtatatgcggtaagtgctatgaaggaattaaacaaggtgacacaacagaaagtagttgtgtcgggcaattttagataaaatggcgagtgaatgctgtgcatggaggtgacatcttgccagagacaggagaatgagaaagagtttggcatgtgaagatcggggaaatgagcacatggggcagagggagggaaatgtgaaaaggcatgatggtggggagtgtttgaggggtgagagaaactatcatcagagtaacaggcaacctacagaatgggagaaaatttttgcaatctatccatctgacaaagggctaatacccagaatctacaaggaacataaacaaattcacaagaaaaagcaaccccatcgaaaagtgggcaaaggatatgaacagacacttctcaaaagaagacatttatgtggccaacaaacatatgaaaaaaagctcaccatcactggtaattagagaaatgcaaatcaaaacgacaatgagataccaactcatgccagttagaatggcgatcattaaaatgtcaggaaacaacagatgctggagaggatgtggagaaataggaatgcttttacactgttagtgtgaatgtaaattagttcagacattctggaagacagtgtggtgattcctcaaggatctagaaccggaaataccatttgacccagccatcccattactgggtatttatccaaaggattataaatcattctactataaagacacatgcacacgtatgtttactgcagcactattcacaatagcaaagacttggaaccaacccaaatgcctatcaatgatagactggataaagaaaatgtggcacatatacaccatggaacactaggcagccgtgaaaaaggatgagttcatgtcctttgcagggacatggatgaagctggaaaccatcattctcagcaaactaacagaggaacagaaaaccaaacactgcatgttctcactcataagtgggtgttgaacagtgagaacatatggacggacacagggaggagaacatcacacactggggcctgttgggggaggggtgggaggcaaggggagggatagcattaggagaaatacctaatgtagatgatgggttgatggctgcagcaaaccaccatggcacatgtattcctatgtaacaaacctgcacattttgcacatgtatcccagaacttaaagtagaaagaaagaaagagaaaagaagaaagaaagaaacaaagagagagagagaaagaaagagaaagaaagaaagaaagaacgaaagaaagaaagagagagagagaaaggaagagagggagggagggaggggatggccaatgtgactagagtgaagtaagagaggggaagaatagtattagtcaaagttgaaattgaagacacaaactggctattcaagactttatgcctgtgatgtggccaggcatggtggctcacacctgtaattccagcactttcggaggctgaggcaggtggatcacttgaggtcaggggttccagaccagcctggcaaacatggtgaaaccctgtctctaccaaaaatgcaaaaattggccaggcatggtggcacatgcctatactcccagctactcgggaggctgaggtaggagaatcacttgaacctggaaggcagaggctgcagtgagccaagattgcaccattgcactccagcctggccaacagagcgagactctgtctcaaaagaaaaaaaaagtttatacctgtaatgagatgagaagttcagattttccagtgtgtgttgtataaatgaaggacccaattttctcagacagaagataaaaggagttgaggttcgtaacgaggtgattttaaggatggatcatagaatcatcaagccaggaaggagagagtgaaatcaaggagaaggtgatggataggagaaaggaccctgagttattataacagagtccaagagtcagagagctgcacagatggggtgggatatgccaggtcaaggaaagggccatgggagtgggtgcctgatgcggagaggaggaaaagaggtcagcgaggaggtaaagagcctgggcacagtcatgttggtagattttacagttacataaggagaggtaggaaggaagatggcgaaccagaaagtaagtcattaataatggctggaaggtggttttatgagggatgtggattttcagagagaaagagaaaactgattaagaagtagcatcaaagaggagcaaagttgatgcacaacctatctctagatcttgaaggtcttatagaatattgtttctaagtcagaagtatgatgacagggggaggagccaagatggccgaataggaacagctccgctctacagctcccagtgtgagcgacgcagaagacggtgatttctgcatttccatctgaggtaccgggttcatctcactagggagtgccagacagtgggcgcaggccagtgtgtgtgcgcaccgtgcgcgagccgaagcagggcgaggcattgcctcacctgggaagcgcaaggggtcagggagttccctttccgagtcaaagaaaggggtgacggacgcacctggaaaatcgggtcactcccacccgaatattgcgcttttcagaccggcttaagaaacggcgcaccacgagactatatcccacacctggctcggagggtcctacgcccacggaatctcgctgattgctagcacagcagtctgagatcaaactgcaaggcggcaacgaggctgggggaggggcgcccgccattgcccaggcttgcttaggtaaacaaagcagccgggaagctcgaactgggtggagcccaccacagctcaaggaggcctgcctgcctctgtaggctccacctctgggggcagggcacagacaaacaaaaagacagcagtaacctctgcagacttaagtgtccctgtctgacagctttgaagagagcagtggttctcccagtacgcagctggagatctgagaatgggcagactgcctcctcaagtgggtccctgactcctgacccccgagcagcctaactgggaggcaccccccagcaggggcacactgacacctcacacggcagggtattccaacagacctgcagctgagggtcctgtctgttagaaggaaaactaacaaccagaaaggacatctacaccgaaaacccatctgtacatcaccatcatcaaagaccaaaagtagataaaaccacaaagatggggaaaaaacagaacagaaaaactggaaactctaaaacgcagagcgcctctcctcctccaaaggaacgcagttcctcaccagcaacagaacaaagctggatggagaatgattttgacgagctgagagaagaaggcttcagacgatcaaattactctgagctacgggaggacattcaaaccaaaggcaaagaagttgaaaactttgaaaaaaatttagaagaatgtataactagaataaccaatacagagaagtgcttaaaggagctgatggagctgaaaaccaaggctcgagaactacgtgaagaatgcagaagcctcaggagccgatgcgatcaactggaagaaagggtatcagcaatggaagatgaaatgaatgaaatgaagcgagaagggaagtttagagaaaaaagaataaaaagaaatgagcaaagcctccaagaaatatgggactatgtgaaaagaccaaatctacgtctgattggtgtacctgaaagtgatgtggagaatgaaaccaagttggaaaacactctgcaggatattatccaggagaacttccccaatctagcaaggcaggccaacgttcagattcaggaaatacagagaacgccacaaagatactcctcgagaagagcaactccaagacacataattgtcagattcaccaaagttgaaatgaaggaaaaaatgttaagggcagccagagagaaaggtcgggttaccctcaaaggaaagcccatcagactaacagcggatctctcggcagaaaccctacaagccagaagagagtgggggccaatattcaacattcttaaagaaaagaattttcaacccagaatttcatatccagccaaactaagcttcataagtgaaggagaaataaaatactttatagacaagcaaatgttgagagattttgtcaccaccaggcctgccctaaaagagctcctgaaggaagcgctaaacatggaaaggaacaaccggtaccagccgctgcaaaatcatgccaaaatgtaaagaccatcgagactaggaagaaactgcatcaactaatgagcaaaatcaccagctaacatcatcatgacaggatcaaattcacacataacaatattaactttaaatataaatggactaaattctgcaattaaaagacacaaactggcaagttggataaagagtcaagacccatcagtgtgctgtattcaggaaacccatctcacgtgcagagacacacataggctcaaaataaaaggatggaggaagatctaccaagccaatggaaaacaaaaaaaggcaggggttgcaatcctagtctctgacaaaacagactttaaaccaacaaagatcaaaagagacaaagaaggccattacataatggtaaagggatcaattcaacaagaggagctaactatcctaaatatttatgcacccaatacaggagcacccagattcataaagcaagtcctcagtgacctacaaagagacttagactcccacacattaataatgggagactttaacaccccactgtcaacattagacagatcaacgagacagaaagtcaacaaggatacccaggaattgaactcagctctgcaccaagcagacctaatagacatctacagaactctccaccccaaatcaacagaatatacatttttttcagcaccacaccacacctattccaaaattgaccacatagttggaagtaaagctctcctcagcaaatgtaaaagaacagaaattataacaaactatctctcagaccacagtgcaatcaaactagaactcaggattaagaatctcactcaaagccgctcaactacatggaaactgaacaacctgctcctgaatgactactgggtacataacgaaatgaaggcagaaataaagatgttctttgaaaccaacgagaacaaagacaccacataccagaatctctgggacgcattcaaagcagtgtgtagagggaaatttatagcactaaatgcctacaagagaaagcaggaaagatccaaaattgacaccctaacatcacaattaaaagaactagaaaagcaagagcaaacacattcaaaagctagcagaaggcaagaaataactaaaatcagagcagaactgaaggaaatagagacacaaaaaacccttcaaaaaatcaatgaatccaggagctggttttttgaaaggatcaacaaaattgatagaccgctagcaagactaataaagaaaaaaagagagaagaatcaaatagacacaataaaaaatgataaaggggatatcaccaccgatcccacagaaatacaaactaccatcagagaatactacaaacacctctacgcaaataaactagaaaatctagaagaaatggatacattcctcgacacatacactctcccaagactaaaccaggaagaagttgaatctctgaatcgaccaataacaggctctgaaattgtggcaataatcaatagtttaccaaccaaaaagagtccaggaccagatggattcacagccgaattctaccagaggtacaaggaggaactggtaccattccttctgaaactattccaatcaatagaaaaagagggaatcctccctaactcattttatgaggccagcatcattctgataccaaagccgggcagagacacaaccaaaaaagagaattttagaccaatatccttgatgaacattgatgcaaaaatcctcaataaaatactggcaaaccgaatccagcagcacatcaaaaagcttatccaccatgatcaagtgggcttcatccctgggatgcaaggctggttcaatatacgcaaatcaataaatgtaatccagcatataaacagagccaaagacaaaaaccacatgattatctcaatagatgcagaaaaagcctttgacaaaattcaacaacccttcatgctaaaaactctcaataaattaggtattgatgggatgtatttcaaaataataagagctatctatgacaaacccacagccaatatcatactgaatgggcaaaaactggaagcattccctttgaaaactggcacaagacagggatgccctctctcaccgctcctattcaacatagtgttggaagttctggccagggcaatcaggcaggagaaggaaataaagggtattcaattaggaaaagaggaagtcaaattgtccctgtttgcagacgacatgattgtttatctagaaaaccccatcgtctcagcccaaaatctccttaagctgataagcaacttcagcaaagtctcaggatacaaaatcaatgtacaaaaatcacaaacattcttatacaccaacaacagacaaacagagagccaaatcatgggtgaactcccattcacaattgcttcaaagagaataaaatacctaggaatccaacttacaagggatgtgaaggacctcttcaaggagaactacaaaccactgctcaaggaaataaaagaggagacaaataaatggaagaacattccatgctcatgggtaggaagaatcaatatcgtgaaaatggccatactgcccaaggtaatttacagattcaatgccatccccatcaagctaccaatgactttcttcacagaattggaaaaaactactttaaagttcatatggaaccaaaaaagagcctgcattgccaagtcaatcctaagccaaaagaacaaagctggaggcatcacactacctgacttcaaactatactacaaggctacagtaaccaaaacagcatggtactggtacaaaaacagagatatagatcaatggaacagaacagagccctcagaaataatgccgcatatctacaactatctgatctttgacaaacctgagaaaaacaagcaatggggaaaggattccctatttaataaatggtgctgggaaaactggctagccatatgtagaaagctgaaactggatcccttccttacaccttatacaaaaatcaattcaagatggattaaagatttaaacgttaaacctaaaaccataaaaaccctagaagaaaacctaggcattaccattcaggacataggcgtgggcaaggacttcatgtccaaaacaccaaaagcaatggcaacaaaagacaaaattgacaaatgggatctaattaaactaaagagcttctgcacagcaaaagaaactaccatcagagtgaacaggcaacctacaacatgggagaaaatttttgcaacctactcatctgacaaagggctaatatccagaatctacaatgaactcaaacaaatttacaagaaaaaaacaaacaaccccatcaaaaagtgggcgaaggacatgaacagacacttctcaaaagaagacatttatgcagccaaaaaacacatgaagaaatgctcatcatcactggccatcagagaaatgcaaatcaaaaccactatgagatatcatctcacaccagttagaatggcaatcattaaaaagtcaggaaacaacaggtgctggagaggatgtggagaaataggaacacttttacactgttggtgggactgtaaactagttcaaccattgtggaagtcagtgtggcgattcctcagggatctagaactagaaataccatttgacccagccatcccattactgggtatatacccaaatgagtataaatcatgctgctataaagacacatgcacacgtatgtttattgcggcactattcacaatagcaaagacttggaaccaacccaaatgtccaacaatgatagactggattaagaaaatgtggcacatatacaccatggaatactatgcagccataaaaaatgatgagttcatatcctttgtagggacatggatgaaattggaaaccatcattctcagtaaactatcgcaagaacaaaaaaccaaacaccgcatattctcactcataggtgggaattgaacaatgagatcacatggacacaggaaggggaatatcacactctggggactgtggtggggtcgggggaggggggagggatagcattgggagatatacctaatgctagatgacacattagtgggtgcagcgcaccagcatggcacatgtatacatatgtaactaacctgcacaatgtgcacatgtaccctaaaacttagagtataataataaaaaaaaaaaaaaaaaaaaaaaagaagtatgatgacaaatggtcattttccttaaaataaaatcatatatcactacttactgacttgcacctatatgtacttctgggaaatttagccagcatgtatttccacaatacagggatagtttttgttctgtggactgctaaatgatcacagcctaatgtattgccttctcagtaaacacacgttgacttaaatcagttgggtaaattgtaaactcaattccttactttgactttagtttgcaaattaagaatagtgtacttttcttattttcaggccttatttataattcctaatgctatacactattatgttacagcttgcacttgtattttgacactttctaattattgtcaaattataaatactactaattaatatatccttgattcttcataatattctattaaccagcacttaacacctttttcataaaacacttttcaggatatatatatagttagggcttgttgacactatttcatcttgatttcaatttatgcaatccgaattttcaagtaaaacctcatggaattatcagattcatcactaactttcaaaacttttataacacatctgctgagttttcagacattcattctggaaagaaaaaacatgctggaaagaaaaattttacttactctaatgtgttttattttaaataaaaagtcctataggttatgattttactgtcctctttttttttctgaaaaacattaaggtttctttcccaaagcttattagttaattgtcagtttttatgtaagcccatgaggttagacctatataaggcagtaatttttaattctccctctcttcccacccttccttttcttccctatctcctttattttcttccttcttctttattagtttttaaatatgcatatctctttttataggagaaaggatggataatgattgcagcattctctgaccactctaatatctcaccctagaaattttaataaatgatttactaacattctcatcaggctttttattataaaataatatcaaagaaaacctgctttttaaaaaaatatcttgatacttgtattttaccaaattcatgggtatagataactttttgatttctcattactttcaagtatcttcttcatgtaaaattttaatcaaatttcagatcccatgcttaacacataaaaattaataaattgatgttgagggactatcacattattttatactgaaaagttgttcaattattctaaagttctatatattaatccaaagccgtctctacttgggggaaaaatgtgtgtgtgtgtgtgtatgtgtgtgtataattttttggatctatctatctatgaggatgactgccttattacaagtttcagtacaatttatatatatggattatatctacatatatattttttggttatatatatttttatatatataaacgcttggccattttgtctatttacctatctacctataaacttcagcattttttgtttgggtaattaatattttgaagttttctctcttgttttccttcttgtttggaatgatctgtttgagactgtgtttttaacaaaagtatatgtaagtttgatatacttaaccttatttttcgctaaacaacaacaagaaagaccccctaattttgaaaagtgtccatcaatatcactgtttggcagtttatcataaagattcaatcagtatacagtaaatctataattgaataaataatgttagaagcaaatatcacaggctaggatcagcttaagaaatctccaaaatgtgagcctacataattgagaccaagtgacatttcatttggtgttaacatatactatgtaaaaatggtattatattttcagtgttttaatggaaattttaacatgctttctgatagtttaatatcttttaacttgtgccaatagattgttttagcaagaaatgagtgataatcttaattttattttcttttacccgattcaaacattcttgccttgatcttagaggctggagaataggcagcatgacctctcatctcttccgttctttcctcagccttagtgaagggtgtcccattcacccatttatccacaccatgagccatactgtggatcatccactcagccaccaactcctgcaggtgctgcctctttccaattttacagccactgccttcattcagaatctaaatatttctgcccttgatttctgaactgcctctgcagttagtcttctgctgccctctcctcattcctttcatctgtcattcctgcttaatactctcctagggctctccatcgtgtccagtataaaatcgtactgaaacttgtaatcaggaagacatcccctttgtaatcagatctccatcaccagtccaacttggtctttgacctcttctcactgacattttatgctcctgtcatgctggactctgcagttgctgggcagtgtacccgcatgctttcctgcaggctatcccatctgactctcttctcctaaacctcaccatatttgcatgggtaacatgtcctcaccttttaagaatttcctgaagctctccctgacatcctgattcctgaacaaccacccctttgtgctcacaaaggtctttgtagttacattatttatcatacagtgtttccactgaaagtttaagtgcctgttccccatcgtggctcctgagtagctatgcagagggcgtaggggaagcaatctggtgaaactgggccaaggagacttgtctctaagctacattggcagagcaatgttttacttagattatatctatttaagatggatttagggaggctcagggagattattggagagaggggaaatatgagagaccctaagcacctcttggcagcactgctgtgtttcctctactgtggagtgagctcctggaaaacagggactctgtctgtcatctgtgtgtttcctgagcaccacatagtgtgtgccagatagattgtatgcctgctacatagtaggctcttaataaataagaagtgaattgaggattctagatgctattcatcttcccatattaaattgctttcaaaatgtaaatcctctgtggcactgaagtctatttaaaatatgctcttctgccaaataaaatgtctcctccaggtgatttgaggaagacatgtgggctcaaataagattaaaccaaaccattgtcatgtacatgtaaatattgcatgagtaactagtcttacattttcttcactaatggggatttattctaaggaacttttttgttcagtattttctgatgaaggaatagtcagaaatatcaaaatccttcttactccattttaggctgccatttttttcctaagagctgttatacattgagcatacctaaattgcctttctgaaatacaggaacacactgtattgtcagtaaaatggtctgtgttgattagtttgtctttggggtgtacttgattcatcagatgatggagatcctgctggcgtttcatgcaacctgctatggtatgtgggctttattggcttcccagcagcgacactgacacaaattgtcagattttatgggcagttttaaacctaatgaaatacatccttgagaagcttccttcaccattttagtagctgtacaatttgaaagaaaaaagtcaatgtacaccacacagggtagttcactattgaaatcatggaggacaatgacaacacgcttattttgctcttgaacatgctgtcattaactgcacaatgggatactgatgctgcctcagaggctggtattaatctttgtgccaaaccttgcagaaactctgtgtgcatttactgacgtaagcattgctctccatctctttgatcttaagattactcctttggggatagaaggtaatataaggctgctgaacttaaaaaaaaaatgctcaaagtgagtgaaggtaagagatgttcattttcttccagtactgaaaattaagagtacagacccacatgctattatacaagagaaagtagtcctatgactgctggataatttacatacattatctaatttatcataaccctgggagagtggaaatattgctattcttattttactagtgagagactaagtgatttgctggtttttgatcccgggtctacatgaatacaaagctacatctttaattagttctctatagggtctcaaagcagtcattttactaaatttttgatctttattaaacatagatgcaaaagtaataataatatttccacaaataaagggatgttaaccaaaattaatgttcaagaatcctttcagtgtttctctacctctttaaatattccagaaatggtgatacagtcaggagcaatatattgccaggaactttggcaggacgagagattactttttggatagaatcagttgcaggaattttccaaacgattcacacagcatcaacttaatcttctggaaaacattttagggaccacaaatacatattgtacccaggatgtagtgtacttactgcagtgtggtctatgatttttcttggcatgcataattcaaagacccagatagaaatgactgattttagcacttctaacaataaaacaaaagctcttctacaagagaatatcttcattcatgttaaacatatcaatatctcaagtaagtatgatgaattttgagatagggatcatgccattggggtctcatctggtggtcatggggaaatggtcctctttcttggatatctttggagagtatactatttgactctttagtcaaactgaggatcagtattttaaaagtctataaaatacttaagccatcttgtagaaataaatagtcttcccacccagaccataatctctgaaataattattaggaattttctttttctttcaaacactttggaattataatttagattctttaaaaactgagttttatgactgttttttcaaaaaagcttcaaaattttggcaaatgttgcatttttttttccaattaggataagtaattcaaaaagtcacaacatgcttcagccaaaaatccattgtgaaaatagaaattagaaatgatctttcaaaaaattaagaaatcattttttgaaaaagtgtggagtcattaattaagtgtttgaccttttgtgccttctcaaatgtccattttcaaaaagacagatgcagttagaaggaaaagactatgaatgtaggttcagggccagaggacaaaaactgttgaaattgccttgatatagattcatagattgcaaatgagcactttttaaaatttaaacccttgaatatggtatctcaggcacagagtgagttctttatatatacaaaatgtgattcttaccgcctaccagctgtcttccgatttcaccagatgaccttccctataagtttgacacgtaactcataaaatgcatggctctggagaacaattatcatgacgggagtatgctttcttgattatatggcaggatcctctttcccacctctgcttttgaaggatattaaaggtgagattaaaaatgctccagttgttctgcttgtctgattgtaacagtgaaggagacaaaattgattctagcttatggctcagtgtttcaatgttattctgcagcacttgtttgccagcagctgttagggattattgcaggtttctttgtcaggaacagtgtggcaacaataataaatcagatttagactggctactgaaggggtttgtttaaaagatttaaaaatctcttcagagtcaaagatgttaattctacctggtgaaccagaatgatcctgcatatatcttgggacagacttatattttctaaatctgggtaatgatcatacatgcactgaaaagaagaccatcttctcccagaaatatacaacactgaaagattctctaccaaacatgcatgaaaagatagcaaaggtacaatatttctttaatttgtttctttcctctttcgtttaggtgaaatagaggatacagctctgatcattagaatttcatatggcaaacgctcacacacatagtggatttgaggaaatcaattttcactaatctagaaaattctctcctcaagagaaaagggatttaaaaactttcatgatgtatttaaattcaacatatcttttgcctactttaaatagggaaaaggtgactctaaggtcataacgtgaaattgactttacccttcctggtatagaatggcatttcacattgagaaaaactagggagaagcactgaagaattaatgggcagtggggagagaaatgtagttcattactttattatttgtcgtggtaacacatactttatacaatctatcactcctacttgtccaaatatgtgtttctcctgaggtaaaatttcaaaaattctagatgatgttttggaggttctgtagagaaggtgaatggtatagagctaaagcaaatcttgtatgatttttttatttaatatgtttacttcctatacctatgtctttactgtgtatacatatacacccatatccctatatattcgcgtgttcacttttgatttcaaattttatttgtgaaaaaagcagatttattcttttttttctttgagatggagtctcgctctgtcaccccctggctggagtgcagtggcttgatcttggctcactgcaacctcagcctcccaggttcaagtaattctcctgcctcagcctcccgagtagctgggactagatttattcttaatcccatttatccatgtggagaatatgtcaccctgctcatttcactttgcaaaccgacttactattctttgtacctctctccttctctttttgctctgtcactaatagagctttcagctactaagacacacaggagtcctttctagagagtaactgaaattaaccacatacatcattttggtggcaaacctcacagccaccagtcatttatagtaccaagtccctgctctttgggtaacagtggataagaaatgctacacaagctccttatgtggagaaaagactgttctcctatttggaagccttgtgcccatatccatgccctttgcacatttatcaaataaccgtgacttgtcctttatgttttttcaagcatttgtatcattaggcaaggctctgcctaatggaagagatttactcttactctgtgcccaggtggctcgtccatctctgggtattttcaagcattggaggtggcaatagtgtgcttagcctcaagactgagcaaagaaatgaactttccagagattactcttaaaatatcccattctgagagcacatgtttctcttagtactgtttactccggactttcagggtcagtaggcaagcttttcaacaaatttggtttcttttaaaaactatttttggtagttttgttaaatgtgtctggtaattcattttaagtggaaaagggatggagataaagggtaggtagaattgtaaatgtcctaagcctcttttatcatcctatgtttttgataagttttatctggtaacagacaaacattgtagaagcaagaaggggtttaatgttgttaaataaagaaaatgtattaaaagagaaaaacgaggcactgggctcttctactcttgtttatattcttcacccttgtgttccttctactcaggactccattgtaaatgctcaggattaatttttttgtcatttgatgcagttctatactgtaccttgtctttctgcaaagcaaagataatattgtagtttaaaacttggctatccaccaccatgagggaatatgcttctcttatttttctgcagaaacatttaaaatttcttcagctatattttgtacttacctgaattttaaaaatagaatatagataatacatttccctatttttgtgactcactcactgttattaatagttatttttctaatttgaatattatgctttgttaagttatttagaaccacttaccccatctgtaaataaccccgaactcctatactgtcatcacctttgtttcttctaacatgttgtaatgtaaaatcaaaattattaagttataattatttatgatataagaagtattctgtggataaagtatacatttattttggatatttagaataatttttgtttgtttttggcataattcctttttcttgactatttacaggaaatagctagttataggttttacctaagtctcattcaagctaatggattatgcaaataaagtttgctcactgaaggacaagaatattctgtatcttttttctggttcttcaaggtgatagttcataaagaatatgttccattgacaaagttagttatgttttttagcttattaaactaatttaaggacaaagaagagaaaataattttcaaacccactgtgcttggccctcactaattatgtttttgcctgtgagatacggattttggaggctgtatttgcaataagtgacacatacacaatttataaatgataaaatataaaatatttgtcttaaatagggagatgctgtaatgtctctttcccctcttcaacgtatcatattacagtgattcctcaatgagcagctgaatttccacctgttcttgacgtattacctatcaccatcaggctatgttatgaaactcacttttagagataaagcaaattgtccaaatgtcaccaattattgaatctaaatgtgggcatacaggttttatttgaagcagtctttcagcttttctatatgattacatttttatttaaaaattttgaataggctgggtgtggtggctcacgcctgtaatcccagcactttgggaggctgaggcgggcggatcacgaggtcaggagatcgagaccatcctggctaccacggtgaaaccccgtctctactaaaaatccaaaaaaaattagcccggcgtggtggcgggcgcctgtagtcccagctactcgggaggctgaggcaggagaatggcgggaacccgggaggcggagcctgcagggagccgagatcgcgccactgcagtccggcctgggcgaaagagagagactccatctcaaaaaaaaaaaaattttttttgaataaatagaataatgtgatagcaaatggctagacagctattaaggtggtcaaggaaaacccactaaaagaaaccagcatagtattttgtatgagcatagaaggtgtgggttagagaaatccaatgtctctattttagaaagaaatgtcatcaaggtggacagggaccagaacatgtagcactttgtaagccacgaaaggcattttcattttattcttgtagattttaagtagagatgcagctttcttctcacatattttagaaatatttatttggttaccatatagagccagttctcatatagagaatttattctctatatgagaatagagaataaatttggtgcaagaaataaatatcgggtgcaagatctaaaataggaagacaggttatgaggctgttggatccccattataatggcagcttggatgagataggtttcatgaaaatgggaaaaagcagacatgtgtgggatgttttaggcagctggaatcaatagtacttattaatggcccagaggtctgggtagtaaaggaaagaggagaaactttagataaggcagttagagaaggaaaatcaaggatagattctagatttttgtcttgagcaactgcatggatggtgatgtcattgaatgtgatggaatagatcgggaggggtgcaagatttttcatggagggaaggccagagaagaaacagttctgctatagccatactgaattttaggcaccttttagacatctaaatagaactattgatttaatatttggatatgtaagtctcatctgtatgccatctgttctggctatcttacattcggatcctgtgtattttttacactggcctggaaaagctggcaaaacctagaactgcatttgtcccctctgcgtttataccatttcagttgacaggtctaattttaagttccaccttttcataattgattattcatttgtacacaagtatttgttgagtaccagaaatagcatttagtcatttcaagctttagtttttcatcatcctattctccagatttcagcagcatcagaagccatataaacactgccttcggatggcccttagatggccaccaagatcccctagttacattttctgtgtacaaagcagaagaaagatgtccttcattctgtacacagtgtgctacactgtggtttagtttattattaaagagcataattaaaagaaaaaatatgctatttaggtttggattactaattttaagtttaaatgcctttatatcatatttctttgaagctagacatgtattcaaacctcagctcccccaataattagatatttgaacatggtggaaatagtgaacctatcatctttaaaacaaaggatataaaatctaatagagtggataacatgattataataaagatataaagattataaaatattaaaagttcaatattgtcattagactctaatcaataatgagtatatcacgtattatattttgacatgaagaactatttagccttagagctttgaaatataactaagaaatctattaaaataaattaaatagaatatattccaaagtaactaatgttttcccatattaactcagaataactttgtctgaaattaaactgaatatatatcatttatagatacaagcatagagtttaaattcaggtaatcttatttggatgtacaaaccgtgaatagagacattaaggaaaagtagtcataattaattatatcgaatcttcagagttcacaccattcctcttcctaaaaacacatacaggtttaggctgatcaagatatcaatgtctgctctgagatcatcaaagtaatgcgtccattctaagaagcactagtggcatatatgatcacggtagaagagcaagaaaaggagccctcacttagaaccccataagacaggaaagatacagcatcaacctctcctctccagtttatctgtgttatggattgtaagagtgttttgaaataatattttacttagtaaagtaatatccacaagcatttcaccatgaaaaacattaaacattttaagtatataatatgaaatataccatctctgatgattatttttattgaccatattcttgccaactctaaggtactctaacactagaattttaaacttgttatatttgttactttggtacgaatgtcaaagaaaggtattacctgtaagtattagagcattcctcattgttcctaaacaaagaatttctttttatgtagtctgcactaggaattggaaatgatgcacataaaatacagctttttaatctgtgagattgtttatgcatcttaggtttgcttagttttgcaaatgcgtgcatttaaaatcaccatttgtattttgaactcttctggcttttaactgtagtggaaatttggattgaagacaatggaaaccgtgaggtacaatatataaacttgcatccaaccgagaaaaaccactactcttatctgcacttcaatcagcaggaggttctttttcagtttgtttagaaaaagtagggcctgtcatctgcatggcatacaatctttacaaagaaattttcttttgccctttgtgttttaactactgagtgctgcagaaacttctgtctaactgcaaaacagtttaaggtatcatctatgacaatgttaaaagtaaaacccaatcaaagtttatattatcatgcataatagaccaagcaccattatctgaataccaaacggggccaaataattctctatgattcagatgagacataaaagtgctttaaaaacaagtatgtggtaaaaatcactttggaaaacctttggcattatctaatgaaattaatatgtgcctactctatgatgttgcaattcaacttgtaagcatatactcaagagaaataggtgcacatgtgtacaaagacatattcaagaatgctcataacagcactattaataatatctaaagctggaaataaccaaatgacatcgctattggcatgaataaatatttcatagtatcataatattaggaatactataaagcagtaaaaatgaacaaacaactgttatacccaacagcacgggtgaacccttaaacataatcttaaggaaaagaaattagacataaaagagtatacagtgcctgattccattcatataacattcaaaaatagatgcaattcaactttcatgctagatagaagtcaggatactagttatctttggaaagggtagagatagggaggattcttagtatgggcaatattctcttttgatctatatgatggttacataggtttttatatgtaggttattaaaataatatactgataatatgatcatacattgaggtttttatttattacaataagttgagattattcaaaggtacatttgttcatttttctatacatatatacattatatattacatatacatatatataccaatttttaaaatgttctaagagaaagaaaagctcaataaataaaaacaccccatttccttgtcactagagatgaattactattatgttcaaatcgtatatacagcatattttttatatatgtatctaaaatatgctgaataagcaaatcaacaactacatctagacttctgcatcgcaaaccagaactacatttaaatgcattttatctcacacttaaagaattaaaataaaactcttttctgaacaatcttccaatatattgaccataagtaaatgtaatatgagtcaattattttaaccgttttgtaactcaatgtctgttggatttatcttgatttttataaagttcagcaattcaatttccacattttcttttgtttctatttttgtgaggcactatagtttttatgtaataaatgttactgatatggcctcctacttagaaaatgttattcatgagagtatattgattttagcaaaatttacatatttacatatgtacatccacaggtttgcatatgtaaaaatatagattatttacttactattgaaaaagtgtattatggaagataaaaggttttcatctctgtcagatacgacaggtgaactttggtaacataaggcctagcaaagttttattgatcttacatatatatatatataaaatggtttttcataatttcatgggatgcatcatccaagagaatgatcacagtgatactaattactgccattgactagccacctgccacatgccagacacatggtgacatggctgatgataacatgtgataggtgtttcccaagagagtccctttaaacaaggtttttttcctgtcttcatattgatgaagtgttttttctaacgccattatttcatttattctatgaaagacaaaattggcattttaaaagtagaacacggtcttttgatacctgtcatctgagatacccaaaggattttttttttaagttagcatcaagggtaaataataacaaatgaagttattttatgttagatcttgtaggtctaaatatatgcacagcaatatttaacatcctgaaatcagaaattttgtttctgatggcatctctttccattatgtgatttgaaacattttagggatattttcctgtctactttgcatggaaaaaactacagactttgtcaaatctagttgccttggaagaagaatgaataagaggagatgtgttaaacaatacaaaatatttttgctatttcaagtttgaattgattttgaaataatagtttcaggctaaataataaactgtctttttaggaaacaaaagaagtattttagaaaaagacattaaaaagactttattaaaatagaggacatgatgatcttgtttgttgctttaagcagtttatgtagtaactttaaggtggtagaaagtgtcaggaaatcaatttgaaggcaaatcttcacatatgaaaagaatcagaaatgttaactcaggtcttaaataaaaaggaagaattaatatgatatattaaaagtgatacgaaagtcaaaggaaagattgatgagacttattaatatgaaatgaggtttcttcaataaatatgtaagtacaaaaaagttaaattgtattaagaaacttgagatttaaaaaaaaaaaaaagcgaagtatttaaactacccctcttgagctcccagccacattcctcttagttgtctaataataacacttcttggctatttcactggatatttctaaatgatagggtcctattcatatatctcaacttgtcaatttttaatatcatcaattgacattccttttttagaaatcatgacttagctacttatactccatcttcagtgcttatccttctaatgtaatactatcataattttatttaaatactatatgtcttttatgacgtaaatattgtctaatactaaaacatctactattccatgtttctgtgttttatcttaagaggttaattttatttgtttatttttcctgggtctttagcttttcttgtattcttgtcctatttgccattattatattattttcccactaacatttcaaaatattagttattctaaatagtctgacttttctttagagttcttcactcaaagtcctctatgttctgcctgaattaggattgattattccctatgcccactgtactgtttttctacattggatctaccttgtcagggatccacaccttcctctttcttggtttactttctcattttgctggagcacatcctcaaatggcttcttaagaaatattacatgggcagtgaattttctgagtccttccagtttaactcattgcaatatacaaaatggcaggcccattcaatttatatacttattccttcaagttttggtaatttatctgcattattattaaataatatattaatatattacttaaaatataaattaaaacataaattccttctaatttctccagtctacttttttgaaactcccatgagtcaaatttttaccttgttgtattggtgattgatattatcatttctctcatattttcagtatttttttgtttctcttttgtgggtgatgccttcaacttttttgtccaagagtcatattaaaactttattttaaaagatttgtatttttccctttttaatattattctatttttcttcttgaatctcttcaaaaatattaattagcagtttgcttttaaaaatattatcagttttttaaataagcatttgtcctccagattttttcccctgtttaatgttgattcttcttttccatgagggactatttacgcaacaatctacataatctttattccctactaacatttaactgtgatatcctaaaatggcctgattgaggaactgattgagatgattaagagctctgtagcagggcgcagtggctcacgcctgtaatcctagcacttctgtgaggctgaggcaggcagatcacctgaggtcaggagttcgagaccagcctggccaacatggcgaaaccctggtctctactaaaagtaccaaaatcagccaggtgtggtggcaggcacctgtaatcccagctactcaggaggctgaggcaggagaattgctaaaaacttgggaggcaagagttgcagtgagctgagatcgcaccactgcactccagcctgggcgacaagagcaagactccatctcaaaaagaaaaaaaaagaaaaaaaaaaaaaaaaagaagtctgtgtatagggcaggacgaaaggtgatttggtagaaagctagctgttttgccaggcagcattaaatgtaagaatgtgcagattttttcctctgggatcctgtcatttctccagaatggtaatctccatacttattcctggaggagaggtggttacaagtattctggggccacaactattcttggccttttgtctacccctgaagtttccatcactggaataaactggacagttagacagattaacatgagaaaaggcatacacattcattacacgcacatgtacctggaaggcaacaaagtatgagacttaaagaggggccagatggttgaaatttagatagcatctggagatacggaaggaaggaaataaggacttaaagtctcttagtaggtggtggcaacaagctgtgggagtgtgaggagaggaactgcatggcaagcaaaggttgtcatatcatgaagataaagtctctaaggtagcaatcctcagaagaacacgtgaaaaggtgtcccaggcgtggtgtcccgggagtttcctctcctgagataggatttaatcttctctagttcatgtagattccagggaaggggttcatgacaattacattccttctggaggaacttcccttagataagggggaacttcagagaaagcctctccctgtgcttgaggagaggcagaggggcgagagatgggagtggaaggcaagtcagagagaacttggttctaaggtggcttctttagtccaaagtgctcagctcctcaaagcgccatactttggagtactattttctgagccctaacagccacaaatggaagaagtattcccctgtacagaaaagtttgcattacttttgtcagattatgtctcttaatataatcacattttatgaataagttttatttcacttaacagatttatttattttttaaaaccacaactttaattcccaagtaactcttagaagtttctcctttttggattttcattttgatgtttagtaggcttaaattccagtgtttaacacaacccccagcttttgagtcacagtttatttcattatagtagacccctgattgccaaattacaatatcttatgaaccgggcaaaatgttgacttatttaggacattatgttacctatttattccaaaatatttcatttgaaaatcagctacattcccatgtagacttttctttatacaaaagttaaaataattacagaaaggtaaattattctgatgctaaaattagcctttcattgatttcaagtagattgtaattggctaggatcaaatacatgctttatgtaatacagtttatttcttaaactgatacagaaagtgcacataattctggaagtaaaaatgttcaaaagctaagaagctctcatgttatttttcttcaatttgctacaaacatatatagagtgtagttattttctagccataagaattagcagaagctttggagagaaaaggtaggagactgaatgccctgagcatccctttgaatagctcaggcaagaagaggtgctattatcccaggaggagactgtaagtgacgtttgtgtaattcaagtatgtcctgcctggataaggacttgtgggtaaggaaacagagtagtaaatagccaaagggaagaaagtcagaaaagcttgctgtgttcctccacttaaatatatgttatttctttagggactgcaggttttacaaagagatgaagactaattcggaatgctacttacctctgtttccaaaagaaaaagactcctccagaatgtggttttaagtaggccatggaccaaaagtaggccacaaggcatggcaggcagctttatgaacttcaaggttctaggaaatttcatccattggagagttctccagtgctttaaacaatattagaaagaaaacagcggtacaaatcaaccatgctagtaaaaatctctcctgcaagacattactgagtggtgaagactaagtggttttgccattgttgttgtattgttggttggatggtttgccttggatatttgcttgcttcttttttgttgatttttagcatataaataaaatttataagcccaacaaaagaaaagaaagcaatctttcaagaggctttaagataacatcatacattttcgaggtttttaaggctgagattctattttgttttacttaaaaggaatgttacaatgctgttaacgtttttgcttattctacatttttgcttattcatgaaactcgggagaaattctgtctattggcaggctctcattgtgtattcatcaccacactaaccactcatttactccgaaattaagtgctcagtgatatgcatgttataaattcattctcagttgcaaaattttcttggtgcttaagaaattgtactttaatcgcttttagccaaaaagtttagcaaaaatagtactttgacatagtactgacagcctgtgcttagattttgataaatgtggacaaaatcaatagatagatgcataaggagtgcccagataaaatcatcatacttcaaaagctttttctaacataactcacagctgtagacttttcctttcaataataagcaaaaacaattttcatagctacaaaccgccgacacaactttctatttaaagaggacttctttgcaggaggcagaataataactcaacaaaataaatagaatctctaatttcaaaatactattatccccaaaagtaatgggaattttaaaaattatttagtgtttccagtttagatatttaagaacaccactcacatctacatgccaaataaattgactccaccctccacccgttatatcagggccccactccatccattgtcttttttcttagttatatcttgatatgtcaccctattagttttttccttgcagcatttcacttgcttcttgctttttttaaacaaaaatttatgcactaccctccctgcatccatgttcctgctgcctcatattcattcattcttcagctggtggcaatcagcattcagtttctctccataaaactgttattaaatccaataagcctttcatttctgaatcaagtgaagatttttctctatctttgctgaattctttatggcatttaacatgtcttttcactccatctttctttggggactctcttccatgacttctaagacaacactttttaattctcttccaccattttaggtttgtctttgtaggtaacctttatagattcttctgtgtaatccttacataccaatgttctgaattccattctgctcctctttttccattccatagagtctgattgtgtacttgcaaacacttccatggtatctatttcaagtgtattttgaaaagtctaacatctaggctttcaacttgatctgttgtactttctgtattctatacctgagtgtcagcaaagacgcctgggagctgtctttgagtcttccttctctcttacctccatatttaatggattaccattctcattgattttaccttcttaatttctcttaaattgattttctttctctatacctaatgttagtacctttccgccatgtttctatctggtttacattgctggaacagcacctgatttgctatcttgttcttagtcttgccatcccaacttagtccattcctctgatgtcttttcctttatacagttatcataccatttatcaatttgcattatatatctgattttatttacttataagtcatgttctttgttagctcattaggtaccaattttatatcaatattatttttctgtttgtcattcagtccatttttgttgttgttgttttggtttggttttagagacgaggcaggtgaataggtatagactgaatgctcctaagctagatgataatgaccaaatgattactgagacagggatgagcgatggtcagtgaaattgaaaggatattttagcagctgctttaacaagtatctgggaaaagtccggtctcttccttgcatttctgaacgttaatttgtattaaaagcagcatgactcagaaattttatataaaactcaaataaaccttagaattggatcttatcgagtattgtgttatacagagaatatggagaatatgtgggataaatgagtcaaatggtatgttaaaaaaaaaagtaggaagcatgatagactcaattcttaattcctagaggaaacagagttatgtccaaggaacatattcaacccaatcactgtacagctgtagctttttcttttctttctttttttttttttttttttttgagacagtctcagtccattgcccaggctggtgtgcaatggcatgatctcagctcactgcaacctctgcctcccaggttaaaacaattctcctgcctcagcctcccaagtagctgggattacaggcacctgccaccatgccagctaatttttattttatttttttgtatttttagtagagacgggacttcaccatgttggccagcctggtctcaaacccctgacctcaggtgatcctcccaccttggcctcccaaagtgctgggattacaggcatgagccaccgtgcctggccaatttttctaaataaattaatatgatgatgataatggtatatccaaatagctacccagtttttgattaggcagaagtatgcttatggtcagtcagagtaaaaagtgagaccagcatggtggcatgcacatgtaatcccagctacttgggaggcggagacaggaggaccctttgagcttaggagtctgaggttatagcacactatgattatgcctatgaatagccactgcactccagcctgggcagtgtagcaagaccctatctctgaaaaaagaatcaaaggccttaagaaatattttatttttacctcagaaaatttaaaaattaacttagagctaaatagtttgggtttcattatgtgtagaaatgaatcttgcaacagtaacagtttcccattacacattataagtgtctgttttgagtaaatttgttgaggagtctaatttagtttgaatcactgggaaaagacacaattgaggttttataaaatgtaaaaaatcaaatgaactctgtacttccacttttttacataaagtacatcttccacttctagttacaaaaaattttttttttctcacttgagtcgtttatctgtagtaagtaaatttgggaaaagtgcaagtattcatatacattgttttgcatttaaaagaaaagtgataatgttcaaacccatgctatttacaaaaatcaaaagctcaaatcatgaattctgtttgtgttaaggatttaaaaaaatagtggcgtgagaatggttattgctcttcaataaagatagagataccacgttttgctttaacatatctagaggcaactttttcatcgatagctttattagtaggtcaaggagaaatcatacctaagtagaaaggtccgtggagaaaagagacaaaccatatcagagttaaaattaaattgaaaaaatttaaatcaaggaaaccattttcacttctttcgatatgatgtgcaaaatcatgcattttaaatgggaaatgggaaatttcatagcttcttagcaatgatgtgagctctgtggtctgggtggatgcagggcatgtgggtgcttttgctcatttaaggaaattgcatttgaaacattctcaatacattatgtagccacaagaaaatttatagtgatttctttttggtggaacaaagtatatgctcttttccagctcaggatccttttccagtcttcctacacttaacagccagtacaaacttagtccatagaacgtatttgttgtgcacagacctgcacaaacacacacacatgcaaggtttcacgaatcaggtatgtattttgtgtatgtgtcaaacttagccatcaactggaatttgtgttttagtttggatgctgatttacctcatcagtaaaatgcccttcacttactctccctagacatagactattttccgtaaaatatgttagtgatttcatatttaatgtgatatggaatagaatgagaggttgtgtgaaattaaaatcatgatatcaattatctttctgtcatgcagaataaaataagtgttttgacaagatataaaaaatatttatggtaattaagtacattcatactgtatcagctaaatttgtagaatattgatttctgtattaaattatgtaacattttaattaaaataaatatattgtcgagttgtgagcagcacagtggtaagaatattttgcatgaagatggttacataaatatgcactaaaattgagtctaactgcaaaaaaatgaatgcagtagctacacatttagaaagaagttctaagaataaagcagtttacaaacaaatagtatatatacatgtatatgctttgttagaagaaagagaatttattgtgagtgggatactttaactctttcagatgttaaggattctatttcccaaataacttcattcatgtaagaagtatatttcatgtgagtcaggttttattctctaggtgttttctaatgtgggaaagtgaaatacaagggtttgaaatggttctggggatgcagtctttcctgtcagattccagcagatgctgatataatttaatattcgtggaagacagggcaaatatagaatagcatcaaattgattttgcagagttttcaagccagatgtcccttggcatttacatggaagaagtctactgtgtaccaagttgcatatttttgtgtgtaagttctcagccatggtatgtagtcattggtgttttgacagccatctgctcagacctttatttctctgttcagccataactaaaattgaacatttttcaaatgttccaggtagtttcaattttaagataacagaaaactagtattcaatggttaaaaagaaaaaaagcaatacctatctttggcttagtaataacccctaaattgaaagttaatttcttataaatagcagtgcaaaatgaacaaactttgagaacagaggcctcaccttattatcaaatgagtttgttttaatcatgtggaaggctctcagctagacactgaggaagttatagaaatgggtaattccaaggtgaatgttccaaggatagctatgtcttatacataacaagcacttcatcattatttgctgaatgaatgcgtatgttagaatccatatgtaatagcttgtccatttgcacatattttcaccccactgatagtttttaatatgtggaggtacacatacatatctctgtgttttttgtgggtgagatatgtaggctaacatgtcgtaagtgaatgaaactgtgtttgataagaactgtcaagtgttgactatgcacctattggtgtgctagacattctgaagattcagaagaagtatacaacattatttctaatgttatgattacatctacagacaaagaatcaaacaatgattctttttaatggtaacttgtgttttttaatgttaaagatatgggccaaatgataaagaacaggaaaagatgagtttttttctctatcagaaggatagattttgagctaatcttgaaagaaatactaaatttagacttatggagaataatttaggaaagcaattgaacactacccaggggaggtgggaagtgagatgctgtgttcagagtgagataaggaaataatttgaccagagcatgggattttaattgagaatattaagagataaaattataataaatgtagggaaggtgtatcagagtgagattatgatatactatacttgaaatatctaaatgaagtatttatgtttactctaaaagtcaagtgagagagattctggagtgagacaagaatgtgaggaatggggacttctgtggagtttaatctatagtaatgcacatgaatctgataaattattataatctttgcttttagtagaaatggggatttagagtacatcagtacaggtggcgaaaaatgtgaatttaaaacatattttgaaaaacaaggataagaattagtgtttaaaagctaaaagagaagaatttgtgtcagctgcaaaataaagtaaatacacatacacatacactacatacatgctcataatttaaattatgaactattttatcacactctgctgtgtaagtttttctaactcatattgtatatcagccatgttgtattcttgcattaattaatgtattcattaaatatgtcttcagtacttttttgggtccagcattacattaggcagatatattattcagcaagttttcaatttagttcagggaaagagggatgataaatattattatgagtgtttagaaatattaagaacccgaatccatttatcagtttcataacaatgattttcaagcttgtttcatttctcacagggtagacaaagacaaaatatatatctcataaaagtaataatctaccaggcatgtttgttgtagccaagcaaatatatagaattctaaaaatattgtttatagctcttgtttcaacatgcttgggacaagttaatgtttacagttttgtgagtgaatgaatctatatactgaaaacatttcattcaataagttgaccttcttgaggtttgaataaattttggagcctgagggaatcaatatggtttttaagttgatctcctaggtatgtctaagtttaagttcttaatataattatcaaccctttattattttaatatttcattacattaattatcttttggaatattttcactgatcagtaacttctagtcataagccgttctggtaccaatcatcaaatttcatatttgtaagaaaaaatgactagcctttggctgtcttgacatgcccaaatccaccaagtatatatctcacttccaaaatagtctcaggatatgttttctagatatgatcttagatgatggagtgtattgttaaattaacaagtagtataaaaatagacaaaatattattaaaaatacaaggagaaaggaatatgttagaaacaagtaagaagttccatatggaaaactgataagcaattttttagaagcaaaaatctcatgacgctaaaacaagatgatgaagaaattactctgtgtgcaagtgtggagaaaaatagcttgtgataccatagtgatcttagagctcattatacatcagcaatgaagagctttaactaccatgcaattaaaatactagagagtataaataagattgtaccatgtgtatgtggcagcatataaaaactcagaagtggaaggaattttagtcaagtgttactcttgaaaaagcaaacggattaggaatatttaattggagaacaacatagacaccttctgtaatattattcaagtaagaatgtctcattttggacatcttacttatagtcagattgattctcaaaacactttttaaatgtctagaaatatttacaatggtatttatcctgagaaatgctaaaaaaaattagaaaatgtaaaggtgactgaagttaggaaataacataaaattggtaatgatgagcaattttcttaatggctgttcataactggaaaaaaacagatatgctccgaaatatatgaattgtgagataaactgcagtaaaagaccccaagaaattgagggaaactatggaaatgattgtagcaagtggtagcaagctatttttgtttgcattttgaaagcagtttttagaaatttctaattttgaaaatcttaaattgatttttaggaattctggggctacttttttctcagacctctagggcaaccaattgtagagacttcccccttctgttaattgactcagatctgcttacatattaaaggccacctctggttctcagctggaaaaaagagttcctcccttttgaaacagttgactcagaatcagttccttcctttcagatccttatctttaattactttgtcttctaacctggggtcctaatctttgcctaggaatttaaagtaaagattggccgaatcttatttctcttgacttgtatctacctttactttagctcaccctctgggcgtggcctctagccagtctcactttgagtatctttgaaactctctccttattgtcaaccccttactttgattattttttttaatttaatgtttccaatgtagaaatacatctcaaaaattatgcagaagttctatcatataatgttcttgcatgggtctgaagctctttgaaggcaagggtccttgactatgttgttcattgttgtgtaattactgcctagatgagtacttggaaaggtggagtgattcaatgaatatgtgttgcatatagtttaagaagaactgggactggaattagaaacacatgttccgtctttagcaaatcacccatcattactaatcttccattattttatctatgatattgagcaagtaatgcctatcccatctatattatagctttgttggaagactcaagggataaagtgaaaatgctttgtagagttcagtgctacacatttattatggtcaatgaactgcattacccaaaccaacattaattgtacataacatgtgacaaagaaaggcttatggttttggagtttgtttattttagaagaccagataaactagaacaaatattttccatgaagaagttttttttcgtgttagaactcatgtgattaaattgattcacaaaatttgaggtcatttattaattttatgaatattttactgagcacctatatgatgtcagtgactctaattgtctctgaaaataaaaagattaataaatcatggcttctgccttcaaggaacttagagtttagtggttatagaatgttggtttaaaaaaaatggcaaaaataaaattctgacaaaaactcataatatctgagagtttatatgtgcttgctaaatgaaaagaattattagcaatactatgctgaatgactgtaaaatgctgactttttacttgaaatatttacaagaggaaacagaatatttgtgggtttccctgcatatttatgtgtgtgttcaaacagctgctagagaacaaagtgttttgctataaacactgtcaaatctcactgtgaaaaaaatttgtctataaaacaagtattttcatagatatactaaagctgcatagaatttgcttttatagcataaaacagaattagatgcttgagtcagctatgaaatactttttcatgcaacactcattctaattctttacactatgcattaggctgaggcctggtgtaatttgaaagtgataatgcaatagagaaattccagaagctgggggtggggggaatagactggatattgcaaaatgcatcagttagtcaatcaaactcctaatttatcaaccaaaccaacctaatcccatagagaattcaaagtgactcacgaaaagacacacaaaagaagaaatgttttgtttattttccaagatggaaaatgtaaactatccagaggacagtggtatgggtttagaaagacaattcacacaataaattttaaggaaataatggttttagtctttgatgctaacattatttctgggcttccaagtcactaaaacaatacatacatctttttaaaatgttatttttgttgtgttgtttggttttgtgttttagtctttttattttctgacaaaagaaagtttgccatgtctccagaacaggcacacaatttatgtactaaatcctgatatgaatttcttttcttttcttttctttttttttgaaatggagtcttactctgttgcccaggctggagtacagtggcacgatctctgcaacctctacctcctgggttcaaaatgattctcctgccttatcctcccgagtagctgggattacaggcatacactaccatgcctggccaatttttgtatttttagtagagacagggtttggccatgttggccaggctggtcttgaactcctactcaggtgatcctcctgcctcggcctcccaaagtgctgggattacaggcgtgagccaccaggcccatcctctgatatgaatttcttattggagaatccctttatgtgtccagccctgtggtaggctctgagaatatagtaatgaacaaggtaaacaaaacatacatagtctctcccatcatgaagcttacgttccagcaaggaagctagaccttcaatagataattatcatttaaaattataccttgtaatcagtgctatgcaagaaaaataaggcagaattaggggctgtaatgaaggacctgtttacaaagcattaggaaagccctcatggaggaaataagacaaggaagaaacacttgtgaacaataggaaggtatgtgaagtgaaggagcgttaaggaacagagatttctagacaagccctaagcaaggaaaaagcagagctttattctagaatcggactaaaggcagtattcgttgaatgtgatcagaggacattgtaagccaggataatcattttgaattttaacctaggtacaattatgatctatttttaagaagactgacttgatcagatttgaatcttaagaaaactcattatgtaaaaaaagggctaaagaaaggataagggtagtcagcaggccattcaggaggctattgcagatgtccagatgttacaaatgcttgtgacttggccccaagtattggcaatgaccctggagagaagcagatggatctgatatttatttcggagttagcataatatgaaatgatgcaatggcatcaataacgactcccggttttctctatgagacactgggtgggtaaactaagatgtgttgagcttgagagaattcaggagtagctaaatctgggtgtcccttcgggtggggattagaacgctgaaaaccacgaactctactttggagagtaatattaaatttgtgatgttcctgagacgtctaaaaaaatggagatttaaccaggcatttggatatatagctctatactttcagaaagatacctggtctggagatataacttgggagttattgactctacagatggtgtgtaaatgggttggaagtgggtaagatttggggaagagaagaatgaaataagaaaatgatccaggattaagccctgaggaacgataatagttactgataaaaaaaaaaaaagaaaagaatgaagtaaatgaatgtgacttttctgtttcattttttctaagtcttttaagccagagaaaacataatgtggaacagtgtttttatgtgtgttttatcactagagataagaaattgtcaagctgtccttaaggaccagggagggcccatggggaacagcatctttcctgatgctgttgtattcatcaaagcatagatgagtctcttctgatatttttgtttgaggaacatgaatataagctcatgctcctagcatagcaattagtttagagatttatcattgttttatttttattttttgaattattaactgcagacaaagccctaaattttttttgttttctatatcacaagtacctttttttggtttaaggttctaaatttcattttccgtgacttgaaactgttttgcacttcctctccttgctttatattttgagtttacacactaacctgccaaagagacatctagtttataggcttgattttggaagaaagacagaagagagcagatactgaacatatgttccgctgatattgatgaagtgaggttggaagaagcttggaagcagtctatttctctccaactgccaccccctctatgaatattttgggtacccttatgctggaacattccaaataagtgccccagctatgggttttttttttttctcataatgattctgaaagcctttgggatgatttaggattgttctacaagtggaacataaaccaaaacaaagcagttcgtggactctaattttaaatgggtgatggatgagatttcaatgcaaattgtaaagactgaaaatgatgtgaccagagaagggacccctagatagtaagtactcaataaatgacagaagcagggtatagtatgaacctgtttcttgggaaaatagacttgaagttagacaagaatctatttaatcaaactctagatatgatgttttgctaacttttgttttttgttgctttggttttttggagtttttttgcacttcaagaagtctttttgatctgaggtagtgtagtcaactctaatttattaagcatgaagtgattggttacaggtattttaacaagtatttggaggagtttggggaagttgaagtacgaacacattatttgaagtcactgttacagaggtgcactattttgtccttcctgatgtagccattagtgttcctacaagaaatctggattatcatgacagtttttttttcttttttcctttttctttttttaattttagatttaggggatacatgtgtgggtttgtgacatgggtatattgtgtaatggtgaggtttgggcttctactgaacccatcacccaaatggtgaacattgtattcagtcagtaatttttcagtcctcattcctctcccagcctcttcccttttgtattcctgggtgtctattatttccatctttgtttccatgtgtatccattgtttagctcccacttagaagtgaaaatgtcatattcaattttctgcttctgagttatttcacttaggataatggcctccagctccatccatgttgctgcaaaggacatgatttcattattttttatggctgcacagtattccatggtgttcatataccacaccacattttctttgtccaaccaacacatagattgttgagcacatagattgagtccatgactttgctattgtgaatagtgctgcaacaaacacacaaatgtaggtgtctttttgatatagttagttcttttcctttgggtagatacccagtaatgggattgctatatcaaatagtagttctcttttttgttctttaagaactctccatattgatttccataggggttgaactaatttacattcccaccagcagcgtataagcattcccttttctctgcaacctcaccgatatctaatattttttgactttttaatactagctattctaatttgtatgacttggtatctcattgtggttttaatttgcatctccctgatgattagtgatactgagcattttttcatttgctttttggccacttgtatgtctttttcttttcttttcttttcttttttttttttttagaagtgtctgttaatttcctttgcccacttttaatggagctatttgtttttttcttgttgatttaagtttcttatagtttctggatattagtcatttgtcagatgcacagttagcaaatattttctgtcattctgcagttgtctgtttattttgttaattgtttattttgctgtgcaaacgccgtttagtttaattaagtcccatttgttcatttttttttttttttgcatttgcttttgcaattagtcttagtcattaattctttacctaggccaatgtcgagaataatttttcctaggttttctttttatggtttcaggtcttgcatttaagtctttaattgatcttgagttaatttttgtatatggtgacacatagggtccagtttcattcttccgctagccagttattaaatagggtgtcctttccccattgcttatttttattgactttgtcgaagattagttgtaggaatatggatttatttttgcattctctattttgtctcattgccttatgtgccatttttataccattaccatgctgttttagttactatagcctcatagtctcagagcatagtgtgaagtcaggtgatgtgatgcccccagcgttgatctttttgcttagaattgctttggttatttgggctcctttttgtttccatattaattttagaattgttttttctaattctgtgaaaaatgacattggtaatttgatagggattgcactgaatctgtagattgttttgggtagcatagtcattttaatgatattgattctttctatccatgagcatggaatgtttttccatttgtccatgtcatttatgatttctttcctcagtgttttgaagaaatcataatcaattcctggtagagatcttttacctccttggttaaatgtattcctaggtatttcacttttaatagttattttcttatgtatgtctaaattttaatcacagcaaatttatggtgtaatcctatcttaattagatggatgatgtcctttgttgggaatttaataaaatctaatactgcttagctggaccaagtggataagatgacatttgaatccatagtggaccttgtagcccttcttttatttgggtatctactatatagagaaaacattggtattctataaacatgcctaagatccattggagtatgtatggttagctctgtttattttctttttggttacaataaaaatacttaacattttcactgtaacctgtttggaaggaagagagtaagcaattttaaaaattaattcaacagagaaacatgtactactttttctgattaaaaaaaaaaagaagaagaagaaaagagcccacagcagctcagaagcctccaaaaatactcttttattttagaagctgaaaagggcagatctaactaatggtacaagacaaattgaaagtcctataaacaggaatagaatacttactctctttggttttgtttgcttctgaacaactggattcaaccttctttctttccccccagctcttaggcattgttgtgtcaggacagctatggttcaaattgggctgattttccagttctattaaacccttcatctgcatcgtggatcaaatacattaactagctgtctgcagtgcacagctggaaatcattctcttccacattttgctttgtgccatttttgttttataccaatatgctctgacacacccacatagctcaggatttcagcagtcaattatctccttttcttccttgataggtcttagaacattttaaattggtgtattctcttttgtcttttaaatattgaatcacttgcaaacatctctgcttgcatgaatatttttcaaaatgctccatagacctagaagctgaaatggaaagttagaatcattcaaacacaaattttgattttattcctttgagagatggtaggtgattggcatgaaatagcaggataaatattgtctaccaaaagtaagatgagagagagaggaagacagagagacagagacagaaaggataaggatcagccatgtattattgtaaacagtatatgatatcttagagattattttaaaatgaatatattgaagtgaattgttgcattgactgaatggcttttccatagaaagactccagctatcatcagttatcaattacattattggtggtctttacaaacttgactataaatgttgagacatttttcgagaaatacatacacatgtgtgtgtatgtgtgtgtataagtatctattggtatctccgcatgttagttaaaaatataataatatgccaagtacggacaatgaagacagctactccacaatattcatttaatttaatttttttttttttttttgagacggagtctcgctctgtcgcccaggctggatggagtgcagtggcgcgatctctgctcactgcaagctccgcctcccaggttcacgccattctcccgcctcagcctcccgagtagctgcaactacaggtgcttgccaccacacctggctaattttttgtatttttagtagagacagggtttcaccgtgttagccaggatggtcttgatctcctgacctcgtgatctgcccaccttggcctcccaaagtgtagtttaatatttaagctgataaaacaagaaaatatatttaaaaaatttttgctagactacattagaaagattttctttaaagatgtgagctagatagaggtcattttaaaatgatgatttatcaaattttacacagttaaagatagtgaaaataaagagcacattaaaaaataactagatggaaattttcactgtgaaacagaatttctgaagtgacacggtgttcacttctgatcatggtcattgtacaaccattgagtctttgtataattgctgtgagtagtgtcactaccattttcccttcactttttttctatagatatttaaatgaagcaactgtatacatatttattcattttgtcagttataatcaagttattctatcctaatctttctatcttcactctgtgtgtgagtctgtgtgtacataacatgtgatatttatatccatcttccttcttgatcatgagcaacaggaaccaccaatactattttacttaagctgaaatacatttgaaatataccatataacttgcagagttgatgggaaaatttgaaaaccagggtgagaagatggcagacatcaaggtcatccctaggttttgatacctgtacagaatagtcattgcttactgctgccgccatcactactttctctttcattcctctgatatgactatctctactcctatcattatctgattttccttatctctctagtctgtgcttcacatgcttaatattcaaattcctaggccaaagtcacatgtacatgccctaactgctatagggtagggagaagaaaggtctcctctatttacatttccttggcaggaggtaggacactgcataccctcaatagtagacacaatgccaattactcaagaaaagaaatggaggatgaatgttggacagccaagaaatgatgaaggtctgccacatttttcatataggttggctttttctttgaatgttttcacttagctagtgtaccaaaacagttctacatttccaccaaattaaaggtctgattagtttaatgcccttcatttgccatatttttctcaagaaagattatacagtgcatgaactcattcttattcagtaaatttaaatttgagtggcattatattccaactagtgctatccatgccctcagtaattttatagacttgagagccaccgtaaaaaatactaaagttacagtatgatgagggttctactaaatatcaactaagtaatatacggacaccaagaaagaaacagaaaattctgtgtggcaaagtcagaaaacactttcacagagcagggaatatttgagctatgaaagatgaacatgcaacaaaaagggagaacattctttgttgaagggacaagataatgtcatcacaaagcattttcaaaatgcctgctatatttgtaaataggaagagatcagttcactagatgtataagaaggcatgaaggaggatagcaacagatgagttcagacaggtagaaagcaggcctgattataaatgtttagatcaccaaggagtttgtctacgacactacaggtgacaggcaactcacaaaagtctttaaaaaagaaagtgagttttagggaagataatttcaacaacaatggggaagattaatgggagtagagtcacgcaggaagactaggaagggcagtggtgctcaacctgtttggcaccagggaccagttttgtggaagacaatttttccattgacagggataggggtggatggtttcaggatgaaactgttccacctcagatcatcagccattagattcttataagtagctcacaacctagatccctcgcatgcacagttcacaatatggttcacgttcctgtgagagtctaatgctgttgcttatctgacaggaggcagagctcaggtggtaatgcttgtttgccagccactcacttcctgctgtgcagccctgttcctaacaggccacaggctggtactggtctgcagccctggggttggggaccccgggttaggatgctactgtaataaatgtaaagtaaggttaggatatctgaatataaatgttgatgtgtttgtgtggcggggagcggtgtgtgtagctgaatttgaggtagagacaaaaagtaattaaactggaagcagaaatcttagaatggggaaaagtaaggcatatttgttcacaaagtatcttttaacattttctggtttctgtggagtcacattttattaatgctggttgacatttatctacctagaaaaaaatgacagaaatttcaggaacaaaggtgactatgaattaggtaccaatatttttgtggatgatcttcatgaagtcagccaataatggagatgagtatgtggaaaggatggattatttggactttttgaaaagaagttattgggtgaacatgatggctcatgcctgtaatctcaacagtttgggaggttgaggtgggaggatcacttgaggccaggagtttgagataaacttgggcaacagagcaagatccatctttacaataattaaaaaaaaaatagaaattagctgtatgtgatggcttgcacctgtagttctagctactcaggatgctcaggcaagaggatcacttgagcctaggaggcagaggcttcagtgtgccatgatcatgccactgcactccagcctgggcaacaagagtgagaccctgtcttaaaaaaattaaacaaattaaaaagaaatgaagttattgagtgacagttaaagaaactgatttgcaagtggccttcaggaggcagaagaaggctacttgtctttccccagtgattttatgaatccattgaggagatctgcagaagtgttgtcactgctggagaaaaccaaggcttcacttgcaaaaaggagtactttcttaaaactgagaaatttggaaatatatcataggacttgtaaagctatgatggaagttagcccatgagtgtgtttacagaaggcagagctagatggcataagactcagggatgatgcaggaggtgataaatatttttgtttagagtagtgagaagagtgaaacacagtagatctttaataataaaattttcactcatttggaattatgaaaattgtgtttgaaaaccagctgtgccatttaaattctgggtatatgtttcttcatttgtaaaattcaagtttgaactaggcttctttgaactaaattcttcttgccaccagacaacaaccttcttcttcatcacctagaggaacattgcctgaagcctaaggaagcagccttccctgtgccacacagaagaccccttaattgttcaatgaatttctcattgacttgtgtagtgcttcaaaagaaaacacttacacatcaaacatgattctaagtcaaagttcttcatttatatgagattaaagaactggaaaactgtacaagagaaatagtcacctgctgattgcaggcctgtgggtttcttggaaaaactcagcaattttgcttatccaggactatctttttgcccagttcctctgattctgaaggaagttgaaaagatagttttcctttgctgtatccaacatccttttctacatttgatttaagaaatgtcaatttaactttttattgatactgatattgaaaatacataaaatccaaagaatgagataaatcttacatatgtgtcatatttctatagatttttttgaccaacattttattttgaaaattttcatgcacttggtaaggttgaaagaatcatacagtgaacactatgtactcgaaatctagattctaaaattaggccaagcatagtggctgatgcctgtaatcccagggatttgggaggctgaggtgggagcattgcctgagggcaggattttaagaccagcatgggcaacatagtgagaccatgtctctaccaaaaaaaagtaaggccagcacggtgctgcatgcctgtagttacagctactcaggaagctgaggcaggaggattgcttgagcccaggagttcaaggttacagtgaagtattataatcatgctattgcactccaacctgggcaacagaatgagaccctgtctcaaaaaaaaaaaaaatagttaatgccaggcgtggtgactcatgcctgtaatcctaacactttcagaggctgaggcaggtggatcagttgaggtcaggagttcaaaaccagcctggctgatatggcaaaaccccgtctctactaaaaatacaaaaattagctgggcgtggtggcaggctcctgtaatcccagctactcgggaggctgaggcaggagaatcacttgaacctgagaggcggaggttgcagtgagttgggatcatactactgcactccatcctgggcaacagagcgagactccatgtcaataatagtaataataataatgataaattaatttaacatgtttgagtagggaggagatatgtgctttatcacatatctatccatctgaacatatctacccataaatccattttatcttttaatatactgcaaacctcattcctatacacatgatcatgaatatcattaactggagttaaatactgctaatttttttcaagctcaaatttatctacattgaaatgcataaattatcaccccgtgtaacattcactcactgaatgtaatatttaattaacaaatacatacaccattataatacaaactgctatcaagaatattatcatcatcccagaaattttctttatgcctcttcccagtcagtctctgcccccaagctcccaaaggcaaccatttttcctgttttattttcctaaaagattaggtatgtttaaaaagatcatataaatgaataatagagtatccactctttggtgtaaacttatattatgtggcataatcctttttggagtcatcagcattgttgtgtgtatcagtaatttgttccatttttatgttgaatagtatttcattgtttaaatacaccacagtttttgtatcatttcccccattcatggaaacctaaggtgtttccaggtttggctattatgataaaaacttctatgaacatttttgtttaggtctttttaaggacatgtaatgtcatttatcttggatatgtacctaacaggggaaaatttgaaggacttttatatttattaaaaactacctgttttctaaaagggttgtgctaatttacattcccaacagcaatgcagcagacttttgattgttctacaaactttttaatatttgatgttgtcaatctttttaatataatgccatttaatctaaaacatgagaactttgtcaatatataggtccagttactgtgatctctcacccaccatttctttattatagttgtcatatatattctatttacaaacatatgcaatgatgtgattttttgccttaaatattaatatgcatttaaaagaatttaacagggaaaaagtctattgacatcaaatgtacttatactgtcttttatcatctccaattttctattaatcacatgtagtggatttttttttcattctagatactgtgttacatttttcagtcacagaatttatattcaatattttttgttgttaccatttcttttttgctacaagaattttcgtatgtgtgtatgtccttgagtatagtttaaaagctgcttgaagatgcttgtttgcttattccaacatctggttgatctcagtacaatctccgttgattgctttttctcataagtatgagttactttttattgcttccttgtatgtctagtatttttttttaattgcaacctggatgtcatgaataatagcacattgtagaaactctgggttttgttatgttcctctgaagagcactcacccattcttttttgttgtcgcatcagttggttaacttgactgggctcaaagtcccaacttttttctttcctgtagagtgcagaacctaaaatctctgttcagtttttcagccctagctgggctacttggaatctgactagggcaggtgtaggtctggcatcagtgagcaatttggacagagtttatgcacagattgaggctccctttctgtggacctctctttacacctgctgtggctatttttagttttgttcactagttcttcaagccagtaaaactgtgggtttctatttgagttttagccattctggagctcatccagtgccttttccttctaagtattcatagtcttcctggcttacctgttcttaggtgcactccagatatctggtgtttgctgtgtgtatatatatatatatacacacacatatacatacacacaccaaatatatacacagaatttatagctgttatctctgggagctttgctccaataaaagctacttcacaattattaaaaatagaacctccataagtagattttaaaatgtttctgccatttgaaaccaaaaagtgggattttgagaatgtagatcatcaaaatcatgccaacatgtgtgaacatactacattatttgagaaagcaaatatggtataaacacatccaaataaaaacagtggaagttaggtgatttttttcaaatgtttgccatattgtagcagaatttcagtttttcaaattttcacatgatatacacttagcctttttctagatatcctattaccatatatatatatatacactatagaacagaatatattattctatatataatatgaatattctaatctctaataaaatacatagtataaacagaatattgtttgatttttgttcagacattgttccttataaccagaactccaactaaacttatttagtctagtgctattcagaaaaaaaatgtcaatcatagttgtatggataatgatcactggcttttatgtcattaacattacaggaccttaagttgagttaagaagatgtaagtcaatactctctaaaggttcatcagctatttatagttaatttacactcctaatgtttacataatcttaaccaagtaacacatattgaatatggaaataaatattgccctggtgcttttgaatgggaataagtaggcacagcataatagatttaacatataatgaaaatgggttgcaatctataataagacatgctgaagattcaataaaagctcagatattgattcattcttcaaattggtcattcattagcaactaattggagacctttgctgaccaatatgcttaaccgatttttaaaaataaacagcaaaatagcaatgaaatttcataaagcaactattccctgaccataaaacaaggcaattaaattgtgcaaaggttaattttgagcacataatcagtaactgtaatagaaacaaatcaaagaaaagaattgaaagatcctaaatgtaaattttattagtgtctttagttttatggttagaaaactctatgaagcaacaatggcatggtgagggataagttatttgttttattaaagatttaaataagctttaccaaggaccagattttggttctactttaggccctgacaagaagtcttgtaagctttttaaagagctcacttcaaatcatagttatcaatcttactaattcataactttgtacatatcatttatcttctctgagctgcacttccttcatttttataaagtggaaagaattaataaaatttatacaatgggttatatgggaattaaataatatgaagaatatagaatagcttcagaatcaatgtttcttgtactctgtaatccctttgtagctgtatgcttttgctctctttatttatttaattatgtgggataattggtacataatccaattctatattttctgaacatacaacataaagaaaatactttatccctggtctcttttcttggcttcctcccatgattgctgaggcctgggaaagtacaggcctggcctgctccaatcaggtctttcagggcagaccaaagcagggcacagggagtcttacccatacctgcaaaacaggaatgaggccatggtcagggtcagaactagtcagtgctgagggaggaggcaaaaatccgagagaaaaagtgacaatgccctggtgaagttttagaaatgttagcacctgcctgagatggcttttgtgtaagtaagctggctgtctttgaagggggcagatggagctagactgcttaaactcatcatataagcgagcaagagaagtataattttgctctcctttaaacagaattcccagcatgtctctttgttcttactacttatttttctatactgtaaattaaatttttaaagaactggagaaaagtccactaaaacaaattactaacagtgacaaataagcagtgctttatgttaatatgtaagtgcaccattgtattagtccattctcatgctactaataaagacatacccaagactggataatttatagagaaaaataggtttaatagactcacagttccacatggctggggaggtctcacaatcatggtggaaggcaaagaagtaacaaaggcaggtcttacatggtggcaggcaagagagcatgtgcaggggaactgcactttataaaatcgccagatattatgagacttatttactatcacgagaacagcatgagaaaaacctgccctcatgattcaaatacctcccaacgtgtccctcccacaacacatggggattacaggcgctacaattcaagatgagatttgggtagggacacagccaaaccatatccaccattatgtttattcaatgtgtaacctatatgtatctgtatctatagccacatctatatccagacaattacataatcttatatgttgaaacaattacagattcaagtactctgactcactcatcatttacataagctttcagcagagagaccatacttatatgccattccctctgcctgatatgtttgttttttctttcttcattttccctaacagataaacttctatttctccttgaaaattcagctcaagattacttcccatgataagcccatcttagtaatatttttattctcagatcctttactgtctggcataatatgtgctcaaaacatatttgatgaaggaatagttgtaccgttaaatgcaaaatggtgatgaatgacaaaatagaaagatatacagacaaactttatttaatcgcatatcatttattaacctagaaaataaaatgtctaagatagataatggcgtggagaccatctaattatttttaaatttgtaacctgacaaacgtcacaaaattgttaggaagttttcactaaggcttatatcatggaaaagataaaaaaaaataaggtaaaaacttttaaatggtactctactttttataaaacattacattttctaatgaaataaataatactttatgaatgtttaatatttctctaaccaacaattacattagctttccttatgtcacactgacagaatgtctcattgtgttggggccagagagcacagagatgaggggggaataaatgtatcaggaacaataaatgagatagtgattaagtgaaaaagtaagtaccattggcaaatcaggaaaaattgggaacctcaactttcagctgaagaaaaacacaaggcaggaggccagatgagagttgggggtcactattttggaggaacaggattaagggatttttaaagacatatgtataaggagggagaaaagaaagaaaagattctttgggggcagctctttgggagatcttaagaatgactgagacaagaactgagttgtcacttgatcttttgaattcatttacctgtggaattttttggagtgattacaataaagatttaaactatttataattgcaatttttactgtactattatctttttttaacagaaaagaaaacttaatagtcaatacatactctaataatcaaatattataaaaatcttcctaatttactttcttttttaattttttgtttctttcaatgcaattctaaggccaaccaggtccgcaaggtagcactagatctatgctggtttcataaaacattgtagatgccattcagtagagtgattaagaggatagactctggagccagattgctttggttcaaatcatagctctgctacttgctagctgtaatcaggagcgagttacttaacacctctctgccttcttaataaaatagagataatagtggtatgaagctcatgtggatgttttgtgtagcaaatcattgtaggaacagtgtctgacaatagtgcttggcacattgcaaacattcaacgatgctggctattatgattataattattattattatatgcagatgatacagacaaacatttatgagtccaatatttataatctaattattcgtttattttacaaatacattgagtgcctactctgtccctactatgtgccaagctttgaggataaggcagaaaatacaaattcaagatctagagatcttggtaaaaaaggcagaaaacacaaactcaagatctagggatctcagtaaaatatcaagccatgagatttagtcaggaaggtttcttttttcttttctttctttctttctttctttctttctttctttctttctttctttctttctttccttccttccttccttccttccttccttccttccttccttccttcctttctttctttctctctctctctctctttctttctccttccttctttgcttccttccttcctttctctctctctctctctctctctctttcttgacagagtcttcctctgtctcccaggctggagtgcagtgatgtgatctcagctcactgcaacctccacctcccgggctcaagcaattctcctgcctcaggtttccaagtagctgggattacagatgcccaccaccacgccctgctaatttttgtatttttagtagagacagggtttcaccatgttggccagactggtcttgaactcctgacctcaagtgatccgcccacctcagcctcccaaagtgctgggattacaggcgtgagtcaccacacccggcgaggaatgactttctatcagaagttgaattgatatagacctacttggcacatatatagagctgaaacaacctagatggtcggcatattttctccataaatagagtcaaattatctgtaatttcaaatgtactttctccaagaacagatttttcagttaaagagtggcttttgatgagtgactttgctatactgttattgaaaaagggtctataatatgcaaatgctagacatgtatgaagcacaattgacattaacttacaggaagaaaagagactgaatttggttctcagagggaataaaaaaatctccccagccctacacttagatggacctctgagatcgtatctatgaaagttaaaaacttctattatatctaagacataattactggtgtatgatcatggaccactataatggcttgtttctggcaatatattgctttattatattgctggatggcatggaaagcagtaaaaattggtattccaaagtaaacattatctatcttctctagtctgggataaagaagttttaataattatttacactgaaggataattagagcatgaaatgaccatgaaaaaatatatttgcatagttgtgcagaaacattaacatgcaattatgtcttgatactagatataaaatatctgaaatggaagatggaagatttagtgggatcttttaccaataacttcaacagaagatttgtgttttagaatgtgtcctagagacaggaccttcttcctagctaaatattagagataaaaaattaaaaagaggcttaaagtccatacttaagacccagaaagaaaaatagtattcttttgataacacatagtatttatgtagtatactgaattgtcaggtatttatcattaattatctcatgttgggttactttaatgctccgaaaaatattttatctcaattgcttttaaaatgtatcaaaatcctaactttgtttctggtctacacaccttcatttgtccatctttttcaggtttattccctgctgtcctgaatcttgcttctaatgctcttatcacgaccaatgcaacatgtggagaaaaaggacctgaaatgtactgcaaattggtagaacatgtccctgggcagcctgtgaggaacccgcagtgtcgaatctgcaatcaaaacagcagcaatccaaaccgtatgtattttagtgtgtaggtgtgtggcgctgggtaggatctataattgtgagatgttgaggccaagttgcattaaattcaagggtttgtaatactaagaattcctagaattctttttaccattaagagcttcttcctggcccctctctgtcattcagcaaacattattggagttcctgctatgtgctaagtacagtgattggagatgattcgccagctgaaggcctgtggcagtcattgggtttactaactccagataccaaagtggtttctgagggtgtggttattaactcaggctgtcatcattcattggtaatttatgtgccagatattgtgcctgagatccaggaggaataaggtaggatatcgtctttgagctactgatatatagtgtggtaagtacaaaggaaagaatgagcacagcgttctgcagaagagagaggatggccacaaaggcttggtgtaagtaaaggcttgccagaaggagcgatatccaagctgatgaccaaggacatgagctaaacaagggtatgagataaacaggtaaagaggtgagggaggggaagaggagaagtcatgccaggaagagaaatcagaattagacagaaaatcctagttactcggggagctacaagtaggaatgactagaactgaaagtgccaaagggcagagagtagagatgagactagagcaaaaggctggagccagattatgaaggcatttaacaaccacaggagaagtgatttagggagaggcaccatgtaaagccctctttccagcctctatgaaccacagtgatacctcagactcattgatgtatttattcaacaggcctttgaacacctcctactagcaaagcattgtattggagcataatgttaaattacacataacccctgattcagaggacctagaggggaaatagaggcaaaagaaaagtaaattcagtgctaaaataacatgaatgctccatgtagatgctaaagtcatctaaagatttctggctaagaaatctttatatctatatatctctatctgtatctatctttctgacatgccttcttctcttctcctcgcttacctctctctctctgtatatatataatatatatataaaatatatatagcaggtagatatatacttatatgtaatctacataaaggtaaaaatatatattatttatatttatttatattatttttaatgaacagatatattattttatttttattttgtttttgaggcagaatctcactctgtcacccaggctggagtgcagtggtgcgatctcagctcactgcaaccgccatctcccgggttcaagcaattctcctgcctcagcctcccgagtagctggattacaggcacgtgacaccatgcctggctattttttgtatttcaagtagaaatggggttttaccatgttggccaggctggtctcaaactcctgacctcaagtgatcacccgcttcagcctcccaatagatatattttttgttaatattatttcatatataatatattaaaaggtagatatatattatatgtagagagatatattttacatatctatagatcgatctatagatatctatatctatagatcgatctatagatatctatatctatagatagatatatagaggccagaaagtaaatgaattgatggattattagtttcaggttcattaggcaagatgataaagcctgatggagggaaaccaccattggttcagagactggtggccttgaaaatttcatgaagaatatgagaaagcccaggggcatgaacggagttgtggggaggaggtgcgagtgtgtagatgtgtgtttaggatgggctgtgcagacggggagaattagagagataaaatatgtaaaaccataagtgtgtgtatatgtatgcaggtatatatatatatatgtagagagagagagagaaaggaggtaataacgtgaatacttaatgccaagtgaggtgaactatgatgggggtaaagcttcacaattatattattttaaaatttgcttagtatttcttctcctttttttttttttttttttaggcagagtttcgctctgtcgcccaggctgcagtgcagtggcgcgatctcggctcactgcaagctccgcctcccgggttcacgccattctcttgcctcagcctccccagcagctgggactgcaggcgcacgttgccacgcccggctaattcttttttttttttttttgtatttttagttgagacggggtttcaccgtgttagctagcacggtctcaatctcctgatctcgtgatatgcccgcctcggcctcccaaagtgctgggattacaggcgtgagccaccgcgcccggccttttctctgtctttttaaatagaccttatttttagagcagtttgaggttcacagcaaaattaagaggaaagtacagaaattccccatatttcccccgccccaacacatgcgtggacttctccattaccaaaatccccctccagagtgctacatttgttacagtccatgaacctacattgacaacagcatcacccaaacttcatagactgcattagggtttacttttggtggtgtaccttttatgggtttggacaaacttataatgatatatatctaccattagagtatcacgcaaagtagtttcattgctcttttttttttaaattataaaatgtataaaatgagagctttttctcacaatttacattttttatcccaaaaagaaaattgaaaggcattgtgccttttttcttggagctggttaaagagaggcatgcatagtcccctcattatataatttaggaatgcagaaaacattactatatttcagcaattgacacttgtttgattaaaattagtggtcgtgtgtatcacagaatatcagaaaacatgttaagacaccaaagaaggcaaccaccagaaacctttcctattaatgactctggttaatttctttcttttttgttttgttttgttttgttttattttgagacggagttttgctcttgttgcccaggctggagtgcaatggcacgacctcggctcaccgcaacctccgcctcccgggttcaagagattcttctgcctcagcctcctgagaggcatgcgccaccatgcccggctaattttgtatttttagtagagacgaggtttctccatgttggttaggctggtcccgaactccagacctcagttgatccaactgcctcggcctcccaaagtgctgggattacagacatgagccactgcgcccggccgactctggtgaatttctcggatgtaagttgttatggtatgtgtgtaggagtggggagtatagttgcatacccatgtgtttgctagctcttgtatagaatgtaagaggaaaggacatatgtcagagccctttgcttttatgtaaaagccaagggagttcaggtaaatggagtcaaggcaataaagggaaacagatttcaagggaaaaaaatcaggaaaatgaggcattaggtatgtgatgaaggaaagaatttttaggaagaaaaagtaacagttttaaatgcttcgaagataattgagtaagaaaagcataaaataggtttcccttgcttttgacaacatggccatccattgaacacctttctaaagtactcagcagattcatagtggcaagaggcacactgaagaggtaataaatgaatgatgaagaagaagaggggactatagaaatattctgtcaagtatccttgatgtgaaagagaatgaaggacagaggaggttgtggagttgcaaaggttttcaaagataagagacatttgagttggtttagatgcttggggggaaaggcagggaagttgaagaccaagtggtggtgggcatggtgtctctctagaagtaaaaacatatgggtcattaagcataggcaaaaaccttatattagaagatacatacttttaactcaccaaatcagaaagaagaaagaatgaatagcagcagtcagcagaaagtgttgggagaaatttcttatttgatgatcttgatttcttcattaagatgtaaatctgggttacctgctgaggaaagaagcaaacatttagattatgagcctctcaggggaataggaggggatcactgagccgtaatcagaataaagtggcaattccatatggagtaaaataaagaatcaaacgtgtggactgatactcttggagcattacagggaaagtagaatggaaagagaagatggcaagaaaattgaagaaaaggtcagaaagtaaatgaattgatggattattagtttcaggttcattaggcaagatgacaaagcctgatggagggaaactaccattggttcagggactggtggccttgaaaatttcatagagaatgtgagaaagcccaggggcatgaacggagttgtggggaggaggtgcgagtgtgtagacgtgtatttaggatggactgtgcagacagggagaattagagagataaaatatgtaaaaccataagtgtgtgtatatgtatgcaggtatatacatatacttatgtatttattaaatatttaaattaaacatgaaatatatgatatgtaatataatatacttatataatattaaataaatttatataaataatatacacatataagtataaatattatgtatatataataatatgtacctatgtgtatataatatttacactagaaaggcaagaaataagaaaatgtatccaatcataaaaatgggatggaggaatgatgcaaagattggggtagaaaataatttagttctccactcaattatttttattcttggctggaaaaatggatgagatgcattgtcagattgagtccaaaagctattctgtctttcaccctcttgaaagttctacattcagagtatcttttgtctcgtggaagataaatatattcagccaatactatccatgttttcacattgaaaccaaaaatgaatcaattatttcagtaaagcaaggtgtatataagttatgatttgtatttccccatttttatttacctgtagtgttttctaaaccagtcacagtctggatttactttacattattattatttattattattattattattattattattatttgagatggagtctcactctgtcacccgggctggagtgcagtggcacaatcttggctcactgcaaccttcgcctcccaggttcaagcgattctcaagcctcagcctcctgagtagctgggactacacgcgtgtgccactgcgtctggctaatttttttgtatttttagtagagatggagtttcaccgtgttggccaggctggtcttgaactctcgacttcacatgatctacctgccttggcctcccaaagtgctgggattacaggtgtgagccaccgcgcctggcctgcatgattatttttaaatgaccagattcattccacatttccagattatgctttgatactagaaatttagaaagaataaaaccccacaagaataaaaatctagcaatcaactgcatgaatatattttagtaaaagttggagcaacagatgataaaattccacaaattcagtgaactctgagaataaatatggaaggtccgcagttaattatcctgcaaagaaaacgaaccttgaactttctgttaatagactttgcttcccaattaaaagctagcagtttgaaaggtttacctcatcagcgattccctatccagttttcagatgcagttagcccttggattgacttgcatatttatccctgttgaggatgttatacgtttctatctccttttaaataagggaactttgccaacaattcgtcagtatttgcaaattaattatgattaaactttcataatagggattatggttaattgttgattcatctcccagtcctcctttttgtgactaattctcttatcagtttgacctgaggtggcagataccacaatttcctattagacaacttctctcacaattacctaagagccatgaatttgatttagaaatggggttgtatgtgtgtgtttttctatcacatattaaacgcacaatctgtaaaaaagattcaggaggatgtttgggaaatgttttctgtgatatttatttttcttcagaagaagtgccaacaatatttcatttatggttttgattccccatatgccaatttcagcaccctcttatttcaccagggtcatttatttggtatttagttatgcttctgatatttgctgtcatcataaagacctgacatcttccctagcttcaaaagaacaatttgactaatgctaacatttaaatatattcagaaattttacttttcattaatgagacaggaagcctcatctctatggactgctaacatgatgatttggtggaaaataaagtccagccagctgttaagttgaattaaaaaatttaccaataataatggaatatttttgccctgtcttgtacagtcatattaagatttgcaatatgaatatccatatctggaataggactataataccataaatagcttaaaacatagtcttcatgttttcagtaaatgttatgacagtgtattatatattaattataaattaatatgtaatacaaatcttcacaaatctgaaaatgccaaatttagtgaatattcagctttttaaattttgaaatggagtctcactctgtcacctaggctggagtgcaatggcgtgatcttggctcactgcaacctctacctcctgggttcaagtgattctcctgcctcagcctcccaagtagctgggaatacaggcacccgccaccatgcctgtgctatttttttttttttttcatagagatggggtttcactgtgttggccaggctggtcttgaactcctgacctcaggtgatctgcccacctcagcctcccaaagtgctgggattacaggtgtgagccactgcacctggccaatattcagcttttaataaaatttttcttttaaagatgattttactttctatcagattcctattgcattgaggacttagttttgctttatttttattgttttttcaaatgttttaccaagtacaacttgtctctaagattcaaaacagtgtacattttgaatagatgtatcatttattttatgtatatgcataataatggttagaatgctcacagttatactgttcatcagtaaccctgtgaatacagggttcacatccaagatgttctcactggtccgtggcaaagtaagaaaatgagaacaactttccacatttttcataaaaatagaaaggatacaatttaaataattgtcctccattttgatattatgggttttaaaaactaatgatggtttttaaatgccctttgtttcatgaaataataatgatgctttattaaatgatagaaatatattggaggttattattacttggaaaaactaagagctagaactcctatatcaatttcacaaatcgatcacacatttatttttaatttcatattttttctctgaaaattatgaatctggaaaccactgctgtgagcggaattttgttattcctagatcagagatgacacataatgttgaatgatttgtctgtggtcagttacgtactaagtggtggagccaggaggaatatcagctacccgtgtgccagcacctcatggtccccctctcatcaccattattattagaatacatggctagattgcaatattaggtaggcaaattgagagtccatgtttgttcctcatagcaatgtgatttgttccttatgtgaggtattccttcaaatttaaaaaggattgtgttctaatctaaaaggtcattcataagccactcattcgaaacatcttcccagatacttagttttatgaaattctcaagactgacaccccaaagcatccttaatctataataaacacaggagtacagggaagctcacctccactttgtttacatttctatgggcaaatgtgccgactttctagtgagatgtgaggaatttaagtgcccttactgcagccttgggaatagaaacaggatcatcaacagcctccactcctgccatcctcacccatgcatgagcaaggcctgtttagagagggagaaagaaaaagaccttatattacttggaaaatgagaagcaaagattttagacaagaaccaatgactgggaaccaaaatgcaatgagggcttggcagcccaggagtagtggctgctgttgtgagacacatggagctaaaatgggagagatgagaaactgtgagctttgaggattgtaagaaggaagggagctgcaacaaaggtcacaggtctgtggggttgccacgcctcctattttctatctctaatctcccttttgattttcacaattggtcctgttcttatatgtctgggtgaaagtaagggaagatctgtggtttttggtaggatagagtttcatgtgccatcatctccttccttgccattattgtaaagattcctccactagagttagtgatgatggcaacagacaaatgccggatgagaggtttgggttatctctcatattattaaatagtgatagaaaattggcaagttaaagactggccgcaaaaagcttctgtaagggccaagggaaaacttctcttttgccctctgaaggtttgctgaaaaatcaactgaaaaaagttagcttggtaggtgaaaggcatacaaaatgtattttaacatgcatagcatggaagaatcacaggaggatgattacccaataacccaataggagcatagatgtagatatacccttcttcacgggggagggaagatggggaaaatatggcaatttggaaaatagtaaatgattttttaggggaattcaagaacctacaatggcctgggacaaagtctgttgggcccacagagcagatagtggtttgtaacaaaagtctgttcaggtgtgccgacagacttcagtctctcttcatgtgaaatgagttaaattaatgaaaacttaagcaagagggccagaggaaacttttcctcctggtgggatcagactgtaagtagatacgggagtatcagagtaaaacttatttcagcatttgctggtctccaagagcctttaatttaaaataatcagcataccagcatgctatattttcgggtattggtttctgagcctcaatatctcatagaatgaatttaacagcattttatgttaaaaccagatatatattggactccctacgtcttaataataatgaatgtgtcagaagggcaagtgttcaagtgtatttcaaccacaagtcaggattttatgtttctgttaacaaggttgatggcatactagagctgtctcaatagttagttgttgcttttttgaatgattgacaagtcaattagattttaacattatatctttacacttaatttctgtagttacctttaaaattgcccattttggttaatggccagagtgctgaccagctcattcccctgcagcctaagcatttaaacatttcctgctaccttgtatggtgctatgagacagctgtcattgaagaaattctgttgagaatctgaattactctccttctgtattattttaatgtttgatattcacatgatggttgttttaaccatttttttttactttaaagaaaaagctataaactagttatatgatcttttcttcttcctttcatatgatgctgctaactcaatagagagacacccgattacaaatgctattgatggaaagaacacttggtggcagagtcccagtattaagaatggaatcgaataccattatgtgacaattaccctggatttacagcaggtatagttcctctttttttgtcatttccacttttgaaattgcattttacatttgctatttgtttagttagtggtttgtgggtgaaaggatactctttcttatcactctccattgttttcttgataagatgaacaaagggtcctattcatatagcgtattgttatttacgagtattcagcatttaattataaagcacaattcaaatggaagcacgtgaagagcttagaaatgaattaggtgctaactctgttttagctagctggacttaatgatgaaaatatggatcaataaaattttacataacaaaaatataatagtatcatttttaacttttaaaataatacattgctcccactgtgctgatggtgtgtgcacttaaaggttcttggataacaaggctcttgagcaaattgcctctcattactgagagctgagaaagttttgacagttgctttcaagttaaacttgggtgactaaatgaagtaacaagctttgtagttatacaaaattgatgccggaagttgttcaagtttgtcttgcataggcctgggtgccttctatgcttaatctctttcttccttctcttcacaatattcaggtcaggctgaagttattaatcaggaatcgccagcacctcaaattatttaggcttgcaattaggatggaaagtggacaaatgccacattccatcctatttgtatgcctaaataatgtgcaggggtgatggtcaggatagttaatgacagacaccatacactgtaaaggtcatggtttttataagttatcactgtgtggggaagcccccagccagtgggccagatcagcacaagacattttcctaatggatgccatttgccaccagcatgagtacaatctccctcctccagtgtctaggttcattttggtgagggctgcatatattcaagagccacagaaagctggctggagcaaacaagctggtggattgcacggtagacctgccttccacccatatgggcctcctcgggatatgaggaactggtggcggcaggggctcagtgctgcagcttatatcaccaaatggcatggacttatttctaccctcactaatatacagcagctgaatgtcagtcctgagttaataatatttctcaggaagtctcagagcactatcagagaatggcagggcaagctaccacactgatcaatcatgctttaggaaaattaatcctgtgcatgaatcccctggggatcttagcctcaaaatggactgcataccactcctgataaagacaactttgtcctttattggtcacaagagttctcccccttcatgtgatcattgaaagtctagtctcccaatcaagagtgagtctgctgtgcattgactcaggtcatctccagggacaggcaatcaataaataatgatgctttattgttctggtttattctccatttattcttttagattgcacatagaacaatggggtcaattattaatataatttgcacaaatcacttatagtactctttgagctgaacagcaatattatttacctgttatcaaacatggcagcatttttcccctcctaatttacaactggatggcgcaaccacaagtttttactaaatcatttctaacttgcctgtttttatcaattcagcaagtcaaagagtttacctgaaagcctatttttcagtgatgtcattgatattttcctaaatttactttgcatactcactcatccattcccacacagtatcttaagaattatgtggatttgtcgttctgttttctcttcctcccatttagtttaatggaggtaagatgagtgaatatgccaagacatattttatgcttcattcatcataacaaagtgccagaattctgtatataacccaggtctacctgactccaaagtctgaaattcaccaagtggaattggtacagagcatatgtgttcaaattgtcccatattccaggatggtgtccatccatatccttatttattccagctttctatttcctgaaaatcaacctactgtgtgtgtagaagaaggggaattcaagtaatctctaaaaatgtaataaatccttatttctacttgactcaagattttaatttagtcagttatttagtgatgtgaaaagttaaacaggttttgtaatcaagtttcgtgatggaacttctcagacaagaaagagcttcagacttccaatttggcctcaggctttggaataacaaactgtgagacatgtttataatacttattcagctatggatggtatattgtactgcactggcaacagagaaaatgtggacattcttattatgtaactcctcacaataatcctgaataaaccagctaatattaatattcctattgcatagttgaagaacactgtgctttagaaaagttcagtgacttggccttctttctaaagcttattatgggcagggctggggcaacatgaatagtctgaatccagacccaaatacactatcttttctaatgggtatctgaagacataatcctagggagctcaggataatttttattatatattttcaagggctccaaatgtagttcaggttcaagaaatattgcactatcttctcctggcttctatgggataatatagccaacaacctgtttcgttataaagcaggggactagaaccctcattttctagtatactctagtgtgcctctaaaatggcaaagcttctgtcttttctacctaccgcatgaaggattaataggttattcaaaataagatgagctattatccaactgggattaaaaggcagtaaaattataatgaataggtaaatatcactaaatgtttgtttgtcatttattcagcaagagacttgaccatttattagttcttcttttgtataaatttcaacaagtgccagtattgttgttgataaatgcttggctcctctgtgacacattttcataaattagtatcttaaacataacagaaacgattgcatttatttgattaaatcactatagattacagtgggtttttttttttttttttttacattttaacattcaagataagcactagaaaaaatagcaatttgtttggaagaaagtagctacttattttataagtagattgttcttagatacgtattactaagggattattaacttttctcattctatttactcatagcatattttgagcaagtgatttaatcatgctgtgcctcaacttctagattagcagactaaatattacaatatcttggcaagaaaattaaagtaatgataatggcaatatagcaactaaattccatctcacaattacagctattaaaaggatctagagtcagcatgaacttaaagaaaagcttaactgttccagtgacgtgtatataaaaactcaatataattgcgaacaaaaatatacaacaatttaaaggagacagtaatagggactcaaacgttaataagatgtctaaaacattctattttagtctttttcctaccagatttcaccagaatatgtcattatgtctgattttatttatttcttttaaaatctagccattatctccgtcatgccctttgatttgtttcagaagaaagctgattggcaggcggggtaaaacagagggaggcagcttttcagtagacttttcaaacacatattgaggtgatactcactcctggctaatccaggaatgccattaattagttaagctcatgtcttaactaggagtcttctcctcaataagcaattcacttctcttcctggtctatccctcaaaactaagaatgcgtttaccaaacaagattatcttacagctacagagatcacactccacatattcttaacctaaatattttattcactgatcttgcagagaaaaatttgtttggacaagttaacagttttaactggaatttatgttttaggaggaggataaactactatttctatgcaaatattactatacttttagaatccatgtgaatagtataaaatgatttttctctaaagcctagaatcattaatgtaatggttaaacatttctgcaataataaaacataaaatacgtggaaatactttatatattcaagttttaacaatcatttaaacatattaaaggtgatccaattttcagtcttgaaggaaggtcattattctttcatgtcaattctttcctcatgctcttcttactgattcctgattactgattaaaggatgtgttgtacaaggagggaattttggaaaattcacaaatacatggaaattaaacaacatactcccaaacaaccaatggataaagaaaaaattaaaagagaaatttaaaaataacttgagacaaatgagaatggacacactaacactgataagaagaagcaaaagcagttctaagaagaaaggctatagtaataaatacctacgtcaaaaagaagaaagatctaaaattaacaacctaaggttacatttcaagaaagcaaaaaaaaaaaaaaatgaagaaaagataaaagaaagaacaaactaggcctagaagtagcagaaagaaggaaataataaaggtctgggtagaaataaatgaaatagagactagggaaacaatggaagagattagcaaaactgtcacttgggttttggaaaatataagctaaattgacaaaagtttagctaaactttctaagaaaaaagatcagaattgaaagaggagacattactactgatacttcagaaatacaaaggatcataagtgactactctcaacaattatatgccaacaaactggataacctagaaaaaatggaaaaattcctagacctactaacactgaatcatgaagaaatagataacatgagcagatcaatgaagagtaaggagattgaatcaggaataagaaataccctatcaaagaaaagcccagaacctgatggttttactgctgaattctaccaaacatttaaggaactaataccaatccttctcaaaatcctccaaataactgaagatgagggagtacttccaaacttattttatgaggccagccattagcctgataccaaagccaaagacactgcaagaaaagtacattacagatcaatatttttgatgaacatagatgcaaaactcctcaagaaaatactaacaaaccaaattcagcagcacattaaaaggatcattcactgtgatcaagtgggatcactaccagggatgccatggtttaacctttgcaaatctataaatgtgataccttacattagtagaatgaaggacaaaaatcatatgatcatctcaatagatgcagaaaaagcatttgacaaaattcaacattgtttaatgataaaagctgtcaacaaattagctatagaaggaatgtacgtcaacataataaagactgtatatgacacatcctcagctaacatcatactcaatagtgaaaagctgaaaggtttttctctaagatcaggaataagacaaggatacccacttgcaccacttctatttggcataatactggaagacctagccagagaaatcaggcaaaaaaagaaataaaattgtcatcaaaattgaaaaagaaaaaggtaaagtgtctctttttgcagatgacataatcttacatatagaaaaccctgactccaccaaaataactgttagaactaataaacaaattctgtaaattagcaggatacaaaatcaatatactaaaattagcaacatttccataaactaacgaggaactatctttaaaaaaatcaataaaataatcccattcaccatagctaaaagaaaaataaaaaatttggtaataaatttaaccaagaggattgctatgatttggctctgtgtccccacccaaatttcatcttgaattgtactccaataattcccatgtgttgtgggagggacctggtgggagatggctgaatcatgggagtgttttcccccatgctgttgtcgtggtagtgaaaagtctcatgagatctggtagttttatcaggggtttccgcttttgcattttcctcattctctccttgcctgctgccatccatgtaagacaggactcctccttaccttccaccatgattgtgaggcttccccagccacatggaactataagtccaattaaacctctttcttttgtaaattgcccagtctcaggtttttttttttttttttttttttttgagacgcagtctcgctctgtcgcccaggctggagtgcagtggcgggatctcggctcactgcaagctccgcctcccgggttcatgccattctcctgcctcagcctcccaagtagctgggactacaggcgcccgccactacgcccggctaattttttgtatttttagtagagacggggtttcaccgttttagccgggatggtctcgatctcctgacctcgtgatccgcccgcctcggcctcccaaagtgctgggattacaggcgtgagccaccgcgcccggcctcaggtatgtctttatcagcagtgtaaaaacagactaatacagagatgaaagactggtacactgaaaactgtaaaacagtgatgaaataaattgaagacacaaataaatgggaaaacatcctgtgttttgtggaataactaatattattaaaatgtccatactactcaatgtgatccacagattcagtgcaattcttgtcaaaattccaatgacgtttttcacagaaataaaaataaatcctaaatattttatggaaccacaaaaggtgctaaagcaatcttgagcaaaaagaacaaagctggaagcatcacactatctgactttaaaatatactacaaagctgtagtaatcaaaacagtatgctgctaacttaaaaacagatacatagaccaacagaatagaataggagcccagaaataaatctaagcatttatggtcaattgatttttgacaaagatgccaagaacacacaatgggattgaactgtctgtccagtgaagggtgtttggagcagtagatgtccacatgcagaagaatgagtatagacccttatctcatgccatataaaaaatccattcaaattctaaatgaattaaagactgaaactgtaaaactactgaaagaaaacacaggggaaaagttccatgacattggtctgggcaatgattttttaaagatataaaccccaaagcacaggaaacacaataaaacatagacaaatgagattacattaaactgaaacacatctggataaccagggaaacaatcaacatggctgctcttcaaatcactgaatttattttgttggtactatttgggtcactgctaaattggtgaataccaaactaacacagaagagattataatatacatgttccaaatgtagattataccttacctgagtataccttaagtacaacagaatatagttaaaatcacagttctttacctgttttaattgtatatagatttttaagatcatttgttcagtatcacaagtagaatctgtggttaattagaaaatatattttccctttaaatgaatttgtgctgacttttaaaattattaataaaggtgacagctagctttggtgtctatattgaagaaaatgttcatcctaattggtttccgtttgtctaccctttggtctgctttcaacacagcagtcacagcaatctcattagtacagatcacataacactttccactaaaagtggaaatcttattagtacagatcacacaacactttccactaaaagtctctactggttttccatcacattcagtgggaaaagcacaatgacccacaaggccttaaggaccttttcctcacctcttttcatctctggcctcatctgatctctcttcctcagttgcccagctggtcatcccgctatgtcttgaacactcacacctgcctcagggcctttgcacttgatatttcttatgtctagaattattttcttcaatttcaatgtagcttgtttcctcacctccttttggtttttattcaagtgttaccttctcaacaagggcctccttgacaactctatttaaaattgcagctcccagcctgtccacttcctaaaccactttcctgctttatttttctccataaaatatatcaccatctaacttactatgtacatgttactgttcagttgaatatttatctttctaaatgcaatttttttgtgcgtggagctatttgttgttgtaatcattgctttctaagcacttagaatagtgcacaacatataggaagcattcaatgtgtttgtattaagttaataaatgactgaatgaataactagtacaaaccaccaatccataatttaagaatcttattgaatctgagaattaaaggattaagtgatttcactgtgcttcttatgataaaacacactgcactttttctaattatgaaatttcctttaaggttgaatggcattgttttagtctatttgggctattataacaaagtaccagatgaggtggcttataaactgcagcaatttatttctcatagttctggaggcttgacgtccaagatcaaagcactggcagattcaatgtctggtgagggtctgcttcctggttcatagatggccttcttcttgctgtagcctcacatggcagaaggggcaaataagctttctggggtttcatttataagggtactaattccattcttgggggctctgtcctcatgacctaattacctccccaatccccatcacctaataccatcacattaggggttaggatttcaacatatgaattttaggggaacagaaacattcagtctatagaaagcgtgaagtaaattttcttccagttcctatgcatgttcttactctgcttttaagcgtattctaaatttcagttgtatctgtcactatgtgactttaccacacttacagctttatttaggaaaagagatgttaattattttaactcttcttttgtaacagagaagtctgggactgtcattttttgttttttgcttgacattgtattttttcctcatagaacaaaagttagtataaaagaaagggaaaaaaggccatacaatgatgctgtttaaacaagagtgtaaatgtaggatatgtattttgatctaaaatgttgataaaccaaattctagcaataccatgaaaatgtaaacattttggagacccagatcctatttcaaatagagtcaagatgactgccctagaaaatgcttcttgaagtcatggaataaattagatgattgtttatttaaaaaaaaagaacaataatacataggagatctgttaaaaaatctgtgaggaaagagctgttaaaatgttgaaaccacatgaattctgttatggaaagtctgaacaagactttctaaaatagattgaatgtgggcagttttcacagctgcctgatgacttccacacacaaaacatccacatttcatccttttggtggaatactgtgtattttccaattttattcttagagtttaattttttacttacatattatgcttatgtatatcatatttgttatatatattatatataactaatatacaattatattatttatttaaaaataaggaattaaaaacaattatattatttgtttttaaataaggaattacaaaataatgaagagaccgtatttattatagatcttgaaactgtgactaaaaaccccatgcacagagaaaattcttgagtcaaatggcttcattgatgaatagaagttagaatactggttattgttacaaggagagggaagataatgactgggagagggtatgaggaaagtttcatttcttatttttgattatataattgtacaataataatgtgttagtacatagaactaatataattgtaaataagtgtgtttatatataataaaatatacaaaatatagataatatattgtataatgtataattatatacaatataataaaaatgtgataaataatattgtataatatataattatatacaattatattaattatatgtactaatgtattagctatatgtatttatatgtacctatatataagactttttctagaaattgactacatatttgaattgtgagacagcatgtatgttttgattcatagataagatatgtttccaatattacccatatctctaaaatacaaacatggcaaaaaaaggctggagtgagactaaggagaaaggaggagctataagtgtgcccagattccatttctttacctatgacttatgcgttggtacatttaccttaggtaacttgtcccacttttatgctcttcaatttggtctagtgtaaaatggagcaaataggcccacttccttattacgaggcatattataaggataaagtgatgtgttataggcaaagagcatagcacactgctgcactttaggtgatactcagaaaatattacttttggtcttccacattgaaaataatggtgaatggagaataaatgggctaagttgtaatgtgaaaaatggaaaataacaaaacaaaagctcaaaaatgctttaattactggatattgaaatgatacctatgaggttcactttgtatatcacctaagaatattattttactcaatatatttttagcactttatggacattaatatttctatggagaaagcttaaaaagtgtcacttgtgcattgaaactcttttgtaacagcttctttactcttctgttgttgtcatgatatcctccagattacttaaatttttaaccaagaagtaaccttacttattactagtatgctctttccttaaaagcttttctgatttatgttattttaattatatcaatcttgttattatgtacagtttttaattattttaataatttcaacctttctgcaactttccattttagatatgtctcattaatggcatatagtgaagttttgacgttttgtctagtttggcagtgttggtcttttaatgaaacatgcattttcagtggatctgtgtgtatctaagtgaagcatgtacacagaaaaggtgacaaataaaagtctgagagaatttttgctaaatgaaccttcccaagtaactactactgagacaaaaataaccagcaacccagaaacttccctcatgccttttccaatcactatcttgccttctcccctaatagtaaccagtattctaacttgtattcaccagtgaagccatttgatctaggagttttctctgtgcatgggttttagtcacagattccatatctataataaatgtgggactcactggagttttcatttcttatattttcagtttagttgagttgggcttttcaagaaattgatccacttacctaatttttcaaatatatcgacatgagttgttagtgatattatcatcttttaatttacaatgatctgtagtgatgccctttttttattccagatattgttgtgtaacctttgtttttcctttacagctttaataggtcttcataatttcattagtctttttcaaatagccagttttgggcttgattgattttctctatcgtgaaattgttatattgtattgaatcctgctcttatatgtcttgttttttacttctcgttattttttattttagtttactacattttcttagcttcttgaaatggatacctatgttattaatatttcagttcttttttcctaatatatttattaacgcctacaatttgcctctacatagggctttagttgcctcctacaagtttgatatattgtatttttcattatcatttattttaaaatatattctaattttcatagtaaatttttctgtggcctctgagttatatagaagtgaagtgcttaatttctgaacaattgagtatttttctaatcgttttgtttttgttgttattcctttcctcactaattccactatggtcagtgtattttcaattctttgagactaaactttttgagacttgtttttatccaacatatggcagtgacttgaaaacaatgtggaccagttgccctggctcactcctgtaatcccagcactttgggaggccaaggcaggcggatggcttgagcccagaagttcaagaccagtgtgggcaacgtggtgaaacctcatctctaccaaacaaaacaaaacaaaacaaaacaaaaccccaaaacaaattagctgggtgtgtgcctgtagtcccagctattctggagtctgaggtgggagaatcacttcaacccaggaggtagaggttgtggtgagccgagattacgccactgcactccagcctgggtgacagagctggacatcagaccctgtctaaaaaaaagcaaagaaaagaatgcagattctatagttgttggttgcagtactacaaatatatcagtgagttatatttatatatattgatacttttaaattagagacatacaaatttaggattattaaatttaataatttaaattttgtattaactcttttgtattaaccacctttttaatactactgccagcagtacttctatctttagagtgtacttttgtatgtagattcactagcttccttttttctctgtgtttgcgtgatataggttttctcatatgttgagtgtacttatatttaaggtgtatcttctgtgagcagcataaatttgaattgtttatttaactaatctgataatcttttcctttaaattggatacttaattcatttacatttagtgttactatactgatatatgggttcaaattaccatattctcatctgttttctgtttgtcttatcttttgctaatttttcttcctcataactttcttacttttggaatactgaaggtttttccctatttaattattccatttcttctttcattagcttgtcttctgtgaagtcttttattactcatactaattaccataaatatggtaacttgcgtccttcatttatcagaactttgtaatattttacctcagtcccacctccccatcagatttaattctatagttctcatatgtttaattctatgtatatattaaactccataggaagtaattgttaccatcataaacatgcagttttcatctaattttaaacacctttaacttttttgtttattttttgttagtatactttgtttatttatttatttctgttagtaaacttccatcaagaaagtatcccatttcttttctgccttttttaaatgaaagcctgctagtgataaatctctcatcttttgtttgttttttcacttttctttacttttgagacttattttccaccaagtataaagtagaatttcttgcctggttggaattttgttttgttttgtttttttccagcactctaaatatatcctatcattattacttgtttttcattatttctatcatgaagtaagcggaaagtcttattgctggttcttggaaacaagatcatttttcctttcactccattgaaggctattttttttaattttgcttttggtgttcaggggtttaccacaatgtacttaggaatgattttattggtattaatactatttgggattcaaaagcttctagattctgtggatcaatgtctttcaccaatttggtaaaattcttagccgatattttctcgaatgttgttactgtccattctttctctccactctccctgagacttcagtcacatccctgctagaccgtttgccgtgctcattatgtattctatggcttcttttcatttgtcttctcttcttttgaggtttctcagtctgtacattttctgggtgacctgttgtttggtataaataatcccttttttctgctggattcaatcttctattacatacatttactggatttttaatttttgtatttttattttttagttttagaatatccatttgatactttaaaaaaattagactccaaatatctctccacttagtcatctggaacatattaataacagttattttaaattatatgtctgataactctgacgttggaaacaactgggagtctgtttctattgtcttttcatgcattcctgttttatgacaagcttggtcgtttttgattaaataatgtatgtgtctgaaaatgtataaaaattctggaagatgttatttttctcttaaaatgatttattttcattctgtcaagagttagtgtagaggcaagttgctttgcttcagtcagcaactcaaatgttttgtagcttagttagagattctgatggttgtttctagtttactcttagttctagggatagactttcaggactccagtggaaaccccgacttgtttaccacactctttccttcttggctgactcttaactccaaagtttgtcttcccaactctgggagacttcccaaggatcttcttagtttttcacttctcatgagttcatttttgcatgatgtttatcttctggctccttcaccacttagaaattggcaaatctcttgaaggcaaaagctgtgaagaatgtaggtctcatttctctatgaattatggtccctcacatcctagctgacttcatagccctgaattctaatgtttatcttcttatcctgtgagattgctgaacacactaagatgtagctttctctataacctcctattcaactgtcagcaaatcaataaaagtaccctgagaggaaaatggctagcttaccttaatttgcttccctttacttaagtctggctgccttggttgcttgctgatgccttcaaactgctgtttttagtattttatccagcttttatggttgttgtctttgagagaaaatggaaagggaaaaaatatttattttatttacagttttaaaaacaaaaatcagcatattatctgataaaattattattgctttttgtgaatttaaggaatgttctgaattattgcttcaatattaaaacaataattattggaacattttgatggattatgaagaaagaatatgtaaaattgggatcgtgtggaaaatctggtatgcatgaaattggcatataaagtaggcctaaacaaagcaggtgctattcttagtaagaagcttcatgccccttatggcatatctgccctgaataatacataaagaaaataatttaacaatatgcgtttgaaaaatatttgttgagcaactactgttttttaagcagtgttctaagcctgtaggtctgtccatgaaggagacaggagtccttgcattccagggttttcaagtaaacaatttagaatagtgcaagttcatgaaaaaaaaagcataagattataataagattatagacggtgatgaaagagctaatttacatgtatgttctatgtatgcatttttcaggaagtgatatttgagctgagaattaaaaaccagaaaataccagtcatagaaaaatctgggtagagtttattaccagcaggaataaatgtggggtgctgaggaaaggaaagaaggccaatgtggctggaacctagtgatcaagagcaaaggtggcatgagatgctgtcacggaggtctccaggtcttcttagctcctgaagggagtagtcagtcatgataaacagtttatattgaattctgggtataatgagaaacccgcagtggtatttaagcaggtgtaacatgatttcctttatctcattagaagtaacattctgctaaatggagaatgattatagtgagataagtgtgaaaactaggtggcagtcaggaaaccatagtacttttttagcaaagagatgatggtaacttggaatagagtggtagtagcagagagaagtggcaggctgagatttatctggagttcggcatcacccgaattgatggtggaacaaatgtggagagtggggccaaaatgttgactcctaggagtttggcctgaagaaattttcctgaaatagtatggattaaaggaggagcagaatggagatactgggtggcaattaagggtctgttttaacgtgttatctttgaagcattcgagtggtgccaggcatggtggctcactcctgtaagcccagcactttgggaggttgaggtgggaggattgcttaagcccaggtattcgagaccagcaaccagcccgggcaacaaagtgagacccctatctctacaaaaaaaagcaaaaaattagccaggcatagtagtcccagctactcaggaggttgaggcaggagaatcacttgggtccaggaggtcaaggctgcagtgagccatattcatgtctctgcactccagcctgggagacagagcaagacgctgtctcaaaacaaaacaaaaaaattattcaagtggaaatattaaagggacaattggatttatgagtctggagttgagtgatgtgcactgggaaagagactgtacttaacagtaaaggcctgtttaagatcatttagaaagcaggtatagagataaaaagagggcctataattgaatcctaggcacttcaaatttaaaggtggtaagatcaaatacatcaagaaagagggaatcttcagctatggcaatgcagatgctgtgaggtacaaattaaaccactcaggtcttggaaatacctaaacatagggggaaaaaacacctaaattgtaatgagtatatgtgtgtatatatatataaatatatataatatattatatataatatataatacatatataatatatcttatatattatatataaatatatatatataatatatataaaattagagaatctttaataagaggtgaatggctccaaacacagatttaatttggaagctcccaccctagcaatacctactggtgttcattttatttatgtaaacacacaaatgttgactatgtaatttttcaattaaggaaatagccaataaaattgtgtggaaaaaagatagcggtagcagataataacatcttttacttactaaagagattgtgtctaaatattaaaagtaatacattcccttgtcaaaacacttcatttttgtttgttttcacaaatattttaatgtggattttgagtcaaattttctgtaggaaggtcatggtagattaatgtcaaattagctgaaacaataaacacaatgaaaagaaaaatcagccttgtaagacagtacaactaaggagatcagtttaaaacactaatgaggagttgcctctcagcactgggtcattatgattatactaatataataagttaggttcaggttagaaagcaaagatgaataatcttcaaaaggcacagtaaatagtcaatttagttgtctaccttcataatatttactatttccatactaaaagcttacagttgtgggctagaatatatgatattcacgtaataatatttaaattgaatttcatttttttgcttcttcattatccttacctctaccctcctcaataaattcatctcaaatgataagattttccatccatcattgtgaagaataatttatttacttaatgattctggaaatatgggaatgtttataaaacgaaatacaaaaattaagaaatggagtgggcaagtaaaaagacattttcccactgattttagaatatactcaagaaaattaaactagtgacaaaatagatttatttaacttataagctaattcataaattaatggcaaaatttatcacagtatacataactgagactttgcagatttttttgtaaatagataacattctgatacaattaacagatctccatcagctgcattagatttcaagttgccctgctaccactgtatatatgcacatagataaatatgtatatgtagtgcaacacagatgagaagatataaagttgttttattttgttcgaatatgtattacagagaaccctatgtgctgtatagcaccttatatatctttcttttaagagaacctcataggacttccaaattcttcactgaaatagctcctacttcttatattacctttcgatatgtcagaaagattctttttctggaagctgttgttctcatccacatcattgcacaggctgacaatcaagacactatttctcactttctttaaaactaaatcaggatttgagggagtggagggatgactaggcagagcaaaaggatttttaaggcagtgaaaatactctgtaggatagtataatgatgggtacatgtccaaacccgcaggacgtgcaaggccaagagtgaagccgaatgtaaactataggctttgggtaattttgacgtgtcaatgtcatttcatcagtcattacaaatgtactactctactgggggatagtgataataggggaggttatatgtttatgggggcagtgagcgtatgggaaatctctgtatttttttttttttcttttttgagacaaagtcttgctgtgtcgctcagactggagtgcagtggcacaatgtcggctcactgcagcctccgcctctagcattcaagcgattctcctgcctcggcttcctgagtacctggaactacaggtgcgcgccactataccccgctaatttttgtgtttttagtagagacaaggtttcaccatgttgcccaggctggtcttgaactcctgaccttaagtggtctgcccatgtcagcctcccaaagtgctaggattacaggtatgagccactgcacctggccaaaatctctgtatcttcctttcaattttgctttgaacctaaaattctccctaaaaaataaaatattaaaaaataaaagaaactctatgtaccctactgactctttgtcaaagattatctattttttttctcaactcatgcaatgtttaacactttggaccatattatcacttatggttagcctcttataatatggtatggctatttttttaaaaagtcatggtaaaatgacataacaaacaattttttatcttagccacttttaagtgtacattgttgtgcaaccatcatcaccattcagctctacaatgcttttcatcttgtaaaatttgaaatactgcacccattaaataataactccccattctctctcccccagtccctggcaaacactattctaccttctgtctctataaatttgatcattctgggcacgtcatataagtggaaccacacagtatttgtccttttgtaactggcttatttcattcaacatagtgtcttcgagattcttccacgttgtagcatatatcagagtttccttcatttttaaggctgaataatattccaatgtctatgtataagtagactcacacacacgtacatatatggcacattttttgtccattaatccattgatgaacacaggttaattccaccttctggctattgttcttaatgctatgaacatgggcatatgggcttcaatctttaaggtttcagttactcatggtaaactgaagtctgaaaatattacatacaaaaacattttaagagagagagagggagaagctacattcacataacttttattatattatattgttgtattttttattagttattgttgttaaatctcttactgtgcctattttataaattaaacttcatcaaagatgtgtgtgtatagaaaaatacattgtatatatgggcttcacgcattgaatgagggtcttaggatgtatcccctgaggataaggagggactactataattctactgttaattctttgaggaaccactatattgttttccatagtggctgcaccattttacattcccatcggccatacacaaggattctaatttctccacacccttgccaacacttctttttctgtttttttttttttctttttaaatagttagcatcaaatgcgtatgaagtggtggtggttcatattttcagtcatcgtttcccagtatttcttgagacaattttgaaatattgtaagagatataaaataactttgatgttggaaagaatagcagtgaagaatgcccatgtaaaatttgagaatcttgaaacatgacagatacaacattgcattaaaggaaattaaatcctggacaattttgcttagcttgtaagtacatatacaacacatatacaaatacatgtacctataagtacatataaaatatatcctttctaaatttggctatattgtcagatacctgagaaaattattatctttatagcctctgtgatatgtcgccaatgcaaggcccatgaaaactcaaaaagagtcagttagtaaatgaactcttttattatttgtataaattatagtttttataatttaaatgtaacatatgaatacttgtgtctggaattacaatagacacatttttatctccagagagttactactggcactttttgaaatcctgttttgtcctagacactggacaaaatattttacataaattatcttatagaacttttcaactccgtaagaaagatactattataattagtacattttgtatcacagaaattaaacaacttcctcaaaatgacacagttagaaaacaatagagcacaagatgaatccagttctttctgatgtcaaagcctgccgtgtatactccagatgacctgaaccttagagtaactaaaagcatcagggcttctctgatatataattgtgagaatctcactaaaaacaagattaaattactacagaggagtcttagaatttaaaactctaaaaagtgaaacttaggatttaccaaaaatgtttctaacttctcatatacatgtatggatgtaacctgaaatgctgggttgattattgaaatgtccatatgaacttacaaatttaccagaaaaaaatcaaactaccccatcaaaaagtgggcaaaggatatgaagagacacttctcaaaagaagacatttatgcagccaacagacacatgaaaaaatgctcgtcatcactggccttcagagaaatgcaaatcaaaaccacaaagagataccatcccacaccagttagaatggcgatcattaaaaagtcaggaaacaacaggtgctggagaggatgtggagaaataggaatgcttttacaccgttggcgggactgtaaactagttaaaccattgtggaagacagtgtggcgattcctcaaggatctagaactagaaataccatttgacccagccatcccattactgggtatatacccaaaggattataaatcatgctgctataaagacacatgcacacatatgtttattgtggcactattcacaatagcaaagacttggaaccaacccaaatgtccatcaatgatagactggtttaagaaaatgtggcacatatataccatggaatactatgtagccataaaaaatgaagagttcatgtcctttgtagggatatggatgaagctggaaaccatcattctcagcaaactatagcaaggacaggaaaccaaacaccgcatgttctcactcataggtgggaaacgaacaatgagaacacttggacacagggtgggtaacatcacacaccggggcctgttgtggggtggggtgaggggggagggatagcattaggagatacacctaatgtaaatgacgagttaatggatgcagcacaccaacatggcacatgtatacatatgtaacaaacctgcacattgtgcacatgtatcctataacttaaagcataataataaaaaaagaaacttaaaaaaaatgaaatgtccgtatattttcttgattttttccaaatgttttgaagaaagtttttgtattattaaatgctattcattggtcaatttaagtaatcttcttttaagaaatcattcagaaattgtaggtccttgatcgtaattctttttgggtaatttcaattgcaataggttaaacactgtgctggaagatttgagaaagattatcattggtccattttgtcaaaatcatttccagaagtttaagtccttttttcttcatttttagtgtgattcattgattttcctaaggaagaacatttaacttctctcagtattcacaaggaatacctgcttgaatgtttaagtaccaacagaggatttaaagttcttattacttatgagcattaaatgaattcaatactccaaattttatagaagaagcatttctgaagatagaaaataaggataatttttaaacacaagaaatcacatgcttttcatatcattatcaatgtggaaaatgctaaaacaacttgctattaaaaaccatttatcagaaacttgtttaattaatatgtcaaatatctgggtttttaaatcatgtataacaatcaaaatattcctaaaaacatattgagaactttaacaaaacattttacagttggaatgaaattagtactggatgattggattaaaagccagtagaaattatatattatcctatttaaatgtaggactatataagttattggtaatcctttttcgtaattttattactttttccagtacctaagtggatactggtgactggtatataataagtaaccaatgaatagatattgaataatgcattgctttgctcaattttctcatctctgagctttcctgtctgtgctactgcaacattactttcttaattatattctctcactccactgcaataatattacagatgttattccctgattaagaatagtataaattgacaatccaacccctcaaatgaaattttttggtgatccaaacgttttaaacatccaataaagatataacatgctagttctctagtaggcacccatttccaggtttccaaacgtttcaacaaaaacatttatatatttctctattgattgcataatgtggagattctgttttgagaatgcacataaagtatattatattctgaactgtaacaaaatgagactctaatttattcacagtcctttttaaatttgtctgtatttttgttttcctgagaaaaatcttatctttatagcctctctggatattgaatatcttgagactagctttaattctcttgatttttattaaaacttctaattccaactttattcgtgaactacatgcttatataaaagtacgtttcatcaaacagctttctctttatctctttaaaatcattaccttttattattttcagtatgctttaatgctttaaaattttattcttgaaacatttggtttttccattgctactttcctattgattgttttcctcatatgtatcttgagattttagtctaggttttataacaagcatagctatatttacagatattttttctataaagttttcaatatagattctgatttttttatcttataaaaaatagttaacaccattaacgtttggatttatttctgtctagttctcctctgctcacacacacacacacacacacacacgtgtacacacaaatacatatatataaaatgggcagcacactaataaagataaaaataaactttataaagttttacattttgtaactggatattatattgtgaacatccccatgtaactgtgtagtatttgaaacttagttatttaaaaattaaattgcaaatgtatgatcttatagactattttcctgcttccaagacttctttggaactgtggactccctgaaatgccagggtaacataagcgagacagaacagctagcagaacctcagggaataccactgactttatggtgtcagccagtatcatgagagcccacaatgttgcctttcaaaccaagtgatacatttctatcaataattaaataaatttgaaagtacactgccattgcatttgcaatcttctttctttgttctttattcattgcaataataaaaacaaacaaacaaaaaacaacaccaaatcaaatgactgttgatgggggaattataagaatagatgggagtgaagacccaagctgactttacctccaactcaaagatttttgtccactaatctaatttctctttctctctgtgtttgttaaaagtttcaaagtagatgtaggttctcttgccaagttgatactcgtgttctttccttttcaagattacataaaaagtatagcttagatccaacgtatcaacctggaataggtgaaaatatcactattgattataactagtatttaacgaggcttaatatggaccaaacactgatctaggtatttcacatgtattatgttttgtaatcctcacaactttatgaaggaagtatatgtgtgagaaaagatacacacgattagattttgagagccagtgcaaactgcaccgcaggtgtattgcctgttcaaatttttctttaccactctatattaacacctaagttaaaggccggcacaataagcaatgtgttgcttgataatatttgtaaaacaaatggattagtgaacaagttaatatgtcactctgtggtctttaaaatatatatggaaatgcagaatattaaaatctgcaatacatattttgaaaaacaaaggtgagagtaatgctagccaaagcaggtttgactgcaggcacaactgtccttcccactcttcttaattgaagagtcacctcaatccccatttgaatgttctcttttcaacctcctaaaaagattactgagaatgtagatatttaaatgtattctgttcatctttaaataatttcatttatgtttaagctgcaaaaattgatctgaagttagtctggtatattgtgtactttaagcatgtgatacatttctaaaatgttgttcatgtcaagaatatctacaattcaaatcatgaccttcttttggcttgtattctaattttgaagtttctgacctagacacaaaaatgattaactgaagaattttaatagttgtactgttgttcttcacttctatcagtgatgatatttgatagtgtaatatgctgagcaggcaaacaatgaaaaagtcccctccatgcaaaatgtatgtaaaatcagctttcaataagtgaacagtatttactacctgctgttccttttcaccatttgcagtaccattcttagactcactgcaggcataaaccctgggataaggaaaagttaagcctccattcttcatacctctaataaggctttgccaatggctgcaatcattttacaaccatccacttatgtttaggtttaacagagtcttggcttcataatgaaatacttcattaaagtatttttatgatatctgtttacacatatgttcatagtagaattacatggtgttctgttatccagtctttgccattcacatggactcagtttatagtgtctggttatgctactgaagatcttcctgctttaccatttgctgttaagtaattgtagtcagacagactgcccaggaagccccatggactcagttttatcccttgggtatcacaaatgaggaagagtttgattccatattggtgaaatactacttctgtttcctaaagatatgttgttttctaagatttgcttctagattttgtgattaaatgttttattggacagggatttaagaatcagaatttcatgacattttgtcctactttaaatggaaatgtctatagacttttctagtgaaggcttttacaaatgttaagggatgattgaatgctcacagcaggacacatggcattacagaaagtctccaaaattattcatccttttggggacaactataaccatgattttttgtgacactcataacctgttgaattggaaaaatattaatgttagaaatctgttctcatgtcacttttaaaattcttctccttttttgcctcctgtagcatgagtcctagtttgattaaactagacacttgattttctccaatggtaacatgtttttaaaaaaggacttttactctgttggaaccaattaggccaatgtgaggaactttggaaggaacatgagcagccaaacttgctaacagcaaaacgtatttttctgaaggcagcatgaaaaggacggaggagttctctaaggactgtgagttccacgggtccttttgagcttcagaaatccagctctcagcacttcataaatcatttctgacctgatgtcactgaagttgtattattatgtggttagtataaaattcagaaaaattgggagaaaatacaaggagaagaatttgcagggtgattgttgtaagatttttatcatgtcctcttaaaaatggtagcttttcagaaacttttgttaactgctttgcattccatcttgagaaaatgtctgtatagttagatgagcatcatctcctctccttgtttttaaatcacatccaaaatgacatcaggcttgcagccgtctcattttttccttttatttacactcttcacacttcattggcaattgaggtcaccactttaaaatttagggtgaaggctaaagaccagcttgacaaactgttggcggaatgctctcttttgcaagtcttcgttttgaagaaagaatgtgtgatttagaaatatttaagattgtcattttggtagaacttctcatctatcaatgcagggtgcagcatccctatttattaatgttgtgttggttagatatgttcacccattaggtacgtgcagaggtacctgaaaccatctgagaggtggtatcccatttttcataatctattcaattgaactttaaaaataactgagcatcttttatatacaagacattaacagacatttatattctatggtatctactgctagcaacttataacagttttggtggtaaaataaaggcaaacttgcttcataacaaaacaaaattaaattatcaaaaagaaatgctcagttgttaatttaaaatataaaatgagacatgagaataaccttaggttagaaattcagatgtagaaaatatctgtataaagaagttagttgaaatactcataggcatgaaaggtattttgcaaaaagcaaaagtaggcaaaactggatctatgaagttgctccataatgtactagtcaggtgaagtagcacaaattacctagtgtatcagttttcttttgttaacacaacatattaccacaaacttaatggcttaaaacctcacaaatttatctcacagtttaataggttagtagtctgacacaagtctcactgagctaaagtccaggtgtgggtagtattgcatttctttctggaggctctaaggtagaattcattttctaaaattcattcatttaggatagaagctgaaagaatcagtttctacaggctacctgcatcctttggctcatgaccccttcctccatcttcaaagccaggaacaggttgaatccttcgttgtaccaccctaacctcttcttttgcctccctcttatacttttcaggacccttatgattacattgagcccagtggattatccagggtgatcctttcatctcaaggtctttaactgaatcatatctacaaagttccctttgccataaaaagggtcatattcacaggttccaagaattaaatatagacgtctttgagggaccactgtttactctaccataactagcctatctcatttcaattttctaatcagttactacctgtctcttagagttcttgttagcagaaacaaatttctgtgtaataaagtgcctggcaaaaagtaggtcctaaataaaatgttattttccccaagggaaagattattaggaattataacattgggacacacctttgtttaaaaagctctaattaacaagaaccacagcaggggcgcacatacaggggttggagagaaattcagttagtgctgtcttctggacactccttctatcttcattctctcctctgccattgttaaccttccattttaggcaaggagctgtattaggaaaatgtggtttccttttattaaaagaaaatctctaaattattaatagatattacttttccaaagaaaatttcagaaaggagaagaacaacataatcaaaatctgtggacactttaaagataaggatgatggagaaagactgaattttgcaagcaggttataataactcctgagagtgattgtaatagggtgattaggtcatgcatggactacaagggatcaagtagaaaaggagtggtaaagtagtaaacagcagagggtacaggctactcttaagaaagtccctagagaaggataagaaaatggggcaatacataagcttggaaatagatgatgatatttcttttttttttaatttaattttatttatttattttttttattaatcattcttgggtgtttctcacagagggggatttggcagggtcacgggacaatagtggagggaaggtcagcagataaacaagtgaacaaaggtctctggttttcctaggcagaggaccctgcggccttccgccgtgtttgtgtccctgggtacttgagatcagggagtcctgatgactcttaacgcgcatgctgccttaaagcatctgtttaacaaagcacatcttgtaccgcccttaatccattcaaccctgagtggacacagcacatgtttcagagagcacggggttgggagtaaggtcatagatcaacagcatcccaaggcagaagaatctttcttagtacagaacaaaatggagtctcctatgtctacttctttctacacagacacagcaacaatctgatttctctatcttttccccacatttcccccttttctattccacaaaaccaccatcatcatcatggcccgttctcaatgagctgctgggtacacctcccagatggggtggcggctgggcagaggggctcctcacttcccagaaggggtggccggtagaggcgccccccacctccctcccagacggggtggctggccaggcgggggctgccccctacctccctcctggacggggcggctggcagggtgggggctgcccccacctccctcccggacggggtggctgccgggcggagacgctcctcacttcccagatggggtagctgccgggcggaggggctcctcacttctcagacggggcggctgccgggcggaggggttcctcacttctcagatggggcggctgccgggcagaggggctcctcacttctcagacgcagcggccgggcagagacgctcctcacttcctagacgggatggcggtccggaagaggcactcctcacttcccagactgggtagccaggcagaggggctccttacatcccagacgatgggcggccaggcagagacgctcctcacttcccagacggggtggcggccgggcagaggctgcaaactcggcactttgggaggccaaggcaggcggctgggaggtggaggttgtagctagccgagatcacaccactgcactccagcctgggcaacattgagcactgagtgaacgagactccgtctgcaatctcggcacctcgggaggccgaggctggcagatcactcgcggttaggagctggagaccagcccggtagatgatgatatttcatttgcaatagctaaaattgactaagtgttaagtgactctgatctgttgaaagaattcatgaaccaagatcagaaactttcttctgtctttgatttgttattctactctgttaacattatacttctaacacttcccatcactacaaatctttgctattagtccccaaatgctttgaactagagtgattcatttatgtgtgtaatgtcataaattggagaatgtgtaggttcatcttaccttggtaaatacagaagcacaaaaaacaaaggcaatgccaggtatttctccagggtgaataaattttagaaggcaaatttaaactgtcatatttctgattgcctgtgattcacaccattgttgtactctgtgacagtttcattgaaaggactgtcatgttccatgaggaactcagcctacctgctcttttaccagtagctggtgggaaagccatgctgtgccaatgacttattcacaggaggcaggtcaatcttttgaaaccacagattgtttcaaatgagagaaaaatatgtgagaagagaatagatgtcaagggtagtgctaaagacaaggaaaatgcttgcctgggttttccctgcagctgacgttgttaaaaatgatagcaacttaatgaagcatggcgtactaaatgcattaataagctgagggaggaccttattcattccaatttggactctgctcactcgtgttactcgttttcttaagactggactaaaattgtgagaccttatgggccaacgataccctttagagctgataattaatttgaaagaattattaaagcatatttcttgagctaagaatgcagtgtattcacagtaagaggcagagttaaccatttatcaagataattaagaaaatgcattaaatgtttgctccgtaagagcaagcactaaattaccagtagtagtaatattattatgtgaaagggaatcaatagtttgtttactaaaatgagatgcattagcaagcttttttattctgatataaaaattttcaaatatacacaaaagtatagagaataccgtggactcaaatgtacccaacacccatccataagtattaactcaggacccctcttgtatcagttttcaacccatccacatcctactccacccctccagattattgggaagcaaattccatatgtattactcgctttgtaactacttcattatgtatctctgaaggataagactcttttataaaggaaaccattgtcacatctaaaaattaatactattatactgattctttaatattaacaaatatttactcagtattcaaattcatcacacctgcttccaagttttttaaaaacagttgaatcaggattcacaagaagtcacatactgcatttgttcgatatatctaggtctctcaatcaataacattttaacttccttgcaacttatttttttgaagaaaccacgttgtgtgtccagtagtgtttcttacatcctgcattttgctacttagggttcctgtagtactgtttgcatatttctctactactatatttcctgaaaactgatagataaatttagagagttactctgattcagggttcatatttttggcacaaccactttatagattgtgctatgtgcttccatcacactgcagaaaatatctgggtgtctcttttttggggatgtttctggtcattgatcagcattaatggccacaggtccatcattttatgggggctcccttcatagtaaactgcacagtaaactatacacagtgaaccttgtggtaaactgtagcatcctgtgtactatagcaatttactccatgttgcttttttcatttaacaataaatcccgccattcattgctcttccatctcagggttttcttgcttattattgcttgttaaaattcttccaaatcacatttataatcaagtcgttcagcactaaggaaaaaaaataacattttcatgaaaaaatgaaattgcattacatttatatattctcttagggacattgaaaataagtcttgctatttttcagagctagactttgagatttgcttttttgcagagtgagatagagaagtccttcaaatactgtcccttgaagagttaggcattgatttaaacccttttgaaaaacaatttcaacaaataattgaaaatgttctcttcaaagtattatcattagtcatccagttagattattattattaggaattctgaggtggtggaataattcattttccaatgtgttaacttctcatgagtttaatgtgagtataaaaagtctgttttaactgagggcagagtattcctttttctcttataatacaggagccagttacaacacaggaggtgaaatggcctgtttgcttacctgcaacttcaggaatttcatgcttagcaattaattgcagtacacacttgtgggggtaggggtaggaggttggataagtgggttgcacttaataattcagtgacaattacaaatcgtttcactatatgtgaaagtatttgaagtaaatttacctgaagatagaaaatatgggtgggcaagctcctcctgaactccccaccacattattctaggtttattgaagtaaatgtaaacttataaggggacataaaactcacacagaaaataataattagacatatttccacattaatgtttttaagtttaaaacatcatttaaaaattttatcactgatgcttgacttaaacaagtccacttatagcattgtcagaatctgtataagtatctcttcagggaatttttaagatgagagtgaacaattttctgagattgcctacacatttttgttacacagtaagagccaggttctatgtggcttaggtggggatggggctttgagtgaatcctctgttgtacacagacttaatacattctccatttcagcccacttttcacctctgttttcatcagacctacctcggtgaggttctagacttctgccctgctgcagctactcagtactttaggccatgacctccgctctccttcctcagcaactcaccacagaccttccagaaaaatgttaaacccttctcatccttttcttgttattggtttctattttctttctttcttttttctttagcgtcacaggggaagagctgataattgtattggctatatgtatcaactcaaacagagagacattacctgcagttctataaagattcccagattattccaatgggtattaagcttgaaaacatgatgtctatgatcctttctggttctgatattgtataactctcatcacttaatgaaagccaccgttcctatttggataaataagagaattgaaaaacgcactattagaactgagagtacagatgagctttccaaatatattagagatggcatcacagtacatggaaatgttaaaatccataacatgggcaagagcacatactagaaaagtgcagaacctctttagaagtgaagcattttcgttccatgcacatcaatttgctataggagttcagggacaaatagcaatatgggaaggaggcggagctcaacattgagcagaaattagacacatgctgttctcttgagagattaagaaagaataaatagaagagagtaagtcaggtcctatgagaaggataaagcattgtcttccatagagagtgaccttcattaatattttttacggcttttgtggagatcagcctaaggaaacagaagtcctatggccttattacatcattacagaatcacactttggctgggtctcttaactgtgtaacagtggtgctcaaaagtctctgtaaatctccaaaacacaatactctttagtagcatttcttagatttgtgattcttctggggacaaaggatctgggatacaatgggttcccgagtgcagtggtgtgatctcggctcactgcaacctccgccttccgattttcaagcgattctcctgcctcagcttccggagtagctgggattacaggcgcccaccaccacccccgactaattttttttttttgtattttttagtagagacggagtttcaccatattggccaggctggtctcgaactcctgacatcgtgatccgcctgccccagcctcccaaagtgctgggattacaggcgtgagccaccgtgcccggccgaggatttttttttttttttaaatcaagacttagcaatgcatgttctagaaactgattctggttttcagacttaactaacatgggtataggtgagctaagatattaagctgcagggaagggtctagagtagctagagttcctgggctgctcacttcaagctatgaggtctcctgaacactggtaaaaaccccagtgctgtacaaatatcattttatcttagccatgatgttcaagattggaaagcataactctatgtgatgatcattgtccgttgcttattattttgagactaaaggattcttaagaaagaccctattctccatttccacactaaatgagatcaagttcttaatactcttcttattataggaggaacatctaattcaatgctacatcagtaattaaatgatattttgttaggtgacatgcaaatgagtaacaaatggaatatgaaatagaaagttccctttgttatgtaaattgtcaaacacttgatattgtttttaaagttatttgggatttttttaagacaccaagtttgtaacaagtgcccttcaacagaaaagacacttggatatcatgagatgttctcttaggttcctcaaagcctagcagtcatagcattttaatacttactagtggggagtctgccttccctgctgcacaccagaacagactggggtgggggttaatcatctggaaatgaggtattataactactgattttgaagagtctttataatgaaaacaagacacagttaataaaagtagcatagaaaacattagagagttattttattagggccattaaatatttggagtacagtacttagaaaatcactgttaaaattgttacagttactctctgaagcctgctaagaatactgctatttattacatttttaataatgctattcactacattttaaaagtttactcaaaaactacatgactttcaagtcatttaagaagtccaaaagaaattccatgccaacaaatttaattaattttgcatggaatgtgaaagaacccatagaaaataaatgaaagagggatattgttttgaaatgggactcattcagtcttctgtaaggcggtgactgcttttccgtgtcactgctggcagttatgttgaattatagaaagagtctgtggggtctctagtagaacttctcttcgtggattatttttatctattattccagagccaacacaggagctatgaagtcataaatccacattgtagctgcatgagaacttggccttatcacatatttgcatactcagtgctttctaagcaaagttctttatccataaccttagtgtagtcttatttttcttagtgggtacctgtgatctctaatatgctttgctatctctctttttgttttatatctttaaaaaaatctctatgtttttattttttctggaaggaaacaggctcacttggaatatttacctagattctctctttcacaagaacacgcagtattttgtattcattatctcattatctcttccctggttgtgtctttagaaaagaaacaatggataacagagggtaaaagagtttcagtaattttctcagctcacagagacctaataggacaaatactccaggaacgtatgccttagttcctgcagatgacaatatatgctaactgggattcaagctctaacaaacaggcaagaccaatgtcaaactaataaccataacgtggaagcacattacagtgattttggctatccaactaaatgtaataaatatcaaatgcccaccatttcagaagaattataataaggaatatagcatctttaacccatttctcatttgcctgaagaatacttgcagacagcatttgtggcttaatgtttaccctgagataacttgtggcttactgtcctaaccttatccccaaagtttgccatgaaatatctcacttttattattatttttgcataggtctagcatattgactttggaaacaaaagacatcattctatttgtagcattctgtgtttgatagtagtatttccatatacaaaatatagtaattattgattgctgaaatcaaatcctagaaaatacagcattcctatataaaaaattattaaattctgatcatcatatacatttctgttacattaggattagagataagttttatttagaaataactctaagaaacgtttttatattttattttcacattgaaaataagtcagatttgcttcagcctcaaaaaatgtgtttatgtaaaattaaatgagagctggcagtgagctgtacattttttttcctaatgggacatgggttatgggttaaagatgtacaagctggccgggcacggtggctcatgcctgtaatcccaacactttgtgaggctgaggcaagtggatcacctgaggttaggagtttgagaccagccttaccaatatggtgaaactccatctctactaaatacaaaaaaaaaaaaaaaaaaaattagccaggcgcagtggcacctgcctgtaatccagctacttgggaggctgaggcaggagaattgcttgaacctgggaggcagaggttgcagtgagccaagcttgcgccattgcactccatcctggacaacagagcaggacgcagtctggaaaaaaaaaaaaagtgtaaaagctagaggccctggcctccacaagcccacaatttagttattcttcttctttatgattttaagaccttgtcaggaatactttgggattatcagtagttaggaccaagatatttcatattttatagcagagacaactctatctgtgcattttataagattaatccattggtatgtttcttgttgaatttctatataaagacattctacgtgatgagttgttcaatatgaactgtctaaaaaacaattccttatgaataatacctaaaaatgcataagtagcaaatatcttttatagtggttgatgtaacatattctatgttgttcctacttttgccctttctctgttacttattttactttgtctttattttaaagataattttatttaaaagtaaaacatttatgttcatacaaaaaatatagcagaatacgggatggaaaataaaagtcctcctcttttcttgactcctaaaggtggcagctttaatatgttcacataattcctctcccaaaatgtcttggcatattcaagcagttacaggcacatacatagatatgtgtgtctatctgcagttatacctatctatatgcctttgtaaatataaattcatcagtatttctcacctgcagtgatactcaataaaacagaatgctcaaagcccagacccctcaggacaaatatcttggctgtccttgctatgctggggtcaatcagatggtctcaggggagaggaggcatttgggaggttgggcagcagtgatttgtcaacaagtacagaagcatttcagtattttatccactagttgttccacaactgtgcctaaaaggctaatactaaccctactttgactcattcgatgggtgatttcccctccatggctctcaagcatgcatgcattcaagtaaacatcttgaaggaatagcatcagagccacctgtattaccgcattccataccaaatttttatatttttaaatctagtcccttagggtataccatagatcctatacacgtatgcatgagttaccatgtcaaaactatgaagcagataaaatttgtttctagagcatccctttcaggattccctctgtagctcagcagtcctgttaatcacattgtagtgagcctgtcctcccaattgtgccccaccagtgacctcatccacttagagcttagagctgccaagctctcatacctcatagcatttactagtcaagaacatatcatactgttttattattatagcacttttcatttgtctcattattacaatatattaacaacacattgatggtggaatagtaatttaaactaattcatatctgtctttctacctagaacattgtacataaatgtcattccataatgtttcttcactattcttttggactacattggtaaagacacagatatgcactaccacaaaacatctagaatatttctttttttacgtcttcaaattctatataaatttgtaaatagagcattgccacattcctctccattgtcactctgttaacagtaacaatacctctttatttcaccccttttcttgcatgtttaccttttgtaaagagaaggtacagaaacccttcatttaatgtgtttcaggttcaatccgttgtcttcataacactggaatttctcctccattattttctatttggggatgtaaaggaatggacatttattgaggatttactgccacaatgctagaaccacaatctgaacataggaatgtgtttatgttgtttttgctgtaccatactaactgcctctaaatggcacttttttgaggattatgtgatataagtaaacaagttttctaaactatcaagcactattcacactgggaatttctagcttgtattttacagtctttaacacagtaaggtgagtaaattggtatgtactattaataaatgttttaggtggtaataattataatggaactttaaacatcaggtgaaatgttgccaatgagttgttactaaaatccagtcttaatccatttcttttaaagccatggttgtcaaaacaaaacatcacttcttagcaaaaaattattagatatgaacctgtaatagtaaaatcatttcagagaacattataagattatagaataaaatctgaaataaaatctactgtagcatttagacttatatttgacataaaatgatgagaatatttgggaattcaatgttattgttgttgttatacttccctaggtgttccagatcgcgtatgtgattgtgaaggcagctaactccccccggcctggaaactggattttggaacgctctcttgatgatgttgaatacaagccctggcagtatcatgctgtgacagacacggagtgcctaacgctttacaatatttatccccgcactgggccaccgtcatatgccaaagatgatgaggtcatctgcacttcattttactccaagatacaccccttagaaaatggagaggtaagatgagaaaactcaccatttaagcacatttgatacggtgaaataggcctgtcagaaagacctgaatatatcagtaattaatgtcagggagattttaaaataggatttagcaaaagtacatttaaatgagttattaaataaaaaagaaaaacctgaggtgattagaattttaactaccttcatgtgtctcccatctccagtaaagatcagagaagaggaaataggtttaatctggaaagtcaatgattaattttacatataaagagactttctcaacaatgaggattgctaatgattagagaaggattggagaccttaaaggtggccttacatttgagtgtactttggtctgaagatggagacaaaagaaatgaatttgtgaagaaatgtaatccacatgaaagacccaaatgaaaagtaattctttcaatcttttgatgtttttctgctgtcaccacatagggctacagtggggtttcttccctgggtcaggctttgtggaacagtaatgtgcaggaagtcttaggttctcagtgatgtgcaagctaggttacgtgcttagttcaaatatgttcttctccagtgtctgtcatcctgtggttaagattttagattcattcattgattttaagccacatattctaaccatggcttcagttgttattagtttattagttgtatgtgggggcggggaggttttttttttgttttttttttttttgttttctggcttagttgtgtgttcttgatccagttacttaaattctctgcacctcagtttcatcgcccataaatcaggaataataatagttcttacctcatataattgtcaagaggattaaatgcattattgtatttaaagcattagaacaatgctgaaatgcacactaagtactctgtgctatttttattgttttgttgccattaaggaaataataaccattactactattatttttattattatccttagtcttctctcaaatacccaaactttgacttagtgactctcttgaattattcaatatttctttagtatgtttccctgacttgtctccctttagtatatgtgacccacctcctttcatgctacctaattatgtatatctccattgatactcatgtctgatattctctcccacatagtccaaacatctgaagctagtatcatcatttatatttacattttcagaaaacccatattcacattctatcatgcccaccccagccaatctagggttatctctcaacacttctagggaaaattagggttttggcataaatctgtcagaccctcattaggcactatttttatattaatgtataccagtgcttcactatattttaaattccatgttcaaaaataccagttttggggaaaaacattccaaatggtactctcagcagaaatctcaatctgccaaatgacaaggactcaaatgcagtgagtcaaacagctgttcaacctgctttgtgcctagaggcatccaattcctggccagtttggcctgaggatatgggagtagggagtgcagaaagagttttgagttgaatttttattattttttatcctagattcagtttacataagactaataattctcaaacaatttaagactattctatacctttaaaaatgattcaattcagaaatttattaagcaatataaaatacacttcggcaggtatgtaacatgcgtgtcacaagcatataccctacccattctctcccttcattaataatggttctccattccttaaaccaagtcagcctgccaatatgaaacaaaagacatgtttattagttaattagttagtttctttaattggctatattgttttcactcctaaacaacacttactaaaaactgcttattgatggtaactattaggagcaactgactgaactgtctctgtgacatgtttccttacgtctatttgtcactcatggggaagtgaatgaaataaggaacagaaagtaattcaaaatatttgccatagaatgataagactgaagaataagaattaaattcagacctctcctaggctatctattcattttatatagcttactttgtggaatatgttacttttttgaatagacaggtgatatcctccaagactctcagctcaatgataatataactgaaataataattgaggtctctgattctcaggtaaatatttcatccataatctggtaaggattaaaagttgacttttaaaagttgacaatcgctaaacttaaaaatggttcagaggagatacaatattgctggatctaatgtaagtagaaagaatcctaattctgatatatcatggcatagaaaaagacacaaggaattagaagacctggattctggtactggttccagttatttgtgggaccttggtcaaatgatttaatctctctgggattaaatttctttaatagatgaattagttcaatgcccagattgttctaaggcagcatggtattttctaaaataatatagctttggctatcatacaacatttgaggatattctaaaagttttggatacttttctctaacattatccagacaaagtagctgtggaataaatctcactcgtcagctttagttttaaaattatgtactttcacataatccctggaatacaattattaattgtttatgttcaaaactttacagagaagtgacagtcaaataagagaaacaaacatataaaccagtaaataaaacatgattgcataagtactgtaacagtagtgtatacagagagcaataaatctccccctgcttgagtggaaggaggcacattgagaagataacttctcagaatatgggaaaaccagcaacaactcttatctcaaaagtctcaaagccaatatgcaaattcatctccaataatgcctatgtgttaaactcggtacatacagaatttacctccattgttgagggatattgttatcagatgtagaattctaggtttgcagttattttcttttggcacattttattgttttctgatttccattgcttatgtagagaatgcagctatccgattactatcttttggagtgacttttctctgatttatttaaatatttttttctttgttcttcagtagttttactatgatgcttcagatcttcactgcccactacaatagccactagccatatgtggtaattcaaatttaaatttcagttaatcaaaattaaattaaaattccatttccccattacactagccacatttcaagtactcagtagccacatgggactagcagccaccacactggattgggcagaaagcaacactgccattattgcacaaagttctgttgggcaatgctactttagattgtacctttttattttctacatatctgcaaagtgatgtctttcatcagttcagaaaactgttcagtcattacctctctaaatattgcttcttccgcattccctctgctctatgattctaattaaaaatgacttggaactttttactgtatacactatgtattttaaactctcttctttagttttcatccttttgtctttctgtatcttcattctaggtattttcttctggattacttctagttcattaattctcttctcagctatgtaaatattgctattaaagttattcataggattcttaatttcatatatttttcagtttctaaatttctctggttcattttctttttttctttctttcttttttttttttttttgagaccgagtctcgctctgtcacccaggctggagtgcagtggcgccatctcagctcactgtaacctccgcctcccgggttcccgggttcaagtggttctcctgcctcagcctcctgagtagctgggattacaggcgcgtgccaccatgtccacttgatttttgtgttttcagtacagacagggtttcaccatgttggtcaggatggtctcgatctcttgacctcatgatctgcccaccttggcctcccaaagtgctaggattacaggcatgagccactgtgcccagcctggttcattttcaaatagaagttgtttctcattttacattgaaattttatatttatagtaaaattttaatttaataatatgatttattctaaaattttcaatattctatttttaatctccttgagcataaagtaaaaattatctttaaaagtttttgtctgataattctaatatatggcctttttggatatattttattttctgtttcatctgctgattctttttatgctgtcttacattcttgtgtgcctgattatctttgtataacagaagttgtatttgaaagagaatgtgtagaaataatttgagagctagtatattgtcttcatcctgtgtgaactttctgatgctactgccaggcaatggaaatctggatcatcttaattcaattttagggattcaaatttctgggacattcagatgattcaaagcattgctataacccagtgacagctgctttaattccagtatacgctcattcccatgctgcttatctttggagtccaagccagcgtgtgtgggaattacgaaagtcccacccatgcagtcctggaatccaacttttgtcctcctaatacagcagggctgtcaaaagagctgctcagtctctcagccatgtgtctggacaggaaaatgctcacaggacaaaagctgtcacaacgtaccaatcacctgtctagacatctcttttgtccttgatgttgagaaggttatcttcactctcttgatagctctcacatggctttaaacatatgtttttgtatatttatccagtttgtctagttgttgtcattgagagtgttgactcttactgtataatctaccataaatagaagcgaagttgcacatgcatttaattttttttattttggaattatgttaagtttacacacatgtatgaagattatagagaatcctcacattccctcatccagctatccctaggaataatatcttaaataatgacaatgcacatgttaaaactaagaagttagcattgatacattattgttatctaaaccacagaccttattcaggtttcattcattttaccaatttcattttttctcttctgggatccaattcaggtactattttgcatttagtcactgatctgtgacagttttaagagatattttaagaaatattttaagagatatttagagatattttatagactattattcagtttgggtttgcctgatgttttttcatggttaaactgggcttctggattttgggaaccaatactacagaggaaacagtttctcattgcatcaatcattttttattaatatatgcatatttttttcttttttattggtttatggggcttgtgcttctattaataggtagatttttaaaatgtttttaatttttatggttacatagtaggtgtatatattttagatagatttttaacgtggacagcagtatctaaatatttactgtgatttgtaatgtatatttttcactaagcattgaatggtcattttcttccagaccttcaaaatattccttaaatatgtcagaaataagaaaaacaagtccctccctctctgccttcctcccttccttccttccttccttttttttctttcttctttacaaacaggttctcattgtgttgatcaggctagagtccagtggcatgattatagctcactgcaggctcaaactcctaggctcaagaaatcttcctacctaaaaaatcagcctccagctaattttttaaaatttttttgtagagacagggtcttgctatgttgcccaggccgttctcaaactcctggcctcaagtgatctttccaccttagtcttctaaagttacagtcttctgagattacagacatgaaccaccatgcctggcccagaggaatttttaaggcccacccatgtaacaaggcattatgaaataaacatgtctcaattgttacacactagttagacaacaatgttcatgttttaggcttagaacattaataggaaatagttttcttgtgactaatgccaaatccactgagtctaaagtttattacatttccacttgtctaaagaatttttgagacatgtgccaaaatctttagaacattagagctgaaagataccttaggtaaatttctcatcaatctattaaaggatattcaagcccccaatttcagcctctgtatccaaacttcaatactgccctatgttcatatcatcactggagaggtctggcctttccttatggcctctttaatcttaattgcatcatctctgatgttttatttggctttgtttgttactccagttactcccacctgtttcccttcatggtttggtttggccccttctctgccctccactccacattgatttcaagagatcaacaaatgttagagaactgggttcaactactaccaagaaagagcttaaccctgaaacctagcatcctaggcctgcacccaaagggagaagagaagcttattctgagctatgagataatcgtaaggtatcaagtctcagggcctggcaaaggagggataatggaggatataggcaagataataatatgactgggtatgtcgttatccaggctgcaaatagaaggaggctttgagcaaaagccttaaaacagttttattttagaagggcaattttctatcatcaatgccaagagaaggctcagcagggaccctactttgtcctgctttgagcaaatgatactgagctccctaataggagttgcagggtatgaagcaacagactgcaggggcctccattactttgaggccaaccacagggtagagctcttgtgggaacagctacataacatgcatgtccagcagtgccccagggaaccaagccatcgagagctactatcacagcccaagtgctgcctctgcagaaagcagtagcccagatgctattgagaactgcttacaagaactgccacttggaagcaccctgagaacttggctttacttggaaatcacctaggagcatttgaaaaatagctactcctgagaccagaacttttaattcattatatttgtcagaggctcattaagccctatgtatattttaaacaagtactcttggtgattcttatgtctgtattcctggcttaatgttcagctatttccagccttttaaaccctgtaggagaacagggcaccagttatttagggaaagaatattggtcattctaactacttccaactgaagaaagagactaactttttctgtcaacaaatgtgataggttttggtggactgagtctcttggcaggtttgagttgagcaaataaacttcgaactaaaactaggttattgatggtcaaaggggtatctgagagaagaatcacagtaataatattgaggaggacgaactttctagatggcactgctttagagatcctagaattaaaattataatatttttctgttgtatgagacttttccctttctttgactcacattattgcttttaatttatttggattgtcactagactgctagctaaatattcgtggttaccatagtgattttgcttccatttcctcatacagaggcctttaagttatttacatatgatttcctttccttcttaccaccaccttctcactctcctggactgcagctcaatggaacttagattcactttgattctgctttgaaacatggcaggcttgtataaaaatccctggagaaaccatcattaaatcttgaagacacttttttttttttttgtaaactgtatgtagagctttgatattattttgatttcctatgtgacagaattttatatatacagacagaatatttttcttcctcttttcatcatctgacattatggtggtccttagaattgcaaatacaggagaaggaagacacaaacccaagactgtattaaaaaatgtttcagaaattctcctttgatataacattgttaaggttataacatgattttgcatgtgagtttgtatggaaatgagggaatggaaatgaagacctagcctttctcaattacccttgcaattgttcctttagggagaaacagcggagtattactaatttgtattggttttcaatagaaatttaggtaaataattatttggggtttcaggcttcctttctctaaaaataattctttttagaccaatgtggggccaatcagtacctggagcaacaatattaaagtacctccttacagtgaggtttatatggagtcctctaaaaaatgaaatgtttcaactctggttggaatacacagagcagctgaaatattttgaaatgacacacacataaaatacataatttatttaaggtaatttattgttacattttaaaaatacatctttttaataaaataaagataaaattaagaggattatattcctcctttttctttgttgatcagttactagactcccttactcctccaaaaaaaaaaaaaaatatatatatatatacaatgcccagaaagtatccacaaatccctgttaaattaatgcagtattgttgaaaaacaaagatggccagagaaactgaatgagaatggaatcctgaggagaaaacaccaatatttaagagacctggttctctcagtgttgtggaacaggatccactgatatggaacagaagggtaagcttctgttaagctaggtaaggaagcttagggttgtgaaagaaggtacaaagacactgcacactgacttttggggaattacctggatttggctttcaggtagctctgccaaggattaacaatagggttcagaaagaagagtaaaccatctaatatgtgccccagccagtttacgtggttataataacgatcaaattagatttttatggcaaaactctctttaacctctacgatatgatagtatttccagcctttttattctcaaggttcagtagctaacattggcttaagcccactcctaactatgaaatgactgagctggctcagcctggaatgagagtggggagcatgagagggacacagccataccacatgaggccatggctagggaaggcagaggctactgaacaagactgaaggaataagcaaagcaaaaaaccacaagcttgctgaagttggaggaccagaaggaataggtgagggtctcagtgctaatgtagggttaatccagggccaagtagacaaaaataataataaaaccacaacaataataataataataaatgatggctagcatttgttgcacatttattttatggagggtgttaatctaagaaatttcccatgtataaattcatatatactaatacttgtcgcattttacagttgagaaacaggtattacagagaggtcaaataactttcccagggttccacagctagtaatttttggagctgtgatttgaattcagtgtattctcagagcaccagaaaggtacaaagctaaaagtttccttctgtgtctggggtttcctggaaaatctgctctgccctataagctcaggagtcccccctcctagcagttcctgctgaagctctatgtgagattgcacagacctgagtttgagctgctgcttattttttattttggggttttagtattttcatgttttaggttaaaaaaattctttaccttttagctttgatgaattacttcatttttatatctaataggtttttttaaccttcactttaattgatttcttaacctctttatcttgctcattttttaatctttttaatgattttaaaatgctgattttaataattttatcttggcatatttatatttatcagtttttctgcttcaagctttattctggcaaatgatgtatatttatatttcttttgtgttgttttttaaatattttttatttttgtttctggaatttaatgtatgtcagttgtgcaatagacttgttagaattttgtttgctttaataatttttaaagtgactttttgcattacttttgatcattttactcttagcttattttgagcttttgatgtctaaatataactttgtttgtctagtgttttagtgtctttagtcattgcttctacatggcaataggaaatatgaccataaaaacctcagtgaaagtaacccacatttagagaaggcttgtattccttaatcccgcccctctacacaccccacccattcaacccatctgtagcctccctttcagctgttcttaaaagaccttcccttttaagggaacttacattttcccttcaatactaaatcccaaaagctaatagcaatacagaagatccactgaccaacatttcttcccaagacaataatagtaacttatatgcataattgttaaagcaattttaagattttgttttgttttttgctatccaagttcctaagacatgttattcctctaaaagtttactatatgaaatgattgactaatggttgaacaaatactataaacacataaggaaggtgatatgggttttactcacagaagattcctcaaaacgcatacctgatttggttttaataaggatcacattacaggagatccaatagaagctacttaaaaagtgttttagaaaatgtttttaaatattaatttgcatccattataacattactatttgaatttaacttccttccaatatacctgtagaatgagctattgagtttaacttctttccaggcatggttatggagcctgctagtgtgtgggtgtcccggggccacaccgtattaaataggctagtgataaaatggataggacaagatttctcatcaggaacatttttaaacacagaatctgttgattctgtgttgggggcagaggctgggagaaatagggagatattagtcaatgcattacttttataagtgggcaacagaacccatgttgtgtggtcaaagtactgcagaacttctcaagcattgtacacgtttcagtttttgactacgactttaatggtccacaagaaaggcctctaagaatctttttcgtgtccatttctataagagagaacataatgctgtgttagacatagttgagatccattataataatgtcactacattttgaaataaaattctgaaatgccttaatacataaatccttttatgaagtctttaaaattggctgctaaaaccaataaaattatatttttggaacatagttaaccactttgtgcacataagtgaggctgtagaaactagggtttttaaatgacttaaaagatatatatttctccaaactataggtaattatatcaatattactttgacagagatatagtaattctccatcttatagtaaaatttatgaaaacattaagtaaaccaacaggtaaatacatttttggtcaaacaaaactttaaaaattatgtttttcttttatttggctcaagctaattctttctgttatttttattattaattgactactcaggtaaaattctatctgaattgaattgacatcattgatcccattgtcagaaaagacagccctctatcccattcaatttattaaactgctaatcttctggacttttcttcaaagcttgtcagttttgatccaaaaaaacttcagatttcattgtgtggacctgttacttcttgtgtgaaaaacagtatggtttcatggaatccactcttggccattgttaatattgtacagataggcacacaagcatttaaatatgctagcaccttattgcaaaaaaaaaaaagttctacttatattcattgcaatttattatagaaaatgttttctgaactgaaaattataaactgttgtcaataattcaggtcccaattctgaagtgtattgagattaccaaactgtgaagcaggaacaatatttattctctacataaagaaagaaaagaactattaaatgaacttgatattataagaagcacttcaggttgtcaaaactcatattatgacatctataatctggcctaaaatcacaagcaaacattccatgatggaatggcagatcatgctagatttgctggttattatcagttttattttacgttacctaagtagaatttaagcctttcagttaaaatatgactcccaagcaaaaggaagaggattaatggattaactattgtttgtgttatcaataatattggcaataactatttgtctatggtgctgtgtcagttacaaggcactctgccatgcattcttccatctgatcctcaccaaagccttggagatgcttcaagccaaaattgttattattctcattttacagatggaggtgaaggaactgatttgaggtcacactgtggtaaatgttcaacactaatctctggtccaggtccagtccagatcttctgatggcaaaccttataatcattccacttcataaatggaacacttaggtccaatcagtcattttctaaatgtgtatttactgttggtcacaagagtttgtgtgacactgtgtggataattaaatgccatccaccatctctactcggaaaaacccaagggtgtgtcagttaatcagtcttaacaggaaagataatgtactattatcattatggcaaaagtacacttgaaaatacaacaaaggatattgaagctattaaaataagcttcttatccttagggaaactatttcaacactagagctatcatcaaaagtccttgagacaagtaacccaggagtggaatggttatgattacactttataagcaaacttaaaaagatatcaggagctgctttactaggcccctgctatgaagtgaaaactggagaaaaatctacagcaaagcattctagcctgaggatgtgtactattttgcaacacagcagactgactacagccaaatattttcattggaaaaatgtaaatgaaaaatgttgctcaattctgctacctgggtagtacataagacatgtaatttaaattctaatcagggataacaaaaatcctatgatacttattttgcaaaggaaaatggcagtcctggcaaggttataagttagaaaattatattttctttgtgtaaatttgttctttagcttcattcagtaatcagaattatttatttccttattcaaattgtaagtgccttctaaacccgagcctactactattatgttgagccatgggaaattgccaatatttgactattttagtccattaaaatgcagtttcatatggtttaaactaatatgtgccaaagcatgaatagaaatacttgcaggaatactgtcctaagtataacctcagatgcacacagtattttagcaaaagtatcaatgggaaatcaggcaagtcctttcactgaaacaatttataagtataataatttattttgtgaaggccttttctttaccaaattagtaatatggtgaatattaaactaaacctgagtcatactacatttgtttttaaattttgtagggaaggggggaatagcaaataatattttatgctagtaatcaggcattatatcagttgttgtaaggaactacatgaaagttggtggtatacaggttaccagtagtaagtttgggaactgtgttgttttggctcacagaatataaagcgtgtatgtatatacctgtgtttccacatagacacactctgttacccttatatgtattgtataatcacatgtgtagatgttcattgtatctggagtgacagttgacaccttttaggggcattttacatgttttaaaacctgacatccacttacagcacttatctactactctcttcaggataaactacctttattgcaagacttttgctaaaaattcttagattatgtcaagggaaaaaaatcctctattgctttttaaagaaaaaattatcagaatgatttaattttgtgttattttttatctccacattagtttgttatttcagtggttatttcagttaaagacatttttctcttccattatttcaatttgttacattgtatccatttatctcatagaaagataaacttttgtgttgaattagctgtggaagaccagctcacacattaatcactactaagcaaatgcgttacaaaaaagagaggacaacaaaaatgagctggaatacagtttcagttcaaccaccaaacgatttgatatcatgaataaatttcttgggtatatgtagccagtaagtagacctcaacatttagctatttttttcaataaataaatattgagcactgtctttatggcaaacactgtcttaggtgcaggggataatggacattatgcttttgggggattagataagagaggaaataagtcagagaaaagatctctagcacagaaaagtctggttacaagattacagagagagagagaaaaaaaaaactgtagtgacttgtctagggaactgtgtggttgccacatagaaaatgtggaagggagtgatgggagacaggctatgttcctagcaattgccttgactcaccataattatttcacctactgaataactgaataaattgagtagagaggctgcttgtaccaaactgtaaaacagtttcaggatgagaaaattacattttaaacatacacttagggaaaacaaaaacaaaaacaaaacacctgccttgcagaaacatgtcatagaaacagattttaggcagaattatttccctgtacaacaattgtgattaagtaaatgttaaaataaaaagaaggatgtttagcagcataaggaatagaaacatttggagttttagctttagcttatacaatgcatcctgttttataattgttttccaacaatgtttacataatgggagggtcactctttaacatgaggggctctgtcactagaattgcagtgtgttagcccctcattttctccagtgtttttgtaaatctttccattgacaatcttttaataatttccaaaacaatcgggggtaatgttcgaattctaagttcttgtcataaatgaatcaatccagttggcaggagatggatgtagtctttttgctggtgttccgtgctaagaaaagcacacacatttttcttgagagtatggctagccgaaaagcatctgagaattgatggaatcctaaggcagacagaaacgccaaaagtcaagtaactggttttgtctccagcacttacagtttgttgtctgggtgccatgacataccctctactagttaattccattaagcaacatgggccatttaaatataggcaaaacaacaacaaaacaaagcaaacaagtaaaaactctgtgaccacagaaagagcctgtaacatagacagaagactacaaatagtgttcttagaagataaatcattaagacagtagcaaaatgagaaggaatagtgtcctgggcaacataaagtgtgtgtacccttctacctgcacaaacactcaactgaaatttgccaaggctcactagtgtctttgaggcaccctagagaggggaggctagaaataaccatcatcctcagctgttccatggtaaggccctacactaggactcagaggagagatagtttggaacattttatccctatcagtggaaaatagcacagttggtgcctaacttcctttcgttgaaaataacacaggtaattttttagccaaatgagatttttatcaaaaaagcaagcaaaggcagaatgtgaaaaggagctgatatcagtaattccaaggatactaaaatttgttttaaataataaagaaatagcatcttcaggccctttagactttggactccaaaattggatgcagatcaaataggatatttatatattaaaaaatcccaagagaacttgtacagcataaggtaaatacaaatcaaggttgaacaggtataaaataattaggtcaagagcaatcagcaaaatatatgcagaaccaaacaatactttgatattctggtctggaaagagaatttggggttattctgaaaaatactgtcactacaactctgtccagaacccacagctgcagaaatgagtaaacaagtcatcttattagaagactgcaaggttaaagaacagctaaagattcaaaactaaatgacattcttgttagttcccattgatacgattataactcacacaattccctaaaggaaaactacaaaaaggatgtttcttgagataggaatacaaataaacttttgcttgtttgtttgttttgttttaaatccagtgataagaatgaatgttttctgtatttgctttttttaaaaaaactctatattttatgtgcagacatttaacataaaatcttttcccaatgtctttcttagatgattaggtagttgaaagacgctactgtttacgaggcattgctaaaagcttttgggttccatgagggagagggccatgacctactcctttgtacatttccccactcctccgtttacatcacataaacatatatgtatggtcttccatgcagtcagccaaatcagacaaatcatgcctaggagttgaaagtgggaactgatttgtctagtttgaatattctgattagtgaactagctagcttagaattttgtggtatttgcatatgtcattcatttatgtactacagctacacctaaatcccagaaaaatcggtaacaaaataacctattattctagatttaaattttaaaatccacataagaatattaataacacaaattatttgtatgacaatgacttctatttttttcatttcaccctcagagatctatatacttcctctatccaaaaacaacacagaagcaaaatgttacagagacaccagaatgttgcccagaaaaccatgcattaattactcaagccaggaaattcccaattttgcaactctattttatcatttaagagagatctttccacatgtgtgttctaaaaaagaacagagaaataaccagtcctctgtaacttagcaaaaatacaaattggtgtttccactttgatttctctttttgaaataaattttcagcttgactttcttttgcctcgggtattctggattatcattttgtagcatctggataattttacattaacatctggagttgagggtctttttatttgtcggatgcatatagaatacttctgtaagaaatgtattttcccagctgctgtttattcattttaaagagacatggttaagtaagtctaacagcctccttaggaaattcaattcctaaattccttaggaaacacaaaccatgtttaatctgaagtcctgccagtctgttttctctcctaccagcttttcccatggcagaaatggttgagatctgtacagaaggaggactttagtctggtaacaggtggtgttgctgagtgcaagggcctttgaaatcaggcctggtttggaatcttggtccagcaatcaatagctgtgtaatcttaggtaactctttgaagtttagtttccgcatctaagaatgaggaagtataaatacatatctgcccacgttggttgtattaaatgagataatttacataacacatccgactaaggtgcagatgtaataaatgacagctgttattatcatttatttcagcacgttgcagaaagcaacttacaatttcttcttttcctgacctcctagggcttttatgcatgcaattagcaatttgggatttgcacaaggtttttccagagtacaagatttttgagagctgtgactgaatcttattctttagaaacttgctctttgagtggaggaaaaggaagaaactaagttgactaatgacattataaaagcaggtagagaatcatttctttctgagcttctgtagcacaggctatgaagtgtgctagtaaagtaaatacaattttaagcaaagtttcagaaatcaccataataaaataaagtctgtaagtcccagctattaaactggcagggacctacattcattaaattaaatgcaatgtgcaatgttgttcgaaagttgttcaaaatgtttttagaatttttcttggagttgattgcttttataatgatgacttcacgtcttgactctcagtgattttgtttgtctccttagccccaaaattattcaccttaaaagatgaaatttggtaatattaagacagtcaaaggaatgtcctgaagttctgatcacagctatgaatagttctaaaatcttctaaatatttttgggatatgtatagaaccaagatgatttgtgtgaagggtttttccattcacttagttgtattatattttaatataattgtttaaaaaagattcatgttatagtcacagattaaaaggcagtttttaaaggagatgaattaacagtttcagagaaacaattttaataacatgcattttatacatttatttattctgaaaacagtaattttcaatatactattttcttataaccactttaaagaaattaaggacttgcaggttgtctggttttttactatttttcttatccatagcaaggttggtgctcaataatactagatgagcaactgaatgaagagatgacaaaaataaatgaatttattaccactgcatgttaaagaagtgtacttttttatgcttgtctttgagaaaagtgtcaaggtggcatacatgacaaaacacaactttaaaatgacaacaaaaaattaaaatttcactgaacaaaataaaataaaagaaaaatgcatactagctgctcatctgggatgagttagttattgcaattcaacttgtaatttaatgcagaattttcagacaattagggccaaaaaagaaaatgttaaattagctagtgtctgacaaagaagaaagctttcaaactttcaagacgaacattttattagcaatgaattctcagagcaaatttaatgcagtccttatgtaaggatgtcagatagaaaaaagtaaaaggatttcaagcatcactagtgcaaaggacaatattacttgcttatttctgcagtgtaacaaagatgaagatattctcttaaattttttactcaatgatgattcatgtgtctctgagaaactaagataatatgatttaattctgtgcttttgggatagtctaacttaattcatgaaggagtacaggggatgggcgctttgtgtgtccactttgtttgtcactctcaaatgtcagatgtgcaggcaaattctcagagttaaattacttgacaggaacttaagcatccgtatttgttgccaggtagtcttctgtgtggttaaagtacagaatgtactcctacaaaagcagagaggcggcccgttgccacacaaaagtgttttttcagatggcttatggttagaaccaatatatttttctagcatacagtttgagtgataatagctcacattccccgatcacatgccttgtgccaagtaccattctaaatgccttgcatcttgtaactcattaaacctttacagtaacctcatgcaatgtacactcttgttgttcccattttgcaaataagaaaactgatgggcaatattaccttgcccaagtttatacagctggtaagtggcagagtcaggatttgaacccaggctgatggtatagtctgcgtgctcagccacaatcatgaacttaccctcaaactgcctgtgtttgcataatcatgtggatactacaggatagattctttagactcatcttatgtaggaggaatagtgacatgaaccatcataagaggagcattaactaaactttgcttgtcttacccatgaaagaacatcagtgtgactccctgccaaatatctgataatgaaaagaaatgcattgtgatcagcaagataaaatgaagaaaataaaaatgtacactgaaatagctgaacgaatgaattaacaacctattttatagcattgtgctggagaagaatgctcatcttacagaggtgattgtgtctaataaaaactgcactggatttgaagtaaaaaataaaaaacaaaaactggatctaatttccaattctatcactcgtagtctctgtaacctcctagtctctttcactgggatcttagatgtgccttcttagaagctaaattttcttatctgtgagttggtttacgattccttcttcctctatccactcactttattgtgatatcaaaataagatagcatatgtgcatatccttggagattttaaagctatctgaaaatgtgccatatttaaacatactgaacatagttaaaagacatgcatctgattaatgtaaaaactataccaatttattgtagtccacttggaaagacaagtagcttacttaaagatctattttgttgcatttaaagttggaaatgaacctgatataaatctcttcccaactactgtgatcctgtctttaatacaactttaatagactggaacatatgccaagagtatacagtcagaatctctctaagaatcaaagactgatgagaaacctctgaaagctgtgaaaagtgtgttattgtttttaattgcttccctaaagaatgagagaaggcaaagctgggaccctagtggtattgatgggctgttgctccttatccatgatgtgtaagagtgaggaactaagtctgaaaactttttaaggggaaaatagcagtatagcatactgaaagttttgttgtaatatttaaaaatgccaattaaaaaatagtgcaaaattgtataacgcaattatatgagaattgttttgggatcagcggtccaaagacaaagaaagtcccctcttctctccatgttcttttcactgctagcagcaattaacatttggcatatatcctcctagatttcattttttatgcataagtgaagacatatcaataaaatgtgttcttgttatattacatagttcttgttttaacacaagtggaattatcctctacatggtgtttatgatttgtttttgcacttatgaggttgtgtttaaaatgttgtacatttttttaattttagcattggtaaatttactttgtttttattttaacatagtattccactgaaatgtaattatactgcaaattatttatcatatctccactgacggtccttcaggttatttctaacttttcttgattataagcaatgttgtaatgactatcttgtacaagtatgtttatactcttccattaatacttatgtaaataaatctgataagggaaattgtaggctaaagcatatattatacattttattttattttttattaattaattaattaattatttatttatttttgagacggagtctcgatctgtcgcccaggctggactgcagtggctcgatcttggctcactgcaagctccgcctcccgggttcacgccattctcctgcctcagcctcctgagtagctggaactacaggcgcccgccaccacgcctggctaatttttttgtatttttagtacagacggggtttcaccgtgttagccaggatggtctcgatcttctgacctcgtgatctgcccacctcggcctcttaaagtgctgagattacaggcgtgagccactgctcccggcccacattttatttttgatatgcactggcacaaaattgtgtgaagaaccaattaataaatatgtctaaggaatatagtttccattgttttaattatcaaaaaattatcacttacatgggctctagttatacccatgatatgaccaatttaagaaacttgaaaatataatttctagcacgtgtatactaatgcgagatagagaagttttatttacaaccagaaattgttgggtccataaaagaaacaaatatgtctagaacattttaaagttgccagagcagatttcaagatattccagcctgagtccctcagatatgtattttggtgattgtaaaaatatcaaaagaaattatttgtgtccgaaagtcacaatatgcgtgagtcatcaacacaataagataaggctaaaattgagtttcagatattttgggatttctgaaaaaaatttataaaaatccataatgtaatcatttgtaaaattttaaagtttatcattacgaaaaggaaagtcaaaatcaaatgaaataaaacaagctttgttccatgggatagtgtcagtcataaagacttactagttaggtgctaattcattttgagcttacagggttttatcaggatcagactaagtaaaaatgtataattattttataaataaaaatgttttggggtttcagatttaaaaatcaagagtaagaagttttacaatatttactaaagattacgattagtataccacaaaacatctgaactttagatattatttatatgaccttaaaagtcagacctttccctgccaatgacttaacttctgtctttagtgctattttgtttgaaggcttatttatctgctatgaagtgatttttctacgactttctacatgtctcttcacattgggttaggaaatcttcaaggaaattaatatcctcgggtatacacaaccttttgctgtggtatttgctctgacatggaacaaaggcaaaagatacgggaaaatgtagaagtgggcattatagaagaatccaaatgtgtctaatgtcttcttcatactaattccttctagcctttatttaaaaaatagcttctgaattgcaaggatatttttaagccacatgaatcagtatgccccttcagctggacttttcaaggagcctgtgaatgctgaaatgattaacattatgtgaagctaaattgcactgaaccgtggaaccatgtggtgtggcaatagtgggtggggagacatattagtctagaggtccctgctgagcaaaagacaaagacctccttctccattgtcccgcactgatggtgggcttgggatgtattttcagaaataattatttgcagggaacttataaaaacaaatgaatcaccctcatcactgtgcttgttccgttttgggatgtttgtctactagactttctaaattgggagatttagaaattcagtaagaaagatatttaaaaaaattttttgaggtcctcagtgtcttctgcaagtacactttcaatttttattacagacagactctcttgatgctgttgtttaccattgcatttttatttaacttgaatattttaatttagcatgagtcattcccatggattagcaactttgtatgctagcatatctagttgtatcttctgtgtgttttcaatggtgtgtctgctactccaaagatcttcctgaattttacatattagaagtggcatagcctcatgacactttatatcaagcaggaagttctggaagatgatgctaacaaatacctcaaatctggaaattgtaggctttagaaaaataaagtcatcttgttagtgaatctctatattagactttctaataccttataaacaggttttcagaaattaattatatttatagcctcgagaaactagggaaaaagctggatctcaaagacattattacaaagcagtagtaaattataaacaatatattttgaattcataattaaaattaacgagtcaattttctgaggcattgacctattaaagatttatgagttacctaaaatcccaaatcttccctgaggtaatagcttcagttgagataaagggaaggtatcttatttgtcgcttcactgcaggaaaaaataaaatttgtgattatgactcattatcatgatgcctattgcaaaattacagctcactcttaaaattatgtgaaaaaagatcattaaatgttttagacatttcttaaaacttataagcaaaactttcaagttttttaaactgatttactggttgtatatgtagctaattgactatgaaaacttgaagcttaactctttgtagaccttccatcataccattgctttataaattattaccagaatattgaaggaaataaacttttttctaaccatatttatgcaatcaatatttattaggtagtttttgagaaaatcttatatgagaacttattccttgtataccaaatgtttcatggaacaccaccagcatagacatttttgtttactctgtgcaactggatttcgttctggggagcttcaatttgtacatgagctcattttcacaaaccatcttaccgatacttagagtccaaagtgaaattcaggaactatggcccagcaagctttcatgtgctattctttgcttcatgactttggaaatctatgggagaccctgtatcactagacagaatactgaaaagcaggattacatatgaagtttaccatctgatttttttcctaagggtttttacatgaacgtttattccttgtctttttgtgtggattcagcaatctccaggtttactgaacaggggttgtgaagggcagttgttcacaactgagctcattcccactgtgttgatatactccggttcccccacatagctccaccccgctaactcccaacctcatgcatagctccaccacactattgggcttgaatctaggctctgccactttctagctggttcctgagcaagttctttaacctctctgagcctgtttcctcatccacaaaaaggatgaagaacaaaaaggacgaggcaataccttcttaacactgataattaaataagataagcttaaattataaaatcagcacagagggaatgtaaattggttcaaccattatggaaggaaaaaagtaggaaggttcctcaaaaaattcaaaatgggactgcgaggccgggtgtggtggctcaagcctgtaatctcagcactttgggaggctgaggcaggcagagcattttgaggtcaggagttcgagagcagcctggccaacatggtgaaaccctgtctctactaaaaaacatccaaaaattagccaggcatagtggtgcacgtctgtaatcccagctacttgggaggctgaggcagaagaattgtgtgaaccgggcaggcagaggttgcagtgaactgagatggtgccactgcacttcagcctgagcgatagagtaagactctgtctcaaaaaaaaaaaaaaaggaactaccatatgatccagccttctcacacatatatatatgtgtgtgagatatatatatatatatattcaaagcaattgaaatcaggatctcaaagagatatctgcatttccgtattcattttagcattattcacaatagtcaagatatggaagcaacctaaatatctgttgacagatgaataaataaggaaaatgtggtatatacatacaataggatattacttagccttagaaaaagaaggaaatcctgccatttcaggcaatgtggacaacatgaaggacattatgttaagtgaagtaagccaggagtggaaggacaaatattacatgatatcatttatataaggaaactaaaatagtcaaaactcagaaacatgagagtagaatggtagttaccagggtctgggttggagggggaaacaggaaagtattagtgaaaggataaaaagttttatttatacaagatgaattaagtcctcgagatctactgtaccgcatagtgcctagacttaacattactgtatcgtatgcttgaaattttcctaacaaagtcaatcttacaaatgttcttatcacaaaataataataataaagagagtgagagaaaacttttggaggttattgatatatatgtggcagagacggtggtgatggtttcgctggtgcatacttatctccaaactcattaggttgtatacatcaaatacgtaaggctttttgtatgtcaatcaacctcaacatgttttttttaaagcagtatagaaatacctattttttaaaattattacaactgaaagccttctaacttgtggtgttttcttgaaataataatcgtatcttggttaatagttgagatctaaaagcttaggcctaaattcagatagaaagcttggcacatctgttgtaagttttgaaaccaggtgcacagaccatctttgttccagacgatcttctcagggatgtttgtaaagtgaacagccttggaaggtagagatgatgtccccctgggaagcaaagggtaggtttactcatagcttgggaagagagagatggtgtctccctccagatgaggggaatatatttaccacccataagaaaagatttgaacccattaagctgagggttcctcttctgtaacaccacccactgtgagtggaggcatcagctggcctgctttctatctctctgcaggaagtagagcccaggcaactggcaccaaatatgccaaagcttatgctgcttcctgggctgtgagtaataaagtcccttttccctcttttagaagtctcatatgttctgtcagcagccaccaagctgtgtcaggctaaattgctgtcttgcaagtagaataaaatcccagaccctttgcaatctttttcataaaaaaaattttaaataccatatatttaccgcatacagttcagaattatttattaatagtatattcacagagttgtgcaaccaccaccacaatccaattttagatcatttcaacaactcaaaaagaaaccttgtacacgttaagtgtcattcctgtacccactccctgaaaatctgcttgctctagctgtgttggattgatgtcagaacacaggagggaagggcaaatgcaagggagcaggtaagaggctttcacagcaactcgggacaaatgatagtggcttggagcagggtagcagcatgaaagtagtgagaagtggcggaatagaagatacattttcaaagtggaaccaatagtatttcctgaccaattggctctgccaagaggatgtgctgatcaattttccgtgaggtgtgagaatgagatggctgagggatgagtccatggttttggcatgagcaaagggaaggattgagttgctttgaaatgagttggggaagactgtgggcatagcaggttttgacagagaagaataggagttcagcattgcatatgttaactgaaaatgtctattagacattttggtgaagctgaatagatagtgtatagtattctggaattcagatgagaaatgctgcttaaagatacgaattagagaatttaaaatcatgagactgcataatatcacccaggaagtacaagaagacctagaaaagtaacagtctgagaactgagctctaaggaacatctacctttagaggtcagagagatgaagtagagcttgtaaaaccaaggagcaagcacacacagttttggacacagagatttcccataagagcattgcaaacgttacatattctctttgttggatgtgaaaataatcttttgggaaatgtgtgcttagaccttgatgtgatgcatagggacaaatttctaattctatttgcttcctaagaaaatgaaatgttactaaataaacagcgtcagggcaaggagtccaggtccataaagaaaaacttgcacagcatggtgaataaaattaataatggtgtattgcagattttaaaattgctaaaagagtaaatttcaaatgctctcatcataaaaaatattagtatttgagggaatgggtatgttactagcttaattgaattattccacattgcattcatatattataacatcactttgtaccccataaatttacataattagaaattgtcaatttacaataaaaaataaaaagccatcaaaaaacgccaggcaaaaatatgtgatatacttatacccatatttaaacctacaccataaattatatttaaatttataattctgcctgctgctgttttcagtaattaatatcattaagaaagcacaggttaaatcaaatttcaacacagtatcatttcagtataaaatctcatattttgaataaaacaaacatatctttacacattattaaatgaactacgctgacaaattttgtttctttttttgagaaccagaaaaacaattatacttagatgggccatctaaaatgtccttccagcttgtggagtaggttgtgtttgtttttcaatgaacatctgtttgacaaattgaaatgctaattatgatttatcatttccatgacatcaaatatccagatagtaataaacgttgatgactaactatatttttcagtttcagccagatgtttggcatcacgtaagataccaccttagttttacataaaaataaaatgtttcttgagtctggcttatcataatggggaggaaactaatatgaatgaagcagaatggttcattttttttctcaatgtgtacaattctactggtaagacttttacaatatcataaataaaattgtactttaaaataagtgtctttcaaacttttacaaatacaaagaaagccagaatcaaaacccaattttgaatatcaagtgttaaatatgaatatcagaaactgaatatatcatcaatacaaattttaaaaaaaataagtttgtaaattcagagtttatccctcagatgttatttcaagcatatatcatagtgacatatccttgaatatatatttaagatccgatagggactgggcacagttgctcacaccagcattttgggaggctgaggcagatggattgcttgagctcaggagtttgagaccagaatgggcaacatggtgaaacgccaccagaaaaaatgcaaaattagcaaagtgcggtggtgtgcacctgtagtcccagcgacttcggaggttgagctgggaggattgcttgagcctggtaggcagaggttgcagtaagctgagactgtgctactgcacttcagcctggatgacacaggcagaccctgtctcaaaagaaaaaaagaaaaatctgatatgataatttagaatatgggtcctcagggccataaaacagcatatgctagtttgttggcttttactcaccatgctgtgcactaaaagtaaaaaaatataaagtaaagcccattcttttaactgagattttgtgccctttgacataatctctccattcccacagccctcagcctctgtaacttctatttcactcactccttctaagaatttgattgttttacatttcacatgcaagggagaacatgtaatctttccaaatgacagaattttcttttttaaagctaaatagtatttcatcgtgtatgtgtacgacgttttctttatccattcatctgttgatggacaggttgatttcaaaatgtggctaatgtgaagtgctgcagtgaacatgggagtgcagatatcttttcggcaaaactgatttcacatcttttgggtaaatacctggaagtgagattgctagatcgcatcgtgattctacttttagttgttttggaaaactccatgtagttttccataatggctgtactaatttacattcccaccaacagtgtacaaggattctgttttttccatattctcgccaacatttgttatcttctttttgatattacctattctgacaggtgtgagatgatatctcattgtaattttaatttgcatttccctaatgattagtgattttttcatttatctcttggccatttgttagtcttcttttgagcaatgtctattcagcttccttgctcatttttaatttttttttcttcctcttaagttgatggaactctttatatatttgtggatattaactttttattgaatatatggcttacaaatattttctccacattcatagtttgtctcttcacattgttgcttcctttgttgtgcagaagctttttagtttgatatgacccaatttgtttgtttttacttttgtggcctatactttgggggtcaaattcaaaacattattacccagatcaatgtcatatactttctcccctgtgttttcttctagcaatttggagttgctggccttatacttaaggctttaattcatttcgaattgagttttgtatatgatgtgaaataaggggccaattttattcttctgcatgtggatacctagtttccccaacaccattcattgaacagactatccttttctcattgtgtattcttagcatctttgtcaaaaataaattggttgtacatgcataagttgatttctgggctattatgctgcattgacctatatttcttttttgccagtaccatgctattttaattaatactacaatagctttgtagtattgtttgaagtcaagtagtgtgatatctttatttttgttttgtttgctcatgatgattttgactgttcttggtttgttgtggttccgtgcgattttaaaattgttttttctatatctgaaaaatgacatcaaaatcttgatagtggttgcactgaaatctgtagattgctttgggtattatgaacattttaacaatattaaattcttccaatccatgaacacaggatatctttccatttattcatgccttcttcaatttctttcatcaacattttacagtttgcagtgtatgcagatcttttcaactccttggttaaatttattcctaagcatttaatcttttttatagctattgtaaatgggattttttaactccaagtatatttcatagatggcattgatacagtaaaatcctttattctgtaaatggcatttatatagtaaaatcttttccatggtgaatgattattagtcttaagtgaaatacaaagatttgattttataagtgaaatatttcttaagtaaactatccttggctgccagtttctttcttaaaagtttaatatttcccagcaacttcctgtggttgactcttaaggatactgaagctgaaaggagcccagcaattctgggtgatggaggaaatacgtggccaggctctgctgtccgtatcttcctcaattttcaacttgaattttatacttctactctgacctttaatttttgtgatctaatttccttttccccaataatatttgtttttgaactagtcttcctcatgccatttaaagaaaaatttcaggaataaggaaaaacacaggagtattaaaatggagaaacatcaatattgttataaacagagcaccccaaaataattattttgaaagagatgcactcatttgaatttataaactctggaatgcttattttaaaattaactaatgtgttaacctacatacaaatttgtatttttacttgaaggaaaagcagcattgctggtagtgcacatgtgcttctgtacatacagattgtacacattgaggatgatgtttatgccataagagaatcatttcctctctttttatcagggccattacatcatttctcaaatagaccactgttaggaagtagggatatataagtataagggaggagactcaagtaaaaccagagtggtgcatatcctacaaattgagaataaggcatattttatcttttaaaataacatattttggccgggcgcggtggctcacgcctgtaatcccagcactttgggaggccgaggcgggcggatcacgaggtcaggagatcgagaccatcccggctaaaacggtgaaaccccgtctctactaaaaatacaaaaaattagccaggcgtagtggcgggcgcctgtagtcccagctacttgggaggctgaggcaggagaatggcgtgaacccgggaggcggagcttgcagtgagccgagatcccgccactgcactccagcctgggcgacagagcgagattccgtctcaaaaaaaaaaaaaaaaaaaataacatattttagagactcagtaaaataattttaaaggggcagaagtacagatgtagctgttaggaggaagcattatttcagctacagcacattattggaggataggaagagcatatggtattccagtgaaagagcttaattataatagagcagaaaggattagaaacagaaaagaaggtggattatcaggaataaagtcaaagaagggactgaatattgatcagattttcagaaaaacctgcaaacaaaccccaccacatactagcactagtcataggactgagatttgtcaaagctagctctcttctggtgcactctggttcactgtgaatataagtgggccatagagtgtgaccattgtggtctctggccctaggccatggagtgagataattgagacaagagaagtctgtatatcatctctccacataagcaatagagctgattgggctgcctgtaaacaagattttagagactcacttttctttttcttaaaagactgccacacttagccatctgatatggaatggcatctcctcttaatgagcctgtgtctttatttgcaccttatcaaactgggagatactgaagatggcagtgatgctgatagtggtgagacatggaagatgtagaggaaacctacaaagaagcctgagataggagagaaagggtaatttttagaagtagattgggagaactgcattctgggcaataaatattcactggacttacagcgtattcctttttttaaggaaccaagttcacagttgttagaactacaagagcacaacattacataatcatgacatcaaataagcataaaaataatgcttatttttaatttttacaggtgccattttataaactatctctataaagagattaatgttagcttcttgttttggaaataagataatgggagggaaggataaatgaaacagttttgttgccatctctcattgtgagccagtttagaaatgaaaacaaacaaacaaaacaactcttaagcccaacagcaacattcattataattttcctaattacactcccttttctttttgctaagaaagaacggttgtatttttgtccttaatagaaaagggaacagtgcctaaacaacctattataaattcttctgggaaagcatattacaaataattgaaaacaaccctgattctgtgaacttggcagcaaatgtataaaagaaagcaattcagccctggcccctggatgattgattaaatgttttattctttttacctttcattcatgctgtgtttgtcaagaggaaagagaaaaggaatgttgtgaaatgaagtccactttagacaaataacttacaataatgatcagtgacttctcatcagctgtttattcatttttcttgagttgtaatatttcttaatattagctatcctgcatggacccgacagaaaataaggtcctgagttttagcttgtccccaactccctgccagctaaccatcaacacaagctgtatctgagcttctttgagggcatggccctgcagctccctgtggtcagttattagtctgagtccagcaaaggaacaagaacactgtgtgcttgctaaatctacagaaaacttcatcttctggttgtgtgggaggagaggtccctttgtgtactctgtttctttgaaggaactagggatctgttggtgctgtacagatgtcgaggtgcacagagccaacatcctacaaaactagtaaatagatgattaggatccaactctgtacagaataatggtaggaacctaaaccttggggtactgtttacttgtatcaaaattgttgttgtcctataagccatgtaaaattaactacaaatctcctcaatgaaacactttcttagaactttgatatttttaaatgatatctcaccatctgtgtacatcacaatgttgagctacaaatgtggtggctctaacaaaattttaagtatgaagtcagatgtatagaggatcccttctccatcacgttcttctgtttttcatttcccgcttctcacaaactactccccagatgtcaataattctacaatctcctcttcctacaaccttcgtgttggtccttagtcgtctactctgatctcaaccgcaaaagtcaggggatgagactataggccatccccagagcaacagcctcagcacctcagcacagatctggaggggatttgagctagaaagaactctgaccttactcttttttttttttttttgagacagagtctcgctctgtcacccaggctggagtgcagtggcacaatctcggctcactgcaagctccacctcccgggttcatgccattctcccacctcagcctcctgagtagctaggactacaggcgcccgccaccacgcctggctaattttttgtatttttagtagagacggggtttcactgtgttagccaggatggtctcgatctcctgacctcgtgatcggcccgcctcggcctcccaaagtgctgggattacaggcgtgagccaccgcaccagcctctgaccttactcttaattgcttgcatgaaaattggatatggataagaatgcaaacccaagaacatgtcctgctttccttgatgcacattctcctattgatgttcagtgaccttagcatttccagaagcacctctttattgtggatggaaacttacttattcatgttgtctcaggctgtccaggttggtaacaggtaactgctataaagggtggagcacatcctgctaaatggagagatccagtgtcatttacattttttttaactctttcaagggtaatggcaactaacaatagtttctcctgtgtgctagatattgttctaatcattttacataaattatttcttttaatccaccaaacagcactataagatagatattatttttatttacctttgttagagaaaactgaggtatagagagattaagtaaattgtctaaattcacacagatagtaagtggaggagccagaatttgaacacaagcaatttgtctccaacaaatttgatcttaaactatggttaactctctgaacacacacacaaacacacatacgtacatgcaatcacacaaagtatcaggcacatggggatagacaatattagaaaagcatatacatacaaacatccttacagttgtacacatagactcaggtttataaacccactgaagtgaagactcatcatttatgaaaatatacaattttgttctgcaaaataatttaattttttaaaattccttgtgcaatgagaaaagatcagagaggcctacagtttccttttacagagctaggccaggggctgtatttagagtaattgaacacatgattttacttgaatgcggagaaacttgaccaactgtgaatatgcaatttcactctacagatgaaataaaattaaacggggcaaaagtaaagaagaatggagactaggtaaagtgatggaaagagacaccaaaaaattagtcatgtgaaagcaaaactaagaggagagggaaaggtggcaaaagaagggaacattcagagaatgttgatatattgagaggtgagaatagggagttggtaggcaagtgtcagagtgtgggaggatggtgacagtcactaggaactccagtttgcatacacacaatgttaagaacattagaaattagctagccaatggaatgctcagtcttgaagagcttgtgtctctgcttaaactcctgtatgcattagtatgattccataaatttaaagtctctgacatcttgagttttaagctttctgaacattaaatcagtggaggctgctagtagctatcctgaaatgctgcttctatacatatgagtaaaaatccaaattaatgtatttatacagcttttcatttgtgtactcgtaaaatacacacacacacagagacaattcaacacacacacacacacgcgcacacacaattcaacttttctctgaagaacctttgagtcagagaatgagaatgaaggagactgaatttctcttttaagttcctgtctaggttttgttccaatctaatgacacaggatctggcactgtatttagacctcctgctccaagattttatttttattttaaacaagtgttcccacacggggactgaaaacaaaacaggaaaatgttgcttaagttttcctttgagctgctgttatctgactttcaagtgtactgattgttccgtctcaccaatgtaggtcattgtactctcagttactttgttttctatcggaactttctctagcagctctccacattaagggagatcatgttatttcacatatttatttttgttattaacatattttcttcatctccctataatttgaggttttagcactttcttctttgtagaatttaccataaagcatacgtatttttgaaaactagggaatagcttttacttactaaagtacttaagtactaaacctatcataaccaatttcatttattaagatgttagtaagactttaggagttgttggttcttttccggagaataatgctttagcccagcagtccccaacctttttggtaccagggattggttttgtggaagacagtttttccatggaattgacaggggggatggggagtggggatgggtttccagatgaaactgttttacctcatatcatcaagcattagttagagtctcataaggagcctgcaagctaggtccctcacatgcacagtttacaatagggcttgtgctcctttgagaacctaatgccacagctgctgatctgacaggaggtggagctcagacacctccttctgtgcagcctggttcctaacaggccacagatagtactggtccatggcccagcagttggggacccctgctttagccctcaactcttaggcatgtttcagttctgattttggtcagcatagagctttccttctatttaccaggagggtctctactgatatggatcaatggcaggaggtgatattgggtctggaactatcctttggcttagtgacatttgtactctaatctgcctcactcctgccccttctcaggggacctgggcaccgtcggatcccatgacaggtcctacatggtgacctagggcacggtaaaaagtctaccccaggaagcctagaatggatagaatacaaattcatccaacacaaattcatgaagaaaagccaagatctgcagaaaatcaaacagtaaagactattccagaagagcaacaggaggacgataaagaggagatggagttaaaatactgggtctgtcatagacaggattggaatggaatcccaaatcagatgatagaatgaagggaaggtacatggaatagactctcactagtggtgagctttcggtcactacaagtcttcaaaaggggcctagatgaccagttctttttcatccaacaaatgcttattgaacccttcctctgtgggtagtgatgggcacattcagtgaattcagactggaatcgaacacattgtaaccattaaatgagttaatcttatatgagttcatacatacagatcacatgcaagagtgtctcatatccagtaagtttgcaagaataactactattgtttttgtgtacaagatcttgtgtattgtaatttctgaaatagcaatgaggttggaatacatgactaatgattttatcctcttatgatatctctggttggggcacacccaaaacaaaatttggagcaatgcaaatgttcgaggagagtgagagaacttccttctggtgtttttctctaatgacttgctctgaagctactcctcttagattctttcctagctgtgtattcctatatagtcttagcttaacagcacaaagatttaacagtggtgtctgcatttgataaaatgtaaatgagaagctcccaaaagagattgagaagctctattttgacaactcttcttttatctgtgtaattattatatactttaactgaagaaagaaaaacacaaagataaatacaatatttcaacttcgagtactttttaaaaattatttgaaagcatttaaaaatagatgtaaaatgaactcctgtatgtcaaattcctttcagagaaaaaaaaaagtgagagggaagggggaaatttgcatttagtaattttttttgtttttttgaaaatttcaggcacttagtaatcactgttccttttgtacgtcatgcccaatgggaacgataccaggatctttcactcaattctgtggattacaggtcacccacctgggcatgtttcagatgaaactaacctaagctcatcttgagtaaggggcttagaagtaaatgctttgttggttgctttgagttgtacaaagcaggacgaccaccagaggctttctaagaaaaagaatcatagagactttgataaaattggaactcctaaagcagctaaggctttgcttctatttttgatcatttttaaaaagttagttcttctggtgtttggtagttccatagtagttagaaagcactgccacatgaaatctgctattggtagaaaaagaaaatgttacagccaactctgatacaacatgagagagagacagagagagagagagaagggagagaagagacatgttcttctttgaccagcaggaaaaaaaaaaaagctgcacaaaccttttaactagtttcactagcagaaaagaaaaataaaaatataaaatagcaaataatctttaaagaaaactgattttcttattatgctgaaatttattaaagactgttgtgttgactgaagaatatgtttaaatattttgtggaaggcaaagctttcattcaggaatgacaagtgcaaggactgtaattctaaagaaattaaagaaaagaagaatggcaatttaagttcagggacaattggaatcaagcagtaatgatttacagctttttaaaattttcaggcacttagtggtcagtgttccttttatgcgttatgaccagtgggaaggataccaggatcttccattcagttattatgggttacaggtcacccatccgtgacctgtggtcacagtgttaggtatcgaaagcataataccttcttatctaagaaggaaagacctgttaagtctaagcttaggggtagagttgtcaacgatacagtcatatttgttgaacagttcaagttgccatttcttgtattcttggaagaggtaagttaaagaaggttgtgcacagttcttgacattttattattacagcactacctttcaagccactcagtagtcatcggacatgtaagagtggttgttctatttggtcgtgtaaatttctagtgacagtaggaaaaaaaaaaaagacctttattaaagaccttccaaactaattcagtgccctacatgctgcatgaaaatgaggactttccagttctgagtagaaggaatattaaggcacctgaagggacaaatccatttataaaattatttttctttttgtgataaaaatataaatggctctgctagtatactaaaaaatataaatggctctactagtatatttaataatccttcattgatttacctaaacgtatgaagatacccatataatatttttaaaaataagttattgtagctctaaaataatttattagactagaataaataaatttatactagaatttatgatgaacagtcaataaatggaattaaaaatataggtaaaatacagttaaaatatatacaaattttaagtgatacatgcaatgcacaaattgtaaatgtttgattgaggaaagagctaattcattggaagctctagtccagtctatagtatttggggactgctattgatatgttcattcaacaaataattactgataatatagtatgtactgaaatcattatgctaaacactgagggtttacaataaataagaaaatgtataacctcattgaacttaaatctagtagcagacacaagcaagtaaattggcaataaaaatagggggagtcaagggagtttggataaattatagaagaagctcctagacagtccatggaggtatttgtgggaggatggaattggcaacacagctgagattttaaagatatataaagtacatctgtgtaaatggcaagcagtgagaacacagaaaaggtgtttgaggaaagggcctaaagataagatagaccatgacacagaaaggaaagtaaaaatgattcagtgaccatctagtagatatccaatacatatatttgagtgaatgagtgatagactgactatatgaatgggaaatattgaaatataaagaggaaggccagagataaagctctgaaaggtaagcatatattttaagacttcagagtacctaattttctgaatatgcaaatgagcagtattagaattaataaaaataaccctaaaaatgagaactcttggttggagaaaataacaaaatatgaagtaaaggaaaattgacagaatacttcaaaaactgtgcctgatataattggaaataatgcctggaaacagattgagtccataatcctgtatgtgttcattaaggccaggaagattcttggtaaggaaatgtctagtctgaaaggtctaaagattttattaatctgtataataaattatatcttatgaaactcttgtcatttatccagtatatttgaattacccgtgcattactgtttcatatattcatggtactttcatattttataacatttaaaaatatttcaatattccattgatttgaataagattctttaaattacagtgaaagctttctgataaggtatggtaagattatttttcagtaattatgctgatacatataataaagctactgacaattcataaagatgataatacacttagtacaaactgagcttcaatgggattactaaatgagtatgtgaggacagagcagaggaaaaggccaagggttgagcactgtggtgctctattatgagaaagttaggaaggattaaagttggcactgaaggggattgagaaggagtagctgaagcggtagaaggaaaacaagaacagtgtgtcctggaagtcagtggagtaatcacttgtctcaaatgctgctaataggtcaaatatggtgagaactgagaactggacatttcatttagtaatgtgaaggacgttggtgactttcccaagagcagtttcagtggaatggaggaagaccaatggaataataggagcattgtggaggaataaaccaaaatgtacctatttaccatccagagccagactcagagcctttactctgtgctagaaacacaatgaccaattgttgcattgttccctttccttgagctttctacagctcacctcgcttcttcaaacatgtacaatcagacctctgaatctgtggattccacatccatggattcaactgactgcagaagaaaaatgttagaaaaaaatctgcatctgtaccgaacatgtgcagacttttttcttgtcattattccctaaataatatggtataacaactatttacatagcctttacattgtattgggtatttaaagtaatgtagatgtgatttaaataattttgaaatatgtgtataggttatatgcacatactatgccatttcatttcaaggacttgagcatcctcagattttgatatccacaggaggtcctggaaccaatccccacaaatcccctgaaactataactgatgaggggtgatggtacttctttttttacacagtcaaaataaaagagattaggcttgtttttgttatttctccccaaataatgccatattgagcatgactggatttaagaggtccccagatgtctcagccactcatttacataaaaattctttgtccatatctgtacatccttaatctcaagctacacatatggatttactgttctgtctcctggtgtcagcttactttcaatttgttttacctgtttcattggcacacttgtagagattgataatacaaaaatgttttaggagagagcataccacacatcaagttgtcaacttcatccacttctgctacttatttcaaagtttctgatacttattcatgatctttcagtagccttcattctcccatccatccattcactcaagaaacttgtattgttagggaatgtattagaattatagctcttcaagctttccaaaacaaatgtagcaacataaatagacaagcataataatggaaaatcgtctatacgagaaatctaattattttaggcacaaatcattttttaaaatgtattctaaaataaaaatgccattgaggcacagaggtcttactaatctgtaaagcaaacatgatttatatagtatgcttacattagtaaatcaggattatttgggtgaacagagtataatattgatatagttatttggttataaaaagagatgtttctgataaggtttccccccctttatttgccttggaaaacaaatttcaaagaagagtgtcattttaaactctaaaaaaccagttgataaccatagtctgatatttgcagttggaatgaattcctgtgacagcatgaacatacacccaccaacatgtctgtaatagaaaccactttggaagacactagaggctgccacagatttctcaggtcctcacagcaagacagtggtggtcttggggatggatacatttcatcttccttgaagacagataccaccctctggctgtcaccccataggaaatcaggaagtatgctaagctatccagtggacttggaattacactgtgctgtgctagtggaaatatcctatccaacattatgatttattttgaaggagaaaggaaaaaaaaatacacacaaaacggtggaaggaagctgcacacaacatcgccaaacagctggcttgttttatatcccagaaacagcttgggactaactatattcacaagatctcttggcagagtagcttgatgaaaataccaaagctgtgagaagtgttcttttgctgaatccttcatgtagctatcacacggtttattaacctaaatgagaatatgtacaccttttttccaaaaaggtcctttgtatgtttaagtgagaaacttactgattcttcatacggcacaaacatgattcaccacagcattcacaccaaataaactctaataatgttcagaaactataatcctagacatgtagcgatttcctcctttctttcaagtagtatttttggggacagtcaagagagaatttgatagaaatgtaagcctgagttcaatggcactggtgacttttttaggtgccaaggttaatctcagagggaaattagttttaatggcttcatccatatatttatccattcttttaacatttaactctaacctccttaagccaaaaatataactcaattctaaacacatttctggctcacctgctaggtgccagaaatgcggatcttgaggaatatacaagatctgcttcactcttttagaatccctgcattagagaggattcagtattttcagattcatattttagaagacattgcattctattccttactaagcatcccaggtagattcaattaggtggaacatattcatatttttatcatgaggcattttgagtctattctttgtgacaccagaattagtttctcatctcagagtttgctgtatttctctggtgactcaagtagtttattggcagtcagtttgtaaaaggctccctgggattatctaaatgcaggacgttaggaatggaaatatgtatcattgcctctcctgtcaaaaaatgtaattaacacacatgatatatcatcttacaaagtggatgaaaattccagtgggtgaccttgagtcacagctcctcagtgcacacactgtcctgtacccaagcatctcccagatagcacagaactcccacttcctgcatccctgtacctttagcactgtgtgcatgtttgtgtgtgtatgtgtgtgtgagtgtgagtgtgtatgtgtattttcagttcaaaatctaccactcaatttcactttctttaacaattttggtttggttcaatttgttgcataggtaataataatccatttacagaatacaaaaatagtgtaagtatgtgcttcttcctatctgtatgttgagagattcctcattcttttttatggttgcagataattcattatgcagatatacaatttatttaaccagtcccatattgatggatattaggttatttccagtcctttgatgtgaccaaaaaagattataataaaaaatgctgaaagaataatattgtctttgtcagtttgggcggccataagaaagttccatagactaggtgggttgtaaacaagagaaatttatttccccacagtactggaggctgaaaatctgagatcagggtgtccgcatggttatgctttggtgaggactgtttcggggcttgcagactgctgacttcttgtagcctcacatggttgaaagagagctagctagctctctggcctctttttattaggtcactaatctcattcaggagggctccaccctcaggatctaattacctaccaaacgccttgcccccaaatatcatcacatttgggattagggtttcaacatatgaattttagtaggggggaggcaaacattcagtccattagccatattcagttcacctgtaatatagtatctgtattattttatgtctgtagaataattcctagaagtggaattgctagctcagaattactgtgtgtttctaattttgatagttactgctcaattgactttcttgaaatttgtatcattttacagttatacctgtaaatgtaagaggtatgtatctactctcttagtctaaccatcagagagtattaccaatatttgtggggtttgccaacctgaaaaaatgggaagtttatcagtgtgtttttaattaacatttatcctattatgagggaggatcagtatcttataaacttttaacagtcattttaattttcttttctttgaatagggccctcatatatttgtgcattttgttatggtgttggtgcatttctttattgatttacaagagttctttgagtattaggaacatccttcctttatccgtgccaacagtaccttttattttgtcacacagtttattcttcatcagaattctttgctcttgagaagtccctgtgagagcctgccagccttctacacctttggagggcagtttgttggcaatttctcaatttttctttcacatagaaaatgatctgactgaattttatttctcttgatgtcaactgtgctgaattattgtcttaaaaaattcaccattccattcaggtttaacatattttttagagtgtgattttcatagggtatgttacattcttgatgaatttttatcttcttgacctattaattactaaaaaaaaaaatacagataacgacaacctaaaacaacctattgaaatatctcactgtgatgatagatttgtctagttttccttgtaatttttgttctccatattttaaggctatataatgtgatgttttcaagtacagaattattttaagttcctaatgggttccttttttaatctgatattttataactttttccccaagttttctggtttcccaccataccccagattcttaagtaatttagggcacaataattttcagagaaagaatgattaagaatttatggaaatcttaggaaggtcgaattgacgcagtgccttggaagagagaaatataggtagttgaagtataaggagaaatgcctatgatataaacaaacaaattgcatgtacatgtattaagaagactataacatatatcagttacttcactagatgccagtgcataggcatgtacctgaatctgcgtaactaattgggagaatgggaagttaactttatttttccaagaaaaagaaacaaaatcaatatttaaattttggaaaacataattgttaaattatttttcatattgtgtagattcacatctctttaatcaatgggagaccaagtgccgatgatccttctccagaactgctagaatttacctccgctcgctatattcgcctgagatttcagaggatccgcacactgaatgctgacttgatgatgtttgctcacaaagacccaagagaaattgaccccattgtcaccagaagagtaagttatgatgaatcatattagagcctacaaatgatatcccacttatctttttgtctgttaaatactttaaaaatgttttcagtgatttgtaggagtggttattatcaaatttttattttagaattgtagattattattattattattatttgaaatttgacagactttcctttgttcagatccaagctgtgccgcttattacatgtgtaacatttatcaaacattttagccttctcaaactttaatttcttcttttgtaaaatgagaatcacaatgtctacttaataatcttatttttcagaataaaattagcctttgtcaccttaggggatctatactactattataattggctttggcgagttactactggaagtgcaggggctttgaaacatttttttgccaccactgagccagtatacacacatgcacacatacagagagcagtatgtcttaaaccttaatgtgtatgggattagccagtgatcttgtggaaatataggttatgattcagtagggcagagctgagacgctgcacttcaaaaactttccaggtgatgctgatgttgccggtttgtgggccatcaaataatttggttttatgcttgattaatgaatcacaagccatagttttaaaaatgcagtgctataggagaaaactgattctacatactgttttattttcctttacaaataaaatattaggggaaaaagtttaaagcatcttttcaaaagctttttgaacacaagagctaacagaagtgctgtcttccagtgttaaacaggaatttgtgggattacaagatagatgatcaacccagattgctatgagtgataaccgtgcttcctcctgtctaccttctaccatattcactggtttatggcacctcccacatatgctgctacacaaccaaggcattattaccagggaagtcaattcagccataactctataaagtaaactcctgtgaatagagtatctactgtatgactagaggtatagctaagaaaaaagactatagggagaaattaatattgtaggacaaagcatttaattctagaatgatcccactaaggtaagaccaccgtcatcggttgcaaaattgctgaatcactagggttaatagttacagatcctaaatactcctcacatgttttctttcctcgttacttaacttcccacacccaacctctccatcatcacaagataacttttaaggctttagttagtcccatgcaacatatgtcagatgttttagtgccctgtattttccaaacttgaaataatttccccttgtattatacctcaacatattgtaaattgtctcatgcaaaactaatcattattttatagcaatgtttggatttttcacttgtttaagaaaacattttcaattctaattttggcgggacttaaaaatatacaccaaggaagactggtgtgaaattggagtgaaatttaatctttcttgacagtatgtctatcagagaaaaaaaatcaatgaaaataaattagtgttctttctatcatctcttgcaggaggtagagtgggggttggggtacacatctattatttataactttatcgtacatgagtctttaaaataatgcagtataagtcaacatataaatatgttttttgaaagtactcaagttcaataaacactcatttaaatatataaaaataagatagcaaatttcagctcttcttcatgactcaaaagcaaagcattatacatttatatttaaaatagatttcccagttttaaaagcatttacaaatactactgtatcagctttttaagcaaatatctctatttgtgtctatattattaagtgatgaggttaaatggaaaaaatatttttatactatccaaactccctagccagttccattagttcaaggtctaggtatatcaaataagataacataacaaaaatattttcaaagacactatatgtatgtaacaaaaacaaatagaaggaaaaagaaacaaagaagtaaattggaaaaaggggattcttagtcaaggaactcagatatgtgtccacctacatattctagctaaatctgttttttttgtgtgtgtgtataattggaataatagaactatctaacgctaagatgattatttgaatatgataatgtaaagtgctctgacaattataaaatgttatatacacattaattaaaattttaaaaatagtctagcctccataattatccttaaaaaatagctgggtagattaaaataattagtaacatagctctatgttaacttcatatacaaaggtaattgtatggactatattacatagtaatataaaaatgcaaatgttctgcacaataaacttacagttaatgactttttaattttcttcttaatatggttaaggaatatattgttatgagcacaatttctacccagattttgttggttcttttcaaatccatcaagtaaaacagtgtgcgtatgatttgtgaatactgcagttgctataatcacaataaaagagggtttcttgcaagaaactatgtaaaacaacttttatgaagaatagctgtccttagccccagataaaaactactgtcagccacaggtactctagcatggacttggtgctgactgggaaaaagatatttctaaaatgcccaactagcttaaattaaaggccactcttcctttgggctaagatcacagtgctaagagttactttgtcagttttgtgagtcctcacttgtcctcaagaaacacaaatgtccttcaaactaaggataaaagcagaaaataaagtttttactgaatgtccccttttgttactttgaccttgcagtcatcttaacaggatttctctctggattgctttttgcagtattactactcggtcaaggatatttcagttggagggatgtgcatctgctatggtcatgccagggcttgtccacttgatccagcgacaaatgtatgtatatttataggatgcttaggcaaaatgaagccctgagctgtaaaatgtttcatgacagtctttgctgacagagaacgctgtaaatgggagtcaggtccccacttagacagtgtaacagaaatccatgccagggtgaaataagagctggcagttaggatgatagactttgaaatcagccatcacagtataagaaaacagattagtttttcctttttttttttttttttcaaaaaggctccaaactggtctattttgaaatctctctagctatgacagcctgcctcatgatatagctttagagaacgcctgccatcaatcaacctgaccatttcttttaaagtttctaatcaaaaaattaatgcaaatgagtaaaaaaatgtgcagggaagtaaatatataagtgacaatggaacaggaggataaaatagggcaggggcaataagggggtggagggggtggagtgggtgagagagtcaagagagtactgatagtggcaagccggaaaatgccagaatgctttttgatagaattttttcattaatgacaatgaattaagtgaacataacctaaaggagaagatgaatgagcatctatttttcctgtcatagacaaactggtgaaattcaaactcatctcctgtatagtatatggaaaaatacattgaatagtaagatcagtgaatgtaaatcgggccacagattttttttctcaaatattgtaatgcaaatgacattatactcaaagctagttttctgatgattggattataatgttatctcctaggaagattaaagtacactaacatatttttatgggcaaagctgcagtgctgctttctgcctggtatgggtgctttcttcttttttttgttttccattttttaaaattttactttaaatcctggatactcgtgcacaacatgcaggtttgttacataggtaaatgtgtgtcatggtcatttgctgcccctatcaacccatcacctaggcataattttccacaggctttacagagtccctttgtctcactggctttctgcattttaaaaatccctttactgttattttatttggaggaagtgaaaaaatgcatatgccaccatagaatactacgctgccataaaaaggaatgagatcatgtcctttgcagggacatggatgaagctggaaaccatggtcctcaggaaactaacacaggaacagaaaaccaaacactatatgttctcactcataaatgagagctaaacaatgagaacacatggactcaaggaggggaacaacacacaccagggcctatcagatggagggaggcaaagggagggagaacatcaggacagacagctaatgcatgcagggtgctttctatcaggtgtacagatgatcagtgtttcccaggctttaaaagtccacaagacaggcttggaaggccaattccaggtggtaaattgagactgtattcagagcatgcacagacaggagatttagtcctagagacattagatttctggtttacctgcacccctagaggcctaggaatcaactccctccttcttgccatatccaaaaatattaacaacattttgaggggagccttaaaacaagctaatcgacccccaaaaaacacatagatcccaggcatcagagaaggagaattcagtcttcaagaccactcccagctgggccttcctgctttcttctgagcctaaacccagtgattaaagaaccagcctggacttccttaaggtgatgttgatcaaatatacccacttcaagcctggcaccactttcttcccaggctggctagttttacattttagtacacagtccagatgttttctcttttcttcatagtacctttagagagaggcttcctttatggttctaaatgaggctaaaatttgtgcttcctccctctttttgactagaaatctcgctgtgagtgtgagcataacacatgtggcgatagctgtgatcagtgctgtccaggattccatcagaaaccctggagagctggaacttttctaactaaaactgaatgtgaaggtatgttctttagaagccaacaaaatatgtcattcttcctttccaagaaaaaaagccagtaatgaaaaatagtgaaatggctggttatgcaaatgtgtcaacaaatactcatttatattatcacttcgaagacaacccatatgtctagcttttcctaaagggaaatatctaagaaatgtagcagatgactttatagcctaatagtgacaactggtctttttaggtgacaggtatcatggagaaacctgtgtttctggagattttctcaacccaagaaaagacctaaaaatagtcttgggctgaactgcaaacctaaactagtatgaagtccaattcaactgaatgcaaatattaatattacagtaaatcagccctaaccacatttttttcagctcactaagtatatatggccttcaaaaacagcttgatagacattttaaattaataccaacactatatatcctttgaataacaaattaactcaactcacatttatcatgtacaatgtgtcagacatgacaggtctttaaaactattgaatcataacacaccttaatcacaaaatgttccccacctataagatataaagtcggccttccatatccatggtttctccatccatgggtctaaccaactgcagatcaaaaatgtttgaaaaaaagttgcatctgtactgaacttgtaaagacctttttcttattattatttcctaagcaatataacaactatttatatagcatttacattttgttaggtattataagtaatctagagatgatctaaagtgtacaggaggatgtgcataggctgtatgcaagtactatgccactgtataacaggaacttgagtatccttgaatcttggtgtttgagggaggtcctggaaccattcccatggatattgagggatggctgtattttctttttagtttgagattctgcatatatgctattagctctccttattttctgcactcacttcatttgcttttggatttgtgtctgcctgtttataaagatattatggattagaaatctcccattattacaaaagcatatctggaggcatgagccaccattggatcatcactcaccatgcatggtaggggaccattggaagcccagccttttgtttccttcaactacttccagccatgttctggctaatcccttagttctccacagcttctccatagagaacagacatttgttcttaatagtgactttaaatgtaatgccacccagggatgtttgctctcgagctcctttaaattttaattaaatttctcttctgtttgtagaatatcagtaatcataagtgggagcagcacttgaaggtaggggtcttcctgttgccactgacatgccttcacacagtgataattgtgtaatgttaagtggctctgcaaaatcctttaccactctttacttgtgtttctacgtttaaatacaaaacaaaaacaatcgagcaacttgttagcaatagaggtagactaagcaaggcaagacatttcaaactgctactgtacacatttttaaaatagtggaattgtgaaacactttttttctttccctgtagggaagaggggaggtcgtatttccaaactgaaaaacaaacattttaaaaacgcagaaattcaagatggggatcttagccataaagccatacataaaaatcacactttcagcaatgagtacattcctgaaagcttaagtaaaaattttcttttccaagttgaatcatattccaatcaccttaatatttagaaaaatccttccatgacatgacaaatccctccataaaatgaataatcacattctaattcatttgagtttaatttggattttcatcaatctagcttacataaggcaagataatatctctaaaaagcatagaatattcattcagttgctgagcctttactaaacaacagtttcatatgatatatcttggacattctgtgaaatagtaagttgctgatgatagagaaaaaacatggctttgtgatcagttactagccatattcttgaaggttacagacagagcggggtaggctgcagcctacagacagaaagtggggctgtaggtgtagggtcctggctgcacagagtgtgtgatggaccgtttatttggcatcagggttttacatatagtagctcatagttctaaacactcttgacaacacgaattctaaatagtgtgagaataagtctatgttactttatgttttcctctgcttatactggcagcagaagttttgactgttttttgaaatacactattacaacaaagcttttaagaattcatagccaggtccagtggcatgctcctataatcccagctactggaaagaagctatggtgggaggatctcttgagcccaggagtttgaggccagcctgggccacatagtgagaccctgtctgtatcactccgttttcacactgctgtaaagatactacccgagactgggtaatttataaaggaaagaggtttagttgactcacccttctgcatggctaggaggcctcaggaaacttatgatcaaaggggaagagggagcaggcacatcttacatggtacaggagagagaggagaaagtgaatggggaagagccccttataaaaccatcagatcttgtacgaactcactcactatcatgaggacagcatgggggagctgcccccttgatccagtctcctccctccctccatacgtggagattacaatttcaaatgagatttgggtggggacacagagccaaaccatatcactgtctttctgaagaaaaaaaaggaattcttgtatgttgccctaaagatataaaactgcttacaatgcctagtgatttgtattgattactatgtgttccctaaagtttgaaactctccattaacatagcaaaactactatattctaaatcaaatgtcagcaggttgggaaaggtatttacaacaaacatgacaaggggataataacctttctatattaagagatcttacatatcaataagaaaaaagttaacctgttagaaagatcaaaacaggtattcctcagaaatgacatataactttgtaaaaagataatgacactcataatgaaggaagtatcaattaaaacaatgacatattatttttcacctatcaaagtgtttattcttctactcaacaaatatttgaatgcttattatgtccaggaattgtattcaagggttgataacacacaaggttggtggctatggagaaagtgttttatcatatctactagaggaaaagtcatttgtcatagcgttcctggaggggaattttttaagcgattaaaatttaaattttacatatcctttgactagaaattatgcttccaggaatttaccctatagatatattcatatagatgtacaggcatattatcatgatcctcgtcattattatacaagtgctaccactactgctactaacatttattgagctcagtatttagtatgtttcaggcattctgctaagcattctcaaaacatgtatgagacaagtactaaagtgatgctaggactcgagtttttgcctcaaagtcactcaactggcaaataggaaacttttctaacattagagcgcctccctccacccggcatccttgtcctcccagtatgtgtgtggtgttatttgtaaagggagaaacatggaaactgtgtaactgttcattaatagggacctgataaataccttcattcaagtagtaccctgtgtacccttaggggatacacatgctaatatggaaagggctccatgatttactgttagtaaaaagaaccggttctaaacagtatacaaatgccccttcccttttgtagaataaataaaaagattgagctgtatgcatacaagcacacctacacacacacacacacacgtggaaataaatgtaagtactcctaagaaactcaacatgtcaggtaggaaggagactgcatcgatatatttccctggttctatcctaatataaattcttcatatttagaagagtcttacccaatcctttctggagaaagtgatttttcacttcttggaattcttctaatgtaacatgaaaaagacaaggaggaagaaaagaagaaaaatcaattgctaacttctttataagacattacgctaatgatttcacatgcattatctcacttgtgcttttaaatatcccaatctagtaattactattgaccactccatgtattatatggaaactgagccttcgtgaaattaagaagtttccaatgtcatatgactgctaagtagaggagagcacacccacatccaagacagttggttgcaaaatagcatgatcttagccaccagtaaactagctctcggtttgtcttaattccttggcacctgccatgtatcttatttcattcaccgggtaggatgtgaagagattctggcagtctttagcagtgcagactctggagtctggcttcagaggttggtttccaatactgattagaatatcttttacacgttatttcacttctctggactcaggtttctagtatacaaaaataggttaataataataatacctaattcctaaaagcatttttgaggattaaaatcagtagcaacaaatatggagcatttagaacagtgtctggcattgagaaaacctatgttttagttgttattagtattaaaagaaaggaattatattatacatacttttctttacccacaggctctaatacagaaatttccatatggtagtaattcattacagattacctagctgttaatcattcagtgccatcattgaataatttattatttgttataataggaaattgtaagttgaaccatataaaattgcacgttagtcaaaaccaaatattggcaattgcatatgattgagcttaatttatatgttttaatcatttcaaattctattaaaatgtgtgaatttattaatacctccaatacatccagatactttctggatatgtttgtgtgtgtgtacgctaaatgtaatttcccgtatggtataaaagtctaggccgggggcagtggctcacgcctgtaattccagcactttgagaggctgaggcgggtggatcatgggtcaagagttcaagaccagcctggccaacatggtgaagccccatctctactaaaaatacagaaattagctgggtgtggtggtgcatgcctgttgtccccagctactcgggaggctgagacaggaggattgcttgaacctggaaggcagaggttgcagtgagccgagatcgtgccactctgcactccagcctgggcgacagagtgagactctgtctcaaaaaaaaaatctattatgtataacagaaatgatttttaaatgtatctgaaatcaaattgatgtttattaatttatttttccttaatgcagcatgcaattgtcatggaaaagctgaagaatgctattatgatgaaaatgttgccagaagaaatctgagtttgaatatacgtggaaagtacattggagggggtgtctgcattaattgtacccaaaacactgctggtataaactgcgagacatgtactgatggcttcttcagacccaaaggggtaaagtatgctttttctttcataaagagttatttttttgctttttcatacaaaaatgttttatacaaaaaaataataattttgaaagcttctgtaaacagttgaacttcaaattaaaaggtaagtaggaacatttcgtagttgaaactgacctaaatctttgaggatgtaagataaaacttttccatcactccagaaagttttatcatggctccttccagtcaaggagtggacccctaggcaaactctgttctgatttttagaacgtaaattagttgtgcctcttagagaatttcataaaaatgaaatcatacagtacatactagtgagtcttttttcactcgacataatatgttaagatttatccatgttgtttgtgcatcagtagttctttttcttttgaaagaaattgctgagtagtatttctctgcacgaacatatcaaaattttaaatccattctcctgttgatagaaattaggatcatttccagttttagcttagctcctacaaataattttatactagttattttatagtcatatttttatttaccttgtgtaaatacttaggaatagaaagcttttttcataggataggtagatgcttaactttataagaaaccgtcaacattttgccaaattagtaataatgtataaaatgttcaccaaaaagttatatgagtttcagtcattctatatcatctctaatatttgatgttgactatctttttggattttagtcatctagtgggtgtgaaatggcatctgattatggatttaattttaatcgtaagggcttattgaccattcctgtatcttctcttatgaagtagatgttcaaagtctaaatatttttttatcctaaaaaccaaaattttaacttatagagctattacccatatcaagtaaatgtttgtgtgtggtgtgaataagtaaccagatttatatggttaacctgaagttctagcaccatttgttgaaaaatcaattgatcatattacatggatcaatttctagaacctcagttatctatttttcctagcatctatttttccctctgcgtgctaataccatactatcttcattgctttagtaagtctagaatttaggtaatataatgtaccaactttattttttattttcaagattgtctatagtaggggcttttttgtgtgtgtttctatacaattttagaatcaacttgtcaattacagaaaatattaggattattgcttagactctatatacaaatatggaaaatggagcttgaggagatgttggtcaaagaatataaaatttcagttagatagtaggaatacattgaagatatttattgtacagcatggtgactgtagttaataacaatgtatttactcttaaaaaatgctgagagtagattttaagtgttctcaccaaaaaaattgataattatgttaggtaatatgttaattagcttgatataaccatttcacaatttgtatatatataatatatatatacaatgatattcaaaatatcatgtcacacatgataaatatatacaattttgtcaaaaaggaaattaaactttaaaagcaaacaagtattgaggaaaataacatcataataatattgaatcatttaaccaatgaacatagcatatctctccatttatttctatcttctttattcatgtcagtgttccagtacagagatcttgcatgtcttttgttaaattaatctttagaattttgctttgcatgactgtaaaaaaaatttttaaataattttccaattatttaatgtaattgttaaagaattttgaatattgactttatgccctatagccatccttaatttctttttttttttttaaataacttcccttttaaaagttactgagaataaagaatacagaacatggttataggcacttacattgctatcaaatgcaggaattcacttcaataagaagtgctttctctgtaagcatggttcatggcaatagaagctccaacttaggagaggatgttttccgtgacaaaaataataacaacaaaaaaaatggtggttgaaggaaaacagtccaaatttacagatgctttaaacttcttttggccttggcatcagctttcatgttaaaaaataaagctggtggggaagctatctcacttgcaaagtaaatggcttgtatgagattggcgaatcttggtcagatattgcatttttaaagcacaaaaccaccggccaccaatatcttcctgtgcatgcatataaattattttcttctaattcaaatggcaacagaggaatcctggcgtgcatgtgcatggagacacacacacatcactaaggagacaggacaaactatcataaactaagcagtatcccaaacacatcatcatctataggctgttttacaaaggtggaatacaaacgaactgaatgtctcaggtaaaaggcaaagtctatttctccaactctgctgcactcatttatcttcttaaggctttcacagaaagcaccgttttatgaacaggcaattcagtacccagagcttgactggagacactaatcaggattgaagtcttgatgcagttcataaaaacccatttaaaaaaaggcatcaaaaaccacatttaaaataaagttgtccatatataaagaatgaagtgtttagaagttcccagcttgtatcctaataagagtactgaaaggtttaatattagcagcctgtgaacacgtagtgaagaaagagtctgagaaccaagttaacatccttattccactctaattccacccatgccatgggtaaaaacagttcttgcagtctagagtttctcctccgatggtttaaccgtcagatttttacatcttgggattcaaccatcttggcaagcgtcttcttaattctcaacgctgtgagtctgggggctggattgtgggcccagcattctgacattagcttcaaaactgctcgtagacattcatcactgttccaccgattagacacaattggccgcaaacgtttgacacacacaacctcacgcatatcttcgtatgacggatcactcggtaccatgttataatatggcaattggtagtcttccacgatccctcctgtgatacaacgacgagccatctcccaaatgattaggccgaagctgtagatatcagccatgatgtagggctggaagtggtttttgttcaggctttcgtccagcacttctggagccaggtagcgtttggtgcccaccctggtattcaagggcacatcaacttcatttgtgtcactgttgaatttaacagcaaggcccaggtcagcaatgcagcaactcccatttttcttgatgaggatgtttttgctctttaggtctcgatgagcaattgcgggctttccttgggtgccatacgtttctgtgtgcaggtggcacagaccacaggcagctgaataagccaatttaagcagggctctggtgtccagcgtagcacatttcaggaagtcatagagagatccattttcatggtaatcagtaatcaaatagagctgagtccaggaacctgtacctttaatatctgccgctatgaaaccaagtatgttttcatggcgcattagcacagtttggtagatttctgtttctcgaaaccagctggcttcttcagtggtaaagaatactttcaccgccactctttcgccatgccatttgcccatccgtacttctccatatcggcctttaccaacttgccggaccatctgaatctgtttggcaatagttcgctgaaccaataaaggtagtccagacccactaccagaactttgtgactggtcaataaggtcttttagtgattttccaactggaataaatgcttcatcctgttccaaatcacgattgtaacgacgtctgcttgagatgctcttgcaataatgtttgtaacaaaagcagctggagaagatgatcatagcaattatgcagacagccatagaaatgagcaaaaccagccatcgaatgctgccatcaaaaaacggacctatgacaacagggggcatgtgggttgcaaatactggttacataaattggtccgacaacattctattgtccggcgtagctgggcttttggagaatctttgcactgaaaatcagatccttcatatttcatacaccctgaagctaatgtggtttctccctggtcatcttcttctatgatggcaaagcaacgtccattagttatgcatgtgttattaatagcatcatctgggcagtgccctcagcaatagcacttgaaaaaaggcaaggtatcctctggtgctaaggttactccattttctgactttttctggtcggagtctgatttcatcccagtgccgtggagcatactatccagattctgtccttgaacacgagaaatgatgaacaaataggctcccaataatctgatgtaaatgtatagctgagtcattgttcaattgtaatgtttcctgtgtactgtcacctttagtaattggtcttgctacttcaccaatttaaatgactgtcattcagtgagattttcttgtaaaagatcgcaagcacttgacaatgacttcaactcccactgctttcttacgactcctccaagatgtggctagataaaactgtacttccgattttctccaaacagctttgacctatgcttccatctcatgaattccaagacagtattaaactgatgcatattttcataagtcgctcccggcgtctcttcccgggctccttgccagcgtgccgaggcgcaggcagggtgatggaggcgccccggccgggaggatctgccggggagagcggctttcctcatcgattcgggagcacccaccatgcttaatttctttattaattctagtagttttaaactacatgctttagaaacgtacacataaacaatcattttacctgcaagtacattcaggcttacttcttcctttgcaatctttatgccaaggttaactaaaaatggcgagagctgacatcttcactttgttctgaattttaaagggaaacctaatatttcactatggagtatgatgtgaactgcatatttttttatggacaccctttatcagattcagtaggtcccctactattcctaagttgcagagagtttttataacaaaatggttttgcattttgtcatatgcttttcgaaacctactgaaatgaacataaggattttctcctttattctgttaacggggacaatttatgcaaattgaattttaaaatatgaaggcagctttgcatttgtgaattaatctccatttggttatgatatattatcatttttatatattggatgattcaattgactaatgtttggttaagaattttgacatcctctcataaaatatattggtctataattttattttcttataatgtttttgtcaggttttttattggggtatactggcatcaacaaatgatcggggaaatgcacttcctcttctgttttctaaagtaacttcagattaaaattaattctctttaaaatgcttgataaaatttcctagtgaaactatctgagtctctagttttcttcgtgcattgtattggctattttttattagacatagggttagataggttttgtattaatatctttagggagggtcaatttttgatatattgtatttttcaagtaatttgttcaattcatctaaattgtcaaatcattggcaattggcagttttaaaaattgccttattatcttcttgaagtctatagcatctatatagatatcccctgtgtaatttttaaaatgattaagttgtgcttttctccttttattgatcacttatgttaggggtttatcaattttcctaatcttttccaaaaaaacttctgcctttttattttttgtgtttttattgattctgttctatttattatattattcatttgacctgttttggttttaaatttcattttctttttctacctatcaatttggaaagttaaattatgattttacacctttcttcttttatcatataaacttttaaatatagatttccttctagcagttctttagctgtttctcatgaattcaggaatgctttatgttcattgtcatttatttaacataacttctaatttctcttgtgatttattttttgttaatttccaaatatttgagctttattaaatattatatttttgatttctacactggatgtttatgatctgagaacatactctctaagatgtcaaactttagaagtttattgaaatttaacttatggctcagtgcatggtctctcttggcaaacaaataaatgtggatttttccaatctgcgattatggattcctacctttctttcatttttttcagtatttcttcctgttctttgaagcactgttatgaggcacatacatatttagaatattttgaatctttagatttttatatcttataaattaatattttgataactgtgaagatctccacttaatctcagatatcactttttgtcctaaagtctactttattttttattaacattgccacagcagttttcatatgcttactctgtatggtatgttttttctgattttgtttaactttcaacctatctttattttcatttaaaagatttcttataaagagtaaaatagatggattttttatcctgacaattactgtgtgtttagtccctaaatttaatatagttaataatatgattgggttttgctatttgtttcccatttgtgtcacaaaatttttgttcccattcttccttttctgtctacttttatgttaaacaaatatttttcagtattccattttatttcctttattatctttttagcagtacctctttgtataattttccattccaacttttattttaggttcaggtagtacatgggtaaattatgtgtcatgggatttggtgtacagattattttgtcacccagataataagcataataaaattttcaatcttcacccccctcccacccttttcaagcaggccctggtgtctattgttgccttctttgtgtccatgtgtactcaatgtttagctccactcataagagagaacatgcagtatctggttttctattcttgcattaattcacttaggataatggccttctgctccatccatgttgcttcaaaggacatgattttattcttttttatggctgtgtagtattccatggtgtatatgtactacattttctttattcagtccaccaatgatggtacctaggttgattccatgtctttgttattgtgaatagggctgcaatgaacataggcatgcatgtggctttatgatagaatgatatatattcctttgggcatatacgcagtaatgggattgctgagttgagtgctagttctgttttaagttttttgagaaatctcccaacggcttcccacagtgtctgaactaatttactttcccaccagcagtgtataagtgttccctttctctgcaacctcaccagtatctgttatttttgactttcagtaatagccgttctgaccagtgtgagatggtagtattttaagctcatgatatagtgatatagtcctatcttttggactattgttttcatatattgcacataatttgtaagccagcaatacaatgttgtcatttttgtttgaagtcacaaaactatgaaaacaatcttaaagaaatgaaaagaaggaaaaaaatttacattaaccatacctttcccattttccatactctgtggttctagcttatatatattgccctcctgcttgaaaaatttcctttaacattttttttttggtagtgcagagctgctggtgacaaattttctcaacttccctttatctgaaaatgtctttaatctactttcattattgaaggatattttccacatagttacagaggtgtgtgttttcttctttgtttagcactttaaagatgtggcaccattattttctggatttcattcatccttatgacaacatagccattatttgtttctttgttctatatatatatatctttaattcactagatgatttcaaaaatttttttatatctgccttttgacacttataccatgtatgataaaactttggcccgtagaccaaatctgactcatggcctatatttgtatgatctgtaagcaaaggatgtttttacatttgtaaaggtttgttaaaaggagaagtagaagaaggggagaatgaagagaactaggaggggggggaagaagaggaggaagaatgaagagagtctttatatggcttattttactatctggccctttacagaaaagttttccaacctcagagttaaataaactatgatgtgtctatgtttggctttcaagcttaccttgcttgattcacaaagcttctaggaactataaattgagattttattccacatttaggaaattttaggctattttttttatttttacttattttttttaggcttttgtttaaaacctgttttttgaccagtgtttttccttctctttctaggactccagctgcatgtgtgctagggcgttcattgtatctgaggcagtgctaagtaattttttttctttctccgttctttagattggatcatttccattcatctgtcattatactttggtctacatataatgtatctttaatttactagctgattttaaaatattctcattaggccgggcacagtggttcaccccaggaatcccagtactttggaaggccgaagcaggcaagtcgcttgcggtcaggagtttaagaccaacctggccaacatggtgaaaccctgtctctattaaaaatacaaaatttagccaggcatggtggcaggcacctgtaatatcacctactcaggagactgaggcaggagaatagcttgaacccaggaagtgaggttgcagtgggtcaagcttgcaccagtgcacttcagcctgggcaagagagcgagaccctatctcaaaaataaatacaaataaataaataaataaattctcattatatttacttttaacaatagtatcatgtttgagaaaactttggcctgtagaccaaatcctggcctatggccagatgactacaaaagtagtcattaggttgactactcttcctcctatcatctctacctgatgttaagcatatccagtgaattattaaattgaggtattttacttttcagctttctggagttcttatgttccttacagcttccatttctctgaaatactccataccttcactcattataaacattgtttcctttatattctcggacatatttacagaacttacgttgacttccttgtatgctaatttcaatatctgggtcacctcaggatctgcttttatcaacttctttttttaataaggtcaacattttcctgtttctttcctgtatatctaatacagtagtcctcctttattcacagaggatatgttccaggaaccccagttgatacctgaaatcacagatagtaccaaacctatatatactatgttttttctatctgatacctgtgatgggactaagtgactaacaggagggtagtgtctatacagcatagatatgctggacaaggggatgattcatatccctggtgcgacagagcaagatggcccgagatttcaccacactattcaaaatgacatgcaaattaaaacttttcaattatttatttctggagttttccatttaatattttcgaactgtggttaaccatgataactgaaacctcagacagcaaaactacagatgaggtgaggactactgtaatttatcatctctacaggacatttcggagaatacaatgcagacactggtttctgttatgttcctctgaagagtttgaattggttctaattagtaataaacttgctgagtgatcaccatgaagtcatgaaagtttactttcatactttgttaggacagattagtggaaaactccaggtattcatcaaacatttctaatgtagttaacttaaagtctgaattctctttactttatggttggtagcacctgaaaactcttctcaccttgttcagtttccagcggttgctttccactgaatttcctagaatctcctgagtgaatatacaataaagggatcagttaaggctgggaagggtattgttatgcaaattttgtgaattgcagtttaacagctaaagaatttatctctatgatgttcataaaattattgtcttaaaatttgattttagatttttccacttaatgacatttaatttatatgtgtatataaaatatgccttacctattctgtgcacagtcccaacttcataatgggggaatgaatgaatgtatcttaaacaaatgatgattttgaaactgacctgtgaacttagttaattgagattcagtgaggtatataaataagtctaattttaacactctgatttatagtagcaaacaagttttcatttgtaaattaagcctagatatatatacatatgaactatattgaataggtgggcatttcttgggcaaataatttagttttttttttttttcctattacatctggaaaataaatcttgtatatacagtatatgaacacagtgtagttttgtttaagtaaactagctttgttgatatactatgtatacaagataaaaaggaataaaacatgaaaatatcaataagtattgaatctaagtaacaaatatataggaatttattattctattatctttacttttgtgtaagcatgtaaaagaactggattttagaaattataaacatgtattaaaggtaattcttatagttttctcaataatttgctgctctgtattattaaaactactttgtctataaaagtttgctgaagtgaaaaatattgctgtttctattacacttcgttaaattcattttaatatttttgttaggtatctccaaattatccaaggccatgccagccatgtcattgcgatccaattggttccttaaatgaagtctgtgtcaaggatgagaaacatgctcgacgaggtgagagctgcagcagaatgtcactgctctgataaaaggacaactaaaagccaaatatgattattttcagaagaatattttgcagtaaatgttattcatgtaataaatttattctttaatctatcagtgtattagcgttccctccaggaagtagtttttaaactcatctcaataattactttcatgtttaattataatgttttcatagcaagaagagttgaattatgtattttgagatacacacacacacatacacagagataaagaaagagagagagtcaatcacaaatctgtggtatatgtaattttttcatatcgtgttatttattagattgtttgtagcttctatgagttctagcatgaaatgccagcgttcactgaggaatgtgtgtgctgtagtgggaaaagcaaatagaagaactcacacactgagatgtaggcaataatatagaaagcaagaagtgttcataaaggactaagaaggtagtagtcatgaattaatgaacagaaagaggctgacactaatttaagctaaagccttcctttgaggaatgaaattcatgaactccaaacattaagaaatcaaatgccaacataactccttgatataaaagcgtttgggagctacttccagggcagttgctcgccaagtttaagtaggaaattcatagaatgcactgggacgcttcttctctagaaagactaaaattaatcaaggctacaatgtagtgtttttttccctaatgactttagcgttaaaagaccagcaatgtttcttaggtacaattcttgttacctgctttctttataaaactgtaggattatcaatctgagcattacatgtagactaaattttgaaatattaaaaaacggatacgttttgatagtcgaatgatgaattactgagctcacttttcgttttaagccttttctctttgtgtttacaagtaaatcacaatgttgttttcattaatatcatttaactcttccctacccctttttgagtaatgagtatatgatcacagaataaaaatggaaaagtagaaaaataaatatacaattcagtggtaattcaggagagataccactattaacattttcatatatttctgtcataatgcatacaaaaatttctgatattgctcctcttaactttatgtgatgagtttccccaaaaatctatgaaaactttctctgaagtctggcttcagcacctaaataacacattattatatggtcgtgccataattatttaccctctcaactttatatggacattaagattgtttcaaatttttgtttattttaaccaatcctttaataatacttattccatataattacttttcaattattgtaaaaacaatacatagtaaaataaattcttaatagtaaagaaataaaataataagtgtcctcttcaacctatttatcccagtcttacttccaaatttaaaaatattgagccttttttccgattcagtttttattttttttaattatactttaagttttagggtacatgtgcacaatgtgcaggttagttacatatgtatacatgtgccatgctggtgcactgcacccactaactcgtcatctagcattaggtatatctcccaatgctatccctcccccctccccccaccccacaacagtccccagagtgtgatattccccttcctgtgtccatgtgatagcattgttcaattcccacctatgagtgagaatatgtggtgtttggttttttgttcttgcaatcgtttactgagaatgatgttttccaatttcatccatgtccctacaaaggacatgaactcatcattttttatggctgcatagtattccatggtgtataagtgccacattttcttaatccagtctatcattgttggacatttgggttggttccaagtctttgctattgtggataatgccgcaataaacatacgtgtgcatgtgtcttcatagcagcatgatttacagtcctttgggtatatacccagtaatgggatggctgggtcaaagggtatttccagttctagatccctgaggaatggccacactgacttccacaatggttgaactagtttacagtcccaccaacagtgtgtaaaagtgttcctatttctccacatcctctccagcacctgttgtttcctgactttttaatgattgccattctaactggtgtgagatggtatctcattgtggttttgatttgcatttctctgatggccagtgatgatgagcattttttcatgtgttttttggctgcataaatgtcttcttttgagaagtgtctgttcatgtccttcgcccacttgttgatggggttgtttgtttttttcttgtaaatttgtttgagttcattgtagattctggatattagccctttgtcagatgagtaggttgcaaaaattttctcccattttgtaggttgcctgttcactctgatggtagtttcttttgctgtgcagaagctctttagtttaattagatcccatttgtcaattttgtcttttgttgccattgcttttggtgttttagacatgaagtccttgcccatgcctatgtcctgaatggtactgcctaggttttcttctagggtttttatggttttaggtctaacgtttaagtctttaatccatcttgaattgatttttgtataaggtgtaaggaagggatccagtttcagctttctacatatggctagccagttctcccagcaccatttattaaacagggaatcctttccccattgcttgtttttctcaggtttgtcaaagatcaggtagttgtacatatgcggcgttatttctgagggctctgttctgttccattgatctatatctctgttttggtaccagtaccatgctgttttggttactgtagacttgtagtatagtttgaagtcaggtagtgtgatgcctccagctttgttcttttggcttaggattgacttggcgatgcgggctcttttttggttccatatgaactttaaagtagttttttccaattctgtgaagaaaggcattggtagcttgatggggatggcattgaatctgtaaattaccttgggcagtatggccattttcacgatattgattcttcctacccatgagcatggaatgttcttccatttgtttgtatcctcttttatttccttgagcagtggtttgtagttctccttgaagaggtccttcacatcccttgtaagttggattcctaggtattttattctctttgaagcaattgtgaatgggagttcactcatgatttggctctctgtttgttgttgttgtataagaatgcttgtgacttttgtacattgattttgtatcctgagactttgctgaagttgcttatcagcttaaggagattttggactgagacaatggggttttctagatatacaatcatgtcgtctgcaaacggggacaatttgacttcctcttttcctaattgaataccctttatttccttctcctgcctaattgccctggccagaacttccaacactatgttgaataggagcggtgagagagggcatccctgtcttgtgccagttttcaaagggaatgcttccagtttttgcccattctgtatgatactggctgtgggtttgtcatagatagctcttaatattttgaattacgtcccatcaatacctaatttattgagagtttttagcatgaagggttgttgaattttgtcaaaggctttttctgcatctattgagataatcatgtggtttttgtctttggctctgtttatatgctggattacatttattgatttgtgtatattgaaccagccttgcatcccagggatgaagcctacttgatcatggtggataagctttttgatgtgctgctggattcgttttgccagtattttactgaggatttttgcatcaatgttcatcaaggatattggtctaaaattctcttttttggttgtgtctctgcctggctttggtatcagaatgatgctggcctcataaaatgagttagggaggattccctctttttctattgattggaatagtttcagaaggaatggtaccagttcctccttgtacctctggtagaattcggctgtgaatccatctggtcctggactctttttggttggtaagctattgattattgccacaatttcagatcctgttattggtctattcagagattcaacttcttcctggtttagtcttgggagagtgtatgtgtcgaggaatttatccatttcttctagattttctagtttatttgcatagaggtgtttgtagtattctctgattttagtttgtatttctgtgggatccgtggtgatatcccctttatcattttttattgcatctattagattcttctctctttttttctttattagtcttgctagcggtctatcaattttgttgaccctttcaaaaaaccagctcctggattcattaattttttgaagggttttttgtgtctctatttccttcagttctgctctgattttagttatttcttgccttctgctagcttttgaatgtgtttgctcctgcttttctagttcttttaattgtgatgttagggtgtcaattttggatctttcctgctttctcttgtgggcatttagtgctataaatttccctctacacactgctttgaatgcgtcccagagattctggtatgttgtgtctttgttctcatgggtttcaaagaacatctttatttctgccttcatttcgttatgtacccagtagtcattcaggagcaggttgttcagtttccatgtagttgagcagttttgagtgagattcttaatcctgagttctagtttgattgcactgtggtctgagagatagtttgttataatttctgttcttttacatttgctgaggagagctttacttccaagtatgtggtcaattttggaataggtgtggtgtggtgctgaaaaaaatgtatattctgttgatttggggtggagagttctgtagatgtttattaggtccgcttggtgcagagctgtgttcaattcctgggtatccttgttgacttcttgttgactttctgtctcgttgatctgtctaatgttgacagtggggtgttaaagtctcccattattaatgtgtgggagtctaagtctctttgtaggtcactcaggacttgctttatgaatctgggtgctcctgtattgggtgcatatatatttaggatagttagctcttcttgttgaattgatccctttaccattatgtaatggccttctttgtctcttttgatgtttgttggtttaaagtctgttttatcagagactaggattgcaacccctgcctttttttgttttccatttgcttggtagatcttcctccatccttttattttgagcctatgtgtgtctctgcacatgagatgggtttcctgaatacggaacactgatgggtcttgactctttatccaatttgccagtctgtgtcttttaattggagcatttagtccatttacatttaaagttaatattgttatgtgtgaatttgatcctgtcatgatgatgttagctggttattttgctcgttagttgatgcagtttcttcctagcatcgatggtctttacaatttggcatgcttttgcagtggctggtactggttgttcctttccatgtttagtgcttccttcaggagctcttttagggcaggactggtggtgacaaaatctctcagcatttgcttgtctgtaaagtattttatttctccttcgcttatgaagcttagtttggctggatatgaaattctgggttgaaaattcttttctttaagaatgttgaatattggcccccactctcttccggcttgtagagtttctgccgagcgatctgctgttagtctgatgggcttccctttgagggtaacccgacctttctctctggctgcccttaacattttttccttcatttcagctttggtgaatctgacaattatgtgtcttggagttgctcttctcgaggagtatctttgtggcgttctctgtatttcctgaatctgaacgttggcctgccttgctagattggggaagttctcctggataatatcctgcagagtgttttccaacttggttccattctccccatcactttcaggtacaccaatcagacgtagatttggtcttttcacatagtcccatatttcttggaggctttgctcatttctttttattcttttttctctaaacttcccttctcacttcatttcattcatttcatcttccattgctgataccctttcttccagttgatcgcatcggctcctgaggcttctgcattcttcacgtagttctcgagccttggttttcagctccatcagctcctttaagcacttctctgtattggttattctagttatacattcttctacatttttttcaaagttttcaacttctttgcctttggtttgaatgtcctcccgtagctcagagtaatttgatcgtctgaagccttcttctctcagctcgtcaaagtcgttctccatccagctttgttccgttgctggtgaggaactgcgttcctttggaggaggagaggcactctgctttttagagtttccagtttttctgttctgttttttccccatctttgtggttttatctacttttggtctttgatgatggtgatgtacagatgggtttttcgtgtggatgtcctttctgtttgttagttttccttctaacagacaggaacctcagctgcaggtctgttgcaataccctgccgtgtgaggtgtcagtgtgcccctgctggggggtgcctcccagttacgctgctcaggggtcaggggtcagggacccacttgaggaggcagtctgcccgttcttagatctccagctgcgtgctgggagaaccactgctctcttcaaagctgtcagagggacatttaagtctgcagaggttactgctgtctttttgtttgtctgtgccctgcccccagaggtggagcctacagaggcaggcaggcctccttgagctgtggtgggctccacccagttggagcttcccagctgctttgtttacctaatcaagcctgggcaatggcggcgcccctcccccagcctcgctgctgccttgcagtttgatctcagactgctgtgctagcaatcagcgagactccatgggcgtaggaccctccaagccaggtgcaggatataatctcatggttcaccgttttttaagcccgtcggaaaagcgcagtattccggtgggagtgacccgattttccaggtgccgtccgtcacccctttctgtgactcggaaagggaactccctgaccccttgcgcttcccaagtgaggcaatgcctcgccctgcttcggctcgcgcagggtgcgcgcacccactgacctgcgcccactgtctggcattccctagtgagatgaacccggtacctcagatggaaatgcagaaatcaccgtcttctgcgtcgctcacgctgggagctgtagaccggagctgttcctattgggccatgttggctcctctccccgattcagttttttagtgagttacctttagtatctaaataatattcttatcagtacttttatcaccattacatattgcctattgactctccgtcttgaaaggtgaagaaatgtatcattcacaacacctccctccttcattccaccatccatacatttttattatgtgtttcttctacgatatctttatcatgttcaagagagcttacatgtctatttcatcaatgactacatttagactttctcttgaggtcctactatataagatgtgataaagactatcatccctacattcttcaccacttgtcagtgtctgtcaattacatatctttgaaatcttttcaaagattttcacagttacattcagctctggaccaataattaatgcttataattcaaaaatagaaatataataatcaagattgtaatactgtaattagatacatattatttgatacaggctcgaattgcaaaattggacacatatttgtaggtcatttttatcttcatgcttgctctgataacttatttaggaaagagtgtaagatgtggtctcatggtttgcacttcttcatcagattacataaccagatagtagaaaaggatattttagtgtattactggcattcatttgattacgagggaaatacgatgtatttcttctctgatttttcttttagttttcttcattttcttttagtagaaggaagttttctcccttgtagatttgtaagagcactttaaatattaaaaacagtgatagtatatcattttttaataatcagttttcagatttgctttgtgtctcactactgttgataatttctagtgcacaaacttcaaaaattttatgtaatcagctgtcaaagttcaggtaaaattctttacttataataatgataccaacccatgattattatatattttgatttttttgtgtatttcttacatgctttataatcctagaactctcatctatcccaagattagaaaaatgtatttgttttcttcatttgtatgatttcattttataatacttaattttttattccatctagaatttattttgttatatttcataaggaaattttcaaactacattttgttttccaatactcttttttactcatctacatttaatattactttcagctctttagacatattaaatatatttattttattttcggaatctgttagaagcactctgttattgagtctgagtctgcatttttatttctcttctaactcttattcatatggacttcattttcttatgtttcgtaagtgtgtgtgtgtgtgtgtgtgtatgtgtgtgttttgtggatgtatgcgtgcatatgtatttcttagtttattctttcagaagccttgaatttacatgaagttatgtgataatgacctaccttatataggacctagaattttttgttgttcttctgtaaaaccatgctccctgaactgtagtctagtcatcagaatttgccagtcaactccaggaaagacattgttttaaagaatgacgtaagctttctagaagtcaattttgtagtttctcatctccaaggggtttctttatttcttgccagcgcaacgattctgttatctgccatctgtctttcgatctatctacctacctacctacctacctacctatctatttttctacgtttaattttattctgtatcttcaactgttctgaacaggaggggttttttggacatctagtctacaatacttccagaaataaaagttaagatagacattgtttaatacatgaagtacttctacatttagcctcaatttctggaaattttaacatcagaaataatgttaaactatttaatgcctttgcaaactttattaaaattatcagatttatttcccatttggtctattgggtaatctattagaaacgaacttactaatatcaaacaatatttattttaccagagtatgttctacttggacatcatagaggatccttttaatgtactttaggattcagtttggtgttttgctcatctggattcataagttaattgcctgtgactcagacacccaccagttgtgctcctttggcaaatcacttaatttctccatgccttagttacctcatctgtgaaacaggaaaaataatagtgtctatctcatatagatgttttgagtactaactgaattaacccctgtgttttgtgtaatgctaagtataatgactaccataagataagtgctatttgagtcttagaagttttgtttatttggggttatcatttgcatttgggtatcaagttagaatttgcttcataaattgaattacatagctctccatttttatatgaccataagagtttcaagttttgaaaacagtctgtaaaaattaactagcattacagaaaaccaaacaccgcatgttcttactcgtaagtgggagttgaacaatgagaacacatgaacacagacaggggaacatcacatgccagggcctgtcagtgggtgggggtctaggggaggaacagcattaggagaaatacctaatgtagatgacaggtcgatggctgcagcaaaccaccatggcacgtgcatacctatgtgacaaacctggatgttctgcacatgtattccagaacttaaagtataataataaaaaaaattaactatcattaaaacatgtttgtggtagttctttgataatttgtcctcttttgatacccttgattagctttgtttaccgtttccttttgcttgcttttctttttttcaaatctctttacttcctgtggtgtttatattttctcttttttatacttaaatgaattaaattttaatttatctatttttaaaataatggactatttaagcctataagtttacttttgggtacagtttttccatactcaacaaaaattaagttccttttttactgctattatattctacctagatagctatttatttttaattgaagtcttgattttctctttaacccaagagttattaaagagaaatatttaggcattaatttttagaacagttgaattttgcataaaattctctcatcatgtttgatattcagaactaatttaatcttaatttttgtggcatttgatacacatctaaaagtagtaatttatgttaagaaaataagccttagataatttctgctttgataattgagtattttttatagtcaatcacaaactatggtaaatatttagttatataccacataatatgtaatttgatattattagattattcaaattttctgttttttcttacttcatctgtaaatacttaagatgagtaagttagcatcattttcagccattgacttttaaagtttttatttccaatatattttgttgtccacatatttttgtactgataattagtgcttatttgaagcataaacataataatttaaatcatgtttttattatatttttatcaatgtaaaatgagagcttgccttactgaacctagtttatttgagttctactttggccctatttaatatttcacaacttttttttcttttccatacgctttcttgacacacattcattttcttttacttgtaatattttatttgcaatattcctgttcattttgtttatctcttgtgcacattacatgtttatgtttttaataagaacagtaagactgcttaactcattagtatgtatttagtatgcatttctgacactaattctgtcattctgctttttgctttctctccctaatgtttccttgcctttttttccctcctcctttcttctttctgatggactatatatattactgatttgcttttatctttctccagattttgaaggtctgttagttgtattcattcatcctgtattatttctattttttaatcaaagacatgaataaacattgtgttttgtatttctgtatgttaaaaaagtaaatttaaacttttcattcccctcatctattgcttcttatccccaaaatatcaattccaatgaacacctttattttctttagtaatactgccagtggcatgttcttagagtatcattgttaaactgttattttaagtaatatgtctttattcccaaggctactttgcacctgtaatagtctggtggagcaggcttgttccgtgagccactagttttgcatttgttactgcttattcttctcaatgtagcatcatcagcattagcgtttgtggaaatttctccttggtcattgttttctatagccatagtttggtagatgctttgagatttcatctttcttgtttacatttttaatatttctattgacacttagaagatgctatgttcacgtaatcatagaaagcttttaattaaaccctctactctttggttttaacttttctttattgatatatataaaaaatctatttttgtgtcaaaatagcattttaaaggttactgtcattaaaactttaacaactaaattatgtacttgttttagaaatgttgatatgtggctcatctttctttaggtttggcacctggatcctgtcattgcaaaactggttttggaggtgtgagctgtgatcggtgtgccaggggctacactggctacccggactgcaaagcctgtaactgcagtgggttagggagcaaaaatgaggatccttgttttggcccctgtatctgcaaggtacattgtttattccagtaatgtcccactgtcaagacagaaggttatttttcttggcttctctgttgatttccttggcattaagcaattttaatgacttctggaagtatccataatctattctacgtgtggtgacccaccaggttcactgtagcaggatgtttataaggcacttatctaaaagcctacaaatgcacggaggataaaccacgtttaaaggcttgttattttataacaaaaacactttcaccccattgcccaactagtgtgttaatttaaaaatatacggcactagaaatagcaaccctttaaaactaaagtgcattcaaatctacctttgcatctaattcagtaatgaattctgtcaagggttttattctgaatttttaaataatcttctaaagtttgaacccagataagccttaaaatactcattatattcaaatttttctgttcaattataaaaaagtacaaagccctaatggaattaattaaaggctcaatattttcttccaagattacttttagaaatgcaactttatttgttgtacatgctcacctaataacaaatcatgttaacaccaagggatgcattacctctgcagcttataaacattatgaagcatacaggcatgcacaagtgaaaaatgaaaagactgatttactttacctatagtaatgagttctataacattctgaccagacggtgtataactacattagctgagagaatgaaccattctttgaaaaagttagcataccatacttatgtaaaaatgaaagttactacttttttctttattttcaattaaagagggacccttattaaaaatatttttattaacctgttagtcttatcttggcagctataaaatattatatagttatatttggtacatgtgagcatatgtgtacatatacaaccattaagccataatataagtagtaaatattagttttaatgaagtgtttatgaattgggacaagaatgtctggaaatatcaagctaaatataataataatagttacataataggtatatgttacatcaggggcaatttaggttcctattttgaactactgaaataataaaactcctgtggacacagtaagcagaaaagtccacaagcccatagtaaaaagttgccatgtcctggaatgtagtaaattttctaatctattacatttcattccaatattatctgaaatgaaaaattgcttgagttgaccaagattgtgtagcagtgtgtgagtgattgcttgcttaaggacacctcccctctccatcttgtatgtctctgtgggcaatcctgcaggctcttagtgcatcttctctagtatttatcaaaacatgtcttgtgtgtgctttattctcttttcaaaactccacagaaatctctaacctttaccacttgctcaaataaaggacagtcaaaactaagcttaaaatggaaaagaaacctcctgagtttctagaatatataaaatcaaacagggaagaaaaacaagtgcttttctacacctaccactcatacagtggtgatgtctggtatttgcaaggaaagggagtaataagcgagttaattttctttggtaaatatagcgagaaaggctggagcaagagagctgtagtgattagcagggctccaagggaaagccccttgagctacttactgcctgctctcagccgaactcaatattgtactgagaattattataatcctaataagaaagatgcctcctgtgtagacacttgaagctctacacagacaattaaaatgcaacaataaacagcaattaagaaatcataaaagagaatgaaaattaagtaaatagcattattaaaataaatgcctttctaccatgtgatatcttaaatagaaaactgtaagttcttataaactaaattgtttcaggattaaaaacttgcagaaagcaagtttcataaaacatctacataattataaaaatcacaaattatatgcatataacatgaattacatcacagaattatatatcacaataatatcacaatatgccacgatgagttatatcaaaatgtgcatgcaatgtactacaattaagtgcctacagtctcttgtttaaaaaataattaataacctagcatttcaacaaaatatgcatacaatttaaatactgaaaagacacttagtgtagtgtatttaaatactgaaaagacacttagtgtagtgtatttaaatactgaaaagacacttaatgtaacagttcatactgtttcacaaaaacatgatttgacatagatatgtcaactgattgtaaaaacagcatggatcaaaatgctgcttaagaagcaaaattttattgaaagactaaaatattggagatataaattcaaattaaatgacaggtttttagcagaaggggaagaatatatacataagtgtccatatatttctatccaagttagtaactttaaataagtatttatctgtaaatagaaataatataaatcacatatgaaataatgtgtatataagtattcatctccaaaatgcttattaaccttaaacatttgtacctttattctcttatactataacatatgagtttttaaatagtttttttttatcagaaagaaatatcttactgaagtgtgaagacatttttaaaaagagcttcattaggaagtcttgggcctaattgttttttgttttataaattttaaatgactgctctgtgatgagcccatttcagttgaggctgtattatttttcctgtgggtaaaatgacatactgagctgatatggacatcacttctcccacttttgctattttaaaaatacagatatgctgcataaacatagcaaatagatttataaacatttagattcaagaaagaaagggaaattcctagatgtcagaccaaagagggaaatctaagttaagcataagcaaaagctcaagctaaactgagcaactggggtcatggggtggagggtgggagacaagtcttagttctaagatcagggctaaagtttggagttttaatgccctcactaggacttgacactaggatttggacccacagacggaaattgcagctgaactccctgaagcagggacactagaaatgctttcagacagtgaaatgggggctagaaaattcttcctgcaagcctacagaggcagctagaaaatttttctcttaggggctctgggtgggtaaaagttactaccttgtgtaggaccgaatccccaaacctgtgtgccacgtgggaatgggatacatttttattctccccttatgtgctggcattcttcaacaagtcaaggaaatgatattcccataggaaaaataatacagcctcaactgaaaatgatctcatcacaaagcaagtaaagtacacaaaaggaaaataactacaaaaggaaaccagtagccacaaaaatgaggatatttgtacacaaagaactagaaagggtagtctgaaataaatttgtattcataaaaatctgtgatcatattcttatcacataaatcataaaaatatgtttaaaatgtacaattataaaagcatgattagaagattgaagaataaacaaagaaggaatagaaaaaagtaatataaaatagacgctatattaaaattcaaaagtaaccaggtttggaaaagaaacatgtataatttacttccagaaatgaaaaaaatatgcagtcattgaaattaaaaattcaatgattgggttaaacaagagatgagaaactgcaggatagaaaatcagaaatataggcctgaaaaaattacctataaattgacatagggaagtaaataaatatgatgctaactgactcacagaattgtaaaattgaacagaagtttagcagaagttgccaaagaagagattagaagaagttgagggaaacaatattcaaaaaaataatgaaggagagaagaatgatcatgagttaaaaactattataaatcctcagtttgaggatgataaaaaataagtctacccctagtagaaaacctgtcaaccagcaagacaaagagaaaaatattaaaactgggggcaaatatctttattgtgagtgtttaccactcacagtccaacttcatggaaagaatattaaataatatatgtcctttagtaagaatattgaacccataagacagtttcactagattatagtccagaagaatcaatctataaaaagcagtagtatttctatatgtcagtgacaagcaaataaaaaatgtaataaaaatacttagaatagcaagaaaaacttcatgatacctaaaaataagtgtttgtaaaattgagataatttttaaaggttattgaagaacataaaattctaaatgaggagacagctgaggatcaccaagtaccagtgaaaatctgtgaaatttgaaatgtttaccatttctattaatagagttaattagtaccacaatttaggagggcaatatggtattatctagtatctttgaaggtgataaaaccctgtcaaccagcaattccacatccaaacatttaccccaaaaaactcttacaatgtatagagaaaaaccatctaaaatgtgctcaacgtaaatgtacttactatgatgaaaatgagaaaaataaatagcaaaaataaattgtagtgtttcctttaatctgataaaagaaacagttaaagtggttgaaatagatcttcatgtataaaccatgataaatttcagaaacttcaggtggaaaaaacaatgtcattatggtattatttatatcaagttgtaaaacataaaacaatgctacattgtttgtgaatacatatattataattaaaaaatttaaatacacttgtagggtaagtactaatttcagaatagtagttacctctagagaaacaggaaagggaataaaacagaagtgaaatgagattcatttgtatctaagtatcattgctttaaaaatatatctgaggcaaatataaaatataaatattttgttacctctaggttgcatgggtaatgcatgttatatgtgctttttgaatgtcttaatataatttctaatttaaaatttctttaattgaatgtaaaaaagaattccagatttaaaaagaggagaatgaaatttttaatacaatgtcaactacattattacattttacacataagattttctcttcaacaatgatgttaatgaatattatcatcattatatttcaaaatgtgaaagcagtgctagctcaagacactcaaatgtttataatatttttgcattgttaaaaatgttgaaatttctctcacgaattacaagaggcaagtcaatctcagatatatgacaagtcattgactataagtgctgtctgactctcagtatttgtttatttcaagtaccatatgctagaaattggctcttttgcagtttggtgtcatattatttatgcaaaatcagttggtatgtagaatctcacacataatataaattgacattgatctagttaggaacatgtgcttttatttttatcaaagtcttataatagaaagataaatagtgaagtagaagactagaaatcaaagtctgtattttcatcttgttttgctttgtttttattgcattttccattaagtccttacaggcccacgagactatgtgatctggccttggcttacctctccagaatgttcttgagtttcagtcactgtttttcagctttgcttaaatttcttgagtctcttagttgtttgtagcatctggaattttataagttctattcagatttcttgggatacctcatttctagccctattcctttgcttagccaggcatttttaatggctcggcttaacttcaactttctcaggaaagctgcccctgcatcctcaagtcatatcattctcatggcataatcacttttcaaacctttttcttttcttttatgatctcataatgagtaattctgttttatgtctatcttacctctggtgatgatatggaccctatatattttctttaccattgcacaataagaagataacacaatgactcatacaaaagaaagaaggaaggaagagaactaaaatctcgtgaagctttgacagtcatttagcctttccgattctgttttataatctatgaaatggtgttattgaatcttttctgcctctcagtaggtataattatcacactgaagccctgtacaagtataaagtataaccataaatacctactggattactttttgttgttgtttatattgcttttcccaagtagagataagtttctgttctttttccctgaaaggatttttatggtgtgttaacatttttattggttttggatttccctcttctttttcatttgtgtacaggaatggtcacttcattaacttgtagacttgattcctgggcatttttacaaatggacttcaatgtgtacatttaatcctgaatctaaattacagatgtagaatttttggcataaaaggttcatgcatgaatgaatttatctcttgcaacccctacagttcaaataatattatgttagtcaattttttacatggacagactctctccttgaccaaattttggaaagtcttctctgagtcctctttttgatgaggcctcatcgttgacccttgtcctcaaacctagcttggttaaagcaagaattctgctaagtcagtgtgttaagaacaccttacccttgatatctgatccctctggcctgtcttcaacaagaatcctgttaatttggtttagcaagaatcccccctacctacccctgatgtctcctcttaatgattgttcgcccctgatccttgctcgtggctataaatctctacccttttccttggcactgaatccctacttgttcatgttgtattgggaatggaggctagttctttactaaggttgctttttctctattgccatagtttctcactgaagcctattttcatcgttttaactactgtccagctctggttctctttcacaatattaaaagctgaacttgtgaaaattgagaactaatgtttatgtatttccttctccctccctaacccatcaactattatctagccttggaaaagtgtgttttaggagtaagtcctcaacaaatactgctaattaactaattatccttcttttgttaacttattttaatactaggatgcattagtctaaaggtcataacagaagaaaacctgtaattaactacaaactaccaaaaaaccaagcatgactgagaaattcctgaagcaattatcacacaaaaaaaataacttaaatgtcactggagctattcctggtaactttgtcagtagtactcccagctgactaacaatcacagttcaatatgtactgctgaagttgtacctagtttataaagcagtagcttctatgagaaagaatacaagaaaactacggtgactatttctccagagaaaaactgtactgaggaaactatagcaaaaagaaaattgatgtcaacacaatagtatctcacttcaagaaatcaaaaacaaaagaacttagtaaaatttttctaattcaactttgtttttaaagggaaaagagaactaaagaaaaaaaagacagccatgattttttgtagcgtaggccacaacattgagctatgttcaaaggaaatagatgtctaaagcacacatttcttcctaaaagaatgaaaattggttctttgggaacaaaaatatcatattgattttatgtaaaggcaaacattcacatggtgcatctgtacataaaatatatctggagtattaaagtttcatggtggggatgattatgaaaaaatgactatataggctccatagggacatgatgataaaaaatagattaagtagattgaaaacactagtctaaagtgaagtgatgtgttttaatatcataatatgtgagaatataaaagtatttacgtatggattatttacaatggaaaaatgactattatagttcatatttcattttattaatgtaattgattagaataatggtatagaaatagcaaaagcagaatatttggttttaagaaaatatggtgatataagggaatgaatattaatttctagagtggaagtctgtagcgttctagaaattaccgtgttttataggctgtagtgtgaaaattatcattaaatacgcaaattgaaaagaatcactaatggactctatacaaataaagtgttaaaatgaatttattggatcaataggagcttcccagtaggaatgctgagaggtttaatagattagactccattttgtttagattaacagttaaaacaactttaaaaatttttattaaattatgtttttgcaaccattgaagtatagataaacaaaaaaagaaaaaaattaattatatgttaataactttttaaaattcatcagtacaaataaattatagaatcataaaggaaaatagaaatctcatgatgattaaaataacattcagtctggaaggtacaaaacttttaccttcatcattcgatatttaggttcaattatattcccatctatgctttagggactgaattggatggtggtaataaggtataatatatggtctgtgccaatcttatggatggcaagaaaagaacaaaattatggttttactgtgtgtatttatttatttatttatttcaataaatgccctttagtagatatttttacatctggagacattctcacatctggaagaggacactgcaacagtagcctattttaatcttgtcatgaaaatcttgggatacatcttttttgctcaactccctggtttttctgtcttatttttttcttcggggcatagtggacactggtgatgaatttggtgtcagatccagaacatgttgtctgtacccctcttacagcagtgattttcttccaccttgtaatataattatctgaagtccgcctcatcagaaagtacatagggaaactatcgtgactctatttctccaagtagaaactgtgctaagggaactaaagcaaaaaagaaaattcctacttcctttgctataatcctcttgagggcatttttatattccctgtgatatctcatatgtcttgtatatagtagttcagctatgagttgatgaacgaataatataaagaataaagcaacgataagaaataatgagcagagcatttattaataatttgatattgataacagaggaagttaaattattcaaagagctcaaccataaagcagatggcttcactttcaagctgggaatcaaaaaactttaagtgctagaatattcatgtcaagaggatcttccaagaataagccaggaatgcaattaggggctgactcatggatgacaatggtcgatgagtcacaaagaaattttgaaaaaacaatgatgtccctggggacacatagaaagaattggaactagactgtcaagatcatatatattaacaagctaatagaaggcgggaaattttggtctctatgaaaatgtgcacaaaagtcccagaacactatacttctgtgtttgaactgtgctactctaaattatataaaatatactctataatgtagtaaagaaagatttctttatgccaatgtctcacattttatagacattttacctgctactgtcaacttaagttactcaagtatagttctgttgatttatctcctaatgaacaaccgctaatgacttaccaattcctaaggaatatctcttaggatggactttctgagggcagggccctggatctcaagtaccaagtgaagttctagcatacaggaagtattaaatacaggctgagtatcccttatccaaaatgcttgagaccagaaatgtttccgatttggtattttttcggattttggaatatttgcagaatacatactggctgatcattcctaatcagaaaatccaaaatctgaaatgctctagtgaacattccatttgagcatcatataggtgcccccaaagtttcaaattttgaaacatttaagattttggattttctgattagggatgctcaacctgcacatttgtcttgaaaaataaataatgaataaacctccaacttttaaaatgaattcttgttcccaatgtctttgctaacatcggtctctcattctatctatgtccacaagttgaatttttaaaccatgcttcaaggatcaggtcaaactccactcctgtcataaagcttccttaagccttatagcaaaaattagtgcttcctctatgttcccgtaattatttatttctcagatgcacttaccatattccaccttgcattatagttgattgtgagtatatctttttacccaactagatattggcctttaaagacagacttatttaaagacagaccttgacttatttatcttcatagtgcctagaattcctaccctaatgtgttgcttcaggttattaaataaaattgaatgtgaaattatttaatcatattttttcaaggtcattttactaggctaaaatggagctaaggaaaatgtagctaatgtctgcaaatttctaattgttgaacttagtctgaatctcagaatagtggcattataagctttcaaattagagtaaatgaaaagtagattagaccaagcgcataagaacacagtatacagaacagctgtactgtgtcctcaacgggataaactaaatcataattacagatatgtttcatctttcttgcctttatactcttttgaagatgctctcaacttcagtgctttggggatttatttgtcactgtaagtctgaaattagtttgattagttttgctgatatctatcatttcaaaatgtctgaaatctgccttaaaaagtaagctggcacaaatcttggggcagtgcttattaaggttcccacatagaagtggctgagtttgtaaatgagtcatagaaattcagtatcaaaaagttaatttaaaacaaattattctcttggatataaggaggactgctttgtttattcttaaatttttctccttacttcttcatgctatttttctcttctcttctgattttccttatatgttctcagattttatcatccctatcttctgctcaatctgggtttgtttaaagtgtttttattcagctcgtactatgcgtatagcactttgctatgcatgaaaaacatgactgccaagagatttatttgaacttaataaattttatgaagctaatgctcagtgctgtaccaggaaccatgttattttctcagactataaagttagtaagacagaatttctacctctgaatagattatggtagatagctagagagaacaatctttgagcaatacttttttgtggttgtgatagggtaatgtatacagggccacgaaaactacatggagagagaagttagttgtccaagggaattttttaaaaagcctcagtattgataataagggaattcaaggaagaggggaaatgtagagaaaatgcgtatgtagggaatattacaaatctgtttcctggaaagcaggatgccttcctttagaattattagttaagattaaccactctttaaattgagagattatatccttccctgtttttcattatatggtcagctttcactggcctgagtccacattttaagctcaactatatacaaataatttttcagtatactgagagtaggattaatgaaaccagtctggagagcagtcacagaatgagaatagatctttcccatagtatcactatgtgactaactgattgtactgatgtgttacagaaaacactgtaaaaagttaaccagaggaaaactttgctttctactttatctgatctttaccccagtttctctacctgtcaaattcctatgcttgcctcaaatgtacatatttttaatctgaaatgtgaaaagtatttataactggtgtaatatcaatgttctattatacatccatgcattaatgtctttaattttaccatgaaattaaatgaagtacctcaataacagaacagtgaactttaaatgaagtagctcaataacagaacagtgaacctaactggccccattttagtcaatctaatgcattcctgcacaggtatttatcatgacatttactctacactcaacctacatgaagatcaacatagtcacttttacgagagtagatttgcatccatccaataatctttctcaccagtgtaattagaaaggatacagcttaacacatagcttttgagcagatttttaaaaatatcattatacgttaaatatagttgagagggtaaaatgaagaatgtacagttaatattttccttatacagacatggacgcagctcataatgttgaaggatacctctgttgctgatacatctctttatttgcaggaaaatgttgaaggaggagactgtagtcgttgcaaatccggcttcttcaatttgcaagaggataattggaaaggctgcgatgagtgtttctgttcaggggtttcaaacagatgtcagagttcctactggacctatggcaaagtaagcaagcaccatttggttctgtttgctgccccagcagccttctttgttgctttcatcgttgttcttttgtatgaacagtttctgatagtgaacttctacataaagttacaggaagaagtaatggaattttcttcaaatgctgttgtgtatttttgctcaaagcctttgaggttgtatttgtaatattgtgtagactggaatttcttagaataggtagacatagtctttttagtgtccatgattactctatgaaacaataatgcaattaaggtttcaactccaagggtgcatgatttaagagagaaaacactacattgtgatatgaattatattttccattactagtatgttcgtatgcaagttgagaaaaactctgtatcatctgtatacataatacatattatccaccaacgctttagttactatttgatgttgcctaggctctttcattattaaaaggggacattaaatataggcaataccttcattctgagttggtttgaaaaattattacttaaactatttaatagcaactgaaattttctttctttaacgtaaatgtgtttacctttctaacttcactgcctacactacccactgccttttcaaatctgtgcaaagagcatgttgtctccctatacagaaaagtgtcagaggaaaatgggaccttctgggaatttcacacagcctgtgtggctggacttaagagtgcagaatggtaggaaatgggctggagagagaaagaagtctagacgggggaatgagaatctagaacttatagggttgaatatactaagaatttgagatattttacttggagtgtcattgaagaaatttaagctaaagactgacattatcagagttgtgttttataaagactactatttagataaactatttcctaaacacttcttcctttcaactttaatcagtgaactaatcctgaacagagctataaaatattttctctgcctgcagtgcttttaagtcaagcctcatattatgaaatattatctatacgttatcaactgtattgctttcagagcagacttcaaagaatcaaccacagatggacatctagtctaacttcctcttttgtttataaagtcccaccccaccctccagactgccccactgatagatcaaagtttcatagccagccaaggggcagagctggtactcaagctttgatcatcagatgctagagacacagaatcccattcaactgtcttacaatgcctcaagggtgacgttagaaagggaagaaatgcaaggaatatattacttgttgtccagaaagtcaacaggttgtacctggtttctatttctcatttaactaagggaattgcagtgattccacagctttgggataagcagagtcaaatagtctatgaagaaattttaaaaaatatttcagccacatagagtcacccttagcattctgcttcccatcacccacaacatgaagcagctcatgcatgtctagtaggttcctggtagctggtaccctaagccctcagtaatcagtgttttgtcctgactaggtaggatgctttaaattagaggtgtagctgtaggcctgaccttggctgaagcataaagatgtaaaaacaaatcattatgcattcccagattcctcctttaaggttccttccatttctgggccagggatctaggctgtaggtccccacagcacttctgaccctatctgaaggaatacatacagtattgccaggtgttgtcatagcaccaaggctggtgggttcaaatatccttaagcctcaaagtagaaattttaaaaagtgggaggggtggaaatactgaatgaaacaccacctttcaggtacttgcatagtttctttctttttccctctgcattacaaatacatacgcaatactttttcaggttgttttttccaaaagcaacaataaactactagtggagtaaaaaatacggaactgaaagtccaactgtttgattaagtgtatgttataaccattgtatgactttgagtgaatttctatttttaagaaagtggtatttggaaccacaattttttaaaaagcataggttcaatgaaaacagattattatagaataccttggaaactcctagaaacatcaaggaaaaaaaataaacaatggaagcctatgtgagtacatataatatgtctaatgatattcataatgctcaggtttttttctaaatgtttgtggtttggttttttttgtttttaatttccaaaagtggacacgaccaggaacatgaaagagaaaagcagctgatagatattttttaaaaattaatgatgactgtgtgttttctctaagatacaagatatgagtggctggtatctgactgaccttcctggccgcattcgagtggctccccagcaggacgacttggactcacctcagcagatcagcatcagtaacgcggaggcccggcaagccctgccgcacagctactactggagcgcgccggctccctatctgggaaacaaagtaagtccacgcttgcttcccgctattctgctttaactgactgatcgtgagaatgggttttagttggtaattcttttaaagaaagacaaaatcaaatacacactgaattggattgccagaaccagctaaatcacattgagttgggcgtttcttccatgttgcacaagaccttaaagagccacggcatccttaatatgcaactttgtatagctgatgttctatgtaaactttttgaatgggcaaataaattaatgaagccgctagtgtattttcgtaaagcaaattataggtattggaagaaactgtgttgtgtttatgtgaaaagagctgttttctggagttgtctgtggtgggatacttactaaagtttttctcatcggtttctatttcatttcaaaactgatactcaggagatttacttttccttctacctgatatgaatgttaattggaaaagaaatgtattacataactaattaaatgcttgccatgaggcttatgtaaacaacatatttgctggagctcaggcagaaactaccctaaaagtgccagattggaagcacgtttgttttaaagcccacacatatgtaaaaacatacacagataaacaaatgtagcagcctcagaaatacaggcttatttttttctgttgtggattacttctatctagatagatatcctggggtttagaattttattttatcttgcctaatactttgttggaaacaaaatttggtgacttatttataaacgtgaatacttgcttgttctgtgaaagttaataccttctcagctgatagttaaaatacctgatcacaccagaaggtgtgatgggaaaatcccttcctaaattaatgttgtttaagcctagtttacacctaacaaaatatagcattatttatgaagaaatcataattgattaagcaaataaaagtatgtttatagtcagtggttttcttgcatgacatgtgagtattgaaatagaaaaacttagtatctcatatgctactcagtgaatgggaactggtggtgttggctggttgaaacacttttaacttatggccagtttcttatatttaacagaactctgaatgctattacaaaaaatgtgtaaatgtctaaaagacattttcaatgaacatgtattttaagagacagagtatgttgcataaaattcaatagctgtaaaataaaaatcgaattaaacttttatttgcaaggccctttacagcaagaagtcattttatcctattctatttaggaaactctggtattcccaaaagaacaaaacagcacataagacttgaatttctactgcttaaaattgccaaaaaaatataaaaatatactgtcaatttaaaaaaaaaacaactgagagctccaagaagagccttaggtcaaaattggatgaatttcagaggccttatttcttatatgatggcaacacttaattaaagtagcttataatagaaatattctttaccagattttccatcctttcttctttggtcatatgcatttttttttctgttggctgacaatcaaactgacagaaggaaagcaagcaaatggaatattcggtagaatcagaacaaagaatttggacatcccattagtagttgttggttcccgaagataacttcccttatcctggctgaaatatttttcttataacccacagtgaagctcttcatattcccctaccgatcattttcacatcaaaacactgttcttgcctgtactgccgtttccattcagtgaacaaaataacattaacagggtgtgcaaattgtttgaatacggaggacatttttaatgtaacgtggaagcccttggtggtttactgtcaggcatctcagtatgaatgaaacaatttgccttaataactgaaccatgtaaatttttgatactacaataatactgcaagctctcagaaattaccacagtacatcttaactgtcatgtcacatcacgtaaattatagtcatgatgacatgcttagcttggttgatttaatatcttgctaaggaagtggaaaattgtagggccttgttggtaaattcaataaagccacttttctaaatagttgaggctaaattctttaccagtaattgctgttcgaatcagaaccattgccagaatctgacagaaatagcgtatcaagatacaagtgcatctgcttaaatattgaattttatttacatccatgaccaggagtctatggtacataatccttcctctgcttttttagtgttatttcctaattggaaaaaattatgagatgctattagcttttcctaaatatttatatacagactttcaaacattttccaagttgcttggttataaggcttcttctaacagaagggcgatatgctgtgcatgttctcttataatggagatgccacatgctgttattctttttttaggagcctaatcccaaataataaaagtggctcacatgggacacatttttgctaacatggatgtctgcctggttgtaataaaactcaagaatactagccaatttagcaaaggagtgctttgtatcctgtgaaacatttttcacatttttactgttttggaataatgaagtataagtaagtgattataagtgtatgtgtggataatggatgaggcctaggaaaacttagcacgtttttatactttctatttttgaaattcccacagtctcagctaggagttgttcctccaattttttcccctatgtaccagtgaatatttggcacaactggcagaatcaagtgttaattttcccgcctcgttcttgatagtcaaagagaattaaatcaggcacccacagggctatcctaggtgcatttcattttcaaaatgcttggcaaatgttaatgcttggttttagggcatttgtttaagcaactaggcagcagtggaaagagctagaggacaaagaatcctgctggtttgctgcaggctacagctattcagaaacagtttgggaatttcagagttgggataatttactgccctagtaaactaagtgctactggaacattgcaacagtcatttgcttaaggttgccctagtggtctgaaatagttgaggcagcttccaaaagcaattctctttgcatctgtaaagttctgggagaagctagcttggcttgtctgctgttcctgcattaccattaaggtttgaaattctctctctgaatattattaaattaatcttatgtgatttgttctttaccaaaacctgcttattttctacagcattatgctatctttctgtttctagcttagagaagcctttaaatttgttcatatagttgccaagaatacctatagtctagtttaagatgcacattaggagagtctgctgacataatagcatctggcttctaaaagtaatctctggtaaactcttttgttttgttgttcttgcttgactttccattctacttcacggatctcaaattaaagctatagatttgaagaaggaaactgatatttgagatttgtaggacagggtagatctcatcatataaaagaagctcaacaaataccttgtaattgatgctacatgcttaacacaaacaaacaaaactctaagaaattgttttttttaggttgctcagaaatgcccattgagttggatttgtgggagttgaaagatgaattctgtcttgctttacaaaataattaaaaactcgctaacaaatatgttccactctcctttgagcagcatattttgtgacttctttgctccatagtcctcaaaattattcagaagtggagttcaaacccctcctcgccatccataacttcctcctatttaaatcttggattaaatgggttagttaagaagatcattatgcaagtgaagaatggtatggctataaaagtaaataggataaatcaactgtggttgattttttattccataaatcagatcccatcaagactaacttggcaatggagtagaaccaggaagaaggtttgctgcctagaataaactgaatgaatttgtaaaccaaaaataaaattctaagacccctgactgaacggacccccttcttggccaagggaatcccaaagaaacctaaagaaacctgaacatcatgggaagggacgattacacattcctcattataccctgctccctttggagtttagacaccacagaccaacagtaacattaaaacagagattttaaaactgactagacagacactttacagcaacaagataccaaattctaacctcactctggtatagcataacataacagatagcaggccctaaaagaaatcaaagtattttataccaaaatatatttatttgacatattctgaaatgaccttgcaaagctgtctcttggggaaatttgcattctatagagaatctccttcccttactaagtcttttctggagagtcagataccttttaaggtctggcaagagacattcaccatcagcctgctactttaccctactaccttgaggcttcatctacatgacaagaaccgtggcttccacaacccactctcttaactcaagctgacttcaactgttcaggcagaattttactctttcgaccaattgccagtcagaaaatctttgaatccatcaatgacttggaagcccccacctcgcttcaagatgtcctacttttctgggccgaaccaatgtgtaacttagtactggtgtatgtctttgcctgcaactttcgtctccctaaaatatataacgccaagctgtaacccagtcatctttggcacatattctcaggacctcctaaggctgtgtcacaggccatggtccttaaccttgccaaataaacctctaaattgattgagacctgtttctgatactttttggtttacaaattgttaaggataaatgagaaaataagtattaaaaaacaaaaaaaatcaaggactcatttatttcccatagctatgatagaatctgctgtgtaaaagtaacacaaatgcaggagctcaaggtcaaacatagaaacctctgtcttacatatccgtcataacattctcttgacgtttttcctaattaaatttataaagcattagttctaatgttaaaaattgttatataaaaagcattttaatattcacatgcatctgtctacagtgttttacattttgtttataattcgtcaactgaatgaatactagataggagaatgttccatttaataaaaactcttgagaaaaataaaatagcttacttaacagtaatttcaatgtgagttggtttgtgatgtggttggcaacaaaacttacgtaatctagggctacattggcaggaatttactggtcaggacaaaggaggtagtgtttatacagattctgcacaaaacgcatgtcacctaatattattattaaatattattaaatattattaatatttagcttacttgtgaatttctctttttatctttgttaatatacatgacccaagtcatcagctaataaaccaagaaatccaaattaggaagaaatagagccaggattacaatccagatgtgtctatagcccattccagttaagcattttttcaatcagttaagtttattagttcttgcaaggcattgatctttggaatagagatgctgaagcagcttattcaaaagaaagggaacgacaaagatatgaatttataaaaatacaaatgaatgagatgaataacaaatgtcaatagaggggacacaaatccaacaagttttttaaatggtttcaaagctctggcaagattaatcaagcaaaacgtgggtaaaacacaaataaacaattttagaaatgtaaaaatgggcataactgcaattacttcaaaaataaacaaataaggaagtatcagaaaataaacaaattaagagtattatgaaaatttacacacaataagaatacaatttagaaaaaggaatatccttctaggaaaatgcaacttaaaaaaactgactcaaagaaaaaaaatctataatgtcagataaacattaaagtaattgaatcagcagtcaaataaaccttccaatgaagttaactccaagcctattgatttgcaagtaatatcaatcaaaattcaaaaatttttaaaaatgcaaaattatacaaactttccagagaatagaacaactgggacgtactcctcacataattttatgtggcttgatataaaatcttgacaagaggactatgaagaagaaaacccctacccaaagtcactcatgaacgtagatgaaaatatcctaaataaaatattaacaacccaaatccatcagtttataaaaatagtcaggctaaattggccaagtggattttatcatccgtgtttgaggttactttaaaattagaaaaccagtttaagtaattgaccatattgactgattaaaagagaaaaaaatcaattatctcaatagacacagaaaaagaaatgggtaaaattaaacattcttcatgtctgaaaaattttgaaaactagaattggaaaagcactttaactgatgaaggctatctacataaaaatcaatagcaaatatcttatttaatataaaatgttcaaagtattgtttaagatcacaaacatgaaacaattctcactataacgactcccacttaacattgtgctagaagatgtggacagtgcagtagataggaaataaaatatatagggatcagaaaggaagaaataaaactcacttatagatgatatacttatctgcttgtaaaatcaagagaatctacagacaaattcttaatcagtgagtcaataaggagactatatgcaaaattaatatacaaaagtcaatcatgtttctttatatcaacaacacttttcaaaaaaaatttttaagaggccatgtataatagcaatacatataaatagtaccaaggattaaatttgtagggaaaagccaatggccaagaataatcaaaagaaattatagatggggtgcgatggctcacatatgtaatcccagcactttgggaggccaaggtaggtggatcacctgaggtcagaagttcgagaccaccctggccaacatggcaaaaccctgtctctactaaaaatacaaaaattagccaggtgtggtgacaaacgcctgcaatcccagctactcgggaggctgatgcaagagaattgcttggacccaggaggcagaggctgcagtgagccaagattgggtcactgcactccagcctggggcatagagcgagaccctctccaaaaatatatatatacacgtgtatatgtgtacacgtatatatatgtgtatatatatacgtgtacacatatacacgtgtatatatatatacgtgtacacatatacatgtgtatatatacatgtacacatatacatgtgtatatatatacgtgtacacatatacatgtgtatatatatacgtgtacacatatacatgtgtatatatatacgtgtacacatatacatgtgtgtatatatatacgtgtacacatatacatatacacgtatatgtgtacacatatacatatacacgtgtatgtgtacacatatacatgtgtatatacatgtacacatatacatatacgtgtatatgtgtacacatatacatatatgtatatatatacatgtacacatatacatgtatatatatgtgtatgtacacatatatatgtgtgtgtatatgcatatatgtatatatgtgagtgtgtgtatatatatatatttagaaattctaaaggaaagaagtggggctttttggaaagggattaggtcatgagggttctaatctccatgaatggaattaatgcccttatgaaaatcttatctgatataaagagttaggacttactttaaaagatataatgactaaggcaaaatgctatcagtgtgaaaataaaccaatagacctgaaaaaatagcccatagatatcacatacatagatgaatacttaacttttattgaaataggcattgcagatcaatgacaatgggatagaccctatacagtaaatggtctggtaccactgattatctagagaaaaaaaataaaatttctgcatccttactccacattatacataaaaataaactccccttgaaacaaatcataaattttcaaaaattatgctaaagacaaacctttataaagacaacacattgagatttctgctcctgaccataattgaataatagtatctagatttccttatctaccttaaacaacaacaaagcctgagggggaaaaaatgtggaacaacagtttttagacactcttccacagatagcataaaactgtgatctctgaaaaagagaaacaaatggggtgaggtttacaattgccccaagattattgcctggggacagtctccagggtgaagtgcattggtatattgagaaaaaagccaaacacagcctggccttgccaaattgaaagacagaggttagggttcatggaggccaaggcagctagcatttgtgaggcagcatacaagggaagaggaacctgacctgcacagagagagagacgaggagagagctgcagctatctgcaaagagaaaccggagtactgagttgcaaatatgtgaaagaaaactacctaaggctaatgaaagaatcactaaaaagtagtaagagaaacaattcctgagctgatacagggctgctaatagtttattttcctaacacccaaagtggaatgtcttcataagagggactaaattagctccaaactacaagctactctaggttcaccccaacaaatcttgaaaacagccttaaaagaagtcaacttattccaaataaattaactgcatgccagaacaaagtccaatactatttaattacaacaaaatccagcactcaacaatgtaaaattcatgatgtttggcatcaaatcaaaaactaccaggtacataaacaagcagagcatataagccactaccaggaggaaaatcaatcaatggaaacagaaccccaaatggcaagaaaatcatgtcaagatatatcagaatcaaattattaaaaagacagataactggaaaattgtaaaagcaatcagaaaaaaactaacatggccaggcgcggtggctcatgcctgtaatcccagcactttgggaggccaaggcaggtggatcacgaggtcaggagttcaagaccagcctggccaatatggtgaaaccccatctctactaaaaatacaaaaattagctgggcatggtggtgcacacctgtagtcccagctgctcaggaggctgaggcaggagaatcacttgaacctgggaggcgatggtttcagtgagccgagatcataccactgcactccagcctaagcaacagagcgagagtctgtctcaaaaaaaaaaaaaaaaaaaaaagaaaagaaaagaaaacacaacaggtgcagaggaacaaagataaggaagaatagtttcttgtcagaccctatatgctatggtccaaatgttggtgtccccctaaaacttatatgctggaacctaatgcctaatgtgatagtatttagaggtggggcttttgggggagtgattaagtcatgagggctctaatctccatgaatgggattaacatccttacaaaagaggttgaggatgctgccttgccctttcctttacgtgaaggggcagcaaggaggtaccaccttggaagcagagagcaagccctcaccacacatcaaatctgctgatgcctggatcttggatttcctagtctccagcactgtgagcagtatatttttaatgcttaaaaactacctagtccctgttattttgttgtagcagcctgaatgcatcagtacactttgcaagccagaatacaatacagagatatgttaaagtattaggaaaaaacaacgcaagcaatcaaatgaacaaaacaaatactatcagtctataattctttaccaggcaaaaatgtcttccaaaactgaagaaaaaacaaagattgtttcagagaaatagaagttgaaagaatgtgtcacagactgatgtacacaagaagaaatgtagaaagttcttcaggcaaaagaaaaatgttaccagatggaaatttactcctacaaatagaaattaagtgtatcaaacaggtgaatagcaatgctttgtcactagtgctagctgtcacaagacctctagccagtcatgttttcagctgtagggcctaacaccatggttaaggaatggttacctaaatacacaaacttaaagtagaacttcaaatacttcctgtataaaattttccctctgaagttttaaaaagaaagactgggttgtaagaagagtataaaaaaggcttgcttctccagctctcatttctcatttcaaacttaaagaaagaaaaccagcaccaatttgaaagtgtttcaataaactctcaatgtaaaacttcacgttgttttctgtagcttttcagtaacttcttacactcatgttctatgtgcggctcagtggggaactatctgtatccagtggattgttggttctgacacactagcctacgtgcatatggggcaacccccaacatgctggcccctgccacttgcaatagatcagacccaccccttgtggttgagtgaggcagtattatgtcaattctaaacctggcattttgtttactgttgttgagtgttgttggtagtgggagaagaaaataggtcacagacagtgtgaagacacaaggagaagacagccatctacaagctaaggagagagggctgcaacagcttaattccttgtagtgttcataaagaaccaatcctgctgacagcttgatctcacatagcaaaataatacatgactttttttcctccttgatttccatgagaattgggtgaaagctattactcatataagcggatgacctgattctctcatttttgtggttacctttgattagtgttttggtctttatgcgtttcacagacctgattcaaatgctggatctctgctttattagctttgtgatcttggacatatcccttaatctagttgagccagattctcattatctgcaaaatgaggcttctagcacccctcagaattgtacaaagctctcgaaaatgtccttagcacacagaagctgtccgataaatgccaattgctttatgaatttctgtagttgtatgctgcagtaatttattttggagatcttccttatatcagtaaaagacgtttgttaaaaaacactttgtcacctgtctgacatagtatctggtggtagtaaggataagacatcattaaaaataaaaattgacaatcagagagagttaattttagcaagtacgtagattatatgcctttaatggcagctttgcagcaaagtgcaaaacataaataaatcagttaaccagatttgtgaaatacccgcagagtgttttagactttattttgaaggtgccaaattagagctaacatgcatcgcttcatgtcttcccaagaaaattacatgacaaatatctatctctgcttcactgacaacctggcagtgaaagggatttgaggtttgtgcccatcagtaactaattagagaagtaaatgttataactagtcagtattctgtggctacaatgtggcaagttaaaataatatccttaaggtgggcgctaacgcaatatgactggtatccttatgaaaaaaaaaaaaaaggacaatttggagataaacacaccgacagggtaaacaccatgtgaacatgatgatggccattcacaagcaaaggagagaggcctggaacagattcctcttagccctcaaagggaactaaccctgccgataccttgatttcagacttgtagcctctagaactgtgaaacaatacatttctgttgtataagccacccagtctatggtattttattatggcagccctagcaaaccaatacaaatcataaaacatcaattatttttaaaatctcataattttcattcttgttatatatatataaaacaaataaaaggtgactctctctaatgtataaagaagttaaagaaattgataacagaaaggccagcagtccaacagaaatgaatgagcagtttatagagaaggaaatttaaatggctcttaaatgtatgaaacggtactcaacccgactcatagtatgctaactacactgagaaatcattgtcttctaacatataggaaagtcaaccaaatgaataacacatgccattcctgtggcttcttcaggaacaaaggtcctcctaaattggtagtgtgaatatacattgatgcaatccaaaaaaaaaatccaaagttatagctgggcagggtggctcatgcctgtaatcccagcactttgggaggctgaggcagatggatcacgacgtcaggagatggagaccatcctggttaacatggtgaaaccccgtctctactaaaaaaaatacaaaaaattagctggacctagtggcacacgcctgtagtcccagctacttgagaggctgaggcaggagaatcgcttgaatccaggaggcagaggttgcagtgagcagagatcatgccactacactccagcctgggtgacagagcaagggattccatctcaaaaaaaaaagaaaaaagaaaaaaaaatccaaagttataaatgcacagtcttacatacttctcttctgggaatttattctgtaagtatatatatatatatacacacacacacacacacacacacacacacacacacacacgtgtgtgaaatgacatatatgcaaagtgattcattccagaaatgtttgtaattgtcaccacaaagctgccaatcactgagagactgattaaatgagttttggtacactcgtgccatcaaacactataaaattattaaaaaaggaaggaagatttttgtataataatatggaatgatccaaggtgtattttaaataaattaaacttaggaggccaggtgcactggctcacgcctgtaatcccaacacttttggtggttgagacaggcagatcactggagaccaggagttcaagaccagcctggccaacatggtgaaaccccactctactaaaaatacaaaaattagcgggtgtggtggtgtgtgcatgtagtccccactaccagggaggctgaggcatgagaatcacctgaactccggaggcggagattgcagtgagctgaaattgtgccactgcactccagcctgggtgacagactgagactccatctcaaaaaaaaaagaaaggaaaagaaaaaaaggaagggaagggaagggaaaggaaaggaaaggaggaaggaagggagggagggagggaggaaggaaggaaggaaggaaggaaggaaggaaggaaggaaggaaggaaggaaggaaggaaattaaacctaggaacaaagtagtttatctatctaatctatatgtatgactactatttgtcttttaaagtggagaaacgaatatgtccttgtaattataaggtgacttagctatttagagtcacatctagcatttgcatcaaggtgagtttgtctcaaaagctctgttctagtgccccactcaagaacagatattgtcaaatttgtaaaagatattttaactggaatagacttgatttttattgctgatttaatctattacaaactattgcttttctattctaagctgttgtaaaaattattgctttaatatgatcacttaataagcattaaatgccccaatcctatctgctaaaaattgtttggcatgtttaattgatcacaaggatttgaatagcactcttatcttttcaagtatcttcaagaaattcttattttcagcagggcatgttgaggaaacataaagcttacattttttattcctgatgtcttctcatcacttccaacagtagccactgagtcaaagcagttgctctctttccttactttttctaaagctctccctctatattagctgtgtctgagattgcaggcagttaaaatccaacatttggcacactgaaaaaggggctatgtgatagggcctccaactgaaatgtgatgaattattaaacaggtagtttgttgggtgattgaaaattacctgtgaaagagtgcttatctccttgaggcacatcgaaagctgacggaattgagccaattagactgactgtctcttcaatgagttgtgacctatcaatggtaatagcttattatgatgataaatgaacccatctctcaaactgaagcctgagtacacacttcagcagttgccttgaatcatgaggccattgcctctcaacttcagatcgacagcagtgacagccacaggagcagagagcatgcatgactagacacagatgattgttttactcagatgaatatatttacagctatttccaaagaaacgggcccttcttttgcattgtgtattcgtatctgaaatagttaccatatgacgtttccttcattaggaagagaacccctccctggctgtagcattctgaaataactggattttgaaggtcttttttttttcttcactttttgtttattgtttacaatgttttaatttctcattcttgtgagtaataactcaactcctggttaagtaaaatttcagaataaaaatattgttttatagtaaagatgcttgtaatatcaaaacaagtatgtttttaaaaaattaatttcatcctattacatttcacattttatatttgatgtgggttggaggagccccttagagattcttttttctttgtagagaagttttgtagagatcaatagtgtaagaatcatacaagtgtaaatagttttgtttccttttaatttttcaaaatatttgaaaattctttaagtagttactgaaatttggtaagttccatgtgctgctatattgatacattttgttttagaagaattaggagcaaaagggttatttttataatgaaatacaatcttccagttcctaataagtattagacacctgttagctgccaacttcccaaaaatacccctgagaaaaaaaaaaacctgttggtcaagaaagttcacgaagttattacagtaaacaagaacatcaccttgatattcttagtaatgtctcagaaggtgagggtcaggggaagatatttacaggctttagggaaaaggctggttgatttcaaggcaaatcttgagtgagagggaactggttgggattctgcagggtttattatataatagttttggatttgtcaccagagtgaacaaacattgaagaacatgttatgagtctataaggaagttagcttagatggatcacagagcagacaaggttttcttggagattgctcacagcattcttaaaatagggggtggacatttttcttactcccagcattatttagcacaggaaaggaaattgtgttagcgttagaagaaattgtgtttgctttagttcttacagacaatatatttacttaatcttctgtgacactgtttcttaatgtataaaatgaaaataatatgaatacctactttatagtgttattttgagggttaaatgagttaacacatatgcagtactcaagatggtgtctgaaaatgataagcatttggtattagctattattattaactccaactgggcttaatttgaggtcaggcattattttgttgaaattttagaaagactcccctcacacataaacagacagaaagagagagaggaagaaagaagaaaagagagagatagagagaggcagaaagagaaaaagaaagaaagagagaaagaaaaggaagagaaagaaagaaagagaaagaaagagaaagaaaggaggaaggaaagaagagagggagaaagaatggaagaaagaaagaaagaagaaagaaagaaggaaggaagagagggagaaagaaagagaaagagaaggaaagaaagaaaaaggaaggaaggaaggaaaagggagggagggagggaaggaaggagggagggaggaaggaaggaagaggaagcagggagggcaaggaaaggaaaacaatggaaagaataaagaaataaatgcagcaggaaaggaaaaagaataggaagaatttgctcatatctgtctaatttttagggtattttgatatacaaagtaactgactgtcaggacctgtcttagagatgatctggtaggacagtaaatggcttttctttccagttttcatctgggactgggtttgaagtgatcatcagcctcagtgttctggaaataagtcatttataatgaaatggaactggaaataacccacagacaaaaagctttgcaagccattgaagttcccctaggccatttactgccttaagctcgtttttactcatactgcaggaaaaaaaagagtgagtagggaggtggtgttcttatatcacataattttaaattaagatgtgatggttttatataaaagcaaaaatgctttattttgctttttttgttcaagacaagtacagggatgaaatgtaaatatgttaatatctaatcttaagtctgctcttgatccgaaactcttttgaaactttacctagaaaatgatagagcaatttaatgtgtctcacaatctagcagagatttggagggtgatggatagaataagggcttaacacaagaaataatttctgttgtacaaagctcatgagcttcatgcatggtgaaagatatttaggctaaagaaaatgttaactatgcagggaatgaaactcgtgacagcttgatcccataaaactcagcaaggatgaggtttgactctgcatccctgatttatatagtacagtatgtttatttaaaggagataagccaggttaaggggttcagcaaaactgttaaattaactcctttaaaaatctagttattgctatgaaagtctctcaagtgcggtgctcaggcttttttgcatcagtcatctggagtctttatttaaaatgtttattattggccgggcgcggtggctcacgcctgtaatcccagcactttgggaggctgaggcgggcggataacgaggtcaggagatcgagaccatcctggctaacacgatgaaatcccatctctactaaatatacataaaaattagccaggcagggtagcgggcacctgtaatcccagctactcgggaggctgaggcaggagaatgacgtgaagccgggaggtggagcttgcagtgagccgtgatcgcgccactgcactccagcccgggcgacagagcgagactccatctcaaaaaaaaaaaaaaaaaaaaaatttttactattgacccttactctggattcacttatccagaagatctggggaaatctacgtttttaatcagctccccaagtgattatttacccataagaatttggggggcactcttttatgactacttttttaaattactgatgattaattatctgcagatagttccctagactttgactttccaaggctttaaaaaaacaaacaaacaaaaaaacctgcagtatgcttttagtctgaattcagggattgactttcttatccaatagtctatcctgtacaagggaaccctaaaataacctcgttagccaccaccaaagactatgtaaatacaaatttatttatcaatctcattagaaaccgaaccacgcatgtgcacgcacacacacacacacacaccacaccaaccacacatttacattggaataaaatgaatcttagaaagcagctatttttaaagaaacaggaagtctaacatgtactgccattaatttggaatgggagagaaaggagacttggcagaaccagaatattgcgtgaggattgaagatagcttcagattctagaagagtttctagctctttctgaatatgtgttaacagtttcgctgtttgagctctgctacccactagccagttataaacacaggtaagacccttaacttcacagggcctgttgggaagaggttataattttttagcaacagaacctgtttttcaaacaaaatcctaattagaacacccaaaaacaaacaaaataaaggattcaaatgggtgacatggccagtcctggttacagtatgagacagatgccggttacggtgggcaacagaacagatgctggctacagtggtcgacagagttcattttagttcaagcagaaggtagggctggtgcttgttacagtggccagtaggcctggtttctggttatagcacatggcagagttaggagctctacctacattatgtccccacggcctcatctgtggtttccccataagaaaactaccttttgggaaaacatgatacaaacagatcaggtgaattagaaggtctcctgcagatttaaaattttatgaatataatgccaaatataatcttacactcagttgactactaataataaataaccctacaaaatatggtaaagtgactccatgacaacaattgaaaagaaaataattgcactcagctgagctattgtccatatctagatgcactgatgatacacaaacccagccacagaaaatgtggcatgtgtcagagcaaagcaactagaatgattcaagacactgaacagccagtgttcaagctacgtaatttcttacctatattacaggaaaaaaccatctaactctttttctacctccaacctccctcctctgaaatgttattcacatacctggtggagaagaatctttataaaactcaaatttgattaccttagtcctctgcttaaaatttcagtgtctttcaatgaaagctcagagaccattctggacttataactcccttgcagctcagaagggacccgtggtccagtaattaaaatgcccgtggtaagtgttcaatgctctctcatgcttttcttctcacaatgtcccttcagtacgggatttctttctaccattttcctgagtaattaccttctagtcatcattcaaaaagcatttaagcattgaattctataggaaatgtttctaatcaccctatcccccagctctggctgagttaggccttctctgcacaattcccatgaaagcacctaccacccagcaggcagaaatatccctctttgactttctcactaaactgcaaattcctggtgagtgacaactggattctattcttcttctaacctctagaacctagcagattgctttggagaccttaggaacttaataattctttgttgagtgaataaagggatgctttttgtggacagcagttatttctgtttacacaaaagataagagaaaatacaggtaaaattatcctaaattttaaaaaatttgaaacttacaaaaagtgttggatttaagttcctttgtctgtctggatttccgaaatatttttaaaagattttttctgggatcatttaaggcctcatctgttcagaaccaaggggaggaccgaaatagtatgccaaattcttttccagccctcaaattttatgagcctgagttgcattgtgtgggtaaaagtcttgtgctctgtggatcaggaggaagttagatgttttggatatttacatagaaacaaagaatttgaagactggaaagaacttgagcaggactctattaaatgtgttttgtgtgagatggttttcaccctgtgttcttgtggttcctccatgctaggggcaggaggtaggatggagcagatagggagtctcttttcctcttaaaccggatgttttttttaaaatcagttttatatgttgagagtccatggaatggaatgtggaaactgagaccctgaaagattaagtcacttgaacaaagatatacagcttctccagagaccaggcagacactaggtttatgatttcctgacttccactgcagatctcttaccatttttctatgagagtcataaaaaaagaatcagctatttactttctagtcaaggtgggttaaaatcaagccacttgttttcaaacatcgatttcgggttcatgccatcaaattaaaaaattcacttaactgagtttaatttgctttcacttaggaagcagctgcctttcaagataataaaataaacagatacaataatatttggtcagctgtggcttttaatttaaatgtttgatttaatgttgtttagtttgctggattccaaaatattctctgcaagagaagcatacacattctaaagcatttcaaatgtttattatgatgtcctagaggtggctgtctttctgttgctgtgcataccctgagcagacttgacattgctttggaagcacatattttctgatagacatattactctcataatctaaaatttttcagaagtgacaaaagtggggttgaccattttcttcttcgctgtctccatgattttgctttttccaagatgtcatgtagttagaatcatacaatgtgttgtcttttcaggttggcttttttcacttagcaatatgcctgtaaggttccgccatgtcttttcttgccttgataattcatttctttttagctctgaatactattttgttgtctggatataaccacagttgaattatccatttacctcctgaaaaacatcctgcttgctaccatgttctggcaatatgaatcaagctgctataaacacttatgtgataagtcttgtgtggatataaatattcaacttatttgggtaaataccaaagagtgcaattactggatcatatggtcagagcatgctagttttgtaataaactgccaaactatcttccaatatggttgtataattttgcattctcaccagcaatgaacaagagttcctgtttctccacattctcaccagcatttcatattgtcaatgttttagacatcagctattctaatagatatgtagtggtatatcgttgttttaatttgaaattctctaatgatgtaagatgatgagcatgttttcatgtgcttattttccatctgtatataagctttgctgaggtatctgtttagattttttccaatttttaaatttattttcttgttgttgagatttaagagttctttgtatgttttggaccatatcaggtatatcttttgcaaatattttcttgcaaatggtagtttctcttattctcttcacagtgtctttcacagagaagatgatttttaattttaataaaatctaaaatgaatttttatttcatggatcttgactttagtgttatatataaagagttactgcaaactcagggttatttagattttcttctatgttatcttccaagagtcatagttttgcattttatatgatccattttgaggtctatgatccattttgtgttaatttttgtgagggtctatatctgcatttatgtattttttcacaagttatctcagtcaattttctgttgctataacagaatacctgagactaggtaatttataaaggagagagttctatttagcttgtgatcctgggagcttgactaggagatccaagttaggacaggtgcatttggtcaagttctggtgagagtcttgtgctgcatcttaacatggtggagaagtggaagaaaaagtgggcatgtgcaaaatgaccaaacacaagagggagccttcctttttaacaacccaccctcgaggtagctaatccagtcctacaagagcaagaactcactctaagaaaggtattaattcctttttaaaaacctaatcacctctccaaggcaccacctctcaacatcaccccattaggaaccaaacctcactatggattttgattgtgacaaaccatattctaaccataacacaaatgatgtccagtttttctagtgccatttgttgaaaacactttcctttcttcattgaattccctttgctcctttgtgaaagatcagatggccatattcatgcgggtgtatttctgggctggctattctgttccattgatctaagtgacttttttctgaccagtactatattgtcttgataactatagttttatactaagtcttgaagttgggtagtgttagctttacaagtttgttcaatattatttaatgatgtgttggctgttcttggtctttcctctccatataaattttagaatcagtgtgttgatatccaaaaaataacttgctgggattttgactgggattaccttgaatctacacaaattgggaagaactgacatcctaccttgagtcttcctatttatggacatggaatacctctccatttatttaatttttctttgatttctttcactggagttttatagttttcctcatatagattttgtacataatttgttagatttatattgaagtgttttgtggagcatgctagtataaatggtcttgtgtttttaacttcacattccaattttctttgctaatatataggaaagcaattgacttttataccacctttttcttcagacagatggaatcaagtgacttagaaattggctttgttgctctgcctgagtatcttgaaaattctcatcttccttctgagaaccataacctacatatctcaaggttatagataaaatgctacctacaaaatccttgtaatgcttacagtctaaaagactaaataaggcctcaagagattattcaaaatcagagttgttgattcccagtagagtcataaagggctatgttatgttagctgcaattctaatcctatatcaaagcttctgacttccactcccccatatctaaggaggtttccctcaacagttgaaaaataactgcagatactgctttgccatcccatgccacaaaaatgcatttctgaaggatgctgcagagagatatatatttcttaagcccagctcatatctatttctcaaggctgtgtgatatcatagaatgaatgatggagtcaaataaataaatatttatttatttatttatcagtcaaataaatctgatttaattttttagaacttaacatttagtagctgtgagatcttacagagatttcttcaccttgtatcctttgtcactttatctataaaatggagagtgtaaatactacttcttagagttatcatgattctttaatctaataactcatgagacactggatatgtaataggaactgaataattcttaacccccttgctttcccttgacatttccagaaaataaaacttgattgagtatctaagattatataacagatcccactagactaagtgaatctgagggaagatgtatttgtcacttttcttctcttctttggtttttaaaaagtatcattagaaatagaatcagtaactataaacaaatttctgtgtactgatccagtattaacagagaaaataatggttgactgtgccttactgtgcaaggcaaaaatgagctcaagatattatcaaagtcatgaatcagaaagagaatttcgttttacaaatgatggatagccacaaaacaactaggacatacaatctctgattacacaactgcagtctatagctacattctgcagattaaacaccacagtagagatggaaactttattgtttatattttatgaaaactgttctcttttgtttttatgtcagtttgagagtagaagaatatccttgagggcaaaacatgcctttcatacattagagctgcctagagcatagtctggcacattatataaatattaaataattcctataattaaactgatgttctttggaatgaggatggagacacatagttatctgaattgccttaagctagttttgcaataagtagatttttactattctagaatatgtaatgaatgaatcatgctatgttacaagtaagtattaattaatggttgaagtacaaaaacatcttccttgaattatatgataatctacatcacagtgaaaggaatttatcatgacaaatgctagtcaatgttgaatcacagagggctatatgagatccattttcattcttaaagaaaattattatatctttttattaatatggtggatatttactcagtaaataataaagaaaactaatatgaagtgcaatttgtaatattctatttatgatgcatgatttttgttgcacaattagaaaatacttaagttcttgagaatagttggaaagggttgtaatgatcagaaacacatattatacctaaacatgtattaagaccttgttttaaaaattagatcttggagcaagaaggtaagctgtatcattacgttcttagaatacagggttgggcgtgggggctcatgcctgtaatcccagcattttgggaggctgaggcgggtggatcacgaggtcaggagatcaagaccatcctggccaacatgacgaaaccctgtctgtactaaaaatacaaaaattacctgggtatggtggcgtgtgcctgtaatcccagctacttgggaggctgaggcaggagaatcgcttgaacccaggaggcggaggttgcagtgagctgagatcgtgcctctgcactccagcctggtgacagagcgagactccatctcaaaaaaaaaataataataataataagggtaaatacaaggagtgtgttttgaatacaaaatatctatttttagaatctcaaacccatgagttactttcttccatatataagtcccaacatgttttctataatcagtctatgtctattagatgtgtaattatattaattatgtaaatgcacatgaataccaaattatttggttaatcttcgaatttcttttagcaattatatactctcctccaggttagattgagctttcccttcaactcagagaaatcagtgtcaacaggctaccttctgtaagactaccagagagctatgcattactctgtacaaaggatatttctcctataaatagtgctttcaatagagaaaatctgttatcatgttgtcagtaaattcaaatattttctcttttggaatactctgttcctattaaaacaagagctgtttccttctttgaaacaagttatttatatttatgtggttaagatatcctatcttaaaccataagacctttttgaatacttcacatacagaaaaatgaaaaaaattaaacaaatatcagagttgctgggaaccccaggatataatctactgtggatagtcattcatagacaaagacacctcctatttataggcttgggacagttcagcttctccaacttgaagagagttttgaagatcaaatacaaatgggtcttgtgaagtttcaaaaaatgtttctcaaagtcctttgagaaaaataaacttgggcctgtagccaatagtttgtattccaggcttttaaaaaaaattcaaatacagaaacatcagattttcattgccataggggtcatgacatcttttaacataagtgcagaaactatctgtaatgaatcaaaacttaaatcagatgacattaagaccagctttgctattaccacagatggcatcacaattaacttttaatatatcaaaaatgtgagtgtactcatatattatcagtcatttgatcatgatattccaacattaacatctcagtgtattgtgaaaatgattcatttgtacaatatttttcttcttctagacttttaatttcttgaaggaaggaacgcattttactcatcttgtagtgaccctccctgtacatgttgcctgagacataataactattcaaaaatgtttacagtattcaatgaaattatataaatcttggtttaaaaagcttgatatacaatgaaacatacttgggcaaattataaagctgttcctgagaatgagctaatacatatttagttgttaaaattctgaggggaaaatgtaaattagatgtgaactacctctacaatataagatagcagtaggctgtaagttaaaataatcatttttctcatttttcagtaacattcattaaatgcctgatacaattctgtactttctgaaaattgactataataaagaaatcctggccattataaaattgtcatccactcataggtagaataaatgagagaattatggtgatctaaatatagaaagcatttaaattagagaacagctgaaattgtgcttctaaaacatttcagtgttgttcattttctatatgttatattgaaaaaagtaatatggaaatgtaatgttttcatttgcagatgcttaaatttagatacatgtttaatactgtaatcattttgatcaaacagcagctattatttattattcaatatttatatgtaaaacctgaaactttcatctaccttaatgatggtattgtgataaaagtacccatgtatcaccaagatttgccaattctttttattccttaaagaatatctgacaatttgctggtttgtataagtttgagttaagacaccgtaataatgtcctgcagtatatatgtcaaaatacatgggtcaaaaagacactctaaaatagcagtctccaagaacccaggaagtatgtgatccataggagtgtacatattttattttctttaaaaaataagacagacacttctcaaaagaagacatttatgcagccaaaaaacacatgaaaaaatgctcaccatcactggccatcagagaaatgcaaatcaaaaccacaatgagataccatctcacaccaattagaatggcagtcattaaaaagtcaggaaacaacagatgctggagaggatgtggagaaataggaacacttttacactgttggtgggactgtaaactagtttaaccattgtggaagtcagtgtggtgattcctcagggatctagaacttgaaataccatttgacccagccatcccattactgggtatgtacccaaaggactataaatcatgctgctataaagacacatgcacacgtatgtttattgtggcactattcacaatagcaaagacttggaaccaacccaaatgtccaacaatgatagactggattaagaaaatgtggcacatatacaccatggaatactatgcagccataaaaaatgatgagttcatgtcctttgtagggacatggatgaaattggaaatcatcattctcagtaaactatcacaaggacaaaaaaacaaacaccacatgttctcactcataggtgggaattgaacaatgagaacacatggacacaggaaggggaacatcacactctggggactgttgtggggtgggggggaggggggagagatagcattaggagatgctaaatgacgagttaatgggtgcagcacaccagcatggcacatgtatacatatgtaactaactggcacatggtgcacatgtaccctaaaacttaaagtataataataataaaataaaaataaaataaaataagaccattaaaaaaaagttcatcgtatggattgacactgggctgctccctggtggagtaccagctcaagatgttttgaggaaaaaatttgcatttaccaagtgggaggatttatagtggtgatttcacttgttcattgatttagacatatgaaatattatattttttgcacaactaagttggctttcagattatatgaccatatttttaactaaatgaagctttgctgaataaatacatgacttaatatattccttcaaaaaacatatagtgaaataatattaactacacaaagataagcaatgagcaaaaaaacactagtgcttaccactgctcttggtaagagctttccttcaggcacaaaatgagataaaagtaatgacaaggtaaaactggatgaaaattggtcaacaagtgaggaattaactgccttgcaaaagcagtttttattatacagaaaccattttgaaagcagttattcagaaagtttctatcagtatatgatttgtagctcaaattattgttggtctatcaatcacaaatactattttctgcataatatagctagaaaatataattatctaacttatttttaaagtcttctaaacatgaagtttcagtgagctttgaagctttttgttaaatatgttaaaatgtcatactttccaaatagtttccaattataaccaattagcatcagaaaatttattagccaaatttcaccaagaacctaatttgtgagagaattgaaaaatgagtaccataatttagtatgctcagccactgatgtaatgcttataatgggacctgtgtattttttgtctgtgctgtatctcttttcagctgtgaaaactattattactaagtattaaaacaaactgagggcaaggcacggtggctcatgcccgtattcccagcactgtgggaggccgaggagggtggatcacttcagatcaggagttcaagaccagccttgccaacgcggtgaaaccctgtctctactaaaaatacaaaaattagccgggcatggtggcacatgcctgtaatcccagctactcgtgaggctgaggcaggagaatcgcttgaacctgggagacaagaggttgcagtgagccaagatcacaccactgcactccagcctgggagacagagcaagactccatctcaaaaaaaaaataaaaattaaaaaaaaagcctgaacctagaaacggacctacaaatgtcaatacttagtaatatttttaattattaagccaagatttccaaaaataagaaaagcataattgattatactggtttctttttttttttttttcatttggaacatataattgagaaagctttagtatcaagcatatgtaaagactcataaaataataaggaaaggccaaactgcctgatagaccaaaaaaaaaaaaatcaacaataaacattttacagaggagaaacagagaaacatatacagctaaaaacatatggaaggatcttgagtcttatagcaatattgatgagcaaatcaatatgtagaatagcaaatcagtatcattatcaaagagataatggatatctctttatactcaatttattggcaataattaagaatttaaactacagaaatattgaaaagtatttgaatcaaccagatttcttatatagtgctaatataaattggttaaccacttgacattatcttttaaagtttaatattcacacaccctatgacccaacaattttctagatgtatatactaaaggaaattattacatttgtgcacccagataaacacataaaagtgttcataaaagtactgtttatattaagaagagccgacagcagatgcctatccagaggtaaacaaattgtaatatatctggaataacttgttgcaatgaaaataaatgaactacaggtatacgtgataatatgatgcttagtgataggttctcagatgatcacagcatgatggtctttataagcaataacatttttgagcaaacatatatttgctgaaattatctttttaaaaatgtaagaaaataatataaacacaaaattcagcatgtcagggttatgctgcagggtaacggggtggtgaggattgtatagatagttgcaaacattgctcatgttcaacttcttgggttgggtagttggcttttatcactaacaaagtaataagccagggaatacaatgggtaaatgaaaaaataaaatagagtcacgattagaccaatgatgatagtatatcataaatcaagtcttctcatctttaaaatggaattagtaggagtacttagcttcctagggttgttatgaaggttgaaattcttagaataatgcctggtacatagcatttttttttttaagttaagttctagggtacatgtgcacaatgtgcaggtttgttatgtatgtgtacatgtgccatgttggtgtgctgcatccattaactcgttatttacgttaggtatatctcctaatgctatccctcccccctccccccaccctacgacaggccccggtgtgtgatgttccccttcctgtgtccaagtgttttcattgttcagttcccacctatgagtgagaatatgcgatgtttagtttgttgtccttgtgatagtttgctgagaatgatggtttctagcttcatccatgtccctacaaaggacgtgaactcatccttttttatggctgcatagtattccatggtgtatacatgccacattttcttaatccagtctatcattgatggacatttgggttggttccaagtctttgctattatgaatagtgccgcaataaacatacatgtgcatgtgtctttatagcagcatgatttataatcctttgggtatatacccagtaatgggatgactgggtcaaatggtatttctagttctagatccttgaggaatcgccccactgtcttccacaatggttgaactagtttacaatcccaccaacagtgtaaaagtgttcctatttctccacatcctctccagcacctgttgtttccagactttttaatgatcaccagtctaactggtgtaggatggtatctcattgtggttttgatttgcatttctctgatggccagtgatgatgagcattttttcatgtgtctgctggctgcatcagtgtcttcttttgagaagtgtctgttcatatcctttgcccaattttgatggggttatttgtttttttcttgtaagtttgtttgagttctttgtagattctggatattagccctttgtcagatgagtagattgcaaaaatcttctcccattctgtaggttgcctgttcactctgatggtagtttcttttgctgtgcagaagctctttagtttaattagatcccatttgtcaactttggcttttgttgcccttgcttttcgtgttttagacaaaaagtccttacccatgcctatgtcctcaatggtattgcctaggttttcttctagggtttttatggttttatgtctaacatttaagtctttaatccatcttgaattaatttttgtataaggtgtaaggaagggatccagtttcagctttctacatatggctagccagttttcccagcaccatttattaaatagggaatccattccccattgcttgtttttgtcaggtttgtcaaagatcagatggttgtagatgtgtggtattatttctgagggctctattctgttccattgatctacatctctcttttggtaccagtaccatgctgttttggttactgtagccttgtagtatagtttgaagtcaggtagcatgatgcctccagctttgttcttttggcttaggattgacttgggaatgtgggctcttttttggttccatatgaactttaaagtagttttttttccaattctgtgaagaaagtcactggtagcttgatagggatggcattgaatctatgaattaccttgggcagtatggccattttcacgatattgattcttcctatccataagcatggaatgttcttccatttgtttgtgtcctcttttattttgttgagcagtaatttgcagttctccttgaagaggtccttcacatcccttgtaagttggattcctaggtattttattctctttgaagcaattgtgaataggagttcactcatgatttggctctctgattgtctgttgttagtgtataagaatgcttgtgatttttctacattgattttgtatcctgagactttggtgaagttgcttatcagctttaggagattttgggctgagacaatggggttttctaaatatacaattatgtcatctgcaaacagggacaatttgactacctcttttcctaattaaatacccttcattactttctcctgcctgattgccctggccagaacttccaacactatgttgaataggagtggtgagagagggcatccctgtcttgtgccagttttcaaagggaatgcttccagtttttgcccattcagtatgatattggctgtgggtttgtcatagatagctcttattattttgagatacatcccatcaatacctaatttattgagagtttttggcatgaagggctgttgaattttgtcaaaggccttttctgcatttattgagataatcatgtggtttttgtttatatgctggattacgtttattgatttgtgtatgttgaaccagccttgcatcccgtggatgaagcccacttgatcgtggtggataagctttttgatgtgctgctgcattcagtttgccattattttattgaggatttttgcattgatgttcatcagggatattagtcaaaaattctcttttttgttgtgtctctgccaggcttttgtatcaggaggatgctggcctcatcaaatgagttagagaggattccctctttttctattgattggaatagtttcagaaggaatggtaccacctcctccttgtacctctggtagaattcggctgtgaatccatctggtcctggactttttttggttggtaggctattaattattgcctcaatttcagagcctgttattggtctattcagagattcaacttcttccttgtttagtattgggagggtgtatgtgtccaggaatctatccatttcttcaagattttctagtttatttgcatagaggtgtttatagtattctctgatggtagtttgtatttctgtgggatcggtggtgatatcccctttatcattttttattgcatctatttgattcttctctcttttcttctttattagtcttgctagcagtctatcaattttgttgatcttttcaaaaaatcatctcctggattcactgatttgttgaagggttttttgtgactctatctccttcagttctgctctgatcttagttatttcttgccttctgctagcttttgagtgtgtttgctcttgcttctctagttcttttaattgtgatgttagggtgtcaattttggatctttcctgctttctcttgtgggcatttagtgctataaatttccctctacacactgctttaaatgtgtcccagagattctggtatgttgtatctttgttctcattagtttcaaagaacatctttattccagccttcatttcgttatatacccagtagtcattcaggaacaggttgttcagtttccatgtagttgagccgttttcagtgagtttcttaatcctgagttctagtttgattgcactgtggtctgagagacagtttgttataatttctgatcttttacatttgctgaggagtgctttacttccaactatgtggtcaattttggaataagtgtgatgtggtgctgagcagaatgtatattctgttgatttggggtggagagttctgcaaatgtctattaggtccacttggtgcagagctgagttcaattcctggatatccttgttacctttctgtctcgttgatctgtctaatgttgacagtggggtgttaaagtctcccattattattgtgtgggagtctaagtctctttgtaggtctctaaggacttgctttatgaatctgagtgctcctgtattgggtgcatatatatttaggatagttagctcttcttgttgaattgatccctttaccattatgtaatggccttctttgtctcttttgatctttgttggtttaatgtctgttttatcagagactaggtttgcaacccctgcctttttttgttttctatttccttggtagatcttcctccatccctttattttgagcctgtgtgtgtctctgcacatgagatgggtctcttgaatacagcacactgatgggtcttgagtctttatccaatttgccagtctgtgtcttttaattagagcatttagcccatttacgtttaaggttaatattatgtgtgaatatgatcctgtcattatgatgttagctggttattttgctcgttagttgtttcagtttcttcctagcatcgatggtctttacaatttggcatgtttttgcagtggctggtactggttgttcctttccatgtttagcacttccttcaggagctcttttagggcaggcctggtggtgacaaaatctctcagcatttgcttgtctgtaaagtattttatttctccttcacttatgaagcttagtttggctggatatgaaattctgggttgaaaattcttttctttaagaatgttgaatattggcccccactctcttccggcttgtagagtttctgccgagcgatctgctgttagtctgatgggcttccctttgagggtaacccgacctttctctctggctgcccttaacattttttccttcatttcaactttggtgaatctgacaattatgtgtcttgaagttgctcttctcgaggagtatctttgtggcattctctgtgtttcctgaatttgaatgttggcctgccttgctaggttggggaagttctcctggataatatcctgcagaatgttttccaacttggttccattctccccgccactttcatgtacccaatcaggcatagatttggtcttttcacatagtcccatatttcttggaggctttgttcgtttccttttactcttttttctctaaacttctcttctcacttcatttcattcatttgatcttcaatcactgataccctttcttccagttgatcgaatcagctcctgaggcttgtgcatttgtcaggtacttctcgtgccatagttttcagctccatcaggtcatttaaggacttctctacactggttattctaggtagccatttgtcctatcttttttcaaggtttttagcttctttgtgatgggttcgaacttcctcctttagctcagagaagtttgatcgtctgaagccttcttctctcaactcctcaaagtcattctccatccagctttgttccattgctggcaaggagcttcattcctttggaggaggagaggcgctctgatttttagagttttcagcttctctgctctgttttttccccatctttgtggttttatctacctttggtctttgatgatgatgtacggatggggttttggtgtgggtgtcctttctatttgttagttttccttcttacagtcaggaccctcagctgcaggtctgttggagtttgctggaggtccactccagaccctgtttgcctgggtatcagcagcggaggctgcagaacagcagatattgctgaacagcaaatgttgccgcctgatcgttcctctggaagcttcgtctcagaggggtactcggccgtgtgggatgtcagtctgcccctactgggtggtgcctcacagttaggctattcagggctcagggatccacttgaggaggcagtctgttcattctcagatctcaaactccatgctgggagaaccactactctcttcaaagctgtcagacagggacatttaagtctgcagaggtttctgctgtcttttgttcggctatgtcctactcccagaggtggagtctacagaggcaggcaggcatccttgagctgcagtgggcttcacccagttcaagcttcccagccacagtttgtttgcctactcaagcctcggcaatggcgggcgcccctctcccaaccttgctgccaccttgcagttcagtctcagactgctgggctagcaatgaacaaggctccgtaggcatgggaccctccgagccaggtgtgggatataatctcctggtgtgccgtttgctaagaccattggaaaagcgtggtattagggtgggagtgacccgattttccaggtgccgtctgtcacagcttcccttggctaggaaagggaatttcctgaccccttgtgcttcccgggtgaggtgatgcctcgccctgctttggctgacacttgatgggctgcaaccactgtcctgcacccactgtcagacaagccccagtgaggtgaacctggtacctcaattggaaatgtggaagtcacccatattctgtgtcgctcatgctgggagctgtagactggagctgttcctattccaattatactggtttctaaaaaagattgtaatatattgttgagagtgaagggagttttatatcaataattaaattattttaaaatattgtttatttcatttctcatacttcaaattacttatttacattttaataatatattagtatcataacacatgtgtataatacagctagaaagagagagcatatataccctgaaggcatttttaattataatattgtaaaaccaaactctaaagactcctgttctaggtaattgattagtccagtaaatgtaggcataagaaaaatgtatgaaatagatgacgttaatctttcatgcacaataacacctttctccagctgtggctctaactgtcctgatggattctttactgctctcagctaatccattatatggttttagacatccaggatagacactgaaaggaataactattacaaaagtaattttaagaggagcatttgattgactgatgctcctcttatgtattcattgtgtgtatgtattgaatttgtgtattcattgtatgtattcaatattcaatgtatgtattcattgatcctgcatatacttgatgatttgattggtggtttgattccagttatattaacttgccagaaactttctagtttccaaacagtgaatacaacttagacctcatgaagcttacattctagttagaagagagaatattaattagataagcacataaaatatacatgtgttagatagtgataaatgacaagaaaaaaagtagagcatggagggcctaggaaggatgatagtggttgaatagactttaattttatatagaatattaggtcagagatctgaaggtgactaggaaaaagttatgtgggtatctggagcaagagcatcttaggacaaagagaaagtaagtgaaaaggccctaagatatgaatgtggctggcatgttcaaagaccctcaaggatggggtaagagtggggaagagttgaaggatatggggaaggggaaaatatcgtaggtctttggcacactgtagttaatgtcttcacatttttcttgcaatgcaatgagaaacacagacatgtaatgatctgagttatgttttaatagggttagtatgattgttactttgagagttggttgaatgaggacaaacagatagaccagttaagagacttggcattcatccagtcattagctgtgaagtcttggaccacagtgataatggtgaaaatgatcaagtgtggtttgattccagatacattttgaaggtaatgctgaaaagatatgctaatagtttggctgtggaacatgaaagaaagaggagttgaggattatttcccaactatggacctgagcaactaaaagacttgtcattgatttagatggggaagactgtggtaaaaacaaattttttacaggagatcatgaactcagcttagctaattatataaagttagagatgcctattatatatcgaggtgtaaatgttaaagtgatagctagtatacaagtctgaagttcattgggtcaggaacatctgaactgaagatgtaaaatgtttgaatcatcaatccatatgtcatttaaaccagaagactagatgtgataaccaagaaaatgaataacgagacaaaatatgagatctaaggattgggccctatagcaccccaacatttagaggttaggaaactgaggacgaactagaaaggagactaagaatcagtgaccaaaaaagtagaaggaaaaccacagaagtcatgtattgaaagtcatttgaatgaatcaagtgatcaactttgtcagatactgttgatgggccaaataaggtaagaaatgagaattgaccattggatatagcaatgcattcgaccaatgaccttgagaagagtatttcagtggaatgaagggcaacatggaaactagagtggatttaagagagaataagaagaaagaatatggagatagcaagtgtagacttgtctttttctagaaagaaaataagggcatagatacttttatgggatgtggaatggtgctgggacatgtggaagtctcttctattggtctgtatattcttagaaaatagaaaataattgagtatgagaacatgggaggaaaatgctgaagattcaaggagaaaagagaaagtatgaaaaagtatccaggaacatagcaaagaacatggaccagacagcattagggatctatgtgagtttagtaatcatgaatttgaagcaaggtcagtcaacaggtactatgagtttcttcagatgtatccagctcagcagttgcaggtacagagaagatagaggttagatttaactgacgttgtggttaagccaagtgaatacagtaaaactagagattaaaataattgaccatggaatctaagacagtgatgagaaaccctcaagctacagcgatttcccattgtctccctaaatgctattagtactgtagccaagacaagtctttcttttataggactatacaaggccttagaggatatttagtatccttggcctaaaggataaaggtaaagtggtacagtacacatttagtgtgctgtacactaaatatcagtagcactttgccacaaattaaaggaacagtatataatccttgacagtgctttaactccattgcatttccttcttttttagaatggaatttttttctatatgttccccaaagcaaggctagtttatataacattaaattacttatgcaaatgcaaaaattaatctgaacatctatttattatatctagcacaaaacatagaaacaaagaaggcataggttattattttgaaattatgctttactgaacacataggaattgctaccaatcgtttaaatagttgccttatttcttagacaaatagtaactgaaatgtatggagcattcatgcatatatttggaatgtattaagtgttcatgtgtatacctggcgcagagttaattgttttgcctgcattatctgatttgattttcccacagtgccatgaagtatgaattatcattatcactattatatagtaaacagtataaaaatgtgtctatgacttggagaatggaaaaatgttttacaatattacattctggttgttcacttcccttccattcatgttgacattgaattgttctaggctgctaaggcagcactgtcagaagccacgttttttctaggcatacacacactttattcctttgtcctttagttccttaaactacccatgcactttcctcctctttctttttacattgatgattaaaatagtgagcctgaatttttttaaataaaaaccaactaagttttttattatttattatttggaggaacatatgccctccaaaatatcatttagtgcatcttagacataaaacaatttaactgcttgaagaaaatgtccagcttctgaaatggcatgccattagatattagtgacatttgtttataaacaaataaatgtcttcaacctctatgtagttactatcaatatagccatgcaatatatatggagttccaaatacctttcaaaaagtaatgttgatacagtagtgatcacttatgtccttttgattgaaactgcattatacgaagttctttcctttcagcacaataacctgaaaaatatagctgtctatttaaagaagacattttcttgtttggcagaatattatcatcatacagcatatgtacaatatggtcctaatttgtgtcgatatgtgctaggcttagaaaactcactttaagttttactaaatttattttggagtttaactcttacttttgacatgatttatattctaaggagatctcagcttcttcctgcttaaatgacattacatagatagaaaggtatatattcttattatagcagtgtctgccagggctgcagtcctgttgttagaaggctgtcagaattttaaatgtaagccttcctttcccaggtgttataatttaatcttctaactcctattaatttctgaagactgtggggccatcctatatcttagaacaaaatatagatacgtacattcctgatttttttctccatatttaccttcccccaaatgttttaattttattatttcaaaattataataatagcaatggatttcaaattaaaattctggctagtgaatccctcaggtatttctttatattgactgatttgtatgttgtaggctaaataatgccctcctccaagatacccatagctgaatttccagaacctgtaaatatgttccctcttacatggcaaaagggactttgcaaatgtgactaagtttaagaaccttaaggtgggaagatgatcctgcgttatccaggtggaccgaatccagtcacatgagaccttaaaagtagaagagggggtcagagtgatgaaacaatggaagaagaggaaggagaagtttgaagcatgaaaaatatttcattcatcatttctggctttaaagatggagagtcccttgaaccaaggaatgtgaatgacctctagaacctggaaaagagcattggctgacaaacagcaaggaaatgggaacctcagttccacaaccacaagaaatgaattctgccaacaacctgaatgaacaaggagatagattctcctctagagccaccagaaaggaatgtatccatgccgacaccatcattttagtcattttagctaaaggagacccatattggaatattcgcctacagaactgtattccaacaaggatgcatatgttggaatattcacctacagaaccatgagataatatatttgtgttgctttcaattgctaagtttgttacggtagcaataggaaactaatgcaatgtacagttgacccttgcacaatgcagggattagggatgctgacctctacacagttgaaaatttgtttataatttttagctccctaaaaacataactactaagagtctactgttgaacagaagccttactgataacataagcaatttattaacatattttgtatttcatatgtatatatgctgtattcttataataaagtgtgttagagagaaaagaaaatactaagaaaatcataaggaagataaaatatatttgtgttaatcaagtgaaagttgatcatcttaaaggtcttcatctgcatcatcttcatgttgaaaaggctaaggaggaggaagaagaggaggggttggtcttgctgtctcaggggaggcagagacagaagaaaatccgcgtataaatggaccggacttgcacagttcaaacctgtgttgttcaggtgtcaactgtatatgaaggctttcttctttaaacagaaaggaagtattttgtgcccaagatttggagaaagcaatgggataaaaatatcatagagattttatggtatttgtcctttttttccttttccccttcactaagggtcttgaaaaactggtctgaaactccgctccagtagagcaaaaagaagaactgaaagttaagaagatatttttgtgaaaaatgttgtgagacaaattttgacacagggttgaggaactctttttttccgcatctgaccaagggcaggcttgatatcctgaaggttaagagcggctttgcctgaagcaaagttctcactatgggaagttgcagccgagtagtgaagagttatcttgatgggaggccggaacaaatttgctttggagacgtaaagggaactaagaactattcttactggactccaatatgagactttatttctatccattggtttgcaaggcctggagatatatgcattagataaaaagactgtatttgtaattagaaaagcctccagtaattaatgtccaaatatgcaaccaatttaaatgatgtctacataataccacacatagatgaaaatccaaaaagtcaaacattcattataataattcttccaatctagttgttgttatatagaagcccctcagagggcaccccattttgctgaatttcttgagttttttacttatatcacagaatcaggatgttcaaagtataacaaagatgagaagtaagttgaaaaaagaattattagtgatatttcttctaccatatacatgttatcttggaattggaattttttcataataagaaatccattagcataaatacagtttaaattgaataagtaaatttcattaaaaacaaaatatttatttgggggtacattttataaatagctgcaaaatcaaaactgcatttttgaaatgtaagccatattgatgctagtaagtcaatatgctcattatcaattgtgtatgtacttttatgttatttagaaaatttaattacacgtacggtgtttcaagtattcaatagataaaccacctaggaatataacagggggcataaaacatattatcgactctgtgtctttatgaaactagataaagcaaagaaaaatctgtcaattactcagccagtttcatcttagtagcctactgtaaattgaggtctatgtttttgagtgaatgaaatctagtaaattaagttcaccaggtcttattctagtttattttagatggaaatgtatgatttttaaaagtgggagtaaaatcttacacatatttctgaaatgttaagaagataattttataattcaaacctgtacaagaacttagtttgcctatctgagcaaattttacattcactagtgaatgcccatgtgaaagacaagcaggaaacttccaggggccaaggggcttagaaccaactgaactggtacaaaataaacattaggtatttcagtacgtagagtttgtggacaaaaagaataggctcttaccaattactatgctactagaatatccaattttgcttttaccaagccttagtgaaaagtgaatgaattctaacaagaagactcaaagacactggtgctccccctgtgtctcccttcacttattctgcatggtcagcacctcttcaaaagaccaataataatggtcccctacaagaagtatacaattgctcctctgatgtgaaagcatatgaagaaaataagtgtccaaagctgcataaatatttgcacccctttgagagtatgagaaagtgtgtgttttatgttgtgattgataggacaactttcatggcccactttgaactcttagcaggaactttggaatgtcctgagggtctgtctgcctttgtatggcaggaactctgttttcttagaaaatagtaaagaacagtttgtactcctttgttctaaagggtacctatagtttatgggaattggggaacttagtagaaaaatcaccaacgctctcatgtttctcataaaaaatgctcagctttatttggaaactttggccattgttttctttttcttctttcttcttctccttcctcttttgggttaaaaaggccacagtctgacctacttatatgtgtgatgaaatgtgcagactctgccaaggctatttattctaatgatttatctactcaagataaaaagaaataaagtgaagacaaatctgaaatactgtgcaatgtacttacttgaaagcagtaagttctcatgttagaaaatttccctattaagcaagaaatcttgaacacttcattaaagtcatatgatctgatttttattatcatttaagtcagggaattttagaactaaatgtgtcaattataaaactgtacatatgtatagcctccaaaatgtgttaaacattagttcatatgaatctcaaaatactgtaacacagtaaaatgagcaagaaaatttttgaaatttgcacagtagagacgatgctgttaatgttcaccgaggtaaataatttgtccaaagttctatttctgtgagatactcaactgagacataatctcagcttttttcactttcatattctatattttggttttcattttgttcttaagaaacaagtatttttaaaatgaaacatctggtttcggcagtgctggctaatgctcagaactcccttcccttgttttcttcaatgtcacccttctataaaaacctctgaatatctgaatacgttttaagagcaccccttataaaacactttttgctttgttatgtttcattttgcaggtgccaaagtcacaaatatttcacctcattcagatattccaggtagtaaggctgatatttttatgagtcatttcatctgacaaaattaatttaagaataaataacattgaaatagtaagtagcatgtattttggacttaactcttattttccctatttctattcttccatgttttaatagattaatatatactcatgtgtatatatgtacatgcacactcacacacatataagtatatatatatttatttttcctcatcttatacaagtggaaacatactatacacattataagagcacagtataatttttatgtaatataatttgaagttaattccatattggatagtttcttcattatatgtgtaagtatatgtaatatatcatatgtatctatgattgtgtatttcattgaatgaatgcactcaaacgtgttcagcaatcagcacagaggttaaacattgactctagtactagactgtgaaggttcaaatcctgctttcaccacctgccatctttgtaaccttgaacaagttatgtaagtactcaatgcttcaattccctcatctttaaaatcaatgtaacagttataagattcttaccacataaggttgtgtgtggtgttttgagaatgtaatgaatgaacatatccaaagccacattgtagagtgcttagcacttgcaaagcataatgtcagtgtgagttgtcatttccatcatcatttttaacatgtttaattgcaacccctattgatggacgtacggacattttcaatattttttactacaaacgttgttatacattgtttttctgttgttgttgttgttgttgttggagatggagtcttgctctatcacccaggctggagtgcagtggtgtgatctcggctcactgcaacctccacctcccgggttcaagtgattctctgcctcagcctcccgagtagctgggattacaggtgcttgccaccatgcccagctaatttttgtatttttagtagagacagggtttcaccatcttggccaggctggtcttgaactcctgaactcatgagtcacccttctcagcctcccaaagtgctgggattgcaagcgtgtttcagtgaatagccatgtgcccagctgtttctcacatgcacccttataactgtgggataaatctctgaaggtgaaactgctatgtcaaagtatatatgcatttataattttaacagatattgccaaattgaacccatatattttagacatgctaccaccaatgcatgagagtacttgtttccctaaacccctctctaatagagtatattatcaaacttttgggtctttggcaatccaatgggtgaaaaatgacattttgggctgggtgtggtggctcacgcctgtaatctcaccactttgggaggctgaggcaggcgaatccctgaggccatgagttcgagacctgcctggccaacatggtgaaaccctgtgtttactaaaaatacaaaaaaaaaaaaaaagccaggcatggtggtgcacacctataattccagctacttgggaggctgaggcatgagaatcacttaattgcttgaacctgggagacagaggttgcagtgagccaagatagtgccattgcactccagactgggcaacagagcaagactccatctcaaaaaaaaaaaaaggaagagagacaattatatttttttccacacaagcatttaaaatctaattcaaaaatctattctgaacttactgaatcccaagaataattaggagaggaaaagaaataatgtttaaataaattctatctgcctgttactatagaacatgaagaatgggttctgtgttcctcttatgaatttctttttaaaacccttcaaagtaggtattttcatgcccttttagacataacataacgtataattcagagttgaattaattttcccaaaatcacacagcaaatatatagactacaattagaaagtgggtaagtctcattcttaaacatatacttttgcattatagtcacatgaaaccactgagcgtgttcatgtgtgtgtgtgtgtgtgtgtgagagagagagagagagagagagagagaaagcccaagagtgagagtttgtcttgaggagaagtgtttaaaaggaatatataaatcaaggatgcactatagtatcaccaaagtaacagtgtgaacttgaacaatttaacctcttagagccacgattgctccatctatacaatagaataataataataaacctacattatacaatttccggagattaaatgaggataaagagtacttttgaaattctaaagttccatgaaaatgttagctttgattacatatggttcagcaattgggtctccttattttttgagatctaccttttttttttgtattatctgtagcttgctaaaataacataccagatgtttttgttttcaaattttaaaaatccagatcatactgatttgttgccatggtatagtagtcagagaatcttgctctgggcagttacaatattttggagattgttttacataatagcaacaataacaggaacaatgataactgctaacttgtttacatttacaaaatgtcaaatactattctagattattcaattgaatcatcacaacaacgctatgaggtagttactgttatattgttttgatttccctgatggagacttgacacaaagagagactaagtaattcactcctgtcacacacagctaaaaagtggcagagctgagtgttttgccccaggtagtccagttctagaactgtactcttttccactatgctataccatcttcctaatactatctgtacaagaaattttctcctaatgaaatgtattgctgtaccctatataagctttagctctaaaattgcagagcaggaagcaggtggataaagctaattgctattctattaccctacaatagaaatttcagtggactaactctaatatttaaataacccactgttaataaactggcatggtgcaattgcatgtttcccagtgagatcagatctagtccaatgtctcagcagatataggaattccttttctatcaccccagacaggtggatctctactcatgtatcttcagagaaatggataccctacaaagcagcacattccattttcaacagctctagatattattttatttatttattttagatgaagttctgctgtgttgtccaagctggtctcaaacccctgggctcaagcaatcctcctgcctcagcctcccaagtagctggaattatagttgtgtgccactgcatctagctccagattttagaagttaattcttacacagggttttctggagggacagaactaataggattgatgtatatatgaaggggagtttgttaggagaattggctcacatgatcacaaggtgaagtcccacaataggccatctgcaagctgagtagcaagaaagccagttcgattcccagaacctcaaaattagggaagccagcggtgcagccttcagtctgtggccgaaggcccgagagcccgtggcaaattactggtgtaagtgcaagggtccaaaagctgaaaaacttggaatctgatgttcaagggcaggaagcatccggcataggagaaagatgaagactagaagactgcgcaattctagaccttccacgttctcctgcctgctttatcctagccacgctggcagctgattaaatggtgcctacccagaatgagggtggttctgtctttcccagccctctgactcaaatgttaatctcctttggcaacaccctcacagacacactcaggtacaatactttgcatacttcagtcaagtagacagtcaatattaatcaccacattctccaacgctttctcatacaggttctatttctccactatgaacagtgagattttttttctggtatacttgataggccttcaaatgttccaagaaaacaatcatgcttttcctaagtcttctctttttaaatactcccattacctttccaaaccttttgttcagctgttgggaccatcaacatcctggtcacacctctatggatgaagtctaatttgtcaactactctcttaaatggtggtgtcatgaattgatcacagtgctctggatgtgctctgactagctatgactgctcctggatcgccgtttcctttaatctatacactatgtgtcttcctaatacagagagtatgttgtttgcctatatatcataacaaattgaaaatgcatttataacttataaagtatatattactaggtgctagaatttacactattatcctaatatacagaagctgggaaaagtaatgccatagagttgatttatgtgtgtaaatgtctaagtgacttaaatattgatttttctccttcaactgcagatcaaacttcccaaacactaaagcttccttattttaaaacaaatgcatttgtggttcaccagtctgcagtacagtaagctttttataggtaagctcaaatcacagaaaagctcaaatagatacatctcctttagcctatttttaggactgataaagctaagaacagagaaaccaataaagacatattttaatgatggcagggtatctcatggggtagtacaaatttatcccagttttttatgccttctctatgtgtaatacattgaagtgatatatggtgttgaatgtgattaaaattcagcagatacttatgcaagatctactatctataagatgcttatgcaaaattccatagggaaacattaagacgtgaataaaatctgaattgggccatcactatgatctctccccaaaacgtgggattttcaagtgcatttagaattatgaaataaaccactaggtttttagtgtgaaatgtttacagtattttaattttgaaaactatacttattaaaacagtatgacaacatttattgaatacatgttatgtgctaggtaccaagtggggagttttatgtttattttctcatttcatcctaagagcaaacttcggaggtaggtgtgattcgtctcattttagtgaaaattcactgatgctctgaaagcaaaattaactttcccaagggccttgtagtgcttaaaggcagaatcaaaatccacaaccagctctggaaaatctccagaaatgagcttaattttttgtgtgatttatatatgactccaatattaacagacatgtcaaacaactaacacaaccctttacctgtttattttggaagaagacacttaaaatgtattttattaccctgttgattctcctctggagtgtgacttagtatccattgcacctttgggattcttatcttctaaaattcacaaccactttctactgctgtaagaaagaatcacctgcagagttcacgaatgagggaagagtgaaaagggaatagtggcagatcaataccacttggcatcacatcaaaatagtattccaaggttggtgttctggcttctgcttttctgggaaatacgttgtctgctatttcaaaatgccctccatctgaataatgtaacctgaaattcattcaactcatatttagcactttaggccatatccagggttgtggaaggtgtacgtaagcaatgaggattgcctacaaggcaagatgagaactctgttttctatactttctattgttcctccctttgcaacagaagtagaaagggccataccatagccatctactgtccaacatgatgaatatccttaaagacaaaatctttaagcagtaagtgaaaggttaactacaattctcatttaaaaagaaaattgcattgctgatatctctttgttacataaattttccacaaggattatacattttctttttattcatttgttatctatttgacaatagcaagcctgtttctctttagcttaaaggaacttggattaaaattttttctgttattttaatcagcattgatgttgtatattatgagcgtgtggctttttgttttcttggcagagaccttgaaaaaattttgaaccctagtcaataagaaatctctgtattaatataaaactataacttatggtttatttgattagatcaatgtttaattatggataacatgtattttttgcactgaatatttacacacaaattaatctagcccatagtaaaagtgctaatggaatgtttcatccaaacataagttagtaaatggaaaacaaacagctgttgcaaagaccctgtttttgggtctgggcctaacagcacgaagcacttcagagaatttcaccactaccatttactcacatctgttgagattgtactatttcaactcaagatttgatcagtgtatgtcataaagtaacaagtagtacgctaagtcagaaaacttaaaggaaacattaaatactcatttcctatatggaatgttgcctttctaagcacatcatcttcttctatgtgatgttttgcaaatctattcataggagatttatattttcaagtgtgctcaaatggatctgtgttggggaaagatacgtgaaataagaaaataaaagctaatccatttgttttaaaattttgtctgcctaccacattttgttggacttcttgttatatgagaactcctaattgtctggttttcaattgcagccaaaagcattcttacctgatcaaactcttcaaattctatttactttgaattatagctgagtacatggaaagtataattgggccttactttgttacacagcagacaaaacatatgctcaagataggtcagtgctattccagtgaataaacattttaacaaaaatttgtatgagaaattcatgttggcctctcattcctctctatatgcctttcacagttactctttttccccttgccaatcaaaacactataatgaatatctcttggccttaacgataagaaacactgtatataaatattgtctaggctgtattttatgagaatgtggagttatatgaaatgtaggaagaaaaaatatgagtgagtaatcctgtgagcagtggacgggctgagcttctaggacactgataagcaatcagtgttagttacacttgaggcagtatctctggtggtctgttccagaactatgtccttgactctgtcacattcatacttttcatcactactttttatacttctgcaatttaggtcacccaatacaggttatcttatcaggttaaactgattgtagtggtcacattgaaaaagaaaaaaaaaatcccaaattcaggacttttcccaaccagttctaattaatgcacgtgtgaaaggacatagttattgtgaaaagaaatgctatcaaaacagtctaatggctacaagaagaaaaagaaaagaagaagaagaaggaggaggaagaggagaaggagatgaagaagaaagctaaggagaagatgggtaacaggaaaaaaagagggcaggaaaagcagataggaaggaaaaaaaaggtggaagagagaaatgaatgcaggcaggcaggatgttttcctcgaggttttttatttatatcccctggactgcataactcagtttattcccttctaaaccaacttttctagaatgtgttgtctctgttcgacacctacaactctggttcattttctatgcattaaggatgatgtaactttaaaacctctcatgtaaattctgcctgttttctaattctacaatcctcttgtttatgttctattctaataattatcgagcttttaaagaagagaaatctgttcttaactcaaatttatacatacactgaaggaaataacaaaaccttgaagtaaaacactgtttctatgataaaagagagctctacaaatagatgcatgaataaacacttctatgggagggataccttttcagagtttaaggctcgcgggctttgggatctaagaagatgaatcgcttgccctgtttgtgatcctaaatggaaattgacagatatgtttaatttatcctgctcagtattataaagcctttttctcatttgatttttgtgtatccctcctgaaatatttgctctggtaagcaaaagcaaatattaggttttacactccatttagtgaaataacagtgatgataatctgacatcagagaaccaaatgttccaggcttatttcatgaaaaggatttcctctccagaaacattatcctcaataggttatcccatccttcattcctcaattcatatttcttgagattgagagggaaaaaaaaagaggccagaccacaagtagcctactgctaaattcttttatgaagcttagttttatgaattaccttttagccttctccagtcatgtgggaaaactttcctgcctcattaaatctttaatgcaatgtgcaccatgcacactgtattgttatttgtgacattaggttatatattgcatagtaactataatattacttgcaaacaagctggtttttccccctgaaggtagaattaaaacaggtactcatgggaaacagctacttgtgttcttcttttcttaatggggtgaagctgaagaacaggaaagtgaatggcttagcctagaaccatctccaggaatggaggtaaattttttcctgcagtgccttctcaatttgatatctgaatctccctgaagagaatttgccttagtagatatggagaaagagggaaaaggccaagcctttggagacccttatgaaatggaatgaaccgctctcactaaattcactttctctttgtattgaaaagagatataattttcatccctagtaaatatagtcgaatccatccagtaatataagaattgcctcaaagtgaactaaaattgcacttactcctacctgtggaaaaccatatttctctagccaagagaacaatgacagattagttcctaaatagcaggagaaaatgaaatgttctattggctgaacacacagtgctctgtaaaatcagagaaatcaatattgtccccaaaatgaactaatttgaaagtctcaaagatgttcaattttatgaaagactcgtaaaattaataaatgagtctgcaaagtccaaaaatgtggaaaattacagttatttgcagtacgtataacttaccaagaccacttatattttgttagaatttttcaatgaatgttaatggatgaatttttttatatagagttctccctgtttggaatcttttagttcccttatttactgtggttgccactgactctgcatcaggctttggaaatatcactaaaaaactgttttttctttagtcttcttactagtcaaatatcagctaaacaaacaaagaaaataagtgtttgaatggtcagagaactataagaatgagaattctggcaggaaaattcatttttaaaaatccaagtaacagaatggataaatataaaaagaggctagatcagacatacccagacattctcagttcagaatgttcatagcgtattcataattttttcatagtgcctccttgaccaacagaaataagccacagttctatttcttaagtagttagtgccaaacaacttaataaatattcatgttttaacaacctagcaattgtttaaaaagaaaatggacagaaaataataatttttttcataaataaccagaatcacttactgatgggatgtggtacctttggggtagtatataccttctcaaacttgagtatcagattggataatgctatccttatttccttttccacattgacttttgtgcagttcttgcttttaattacagtctcttctgaaaacctttcttaataaagatataaagtggcctaaagtacaagtaagcagaaacatggctcaaaatgttgagaacattcttaagtggaatatagcatgttctaaggtttcaacttgtgaaccaccttgaattagttattgcagtgcccaacagatatttagtattgctgtgtgtccttcaaatgtttacaatattccactgtgcctttgtgagttcactgcagcaccctggggcacctctacacacagtttgtgaacacaggggtagatagatcctagaggcattgaaactacacggaaacttgaatgacgttagggatcccagagccactggggaatcttcattagggaagtgcaacaacatatgaaatagctcattaaactttccctatcaaaaaaactgaagtcagagagatgaattcagatgcttgatgagaacctacttggtaatggatttgaaggagagagtaaacgttaggatactgaagggattctaagagagtgcagaagcgagggcaaggaggcacaaaacgaaggcggcacctggaacatggaggagtggacagatggagaagaggcagagaattctttatctaaagcaagaggaaagggcaacgtatactcagaatattctcaaagctttttccctgaataatagcatccttcagaaaagaagtcttgtaactgactcattgcaaagtctcttacacaatggtatgtactctttggggaagacacaactggaaacaacaccaggaaaagcttgattttacagcttatggaaagattgtggagttgaaggaaaaatagaaggaaagaaattttaaaaagaataagttaatattcctaggggtgcatcctctaaattgcagagtgatatcttaagcaatccttttaagaattacttaagagcctgagcgtggtggctcacacctgtaatcccagcactttgggagacggaggtgagtagattgcttgaggttaggagttcaagaccagcctggccaacatggcgaaatcccatctctacaaaaaatacaaaaaattatgcagtcatgatggcacacacctgtagtcccagatactcgggaggctgaggcacaagaactgcttaagcctgggaggaggaggttgcagtgagctaagatggtgccactccacatcagcctgaatgacagagcaagactctaggtcaaaaaataaagaaagacagaattacttaagtaagtacttgactaactggttatataaatgtgatcataaacgcatacctttagggtaaatgaaaaagacattgattctaatattgtgtaaatgggtaactgtggcttgggaaaaaaacatctagtaacagtatcctgaaaattgtttaaatggtccgtgtttcacacaacttaaatggaagtaaaacagcttcgctcatgacaattttcaggcaattcaaaatacgttgtaataatggcaaacatgagtatcagagatacacaaaagagtttagaaaaaaatcattttatgaaatatgagctaaaacaatgttttactattatcgctattattattagccctcagcagaatagggtaaattatttctattccttagttcatgttttatattatcgctgacctgcatgaggagcccctatttttctgcgtatttatttgttcctcttttcccccttcccacctctaattcctctctcatagtattttagtttatgtcagggatccccaactcccgggctatacaggtctgtggcctgttaagaattgggcggcacaacaggaggtaagcatcaggcaagtgagcatcactgcctgagctctaccgcctgtcagatcagcggtggtattagattctcacaggagcaggaaccttattgtgaactgcgcatgcgagggatctaggctgcacgctccttatgagaatctaatgcccgatgatctgatgtggaacagttttatcccaaaacccctcctctgtgtccatggaaaaattgtcttccacgaaacccatgcctgatgccaaaaaggtggggagtgctgcaagtttccattatatgtgactttattataaataggtatgaaaaacacattagcaaatcaagtatcataggtgatctttttctacttcatctatagtcgtaacagctttgacattcaaattatacacactttgactctttttattgacaaaatggaaaattatccttaattcaaaatgtattttatttgagcatatgtggtgatttcatatattaagttgatatttttctttcctttttagagaagccatattcaagaaaaatagcatgtaattcaaattttaaataatcaaaatagatttgaaagctcaaaattttggaacattataggcctatgtcccaatattcttcccaaacctcctttcaaacgtatttattaatttagaaaattctaaatagttcagtccttgtttgaaatatatacaacataaaacttttttttctcctgcctttctagaatccttttattgagaaaatgtgtagctgatctgaagaagcatgctgtgtgaaattttgaatgtttatcttaatagaacctaaaatcttccacataggttcacccctcattactcacaataatgccaagtgctgtagtccaggcagatatttattattttatatgtgaaaagacattcgaataaggccatttctcagtggattaggggaatcagagttttctgaatttaagttccttatagagccccatgtaatgagctcttagaagacattgcagagctgcaatttaaaatcctgtttaatcagccgtagcgagctatgtgccattctctgtggaacactaagaggaatcagggttcttcctcctccatccagtacattcccaaccaggaattgctgtctggtcagggttggacgtgaaaggccatagagagccaaccctgcgaagccaagtctctgcatgtcagcacagagcaagcagcagaatacagatcatcagctttgttttatgaatatctctatttacagtgctggagtggaattttaaaaaaaggattgcagcatttgcattgaatctgtcactcacagcttcaattttgattcctgtcctataaatgatcttgctttcctatttttttctgaatttctacaaggtgactgtcaatgtcagaaaatgtaaacctcaagtgtacattgcatggggcttggcatgtatattagaaagaaagaagtttgcttaatgaaaagaggataatatttattcaaactaagcctatttaattgcacagaggaaagtataccttctttgcctgttttgtttgaattttaatataaaataaaatttgctgctaaccttttgtttttctttgaccaataacatttctcagcttagtgtatgggctatgtaaagtgcctgtcaaatggagggatgtctttgttgaaagaatccagactcacagaaagtgagtgactttctggtcagatggttagaactctcccaattttgacaaagatcgttctctgtttgggatttgtaaagctcaaactgtagactaagatgatgacaggaggatctgctgtttggcttcatggaacttaacctatttcagcaagcctgcaatactggggaaaataatacatatatttatgtttatgtcaggcttgcagttgatgggtaaggttcataaaaggttactcctaaataaatgcctatcattcccactccgtactccagtgatttctgcgtcttgcaaatactgccctatagaacaataaaattcgtatacaacagtaagtaaaatatgatttaatagcccatctcctatcccgtaatgattatgcatcttctgtcttgtagctcccagcagtaggaggacagttgacatttaccatatcatatgaccttgaagaagaggaagaagatacagaacgtgttctccagcttatgattatcttagaggtagagtactgagagcatgttcacccgtgttacttcctgatgttacttaaggttaccagtactgtattttttacctgcctggtttgacactgacttacaggactactaaaaaaaaatataccttaggagatttttgtgccactcttttgtttcactctgagacatatctagaagattgagtatatttgttgggtttgaatgataaaggagaactttagaccagacttgaaattaaatttcaaacataaggaccatatttccaaaatttaaatattatgaaagtgtttaggtacatgctaatttacatggttgtgtttttcctgttttctcttgcttccagatagattttattgtctactcccttgtttatattagataaaataaaatgaaacaggaaacttgtttatttagctatagttaaatcttgacttcagaatcctgttttaggtaagaaaggtacaggagaaactgctttcaagatttgaagggccataggcaacttcaaaatgctcaaagcctgaagtttccttagaggctctctgccaccctttcttatcatatccattctttccaataatgtatctcctccccttgacactgatacgtattcagaggcacacacatacatgcatgttcattattccaaatgggtagatgttaatttagcaccaggctctgttgtttcctgtcttgaaactttcatgcatgtgaatctatgacaaaatgaaaaattcttttctcaaaatggacattttccagtattggatgaagtggtctgctctctctctttctgtctctctctttctctctctctctgtctctctctttctctctctctctctctctctctctctctctctctctatatatatatatatatatatatatatatggcaactagatgtatactttggaattcctttaaggtgaaaagagttctctaaatgtaaagtgttgagtgaaattatttagcattcatgtgaatgaactaagacaagaaggattacctaagtgtcataggtcattcaatatactccttagatgccattgtcctattttgagaattagactgcagtcttttttgttgtttgttttttcccatgtagtaagttcctttaaaataatagcttaattcagttttaagtttctttccctattgttctacacaacccacatccatctacagtttgaaatatgtaactttcgtgcacttttttcaattcaaggtgtttgtaatcacatatatgtttatgagttgtcaggtagctattattttagttaacagggaactaaggtcatgccaaaccaagaagcatatgcttcataatgcatttggctaaggctaatattgaaattgcattgccttcccttcatgtataccacaaatatattccctgaatgacagggaaagccaacctgaaaataaaagtctactaaggccgggtgtggtggctcatgtctgtaatcctagcactttgggaggctgaggcaggtggatcacctgatgtcaggagtttgagaccagactggccaacatggcaaaacccccgcctcttctacaaatgcaaaaaattagccaggcttggtggcaggcgcctgtaatctcagctattatggaggctgaggcatgagaatcgcttgaacctgggaggcacaggtggcagcgagccgagatcgcgccgttgcactccagcctgggggatagagcgagactctgtctccaaaaaaaaataaataaataaaaaataaacataaatttttaaagttaaaagtctattgagggtggaggatacaaatatagatatgtttgacacttttgtaccctcttttcagttttactcttttttatttcttttttttccccctttagggtaatgacttgagcatcagcacagcccaagatgaggtgtacctgcacccatctgaagaacatactaatgtattgttacttaaagaagaatcatttaccatacatggcacacattttccagtccgtagaaaggaatttatgacagtgcttgcgaatttgaagagagtcctcctacaaatcacatacagctttgggatggatgccatcttcaggtaaaatcaagaactgcagctccaacgttcacacatttactttggggccaaggtgcaggagccgccccaggagtgaattttttaaggcacctaggatttgctgtcttcaaagagcagataagaacggagccctagttttctgaaagatttttctcttaaacctttacagttttaaatatgcagaataaatttgtctcggtttttattattattgatgattctttcacaattgtcagaacatgtgatcaataacgattcctatattgagaaatgttatattggaaaataaagtctcctttatgatggctcatagcgtgggaagctaaaaagatataaattccagggcacccctatttggaaagtggtttttaaaatatttccttccagtagttgttaactagtttctggcttaatagtatatagattgtaataagaaaagtaagtcttttcatttaagtgaccacccatctcactataaaacactttaagactataacagccatatggtataaaggaaagaatatgaactttggagccaaactgaatagaaattcaataagctttattgcttattttatgtgtgacctttggcaagtgattaagccttgaggaacgtttcttttcagtgtaaagtggatatagtaatgcctacttttcagggtctttgttaacatgatatgtgatcattaggaaagtactcatcacctagaacactttcagtttttttcttgttctccccgccccctttttttaaaagagtgaactacctgacttgaaccaaatatgctcgggtctgattaactgctgtaaggcggctttgttttttttatttttaaaacaatgacatttttatctgacagaattttaacttcaactgtgtctgaatgagctctttacgcttctcgttttctactctaataataaataacacaaggtgtcataggaacttccttctaaatcaggttaagttagacattcaaatgtgaccccagcctgacaacccggtatacctttaatgaaagcaatgtctccaatattggagtttttattgctgacaccaccacctctcacctccctgtccctcatcatttccctgtgctgcctagtttgcctttcactggtaatatttcaacttagtctaatcatcattaccatttcccaaaggagagaactgcagaatcataaacagaaccattgccaaacaatgtacctcttttgcataggcaattcttctagaagctgggttaaaatgccatggagatgagaagcagcacttaggaattaattatgtttttcacatttagcaaatagaggttgtcatgatgtttaaacagtacaaagaaatgagtcctccagctttcaaaatgaatgacaaccaaattgacaaaaaaagtgtctggggggcttatatatttttgtcagcattgcttttcaggctagttaatacaaagacatttccccctgatttatgttggacagtttcagtgtctacccgtcttaaaatcactggtttcatttgcagtcttctgaggtttcgccatacaggaggaatgcattcacagcgcggctctgtgaaatgacacaagagctaatccaagtaggtggctactttctgtcacctacattacctaaagcactgtggttcaataagtaaaagccaatgtcaaatttgaaactcctacccactcaggtgagctgaaagtcggcatgaatctggagtcagtcagtaagcttgttatattttatctttgatctactagtagattgagtcatatttgtaaaacatcacttgaattgatttcaacttgtcttgcacagtaggctttcgacttggtatactgtttgtgtacaagcacaagtaaattgaagctcaacaaaaattcatattcagacttatttacagtggatttacttccatggcagttctttcagcaaatgggcttaggttcctccagttagttatatgattagatggaattgtataacagaaggagaactggactgcgggtcaagaattttgacttttgttttcaactcagctatttaatagttgtaaacataagtatggctttgacctctttggacttcaatcacttcatctgtaaaataaggaggaggacaattgctctgccagcttcaaaaagtcaccgcaagaattgaattagagagctgcaaaagcacttggctagtggtaacccagcacacaaatatgaagcatttctatcttatctacttcatcccaaaggatcacattttctccaaataccattaagacttagagacctctaaagaaaggcacatactggcatttccatacatatgacagttcttactatcatttttatccagaatgctgagacccattagataaaattaatttattttcttctcgctgtcttcactaggaagatgaaggcacaagtagaaaactcttcattcttcttttaagaatataagagaaatcaacctaactgaactgtgcatctttcacctttaaattatccaagacttggatttagtaacatccttggtctttaaatcaagaaaggcttttatgaagcacctatattagatatagaactctgcacaaagtgtattttcctctaactttacagtagacattagtagagttcaccaaatttccaatctcatctataggggatattgcatttctctaatcctggagggtagatgtgtcacatgacttggtttagccaatgaaatgtggtagaaatgatgtatttttttttttcctgaggtaaacattgaatttccaatgtgagactctctgcagcttactcagcaatcagaagattaaaaaacagcctggggccgggcacggtggctcatgcctgtaatcccagcaatttgggaggctgaggcaggcagatcacgaggtcagttgttcgagaccagcctgaccaacatggtgaaaccccatctctactaaaaataccaaaattagccagacatggtggcacgtgtcagtaatcccagctactcaggaggctgaggcagtagaatcacttgaacccgggatgtggaggttgcagtgagccgagatcgcgccattgcactccagcctgggtgacagagggagactctgtctcaaaaaaaaaaaaaaaaaaaaaaaaaaaaaagcctggaatactgatttagcacacagaggtcagctgccctaacagtcacccaggcctgtagaggattttacatgagtaagcctttgttttctgttaagccattgagattttggagttgttaccacagcataaccgagtccatcgtgacttcatcacgatataactcatgagtattgcttgaaaataaatacagaatcttttcaaggcaagatatttttacacaacttttagtgtaaattttgcggtttgggatcaaaaaagattatacagaatttatataataaataatctagaaaaattcctttgtaaacaaaggagtctttgataatcatagaaatagtattgataggtacacagtatacctctgccttctgaagttaatgatttgggtaactacattttgaagacattttactgataacactaggacttaaaaagatttttgcagctcacttggcatccggccattggtaagaggtgcagccaacattttaccctacgtttccttcccattatctttgactacctcccaatgctattccataagtgttggattcgttcagtctgcaaatatttactgagcaccttccatgattatctctgtaaatctcagttcctcttgtatacaatggcagaaacaatgtctaaatttcaattggcaattaagtgaaaacataatgtatgttaagcacctgaaatagtatctaacatatgttgggaggcaatgcagggtaacaaggagatctttggttttggagtcatgcttgggtttgaatctatgctgcaccctttgctaatggtattatgttggacaaggctctttactcctctgagcctcagattcttcatttgtaaatgtgaatagacatgggttgttacattgtttattgatacttaaatgaaatgtctttccagcctgtatcatagtacacagaaaatagtagacagtaagtagtaactattaaaaagcagtcattctaggctaggctataaggatacaaaggtggacaaatgatcattcagttcaaagaaggcattgtacagtagagaagacagatatacatatacatactgtacatttatgataatataaatagtgcagaagaagtgtgcacaatgcatataaatagtgcagaagaagtgtgcgcagtgcatactggtagaactaagaaggaagcaatgaattcttgtgttagcatttaatacacttttaataaatagctgcaaaagtatcagtttctgtcagttactgctcttactcgatgtgggattgaaaatgtttaaagaaaatatcttgctatatatatataaaaaacaaattatatagcatatatatatatatatatatatatatatatatatatagtgggtagaaaaaagacaattgtaacatcaagggtatttttgttgttttaaagtgtcatgttttgtgctggttgttttagtgtaatatagcatatcttactctggtgggaaatgtagtaaaacaaaaatattgagaacaatctttaaggcagcaccaagacaacgtttctgaaatagttccaatattattcatagtggcttgtataattatgtcctctctcttcatccatcatcttttctgtattttcaaggcataaaaataagagggaagagtcagctaaagcatttgacttagttgacaattctttgatagctcatgcatctctaaaatttagtactatattattgccaacattatgtatttaaatgaatgcagcttgatatcaagagaatgaccatactgaaggggaaaaaaaaataaactgcagccttcttcatgagtaacacttgaaactgttaaacacattaaaatcccatttaacaaatagcagaacctaatgaacattgggattgctcagtgagtactaatgtggaatattactgggaaagatgtttgagtgttgaagtttctcatagctcagaatggttacacagattaaggagaggaatgtctgttgttcaaaagacaaatgaaatttgtcagttcactgaaaatatttttgtttttgtatcttttttaaaactgtttcttaaagtagtcaactgctcattcttctattttgaaatttccagaactctttgtttaagttttgcatgtcaattttatatgagaaattcttggactgtatctagatacagttaatcaatctgctgtttagtaaattgtggtgatctattgtatgataatcaactagtgtatcaaccatgaaatcatctaattctgaaattaaaaggatcagaattataggtttatcaagtgacagtccattaattccaggcagttagatttcacaatacattcaggcgagttctggtctctggcctcaagttctaatgataacagtttccatttatcttctatgtcaaatcaaacaagtaatttgtcttttacttttctgattttattcatctgaaatgtggctagtagtctttattgtatcctttgccatggagtttgttagtcattgtttgtaatagaactgttttccattcatctattcatttattatttaagtatttagtcagttacttttgtatacatttatctgtctatctacccatccgtccacccatccatccatccatccattcatcaattcacccattcgacaaaagtctactgaacatgaacatgtatggagatgatcatcctgcatatatagatggcaagataggtttctgttctcaaggagtagcccataagctcatgccaacataagtactggctttagtaactcttcaaaaccccgttgtgttaaggagacttatcaggcccagaaattctgtttctagatatatatccaaaagaactgaaaataggtattatgtgttcatgaatatgaatagcaatattatttatgatagctcgaaggtagaaacaatccaaatattcatcaactgatgaatgaataaacaaaatgtggcatgtacatgcagtgaacattagtcattaaaaggaatgaaatactgatacatgctgcaatgaagttatctagaataggtaacttcatagcaacaaaagcagattgttagtttacaggggttagaggaagaggggaaaagagaatgactgcctaatggattctgggttttcttttgggctgataaaatgtcttagaattagatatatgtcgtagttgcacaacattgtaaatgtactaaatcacagaattgtacaatttattttttaaattttaaataggtttgaaaattttcatcctaccccaaatgtcaaagttcctctctatgtacaacttgaaatgcttaattttatatgatgtgaatttcatctaaactaatgacaagaaaagtaaatgcctgtgacactgcatttttcattgacagggttcctcagtgaggggggaaaaaagcatttaatgattttcaaatgacacatgtaacctaaacactataggacagtgatatttgcctaatctagaaccttctaccaggttgtccaagatgtgcccctagagaatatagcactcaattaatagtgttggatgagtttatttacaggtaaagataattgccttgtgtttagagggtgccatctggcactcagcagccaggatgattccatccaactgcctatatctggtgatttcagggttaatttccttttctgcttcctgatcatatatgagctcatacatattcaaaagtactgtcaagtgtctaggattagcaaagtgggggtaaaagcaatgaaaattttagaaatctattgctgaaaagcttacaatttggataaagatcatcacttttgaagatatgtttacaccttgtaatgagccttttagctttgctctctggcttgattcccaaattcccagcattgattcccaaatctaacaagttatttggtaattgtgaatcactgatcaacaaaaatctaccatcactcctgagaaaggaactgaaaaatgcaggccatagcgagaatcagttgcttctttcttatggttacaagatgccatatcatatgctataaaatgtctatcggtaatttttaaaactgtgattattatgagtcaatagtagtcatttaattatgtgctcttagagtttatttaaaatttattttcatgcactaaaatgatttggagatacaaatagtgaaaagtatatttcttgtaatgttttgtagtaatttttatttggtttcaacagtcaatgaaaataggttaataaaatgtctagtatttcataataacctactgtgtgttacatattataccaagaagtttatattcatttccttttaaatcaagctcatggtgtatggactattatattatctccattgtatagaagaaaaaattgaggcctagaaagaataagttattttcttctaggccacaaggctggtaaatatcagagacaggatataaatcttggtctatttgactcacaaaactgtattcttaataattaagcttttaagatgtccttttacacaaaaataggaaaagcaagtaagataccaataacatttatttaaaatgtgaatgcatagtaagaaaagaaatatgtgtgtgacagcatttttttccaattttccatttggccaaaccagcttttctctaaaataatgagttatgccaaatcactctgctaaaatcaccagattgtacaaaagtaccaataaaatgaaggccatagatacagagaacaatggatttaatttaggccaaaaacaaattccagagatcattctaagtcagtcaactgagcactttgagaaagtttagcttataccaactacaaacaagcagatttatctctaagaaaaagaaaacaaaattgtttccatcttttatttcaatttaaaagctaagatggaatattaatattgcctacttctgctttccttgtttaagcactaaaagaaatcaagcagtcattggaatgttttcttttttaaaagaccctttaactatatgattttaaaaatgtctgtctccaaaaaatgaaaatcaaaacacatagccaagagccaagagacgaggaagaacattctcatatcttttcagcatttggaggtggtggtgattgtgagcactttagactgagccaacttgacctaatatgacaaaggaccagagcttttggttatggtattcatcagcttcctttctcagcatgcataattggcttatatttatgtcattgttgctgtacgattcctacagctgtataatacctaagaactttacttattcaccatctcttttttcctctgccataggttgagctctgttaaccttgaatccgctgtctcctatcctactgatggaagcattgcagcagctgtagaagtgtgtcagtgcccaccagggtatactggctcctcttgtgaagtaagcttgcaagaatgtatccttagtgctttcaaagttccctcaacattgctttcaataacctattctaataagagctgttttttttctatcaataattacacaaataatgtgtatcacttaaaaacaaaacttgaatatctaccaaaagctgtggctttcaattagagtattaaccacataatttcattttgtaactctttctctctgagatattttgcctataactgaaaatctgatgtttctgtctttgctacatatttgatctattgtatgctggatggtagcagaatagcacttcaaaatattttctcttcattttcatcataatgttatccaaaatttagcactctattttttttttacttttctctcattttttaattctgtatcacacttttcctctacttcatttctaagaatacaaccaaatcacaatcatctgaagcatataatcttcagaatgtcaagaatataatatatggaaaaaataccttgatatagaaaactgcctacaggtctttgatttgtttagcacctaatgtttgagatatttattgttgtctcaatatcctagatttataataagattaatggttcttacttaataccgcagtgtgtcatcctaaggtaacaatttttatttgcttctgtgtattttcttttacacagaaaactggtgtgaaactggttttacttgaaacctggtcaaaaaatgtgaacactatttccttgacagagcgcatggctagcagataaataggagcttagtttctttaaaatggtgcctttaaggaatcatttgagtgtactgagatgttccacttcagaacactacctcattatgccatttatagaaatactctaggcattgctttgtcagttctctcgtacttttaaaataatgcatacatctagagatacgcattatagtcatattcatgacagctgtgtttcctttaactgagctcagattcacctttctagaaataaaactagatataacttatagaagtacttgcttttccaaaattcatgtagatgagagaaaaataattatggatatcaattagctatgtcaacccaaatttgattttacatataaaatacacaatgtatttgatgaaacaagagccttttgctcttgattccaaactatttgaacttttaagatcctctctcaattggcataataaataacttaattctactcttgttttaaggcttgtttccacatactttgttctcatcctttgcattatcttttatacaaattctaagtgcccactgaatataaaattacttgaatattacaattgcttaattggctatgcttttagtctcttccttctctccttcaaaaatattttcaatacattctagatatgtttgataaattctgtaaatttacctgtataaattattaataagtacatacaacataatccctgtcctatctgtttagggagacaataaatatctatgaaaaatgggatctcagcactgtataattaagggagaggtatgtgctacagaacatacatgcaataatcattcaaagggatgagctactgcagtggagagagatgcaaagtgtcctggagtggagaaatcttaaattggatgctaaataatggtaacagatagatagaagcatttgagtgtgaaaaaaaaaggagagataataaaagcttcctgtatctgtcacacaataattgtttgataaataaaattactttgtaatccataaaagaacttaattgaatcaagagacaatgaattttggaactttggattttctctctgacttcttcatttcttctactctctaaaattcattttttccttatcaaaactttctgtccctaaattcactattattcagtcctatcctttcattatttcatttgcttttcaattaagtgtagtttgtaaggccagtcattctagccttgttatcactaatatcctgggatcccttaaaagctgagtaaacgccaaagaccattaatgtcttaattccagcttgctgagaacctctggccaaaaaaggatcaaatgactccattgtagacattctcttttacttcatttggggccatagtgttgattcaggatcttttttctcatttctacttgacttcttgtgaagtgttctgcagttaaatctttcaaaaattttcttactttcatagtgctgtcatcatagatttcacttgacagatgagacaggggatatactattaaaaagagtgttatgcaatctcagtttcttcttccatgaaatgaaaataatattaaccacctcatagaattgtttgtttgttcgtactttcatttagctgactagtatttgatgagcgtgtattttgagacaaacaagaccctacacagggaaaatagtgccattaacaatacagatattgtccctgtccccaaggacgttgcactgagtggtggcattaacgatatgccagaaagcaaatagaaataaacgtgacaaattctatgaaggaaataaacagggtgaaataaacagggttctatgataaagttactgcaagtggttgtatgaaggttagaaagtctactttgtaaaagtttgtcaggaaaggcttcctgaggtggtgacagctaaatcgagtgttgaagaatgagagggacaacgatgtaaaaccagctgctaaggaagcagcatagatcgtggagtctgtaaggactggaaagaaggagcgtggctggagccttgtaagcaaggggaaaagtgggacaagaagtgattggaaaagcaaggccatgaggagatttgcacatatgataagaaatgagcattttattctcatggcatggaacatcattacaagcctttcagcagagtagtggagtagtgtaatctgatttacatttttgggttttggggtgttttttgttgtttgagacagggtcttgctctgtcacctaggctggagtgcagtgatgctgtcatagcttgctgcagcctcaaactcctgagctcaagtgatcctcctgcctcagcctcctgagtagctgggactacaggtgtataccaccatgcccagctatttttttttgtttgttttaatagagacaagatctcaatatgttgcacaggctgatctcgaactcctgagctcaagcaatcctcccacctcagcctcccaaagttctggggttacaggcatgggccaacgcacccagcctgagttacatttttttgaagaaggcattatggctacagtaggaagaatgtgtcttaggagggcatgaataataggaaggagaagggttaatatgtagttgcagtggaacacagcaatgacagtagttgctgttaggatcatggcagggaatataaaaagagttagcatattctatatatattttgatagtagaacaaataggacttactgattcgagactgtatgtcaggggagagattaaagaaataaagagtttaagaatgagtcatagatgaccagtttgaatgattgatcagttggttgtggtgtcatttactgagctgaggaatagttggtgtgtgtgggggggtgggggcatggaatccatagtccagtttagaaattttcgatttgaaaacgctgtgaagtgtaaatgtcaatgtgtatttataatattcaggtcttaaattcagcatgtctgtctggtctagagatatgtttttggaaggcgtcataaactatggaactgaataaaattacccaggagaaagtgcaattgatttaaaaaagagagaaaaatagcccagcccaagccctgaggagctcctgacgttaagaagcagggtcaaagcagaggagacagcaaagaaatatgctagaaatttgggaagtgtgatgtcatgaagttgagaaaagaaattgtgggaggaaaaggagtcagctaggcccaaggctgatgaaaggttggataaaatgcaattgcagaattgtccatcgaatttggctgcatggaatttggtgacaaggacaagagcagttttaattgagaggtggtgacacaaaacagattagaatggaatgaagtgtgaaaaagaggtgaggaatataatacttgttaagagtagtgttactgaaaagaaaaacatagatgactagaaaagttatatgaggctaagaggacagttttgtcatttgtgttttgtttatttttgatggagacactagatcatatttttttgtgctgatagtaatgacccagtagaagggaaagttattactaatccatcagagagagtgaatattgagaagataacagatgctggaatcagatgacaagtggagtaatatttctttaggaggaaggaccccacattccccacatcacttgtttggaatgggaatatggcaacaaggtttggagatatatgcttagatctctggacttgttagtgcaaaggcagctttaatttttttctgtgagtaataagttaaaatcactggctaaaagagaggtgtaaggagttgggaagtttgaagaaagaagacgtggtatgagtactgcatttgcagagtattaaaacaaaacaaaaaaacttattaaggaaaacttcatgaatatctgtctgaaaacagtagattagttctctcccttttctcaacatccttaatttctacccccttatgaatatgtagcttcaccagcttttaaaaatgtatattacagaaggaaatcacttctataatgaatctagggaggcaaaaaatgtaatggggagaaatgggaagggatttaattgggagaaatggaaacggaacaggatagaaatttgacaattttgggttggttgtgggggttgaaaaatgagaacacatggacacagggaggggaacattatacactggggcctgtcggagggtggggggctaggggaaggatagcattaggagaaatatctaatgtagatgatgggttgatgggttcaggaaaccaccatggcacgtgtatacctatgtaacaaacctgcacgttctgcacatgtatcccagaacttaaagtataataataattttgaaaacaaatttgacactttttttggtactgttcaaattaaggggaaagttcattttattttattttcagatataaagtatcagtacataaatttttttatgtgttcattattgatgttcaaatttgagagtcctcatatcctgaggcagaaggaacatttccacggagcataacacaattctatatcctttattacttcagtggtttctcttctgttttctttttcaactggaaaagaagggcttttcatgatatatgatgttgtactcgaccatccagaaatatagtaaataacccacaagatgcaatttcactggagggtgatcataagctcttagagggcagcagtatttgcctcatgcttattttgcatctcatccattttgtagtaatccccacagatggaaaacttaattaaggatgatggggaacttagagcaggcactgacacagggaatctaagactaaaataccctgttttaatcagaattcagtttttatataataaagtgtttcacattttaaacaaggaatgaaaaatacaagcaaagttacagaagaatgccataaaataagctatcaagaatgtgagaaataaatcataaactttttgtgtaaatttgagaaagcataataggatggaggaaatttagcatgaaatacatgaattatatatgtgtagaaattagctgtgtatgtggtcaaatataagtgtgggtgctgcctttcttccaaatcatgtcaaagattttctggaaatgatgacgttaagggcaattagtatatgggcaagtgaacacattccagagaatcaaaattgcttgggatgacatcgggtactctcttaggctaagactatatgatgagtccttttatatcagctgccttttttacagtactttttcttctactttcctgtctgtgcttttttctttgagactgtcacatttcaattctttatatctctgctttattttaccatttcagaagaaacaccaagctaatgcttcctctaatctcatacctgccaataacactaaggtcagtgcaaagccccagtgtcaggaggaatagctctgttgcaatgtttcaataatggcaatgctttgacaagcacatttgatgagtttcctacctgttattttctgttatcagaaaacaaacacaaacaaacaaaaacacctttttgttttaatctccaagactgactaaagccttatctttctctcagtcttgttggcctaggcacaggcgagttaacggcactatttttggtggcatctgtgagccatgtcagtgctttggtcatgcggagtcctgtgatgacgtcactggagaatgcctggtaagtgctctcttctttggggatgctgattgacaaggctgaaatcacctcgacagatgctacaattcagctactaccctggggaccttaaacacttgagtcaagaagtgctttgacaaagatctttgtattgaactgaattggaactgagaatgctctttcatatgtgatctccctaatgaatatgaggaagtgtttattcatattaaatcaagaattaaattagaatcagatatatttttataaggcataacttctgattggaagtataactaccatgaatatatatggtttcactttcttccataaatctatgaaaagtacagtgtacttttaaaatagaaaataatttatatccccataatatgaaaagtgtaaaatataacctttatagtaaacataattaagttttcttcatgttgaaaatgaaaacatactacatatttttatttaaaatgttcataatttaactaaatgcatagtgtcatttgtagattaaaaataaaaacaatatgtaatacatattcaccagagctgcttctcctttgcaattaagtctaagctttaaccagaaaataggctttacaaagtgcaaagcactttccatcctgctaagaaaccttaggattggagaattacactgaatagaccattctgattaactcaagggcacattagttttatattgtctgacatggcatgaagcttgaaacaacacttctcctttcattagtcttgcagaaacacaatttaaaatggtgccaattaaggaggatattatactctcatttccctgaagaatttaaggcggattctgttacctgtaattcttaatgttctatctttctcttgctcattttcccccatttctcttctacttaaaagcttctgggaaaaatccaaaatgaaaattcagggcttttgtttcagtgtaatttggcatttaggtttgttgatgctctttcccttttctctatataagattttgtttaattgcattgcattatgaagcatgagagccttaatttgtggatcagtggatttttgaaatgacatttttatgaatagaaagactaagtgattttcattttaattatgccataagtcttttaaaatgtactttgggaaaaatattgggttacctttaaacacttcactaacatgcagtaggaaataatactcagcccaaaactgacatggaattgttttacttaccctaagaagacaaaaataagtatgtcataataccaaactcatgatgttccatatagtcatatttcatgaattcattaggataaaatcaaatcaaattttcatgctgaattcattaggatgaaagcaaattagtccatttgttgatgtgatatttctaaaactagaagccttttttaactaataaaacagtgtcattcagcataattttgagagaaggaagggagagaacagaccctactaatgatgcctagtttactgattttgtttcatgaacagggagataggaggtctccttcaaataacagagcgatcttgaggaaacagtggacatcttgatgataaagacagaatctggtgtttcctgaattttccatcatagctagtaaataggtgatcatgtaggatatactgactttcaagtgccctttctccaaaattgtattgataactaagtgctgatattccattttgagtatatgggttctgatacaatacacaaagaggagaatatttgaatgttgctcatcaagggcattcttactgttcagctgaccctgcattttagcttcttgtttatttttcatggttttaacccagcattaagtagcatggtttttagcatgaaaaataaatttataaatttataaagcttaacttgctttaaaatttgattataaattatctgaaaaatatttttggcaccagaacaaaatctaaacttctgcaatagtgtaggtctatatttaaaagacattttaactcaaagtccatttgaagtaagccaggaagtattcaatgtcacatgggaagatttcatgcttgcttcttctcatagttcttgtggtatgtaatgtgagcaaaattttgtaaagcactttcgtaacaggacacctgtaaaaataaccaatccatcagagtgaagcttccatcttttttttttttttatttccattatataggttgtctgatgcagttttctggtttccactacaaaaatacttgagttttaagatgatttttatttgatgaaacgtgacattagaaaatgtaagaactacatgttatttgtcttttaaatcaataattggaaataaaaaaccctctcaattatgcaagattttcagttgaatgttagaaataccattttcaacatgtttaaggcaaaattaatttttgattcaattttttaaaacccttaagtatttgaagacataattttagttgtatcagtgagataacatgcaaataattttacaaaaaaacaagcaattcttcagtaatagcttagtttagctaaacttaaaaattgaaaggaagtaaaacaaaaatcaaatcggggaaaaaatctttcttcaaatggatccatgttttgcacattaaatcccaatatactgcattattaaggcaactattcatagtgaagctgaccttaatgctatcttttaaaaagttttgttaaaaataaatttgagaaagaattttaaataacttagagaaaagcctgttttcaaatatcaccagttactacagaaatacatatccacatttagttgatgaaattggcacgtgatgtttaaaatttttcaattttctccatgtttaattatgagtcaagcaagcttctcacagatgtaatacagtagtgcattgtccaaaccatcagagtccactgaggccaaaattcatgtctgagctaagaggccatagccccggaggatttctatgattagccacagttcccattaaatcagcaatttcaagctgaacaattgatttttacctagaatcagctacaatttccattaaacatatgttattagtgctctatgactacacacacacacacacacacacacacacacacacacacacacacacacacgcaatatcatgtattttcttaaggaaaataaagaaaaaatgaagtaagatttgcataatgaaaaacattaaaatgaatttcaatcatctttttgtaagtatgcatatgctgaaactactgtgttgtttataagctagatattaaattaactttcaatgctatttctctgctgtaaaattgaccatttaacatggaaaaattattcttgctggcagggagcagactaatgacttcgtagacctatttttggcaacatgttgatccctgacaccaaaataataaactctgatgctcatttctttctcagaactgtaaggatcacacaggtggcccatattgtgataaatgtcttcctggtttctatggcgagcctactaaaggaacctctgaagactgtcaaccctgtgcctgtccactcaatatcccatccaataagtaagtaacaaacttaccccatgaataagctcagcatccatttctgcaagtacacttttcatagcaaatatacacttccttttatcccatgtaaataaataataaacacagacatgaattttttcaggaaaattatatgaattttttcaaacctaagatatttaaaactatgaggatttctaagaatttgtaatttttttagctctagttttggtgatttaatttctaagagtagaactcaaatagaatttctacaccaattccaaagaacataaatattttatacaaacacatacatgtgcatgcatgtacacacctacacacagacacatacccatcttcataccttaataaaaggatataaatacagctaatttgggttctacccatacactatttttttgtgaatcttgggcaagtcgtaaacctctcaaaaagtaaaatgaagggactgatttaactgacttttaagtacccattctatcccttctttttagaaaaattcgttgttcacctagaacaaccacctcttagagcagatttaaaaaaacaaacaacaacaagaaagaacacttgacttcctcatttccttaccttttagaggaatgctatatccagctgcttgaattcacattccctcagggcagcctctctcagtaaacagctaagcacaccccaaccaaaaatgttgttttgtttttaaattgggatactttttttttttttttttttttttgagacagagtctcgctctgttgcccaggctagagtgcagtggtgcaatcttggctcactgcaagctctgcctcccgggttcaagccattctcctgcctcagctggactacaggctgtgttgaataaaaatcaacaatttttactcaaaagtgattataaataactatacttttaaataaaaggaaattattttctgaagaactctcttaaaggtgagcttagtgcttaataaggttcatatcgtattgtacactttccagctatctctaggcactgtgacaacactgacagagcaaaaattttcaatgatctttaagggaaatctgtcagctatagtcttttaatgtgtagatgtgatcaagtaggtcatacttcaaactcttacccagaatgcgcctaattaaaatggtcttttgttagattcaatgaatactataagctaaagactttgagataattctaacattaagtttaaatgttctccttgaaactgtgcttcctactgttaatccacatgaaatgcttatcctcccaatgaccttctttactcagaattttttaccttactcattgtttggaaaagaagagaaagcactactatttaataaaagcagactactatattctaggccaaacactgtatttggtattatttcaccttcaactataactcagtaaggtagatattattatcctcattgtatagattaagaaatgaaggccattagtagaaaaatggcattatgatgccaattctggagccagactctttggtttaaatgctgggttccatactttccagctgtgccactttaggcaagtcactgaaactctctgtgcctcaattttgtcatcattagttataataggactctcatagggttgatgtgggaaagacataattaaaatgtgtaaaccacctaaactgtgactggatatgatgaacccaatctaagagctgattgttattaacctgctcagagtcataaagtattaaagtatcagagttggaattttagttttaaaatccatgtgctttccaaatctctacggtctacaatgaagacttctttaaaaaaaaatacacactgcattttaagtgataacactaaaagcagtaattaattcattggataagtcaatttatctagcaaggttttgagaaaataagacattggtttaatgcaggggtcctcaaccatctatagcctgttaggaaccgggctgcctagcaggaagtgagtggttggcattaccacctgagctcagcctcctaacagatcaggcaggcattagattctcatagaagctcaaaccctattgcgaactgcacctgcgagggatctagcttgtatgctccttatgagagtctaactgatgcctgatgatctgacgtggaacagttttatcccaaactcctcccctgcatctgtggaaaaattgtctccaacaaaagaagtacctggtgccaaaaattttggggaccactggttaatgtatgttagtgatcagaacatttccagggcctaaggcatgagcctgaatgggctcaaaactgaagattctttaacaaccaaggatgttagagaagaggaagaaggcaagagagaaacctgttggaaaataattactataggagaacaaatgaaatatattccttcataattaaaggctactcaagcctatgatagtcataacatgacacaaaacctgcactttggtatatatgcgaagggttagatcacccaatggaagacctacttgtttgccatggctgaatggcattctcttaaccatcttcatttacatgaaactcattgttcacgactaacttgcatttgaggaaagcagaagtattgcatctggccactcgtattgcatctccttctcagccaagatgtcatgagcattagcaccactatcaatccagcagagctggctgcccattgcatcatgtgaattccagctgaatacatattagaattatataattgattgagtatgcaaaccctatggatttaccctcaagtctgaccaacattactataaatgcagaggaaacattagggagataattttgcttggataattataggcattcatgacccattgttgtctctttatttgttgtgcatttacttggataatgggttctaattgttgttcctgaaaaagaaagaaagtctgcaagcattaaaacacaatccatcagtgccaaagggattgggtttccagtgtccaataatattatttcctaaaagatgtatattctaatttggtataattacgttgatcctgatttttaaaaatgcatataacacagtgataacaataccagtaacaccaagtatttaatgattctttcattttcaaaatgttttcacttagagtaagcaattaataattattagtaaatattaataattaccaaattatcaaatattaatataaaatattaaaattagcaaattactaaataataattttacttctagcagtagaattgggactagaatagcaatttattttaaattccagctttcaatgtggtattttaacaagtagaaagagagggcagtgataattcacttagtttataaatcctagaagttttgtgagagggttataatgtcttttacatttaaaacaattttacatttaaaacaattttacatttaaaacaactagaaaattatcatggtttagttgcacaactgtgatgagaaaaatccattttcatctaacaacctgaaatgtttaaaaaaaaaatcactaaacaagacacttaatgacctagggaaactatcctttttaaaaatattttataaaaaacattactgttataatgtgagctagaaactctgagatatgaattgaatatttgcatacaatcctgaagacgagattttaatttccacaggttattcagagaaaaaaaaaaagggagctaaaggttgacgcaaccttcatgggaagtctaaagcttagtgatagttttaccttggtgatttatctatttaatccctggtcataaatcttatagatcacaagcattttggctccaaatttcttagataatattgctaaataaatcaaatatgtaagaagatagagatagattggtataattattatgatgtatgaatacagagaagcatataatatttaaattatacatatatatcaacttcatcaactatttatggtgatcactatgcttggccttctcatcttgttgatgtatatattctagctataggttgtaactaggcagtaaaagttatctggagagaagcaaataacaatgtaactatttcgaatgtttatattctttaatttctggcatcacatagcttataggttaaataaaatatgaaagagacatgtgaatctctgcctttgaatacttaggatgtgtttgaatatataatattattgaagttgttatagattttcatcagttatataataaaatatattattggcacaaggctggacagagataggacctcaataagttctatctactaatatcactgtaaatactactggtttgtgtgggtcaggaatgctgaaatttaagtttttgaaagaatgaaactcaaatttgagttgacctttgggctcactcaagagatcatattgaatgcacgttgttaaaattaatatagagaaatgtattccaagacaataggtaaatttaaggaaacaatcaattcagccatattctctagaaaattgagaatgctctagatgttttagtgctctttcctacacattgttttatgtgcacatgggagattatgatgggtcttcctggttccatatgccaaaggaaaaaactaaagttcagagaaattaagtgccttgatagtgattatacagcttgcttgtggcagaaccaatattggaactcatatattttgactcacctctctgtgcttcttccaatggggctacagtaatagaaacaattacagaaacattgaaaagaagcaaaaaaaaatcaatagaatttaatgtcagacaaactgtaaatgttcactgtaaaaatcagtaaatcttcactgtttggcaagagttatgttaattatgctacatagttacagttatattaacagctatgttaatataagggactagagcaggatgagaaaactgcagatttaattctttaactattaactaaatacctttcacgttaaatcaacatatcttattttgtttaaaaatttgtaaaaaaaaaaaaaaaggcaaagttttttaaaaaattaataagtcgtatctataatttattatggcaatatgctttcatactttttcagtataaaagggtttatcaaatcaatcatattattccattttgcagaatgggaaacaggtttagagaaatatatcgttcaaagacatacttagaaaataaatcaagtctaattaagaaatgcaattgtggagattaaatcagatttcatagtacttaaaggtaattaaagaaataagtgtttgcttaatgattctcctgagaataagtaggagagatcattgaactgaagaagaaaatacttagaaacttcagaaatttatgacgctaacaccaaaatcatgaagtaaatgaattttttctttttctcctcttcctctcagtccctgccccttttcagttatgtgtgaatattctcattaccctcatctccagcttctccactgacattgtgtagccactcaaaatggtttctcttatcctacccaactgttcaagataataattagttgaaaggagtcctgatcccctgttgtgtatgcaaatacagaacatgccctgattttctaaccctaatgatggaagttttaattttatacccatgattaaaggagtgcttgttttatatcacatacaatcccaagaagcaattcattatattttatttcaaatgcatgacagttaaagacacacaaaatattctcacacattgacttaatatgtgtttaattttattttagagtattggattaactctctgtgggagcatttaacgttagaactgaatttcaggacccacagaaggacccacagaagaagtttccctaatgtctgataatcaggaattgttgagcttctattgagcaattgttttgcttttggcttctggctgctctgaatcatttacctgttgattgttcccttttgcattagctgtgaaaaacctcaaagccaaatgttgatccacccttatcaaatgaacatatgttataacatgcattttgaattctaaatacacccttaagtttatcttttttttagtatttttttctctttaaccttgctttattcttaatgcacatattttgacagatagaattaaattctttttagaacaaggttaattgtttctctatgtatgcattcacatacataaacatatatagattgttgacatagtcacatgtatacacatgtatgtacacatatatatgcatacatatatacatgcttataagtagattataaaaataaaagtatatattcagccattaagagggattattttcatgtccagctttttattggttatcccaataacagcttcccctcctcccctatttgtggaaaatgcccgctgctcttggctttcttgtgtttcctgtggcgtggtttggataatccgggatgaagaacattttctgctggtgtggagctagccaaatagagttaaatgacataatcttggaatcacttgaggtcaatgatgatctcacaatttcctctttgtgtcacggaacaattagcttcatgtcttggccaaaattagtgctaagtgactgcatttgccaaggcaaattctgtagatgttttttattgtgcatgtttatttctcactctaattttatttttgttgttgaatgccatcttctgccatagctgtaactgcaattacagcaataagagagtgaatcttcagtttatgttgttgaaagaatatcaaagcacaaatacagatatattttatgagaaagttttatttggatgcgttatgtcgagtatctatattactagaaacttaaacttacttaattcttaccagtaggtttcaatgacaattggttataggaagaagagaatatcacattaagaatctaaagtcctagatcccatactaaattctcctggaaattttgtatatgaccttggttaagaaaaactgtgcctgccctaaccagctcataggattttgtgaaaatgtgataaaattgtaaaagtattctgaactgtaaggagctagtcaaatttaacatatttttattgcctaatttttttctcgaaaaagtgttgatttttgtcagtgagcaccttttacttatgttggttttaactgacatgtgagtgtatttaagaatctgaaatctattttatgaatagctttaaagtgtcaaggccaggtgcaatggctcatgcctgtaatcctagcactttgggaggccaaggcaggtggatcacttgaggtcaggagttcaagaccagcccggccaatatggtgagaccccatttctactaaaaatacaaaaatgggccaggcctggtagcacctgcctgcaatcccagctactcaggaggctgagacactagaatcgcttgaacccagtaggcaggggtttcagtgagccaagattgcaccactgcactccagtctgggcaacagagcaagactctgtctcaaataaaataaaataaaatatttttaaaaatgtcagaagccttgtcaaccaccattgacaagagttatgataaactgatttaggattataaaaaacaattggtatggttttctttcaatcagtgtagtcccacagaggtgggaaacccagtgcttctggttggagtcagtttctcagtagatgatgagatagttacagaatgccaattttcaaagaagacatatatatgctacagagatgcagttctcacttttatgtctgaaaacagtaacagcaaatcaccggatgtggatgagaggaaatcctttttttttattttattttaacctgtgcatcttcagtgcaatcacaatcccgtcaagaaaatcacccatagtgaactgtctttgggtcatgcgtagcaaagtacaggatgctttataaaaggagattctttactcgcagtgcacacgctgggtatgtcttgtctgctgttcatcacagctaccagaactccttaatgtggaatctttgatccagataatatttataaattcaaagcatcccagaccagcctttatctccttgacccagcagattcatttagactttccactgagttgaaatgtttaaaatgatagacttacctggtcctaataccttgctagtatcccaaaaataggaagaactattaaatctttacagaactaccctgagttaagccagagaaatactattcagaaatagtgttcatgatctgatctgcaccaaagttaagaaagtatttcaaagtaattcaagtgtcaggagcaggatcaaatcaggacttggaatgtttaatttgttgttatgtctttaattcatttagccatcaagcaagtctctattgaattgccctgtcatatataatagaaaacaaatctacttagggaaaacataataagagaaagattaattgagggcatttccctttaaaacggtagcgcaacagaccttacagaattcaaaatggttgatggcccttcagagagccagtcgagaacgcattaccgtgtgtcaatcttggggtaggggttcatgtatgagaggtgcctctcacaaggcaaagaagcatggctggagtgaaacatgttgctgaaagctaaagctagcacctgagttctctgttggttcttcatctggtgttcagctctattgcttcagacccaaattagaaatatgtgcaaagagagaagtgaattttgaaacatgccagagggtatgagatggcaaggttgcttttgtttggttaggtttatgataagtttaggtagaatatgcacacttgatctcttctgaaagctttcctgaggattccatcagtgtgagggcatacctgcaaggaagcacatgccgcagcctgcacacaggcacgccccactatggcagtagctgaagaaggaagcactgccaccaccactaccacatactgagatttccaaaatcactaacaaatttctccaggctgcttcaaattcagagggatttggctacagaagaaagtatgtgaggctgcatatgtgccaggcctggaggaatttctaaaaagcagctatacatttccacttgttactgatgatcactactcagagcagtcgaaagtcagttaataacatgtcacagggatactgctctccactgggctatattcacgtctgcagaaatagcaatgtcatttcatcctccattggccagaccctaatctctgtctctggggtgagaatgaccagcctgtactcttttgtcagagcagtagtggagagagagaaatgagaaaatgctaatgactttgtgtatgtccttcttccttgtccctgttttccgcaacaacatcaacatagctttagcccaacgtgccatttagaccggagtcttggattgatctgtgatggatgccctgtcgggtacacaggaccacgctgtgagaggtaagagtatactacactgtcttgcaaaatgatttctaccttgggagttataaaaccgcagatacaatcatcctttgcatcatcctttggagaaaaaaggccacactcaatgaggtgaaataaagtttctcaacgcacttgtcaaacaaatgcattatatttttgtaatttatttatttttcagaaattgcttcataaatcttcattcactcagagaatatctgattaatgttttaatcttaaaggttaagtattaacctacaatctttgtagaaagcattgctcaagtggaaagtcatgcactttaagatttatcttactgtctgtgtaggcaccatttatttttcataattagctttttgtccttaaaatgtagcttaaatgcatagttcatagttcagcaagtggttcataatttactttaaatatacttgaaaatagaaacaaaatgtaatttattatcatgatttatatcctcttctaattgctcctaaaccagtattttaattcctgttgattttactgggttgctttgcagcagaaacaagagtattattttatgtaatttgtgtgattatatttccttctgaaatgtttttgaagaaataattcttctatatattcagcctcagcataaaagtgatacaaacttcccccttgacatcattgccaaaaacaaaaacctccctctggtttcagcactggaaatagtccctgctgccacccttcctgggagggaggggtgcaaaggaagtgacctactttcactcatcatcactgaggctaaccctgaagagggctgtttctgcccgtcttttcctgtcatcttggcagctatcacccctgtttcaaccaggatgcataaaattaatgaagcaggagcctatcacccagagagaatttagctagcaactagcagtctgtggacaaagtgccaatgacagttcctagcagcaacaagtactatttgtgagtatggaagcatctgtaaattaggaatgaaagaaaaaaaaatgaaacaagcagcatttatttgcaatcaagaaactagatatctttaattgtgtgtgtgtgtctgtgtgtgtgtttaaagaaaggcatgtgcatattacttactataataggagaacatatcattgccaagacagatttacatcaagtgcctaaaccccccagttcactacaggcaacctttttttagcaactggaaaatgacagctgctctgtcatacaaggctattaaatccacttatctaggtgagcataatctctgatgtacttatattgctttgctttatgtactatactccctatacatgttagacaatagtttctgaaccatctataatttaaaaccctacattttatttaacaaacatctgtttagcaactaccatgtgctgggtacaaggctagacattggatataaatagatgcattttcccatccttgccctcagcacctcacatctttctttaatgcaagtgaggatggttgcttgtattcttgggagaattccatttgaatagtaaaaatcaccaaggagagaaatacctgacagaaagtatgatttcctgtctaaaatctgtattaatctgattcagaagatggcaacatgcatatgcagtgtaatgaatggcatattttatctccagctcaagtttttccacagttgataccatatttttctagccagaatttagattagggttttccaggaatatttaagatttataatttcattgtatttatgtaagccaaaagaacaccttagatagatctaaaatatgagggaaacattttttgtttgagatgtgcctgttgaagtagaagagagggaagataagggtcagggtaaggaggagatactggttgcattaaaaatcttgtaatcaaaaccattctgtaagtgatttgtgtgatcagcttatgcacatcatctaaataagaccagaatttaaaaactaaatcaacatttcccaaattgtagatgttcctggaataaagaattctgtgatcacatgagtttgggaagcatccatttgcatgttaaaagttctggcatgtcctacagtgtgtaattaagaaatctgttcaatttgtttagctcagcatttcctaaacttatgtggccataaaccctctgctttaactatatagcaagaatatatctcagactacagctcaggtgggacaagagttataactttatagtctttatcacaatttaatttctattttgagacccctttctctatatgtgggaactgtgaggtcttagaaacataatctgagcccatttcaagttgttttcttctcctctctcccagctagaatcaaagttctattaagcttacctagtaccaaaggccttatatgcaagggtagaggggagggtataatgtctgtgtgtatatgttgagcaaggggacatgtgatagggccagccagtactgagtatttcacccaagcatgtttctgctgacctatccctttttctccgtcctcctaattacctttcctttcaggtctagaaagtctctcaactactttcattccattcttagaggcacaggaatcattcagcttctttcattccatgctaagacccaccaacatctctaccatcatcatttttccatctgcctttccaaatccatcccattttctatttgaaaaaggatgagctacatttgtggaactggtggctttcagagctcggggtctggcagattcctatgtctctgccttttgccctgtcaaatcccttcattcaaacatgtagcacaagatggccttgcttcttgaatcgagggggtgaagagaaacagtgaacaggggaatggccaaacaagatacaacaaaacatggattggtattctgtcacaagttgaacactagttacagcttggaaaacattcacttagggccaaaacaccactatttttgaggtatcactgctttgctggggaatgatttaaacaaaggaaaaaaaagagtcagagagtgaggggagaaggtattcatgatgatacctttgctaagattctagacttttatcatctggacaagaggagaacaaaaataacaaagagacagaatcttgaagggctaaaagagattaagtaagcaattggaatatcaagagcaattaaaaagactgttgagctaaaagtgagtcaaatgctgaggatacctgcctgatcggacactaagttactttcagaataagtttgtaacctcagcaacatgtcatacattatggagaaggcatttcaaaaaggcaggcaagttcatctggtggattctataggacaacatgaaacttaatgggatacatagacttcttaagccctccccgctccccagctggcaaatttttaacaacttctccttaagtgatgagagaggggtcaaaagccaggactaatctcacaattgccactgaaaatgtggaaggtgtttgaatctaattgcttaatattttgaaaattcatctacagttttatcctcaagattcatactagatatcaaagaaattcctttttgtatcttaaatttcagttccaaaatcccatttagattttgtctgcttcagaatgtctgaattcgaatcaagtctaatcacccctctgcttactatgctcatgggaccttctattcacttgtgagtctccttgtgcctttgggtcctgaatgcagagcatgggctacagaaataacagaggaggggcagttatacctacctgtagtactgttagcaaaattgtgactccagttgaggtgtcaagaggccactcatatgtggttgtgcagtttgtacactgcacaaaggcactcagggaaggggaagattgagggcttgaatccagtttaccctcttcttttccatgaagtccctgggtgtctagtctgtttactttttctgcatatgtctagaaaggacaatttcttccaacttgtaaaaggcaccatgtgagcagggaaacaccctcagtcttttgctgattatgtcaaatgggaggaagtaagaacacagcattacagccacgcctctttatacagcagccaccctcttctgtgcctttgccaatactgttccctctgcctggaagattgcagccctttcactcctccatccgagactaactaatccctgttcagctcccaaaagtcagcactatcatcctgaaaatgtccttgattgggcctaatctgagttggttgcccttttgtgtgctgccataatagcatttgcatatctccagttgttctactgctacgttttaaaatgtgtgttcattctccatggactgtagtgtgaagactgtaccttatttgtattagtaccgtgtaaaagtgctcagctgattttttttaatgggttgggagaaaccagagcttttctaatttgcttggctagattaagccagcattatattgtttcattgttttcagtgtatagataatagaaatgtaggccgtgattttagccaaaagttgctgaaaaaatgatggggcagaatgagacaaaagtctcatcagtgtggttgctttcttctcattgttgcttgtctgcacgtccgctctttttctacctctccctctctctcttcctctctccctccctccctctaacattgttcctaaattatcaatagcagcaagtgtaacaaataactgcatgtgttatctggagtcttatttacatttaaacggccctttttcaaaatattgcaatttgatttgaaaaagttaacagatgtggaaaggaacaatgcctttgttatgtcaagatatccgtttctagcaaggcattcattcgataaactatttttaaaaatgcactcattctgccttgcatatgaaaatgagagggcttgacatttcacattacaattatttttggtggagtgaaaaaccaaaggactgtgatttaaactaattttaattaggtgaatccaacttgatcagactctaacacactatttttattaataaaagttatatgattagcagtattatattctctgaccctcaaattactttttaattcctaacggaacaccttcagaaatctctaatactgttctctgtatagaaacacacacccatacaccagtaatgtgctgaagtgttgcagaaaatagtcccactttcagtaacatggcatatgaattttctatcacgtatattcacaaattttccttacacgtcctgcaagaaaaaataaataaaagacagatgcttctttagttattctatttaattatagttattttcctcctgaaatgagtttttttattatggagaatttcagtcttattaattgctatctaagttaagaaaaattcccagatctcgttatataaagctatctctccaaagggcagtaactcatcttgaggaaagtgagctgaaaataataggttttcgtttgctgtgataatgatcattgtatatccttattccagtggcacaaagtcactctcttagtggtaaacaaaatgagatgtgaatatatgtggatgtgatcataagctctgaatattaaataagacaagaagaatcaggttaaaattcaaaagaatctccttcttatctttatcaaatgcctctcttgaagggattttgggggaattttgtgcactcaaattttattgcatattttataatacagaattaacaaacaattatatctgtggttggcaatattcttctaagcagtatttatacaactcataagtgtataaaatcttttgtgaatataagtaatttcattttaaaaattatgataaaacatcaaatctatgaattatagtacctaagtacctatacattttctagaaaacttagaatcatcaatgtatctgcaccaaattaatggctctgccccagaattgggatttgttaaagtactctcaatataatgtactggatttaaaccatttttatttcaaatggtagagagcctttctctaaataatgactgcatatctgtgagtagatgagcataaaagtggtgtactactgaggaaattatattctcccacattgtttttgatccccttcaattttgacacttgctgcaaaagactttatcttggtaagatggcaaagataacagagctagcctgaccataagattcagatgccctgttctgtttctcctttggcaaatgtggcttagtataaagtgtgagcaaatgtcattgaaagagaagacagagcagaatataaataggcgctgcctataaggacgtttctgcacacctgtagcagtaagttgcattttaaaacataacatttaggtcagagaaaatttgctgctatcgtttttaaaaatcttctttgccatgccctataaacaaacttttgtttttccaataatataatatattatataaatagttttatattatattatatttatataatatatataataatatataatatattatatttatataatatatataataatatataatatattatatttatataatatatataataatatataatatattatatttatataatatatataataatatataatatattatataatatattatataatatataataatatataatatattatataatatataataatatataatatattatataatatataataatatataatatattatataatatataataatatataatatattatataatatataataatatataatatattatataatatataataatatataatatattatataatatataatataaatagtttttggtaagaaagaaagagcaggagacaaagaaagaaagaaacagagaggaaggaaggaaggaagggaggaaagagggaaggagggagagagggagggagggagggaggaaggaaggaagcaaggaaggaaggaagggaggaaagagggagggagggaaggagggaaggagggaggaaggaaggaagagagagagagaaagaaaggaagaaagggagaaagacctggagtttgctaatagagttggcaggcacagttcagtatcaccttatggcatattcctataatatgcaggcatgctttctcagacttccctttagtaaagccttcaatgaaaatttgcctctgaattcatatgcaaatacatacaaatagattattaattcagatatacccacagctcccatccaattaataagaatcttctgagtcacagtttctagttaataaattctgaactcttattactgaatttccttgcgagcctgtttcctcataacaagttctggctgcaacaacaacaaaaaatgtgaaccttacatatttgtagagaaaataaccaattggagtagagacatatgatgtgttgtactacaaaggctttccaacatggacctggattcctccagagtgccagcagcagattcttattatgctttggtctcattttcagtgccagtgacaagattatatatttttttcgggctgaaatctaattactagtgggctggcaggatatcatcttgtatctacactgcagttgtagaaaaacatttttttaatcacgttgcgtttgagaaaaggaacacttaaaaggaaaatccatcatcctgggagaaggggagaatgaaaaatatgtaaacattgccccaactgaggtccccccaaaggctcactgatgaaatttcttgccttaggtgtgcagaaggctattttggacaaccctctgtacctggaggatcatgtcagccatgccaatgcaatgacaaccttgacttctccatccctggcagctgtgacagcttgtctggctcctgtctgatatgtaaaccaggtacaacaggccggtactgtgagctctgtgctgatggatattttggagatgcagttgatgcgaagaactgtcagcgtaagtcctgaactattgatgcccctgacagaattgatgtattgtacctcaaagtagctgatgagttcttgagtgtggattgaagagtaggaaattatgtggaatacatggttgatagatgcatagaatatacagagtctgcatattccagaacatttccttgtactaactaatagagtaaatacctttaaaattgctgtggtattgaagcatcactgttttccaaatgataaacatgtttttatttacatgcggaaggaagatttttttaatgaacttatgtccacagcaggaaagaagaatttgcatattagatagacaccatgtatccatttttttatctcaattctaatcacttgctttaaataattttttctgcccatgatatttcagtagtagccatcagaaggtgttaatcagttatgctttcatatgttaactttacagtgtcgtattttgtaataggtataaaattctgccaatattttcgcacacaggcatttgtcattgttgaatgattaacctcattttagtttcataatagtcatttaaggactatttctagaatgctctttcagtgttttccttccacaaaattagctactctagggcttcatccatattagtataatacatttctcccctctttaccttttttgctgtattaatactacatagaatttccaaatccttaatgtcagtgggattagaatatgaaggcggatcttgttgcagaagatcaaatggaaagtgaatccaatgttagcatttggccatcatcagcttcatttactatcataatgtttaagcagagtaggttatgagaccagcctatccattcatttctgtcaaatttatgtgagagactcttccaattattcaggtgggtcccaggacatgcagaattatagaaaccactgtaaatgtagcctattatcaactctactgtaagcaccaaagacccagtagggtaccctatttcattaagaaatgtgtctctctcatcacaggtttagaagatgagttctagctttttgttatttaataatgataattcattgaatcaaaaccaaatcactttctggaccaactggcagctgttaatataacctgtaaattgatctttttttaaagcaaaatttccaacagctcagtgcctttaaacactggattcctgacaaatgtataaaatcatagaaagcctaagaaattcttcctttcccacagatcatctaggatctacattttctagctgtgtgctcctgagcaagatatttgacctccttgagacacagttttctagtctacaaagagagtcatgaattttctgtggggactaaaggatttggcacatagagggtatccagtgagttcccaagtcctggagatgctcacacatggtagctgtctttggtagcagtgctcatagtagctgtgcatatcagttgttcaccagtgaattctaaggctaagttagtcatttactgacattttatcctgtcttccaataacccccacccccataaagttagggatattattccactaattttattatggtaatttattgtgggattattttattatggtaattaattattattttattatggtaattaattattgtagaaaattattatgggattattttattatggtaatttattatgggatccatggcatgaagtcttaagaacataaaaaagaatgtgagaataaaaacattttgaccattaccagttttcatactacttgccgtgagtatagatgtgattataatttttaatgctctttgccatataatcacaattaaaagtataagaagcacatttattacttatttttataatttttcatggatacaatatcacttctatgcataagtggtaaaacctcaaggaaagaaagttcctggaaatacattattttggttacctatagatttgttcaagaaaagtacaccactacaaagaaatatattttgcattttaaatttgtgtatatcgttggtgtcatatttttccattaaaatgacactttagcaaaactttatactgctttgttgtttttacgataacattaattaattaccatcatatttatggtaaatttaattttgtagtttacactccaagaaaaagtgactcctaaagtctaaataatttgatattttaaaaatgtatgatatgcataagaaactttcataaaataataaaagtatatacaaattcgataaatcagatgaaaatggatatttaaaggaaaaattttcagcctttccttgtatttcagctatagactatccgtaggctctttcagtttctcaatggcccttactctagtatccccttggcagacactgaagacaaactttgctggaagataaattaagcagtttttagaaaagcagttcttttgtttgtttatttgtttgttttttaaaaggagaacctagagccaggagaataaaatattagcataggctgatagagtacctgtttatagcttaattttaggttgtgttcaaatcaaaatattcagaaatttaacaaaatcatctatgagtagcctaaattcccatgtcatctcctccttgtatttttattctgatataaatgcaattatatgtaccattaaaaatatagggtacatagtaaacaattaattactattctatttgtgaaaaggtcacttaagctttagactgatttactctacgttttagaataacctcagacagctttataacaaagcaaaaaagacaaaagattacttaaatgaaatatgttttgtatgtttggagatagcatataaactgtaaaataaaagtgattcttaaatgttataatgctatagtcttaagatacttgaaatgatgtttttgttgtcttttaaacttctgaatcttaaaaaaggcataaatatttcacctcaaaccattttttaaacttaacacaaaaccggcacacagtaaatcattaaatcaaaaaaactaactaaatttttctagattaatagtaacattaaaattttgccaggggtgctattaattttgaaaattcctcaaaattattttagttctaaagtcagtatgcattacttacaatgggataatagtattttaagtgttaccctgatgtatctgtaaagaactaaaacagcgttacaccttgagtcaagaactccaagttcctgtcacgttctggactcacctatatgacacagcaggcatgtggacttgtataagctatggcttctttgaatttcagtgtcttcatgctcaaaattggaatgatgatgatgacattaatattttaatggcatatgatgggccagacatgatgctaaagcctttatgtgaattatccctacagcttgtagagttgttatagggattaaatgatagaatgcctaacagggcacttaacaaatcagaaaacattctgttactgaacttaggcgtccatgttaccatgtggggtatattattatttaacaagcctattaagactattagaaagttttcctgatcacaggtctctcttctctttgcagcctgtcgctgtaatgccggtggctctttctctgaggtttgccacagtcaaactggacagtgtgagtgcagagccaacgttcagggtcagagatgtgacaaatgcaaggtaaggagtagaggctgacccataaattactttctccttacagattttcactggcttttcatgacatgttttgtataccttcgtatattaaaaggaaggtttgggattatctaattctacaattgaaatgactgtgatcagtgaaaagtttttttcaaactagaacaaaattcattgtacattaccatttgaccttaaacatttttttttggcagtgaatgtgtattatattcgctttaattcagacatttctgaaacaaatagcaggcgaatttaatcttaatctgtggagatactctttcctttgcctttacatttttggcagaataaaatgttactcttggggctgggcgcggtggctcatgcctgtaatcccagcactttgggaggccaaggcaggtggatcacgaggtcaggagttcaagaacagcctggccaagatggtgaaacaccatctctgctaaaaactacaaaaatcagccaggcacggtggcaggtgcctgtaatcccagctactcaggaggctgaggcgggagaatcgcttgaacctgggtggcagaggttgcagtgagccgagatagtgccactgcactccagcctgggcgaccgagtgagactccatctcaaaaaacaaaacaaaccaaaatgttactccctttgctttttagcaaacaccttcttctagttccatcatttaaaagctacttcctgtgagcagtctacctaatggaagtttcagtagagaagttaatcaagatatttttaaagatgcattattttgctaaaacaaaatattcaattaaaatacagcatgttgttctcagtccctgaacataccgattgccctgctttcagtatggcaagcaacttcagattcctccatgagggtggacagatttgctctagcgctttcacaaaaatacattgtatttgtgataaagacagctaagcagaagcaagcatttctccgatgtcaaactggccttactgtaggaagtttgaaaatatcatctgcttctgtctcttgaataatatcattgctctgttttgtttttattttattttatggttggtttttaaagcccaatatgtggcgggatccagagaagcgattctgtgtgctatgtgactgcgatcccgttggctctgtgtcaccgcaatgtgatattacaggaagatgtgtctgtaaatcaggcttcgtagggaaacagtgcaacctcggcaggcaggtgcaccaacaggaggagcagccgcggagagcgcaacgggtgctgggttctcctcagaggtgggctatcggcagctccagcgggtgccctcggggagcctatcgggccccagctccggtaatcccagaggcgctgcatggctcatgcctctgcatgttgtgttctgtgtgctgtggctgaagttccctggtggcattttaccaaataacagttgctaagtgtgcaaattgcaaatgcaaagattagacaattcctaattgaacccttgcccttttaaaaataaccatccgtatgctttaaaaagcatattcaagttcatagggtcataaaactttcaattaaccaaactttcaattaaccatgaatatgtggaaatcaaataaaaatctacttgagagaacctataatcttagaaatggaagagacttcaggcaacctttggggaaagctaactttaataaatgaacaaatgaaggaaaatctagcagagaaattgatttgtccaagaaaactcagcccatttatcaggcatttcatcataattaagaattttgttaatttccacatcaattgtgcttatgtgtacaacaaatgcaagaaacacattttcacacactataaatggacaaatacccaaaacggggaaagttgtttctaattacaaaagtgtggttctcatatcacaggacaaaacaaaacaaatgctggggaagaaggaagagagggagggagggaagaagaggtcccaggctgagctgcagaagagtaggagacaagacttaccagtatagagtcaggacctgtagagaattgaggatagggcatagaagaaggagagatggaaataaaaagtaaagaagaagaagtaaaaaacaattcatggttttatttcttggctcattatcacacattttttaaaaaacaaattttgatgtcagactgccttagatcaaatcctggcctcattacttcctagctataaattccttgaatctttctgtaattcagcttcttcatctgtagtaagatccacttcagagggtttatgtctgcttacgtactccaagaagcaaatgccaagaggtttcctgggggaaaggccaacgaagcatgaagtgggagacagcatagccttctgctgcaatggggttctgactcccgggaaaacacagaaagaaagactgggtaggaaaagccttgtttggtgcattttgtcaaatcttaaattcttggccaagccaatgggatatacccaagcaaattttacccactaaaggaatcctgaattggtcagggaggttctagtatcttacagtaatcagcctgagagaaggatactcttgtggaagctcatcttaattcattcagagtgctataagagcataacatagactaagtggcatgtaaacaatggaaattcatttctcacgattctagaggctgggaagtacaagatccaggtgctggcagatttcctatctagtgagggccctctttctctagacagtcatttacccactggaacctcacttgggggaggaaactctctgaggcctcttttataagtgcagtgatcccattcatgagagctccattctcatgacctaatcacctcccaaaggccccacctcctgtctataccaccaccttgagggttaagatttctacatatgaattttgggggacataaacattcagtccattacagagcacctctgatgggtccaaaagacaagaaactggaggctttcagtcagtaaaattccacactgtaggttgtcttgcaggtagatcggatgaggcgcctccaaggctgtctcagggtagcagtgagaacagtgcatcaggcaggagcatagagagtttttagtaaatgttaggcctgattactattattattaccaatgttgttaaatgaagaaatgtttaaaataattttttttcaaaaacaaatgcatacatttacaataaaagaaaaagataataactgattaaaatgtctcctaaatataaatttagcagaaagtcaacgttcattcaagccctacatatcttacagtactattgtatgaagcagggttttgtcccgagactattttttcctctgcagcagtatgtgtgagagctgagagctcagactctggagccaacctagctgatctggaatcttgactccacaattggttagctcatgaccttaggcaacttacttaacctttctgtgcctcagtttcaccactcaataaaaaagtggtgagaatgacaactctctgccagggttgtcctgaggagtaaatgagtacatatttgtaaagagtttagatttgtaaagggtttagaattgtgctttgcaaaaaggaagcacaatatatgaatgctagttcttattaccccgagagagacacatttatgggaacctatacagtttctcactgggtctggatagccactctctcccatatttattttacctcattaatctcaattactgaccatgaatgtctgctccttaagtttgtttactagtggggttttctttagcctttgaaacaaatttttgaacaaatttgtaaacattttattactgaaatttggtagtatttattttgctacaacttagcctttaaagctacattatttaaatatttgaaaagtgaggtagaaccgtttcttcttgtatatttccttacataatcgactttggaatttttaaaatgatagctataatttggaatctcatttgatatttgattgatttaaaggggtgtacacacacccctttaatgagtaaatcaatatgagagtgtggatatatagatgtaaatatatatgagtaaatgtatatatatatgagtgtgtatatatatgtgtttatacatatatcggcatagatatatgagtgaagacaatttctgaaataaagatgaatacaaagtattatttctatgactcagatatttttcaataccgttttaatatattatgtttagtctttttgtctatgtatttctgtttctgtttgtgtgtctggtggtatgggtatgtaattgaaatttacatagtatttatatagtttcatatttttgtttaatttctatttcatgctatatcctaagcatatttatatcattaaaactgcttcaaaacaggattttaattcttgcatattatttcataatgtggatgtcatcatttaatttattcaacaatttttataacattgtacagttaagtgcctgcatagttattcaccatgataaataatattgtaataggcatgcttttgctttaataatattccaatttctgattatttctctaagccaggtatctaaaattttacatgaatttcttttactaataatgatattatatggttagttttttttatataggtgaatttaatttcaaagtcatgtcatctgttggaactgttacatgcttttttctttaatcatataccacaatctgaattagaactagaaataaaaataaaaccaacagtaaatgtaaagatgagaatgatcgtcaaactcagtcaacccattttacattttaaaaataaaactattcttagctacggtcattttaaaaatctaattttcagtgtgatttcacttttataacttatttttaaaactactaacaataatatctaaaatatataatgaggcttattaatttctctttgggtggctcacgttaagtggcaagatttttttttaccaagaagcaattattaagtctaattttccaaaataagaattatttttacaaagaagtaattaccgagaataattttccagattaaaatatcataataatgtgacatgctttatatttttaaaaaataaccctgaagtattttaagcaggatagatgattttcatttttctgctcggagtgattttttaatccatcagcattttctaacgtttcattttaagcctgataacatgcatttcaagaaagtcagccgaagctggtaatgcaaacttgaccgtaaaagatgatttgttatagatagataagagatatgcatatgaataactcatcagagaatgaaagtttacttacctgatctggtgctttaatacgtgttctcactaatcaatttcaattgttagaatgaaacctaagaaatcaaatgtttgttgaaccaattatttgatcagtgtaagcataacctgaaaattatatttataatgtgaacactatagcaatgattaaaagtatttatggatatgtgacaaaattctatcaaatattagggcaaaaaggattattttaactttaggctgctggtcaataatgttgaaagtatttttaccaagtaggagtccatagatctgaaagtaatcaattcagattactaaaaatgaagaagtaaaattttaaattaagactagaaataccacctataggtcctttccatattgctattgaaatcttgagaagtactgggacaggctggtgaaaatacaacagacagtaaaggaagcgcctaattctgcagttaattttgataaaatttcagaataattgaacttttctctttggatatcatagaaaaggtccatttgattgaatgaaaacccaattgtcataacatcagtgaggaatcctgataactcctaagttcctctgttcccacctgatctttggtattgtgcatcttgcttcacttcgagttaactgatttaaatttaatttttctctcctcttccattgccaggctgggacctttggcctacaatcagcaaggggctgtgttccctgcaactgcaattcttttgggtctaagtcattcgactgtgaagagagtggacaatgttggtgccaacctggagtcacagggaagaaatgtgaccgctgtgcccacggctatttcaacttccaagaaggaggctgcacaggtctgtaaatatgacttaagtcctacatattcactctgatagttttagggtctgacttctgtaacagtttgttcttttaaaggaagcacagattgatacaacgtatttaacataatgagtaatgtctacttatttttacgttacttaaaaaatgaaatacatgtcagtttgaaacactgccttaataactgtgtgcaagtactcagtaaaaatcagcagatgctcgtttggttgtgtccctccctgtctgtgactttgattcagccagtcactcaaacactgctacggcttgaaagttaaatgttcgatttttctggtaccagtcttatcttagtttaagctcaaaccccacgccaatgcatttcaactttccctttttcctattgcaaaattggtatccggatcaagaaaagtcaaggtgttttttttttcctggtaccccaaaaacatcttttcatctacttttggctgccttgaaaactatgatgttctaagagagaaataggttggctctagatatttagttcatcaaaaaatgcaggcagaggtttctaaccatgattccctcaagcagtattcttatacatccagccacagccttcacccaaatcatgagctaagaaaatatcacttagcattctgcagatgaaagtaaagagtgaacattagccttgatttatatgctgctaatttcgaactgacccttattccaacaatcactagtttgaatattacctttgtttactaatgtcatggattcaacctggataatgctcacatactctcagcaccatggtaagattttaaaacattgttattcactgttgtggcaaatttaagtaggaagcagtaggaataatatttaaaactatttaaagaaccaatatctttcagacattctccagcactttagatatgtggattttaccataaattaagccatgataagttattctaattgataagttattctaattgataagttattctaaatgataagtttataattgtagatcctctaagaatctgtatatctctaagccaatatctgtataacttaaaaattataaagctgtattttaaaatatactctgttctttaaatccaaagctcactgacatttttacttaatatgaattaatgaggtagtattatacatttaaatacatatagtaacaaattataaatgagaccaagaatattattttaaattatagaaagatgacagcatttaataaatgcagacctactagcattctggcccaaagaaacaccatagaaaaaaaaaagcacaaaacaggaagaatagtaatatgactgaggacatgacttgcacaaaatagcctggatttgtctaaatggctccttcagtaactagttctgggaccttgactgagtaattttgtttcattttccatctgcaaaattcatctattaaattaagataataatagtatctaccacacatggtttttgttacaattagttgagttagcggctataaaatatttagagtaatgcctagcatgtaagtgctatggaagcatttatcattattattattatctttattagttttattaattgtgttatacattgtgctttggcacaggaaaactagctaattactcaggttttctttctatttagtgttatgattccgctgaagaactacttaagataatttctatttgcaagtaatgatttgcactgtcccatgacattttttagcatataaatttaaacataatggtaactatttttcttcttaatgaaggacacatctaaaataaatcatttggcttaaaattagcaacaacagtaataaccaaaacagcaatgactaacatttatttagtgtttactcggtgtaaagtatttttctaaacaccttccacagctggtgtgtaatgctgtgagcaatgaatattgtcatttcataaaaagtgaatttagtcaaatattctaaatatattcagtgaaaatgatttagtcatcatataaccaattaaaagtttactcataacattagtcttccatttgaattcaagtatttgggtttcttccctcacttacatttctttgacatgaaacgctgcactagaaatattcttagtagctgggtcaactgccgctatgtggcatgcattccttgtcttggatggctttgaagatattctcaaacattatttttgcaatctttgaaaaagtacaaaaggtagataactttgtaccctttgaatattgcatgatagcaacaaaaatgaaaaatctatagaaaaaagtcaggtggtaaataaaaatcgaaagtatctttatatataaacagtgtccataattcaaccattttaaagtatttgcaaaattggattattctgttgtgtgcgtttctaactatatacatgatgtaccgaatttaagaagcttattaagcttattggtttttactgcagatcgggctcatcaaggaaaaactaatccgtacagcataaacaaattagaaatgaacttaaaataaatatacaaacaaaatagtaaactttgtagtacccgaatataaggtgttacagttaacatggaatctgataacaccaattctttcctttcttaaacttcataggaaagctaaaaatactttaacttttgaaattaataaatgaaatacatcttatatttattgaacagctcctttctgaaatacattgtactataatataaaagatgaatgaagtaagtttttatttccaaatatccttaagtgtagaactgaaaagaaaataagacaaaccaacacaatataaaactcaacactttgtgtcaaatttttactatttttccccttctttgttttccctcttataccggtgaagcttgtgaatgttctcatctgggtaataattgtgacccaaagactgggcgatgcatttgccctcccaataccattggagagaaatgttctaaatgtgcacccaatacctggggccacagcattaccactggttgtaaggtgagtgaaccacttttttgctctgataattttttggagagatttttgttttgtagagctctgtaattgggcatttcaaaattcaatattacatcacaaaataatgtagaagtattactataatgtgattacagatattaatcaatatcttacagtttacttgtaggaaagatgatgaagtaaatatacatttatgcagctgaacacttgaaatctacaagaggggtaaaaagaacaaaaattctgtaataataccagaaaagagctataacctcatacctaggcacaaggacatacatgtgcaaagtatgaggatatgaggaactaattaattttccaaaaatctatagaaattgcccctgaattatgactaggttttaggtttcaggaagtagttgagatcattctgaagagtcattttaacaacatttagcttggaaaataatcattttttcccattggtagaccatagaaattgacatggccagagtcatgttcagagagatctatctagcatcagcagggatggtaacaatttataaggctgttgaagaaatattaataagagatgccaaaagcctggacccagtcaatgagcgtcagtgaagatatatagggcgcgagttacattttagaactcaggctgatacagcctggtgaattcattgatttggggaataagaaagagaagacttaggatgactcctaggttttgctttgcaatggagtagatgataataagtaccatgtgcagctataggaattataggaggaggagcaagttcaggaaggaaagataatcactttgcatttttatcagctttttgtgaggtattaataaaataaaattcacccatttatagtaatgaattttaaccaatgattacagtggtgtaatcatcccttgtgccccattgcagtgaagtccccatcaccccccatgtgcctactgttttgccttctagcattataattttccaatttctacaacttctgaaaaatagaatcgtagtctgtttttttgagggggggtttgtttgtttctttgtttggcttccttcacttggtgttacgtttttgtaattcatccatattgttgcatgtatcagcagtttgttctaaaaattgcttaataatattccatttgtgtaatgtacagtgacttgcttacctgtttaccatttaatgggtgtttgggtcatttctagtttggggttacaattttgctgtgaacattagcatacaagtcaaaagcatatttatggacaaatgttttctcttttttttcttaagaacactccacatctttgccaactcttggacttttaacccttttttaattttaagaattctgatgcatgtgtatttctcttgtttgcatttatttaatgcccagtaatgttgggaatcctttcatttatttatttgtcatttatacatcttttttgaagtgtttacaaagcttatgcccatttctattttgagttgtttgtttccttagtaatgcattgcaaggattatttatatattctggatacatgttctttaacgtatgttaaagcttgcttttcatatagattgctttttacctagtttcatcatctaatctttataaacactagcttattatctttttcttctatagtccatactttttatgttctacccaagaaagacaaggtccaaagatttctctcccatgttttcttcaagaagttttagagttttagctcttaaatgtaggtttggattccattttgaatattaatttttctatatatcaggtaatggtcagagctcactttttatggatacccaatttttcaaacattatttgttgaaaagactatcctttttcccattgaattactttgactcctttgtcaaaatctatcaactatatatatgtttatgcatttctggactcttttctgcttcaccgatctattcttatgttaatactagttaatatgttaattattgtagctttccagcaagtcataaaatcaggtattgtaaattcctcaacctcattcatcgtttccaataccttttgagtactttagctcctttacatttccacataacttttaaatttagcatgtcaattctttaccaaaaagcctgctaggatttggctgaaattatattgaattgatagatcaatttgggaagaattgacagcttaaaagtattagatatcccagtgtatgaacatggcataactctgcatttttttaggttgttataattttttctcagaaatgtttgtagtttttgatgtgcaagctttgcatatatattgttaaatgtatccgtttcatattttttatcaaaagcaaatgctgtgttccatttcagttttaaattgcttgttactagaatagaaaaatacaattatttttataccttatccttctatactgtaatcttgctaaacttattagttctagtttctttttggtccatttagtgagattttcttgtagataatcatgtcatctgcaaagagagatttacttcctttctaatctgtgtaacttctgtggcattttcttgtcctattgtagtaaactattgactagaagtggtggaagcaaatatccttgccttgttccttagtttaagtggaaagcattgtcttttataattgaaaatgatgttggctatattttacctgtaggtgctttttattgttttgaggatgccccctcgtgtttttagtttgctaagagcttttatcaagaatatgtgttcaattttgttaaatgacttttctgcatctattgagatgaccatatgatatttctttttaagctgttaatatgacagattatactgattgattttcaacatatcaatccagtcttacaatcctcagattaatcctgcttggccatggggattatccttttaaaattatgttgaatcctgtttgctagcattttcttaatgattttggatctacgtttataagaaatattggtatgaacttatttttcttgtagcgttgtcgtcgggatgaggtactgcaagcttcatgaaatggattcagaagtattccctcctcataatttataaaagcgttttcacaatcaatgaggtagaaaacagaaatactttagaggaacccaaaagctcactatttgaaaagatcagtaaagttggtaatattctagaaaggttaatcaagaaaaaagagagaagaaacaagcaatcaaaatcacaaataaaagggggacatcactatagatcctatagacattaagataataatatggtagtaataggaacaagttttgcctaataaatgtgataacttgcatgaaaagaacattccttcttttgcttactttgagtttaattttctcttgtgttccaagtttttttgttttttgttttttgtttttgagacggagtcttgctctgacccccaggctcgagtgcagtggcagatcttggctcactgccagctccgcctcccgggttcacgccattctcctgcctcagcctcctgagtagctgggactacaggtgcccgccactacgcccggctaattttttgtatttttagtagagacggggtttcaccgcgttagccaggatggtctcgatctcctgacctcgtgatccgccagcctcagcctcccaaaatgctaggattacaggcgtgagccaccgtgcccggccaattgtgttccaagtttcttaaggtgaaaccttagatcattgatttgtaatcctttttctctaatatgggcatttgatacatttttttccagaaactactttgtttgcactccacatattttgatatgctgtgttttaattttcacttggtttaatataatctttaatttattttggggataatgtttagtttctaaatatttggggaattttcaaggtatcgttactgttactagtatctagtttaattctaaattgttctgagaacataatctgcattatttcagaccttttgaaaattattgagatttgttttatggcccggaatagtgttcagtttgtttattataacatgtgcacttgaaaataatgtgtattctggagttgttggatgaaaacttctatataggtcaattatccttaacggtttttagatctacatgttctctcagttactgagagtgttggactataactttgtccgtttcttctttcacttctctcaggttttattcacatgtatttttgagcagtgatactaggtgcatgaacatttaggattgctatgtctttttgaaaagttggtgccttttgacattgtgaaatgtctctctttattcctagtaacattccttgttcagaagtgtactttttctgatatttatatagctattgcaactttctttttaatggtgtttgtgtggtatatatttttcacaccatcatctatttcatctccctttttagtattttaatgtgtgccttttttttttttattctgagacagggtcttactccattgcccaggctagagtgcagtggtgtgatctcagctcactgcaccctccaccttctgggctcaagaaatcctctcacctcagcctccagagtagctgggactacaggcgcatgccaccatgcttggctaatttttaagttttttgtagaaatgagatctcactatattgcccatgcttgtctcaaagtcctgtgctcaagtgatcctgcaaaattctgggattacaggtgtataccaccatgcctagcttaatgtgtgtgtgtgtgagagagagacagagagagagagtgtgtgtgtgtgtaaataacatatattcagatctttatttttcaacgaatcttaataatttggccttttaatttgaggagttaaatcatttccacttaatgtaaatattggtatgattggattaagcctgcactttgctatttgcttttgcttgccttatctgctcttgccttttttttttccttattgtcctgccttcttttgcattaatttgtataacatcttctcttgacttttggattattaaatatacctattcattttatttctttggttttgtctaggaatatacatctttaactttccagaatgtacattaaaataatattataccactttacatttagcgtaagaaccttacaacaggaaacctccagtcccctttcctatcctttgtactatattgtcatatatttttacttctatatattatacatctgacaatataagcttacgattttgatttcaatagtcaattatctttttaaacaagaaaatttctcctataactctttttccttgtgtatatcaattttaatgctttaaattcctttgtgtacattaaaattttcatttcatatcatttttcttcttccattaactacttcctaatctttatcattttattcctgttgtttcaggtctgctgacaataattttttccttttttttttttttttttttgttccagaaaggtgttttttttttttccgaagatgtttttgcagagtatgtaatcctaaatactggtttgcagcaatttaattatgctttttgttttctttttgtgtgtttaataattattttttcatgggattagttagatctgttggccctgtaggattatagttttcatcaaatttggaaatgaaagttgtcagccattatatctttaaatatttttttgttcttcattcttattgtctctttctggaaatcattttttgtatgttgggccaattgatattttcccccatctcactgaggttcttatttttttaattatttttgtatctgtattttttatttctgatagtttctattgttaagtgtccaaagtcactgattttttaatgcagcctaacctgtttttaatccaattgagtctattttttattttaaacattgtatttttttatcttttaaatttccttttggacattgtatatcttttatttctctactatactcacattttttcatttattcttgaaaatataatgtttataaacattagcatttttaaaatggtcatctgcaaattccatcttttttattgcaggactattcctactgactgacttttctcctgtttctgagtcatattttcttgattctttacatgcctgataatttttatttggatgccagacattatatacttttcattgttgtgtattggattttattgtatttctttaaagaatgttgaactttatgctggcaaacagtttaggtagtcacgggtcacttggattcttttgaagcttgcttttgagttttgttagggaaggtgcagcagaacagtctgaaagcccttctactaagctgtgaaacttctgagaatactacctagttggttactatgtctctttactctggctgttgaaaatatggcttattccaagctttctctgggctgtaagaatttttgcagcctagggttttccaatgccattttccttcatcccatgcatgcacctatcagcattcagtcaatgactcaagagaacgcttctgcacatctctggaattacctttctatctaacttctttctttttgaacacgtattctatttgccatcataagtttcagcagcctcggcttcctcaaactccactctttgtctctcaactcagctataatgcgggctttgggtttaccctctctgtgttgcagcctagaaattgcctctgtacactgcttcatgtttttttccttctctcagaaatcacagtcctgtgcttcctataattcaatatctaaaaacaattgtttcttggtttgtatttttattttagttggttgtgtactttaacagcttaacaaagaagaataaatactgtaaaaactaagaagaggctgttcaaaagaagaatattcttcagtgcctaatgcaacacaaaggtcaagtaggattagtgctgaagttgttcattaaattgaagagcaataataagggcatttttttatgttagtgggagtcgttccaattgattccactgggttgtgaaatattggaacgtgatgaccaagtgtggtcctgtttgaccctatagcagtaccctatagagatgtaaactttttttcctgctgagttagcacagatgaaataatagactctaaccaccttcacatgtatgataaaacatttgaacctggtctagaatatgctgacctagaggaaaacaagcatattgatgattcttcaaggaagttcagatgtctgacttcaattagacatgtgattagaaaaaataaaaactggacaggacattcatttttctattgtcaatagcattattaagtttaaaatgcaagagagctacatttttagaaagaaatcaaaaactcctcagaatttcaaagtgttcttatgaatatgaacaatgctataagtgtctatgactgacttttgcattttcagcttcaaatccaagcatccaccatatcacttggactcaggagtaagccctagggaaacttacaagagttccgttttatccacagaatgctatgatatagccaaactctaattaaactcttgaaattgaagttgatacctcatgttcaagatataaatcaggataaaatacattccaagtttctatgaaaacgtagttatatgtttagtactatcatttttactgatcattagataattactctgttgactaaagttgactgaattttttgattactttaaaatcaccatcaaaagtctagacttctgaatcgagaaatacttcaccattatgaagaattacaaaaaaaaacaaaactcatagagcctgtatcagacaattcttgcattgctataaagaaatacctgagactgattataagaaaactggtttaatgggctcacagttctggagggtgtacaggaagcatagcggcatctgtttctggtgaaggcctcaggaagcttccagtcatgatggaaggccaagcaaggacagacttccacatggcaggatcaggagaaaagcagggatgccatgcatttaaacaaccagatcttgccggtaggaactcatggtcacaaggacagcaccaagccctgagggatcagcccccatgatccaaacacctcccaccaggctccacctccaacactggggattatattttaacacgagaattagtggggacatatccaactgtatcagagacctctcaagtaatttatttatgagcatgtgttttactgtttttaaaactgggatgactttaatttaaatgaacagtgatttgagatttatagcttccctttctttgtgtcatggataatttctctgtgctaaggtgtgagcatacacatcatttgggctgttattgaagtagaatacgaagcctgccttctttcactagcaggggaatagtgagtaaattctctattgctaaacaaatattacctctatttatgatttaaatttgatgatggccatagtgctatctaaacacatggttaatggtctggtttattctccactataacttcctgaataaacttcctgatttggaaaggtcccaatgtctatttgtactgtcaacaattttgtaaaaattcatgctttggttttatacaattatttggataacttcatattttagttaaagataaagatgcctcacaggataatttaaatttattatttgattatagttttgataacatgattttctattaatacccgattatggcctattttgtttaagtgagttaatacatactcaaagcagttggcaaagaaaaactatgtaagtgaatatgtaagacatcctaattttgaaatttgattctacatctgatgttctttaagttacttggcggtgaggttagtgggttattctatgccttggaagctttgtccatatttataatatacaaataatcacattttagatctttgggtttaaaatatcttctagaagccgcccttattgcagcctttctactgattagcaataattagatagaaaaatacttacctataaagacaagaaataaagctaatcctgataatcatttttttttttttttgagacggagtctcgctctgtcacccaggctggagtgcagtggcgcgatctcggctcactgcaagctccgcctcccgggttcacgccattctcctgcctcagcctcccgagtagctgggactacaggcgcccgctaccacgcccggctaattttttgtatttttagtagagacggggtttcaccgtgttagccaggatggtctcgatctcctgacctcgtgatccgcccgcctcggcctcccaaagtgctgggattacaggcgtgagccaccgcgcccggccgataatcattttaataacagaatctgggaagatttttaaccaaatatttgggcatgaaagacaatagaggaggaactggtgatcttggaaatgataatctcataagcaaactactgttagcaggaacagaaacataatactcctggtaatggtggatataagaattaagctgaggagggaaagtgtgagatacacagtgagatgcagccagacttggatctaggagtttggccaggtgctatgcatatgactttaccactgggctgtagatctgagaaggataatagaacagcaccaaaaagagttaagtcacaaagtgcatacaccatatggtggcaaactcagacagagagaggtgataccctttgtaatgccaagtcatgctctgcttgggagacagaaactacactggttttttaaacagtgaaatggaattgttaactggtaaaaggtggttggttactaaaaaaggataaaagaaagctataaggtgtcccgagtacaggtacagaagagcagctactccctctaggctgagggaggaaagacagtgaaggagttaagggctaagagagggcatgctccttctccccacttgcagcaaagctgaggttcagaaatctttcaagagggcgttgctgtcataggaatgtacagcctatggatggtcaaacaaaaccaaaaacaaacacgtcggagtttgtaggcaaatgcatgtctgtagaagctgcccaccgttcttggaggataggagcacgctgggctactgagaagccgacttcaaggtcagagcgtgtgtgcagaccaaagctagtcagaagggtgcctatggagagacaatgtgccctcccaactaaaggcacacctgggattctttctgggccactgggctcccgtgctaaataatacaaaaataatgatgaagattctttttttttttttagacagagccttgctctgtcgcctaggctggagtgcagtggcgcgatctcggctcactgcaagctgcacctcctgggttcacgccattctcctgcctcagcctcaggagtagctgggactacaggcgtccgccaccacgcccggctaattttttgtgtttttaatagagacagggtttcaccatgttagccaggacggtctcaatctcctgaccttgtgatccgccctcctcggcctcccaaagtgctgggattacaggcatgagccaccgcgcccggcctaatgaagaaccagaactcagcttggaagtgtggtgggccgccattatggacttattgggtccttccaaggcctctattgactaagcctatcattctgccaccggatacggagaaatgtctacggggtctacctactgtatcacaaagcagggtgaatttggagctcagaaacagtagatgtataattggcacagctggtccctgaaatgacttattccaagatcctaaatgacattttagaaattcacttggcatttttattaaattgcaagaagatatgagctctgtaaatcaagagcagaaacctttaaaaggataatgtaagacaaaaagacaaatggataagcagaaattaaagatgagagaaataaaattattcaaaagaagttaagattgcaatagggtaatgaaaataagcattggtggtatgtgtatacaataaaacttttcctgtaaaacaggagctgtgaaagtaggataccaatttgagaggtaaatacagcaagaaatgtaaaacaaaggaaaatgattgcagaagacattaggatattatagatttggcagagagaacagagtgatgtactttaagaattatagatgatcctgaaaaagaaaattgattaattagaacagatgtaaaaatcaaaaacaaatctgaagaagaaacagtactgaatcaaaacacaattatgttcccaaactgaaagaactatgttccagtaagttgatggaaaaaaaaaaaacaaacccaagcttcagaaaattctagcaaaaatatgaattatgtaaataaagagaaaatcgtgtatacatcttgggcgaagaaaaacgttactaacagagacctcaaatcagaattgtatgcaagaataaatgccaaaaaacaatatactagatgttacttctcttcaagctctccttggattccccaagtctagtctgatgccctttgtatgttcacatagcattttggacttctcctattatataatgcttattctatcatgttatgctaacatatttacttgtctccctctactagaccgtaaggtatgtctccaaataaatgtttaaatgctacaattatgagataataaggtaaaataactttgtctaaaatttaatctttgagacaaagcagttggaaaaaacccatacccagcccctctctacctcagaaagagagaagacacattttctttctaattcacatagcattatggtttctggacgatcatatatttccataaatgcaggaagcaattttaatgtttatgttcactgatgtttcccaagtgactaaactagaatagtacaaagcctataacagatacatgattaatatgtgtttaatggaagcatagaaacattagaattaaaattttaagatatttcccataaagttgtgttaatggttgctgtttttatctcctctataggcttgtaactgcagcacagtgggatccttggatttccaatgcaatgtaaatacaggccaatgcaactgtcatccaaaattctctggtgcaaaatgtacagagtgcagtcgaggtcactggaactaccctcgctgcaatctctgtgactgcttcctccctgggacagatgccacaacctgtgattcagagactaaaaaatgctcctgtagtgatcaaactgggcagtgcacttgtaaggtatgtgctgctgacatgcagctagggaaaacctccctcaattctgtttccattgctcagttttaacttcattcagtgtttgttatacctgcttcattaagctaaacaaacagatggacaaaatctcattgccagacatggagttttcattgatatgcatttgttggcataccgataaacactgcttttctagagcttattttcaacccaaacccacctttttttctagttggtggagatgatctattttcaatggtatagtgattttttaaaaaatatattagatttgcttcgataaggacaatctgggaggggtggcagggaagacagttcttttaagcatcatcagagaaaatcacagctaaataataaggcttataaaaaccatttctccaaaaattaatctgcaatcgctgtatactagaaaatatatttactgctgtggaagtttagtaaaatttcaacacatataaacgctgtcattacaaacagtgactatgtgcaaatttcagccctcattaatatggttaaatgatgtagaaaaagagccaattaaaaaggtaaaaaggatttttcccctcagatagttctgaaaaatcaattccaggataaatgcagtttaaactgtgtcagaggtatcttttcaagataaaatctatgcaaaaagggacagaggaaacaggaagataaaatctgggtagtggttgttaaaatggccttgagaattgaggaaaatggcagtttctaccatcaagggcttcggccaataccgagtacaatgctgcattcttatatctcgcaattatgatcatatatttaatacatgttatgtgtgtatatatattacaataattatataaattgatattttaacctgctgcctatttcttacagcttacaatagcaccactgtttaagactcaatgtttttatgttgcttttgaaattttcatgagtctttcatattgctcagagcagaactgtagaaaatgtaccacttacatttaagaaacaatgtacaggccgggcgtggtggctcacgcctgtaatcccaccactttgggaggccgaggcgggcggatcacgaggtcaggagatcgagacaatcctggctaacacggtgaaaccccgtctctactaaaaatacaaaaattagctgggcgcggtggcgggcgcctgtagtcccatctactcggaaggctgaggccggagaatggtgtgaacctgggaggcggagcttgcagtgagcagagatagcgccactgcactctggcctgggcgaaagagcgagactccgtctcaaaaaaaaaaaaaaaaaaaaagtacaatacctttagtcttatatctatttaaaaataaagcatttttaaaagatccatgaactcctaacaatgaggttaactacatgtgccatttgagatgtgagtctaatactcagtgttcttctgttttgttttaaattttttaaaaagagtatgctcccgttatgcattctcagggtgatttctcccctaactttgccgttataaactctgagggtctcttgtctttcctcaggtgaatgtggaaggcatccactgtgacagatgccggcctggcaaattcggactcgatgccaagaatccacttggctgcagcagctgctattgcttcggcactactacccagtgctctgaagcaaaaggactgatccggacgtgggtgagtagggaactgctgagccatgtaatggtataatgttagttcctgctggtgtcttttagtcaggcactgaggggtagtagaaaatggcaaaacatttaagtaaccttttcctctgtgaacatttaggaacagcaaaggggtcacgtgccattagagagttggagtaaatgcctttcttatttgttcttaaaagtagttcacttattgataaggaaatagatgccaagtgaaaaagaggaaccttgtccgggaagcattatgttttgagatgggaagagtgagggcaccagagcatgaatgttgatatgagctaacacaccaatgagaaccaggacttgtcacacattcattccaaccaaccttaggcaatcatgatttttggagtgaaaacatgttcatttttcattttcctttaactctttctacatttagattcaatttgtgttagtgtgaaaggctccagtgtccacagatattgtggctttcactatgtgaattagtcaaaaagatttacgtcctgccatgcttgcccactgcgtgtgagttctgttgcttgtgagaacatcatcagaatgggtataggaactgcagatagacatgcagttcgtaacttagttttaaagaaatgtccaaagcgtaaattcagccttctgctgtattttgaccccttgcaggtgactctgaaggctgagcagaccattctacccctggtagatgaggctctgcagcacacgaccaccaagggcattgtttttcaacatccagagattgttgcccacatggacctgatgagagaagatctccatttggaacctttttattggaaacttccagaacaatttgaaggaaagaaggtaagcacaagaactttaatgtcaagtgagaacaagataaaatctttttagaatcacaccatttggagatttatccaattcctcattcttctttttattttgtcagttgatggcctatgggggcaaactcaagtatgcaatctatttcgaggctcgggaagaaacaggtttctctacatataatcctcaagtgatcattcgaggtgggacacctactcatgctagaattatcgtcaggcatatggctgctcctctgattggccaattgacaaggcatgaaattgaaatgacagaggtaaagttagtcattgtttggtgcaaagataccaatcaatggttttgcattcagttttgtcatagtgatttctcttcttgttaacagaaagaatggaaatattatggggatgatcctcgagtccatagaactgtgacccgagaagacttcttggatatactatatgatattcattacattcttatcaaagctacttatggaaatttcatgcgacaaagcaggtaaactctaatagaaaatattcaagctcttattttagagtctgtaaggaaggttattgacctacagatatcagataagaaagattggaaagtgattggttttgcagtataatgatagaagataaaccatggaggcttccctgtgacctggaagaagctactaccattcatcagaaaagaaaaatagcatgagaaacacgttaaagggaaaaaaaaatatggaattcactgcagacatagtgagtttaagatgccagtcataaattcaagagatcatatactgtagatcaggtaaaattaactgttgtggtataaatggattataaaagtgctgagaaagtgacctcttcacccatcaggggaaccaggcagggccaagttggtccagtctcctccaactgtgagcattctaatctgttcaccccagtgtgccatacaatgttgtcattttccctatgcatcatgttgagaaatgattctgaatcactttgaaaaaaatcacacagaacagcaagaatgaatgcaatgttgtcgaacctacatgatgggaatacttcaagggagtattccgtgttttcttatgaccaaaattggccaactgaaatgaggcttgttgggtctgacacttaggaccacactggtaacattcatgataccggtctcagtgtcctggggcagaattaatctcaagcttttaaagaaagaatgtgacacatgagcccaatattatgagtgtaaactattattttccatgaatataattgtaaaaagaaggaataacatattgtcaaaagtaaaaagatgattgtttaatttgaaagagtatgtttacagaacatgggaatggattagtaatgaggaaaatattgaaatataaaataaagagagaataactaatagaggaaccaggagacttccacatcatggaccctcatggtcatattctttgagtagacggttcaccttatccaatgggataaaatgagaaatcatacagatttaggtaagtttcataccatggaggcagaaagttgaactgagttcatataggagacctcaatttctctttcatgtcagtctctgttacattctatgagaatatagaatcgatatatgtttgtaaatagtcttatataataaattattagacctgcctaggaaagcaaaacagaaaaattatgaagtctctcaatggccaactaatgaatataaaaatactatttttcaaatgtttatactggaataagcacacaagacagcagaaaaccttttatttcatgcagaagatccataatgcttttctgattgatgtagagacttttagtaaaagagtaaattaaggaccaaaattcacttttatatatgtattccttgggtttccttttgatatttctcactataacaggagattatttttatatgaaataataaaaaaaatatacttaaaaaacgctgttatctatactgttaattattttagaatatcacatgtaaattaggtggcagaagccatagcagatttgcatgtcttagaaaatagcaggtaatttcgtgagtttgcaaatagattattttgcaaatggttctgtactgcagtaaaagagtttggtagtaaacagaacatcttgttagtggaactgatagaaacaatattgtcattcatctttaattatactttctttgcttctctcacaccaatttcaccttcctacactgtgacactttgtcttttttttttttcccgccctatgtctttttcttttgtcacactgttttacatacctcaccaaatgagatcttttggtttaagtgaccgtttttttgaaactttagaatacatttttcctaatctcagtaaaaactggggtcatagtctcacaatgctaagaacaaataaagctgtcatcagcatttgattttgtaaggcagtggaattgtggcaaaggtttttaaaaggtttgaatagtccccctaaagtaattaaaataaccttgtatctttatttattcaattataaatttaaatctcaaaagcagagagtttaagagtttatattctgtttgaggtttgaactttgtacattgtatcagtgctggcattatcttttttctttgcttttgtttccttttataaagtttaatttaaggaaatagcaacttttgcatttcagtagttatttaaatggaagctggagtttggccaaatccctgatgcaatcaaagccattgctctctaatcccctgaaaaaaaaaatggtgtattgcagaaatatttgttgttgctgccattcaagcttcacttgatttgtaaacacttgcgggtctgttatgtgcattcatgtgcaagagaaaggagaatgaagccagtagctcctcgggctataaaattccatggagatgccaatgcaaagttaccttcttactcccacagagagcccagagaacataagggagaagtttttcttgcagaaggggagtggtttgcttacagctcaccaccactgtgtgtacttacagggagcagagagtgaaacctgaattttaattgaatgtgtgtttcatcaagaccaatcttcagagtgcagattacaatgctagcaaagaacatgcattcataattcagtttcaataaaacctacctatgcttgttataaagtttatgactcaaactccttaaactcctggaggtaacttttatttgaagcaaaactattcattgtcacattttaaagtttatttcccaaacatgtttgtgttaccagttagtccatcataaaatagtcccagtttatggactacatttattttttaatgaaaagggtattaatatgttattttcaattatgattttcttttcaattataatgactatttcaccatcagaaaaggtgagttaagttacttgaaggaattatttaataaagttaagaaaatattattttgaaacattatcctcagaaagaaatcaatattattagattatgcgtgatcattattttctaggtggttttctaaagttcctgaaaggtcattcagagcattgggaagaagaaatttgggatagtagtaaattcaaagcaatttcaccagtgcctgtacgaaataattgaatggggaatgaccttgggttgtctgtttgcaagaatataaatgtctaattaattggccgtgtctacctgaagccactcacattttaaaaagtggggggaatatctttataataacttttcaacaggatatcagacatccaatatactaaacttcttatgatttatgtgaatattttgctaatatgtactcttaacatttgaggaagcaaaaatgcaatattaggatttggtacatgagccccagaaatttaaacagcttcaaaacaatgttaattatcttgatttaatcatcccacaacttatctatgtatcaaaatatcacattgtttaaataaatatagttgacccttgaacaacatggtggttaggagcatcaaccccacctcatgcagtcagaaatccacatataacttttgataccttcaaaacttaactactaatagcctcctgttgaacagaagccatactgataacatagtagattaacatatatttgtgtgggtattatatattgtattcttataataaagtgagctagagaaaagaaaatgttattaagaaagtaataagggctgggctcagtggctcatgcctgtaatcccagcacttcgggaggccaaagcaggcagatcacttgaggtcaacagttcaagaccagcctggccaacatgatgaaacccagtttctactaaaaatacaataattagctgggcgtggtgttgcacacctgtaatcccagctactcaggaggctgaggcaggagaatcacttgaacctggtaggcggaggttgtagtgagccaagattatgccactacactccagcctgggtgacagagtgagactctgtctcaaataaataaataaataaataaataaaaagaaaaaaaaaaagaaaagaataggaagagcaaatatattaagtggaagtggatcattgtaaaggtcttcatcctcgttgtcttcattttgagcagactaaagaggaggaggaagaagaggagggattggtcctgctatctctgggtagcagacgtggaagaaaatccccgtacaagtgaacccatgcagttcaagcccatattgttcaagggtcaacttatgtacaattattatttgtcaattaaaaacaaaaagacaatagaacatacttgaggttgacaaaaacgtgagaaggatattgctgtaggattgattgtttactaggtgatcttaactgactgtcatagtaatctaagtacattctcgctgtttctaggatttctgaaatctcaatggaggtagctgaacaaggacgtggaacaacaatgactcctccagctgacttgattgaaaaatgtgattgtcccctgggctattctggcctgtcctgtgaggtaagctacctcctactaacctgcttaatctcaagtcacttcaggagctaaatggaaatactcccagaagtacctttactgcatacatattcttaatctattttatttaatcttccactcacagtgtgagacacagtggcaagaggataatgttattgatatttagtacaaatcatacctgaagggaaatagttgatcaaaaatttaaagatttgtgaaaatatttaacaatcaggaattaagaatgttttaataagcctatttattatagctgatctattttcttggaccacttctgaagagttagagacatttaaactgcaatgattaggagataggattatactgggttttgaaaatatttttatatagaacacgacaaaacttgtacactaaatagcaggctgttccctttaacataagcttctcagggaaacatatctttgttccaacagtgctgctatgagtcattacagttataaaactatcttttttttttacattttaaaagtaattttaaaactgcttttcaataaacttgctgagatattctcttgtctgccttcaagattgtcaaatttcttaggatctaatttctataattgtgaaatattaataggaacagtacgacttaagggaggtggaatgaatagatgagaaactggcctgggtttgaatctcgacttcaccatacagtaagcctgagaccctgcactgggtgctacacctctttaggctttagcaggtaaacaccaagtccctgagtaactaccactacactttcacctctcccgcagaccccacagtctgaagcctggcatgcatggggcctccaggactgctccagccctacagctgggattctttctcattagtcaggctggctggtgctcacagcataccagttagatattattaaatctccctcacctacagcctgagtcttatgaagactaaatgagctgttaatgttaaggattcatcacagcacctggtgtgtagatgatgtaagttttgatggttaatattattattaatgtaatcactagttatatacccatgtattgattcagttataaataattttatacatcttattttgtaaataggatttgagaagttgtattaagtatggtacatgagacagatgattccactaggtcaaaactgaagtgcaacttaaaaataatgagtatacatttcttgagagggacatggcatcatgaaaagaaaaaggaatttggtttcagtgaatcctacctagctgcactacttggacaggttacttgctctgtttttgctaaatcttgggtttttacctatacatcctaaggattgatttaaatggaaacgtatgtgtgaaaatccctttacaaactgacatgccattcagcttagttaccatcacatggattccatatagttcaaggaaaaagtttataaaataactgcaactgttttgtgacacatgcttaaaatgattttctactctttcctgtgacttctctgaagggcaatatttatttacatgtgtccattttgagctaataaataatcaagtaatccatctccttattaaattgtatttcctacatctatttatacacacactagtaaacttatactggtaagcactgcttatacagtaagcactgctctttccaatatacatatgtacacatagtgtatgggtgaaaactgagactgtgtggcacatatgaaatgagtgacctttccagtgagcattgaagattttaaaatggaggacagaaagaatgtgagatttttctagacaagagatggaatttcctttatcccaggtagcgtttggttttacttttaactgtgtgcacttgatcaatgctcttaattgctgtagaccttcgttattatatagctatccaatctataaaatgacagattgagttgaagttctaaaattctctgattctgcaatattattttgctatagaaaatattctgtaagtagtcaaggttgacctttagatatcttgaagagaaggttattacagctatatttttctgcatttatttgaaataatactgttcacttgtgaacaaaaatgttagtagaatagcaaattattttcatgcaaccaaccttccattctggatttaaaatgttaaaaacctttcttcatatgattgatagactttttgaatagtacattcaaatacatgctttcccattaatttgagtcattttccatcattatatgaaaatgtaaatgagcacaaataaaacaaatgataaatgaaaatcaagaaaaactaagaatatgtacaaattgtcatctgcattagtggcttcaccgtcccatgactttcacttaagcatctatttacagacagtaattgcagtaatatcttagtagagagattacagagataaagacctatctctcataataatgtacctgaagtgttttccacaacccatggcctctaatccattatacctcttatttataattcatcttgattcctaagtgtaattacccaggcataaaatcttatcatcaaagcaagagctaagggcagttttgaaataatacatcccattccagtaacatatgctttgggtcatgaatacacaaagcagttcctctacaatatttttacaaaatgtatagtattctagagacatctgcatctacaggctattttatttcatgtttttatccacaatatggttgcaagtaaacaaaattaagtatcagttactgctaaaatatagccagttgtaaagactcttagcctttgcttgttacctgcactgttatgacagtgcaggcctggtcattaaaaatgttagttttagaaatgcctaattattataatttactatttgcagaaggggccagattaccttcaggagtcaaacaaaggacaccatttcctcaccagatttcttggtgttggagccattgagtttgttatactttatttaacctgtctttgagtgacattaaatataggttattgcccaaactgacctaaactgagctttatgcagttgaaaggttatatgcaggtaccattcttacttatgactttctttcttaaatatggaaaatattcagccttgcgtgtgcagctctctgcagtaatacggaaatcagaaatttgtcaatgatctctaggtcatgttttgatagtttcagcttctatcctgtcttcccatattttaaaagggctttaggcttgcagttgaatggccggtgtctattggatcgccactcagaagctgtcccttgtggctattaaaactgatttttttaaatctccaaataatttatacctatcgtcaacacataaagcccaaaaggcaaaatgtgaaaatagtcttagctacttacatatgcacacatctatcctttatcacttctgttgcacaccagagacccaaagtctctgttttcatgtacagacaagtgttgaggaacatggcatgggtaagttatgttataattttgtttacaaatataacctaaaacaatcatggtatctttatttttagtttatttccagcaaacatagaaaaaactatttgagatagagaaacctattgatttatgtatgacaattattaaacatgctttatctcaagtaatcctcagatccaccctatgaaaagcagaacctaccattgattgagtgcttactatctcctgtacacttcctaatacagttacaccaacatcatcgactataatttatgatccccattttacgggtgagagaattgaggcccatgatcacacacctacacagcaattcaaacctcaatgaatctgtttccaaaacctaggtaaacttgtactcaactattatattatgcagtcatgtgctgcttaacgacagggatacgttctgagaaatgtgtcgttaggtgatctcctcattgtgcaaacatcatagagtgtacatacacaaacctaaatggtgtagcctactacacacctaggctacatgggatagcctgttgctcctaggctacagacctgcacagcatgttattggtactgaatacagtaggcaattgtaacataatggtaagtatttgcatatctaaacatatttaaacatagcaaaggtacattaaaaatatagttttataatcttatgggaccactgtcgtacacatggtcctatcattgaccaaaatgtcattatgcagcagcacatgactgtacaatattcctacattccaggtgaggaaaccaaggcacacagtattcagaaccttactacatacaaagtggtgaaacaggaattaaactcgggtctgcctgattgcaaaatccatgcaaagatacaagatagagtgtttttatgagctccagcacaagcatctatttttattactaaactctgaagaaagaaaggagcgcagtgtgcagccctgagcctaggataggataggtctctacagtctgcttcattctctcctctctaccctcccacatttttgtgtaaatttaatctaattttttgatgaaacaatatattatgaaaataaattaaagatagacgagagcagaagaaaattgagccatgaataatttcaacagtggggaagagaactttggaaaagtttaaattagagtagaaatgggtaagaggagctcaggaaagtatttatttgcttttctttaattccccattgtgttccagaaaggattttagatgggactcaaaaagtaacttttttgcttccaattccaacataatcattctcacaaacttttgtctcagttcaccaagaggaaaaacattcaatattgacaaacaccctaaaaattatttaaattgaaagaatagtgcaaaataatcaaggaaaagagagaatttctgtttttttttttaaaaaaaacagcacgttttaagtttctaatctttgcgttgtcaaatactctctctctctcttttgctacctcatagaaatttaatccatcaggatacgaaataaatcaaaactaatctaaaatgttaaaactgaaagacactttagaagtcatctgagttaacctactcatttgtgggatgaggaaactgggtctcaaagtaacttgcccatatctctcagacaaaactaacataaaatcaaggcttccctattcattccttttatagtaccaaggagtggtatgcactttttatgtatttatttatttttttgagatggagtctcgctttgtcactcaggctggagtgcagtggccagatctcagcttactgcaacctccacttcccaggttcaagcgatgctcgtgcctcagcctccagagtagttgggactacagacacgcatcaccacgcctggctaatttttgtatttttagtcaagacatggtttcaccatgttggccaggctggtctggaactcctgacctcaagtaatccagccacctcagcctcccaaaatgctgggattacaggcgtgagccaccatgtctcgccttttccatgtgcccttttaaatgcacacatacacaacagagaataaggagcttgccagtgacgctgcgctctaattgtctgttagacttttctaagagttttaaaacaaactcgggcctcaactctcccccagaggaattgactccacctcctctagggctggaccggaccacagactcccactatgggcgcttgtctattgtgtcaggctgcctgtcggggaaaaccacagtaataggaaaaatgtgttgtgcgttagagtagacttcaccttagggctcgccttcacatttggacctacaacgctaaactgtacaattcctcgatgaggagtattacttcttgtgtttctttttcttctaagatttattttaaacttttgtttgagcttcaaggaaacttcctctcaatttgtgtgattttttacacaaatttttacagacagtaattacagtaataacttagtagagagattacagagataaagtcctatctctcatagtaacacacatgcatgcacctagcaagtatgtcaataacacaacaattttatatatatataattttatatacatatttatatattatatatattttatatattatatatataatttatatatataatatataatttatatattatatatatataattaatatatatattcaaggatgaaatccatgcacagaaaatccagttttattcagtggtcagcttgctaaagaattggaataacccacactatgaaccacttttaaatagatcttggtttatttcttcagttatgcttaaactaattcttcaaccatcatttccaggacttattcaataataatggcaaaaatgaaccttgctttttaaataatatgtataaactttattaaattatatgattatgtccaccataagacaaataagactcaaaatagtttgaatactattctcagttttatcagcttgctcaaagttgggacattattaaatctcattagaatttattttaggctgtgataaaagcagagagtctcttgattaagtgcttaattgaagtacttttgcattatccaaatcaaaataaacaaggagggtgctagctattaagctagatctttttaaggagcttctttgtatatttgtctctggactgtctaggccagaaccaaagggatgtggaggtactagaaagttcttaatctgatattttttctggcttagtcagcaatcacttttctttcatcaatgggcataagatttttaagtgaaaaaaaaaaattctacttaaccaaggtggtaaaatagtccccttgtaattctccatgggatttgaaaaactgactcctaccttttattcataaatcaagcaatgtctgcagctatgcatgaggagaggactgagcctgaaacacaagacggttttcatcttcgtgccagagctgtggactaccttccagaaagccagagatgtttgttgatacattttcataataaacccaaatgaagatggaagtcttgattttgcatatgtcagcttcactagaagttttctgtttgctttcagatttttattgcaaaaagaaaaaaattatatcagggaaagataaattttattggtggtctaatagtcgcaagacatgtacagcttttattattttggatttcttacttttatagtctttaaattatatcagtataaataatgcatccataacactttttatttagttttttgctgtgtttcattggacatttgctagttatccatcaagcacagtaaaagcagattttaggtgttaaagacattggaattatctttattccatatgacaatgttatttaaaaacaaacatctttttcaagaaaaatactctttggagctttttcaggctgaattgtatctacaaataaaagctttccttggttaaaatctgattacacatggatgccgcccgaacaccttggagaccaggaagaaatacacattaagtatcaaaatcggcacttgcgtttgtaagtgatgttgcccctgccgcaggtgggggaaggccagtctgtctttgcagccactgaagagctcaagcgttgctaatgcagtatttctaactttgctgtcctaattggcttccttttctttcaggcatgcttgccgggattttatcgactgcgttctcaaccaggtggccgcacccctggaccaaccctgggcacctgtgttccatgtcaatgtaatggacacagcagcctgtgtgaccctgaaacatcgatatgccaggtagtcctctgagccttccttgaacaaggtccatgtgctcattcctctttacacatgctcagcatctgcatgcagaggccagctaaactgtaagggaatgcaactgtgtgtgtgaaataaaatatgtaagggaaaaagatattcacagattctgcattttaaaaagtaaggaaaaaataactgggagaaccactgagcatgtcaagaaatagaattttagcagcatcttagaagagcaccagaagacatacctatttaaaaattatgtgtgcctttttttctgattattttcttataaataaactttctataaaatttggaaattacagaaaagaattaagaagaaaaaattcacccaaaatgcaacataacattttaatgttttaagtatttcccaccaatttttacatgtgtttatgaataagatttatataacaccatggatgcagttttatgtcttgtcctttacatttttacctatcatgaggttgtattatgttgttagatattatttaaaatctttacgatctttgtttggatgtcccataatttacccatttcccttagaattgaggtagctcttatttttttatgtttctgctggcaccctgcactctctaccaccatctgcattagaacaatcagaacaatcatgtgttccaccctttttatcgtagtcactgtaagaaattcaggttgcccctgtcaccacttgtccctcaagctgtaatctgcccacagctcatctttgttaagcccatctcccacctctgctcaccttctgaaaccattctactgagccttgtggaactcatggtcaaaacaggcaaaataccccgcagaatcctcctcttccctcagtgttctcttcatcatgctctgactgaaacccaactctcactttgcatgctgctaccccggcagccctcttaaggagtagccatcacctttttgttttttttttcccctgagatgctgactcactctgtcgtgcaggctggagggcagtggcgatcctggctcactgcaacctccgactcccgggttcaagtgattctcatgcctcagcctcctgagtagctgggactacaggctcacgccaccacacctggatattttttttatttttagtagagacggggtttcaccatgttgtctaggctggtctcgaactcctaacctcaggtaatccacccaccttggcctcccaaagtgctgggattacaggcatgagccaccatgcccagctgcagtcgccatcactttctttcactcccttcattcccctgagtctgaaggtgggggcaggttttcctgctcctcgctgccagtttcatattatccatcctcctctacatcagggtccacaacccctgggccacaggaggatattggtccgtggccttttagaaaccagaccacacagcaggaggcaagcagcaggcaaaggagcaagcgcagcttcattagcatttacagctgctcctcattcctggtattactgtactgcctgagctccacctcctgtcagatcagagacagcattagattctcataggagcacaaaccctattgtgaactgcacatgtgagggatctaggttgtgcgctcctgagaatctaatgcctgatgatcaatgatctgtcactgtctcccatcaccccaagatgggactatctagttgcaggaaaacaagcttagggcttccactgattctatgttatggtgagttgtataattatttcattatatattacaatgtaataataatagatagtaataataataatagataataaagtgcacagtaaatataacatgcttgcatcatcacaaaaccatcccccaatcctagtccatggaaaaattgccttccatgaaaccagtccctggtgccaaaaacattggagacgctgctctacagcacccagctttgactctcatgcttccctctatgtgccccctctccatctgcttgtcgaagtcacctactaacctttaaataccccacatcattccttgctgattttccctgtctaattgtcattttccctagcactactcctgtcatcattcttagtgattttaatgtccatgaacttaactcttccatactcttcactttcagtttcttgtgcctctctggtctccatttgaagcgtttttttgttgttgtttggtttttgtttttttttttttttttcccactgtgtcgtttctctctagttcacttcttctaaatacttccacttcaatgtgtgtaatctcacaattgatgcacacacttttttcttgttccttatctcatgctttcactgtagtaaccagcttaatagtcatgatctttcattggtattactgctttgcaacgctcatttccctggctactcctttacttattttttactcaagtgaactccaacactgtgagaatcctaccatctcctccatacctgcaccttctttttttttttgagacggagtcttgctctgtcacccaggctggagtgcagtgacgcgatctcagctcactgcaagctccgcctctcaggttcaagccattctcctgcctcagcctcctgagtagctggaactacaggtgcccaccaccatgcccggcttctttttttgtatttttaatagagacggggtttcactgtgttagccaggatggactcgatctcctgacctcatgatccatgattcgcctccttcggcctcccaaagtgctgggactacaggcgtaagccactgcgcccggccacctgcaccttctaagctgaacgtggctgtagaaaaagacaattgtgccatctaatctcaccttaaattcatgatccctctcttcaaatggaccctttgtgctgctctgcaatcatgccacttttctctcatcctttttcttttccacattcctaggtgattatttcatacctccccctccatcctcaagcctaaacctctcctctcaccccctcccatccttaccctcagttgatggtgttgcctcttatttcattgagaatttagaagctgtcagaagagaggtaacaagctcccactactgcatgcacccacttttctgcatctgtgcccaattattatgactcttttctattactttggatgaattattcttgtttccagaaaagatcacatcttccccctatgttctcaattctacccctctcccgcttgatgacatcactctggctaatctctcctccttcttatattgtcactttttttttccatcttaaaagcaaaaacaaactctcctgactcatttcctttctaagtaaccacttcattcttctccttccatacaatggagagctgtctatcccgtctataatttctcttcatccattctcctttgaattactaaaaacaggctatcacctcctcttctatactggattcaatggctaatctacagccaccagtgttcaccttactatatctaacagccatgtttgccactgtgaatcaccccattcttcttgaaaccctttgctcaatttgctttccagcccatggcattctggagatgttcaaattccatagtggctccttctcagctttcttcattactctgaaatctacatagtggtattcctgggactcaatccttggagcaatttgtttctctaactacattcattcagatggtgatcttacccaggcatgtggctttctgtactgagatattttgatattgacatcccacagtatttactattaagtttatgatttaattttatatccactcattactatggtgtggggaggtaatttttctgcagatatgtattaccactgtaaagaaacatttactgattaatatttccttttccccttgatacattattgtatctgaacatacacaaatttatttcatccatattaagatatgtttcagtataatccattttgttttacttaccttttagctcttattacaatgttctgcttaccttcattttatgttaacatatctgtaaagcaaggtcctttatttctcttctcttctaattaactagatgctcttacatattcttccagctgacacttttatgcactattttaatctcttccacaaattttaattacaatcaaaattactggaattttgattgtaattaaattagcctatttgtaaagaattgctatatttacactagtcactcttctctcttcagatattttatgtcttacagtaaactgttttaaggttgtctatatcaagcacgcatttctcatataaaaattctttctatgtatcttacattttcattttaatggtagtaaacattacctgttttgtttcaacatagtaaatgtactaactggtcattattggtaaaccttaactattagaataggtgtttttacatgtatttgatatccaataacttttattttagttctagaagtttatcagttgattcagttattgttaagtttaccatttttttttttttttttttttttttttgagagggagtcttgctctgtcacccaggctagagggcagtggtgctatcatggctcactgcaacctccacctcccaggttcaagcgattttcctgcctcagcctcctgagtagctgggattacaggcacctgccaccataactggctaatttttgcattttagtagagatggggtttcaccattttagccaggctgatttcaaactcctgacctcaagtgatctgcctgcctcggcctcccaaagttcagggattacaggcatgaaccaccaaacctggcctataatactattatttgcaaatattataattgtgctttcacttgtcaaaagctatatctgttataataataatttcatgtttttaaattgtctcccaaaataataagctttctattttattactgattttaatatgattgccttaagtctttcaccattaagtatgatgctgatggttagtataagaaaaacatttcttgtcatgttacgaaaactgctttctattcctagcttcttaaagatatcctctttcaatcaggataagatatttaaattactcatatgcttaattgtggagagtggagtgggaatgtagatgcatttaagaggtgatcatatataggtttttcaccttaaacagaaccataaatgatattattgactaaataaataacttaatattagccatccatgaattccagaaataattactatcttgctttagtatgctattttttcatcaactgcttgcctgacaaattcaataggcaatttgagaggaaggggttaatctatacacattcttaagcaagaattaaatgtatatgtcttatgcaatcttcactggcatttttagcacagttatatttgctttatatgattaatttagaagcatttataaataatgcagtttaatttcaattttgttaggattaaaattaccgtctttatactgtcctcttttgaccaattgactattatgactatttttgttctctaagaattctaaaagcatgtctattttctgaggaatccctagatgaagtaaaaaataaatacttccattaaacaaacacagctggtataaaccgttatgctccaaatttttatattttctttcatggaactcacaacttttgaatttaggcaactctgttcatctttgaaatggcctcatgaggcaaataagaaatagctgttattactcccacacagtaagtgaggaaactgaagcatactgatttctcttttatgtgcaatatggctctcagtttcatatcatatccattatacagtgcaatgccctctaccttggtatagtggcaagcatgaactctgcagtcagagtgccttgattcaaatcctggcttcaccccttactggtagtgtgagcctactcaatttatttaacctgaatgaggtcttagtttcttcatttatataatgaaaacaataatagtggctactcacagagtttttgtaaggatttgatgaaatactcaataaaaggcttagaacattacttagtgcatggtacgcttcataaaagcaattatgataatgatgatcataaagatgataattaccatacacattatctaccatttatagtcgaagaaccaatcagttgataattaatcaaaaaataagtaaaaaaaattcatgtctagcgctatgctagattttcttactgtctcagtccatttcggatgttgtaacaaaatatcataaactgggtagcttataaataacagaaacttatttcccacagttctgaaggctgggaagtccaagatcaagtctccagcaaagtcagtgtctggggaaggcttctttcctggtcatagctgaccccttctttctttgtcttcacgtgttggaaggcactagatagctctctggggtctcttttgtaaaggccctaatcccactcatgaggctccagcctcatgatgtaatcacctcccaaaggccccatctcctattactatcacactgggagacaggatttcaacatacaaatttttggagaacacagttgttcaggccatagcaagccttaacccccaacatgatgatatttggagatgggcactcacttatcttgtttttctttatcttcacacctttccctgaaaatataaagtgcataggaaagaaaactgtagaaagctttatagactaaatattttaaagaaacccagatcaccttgtaactatgctcttcatcatacctaatgatacttgcaagataattgttgcttcatcctaggcattaataaatcctgtacataggcatgttattatgaatagctcagtgacattgctccttaagaaaaaaaatttttttgaagactaaaacctatgtaatactgagtccaaggggatagcgggaggtaagtgaactaacagtaactagtacacacacataggtagtaagtaggtagatagatagatagatagatagatagatagatagatagatacagaaggaagatattttcatttaatcattgctacaccctgtagtcagattatttctcctattttttttttcacatgggaatattgaagacttagctagctcaaacaactttttaaagataaaataatttgtggaaatattattttcactctatcataattcttattttaaaaagaaaataataaaaataaatctctataactgatcattgctgttgcctgaaacatttaaccaattacctctatcttcagtaaatagacagatttgtaactagaattcactattttttgttttgtaaaccttatttaatctacctaacaaccttgccagaatagagattgttagcattatactaagttctggaaattaatgctaagaaaatgtaagcaacctataaagccttgaacaaaaagtattagaagcaggtttcaaatccaccacaaactgcgttctccagacggcaagagagtgtaaacactctctgctgattaaatgagtttgattttacaagctcaagtgaattatatcttagagtcgggacagaatctgcaaaagtgactaggggtcatgtatggaaaacacttgagaaattgtgagaacataaaatttgtcgcaggatagtaagcaataaaacatctttccaggttttataaaggaaaataaaatgtaggaaactgattgtcatctccagtgaaacttaagtattgcttacttaacaaatatctgtcaactgtggaaaaaataaacagtgctcattaggaatcagaataggttcactttgtcagaggcaatggctcatgcctgtaatcctagcacttttggaggccaagagcggaggatccaggagttcgagaccagcatggtcaacaaaggccctgtgtctacaaaaaattaaaaattaaaaaaaagaataggttcattcaaaataacacatatcaaactaagtgctaggtttactgtatatataatatctgaaaacctagttttctaaatcccagtaaaatatcaagtttatcagacaatgtgatacatcatatctcaaattcagcaaaaaataataactgctattatgtgtccaaaactgtgtatgtaccaggaccaaaacaggtcactgtacagagattttctcatttattgttacaataaacttatgagatagacaagattatttcttcttttattgttgatgaactgatgctagagaaattaaataacttgcttaagtcataaaacagcagaggccatatccatgtttcaaatgctggtttgtttaaatagatgtttgatgagctatttcatagtatccttgtgcacaagattgaaaatatgagccagatgttagccagctgataggttgatgggcatatacgttgctaaaaaaatgtgacccagagtacactctagtgatatctccaatgatgaggcgtaagctttgtatttgaccttgttgtgttcaaaatatctgtaaatgctttggatgatatctatcaaatattcagataatataaagctgaaagtattatctaatgtgttggatggtgggaaaatatcctgacagatgatactatgaattacagttaacaagatgagattaatagaaaagatttgaactcaggtaagctcacttgtttgttcattcctgtggcatctgttaattatgtttccaacatgcaggtctatggcctatggtagatagtaagaatatgaagactgcatgggtcttgccctctaggagcttattctctagtttaggggaaagaacagaggaaatgacacatattagcaattcatgtgaagtaagagtccttacttgattgcagattcactaggtgccaacacagggcattgctatttgtataagatccaaatcaagggaggaagtacatttaatatatttgcaagtcacagctagagacttataatctactatattttgaaagaaaccctgagtaagattgctaaatgtttagcttgaaacaaagatttaggaagtaatagtattcttagatatttgaggaccttccctaggaaaagggaattagacttaattttcatagcttcagaaggcagaacttggatcactcactgaaaattagaatgcatcaaatttttattcaccgtaaggaaaaacttcacagcttatgcaagacgaaaaaagctgtcttataagaattcatgcatttaatgatatctcaaggaaagtatagaaggcattcctgtatggcaagaaggttagattaagtaatttctcaccttaggcctgagatactataatattaatgttatagtcatttgattttgtagaaggaatatataccaacagttttccagtgtgcaaaaaaaaacttaacaaatctaatatattctgatgtattattgaagagatactagcacataccactcttgagaatataattaaacttctcattaggcatccaaaatataggaatttcccctaatggctaatttttatataagaaaaaatactatgtacactatttcaaagcagacagaaaagtcatatgaaaagggtatgtcaaaaaagtttcaaaaagaggctcctgatttatgtgttgtgtgtttgtggacctaaccaggacatttgattcaattaaccaagtttagtatgtcagcaaccctctgaaagattgagaagattgactgtccagagaatattacaatatttgctttctctgttgaagaaattatgtagacttacaggtataagagaaacaaaatcatatttttgaatctcttatttttagtaatgattattggctttaaggattttaattcagttactaatgttatatttaggttacataaaataattcattatgcaattattttactgcaaaagcaaaaggctgaaaattattgttgaagatcccatgtatttttggcacattcatctctataaaataagttcttaaaacactccccagttaacacttattcatcagcatgacaccttgctgaatgacttgaaattataattcatagataattattttatcttggagccattatctctcataatgctactgttaaatatggaatggctcttttattgcttaaaaatggtggttcctttggatggttgaataaaagaggattatggcacttaaatcaatggcaaaatatgacaaatcattttgccctgctaaccacttttctgcaatgacacttgaaatttgggctttttcatctgaaaaagcctgaccagtttcatctatacttcctggaacatgcattcattcattcagtcattcaaaatagtcatcgaatgcctcccatgtttgatgaactaaaaggagcatttaagccagttttaggtcatcggggaatgtttctcagagaaagtgacatttaaaatgagagctgaaatgaataagtgctagcctgatatacactgtagagctaaggatttgcaaatgaaaagtcccagcagtgataaagagtatccgcataatttgagaatttcagatggccccatgtggctacggcattatatgcaaagaaagcagtggctacagctacatatggaggggtaagcacagtggtggtgaaggcgggggtgggggtggcaggtaatgaagctcttccttgccatgctaatgatttgttattcatcctgactgcatttgggagctagtgtaggctttcaagcaagagaaggtcatggtttgatatgttcataggatgatcactctgcagtgtggagaaatcaccagataagaaaatatggagacaggatctttagctaaaaggctattctaataatccaaataaaatatgacagtggccagatgaaaatagtagcaacaagaaagtcaagaaacagagagtaatagactcatggaactgatgatctaatggatacctcggataagagaggcctctaggttgctgaccttggcaattgagtgaatgacagtgacctcagatgaaacgagaaatacaggagtattacaaggtttagcaagagatgaacttcattgttgtcatttcaaatttaagacgcttctgtgttatacaatatttattcaagaagcaattagaagcagaagtctggaacccattagagatatccaggctgaatacataaaatacagagttttgggcacaccattaactgaagtcatagtaatggatgaaatcaccaaggtaaatgtggaggagaaaaaagagatgaggaccaaagttagaattaagggcgtcaattatattgaacagaaagggaaggaagagtcgataaaggagaattcgagtagccgcagaagtaggagaaacatcaactggcttactcttaaagaagccatgggggctgggcacggcagctcccgcctgtaatcccaacactttgggaggccagggcaggcagatcacggggtcaagagatggagacgatcctggccagcatggtgaaaccccgtctttactgaaaatacgaaaattaactgggcatggttacgcatgcctgtaatctcagctactcaggaggctgaggcaggagaatcgcttgaacctgggaggcagaggttgcagtgagctgagatggtgccactgcactccagcctgactacagagcgagactgtctcaaaaaaaaaaaaaagaaagaaagaaaaagaaagaaagaaaccatgggaagagagtatccagaaatatctatcaatggctacagaaaacctacatatgaggcctgatgattgtaagttttgctttagcaacaaagatcttatgggtcatcctggtattatgtttaatggtgaaaccagaagcctgtttaaagggagaatgggagatgaagaagtagagaccaggaatgtaaacaatgtctttttaaaagcttatcgaaaataggatagaaattgtcaagcaatttgagacctcacagattttttttttaagacaggaaaggcttgaccaatttcaaatattaatgagaatgagcctgcaaaggagggaataaagatggtggagaaaatggggaggcaggaggaaaggaaaccaatttaggagtggagtagcttcagacaaaggacggaaacaaatgtcaaagggatggaaaataatgtggcaatatactgaattgtttgccaggaaaccaagggagcatccaaattagagctttcttatctcttaaagtagggtaaggtgtagaagtagaagatttgagattggctgggcacgttgggaggctgaggtgggtggatcacctgaggtcaggagttcaagaccagcctggccaacatggtgaaaccccatctctactaaaaatacaaaaaattagcctggcgtggtggtatgtgcctgtagtaccagctactcgggaaggtgaggcaggagaatccctttattcaggaggcagaggttgcagtgagccaagatggtgccactgcactccagcctgggcgacagagctctgtctcaaaaaaaaaaaaaaaaaaaaaagagaaaaagaaaagaaaagaaaagaaaagacttgtaccttgtcatattggaaaaccagattcatttcacattgttataaaatctgtaaatgtcacaatataatttcaaatataacaccaaaaatgtaaaaaataaatgatctaaaattcactgtggcaatgtcatagtttcactgcaagaaatagcataaactctcaaaaagagttaatagaagttttaaacaaacattaattccatggcaatatctgtggtggaaatgacgtcagctattgtttgttgtgaattgccacacattccctaccaacaattgtctggccattagaagacacatgaaacataaatacattcttcttgattgactaaatgaagcagagcccagtctatgggatatcatccaagttcaagctggcggcttcgtggctccagctgagattatcaggaagtcaattcactaacatgtccatctagtttgtaactgacttttttgtttctcaacttttctttcgatattgtttataagatgtaagtcactattttgaccactccaaatcctgtcttataaaatccagctaaaattcaattccaaattcccttcttcctttttctcaactctcaaatgcaaggatcgcattcccacaagataacattcaatgttgcattcttgctgccatgtttattttttgtcaggtggtttttttaaattattattttcccaaagtctaagtaaatttctagaaggtaggatgttctttcattgcctgtttcagtgcattccatgtagctcttcctaactccttattgcataattgattattgtgttaaatataattctgcttcatgaaaattttaatttgaagctatttgcacactattctgaagctattctcatttctttgtggaaaggtgttaaagggtatcaccccaatgtctcttattatgcaagcataagaaagaagatatcgatctgagattgctagttttagattgactcctctgtatttatgaagaaccacctacatctatgctttccaccttgaggtggtttcagaaagcccactagtgggcatgtgccaaggccacagtatttgtagcacctttttctaacatctcatagagctaaaacctgggatatgaagaaacataaatgcctagaagaaataataaattttagagactcgaagtctattccccaatttagagtaggagaaaaatttacatagagattgattcagggaaaagagaatagcaactcttattgtcagtgtagctacgatagcacagtattagtttctcaaatcaaagagttcctttaaaaatatttatatcaaagactgagttctctgtcagtgataaagtgtgtgtgtgagtgtgtgtgtgtaagaaagtatatgtgttcatagacacacattcatagctagggactgtatgataaattacattctaactatcactaaattaaaaacaaacttcttctcccttttcctttacagaattgtcaacatcacactgctggtgacttctgtgaacgatgtgctcttggatactatggaattgtcaagggattgccaaatgactgtcagcaatgtgcctgccctctgatttcttccagtaacaagtaagattgagaaatataaccatatttcccaatcagaaacgccatctgtctagcacatgggctgtctatgatttggctattttttccatgtagacaaaaatctcaatttaagatagagatatttttaataatatagaaacatgacaaaagtgagtatataatgctctatggttcatttttcctttgaaactctgtcccaagtaaataatacttattaattaaaattgaagtaccaatattaatgtaagacatatttataaaacaaatgatatatatatacaaatatgcatggtttcataaatataccagtctaatgcttgcatatagctctgcccataatatcatctatgaaggattgttcgggtgcatattatataatttttgtggctgtttccatttattttatgtgtttaattcaagattgggaaataattatcaagaaaacattgaaaaattgtacaattaaagcaggtgacttattgttatgctccaaaaaatgtcatctcccggaatcacagcctcctttttcttaagatggtctgagcttggtaccatggaaacacagccctaagaagaaacaaaagctggaatatcttatttcagtgctgtctgaacattctgcactggtttatacattgatgaaaaccctaggtgttttcatttacctttttgcccacactacctgcactttctgttaagtgatttatagacttcagtaaggcagggtagttttactctaagaatttgcttttgaaaataatgtatggcagtttgttcagaattagaattctggacactttatcttgagtgttaaacagccacagagcaatttggacaatgtgatctttgcacctgtgcctactcactttcttcttaatcttcggctttgtgtgcattctgaaaacatttcctgtaaatcatctccttttcctctgaaagctcctcttttttgttggctggaatcacaagccttttacagggtgtcaaatgtcaatttttaggtaagctggatattgaagaggataatatacatggtcttattgttcatccagggaccaagtagtatgtgtatgaaaaataacattatttttgtctctctttccctaatttctccttgatgccccgatttatttaattgttttaaaaagtaagccatttggattagaaaaatttaataattaattgataattccctggtgagtacactataataaaagctacaggagatatacaagagaagcatgccattttttggaggagctcactgtaaaacctgtgtgttaaggggtatcaacttaaatgtaaagaaaattcaaaggcacaaaacaccacacttaatactggaagcttcaagaacatatgaaaagaaatagtagcatgtataatgggtcttaaacaattaatttcaggattttcactggtgggaatagtaggaaattatatgggcaaatgcttacaaaatacaaggcatgtgcaaaacctaataagtaacagaatttggaacatggcgttcagacacaatttcatgatcacagatgaaaatgaatgggagaataaagaccatattgtagaaatccttaaataccagtctaagaaatagttatttaattttctatgtaataaggaaacactacaagtttttattttgaaaaaaaggttaatatgattatggccacattttaggaaaactattatcatagaattgagtataatgaattgaaacaggcaaatgagaaaagcatagagaccaattaaaaggctagtatactagcatgggcaaaagataattagaaccagaagtaggtaatagtaataagaatggagacaaaggaatgaatgtgagaaaatggtttaatacagctttacagattcggaaactaattagatgtgaggggtgagggtccgggcagaagttgaagacaggtttttaggcaggttacccccaaaaatggtggtgctattaactgaaatggagaaaccaggagagagccgttagagaagaaagataatttatgtttcaaataggttcagattgatagaacatatctgtctgaatggaaatatgcaaatagctgcaggaaatggaaatctgaaaattgcaggagcagatgaaggaagagatatgttaataagtgaattaaagttggataagatttcccaggctaatgttatccaaggcgagtatatagaaagaatgaaagacaggactttatgttgggaaaggagaaaaagaagagccaaggcaggagcagtcagaagagagggaacccaggcggcactgccattgacaccaagggagagaagagcagtgaacagcatcagttgctgctctcacaagggagacccaatgaatatggtggcaattgactattgtaattgagcaaataaatgggcttgccgcctgaagcacatagaagccaataacgttggcactggcttcggagaaaagaaaggctttactgcaaaattgttcagcaaggagacaagagtcaggttcaaatctgtctccctaatttgggatatggggaaggttgcaaggggtcagaaggcaaggcaaaggatttagaaatgctggcttggcagagtctgattggagggcttcaaatttgatcacttacagtaaggtatattgaggcagattttagccctggatcttctgggccaatggacccctcatttctgaaggagttccaatgtccaggttttgattttgtccctgtcttgttggttcaaggggaggaatagttggttcctggtgttgttagaggtcaaaatttttctattgaacatgcctgggctacatgacttgcagcttttggctctgttatacctaaaaggtaacttgacattttgttatcaacagggtaggcccggttttggttggtcctgtagttacactctcagagtcattgatgaattttgaccatcaataatgaaagcagaatttgaatttacagttttaagaaatttcaagaataaaatgatagaatactaccctgattggttagcaggatcaataacagggtgtgttttcatttttgtttcattgttgttttatatgatttgtataatttgagtaaatttttatgcaaaagaccctgaaagaatcaaaatatcaaattaaaatggcaagttcagtggctttcaaactttattgattgcatccactgtaagatacacttttttatatcataagccagaaacacacaaaaacttgtgtgtgtagatatctaaatatatgtattatacaccatgccatttatttaattttgttattttacatttttagaaaaaaaattttagccaaaacctactcaatggatttcatgagtcacttatatcaccatctaaagcttgggacgtattaggctaattaacaaagtgaagacctataaattgtgagaagagaagaattaaaatgtgaagcaaagaaaccagccagggcaaagaaaagaggcacttctccccaagacataaaaacagattctgaggaatagatggaggaggctgagatatctcaatttatgacttcaatctgtgcagtcagtgagaaatatggaggcatgatgagtgattactgactcatttccacggcattagttcaagtcctcattatctcttaccaaaacaaatatggtagaaatttaactcttatgacggagtggcagtgctcacacacccttagaagtttccagtgccttcccaaggaaagatcagactctttgagcattagaaaccctctgtaatctgactacctttccaggctccaagccctcaactccattctatataatgccaagtttggcatttcttgcacttatctagacatcattagcagtctgctcttgctattccctcagacaatccctgtgaaatctaatttatttttaaaggcatttttcaaaccctacctctgccacaaaacctatccatagcacagaatgtattttgtacattttatatacaacgaacacattttactatacagaattatttcaatcattctttcaggagatgaacatttactaagcatatacttcatcccaacactatgaataaaagataaaagatatgtgtcctgtcctgtatgtgtacatatctgtgtctcacacagaattgtaaattctttgaaggtaaacataatgtcttatttctttctttattcaagaaaaagttaatgagggcccaactcaatgctaggcatggctcttcgtactgggaatatataagtgaacaaaacggcctgtgtttcctagccttctggagcttgtattttttataagagagtaagataaagaaatagatatataatgtaatatcaggtaatgacaagtactaccaggagaaataaaggagactcaaggaacttagagtgatgaaggtatgattttagatgaggtggtccatgatcttcacaaacagatgagacttgtgcagaaatgtgaatggtgtgagccatgtgaatacctgcaggaagaacagtcccctcagagaaaaaagtcactgcactggccctgagacagacccatgcttggcagataacaggaggccagggtggttggaacagagtgaatgagaagagggggctaggagatgaagtcagcaaagctctaatgaatatctaactctcctgagggctaaaaatcttccagtggcaagaggtggcttggtacaggataatccagtggtgttattgatggaagcaccagcagcatttgcagataggagataagtggagtgtgagagaggagacacggttgacaccatggtttttggcagagcaaatggaaacatggagtggctgttgactgggatggggaaaattagggaaaggtctggtgtatttttggagggggagaaacttacttttagatctgcgaaggtaggcacaatatttaaatcccttaggactaagtgagatcattcagaggagagaggagaagggaacagaaatcagaaaactgaattgtgaagcacgttaagagatcaaggacatgccatagatccaacaaaggaaactgaaaaggaacaaccaatgaactgggataaaaaccagaaggaaatggtttccaggaagcccatttatctctgcagtgtccataggagatgacacagagagcaagctctgtaaattttaaaaattctgttgaggggagtttggaattagcagccatagggaaatgtaaaagatggtcaccatgagaaaagcacaaggatttctgagtagccctgcagacaaaatgataattgagagaagattagggagttgtgaacagaaagaataaactcaagcttcaagtgagatggaatccctactccctccagaagaccttttatgtgatataaggaaacagtgcaatccaccataatatcataatttgaaaaaaattgtatcaactattcaagaattactacattcctatacagtaaacactttattatttttttattgacatttcattattttactataacgaaatgtaatttaatcatactggctctttagagtttctcttgaaatgtctaaaatctgtttcttagagcccatatatgtataagagtgtgtgtgtgtgttcgcgtatgcgtgcatgtgcgtgagtgtgcatgcacagatgcagtcagtatcaggctttaaatgaatgagctaaaaatttggcagagtgtgtcagttataagtttattttttgtgaaggcaaaaataaatttgttggataatgcgtttgtgagtagtagatcaatttgttcacatattttgcaaaagttagagcttattactcattcatgtactattgatgtaacgcattagaagacagttaacattaggtcctaatggcacctgaccaaaaggagctgtgggcctggcctatacaccttattgcctgttttcagcatcaactgatttagtgaagcagcaaaaagaaaaatggtgtgtgcagcattatctttctgccacagatacatgtttttaatttccaagtttccaatgcatcattcagttttatctaacgggaatgcagctgagagaagtttgtaacaacccaaaactacatgctaatatagtttagttttcaagtcttgtggagtctttttttttttaatggaataagatcatcagaaatccaggagcaagacagactggctgtggtctaccagcattgtagtaaaaacattggggaagttttataagacctaattattagaaaataccataaaatagtcattttcatagaaaaagctttccctttcctcacactgaatcacattactttgtgttcaaggtaaaatgtagtttgaaatctggatgtaaattagaaaagatattattttattccaagtgaaacatgtattcacacttcacgtcttgaagcaccagtggccatttgggctgagttttcaagaaaaaaaatttatatagattttatgccctttttttaacctaagagatattaagtaatagctattccactatcagacaatgtgcataaattctagtcagatttttcttttgattagtgaacaataggacaattttgctggatgtttagtatattcatggctgtcacatcattattaaattccagaatattaacatgctttgtgtgatgcatttttaatccatcataaaccaaacaatatatatttgtttactgttattaatggtttttcattgtgacgtcctagccttaaataagaacttcagcaataattataaagatggcatttattactacctaaaagtatgtcccaataaccttgatcatggataggaatactattttataaaataaatggattaaactttttttgcaatccttttctttctgattcagtttcagcccctcttgtgtcgcagaaggacttgacgactaccgctgcacggcttgtccacggggatatgaaggccagtactgtgaaaggtaccaacagccatgaaacgtacagagtaatgatatgtagggactatatggtaaagggtcacaataggaaaacattcattatttgaagaacttcaatatttgcatatcctttagaagtttaaattacaatgctttcaaaaccacttgtgtatcttagaatttgtccaaagaaagttgtttatttccaccgtatgtttagactttatcaaagattccaaactatttacaattatctaacttatgctttagtatatatatatatataattttatatgtaaatataacatttcataagaataaatcaattttcaaaagcttagcagtagttactactaataagaaactggctacacttttcttattttaatgcactggaaaatattgtctggaagtaactgaattcacgtcattgttctgaacactatgactacaccagcaagtgtatacataactcaaaatataaatagtatcaagaatttttaattagtacccagacaataaagtatttgttattcagttttccttttcaataggcaaacaatattatttaaatgttttctcttaccatattgcttatgaaatctcataatgcatgtatacagctgttaaattgaattctcagtgtaatccaaatggtaaattaaggagtacagttccaaactgattgtctagaaaagttgcaattaatatcttccagatatatattttctgtaagatcagtatcctggatattcaaacttgtcaccaccacttttggtatattttagatattatctttaatgtaacagagagttactaatgttaactactaacattatacacacatgatagttttagcataattgatagcagtataaaagttttagaaagatccatagacttcgctcaattccaacagttcagctacattccattttcctcatctataatctcaggaatcattgataggccacctactttacactaatattgtgacaataagtgtgtaaaggacactgttggtgccctgcctaggcacctacactgaagccttctctccaacagaagaggcagaaaggcctgaatgtttacccgcccttcctgcagtggcccatgactaaccagcgtgagagtacaaaagtccagctctttggcccctaagtggaacaagttttgagatcttattttatgctccagagcactccatggaatcaggctaagactgggacatcacctgaaatcatacccttgattagagcttttcttttccatgtcctgcttcacccactcctttgctagattctcctaggaacacttaaatggtaagcttctttgtaaatataaactaatactaattatcagcatccacttaagagtcttgttttatataaccagcaacagctgtattaatcatggcaataagtaactaaataattagggttaagctttataaatcccaatgcaatttttatacatttgtaaaatatatttctaaataaatccgtatgtggtaactctaaacacagtatccaatatttgcatatatataaaacagtggattcacaatttccataccaacagaaattagcagcaattaaataactcatagcaacaccaaatctaaaaatatttccatttgttctgaagatatatacatcttttggatatagatataggtgatacaagtacatacttgttaatacccaccagtgagctttggtattcatggttagactaatatttatttcctgtacctttaaacaccagtaggatggtgactaaaagcatcgctggacaccaaaaagattatctacagtaattcatgaaaaaaaaattatgatatagctacatttatacactgtagttaccattttctacaaaagcatgtgtatagaataggctagaagggtacactaaaataacaattattgtgttaaagcagaatgattacagaaaatttatttgttaatatccagtagtatttaatcgataaaagctgtcagtttgtgtagcatagagatgagcagggccatacagtatcaaatgtgagtgacttaaagtgtttttccagtcctcaaacattgttatagctttgcattcatcatctctaacatataaatgatcaggttatatttctctgaaaaattgctttattcagctatattaaaccaaagttcttggttaaatttttattgtaaccttccaaataaatttgttccagtgctgagagcttcttaaatcatttaaatcatctttcgacctgctcagactgatcaggttaggtctaaaactgcttaaatttcttgagtatccctgtaatatagaaacctctcctcatactttattttcaatactcttgtaataaactctttgaacatttaatcaatctgaatctgcttagaatacaattattttacctataaatgttaagaagccatttaagtggacttacttaaatgctactttcagtatttgtactctttcattgaaaaaaataatcaaaaacatgaatgtataaaagcctaatgtcacaaatcgttttcttcatgttttgccttttctaaccagcacagggtgaattaactttcacagtcagccatgcagatttcacagtctcaggcagctaaagatggtctatgattatcttgccagtatttatagcttttggctccaatcccctactgtctctcaacttcctcacatacttgcctgttgaacaaaaattctaactgtttgttatatttacactgaccatatataaaacttgttgtccaatctgggacactatattaaaaacaggcagtgtttttagcaattaagccaaaacaacaggtaataggaaattgtcctgggcaaaccagaatgtatggccctgctagcattgtgtaaagttaccaaacttccagtgtcataacacggagtgaaatacacttaggtgaatggatgcatagatacgtggaagagtcaattaatggactgcatttagggttcatccagttggattctctttctacttttccaaatcagtgttatatattttgtttgcatatcattaacccacttccacagatacacatgaaaaatccatcttgaggaagatatggcaaaaagaaaagatgaataaaagtaaacagaaaatctgagtagcctattgccacttaacttgcctcttttgcctcattggtaaaattaatgggttgtattatttggttattttgagatctgaaattcatgagtatagggaagcccagaagtcaatatagaattgcactcatctctaattatacaagaggacttaacaaaaaagtttatgatctagagcagtcacagacaaactatgacccacaggccaaatttggcccatttctgattctgtatggcactcaattaagaactgttgttacaggtcagcatttacaatcaatttgatgacaggaggcactaagttataacccaaatgaaggataatttcaaacctcaggaagaatccaattcttctcattagtagcctgatattacaaagtaatttaacattattattattattattattaatgttttcaattccatcaacaacagcagaatgctttagaattttatttctttttcacggcataatcttgatttttcctatgtcctgcaaagcctactgtttactatctgaccctttacaggaaaagttaactaatgtatggactcttgctatcagttttgttgcatcaaaacaaaagaccacacacaacaatgtggagacatgacttgctattaacctcttttgctttgtcactgtttcaattcaggtgtgcccctggctatactggcagtccaggcaaccctggaggctcctgccaagaatgtgagtgtgatccctatggctcactgcctgtgccctgtgaccctgtcacaggattctgcacgtgccgacctggagccacgggaaggaagtgtgacggctgcaagcactggcatgcacgcgagggctgggagtgtgtttgtacgtatactaactttgctgttagttttggaggccttgattccagttctgtctcatttccaatgagaaagagtgactctccccgcccgcctttttttttttttttgcaatagttatactcttcattctttctgacactatctatccaccttctgctgttcacctgctgattgcgtgtccatcctgctgagccaagaacagctgagaaaatcctcagtgtgctttagtcagttcattgaaagacctacaatgaagctcctggaggcattttatttgatttgtccatctcagggtttacagttttgcctcaagttggcattgcctttgtgacagattaaagatgtgagtgtattaaaaaatttagaatcctcctgaatttgtaatcgactggacagatactttaagccttgaatgacaactgatgtttcttttcccagcttttatgaaaatccatgggcatactgcttcataattttctcttgaactacaaaacccgtaagcagtaacaatgaagtcaagtatttttactcacgtacagtaagtggagagcagtttgctctcttgctgtctctcttttttcttactgattctggattcgctagtgccatattgaaagtacattgaaatcagtagctaaatataattcttggatcttgcatacattcaaatccaaaataggttatttataaatttaaggaaggagtgctcttctatagtattcttttcctcaaggaaatttattttagcaccttttatttcaacatttacctattgtaatagtatttgtgcatgtcaacatttcttgttttagcatattgtttgagtctaaatcttaatagtatcttaaatagaagaatttttgtttatgttctagttttataagagttaacctcagaagctaaagctggattaaaaaatacaccaaaaagttaagactgggtgttatttgggaaaatagattttaaaatcattttttctttgtattttaaccatctttaatgaaaatgtattacactgaaaataaatgtgaaggtaggtgagaggggagagattaaatgtactgtcaaatacatttatattgtcatatttagttgatagtatatacacactaattcttcccaagtataatgatatattttaatgataattaaagaagtagactatcaaagtattttataatattgctttcaagtcaaataaattattaacatgcacataattaactagataatatatagatattcttaatgtaaacagtccttgaattattaatcatcacttttattaactatccagaagcaaacttgaaataaaaagatcatattaatgttaagcacaaaaattaaacaatagtacattaaaatctggggtagataatataatgggattatttggggaacatttcttttaaagagaattggcattctgcccatcaacaacaatggctttttcatttattgttgatgatcaatacttttttaacattttgaatacatttatcattagaaatcgtaattcatcttttccctatcacatatgtgggtttctaatctccacttgtcccatgtgatattaagaaaagggccaatcctccagttacaaagctacaccagttttataattcttatttgctttattcttgccccacaaggaaatgtatttacaggggttatacatggtatttagttcagttgctggactggaagtgtttatattctttttaaaagaatagcagtttttattccagaaaaaaatattaaattataggattgtttttgatatctagactcttttgctaaagcacagttaattatcttataattatgctgtatagattttccatatactgctcttaagcattagtgatttccacttacttctaggaatgttttctcttcacctttcactaaactaactctaagaattgttacacagagtatctttagacttttcatcttttctcttcttctaaaatttctcccgttatggaaaaatatgccatgattctatgatcttggcctttcccaggattcggtttctacttctactcctagttttgaaatcagataaaataagacacaagtgaggatgtaattctgacttattctcaattttccttttaatatatttctgtatccttaagctaaattagtgcaagagaccaaaaaatggattcacctggggtgtttgatctgcaggacctgttttagcacatgtaatcatggtggaattgcataaggcctgggggtgagagtaagggaggtagcttggctctagcaagagaatttagatgtagtaagagaaatgtctgcagtgcttgttgttagtatagtactgactacaggaaataaactttctcctattgcttagaataagtaaacactcagtttagtagcatgtattgtacaagagttaattttgcttcctttagttacttccctgggaaatataatttagactgatccacatcatggatttgtgtatttcaaaaacagaaaagaaaagaaagagagacagaaatgcatgataaatgacctaagcctgatcattgtgtgatctcaggtaatttgcatattggtgaaaggaatctatacactcactgtaaatttagtttaggctcttatttctcaaagtatataaaattctgctgaagagatcaggcaaaacaaagccaatgcaggaactgtgaaaggacttcccttggacaccttggtccctaaaagatacttatagcttccagggacagttgccagtgacccctggattttactggatccaaaatggaattttttgcagcacacaggccttttatatgtggattttcactactatcatgaagaatgtatacaaataatctgtgtccacgttaggaacctatttagacatcacagtctctcatagttagtgacctaaattcagccccaccatgcagagtcagttcctgagcataactaagcaatttattcaccttcaaattccaggcattctctaaagtcccttttaccacacagggttcatcataatagtaattttatttaaaggctcaccttgactgagaacttaccatttgccaggcactatattaagcattttacacgtggttctttcattcttgtaacattcccattccttatcatccccactgtgtgataagagaactgaatttaggtaggttaagtcattttctcagtgacttttcagtagatccgtgatttgagcatgggtcagtcttacaaatcttattttcttaacctctatgctggctactgataaacagagaaagcaaacgtggtttagccagtatattcaacattaatgaattcagccctttattcatttactgcttccatgtttagagcccattctacctcgattaaaaataaatataaaacgagctaaaattacaaaatgagaaattttaagtgtatgtaatctcagtaatgacatttattttctgctaatcattgagactcctctaagatttaaaacattatggcatttatggtagattccttttcatcagagattgtcaagtagagactgtcttctatgcagaagaaaagatactagctgggtgcccagattaacttcacagcctctttttttctaaaaggaattatttgggacagctttacaatgttatgtaagttggtgagttctgaagagatattttattaatttcccaaattaagatttcttcttgataagttaatacaaatccatcctcctctttcaactgtcattcatagttcacatgtcattttataaaatgagaacaactaacctgccttcaagaaacttaaaaatgaacaaagaagccattatttgcttaacagtaaagtttagtattttgaaacacaaaacttggatttgttcatatcctattttctgtaaactcatatcattaacacagaataacccatgtgatgtttaaaatagattatgagtggcatagtaaaatgtattactctcctagagaacagaaattaaaattagtatctgttggcaagatattacttcataaaaattgcctgaaatagcattttataaatatcaaattggtgttgcctatttttaatcactgcatagtggggtttttgggatatatcagcttttattatttatagtcacaatttacttaaattctaacatatatttatttaaaataaaacatacactttgcttgccaatttgcaaaagtgatcatgaactatgttttctacttgcaacctgagataagcctagctaaatgtggtaattttccttaactctgtaaaattggcaacttccaaccacttggtgaaaccggaagtctgaagttttatcctatcttgatctacagagatataatcaacattgtcgtttttaatagccagttgccaccaaagatctgatcacaataatgcagagacctttatatattatcactagaacactgttgtacatttataatcaaaaatgattaataatggcagtgattgccccctatatatgggagcagaaacaaaatagaatgtggttatcactgtaatgaaaacaggacttactattctgaaaaatgatgataaacatcagttgatctccagatgctgattactgatctaacactttgcttgttgtaccccctaaatgtcatcctctctctgctcgtactcactgctcaagtaagttcttatttgaaaggacagtaagtatgtcatagttttctgtagtctaagctgtgtcatgttgttcacatccaggtgttaggcaatctataaaacatcttctgttcaccttgtttgcaccttctactcatttgttttgttagtaaaagatatttgagtttcttgttgtcaaccttagcattggtccaggctaacaatgtgtggaatggcaactatcaccgtgattctagatgattttcctagttgttagagatcagtctcagtggtttgtatattattgaggaagctgttctgctagctgattaaggagttgcacagttgaattatcgtatagagacagctgatcactgttgcctttgttttcagcaagttttatttgaagagtaaactaaactctactttgattgcaatttctactctggcaaggctcaggaggttttattgaccttgaaagacaaactaaaatcacataatcttaaagttggaagaaataagtaaactagcctagccttctctttttctgtgacatccacaaaacagacagcatcctaatgcaaggaagcatggtgttatgaagtggctacagaaggtttgaaacctagcttgcaatttgtgtgacattatttaatttcctaaacctcattttcatcctctgtaaaatggatgtaaaatgctacatacatgtatgtgaagtatctaagcataataggtgctcaataaattctaggcattgttatcatcattgttattatgtgaccatttttttccccaaagacctgatgttttgtgcaacgcatcagtttctgatgaaatattttctttagtttaggctgactttcagtttcctgttactatctctaattctaggttcttcaagtcactgaaaaccacttttatggccaccttacatttctcctgtctttaagcccttcacatgcattatttatagattcataaacactctggttgtgactatttttctcatctgtaaaatgaggatatgaatggtacttacctcatagaattgctttaaatattaagtgagataatgatggcaaagtataatacattgccagtcatgtagtgactgttgtgtagataaaaactattatcccattattatttatagtactttcaaagtttccattagtgttttgaagagttacaccatctttgaaccacattgaacttgttttcccatgtattatatatagaattttatttaatatatataaaacacatatatcaatatttaatatataaaaatatataaaatatatacatataaaacacatatcataaaacatatatataaaacataaatatcgttacttggtatgtcgacaaattcatcagtctcagctgaggtctacagctttcctctctattcaaagaaatgacaggttaaaaggtcttcttaatgactctggaatcaaatttttatttgagaagatatttattttaaaatagaatgactaaatacatcttaataagccctaaatatatgctaatgtaaaagtttctttttgaaggggaaaaagggaagtgagaaatagaaaattcagatccagggaaccgtcaatggcattcatctaggagagttaatttaacatacacacattaacacataattttatcttttgttaaaaatgtgtatttactcattttattcctatttgattagagcagagaatttatgtatcgctacctaaaattggttaatagctttcgccctttcaaaaatactcagtgtcctcattttagcttcagcttctttggtttggatgcagtgtgtgattttttttgtgacagtaagccagtagttattatgcatggggaatcctggtagaaatgcagtattttgtgctaattgctaacagaaagatctgtaatactggctgcatgatttgccccttacatgtgcccagccataacaatctgaatttagtactgtgtttgttaatattagacacaaatttatcctgacacttttataggcaaagcctcggaaacatttagtcatgtaaaatataatcatggtcttgaaatatttgcttttgctcctgtgcattttaggcaggatttcactttgtaaccttattagtattgctgaatttggagaatggtttggaaaggttctttgaggtcctgattgtaagataggtgttcatttacactgagccattactgcactttatcaaagaacagttgtttacagaatgtgaatattccatgtctctacacactcttcagattttccctatgatagtaaattacatttggttttaatttgcattccatttccaatgtttgttgccagacactttggactttttgagggcaaataaaagtagcttctggtgtaagtgaaatattttgtgtcagaataaaatagcaaaccattatgtaaagggcactttccccatgtgtttaccttataacttcatgagctagacttgtacagaagctttgaaaaaatccccatggctgtcatattcataagtctctctgacccattcagacagatgttagtatattgcttggagcgtactataaaacttacctttcacttatggaaatgtgcttgtactttgttccccaaaaagcaaatacagataccataagacatgggataataataaacctttggacacagaaacataaaatggaatgtatgagcccttgaaagagcaattaaatacattttcatttcaacagctgaagatgaggaaccaaaacagatgggcaggggatagaataaatgagagaaaaatcagtattcatcatgcctcttggcattctagtacaccgtagcatattacagtacatcagctctagttctgcattctggtccctgatttattcttgtatgaagtaaaaactgagaaaacgataggtactttccttggaaatttctggaaccatctagtaaggagtatctagccatcctgttatcaacaaactgattcaattccttcttggaaataggtaggttatatattattaaataaattaaagaataatttaatgtttgctatcaaaggcacacactgccctaaaaagcatggtgaaacatcctattatcattaccaagtatctttaaagatcttggaggtgaaaaaagagcaaattgcttgcttgcatcctaggaacatctgcccaaaatacatcttcactagaggtcaaatggaacttttaaaacaatgatgaacttgggctcagtgagagaagaaccttcctattcttcataattcctaataaaattataattgttactactgctgtttttaacctatgaattgcagcttgaaagtctctgatctgaatcacatgtgcaaaacttgaaaaagtgtgtcagttatcgattgtatcagttatacattccaaagtttagtagcttaaaacaacaagtgcatacactctcatgattctgtaggttggcaatttgggctgagctcagttggacagatcttccactgtcacgcctaggggctcccagatggcctcaagcccaaattggggcctcaactgccctttcctctctcacgttgcctcccttcctcaaggaggctaacctgggattgttctgaaggcagcaggggtccaagagtgtgaaagcagaaagtgcaaatttcaatatgttgctctgccacattctgttggtcagagtatgttgcaaagctaacccagattcaaggggaagggaagtagacttcacatcttaatgtgaggtgtggcaaagaagtattaacagtaacctttttttttttttttttttgagatggagtctcactctgtttcccaggctgaagtgcagtggcatgatctaggctcactgcagcctctacctcctgggttcaagtgatactcctccctcagcctcccgagtagcgggactagaggcacatgccaccacacctggctaatttttgtatttttagtagagatggggtttcaccatgttggccaggctggtctcaaacttctcacctcaagtgatctgcccatctcaagcctcccatactgcttggattacaggcctgagccaccacacccagccagtagtaaccatttttaattgtccccagaaatgatcatcgctttgatctgtcagtcatggtgttctttcctcctaaagttttgtgctgattttcttcccgtccatctctccctttcctgagtcaaaactgaaatccttcaggcaggtatctgaatagtcattcttgttgatcggacagtctctgcctctgcaatcacaagatagttctctttctgtctctaaaccattgtttttaatgtattctcctgttcctcacacatctgtgaggttttctatcttgttctcacattcagaagttttcttccggccaaccccaacctcttccctcttcccctcttcccctctctcttctctcctaacattctacctccctgatcttctcactatttcatgtacttgggcacatgccatgctcaaacattaacccttgccattctctttgtccaaagtgttttgatacccttctctcacaaaaatattagcccacaaatatttactgaatattaactgtgtacaagaccctttcctaggcaccataaccaaggtgtttaaggtcccttctttaacgaggaagaaagaatatataaataaattaagtaataatgtagcccaaacaggcataagtgttaagaaagcaaaggaaatgcagtagtgactggcgcagggtatagggctgggggtggtggggagtttcaggtaacagtaattttagaatcatcagggacttgctctctgaaaaagtgacacttgagcacttgacctgaacacctaggaaccaggtgggagaagaccaagggagaagaattctaggtagagaagacagcaagcaaaaggacctcttccaaatccttgctcccttgaagattgagcatccctataatttatcacctggtccagtggttttatcctttggctacatggtttttcaattactggaatatttttaaaatacagtggttcacgcctatgatcccagcacttggggaagctgaggtgggaggatcacttgaggccaggagtctgacatcagccagggcaacacagcaagaccccatctctatgttaaaaaactagctggatgtggtggcatgtgcctgtagtctcaaccactcgggaggctgaggcaggaggatcactttagcccaggagtttgaggccgcagtgagtcatgatcacaccactgtactccagcatgggtggcagagcaagaccctgtctcagaaaaaaataaaaatagaaatactgatggttagaccttaccacagacccatcaaaaatcatattctgtggtggtgaggagggaaagagcccaggcatctgtattttataaatgttcatgtgattccaatgggcagccaaaggtgagaaccactgatccacaccaatgttgtcacattctaatgtgcagagataatgtgggacgcagattctgatttcctagatctggggtagagcccgattatacatttctaataagcttccaggtggtgccaaaactgttggtctgattgctactcaaagtgtggtgcacagaccaacagtagcaatatcacctgggagcttgttagaaaagcacattctcagtcagagactaagagaaaccaggtgatcaaatcacctcctgattcagaaatactagggggtgtggaccagccctctaggatttccgaaagtcctactggtggttctgaggcccactaaagcttgagaaccagactgtggatcttggtgtttagacacagtcaatttggcacttaactgagttctatgttgtgttttctctaattgtttaatgtggacaagtctgttgaagtttgcattgaacggggctatgaagccaaaataatcttttacttggtttccatgcagtgcaaatttggtttcattctggctaggagaagagtaagagatatagccctagttccagacttctgctctggcctccaaagcctctttgttcattcagcttgtgaagcatcaggagcttgcaaagcccctgcaggtgacgctctacagttgtcacctgcaagaagctgcaggtgtcacctgcaagaagctgatttattaaaagccctgccagggcagtttaatccctgtgaagtgatattgtaactcacctctagctgctgtcctatcaaaaaatcactctccgtcctccttctctttgtttacaagcaccagttaatggttttctctccattaagcagctcaggggactgctgtttagagacctaattgaattcttgccaagtttgggcatgatccagagctgctccaattctcggtattttccatgctatgtattttcccctattctaacatgtatatagcattgatacctctatctgcagaatgtaagaaattgtaactgtatacatgagagtatattataaatgcagtagttcctgctccttggcgtgcagatacacctcattactctgcaatgcaaaactaaaaatatacatgttttttaaatctgctaaaagattcaatatatgttaattttggaaattatacgactatttatgagatctattccataatgaagagtcaacaatccatttgtctctctaccaattctaccacctatcctggcccctaccaccaaatttgaatagcacctctttgatggccaaaaatattatggtgagtgtattagtccattttcgtattgctataaagaaatgcctgaagctcggcaatttgtaaagaaaagaggtataattggctcatggttccatcaggctgtacaggaagcatggctggggtggcctcagggaactttcactcatggcagaaggcaaagctggagcaggcatcttcacacaggcagagcaggaggaagtgggggctggaggtggcacacacttttaaataaccaggtcttatgagaactctgtcatgagaacatcactagggcggtggtgctaagccattaaaaccactccagtgattcaatacctcccacgaggccccatatccagtattggggatgacatttcaatatgagatttggatggggacacagatccaaaccatatctggtagaatattagcattcttggctacttaaagaatatagtttttctagcctttagcaattatttatctataagactgaaagaggttaatcatcaaagtagggatttgtgagactgcatctaatcatgggtggtaatagactgaagggataaagaggaacagttggcaaataaataagtcaataaatattatcataagaaaacactatagaaagaaaagttatttttattttgactttttattttattttttggggggtggagtctcagtctgtcgcccaggctggagtgcagtggtgcaatcttggctcactgcaacctccgcctcccagtttcaagtgattctcctgcctcagccttctgggtagctgagactacaggggcccgccaccacgcctggctaatttttgtatttttagtagagacagggtttcaccatgttggtcaggctggtcttgaactcctgacctcaggtgatccacccacctcggcctctcaaagtgttgggattacaggcatgagccaccacacccggccttctttagactttttttttttttaattattctactcaatagataccaagctaaaaatttatatactttttgaatgtgtaatacataaagcatgtggaggtcaaattactatgactttctccagtgcaatctaatggagcaccacacatttagactctggagcatgttttattccctgtggacaggttcctttcgattgctcatgtagggatttagggggtacttttaatgttatattctatgccttaaaggaaatcttcaatacttgtgcaatacactttttctccccaaatctatttgctcctcctctttggtccctcagtttatattatcgcctctatttcaggttctgggcgacatgcatatctgttcttttgttgttgttcttatctttcctcaaccatcatccatttgatagcattaatattctgagatgagtagtttcatcttccatggaattattcttggaccataaaatatttcatagctgaattctttgaacatctgcctgggatgtttagcagaagtaactactctttgtcacttctctttcacagtttgtggagatgagtgcactggccttcttctcggtgacttggctcgcctggagcagatggtcatgagcatcaacctcactggtccgctgcctgcgccatataaaatgctgtatggtcttgaaaatatgactcaggagctaaaggtaggttggtgcagtcacaagcaagggccagggacaaggtgacagaagcttcacaagcggtattggctgtaattggtaaatgttcttcccacagccccaaatcaagggacacaactgttagggaaattcagagactttcttaaccagtgtttttcaaactcaagaactataatatacagatttctattaagggaaaagagtctcatgtaccccccagtgtctggcctaaatcagttttattatgtcacttaaatatgtgcaaacataaaatcaggtataaactctttatacttatagctctataaaattaaaacaaattaatccttacaaaaccaataaaattcaaattaaaaacattaatataaagtaacatgattttggctgaatggaaattgctgcttgcaacaagaataggatattgactattttcacacagttcttccaccagagatgatgtggtaactcatttctcctaccttaccacatttgaaccagagagccccctacaaagggtcctgaaatgaatgtgagcatcacttgacaagtttatgtgactaacgtgctcagtctgccataggctcaaacacacaggcaaatgtaggcactgagatcaggtggccatattcatctctcaggtgcctagcctgggatccagaaatgcttacattaatatttaaggttatcatcaaaatgaaaacacatgattagaatcttgtactaaagagctagaactagtagacctttaaaagttcttcaacaagcaccagtttgataaacactgttctaaattgtggttaaagcttttggtagttaacgaggtaggagaaaacattaaagaaattggggttgtttcacctgatggaaaaagatgaaaggtgtcaacttactatcagtcaattatcagatatttattaagaaattatagaatacctcagcattgcacttggttccctggggatttcatgactcttttaatatcttcactacccttaggaaatgtagattctatgtgctttaaaaataatcattaaacaataatcaagcaattagcaagaatacataatgaccatgtgttttacaaacattcaaagtacattagcgcacagagactggagaaatcagtaagattcagggtaaccagagaatgtaccattactgagagtataatttctgttggaatttgaagtgtagacacaattttagtagagaagtatttgttgctttagaggaaggcatctaagatttattcactacacattggtagatattcttttaggaaatatattctttaattctgaccataacctttaaggtaagtattattatccctattttccagaagaagaaaccaataatgatgataacaagaataactaacatttattgaaaagctaggcaattgactgaagtcttaaatggattaccatacatagcttttacagaaactccaagaaataggaaagaagttgtcatggtctgaatatttacatctccccaaatttatatgttgaaagtctgtcacagtccattggagctgctgtgacaaataccataaactgattagcttataaacaatagaaatatatctctcacagttctgaggctgggaagcccaagatcaaggtaccagcaatgttcaatgtctagtgaaggcctgttcctcacagagggtgacttcttgctatgaccccacatttaattcatttaatatctggatactgaggaaaaggatagctagctctctggggtctctttaataagggcactaatcccaatcatgaaggctacattctcatgactcaatcacttcccaaaggctccacctcctaatatcatcacattgggaactaggatgtcaacacatggatattagaaggacacaaacattctgccttctgccgtgtgaggacacagggagaaggcagctgtgcttaacagagccatgtgagcagaggcagtggtgtgaattagatctgtctggcagatattaaaagtcagacctgctagtgaaagataaggctggagacttcagtgaggcagggtgatatgatggacaaccttgaaagccaggcagaggaacctgagtttaccttgtggtcctggtattcagggaagtgaagagttttaatgaaaagaatgccgatcagttattttccttgtatatggagagaatacagaaaaataaattaaactagaaaagcaaacattttagttgaacatgaaacattttaaaactaatacttaagcaatggatgatgaagtaaagaggatcctatagaagaggctccaatttgtgaacatcttctaagccaagggattcagtgacccatccacttctggctggatattgatccagatgacctggattatccttaaattctagtctttcttgattttttattttgttcttcttccatcattcacttgacatttgtatactgaggatcaccttctggtattataaaaacttaagttatttcacctctttgctcaatttctttaactatgtcagtgctccccaagcttcagccaaagaccatcaaggacacacatgtgatggaacaaagtgggatttattaacttgttgcaacaaggggcactgaacaccatgggggaattgtgggctgtctcaataagaaggtgttaggaataacttctagtatttgaggctgtgctagataacttaaggttagcactcaactgggtgctattcagaagtgggagtaattctgtgagtattttgtgaatcctatctagagggaaggaagaacagagggaggataaagctatgattaataaggaggcagtgttcattcatattagccaggaaatgggaggttggggtagttttgtggtctacacaaaacccgctatggttttgtctgcgcttagacattacagggtagtctctttttttctgtttcattcatcactggttcagagtgaccttgtctaatttagtgtcctatgagattatttatgttccataggaaaaaaatatggccctgctgttaggccagttcctagcaacaccgaggacaggccagttagttagcgcctagccaggtctctatgttaaggcctgccgttctcttttttacctgtgatctgtgtctctgttaattggaatgggagccttaaatgggccaggcaaggagtttatcttaactctaccccttactgactgtgtgatctcgtgcacatttttaactgtcttcaagacagtttgctctttcatgaaatggaataatgcttaccccccatagagctgttgtgaaaattaaatgaaaaaacaaaacataaaaagcctggcacatagtaatttctcaataagtcactgcaatttttattatttgcctgaatatttggcatgacactcaatgtgtaagtgcccagttgaaatagtttccttatcttttctttgaaggtgagaaggctaagttccttttatatacaaaaatgtgttctgtcgaacactatcactgcaaggccatttactaaaaatgtttatgggatggaatctttttcagcacttgctgtcacctcagcgggccccagagaggcttattcagctggcagagggcaatctgaatacactcgtgaccgaaatgaacgagctgctgaccagggtaaggtggcaaaattatgaatcttctgaaagcagatagattatgtcaatgaaggaaaattacttcaaagttctgaaatgcaaatcaccttcttcctaattcccaatttggtatataaaatagatgtattctgacttgctaattctgcttcaaatcaaatcatagaaatcagtagcacgcagaaaaattggggatacctggaaattgtcaatggctaaaaagtccagaatgacagtgtattttgagaactttattcagtagcctccgtggtaaagtttgtatctgttctgatttccaaaagcactatctttgattgtgtaaagagaaagaaaaacaaatgaaaatgcttgtggtctctttcatctcatcgtgggatttttgcattagtatagaaatacagtgtaaatcagtctttccacacaaaagaggaaatcttctctattgtgagactccaaagtgcttaagacactttttaaagtcagaatgtaaagtccatgttgcatttatcaggctttttaaagaattggaaattttaaattttcaaaactgcgatggtattaaaaactttttgcagttagagaatgaagaaaacaacataaagcccgccatcttgtggccagaaatatgcatgaagctagaaacggggctgcaaagtacggatttaatttgattatctaagagctttaaatgataaagagtattggagctagaaggttcctggggattatcgagtccactttgtattttaaagaagagctgcctcgggccatgacagtgaaacgaattaacaatggccatacaatttgctaaactcagggacttaagctggacccagtctcaagattcccactggcccagtactttttctacatagcctgctgtcggtttaggaaaatatccacaggaaaatcaaataggcttctgagcacataatgctaaacaacggccctgatgttacaatagcatactaaacactttttcagaatctcatagcaacaatatagaatgtacagatacaacacggagtttcttgccaaatgtatgtagacattagattaaattgagtgcatttatctcatattaatttaatatgaaataattcatatttgttataaataagaattttctaacaggtcatggtagaataaatcaatttaacaagcacacataaatgttcataacatacaaagcctaagttacgtgttggcagatgaaaaatatgaatgaggctcaatctgtcttcaaagaactttgagatgtgtgtgtgtgtgtgtgtgtgtgtgtgtgtgtacatcagcatttaagtgtatggaggaccatattagacaactgcatgcaggtatataataaaacatgaaataaaataaagtcggaagaaattctggagaaatatttaataatagaataatttcatctgcttaggggtaattagaaaaaatttcatgtaataaatggcatttcattcattcattcacttaactaatactttttgggagtctctcatgttctaggaattatgacactggggatagaagtgtgagcaaaactgcgcagtccttgccctcattggcttagtatagtctaatgatctgacgttagagacacaaaaagtatttctttttttttttttttttgagacagagtcttgctctgtcgccgaggctggagtgcagtggtgcgatcttggctcactgcaacctccgcctcccgggttcaagtgattttcctgcctcagcctcccaagtagctgggattacaggtgtgtgccaccacacctggctaattttttttgtatttttagtagagacgggtttcaccatgttcgtcaggctggtcttgaactcctgaccttgtgattcgcctgccttggcctcccaaaatgctgggattacaggcatgagccaccgcacctggccacaagaagtatttcattaagagtgtcagatctttattatgtctcaacctatactctttaccctttccagcagattgtctcatgctatgttttttaaacagactttattttttagaacagcttaaagttcaaagaaaaattgagtgtaaagttcagagtgttctcatatctactccctgcccccacaaccttccccaccagaatggtacatttattatagtcgataaacctaagttgacacctcctcatcacccaaagtccatagtttacattagggttccctcttggtattgtacattctatgggtttggaaaaatgcattatgacatgtgtccaccgttgttgtaaaatatagaaaagttttactgcccgaaaactcctctatgcttcacctattcatacctccctcttccttgacccctggcaaccactcatatttttactacatccatagttttgccttttttggaatatatagctggaatcatacagtgtggtactttttcatattagcttctttcccttggtaatatacacttaaggtttctccatattttttcatgactttatagctcatttctttgtagtgttgaataatatttcattgtttagacatatcactgtttacttattcattcccctactgaaggacatcttggttgcttccaaattttggcagcatgaatcaagttgctgtaaacatctttgtgcagacttttgtgtggacttaagttttcaacctatttgggtgaatataaaggagcatgattgctggatggtatggtaagagtatatttagttttgaaagaaattaccaaaatgtattccaaatggtcttttctattttgcattcccaccggcaataaatgagagtttctgttgctccacatcctcaatagcatttggtgtttttagtgtttggattttgtcattctaataagtgtgtatggtatctcattcttgttttagtttgcaattccttaatgacatatgatgtcgagcatcttttcatatgcttatttgccatctgtatatcttctttggtaaggtgtctatttaggtctttttccattttttcattgggttgttttcttgtcgaattcagagttttttgtatattttgggtaatagtcctttatcagatatgtcttttgccattatttgcttcccctctgtggcttgtcttgttctcttgagaagtgtctttcacagagcagaagtttttaattgtaacgaagcccagcttatcaattaggtttctccttgttgagcctttggtgttgtatctaaagactcattgccatatccacggtcatctagattttctcctatgctatcttctaggagcgttacagttttgcattttacacttaggtctataatccatttttagttaattccaatactattttaaaataaactttttactttacagtagttttagatttcaaaaaacttgcaaagagagtaccaagagccttcacatactccattcccagtctccccattgttaacatcttacattagcatggtacatgtgtcatatacatgttatatacatgtgtcatatacatattagctcatatacatgagctaataatattgaaatattaccattaacccaagactgtattcatattttttcagtgtttactgaatgtttttttactgtttcaggatcccatgcaggatactacattacatttagccattgtgtcttcttagggttcctctagactgtgacgacactgtcaaaaatactgtaacagtgtttctgatgactttgagagtttggacaggttcatgtgtttggtaagctgtccctcaattggggtttgcctcatatctttctcatgattagaatggaattatgagtttttgtgggaaaaacttcagaggtaaagtaccattttcatcacatcaagaacccatgtgaccaatatgacttattactgtggatattgaccctgatcacctgactaacatagtgtttgccagatttttccactgtaaagttactcttttatgcccttttcatactctaatactatttttatctgcccattcttcagattcagtaacataaaaggcgcagaaataggactactgaaagcaaagatcactttgatgggttgagaagggggaggaaatgtaaatactcattaattacttttttcctaccatatttataattacaaatatatcttccatgcagaccataaatactcaagtcaacatgaccaattctctctttccctgtggtcaagctgcatgacaatcaaaaggtgaattaatacagatggaattataattagagagttagatggtttcattatccaaaatcaggctaagcacgctaatgcctctatctcagagtcatgaatgatcctgcagttgtgaccagggtatgagaaatgcagtggccacaacttccaattacccatgactacattagaggagacagtgctctagactaggactgcacattggaattaccaggagccctatctcacacccataggttgtgatgcagttggtctggggtagagtcagaccactgggatattcaagaactccccagattatactgataaagaattactgtgatcctgtagttacctaatagctaagactctcttccctctggaaaatgccttaattggtactgccaatcttttttttttttttttaaacagagtttcacccttgttgtccaggctggagtacaatggtgtgaactcagctcactgcaacctccacctcctaggttcaagcaattctcctgcttcagcctcccaagtagctgggattgcaggcacctgctaccatgcccagctaatttttttttttttttttttaagtagagacagggtttcatcatgttggccaggctggtctcgaacccctgacctcgggtgatccacccgcctcagcctcccaaagtgctgggattacaggcgtgagccaccatgcccagcactactgccaatctttgttatgctcctttttctctgcttggttggctcaccagtcacttgatacagtctttagatttaagagcacatgtcaaggttgatcctgcatgactgctgtaggagctaccctctcttctttaagggcttttatattttatactcattgtttttaaatggagaaatctaattccctaatatccctgggtaaagaagacattattccacccaagaactcatatttaaaatgtattttgatatattttaattcatgtataaatataaagtaaaaaaattacataatcatatatctctttcaatgcattttgatttgttgccattttattttactcactggaagaacccaagttcctcacatatgagaatcatgtttaacatattcaaactgccctacagtatgtgtgaaatattaagatgctttttgatgatgactctacttacctctatagctattgtccttagctcctttcttttttcagagccaaaattttttaaagacttggagacaagtctgtatttatttctcactccactgctgcctggattttcactcccagcccactactgaaactgtttttataagataaccaatgacaatctggtaactaaatccactggatacttattaattttacttgaaatctctgcagctttgatctttccttccttcttaacatactgtcctctctctgtttttctcttaattctccaacctttcattctaaggctcttcctctcatcatcccttcaaagtcggtgttccttggggactaggcctcagtccatgttttccctcactgtataacactttctttggtcttcaattgccatgtacaagctgttaattcataaatctatattttcaaggctgacttcattctcatgctttggtcctatgtgccttactatggattggacatctcaaactaaactcatcatttcctcttaaagcccattatttctcctgtgtagaacatctcagtgttttatccgccagtatatgcccagtctcccaaagagaaattagcaggttgcccttcactctactccctctttcatccttcatcaaattcagtttccttctatggtgactctttgtaagccttatccaactctaacctgttgttatttatatggcagagtgaacattctaaattgcagatcctatcatgtcattctcttccttaaattgtactatggctttccacttttttcaggatgacatacagtgctctcccaccatgatctaatctctgcttctctctcatctctccccactactcatggtctggtcatctggacccctacggattgagggtataagccagaaacctacaaattttctttggtgcctctttcttcctcatgatgctcctgcttatccaattcattaccacacactgggcttccacttgtgtgtatggcattcatctctactaccccactctcatccaatctcatattgtgtagtttgggattaccacatttgttttttagctggtctctctgcttttactcttgttctcctccaaatctgttctccgtaacgtagccagaatgaatgtttgctattccaaatgtgaatacgtcatcgcagtgcttacaaactcttcccctgacttcccttaggctcgtaggataaagaccaaaattctccccttggccacatctcccatcacttgtgcccctggccatctgcactccagccatactgtcccccagccactttgtcccaccacaaagcattgccacacatttctttattttgccttaaaggtaatctacctctccctacattttgttaatttctgttaactccaatttacctttcaaatctcagctcgtgaaagccctctgtgccatcgcaggggttccaagattcctcctgtgcttatcttataccactatttttcctctagtttgtagttataaatttatctacatgatcatttgacaaataactatatagtccaccagactatagactccaaatgggcaagaaacctttttgtttcttaccacagtatcaccaatattgtacacataataggtgttaagtcaatatttgtttaattaattgtgaatgattttaaaagcatttgaacaacaagatggaaatgtagacaaacccaaaataaacatttattttgcactctttaaaatgtgttaaaatcaggcatatatttataattatattgttgaatattttgttttcattgataaacacctcttaactatttatattctgtaaggggagaatgctatgtagtagattgaactgtataaaatattaaaattttgtttcacttatattgtattttattgcctattgaatatcaaatttaatgaaaatgaaacatttccaaaaggatgaaactagtttttaaacgatttaagtgccaatattataagtttacaagattttatttatagtttttaaaagatttcaactgctaacagtgttttttatttctccttttatatttttaaaagatatatatataatataaaacaagtcatatctttttggtttggaacttttaaaattggcacgtgaaatatttaggaagaaattccacatggaactggctcattgtcattccacggggtcagctggttgctccttctttccttgtgtgttgttggtccttatggcttgcctgatgagtgcttcactaccacttagacatatggagctggtaatattggaagatgacccttgagagtatcatataaatgatttgatctgaaatctaattttagcaggaaaccatatgagtccacaaatgcaaaggtagacagtatctaagcaatgttatctattcagtagttaggtttgctccattagattctagttttaacataaagaaggcagaaaatgaaacacactggtcatatccaaccaagaaaattatgtgcagattttaagaggcacagtagaactgcttgagctaaagcaggaaagtaacagctacattgttcagaagtaaattaacgtgtgcctaatggtaatgcatgctgcctagacataaatactctaaaaaacaaaacaagaaaaaatagaaaaagaaatgggaaaaaaaaaacctagttgagtgaatgtcaacataaaagaaaaggtaatcaaaggcaagagagatacaagatactgtgtaaggcatcatttacaaaggaacactgtaaagattgcagaatagaggtaagagaatgttaaaataagaaaatccaagatagagaatgaaaggaagattgtacaacatattaggataaatgagaagttatttgtcaaatactcaaaggacaagataatagtgaataagaagaaggatgactaagagatggagatggtaatttaataaaacacagaaagagccaaactgaatcagacagatagttcctatcatgtagtatttagcattcattcataacattatcaatagcctgtcctgggtgagattgatttttgtgaattttgctttggcagtgataccactatctatcaccactacccataggtgatagtgcatttgtcataggcttctttatgaagtctctcgtgggtatttttgaccagggtgaatcttcaacttaattactgtgtaatgagacatgatttttaaaaatatatctagatgatgttctgatatgattttgaaatgtgttaattgactgaaagtcaaaacttatatacttaaagtatacattaactggagcagtgtcctccactcacctagaatactccagtttttcatgtattttactactctttctggatgttagccaaacacaaaatagtgttgggtacaaacaaaatataagtctgtgagacaaaaaaaaagtgtatttcatctccaattccctgtacatgtaagttcagataagttacttaacctcctcataccttccttttcacctgtgtaaaaagagggatgatgccttctatatatctctaaattcaggaagagtaagtgagacacacgagagtgctgtaagcctttgcaaacatgtatataaatttggcataactattcacaatagcaaagacatggaatcaacctaagtgcccatcaataatagactggctaaagaaaatgtggtacatacacaccatggaatactatgcagccataaaaaagaatgagttcatgtcctttgcagggacatggatggagctggaggacattacccttagcaaactaacacaggaacagaaaatcaaatactgtatgtcccacttataaatgggagttaaatgatgagaacacatagacatgtagaagggaacaatgttcactggggcctaccagagggcggaggatgggaaggatgagaggatggagaggattaggaagaataacttatgggcactgggcttaatacctgggtgatgaaataatctgtgcaacaaaccccattatgcatgggttttttttttttaacctgtgtaacaaatctgcacatcctgcacatgtatccctgaacttaaaagttaaaaaaatataaaaaatacaagtaattctgaggtacagatgagcctgactgtgtaactcatcctttagcatgctaacccgcattaagttgatgcttttggtgccgggaacctcacgtctcctcctcttctggaatagcctagagaggaagctcttcttctgtgtttagagggaaggtatctccttcagtaagcactgtgctggccctgaagagtcttcctaccctcttcctgccccctactgccactcccaccccaccagcgtggaacttcgtgtgtattcaaaggtccagtttgaattactgtgaggccagtggctagaaagcagtgtagttgggactggagattcacatgcctggctcttctcccaagcttcaactgtagctcttgagcagcagcttcctctgagcttctaaaaaatgcccagaaaattgcccagccaaccacatttcctggcaagcatagcaccaggcatatggtcagtttgagtgctattagataggctttagaacttccaagggatcattggtttgattgtcattgtatccaccaatcacccaacatctatgacccacgacaatttgccagacactatgcttggcactctgaggaataaaaagagtaagacagatccctagccttttctaatctatctatctaatggagatatggcaaagcacctaacaaagtcactacccattagagttgtgaatagtggtaataataattatttttgaaaatctaagaaaagagagcatgtgctagaataggtaaggagggcttcactgagaagatggagttggaattgaatctcgaaagctggatttgttttggataagtagagaagagttaagaagcaaaagtatgaacaaaatctttttttgagaatgttccaaaaggaagtaggcaagaagaatggtaataaggttggcaagattggttaggaaaattgttttttagtcctgtatataacaactttagagaatatttactataagttaggcatcatactaggagctggatatatgataaacaaaacagaccaagttctcacccccttagagcttaccttacagttggagaggttgtcaataaataggtgagccaattactaagtaattctcaaatccatggtgctatgaaggaaacgtcctgctgcaggaagtgtggaaacctaggtagcaccctgggaatggccacgctaaggagaagcacttaaactgaaagctgatgggtaacaaggacccagtctttacaggtgttgaggagaagctcattctaggtaaagacaatgggatacaagaaggtgctaagaagggatgagttttgcatatttaatatactaaaactatgccagggaggttgattgcatagggtcttagtgctaattgttttaacttctttcttatcatggagtttgtaggattcttgacaatttagtattgaagtaatcatataatcaatactaagaataaaatgcatgtgaatgatgactcttacacattactacgtaaatgaaataacctgtacaacagatcataagccagaggaagttaagacaatgaatatgatcttgatcatccagaatttaaaagagacagtgtatgatatacatttactttttaaaatttagacactttgagttataaataagaattggtccacttggtgtgaaattatgatcttttggtaatacagaaaatatattgatgaagaaaaagaatatattttaagtttaaattataatgtacattttctgtaccataagagacactagtggtattgatacattaatccgtaaggtaagatattggaagatgaccaaaatatagatcaagttccttattatggtgttcagtaatatgtgaaagtaagagtggtaccataaagttcagtcaagtctagactagaaaaatatccaaagcagtttagactacgaacatctttttttttcttttcttttctttttttttgagacagaggctcgctctgtcgccaggctggagtgcagtggcgtgatctcggctcactgccaagctgttgaccttagttagtgattcagaagtaacatttaaataattgggtatgagtatgtgtgtgtgtatgtgaatgtgtttatgtatatgtgtctgtgtgtaaaaagttatttgacccatcagacctttgagtgcaaacacgtgcaggaagccaagtttaaggaaattaatggaacataattacaacactcaccagaaaagcaaggatttgagtaacctagggactggatgcacagtttatcccaaaaaaatttttaaatccaaaagtgaaaataattccattattaatgttttagaagaataaatccagagcattataatactttggttaatactctccaaattattgtgtatatgtactgcaaattatacagaaaaaaattttaattttccaatggattcttatcctttcatcctttcatttgtgatgttaacacttgcaggatgagaagttagatgataatagttggactttatattccttcatttgtgcaaaaccttgaaaactttcataaattaaacctcttgctgcccttggaaaatcacaaaatgcagtacaattcctctagcgtcttttaccatgttctgtgctggccagacatttagttctatttaaaatccacttacgtatattttaaatattaattctctggccatgcctagtatgcaagcactctggtacaagattctagagtgttaatatgctgccaacttggaccttattcaaaactatattgagacagtttgtgattctctaattcattatctgtagttagactatccatatctttttagtaaaagagaagaaggcttatatattagcatatgcaacacatagaaaaatgaagtataaacctttcagggtactctaaaccttgtaatttttaaagaaacaatgttatacacacaccatttttgtttgactaaatatggtatattttaaccgtgaacacgttgaatgcattccagtgtgtcaaatgatattttaaatgtaaatagaggtgaatgtgcctgagaatactctttgggaggtggggctgttttggggttctgttttactttgctgacactgctgcatgattctgtgattaacaagcatatttctggtgctatcatatggaaaagttagcatttattctcccttaacattttattggcatctttgatgtgttataaaacaggcatttactactgagtagctaagcatttctccctctttgtttctttaattaacgtattgatctaaaacaaatctataggatcaagcttattgaggcagacagcctgtttgtctctcaagagatcattgctgcactccacacactttttcagtaaataaaatatggacaaaactgcaacatgtggaggctgaagattccattaaggacttttggcatctgtaccttaaagatatttcaaaaataattgtgctttattgcttcttctctgccatagcatataacaagcgttttttaaaagaccaaatacagctctctgatttccatttaatggaagaagtaataaagtttaattgtatacgtgagcatggggcatcatttgcaatacatctgatcaataattcatcgattgccgttggctcaaagtaatatttgaaagaaaatgcagccagtgggagcttatctagctgtagcttcatcatctctattaattatgtgtttcccgaatttggatcattaggctaccaaagtgacagcagatggcgagcagaccggacaggatgctgagaggaccaacacaagagcaaagtccctgggagaattcattaaggagcttgcccgggatgcagaaggtattagaaagaatcacattttaatcatcatttctcccaacagaaaaacacagaaagggatgacacaggactggaatttctcttgttataagtgacatctgtaaaatcaaaggtagagtttcaaaaagtagtgtggttaagatattcaagggtattatctgctgagaacctgtgacctgcagtgttaaattagcgacaatagtgaattagcgacaatgagggcagaatagcagtaaattcttgtaacatggctattataattacataagaataggcaacttttgttttgttattgtttttatttgaaagtatttaaagtatttttcattttcaagcaagctaatgtcatcattccacttgatacattaaagcagcactttagtttctccaaatggcttttcaaatactggggactggtttttaatgaacatctgttgcttgggatttggatgtgctactttatgagaagctctggtgcatttagctcacaattctctaggagttagttcttgccatctactaacatgaatgagaaagtggaagccattttttggcaaaagcccaaattaagaaacttaaagaatacagataatgccccatccgcactcgccccccaaaaaaacctagtccttaaatatctgttaaaatataataaacgtgcatgcatgtttagaaattgggaaaaatgctttttgttgttttttgcttgaagcagtaaaacatttttcttgctctgcaatattatgcattttagatactttgcttcataatgtagccaaataaataaggatgtgagatcaacttcaaggcagattctgactgataattcttaggcatcactggccaagaagagacaaactcccaaatgttcaccactgcaagaagcaacagggttttaatttgagagctaatttgaggcaaaggtgtgaggttctgaaacagaaattatttctgccagaaaaatctcagttaattcattgtggtttatcctctgctagatgaagctgttgtactttccctagtattattttccattaatgctacttgaagtgtccccctccaacccaaaacaacaacaacaacaaatcccactgcaggtagagcaccttcactctgagcggatccccaaaggccctagtcaatgctccaggaactttccttttctttccattgacatttcaaacacccaacacctagcagcccatcctggggactcattttcaatttgtttcaatcaaacactggtatgagaataaatgctagcatatgttttagtagatcctattatcaacactgcttactttgttctctgcaatgaaccttccatctcccaccaaagagagatgcatattcatggttacctctttggtcaatatgaatatttgcttcttctgggtgcctagggcctctaggtactatttgtacaatttgtggaccaacaggggtagactggagatggagatttatcccaggcttgctcaccaccccaaatcccacgtctatacaccagagaaaggattacccatcaccaaaggtgtctctcgttccctaaattatgcatagatcaggtggtctgattgtgtctgtccagatagggcacccttttctaatttatgtgaagtgccatgtgggatagctatactttagggaaataagaacaccactcacttttgcctgcaggcactatttggtagaattaatccaactgttaaaattgaatgaaaggtcaaatttaaattgtaccagagcaacactaaatgttcattgagatgtaatacaaagcttggcagtttaatggagaaaaaaagagaaagtgggggaaggaagggaggggagggaaggaagagaggggagggaggaaaaaggaaggaagggagggagggaggagagggaaggaagggaggggagggaggggagggagggaggaaggaacagagggaggaaaggggaagggagagaggaaagaaggaagggaaaggagggaggaaggaagaaaggaaatggaaagaaggaaggaaagaggaagggggggaaagaaggaagggaaaggagggagggaggaagaaaagaagaaaagggaaggaaggaaggaaggaaggaaggggaaataagaaagggagggacggaaggaaggactcaccaaaggctttaaagtaggttatactgtatatccacacctctttttctctctctctaaactataataatgagggataaccatcagtacttttacatttttgtttgtcagttgtaataaattgctgtgggaaaagtaaatgcttcagactgacatttatctatttcagctttatgtttggatagatgtactattcatcctatctttcattatgagtcatgacctcgttatagataatcaccttctattcatctaaggcattcttatctcactataattttataatatctaccgtgctatgactcctgattagttcataaataaactgttttattccacgcattattagaattaatgagtggacataggtaaacccattagtgtttatttcctgacatacaataggacttaatcaatgatagacacctttccttcctgtttctcagatcagagtattactttctattcttaataaatttacccatcagaggattttgttttcagtcttagtatgaaaacagttttgcttctcctgaggaatttttacttacctttatagatactgtatgcctcttaagaatcctatttgtattccctgctacgcgtagtctactaagatgcttagtagtggacttaggatgcactgcattgaacgttatggcatggttttctgtctactaattctttccctaatttatacaacttttttttttacctgtagtgctatttccttttattttaattttatctgatattaggatttttaaaaaattacctaaatcctcctttgaattaagttggaaataaataagtaaattccaaagatacatcttttacaatcattttcaatactgtgggaaagaaaatatattgaagtgatagtgcatacttttgaataagagatgaaaaacacattcatctttaagaatgctcagagaagttccagatcctatttatacataggatctggaactatatatatgtatataaacataaaactgtatgtttatatatgtctataaagagtgaaacagacttctattaaaatgatgcttcctttccttttttggtgggggagatttctaagaaaatcatattgcctagcaagtgatagatgcctatgagagaaatggaaaatgacagcattttaaaatttaactttcagtagaaaaataatggaaataaaaattaaactagacagttcaccatacaaaaataatgttaaatgagggtaagtaaagcgcagtgaaataatctggaaaataactataaaactttaaaacactaataataaataaatgttatccaaattaaactggcaagttttaatgggccatgtgtaatttatctgtgtcccgatgaggccatatttttctccaaaacccatatctaaaatttgtttttcataatgaagataaagtagcacacataccaaaaacccatttgaaagatgctctcatttaatccaaaaagatactgaaggcccatgtccattttggggagcttgtattttttttacataacatgggttgcaacaaaaagctggccatggaatagcagtttattccataagcagccaatatatttgctaaaatgtttgttcttttggtcctaaccacattgaaatcttctgggactatttcaataacagtaattgcaacaattgataatatccaactggaaaaaaaaaaacaacctcatgactgagctgcacagtgatgtcctatagaaactttatggggtatgtgttatatgttttgatgtttttcttttttttattctcatgtttttattttcctttttactttaagttctgggatgcatgcacagaatgttcaggtttgttgcataggtatacctgtgccatggtggtttgctgcacctatcaacccatcaaaagaagacatttatgcagccaacaaacatatgaaaaaagctcatcaccactgatcattagagaaatgcaagtcaaaaccacaatgagataacatatgacaccagtcagattggtaattattaaaaagtcaggaaacaatagatgctggcaaggctgtggagaagtagaaacacttttacactgttggtgggaatgtaaattagtttaaccattgtggaagacagtgtggcgattcctcaaggatccagaaccagaaataccatttgacccagcaaccccataactgggtatatacccaaaggaatataaatcattctactctaaagacacatatacagtatgtttattgcaacactatttatgcaaagagatggaaccaacccaaatgcccatcaatgatagattaggtaaagaaaatgtggtacatatacaccatggaatactatgcagccataaaaaagaatgatatcatgtcctttgcagggatatggatgaagctgaaagcttcagcatcctcagcaaactaatccaggaatggaaaaccaaacaccacatgttctcgctcataagtgggagttgaacagtgagaacacatggacaaggaggggaacaacacacactggagtctattgggggttgtggggagaggaaaaggaaagcattaggacaaatagttaatgcatgaggggctttaaaacctagatgatgggctgggcgtggtggctcactcctgtaatcccagtactttgagaggccaaggcaggcagatcacctgaggtcaggcgttcaagaccagcctggccaacatggcaaaaccccatctctactaaaaatacaaaaatcagctgggcacggtggcatgcgctataattccagctactcgggaggctgagacagtagaatcgcttgaacccaggaggtgcggtcgcagtgagcagaaattgtgccactgcactccagcctgggcaacagagcaagactccatctcaaaaaaaaaaaaacaaaaacaaacaaacaaaaaactggttgacgggttgataggtgcagcaaaccaccatggcatatgtattcctatgtaacaaagcttgctttcttaatacatgatcattttgctaaagtcatttttgtgcaccttaatgattgcttcttgtttacaaatggttttaatttaaagaaattatgtatgccatccaaaagatacagccatatttgccttttccctttctctatctgttgtcattctttttccaccagattcttctctgcagaagtttagctttgagaccagagcacaagagaaatagtgagactctgtctctcatttttcccttcctctatactgcctaggcccagaatctaaattagatcaaatttcaaaagatatttcttatgaaagctgatttatacacgcacacacacacacgcgcgcacacacacatattcatttaacaaagaaaaaacatacagctttagcaggttgggaagtggcatttattaatatcatcttcattttaaaaagtgagtacaaattatatcagtagttacttacatgctacaattggttaaagtcagctatacagatagcatgcactcagactaaaggatgagatagtaccataggtagagccaaatctgctactgctttcttgaaatctaagaagcagaaagcttcttacatttaatcattggtactctggaaggcttcccacctagtttgctggaccagggagctttcaaactaatcagcctatggttactgtgattctgtaacaaaattgagacacagcctaggtgatgtatcttactgacaatagtggtgaaatattgggaggattctttggcatatgtcaaggtataactgttaggcagtgggtcaagaaagagccaccctcactaacttctaggaatacagcacctgacaataacttctaccacagggctaggaatggccatatttgttctttaagacatgtgattcaaatatttctgctaattaaaccatggctgtcttagcccatttgggctgctataatgaaaatatcatagattttgtgccttataactgaaatgcatttctcatttgtgaaggctgagaggtccaagatcaaggtgctggctggtttggtgcctggtaaggagctgcttcctggttcagagatggctgtctccttgttatagtttcatgtggtagaaagggcaagggggttatctggcatcccttttataagagcactaatttcattcttgcccttatgacctaatctcctctcaaaggctctgtattaatctcttctcacgctgctataaagaactacctgagactgggtaacttatgaagaaaagacgtataaattgaccacagttctgcaggcttaacaagaagcatgactaggaggcctcaggaaatttacgatcatggcagaaggcaaagggaaagcaaggaccttcttcacatagtggcaggaaagagagagaatgaaaggggaagtgccacataccttcgaacaacctgatcttgtgagaatttattcactatcacaagaacagcaaggggggaggtttgctcccatgattcagtcaccacccaccaggcccctccctcaacatgtgggtattacaacttgagatgagatttgaggtggtcggtggggggacacagagaaaaaccatatcaggctctgcctccaaataccatcacattgggaattaggtttcaacatatgaatttgaggagaacataaacattcaatctacagcattggctatcagggttaaagtactgactacaggaacttttaaaccaaagacatatataacgaaaaaagaattataaagatgcattgtggaaagggtatattagacattgaaactcaattctttctactatcccagtgtttctcaagctctagggtacatcagaagctctgagaaggcttgttaaagcccagattgctggtcctcacccccagaatttctgagtctgtaggtttgtggcagggcctgagaatctgcatttctaatgggctccaaggtggtgatgctgctgctgcttataggggaccacattttagaaccactgtactgacccaccttctcacatacccctctgcctgctctgcttgtcctgactatgtacacctgtttcaggagctctgcccagtgcaaaactctctccaagaatagaaattaattttcaggaatctctatgtcataaggagatcttcggatacacccttgaatggtagaaaatgcctcttggccaaccgagacccctcattctaggagttttcaaaggtaatattatagaaataagtattcagctgacaaaagagtttgagaaaacatctctcttaaattcaccaaaaaaatgtcctatagaacacactccaggaaactttagtctaaaactaataatataactgtgtaaatgtttcaattcaccattttaaacttttatttgacgtagaattcttttctcaaatgaaatcctgcccagaacatcagcctataaagcagactcttggcagaatagacatcatttgtagaaaacctgaagcacctggagaatcctacgattccaaggagtacagtttgaaaccccatttaatgcataataaacacagacccttgtgaaggatgctattgctggaaagtgtccttgaagcctaatttataacccttctcctagaagggttataagtctagaccagtgcttctttcttcactcctttaaaaaatgaacacaggagaactatgtggaaatacaagggcaggttcattttcagagatctcatcactgagtgtatttccacactcagtatttttaaactgactgatagccactgctatgactatcttatcagcaatgcagagcttgcgtttccagcctccaagtgttatgctacaggtcactgttttttttaaactcttacctgagtatgcttcgacctacttctttattttaattctttctttcttttgaggttagaaacaccatgctttaattgctgtaacccccaaaagaaatataatattgagaaacatattacatttccctgtttgttactgattgttgtcttaactgcctctgtggttcccagcaggaacactcacggcaaaatactcttcatttggagatggtggtgcccagcagatgctgaataccatgttttcatgtggcatgtttgtttactaatttacaaaatttgttttaccccctgcagctgtaaatgaaaaagctataaaactaaatgaaactctaggaactcgagacgaggcctttgagagaaatttggaagggcttcagaaagagattgaccagatgattaaagaactgaggaggaaaaatctagagacacaaaaggaaattgctgaagatgagttggtgtgagtagatgagttattattttttcttttgacaaactgagatttccagataatttacagttttctaaatttttatcacacgtataagtaaaagatgctttgtttttccaacctggagatatttgctatgttatctatcatctatctatctatctatctatctatttatctatctaccatctattatttattcatttacttatttaattgtactttaccattgttccaaaatgaatcaaaagcatgttcttgcctacatataatcaagtaaatgatcttttctggtgctgctccttctgtaattaggctaatgagtttgttttgttaatcatctgcattagggacttttggactatcagttgatttttgttttaataaaaatacctttggataaacaaagttatgactttaccattcatatattggccaacctatacattttatcatcttaagaaatgctgaaaagaaaagtcatcaaataataaacacctaatactttcaaataagagttgcgaatatgagggttgggaaaagtgatagtgattttacccatgctaaagaacttttatgataacgcactcaataaaatagatacatctctacattcatagtcagctaacttcaaagtggtagtattactaatacttaaataatttatactaaaccagcaatatcagcacaccagagaacttgttaaaaatacagattgtcagaccccctcccagacctcctgaatcagaaactttggggatgggacccagcaaaccatgtattaacaagcccttcaggggattatgaggcatgttagtttgagaattactgtctttcaagtatttagagtttcttaatgactcgaaaattatcactttagaaaaactaggtaagttaaatccaaaaacttccagatcaatcagttggaagaaaaagaaacatagattaaaattatgctagtctactagcatgacaatgacctagaattctgttcacagtttctgagcaaacataacaatattcatcattacattcaaagtaatagagaaaaggtctcagtacaatgaaacaagtggattgtttgattttggtatgtgaagtgaatcttaaaactcatttcatcaatcagattcctagaatgacatgattcaaaatgttattttacttacaaatttaaaaggtttcttaaaaatctgtttcgcttttattttaattaattataaatggtctcaggtaccagttttcaacttgatttagcacacagtgaatctattttacatgttttcttattttctcattcttttcatgttagcatctctttgtaacatggtttaataccaataaaccctaaggcagtgacatgagctcattgtctattattgggctgggggtggttacagagctgcagaagcccttctgaaaaaagtgaagaagctgtttggagagtcccggggggaaaatgaagaaatggagaaggatctccgggaaaaactggctgactacaaaaacaaagttgatgatgcttgggaccttttgagagaagccacagataaaatcagagaagctaatcgcctatttgcagtaaatcagaaaaacatgactgcattggaggtgagtcttaggggcacttttatcttaatctcagaaggttggggactgcgggggcagtgttgaacatggctggactattcaagttgatgcacatttacaaaagtcaagagtgacaactctgaaagggggcttctaagaaacagaacaagaaatgacttttttttgtttttgttttgtttttaatgaccagttaccatcgcccaaagaatcaaataaaattttgataaattaaactgttgaagatatttaagaacactgtgatacagtggaagaagttctttacagggagtcaggcgaccttggtctcaatgacaactgtgccactatctagacatacaaattgggcaagtcaattaatctgtaagcatcagttccccaaatctacaataagtgcattatactatagcatacatatagggtatcttcaaatattcatatcatattattttgcagctttcccaaactaattcacaaatcttgttcagagatcttgctgccaaaaatcatagaagttccctacactttcaaattcaatctgagcacatgacaaatagctcaatgaattgagaccagagcttggaaaaattttggttcctctttttctatgcgctgtgttctatgcaaatgatcttttagaaggaactaacatgaatagatcaggtctgcgttattttctcctccttttccacacagataacagttacttctcaactcaagaaattatgggcagcctctatctttttaagagttctgatggaactagaactaaaacagattcctccattattttttcttcttttttttccaatttctttcttaatcttaacatagtaaattatcacttttcctaagagtaaactcagcacatataacagcagcaccctgtatgtgatattaatatttaaacaacaacaactttctccccagagacaaatttacctttgctgttttcaaagtatctgactccaacaggtcagaaaacagcagcagacctatacatcttctaacacataatttcaccgtcaacagtaactcagcaccctctggcatatagtatgtatgtagaaatgtttgttgaatgacagtaacaattgaatacaatcaaccaggattttttaaatctattcatttctattttcctttagattaagtagtaagaggaagaattacatttttttaatatattttatttccgtgtccctcttctgggacttagccttgtcattctggtagaatattgaagaggcttactttttttcttcactgatgcacctaaccaatttggagtctactgacatgctagcagtattccagaaatactgctgtgaggcaggatgctgggccactgtcctgtcacaggctccagcatgattcaccctgctcggtgacacaccagccgtgtgacttacccgaaggtgcacctgtctattttatggcaaccgtttgataaatgaaaattacctgtgtggaaagcatagtaagtatttgagaaatatttcaagaagagttatatggcacagtcaatagtacctttagctattcgtttcttttagtgatgtttaaaaccagaagtcatcattcttgggcacccctacaaatacctggagcttatgtatagtcggtattgaaattctgagtggtcctgtttggattttccttgtatgtgccacgtttaactaaagacttgtttaaaagttactggataaaatagataaactaactgaatcaatatgaataaggcatagattatttatggttgcttaaaccaaataaataatttggttgctgccaaaatggctgaaaatcacatggggtgtttgttaagccaacaggtttcatgggctcccacctagagagtctgtgtaggctgctctggggtttggccccatgtgtacattctaacactctccctgggctaatctgatgcctatacaggttcgaggaaaactgacacattgcatctatttgattgaataataagctgcattttaaataaataactcccttataactgtgtccacaatgaaggtaacacaattaatacccaactcaaaaactttttatttattttaaggtggcatgtaattttctttttaaaaattttatcaagcctctaattcattcaggaaacgtgctagacaccaaaattgattgtgtcagtgatgagcccccttagagcagcagcctcagcgtaacctagcaacttgtcaaaaagacaaattcttggaccccatccctaaatgaccaactcagaaactctgagaatggggcccagaaatccgtgttttaaaaattcctccagtgattaagatgcagcttcaaggttgagaaccacgggtataaacactaaaacaccatctctgattacttcaagtaacttgtatttagtgggaggtacacataagcaaaccactccatacgctaccataattatcacaggcgtaagcaaaggagggagtctaagtcacccctgagtttaggaagagctttgtagaggccctgacacttgtgctagatcctaaaggataagcactgggtcacagaagaataaagagaagaacatttcagaaactgggaaaaacatatacaaaggcatggaggaaagaaaatgacattttgggggaaagttcagtggtttgataggcttggaaagaagactgcatgtgaacgactgaagggatagaaagaaagagaagataggcagagtgcagaccttcagttataagagaatcgcattgtgagactaagctaaggaattggtttttatcctgagagccataggaagcaattgaaatattgcagtcatgggttaaaataaaatgttgcagaatttgagtggctcacttaaactgaataaatggttttttatcggaaaatagtgtgatattaggctagaaaagtaggctgggataatatttatctacatatctgtcaggtacctaccatatcaaggtactgttggtaaccagggtatttgaggttgaatagaaatgattcctggcctcaaagaatttacaacctcctgaaaaattcagacatgtcaacctttcactctacataatactatgataatattgactgggagattcagcaaaagtttcacaaaaataacagcatcatagcagaagtggagaggaattggaagaaagacagagcaacaggaaccccagccagagctttggaagtgtaaggtgatcttaggaagtgtccagtacagcagaaaaactttcaaaagctacgtaaaaatctgtagcagagaaggctctggaatttggagccagatcatagaaggctttggatgcagccaactagatggtgatggagttggaaaggcatttccagcagtggagagagggctaagggaactggggacgtcatgggaagaaaagagaagacaaatatttcagtgaagcaaaataatatgtattgagcagtctatccccaaatctaccattatatccttgccaaagaaggcagtgcggatcaagtaaagagtaagttgctacataaagaatacacaggccagcctgagcaacatggtgacaccctatctctatagaaaaatacaaaaattagtcgggcatggtggtgcatgcctgtggtcccagctacttggaggctgaggtgggaggattgcttgagcccagaagtttgagcctgcagtgagctgtgatcatgccacagcactccagcctggatgacagtgagacaatgagacagtgagacagtgtctcaaaaaaaaaaaaaaagaaaaagaaaataaaagaaaacaataatagacaggaagatagcttttgcaggttcctgaagaatctaccacaccaacacaccaaaaaaaaagaaagaaagaaaaagaaagtgtccaatttgcaaagctctggaataaataaagatctaattaattacaagttaaaagtagaaatataatcaaccttcatatccaaacaataattgagcaattatacttatgccatactttttgtagaataattctccctatacataggccttctttctgtttcttaaatactctaagtttcctatcttaggtattttatatgctacatcattttctatctgtgcctctctttgtttttattgtactcatctaatctttctttaagaatatattatacattaatttactcattcattttatctctcctccacacaagccatgaggaacatgtgttcttcctcacatcccccaatcctagaacagtatctagcaaaggcaaaacagattgttttccgtgaataaataaagtgccatagaacaaacccagatactctatacttttgtcaatatttgtgagctccaaatttccatcttttctcggttcaaagctagaacccatcagtatctaatctgaaaacaagacacctctaaaatttatttaacctcatcccagcactctgggaggctgaggcaggaggatcatgaggtcaggagatcgagaccatcctggctaacatggtgaaaccccatctctactgaaaatgaaaattaaaaaaaaatacaaaaataaaaaaaattagccaggcgtggtggcaggcacctgcagtccctactcgggaggctgaggcaggagaatggtgtgaacctgggaggcagagcttgcagtgagccaagattgctccactgcactccagcctgggcgacagagtgagactccgtctcagaaaaaaaaaaaaaaaaaaaaaaaaattatttaacctcttgatcatcatttctgattgagtatgctaagaagcacattttgatctttgcttttacaaaagattctaactcactactttattgaaatcaaaatatatatagctcttcaattaacacacgtgtggaaatatcttccctgtttccagtggcacagcattttaaattaccttgatccattaattcaaacaagccatgttgtaaaagattcttgtgtttctgtacatgctatactttaagtcagctcatacaaaagctaagggctaaaattggcagttgtgtaaaagaatgttagacccttggaagataagatatgacttgtaatcagggagattgtaatcagggacattgggactcttcccacatttgttgtctgtgaagagtgaatgacatatcaaaacttcccctgaattagtgatgggagtagctgaatgagccaagtgtcagcagcacaagtcccaggaatggacttcattttcttttttctttcttttcttttcttttttttttttttttttttgagacagagtttcgctcttgtcacccaggctggattgcaatggtgcaatcttggctcactttaacctccacctctcaggtcaagtgattctcctgcctcagcctcccaagtagctgagattacaggcatgcaccaccacacccagctaattttgtatttttagtagagacgaggtttcaccatgttggccaggctggtctcggactcctgacctcaggtgatccacctgccttggcctcccaaagtgctgggataacaggcatgagccaccgtgcctgacccatttttatttatttattaaaaaatatttattgaggaaactcatctacatactagagatagtgatatataaaactgtctttatggaatttgtgttacagtgcaggagacagtcactaagtcaataaataagcataagctacgaccataaagtctggatgcacgggctgataaacataagttgtttactgatatgtaataaatggtatgttgcatgatattgcataatagattcaatgtgttgtccttcattaacaatgtgtagttcaacaggctgtgcctttctgctagtccctgtacatgtatctgtgatgcattggtatttctgatttttattacctaatctttgtttttagcaactcccggcaaaagtaatcaagacgaatcaatctatataaaaaagaaaataatattgtctatgtttctaccactctgtagaatataattcagataaatgggttctaagaagaacaaaataaggtaattataatagttaaaattacagtgttactgggtgccaggcagtgttctaagctaattcttctccaattttacaatgtctatcaatcatgtggggttcttgttaaagtgcagattctgagtcagtagttcccaggaatggattgagattatgcatttctaatgagcttccaggtgacgctgatgctgctggtgaatgggctgcacattgagtagggagggactaaacattttgtatgaaggtaaattacttccttaaggtttcatagcttgggagtgagcagagctgtgatcccaaaccagaagggctgtcacttggatgtagcttttaatcactgtgccctagtacatagagaatgattgagacaaggataggtgctattttagataggtaatcagaggagtggctattaccagaatggagggaggacacaagccaaagagtaggaagagcacatagtgggaatatctgcaagtgcaaaggcttagaggcaggaactagttgtatgtacctggcaacatactgaattggtcggtgaagggaaggaaagaagggtatgaaattagcactagctcagtgcaaattttaaaactgtgatttctataatagaagagatagtattttcgtagtcaaggacccaggatctatcattaagtagacaggggtttaaatcttaatcacactgtactatgtgaccttaaaggaatcatttaatatcttagttcatctgagctgctatagcaagagaccaaaaactgagtggcttatatgcaatcaaaacttatttcttatggttctggaggctgggaaatccatgatcaaagtattggcagatttggtgtctgatgagggaccactttctggttcatagacaccgttttcactgtgtcctcacatggtaaaaggatgaacaagctccttcaggtcttttttataagggcagtaatcccgtttatgaagtctctgcttcatgacctggtcacctccaaaggccccacttcctaatcctatcaccttgaggattaggatttcaacatatgaattttcaggggacacagacattcaggccactgccctttacttattcaatttcccacttatgtaaaaagtgatcaacatgggatccaaagattggaataacaaaatgcttacaaactgtctggcacatattgagatctaaatgaattagcattattgtctatagaaaaaaactataagtggtcaaagcttaaaattataattgatgcagttaaatctgtaggtagaatggtgatttcaggaataggaatgaatcagaagtataaagaataaaataagtaaaaaatagaccccaaatggagaaatagcaatatttgtctctcactgattttactcttctaggccaggattgagtttcatgtacttttgagacaagctatatgttccaaagaaaaattataatctattctctcatgaaacagtccattaggttgattcttccatgtgatggtttctctatttcttaaaaagtattttccctaagtttccttaaaaatctcacttcaaatttcacagaactcccattgaatacatctgcttatgtttatgctcacaaagtactcatttgtatatagattctagaattcaatatgtagtaccaatataactattcagcacttatattttagttagaaatggatgctccatctttctttaaaagtagttttaattccttaactagtatcgcataacttttcttcgcttggatgactttctcacaatgagaagaagaaataacctgtacaagcctctacatagaagaactcttcaaggactggctaagtagtttatatttttctcatctagccacatttcaacatgatgtaccttttttgctaagcttttattcaaacagctcaggaaagtcaggaatacaaggggtaggattttatgaaaatgcaattttgatgtcttgttcataatggtctacagaaaaagaaggaggctgttgaaagcggcaaacgacaaattgagaacactttaaaagagggcaatgacatactcgatgaagccaaccgtcttgcagatgaaatcaactccatcatagacgtgagtattgggtaaaactcaaaagagagatgataatgaataaatgggagccgatgagaaagctcagtaatagaagcaaatactagtacttgttttcttgtggagataaaattatttttgcattattctactgtgaccatgcctatctattggtgacaactggaatatcactttgttctcccaatggacatgagtgtttgtgtaagtgtactcacacattcacacatatctgtttttgtccacagcgatgaaggacatttcttgttcctagagcagcacttacaatctgcttcaatatttatataacattagttaaaagacaaatgtaaatttacaaacaggcttttaacatgtaatgtctaatgcattacatagagtgatatgtggtcatagaaatgcaaatggcctaagagatcctaatgacatgtatacctatgaagtggcattgtttaaatagataggcttttcttggtctaagttggtttcttaaatttcctagtctattccattaaataatgactttaattctctattctttttgctatgttagtaagtttgaagtttcattttaaaactaaacatgtgggccaggcacggtggctcatgcctgtaatcccagcactttgggaggccgaggtgggcagactgcctgagctcgggagttcaaaaccagcctgggcaacatggcgaaaccccgtctctattaaatattcaaaaaattagctgggtgtggtggtgggcacctgtaatcccagctactcaggaggctgaggcaggagaattgcttgaaccagggaggcagaggttgcagtgagctgagatcgcaccactgcattccagcctgggtgacagagcaagactctgtctcaaaaaaaaaaaaaaaaaaactaaactaaacgtgtagttatgtctcatagagaaattagtaaaagagaggaggcttgaattcacttgcttaaaatgccctcttctctacatatcagtatgttgaagacatccaaactaaattgccacctatgtctgaggagcttaatgataaaatagatgacctctcccaagaaataaaggacaggaagcttgctgagaaggtgtcccaggctgagagccacgcagctcagttgaatgactcatctgctgtccttgatgggtatgtcatttgtttttggaaatgtttgtgtattttgatgcttgtccaaaggttttgactagcataaatagtagagaatcattttcaaatcctgatttctgttaattatgaacacactagctatatggcctttctgtggataggcttaattaggagggtctgggcaaagctttgctacagcagcatcaaaagtctgatttacaagtagactcaaatatggcttagtaggaagtgaacatagccctaggctacacttagaaaaaattattttctgttctttattaaaaagcacagtggttgccttattagcattttaaataacatatatgaaaatacattctgtttcaaatttcagtttcatgtttctaatggaatcaaaacaatttattgttaaaaggatggcttttgaaaatttggccccatacgtagtctttaagtcttttttatttttcctcttttaagctccagggagacattacattttctcctgtaaaatagcagcttattctagctgggattattacaaaggtcataggagggagagtaaagagggaagtatacatttgacttacaaacagccttctgtgtataactgatatgcttttcctacaattttgggattgtcgtaatttaatagcggtgctattagccccaagaataatttgcccagataaatctacatcacatgcaaagctttgttctcatacttaatacttactgttataaagaaaaaatgctaatgtttgaagaccttggacaatatatgaactatcattttattttatgtcaaacttttgccactttataatgaagggtgggtggcagatgaaacacaaagctaggtatcatcagatccaggctctaagtccttacttggggacatattggtcatttggcctgaaacaggccatttaaccttctgaaattcacttggtctcttctgggaagtgcacctaccccagaaagattttgtgaaattaattccagtaatgtagtacaagtgctctgaatctcacagcatgcttcacaaataaggtgaagaattgtctcatatcacacacctgctagagcacctggttgcagagacttttggaggatgctatgggtatttaagatatgttggtagtatttcatagctgaattattagaaatataagtttaggttatagaaaactataggacaatataataagtagatacttcactattatttggaattgtcatagatatattggccatgatcatttggaagccagatttcatataattaggacgttcttcatttgagtaccattgagtgccctgacattccttttttgaatcatcccaccagaatccttgatgaggctaaaaacatctccttcaatgccactgcagccttcaaagcttacagcaatattaaggactatattgatgaagctgagaaagttgccaaagaagccaaagatcttgcacatgaagctacaaaactggtaagaaacaaatggcacatgtgctgggaatggaagtcaacctttttgaatttttcaaatgtaagtcagtctggaaaatcccagtaaattggtatatttgttttgggttatttttgaagacctcttttaaaatttgcctaaaataaattctcggtatgctataattatagcagaactcttttctcagtcacccactaccactgttagggtcttaaaattatctcagaaaccaagcaagtttgtgctaccaactcacaaaataaaacaggcaaagacaacactctggatagggaattttatcaccattatctcaaatggcattagtaaaaaagaaaaaaaagtaaccattgtatataatcacacacaaattggttacatatgaagtttggctataaaattcactttttaataaaaacatactggatcatatgcttctaaacaatttataccatgtttatgaattaatgaatttttatgaatttttgaattaaaaagctcttaacctttggctacaatcattgttcgtaatacatttggaacaagtattttagagtttgggcattccaagttctatcacattatttgaatgccttcaatggtgacaaatctttatgctttagatgtaaagcaacattttgtacatgagttgtgtgatagtaagttggtagtactatttcaggttaaaaaaatctcataggaatcatcctgaataaaatgttcagaaccatcatttatttattttgtttcacatagaacctaccaaacacatgagaattttttgggggagaaatctgattggacatttgactgtgagtgaaatacacataagcagtggtgttaaagaaactgatcaatattttctttgcttcagtgttgggcaaaaatactttctaggatttaggggatattagagatatcccctaaatgaaccagtcttagcaggttcattttgtgatcataatgaaacatcatattctatgagcaatttgtactgtttttggtttctcttgagtgagccctactaatgccatatgttctgttgacttcttattcaaaatagtggcatgatcattgcagaagcatttctatgttcagttatcctttcagaatgaatctacttttcaaatctaaactaaattttaatccatcttctgttagataattttctattttaaagaccctaatttcaagttcaccattttcatttcacctgttttattgtatgattattttcagcacctaaaatggtgcctggcaaatagtaggcacttataaatgaatgagtgtattttttcattataattgacaccttttatgcctgttcataatcttttataccaataaaaatttgctgtagtaattgcttcatccttataaatttcttgtaacattttatgataaggaggtgtttaattttaccctaatttaatacctttaggaaaaatcattttttgccaacatgaagtgtgcacttacttcttaccacccatgcttatacatggtaggctaaccaacctcaaacagagagtgatggtgagttgtaatgcattacaccatgtctgctgttatcattattccttctctctttccacaatcatttaaaaataattaaatgtctgaaaaattacaaaataagtgctatagagaatcagtgatttattaaatgactattggataagaaaaagaagacaatctgtcccagaaattttgttggaatgtttttcatgaacagaatgaataaaattttagtttaatagatcagtataatatagttctactttgctggaaaagaaatatatttgaaaagcattacgttgagtaattatctagataggactaacatcccataaatataagatctgatataaaagctatagctcaacagagaagaatgagattaaatgtattattaagtatagaagagttcaaagcttaacaatacagaagagtcctctactcctttgagtctagccctataaagaaggaagaatgttttcaataacttaaaaggaaaaacaaagaaacaatttatacatttgcaggagaaaaggaaaaggtcaagtagtagagcaaccaacgaccactatgaagaaagtggaggtcagacaatttgagaagaaaaaaagcattgaaaataccataagaaaagaaacaaagaaatgatagaaataacctccaagcataattaagacaatgtttaaaatcaactttgattttttaaaaatttacttgtcttcctatatataaacacacatagacaatcaagaatcacactgaaaggaaaatatgagtgagaaggaagtggatcctttataagcaggagaaagctaatacgatttgtttgtactgcagtattattttgtaaagagtaatagctacttgtcttgcataactaatttctttaaatatcagaatgaaatgttattttaagaatttagacatcatgaaataacaaatgctatttttctattggtgtcgggtgaggaaagtactataaagcatttgttttcctacatataatcaccaagaaaatatctcatttagtacttctctagagggtgcaaggaaaacagaaaggagatatgtcactcataaaatggaataaaaatggaatatggacatcagtaattttttctcatcttagttgctttgatcctataagagactctaaaataacagagaattagatgtttttaaaacatttccaggtcatagtaaactcaaagcctacattatctatcagatcagatttttaaaattgatgaatgtattaatgttctctagaaggacagaactaataggatagatgtatacaagaaggggggtttactaaggaatattgacccacgccatcacaagatgaagtcccacaataggccatctgcaagctgaggagcagggaagccagcccgagtcccaaaacctcaaaagtagggaagctgacagtgcagccttcagtctgtggttaaaggcctgacagcccctggcaaacccctggtgtaagtccaggaatccaaaagctgaagaacttggagtgtgatgttcaagggcaggaagtatccagcatgggtgaaagatgaaggctggaagagtcagaagatctactctttccactttcttctgcctgcttttattctagccacactggcagcttattagatggtgcccacccacattgagggtgggtctgcctcttccagtccagtgactcaaattttaatctcctttggcaacaccctcacagagacacccaggaacaatactttgcatcgttcaatccaatcaagctgatactcaatattagtcatcacaagtccaccccttgtcaacttgaacccatacacatctcctgaaatcatacataatctccaaataaagacaataataacatcataattatacctaacataatacagctatcccttgtacaatcagaagcacactaatccttaacctaaatgctattacataaagttaacaacacttaaatgctgatatgaagtcaataaattttatgtcacatgataaaggaaaaagaaagcaaatgaagatattttcctagtacaagtgtatacatgcacaaacatattcttaacagaataaggaggaaatatatgacaattacagtcttcatttctgcaactggccacgtggttgtagctggtattgatgactaccttcttctactaaccattatgtattccctttgccttctgcaagcacctcagcgggtcatggctttttacctggtggggtgacccaaacctttattctggaaggacctgtgccatttgtagtcctgtctggattgggttggattgggttgttgtagtttcccattgaccttaaacacagaggatggtaatattaagagatgccctatgggatctcctgtattccatgcatgctcttccttgccttcattgtggaatagtagactgatttcaccttgatattctgggtcaattacccagccaacactgaaacccccttcttagcctgttgacttggaggtaggagggccccaattggccaggtggtaatcttaacttccagtttaatggaatcattgttgtatcccttggtgacagcattcttccctctggaactaagatgtctaggccagcagaacataatgttgtgggaacaggaagcaaaattttgctagtgggtcactagtggtgatggtgagtggtgccacttccgcttccaccccttgattctgggacacgtgaacactggctatgggagaaacagtaccatattttggacactgattcaaggcatacacagccttctggagaactttgccccagtccggcaaagtattgtcacctagttggcattgtaattatgacttcaaaagggcattccacaattctatcaatccacctgcttcaggatgatgggaaacatgataagaccagtgaattccatgagcatgagcccagtgctgcacttctttagctgtaaagtgagtgccttgttcagaggcaatgctgtgtggaataccatgacagcgaataaggcattctgggagttcacggatggtactcttggcagaaacattgggcgtaggatgggcaaatccatatccagaataagtgcctattccattgaggacaaacctctgcctttgcatgatggaagaggtctgatataatcaacctgccaccaagaagctggctgatcaccctgaggaaggatgccagacggagggctcagtgttggtttctgctgctggcaaattgggcactcagcggtggctatagtcaggtcagtccatgttgctgagcctatgcataacctccattcctgccaccatggccactttgttcatgagcccattgagcgatgacagggtggctggggaaagaggctgagtggtgtacacagaatgagtcatcctatccacttgattattaaaatcctcctcagctgaggtcacccgttggtgagcactcacataggatacaaatatcttcacagtttttgaccactcagagaggtccatccacatacctcttccccagattactttgccaccaattttttaatcatgcttcttccaagtccctgaccatccagccaaaccattggctacagcacattaattagtatataattacacatctggccatttcttcttccaagcaagtgcacaaccaggtgccctgctcaaaattctgccccctgggaagacttccctttgctactgtccttcagggatgtcctagaaaggggctgtagtgctgcagctgtccacttttgggtgctacctgcatatcttgcagaatcatctgtgaaccaggccctagtcttctctgcctctgtcaactgatcatggggaactccctgtgaggccatcagtgcaggcttggggagagaaggcagggtggcaggagtggaggccatgggcgtttgagccacttcctcatgcaactgacttgtgcctttaggactggctcgagcctgatcatgtatataccacttacagttgatgatggaaggctgctgtgtatgcccaactttatggctagatgggtcagaaagcatccagttcatgaaaggcagtttaggttgcatggtgacttgatgacctacagtcaaacattcagtttctaccaaagcccagtaacaggccaagagttgtctctcaaatggagagtagtgatctgcagaagatggcagggccttgctccaaaatcctagaggcttccacctctaggagtcacctatgggagcctgccaaaggcttcaaacaggatccctgtctgccattgacacctcaaggactattggatctgctaggtcatacggcccaatcggcagagcagtttgcacagcagtctggacttgttgcagagcccacttaaaattggcagcctttcaggtcactcaataaatgggcccattttaacacacccaggaacaatgctttgcatccttcaatacaatcaagttggcactcagtattaaccatcacagtgaatgaatagattttctatgacgttgactccttggaatgaccaccagaggcaataagcacactctcagtgacacgaggatatgaggccctcctctgcccatttacactggaaatgtcttagatgtcttagtgcttttcaatcaggtatatccaaacaacaaacaaacaaataaaataagactaatgcagaatgaattccatagttcagattcttcaagataatggaaaattatcacataatctccacctgttttgaaacattatcttctttccttcctttcctccctttctccctttctctaagtcagtggaatagtctagtttaactttgatgtagaaaatttaggcagtcctcaacctctctaggtatgctgaattaaaaaaaaaaaagaatgacatttttaattcccatggcaaatggagttctcctctttcttctgttcctcttcttcaccttgcaatgactgtcattttgtaaaactttctctctgtctctgtctctcttactcacacatacactcacaatgttccttaatatcttctaatcctgaatttcctttctcaatttgtttagttagatcttcactagaaataagtattagaaattgggaaaagtttatactggttgtattagggttctccaaataaacagaactattaggagatggatagatagatagatacattgattgatagatgacagatagatgaatggatggataggtggataataggctggtagatgatagatggatgatagacagattagatagatagatagatagatagatagatagatagatagataatagattagatgatagacagaaagaataagagatttattatgaagaattggcttacgtgattatggaggctgcaaagtcccagtatctgtgagctgcagatccatgatatagttcactttgagtccaaaggccagagaatcacgggagctgatggtacaaaccacagttcaagaactagagagaaaatgagatgagatgtcccagctcaatctgtaaggcagaaaagaagggaaggaattcctcctttctttgctttttgttctattcagccctcaagagattgggtgatgcacagcaatattgaggagggcaatctcttttactgtcatccagaaacaccctcacagacacacccggaaataatgtttaatttaggtgcccatggccagtcaagttgacacatacaatttacaatgacactggccttcaactccagtgcacaatgtggtcttcctctttattctccaaattcaagttctcttacttgctacagttgtccatatttcttgggaaccatcattctaaaaaatgttgaccaggcctttcttaggcatttctaggaaaaataatataaaatacagaataaagtgaggggagttcagatataatgcatttctcatagaaaaaatgatagtgggatggttagtaaagaactgtgctgtgtaagcaagatgtaagctttaaacaaagtgaagaaaaggggagaagcctagaaaaaataacattatacagaaagagaatattcttaaatatgtcaacttctcttatagcaaatttcccagtgttcattcctaatacaaggagagtaaaaactccatagaaacctcaaaaagagctttttcttgcaatggggttaggtgtctaaggaataaacaggacttttgaaactttactcttatgtgacagatcagtgaggaggaaacacgctgataagaagcactgaactactacaaatacgcttcatttgctataaatacacttcattcactgaactataataaaattcacttcaaaaggaatgtgaacaaaatgaaagaacttggatataaaggggcaaaagtgaacaaaaagatagaaaatgtgtacaaatctaagtaagcattatggaaagcataatgataataattattaaatatgtggaattaaaaacaaagtggaactaaaacacaagagactaataaaatggaaaatggggcaggtagtcagttatttaataaaagtttttaatattcttgaattctggggaggaaagcaaaaagctaattaactttagttttcactaagaatatgtattaaacattgaaaaaaaatctggaaaaataaaattgacaatattcgagttctccagagaaacagaacaaattggaagtgtatatatacacagatatattatatattttaaagaattgactcatgagattgtggggtctggctgcagggaataggtgaatattgccgtcttgaatccaaaggcagtttggaggcagaatttcttcttcttcaggggacctcagtaattcttcttaaggcctctgactgttggatgaggttccccaacatcatggagggtgacctgctttactcaaagtctactgactgaaacgttaatcacatctaaaaaatacattcacagcaacatctagactgctgttttaccaaaaaccaagtaccatagcctagccaagtggatataaattaacgatcacaaacagctaaacattccaaacaagcagacagagagagaaaaaaataaagaaatgtgaaggggaggagaattttcaatcaattctggaaaagacaaaaaaagagaaaaagagaaacaaatcataaatataaaatataatggaattaaatccatatacaacaatcagggtaattatcaccagctgcctcaagaaataacccctgaaatctcacatgatggacataattcaagtttatgtctcacatcacaacacaatgtgagttataccaccttttgcatcttgtagtgacaccatacagtgtagcctccaaggcagggaagagaaaaaatgaagagacatgtaggcccctaccatactggctcatgaagcctggaccacgtctggtctgagtcattgaccagaagtagccgtgtgccccaagctaactgtaagggaggtctggaaaagtaggaggcacataggatatttgatgagcactaactatctctgcttcaggttgtcttcataataaatgcaaacattaaaattgacaggttactatgattttcatattggattaaaatgtctaaaacaaagggattcgtctatgtatgacttacacaaatactgcaaatcttaggggaacagaaagactgaaaatgagagataagatacactatgcaaactctaaccagaagaaagctggtatgctaccattaatagcaatcaaaaagactttaatttttttaaaagaattattaaggacaaagaaagtgatcatgatagaataaaaggaacaaggaaaactaaaaaattatgagcctgcaaggtcataataacaaagcctatggataaataaagataaatatatcagaatgagaacattttcatatatataatagggaatgattttaccatatctctcttaaaaagtgatagatcaagcaaagagacacagattttaaaagtaccttacacaagataacttaatggccttatagaactctatgtcaactagataattaattctacatgccccattcgatgaagtaactcatgaaacaaacaaaggaccacaacctagatcataaagcaagtatcagcaaatcctaatgatccaatagcatctagactacatcctcttatcataatgcaatacaattagaaattggtacaaaacaattgacaaaaagttttaaaataaaaaacatacttcaaagtaatccatggcttgagaaaaaaacacagtttaaatttacgaagtatttaataacagaatggaaataaaatttcacctcaaaatttgtgtgtgcaaataaagtggtaccaacaggaaaatgtacagtttggaatgcagatattaggcaagggtaagaactgatactaattatctaaggtttctgctcaagatgtttaaaaaagtacacagaaagaaataaaaataaaagcagaaattaatgacctaaggaaaggcattagacagggttgacaaaacagcaagttgattcttagaataaactagcaaataaacagaagacaagaacaattaagcaaagagagacaacacaaatgaataggatcaagaatgaaaaggggatcataactgtagatacattatagattgaaaaataaaaatggatatattggaggatatgcgcaattttattcaaacacatttgaatacttaggtgaagtaaacagtaagtttagagcaaaatttactcaaaaagaaatagtacacctgagaactataaccgttaaataaattgcatcagtagttaatacaacaaaataacaatatgtacaaaaatgtaaaggacccattatgcaatttgttcccaagaatggaaaaagaagaaaaatttcctcagcttattttatgaggctgatacaatcttgatggcaagccctacagaggacagtactacaaagaaaaactataggccagttatttaaatagagaagctacaaatgaaatattataaaacccagttcaaatgtacatattttaaagatctgtaaatatacagtaaaacattaacatttgccagatacagatgatgggaatagaggtgtctgtattaatttctaatcgtatctatcttatttcctacttaaatagtttaattaaaatgaacctcagaggagatagaaaatctgtcctgcaataaaatctgttctaaaataataaagaaaataggtctaaaatgggtctggaaatgaaacaacaaccctcatcctttacaccagcaagaagttctaaatttctttctttttctaaattcatgatgcatacatgttttaatttcttttaaatgatcagaggctgataattgcaagcaacaatcccctaacctaacttttctctcaactaagctcacagctccaggatcaacaattccaaatctttcaaatattcttcttttactacatctcttagtaatattattgtgccatcacgtatttcattaagtggggcattatctatttaattactgctatgatgaaggagatgtagttcacttacagaatatcacatcacattttcccacccttcagtttcccaatataggtacattactgtgcttagattcttcatttttaacctaatatactgagagcattatttcctgtataaatgatagactctgcactctttaagatgaagctatttatgtcctcattcttccctttagcttccttttttcctcgtcctctcagcttctacctctttaactttgatattgtgatggtcaataacatttacattttatctataaccataattgtgccatggcagaatacagaagtcccttctctgaagacattttattccttaaaggactccctttgattttttttcagtgggccatttgatgcttgattgccagttgctctgtgcagaagagaaggggtattttattccataaaataacttgcagtgaattattcctttttattttcacaactgactctcattctctaccttacctgttctttctgaggcctggccttctccaaattttttctatctccttgctggcatataccctatagtgcaagttgtgggtacaataactgcaaaagattgaggagcaggaactatctaaataaccatggtggctgggtgcagtgactcatgccggtaatcccagcactttgggaggctgaggtgggaagattgcttgagcccaggagtttgagaccagcctggacaacatggcgaaaccccatctctactaaaaatacaaaaattagccaggcatggtgacacatgcctgtaatccaggctactcaggaggctgaggtgggaggatcccctgagcctgggaagtcaaggctgcagtgagccaagatcatgccactgcactccagcctgcgtgacagagcaagaccttatctcacaaaaaagaaaataaaaggcccatggtggtgtggctaggaaagagtgccaaccctgtccaaagggaagctttctttgctgaaattatacactttctttctttttttttttttttttttttgagacggagtctcgctctgtcgcccaggctggagtgcagtggcgggatctcggctcactgcaagctccgcctcccgggttcacgccattctcctgcctcagcctcccaagtagctgggactacaggcgcccgccactacgcccggctaatttttttgtatttttagtagagacggggtttcaccgttttagccgggatggtctcgatctcctgacctcgtgatccgcccgcccaaagtgctgggattacaggcgtgagccaccgcgcccggccgaaattatacactttctttgatcaacttctttttactccgtcatagttttattccccaccaatctcccccggacagtcactccattttacttagtctcttggtactattctcagaattcaaattttaaattaattaatctgtatttctgaagagctgtttgttttcttactgtatattttgctttctccatgggaaagatatgcttgggagcctcatgcagtcttggtgggagttatgtaaccactgggccagatatgtcagggcacacagcatggtgagccattccctggccagttccatcgcccagagccagaccctttgggccctacacagactgcacagccccagcatgtgggggcttgtataagggaagttctgatgtcacaggatccttggggtgtttcttcaccagctggaaacctctgtggccagtggcacctttgcctgagttttgctgaggtccactgggcacattccgcccactcagcctggcaggctacacttggctcacactaccactactgggctggatcccacacctgccaagggtgattcagggcagagtggcgaggggtgtgtgagtgagcgtgggctccagccactgtgcacagctaagcgtgccagctgcagtgggctgggcagctccaggtcctggctctatgtgaggctgtggctgaaccagacatactacaattggcttccaccactggtaccagggaatgcggtggcacccaggagcttggagatgccaggaaccacagagtctgaaagagggtctcacagccctggctcagggagtccataggtctcagctccccaaaaggccacagcccttctctcctgctcattgctgtcaacatggtgagctggggaagggggtgtgtttcaaccctgtttgtgttgtagctctctcatttccaccatttgcgggggggtcccaagttcttgtcccacatcctggaagaatgaggtttgcagacaactggagggttagcaaggtgaagaggtgctttattgagtgacagtgcaactctcaggaggcctgaaatgggtagctccgttccacaggcaggtaattccagcatctgtgcagcaccctcaacagaggtgagacacacagtgggtagctcctatccacaggtagatcatcctgttgtctgcccacgtctggctgagtccggggttttttatgggcctcagaggggaggaagtgtatgctgattggtccatgggtggccatgagctggcccaaaaaaagcaccataagttctcactccagtttgtggaaccgacagtccagcccccttccttcaggcagtccctggcttgaaggtggagcttcactgagggcccacccctttccacccaggaacctgtatgcctcctgccaccaccaacctgccatccacggcgcccactggcacccaggctgttcatgcctagggtcaccttcaggcccatgcagagccaccctcaactcccccttggcctccctaatgtgctccttggcacccaaaatccagaaggggccaagatagtagggggctagagtgtcagtgctgccccgagcatatgcacacctggctgggttgcaacagcctcagctttgctctgaaatcagcctgggtgccgggaacagtgagagaccaggaagaaggagcgggcacttctgagcctgtaggggaagagaggtggctgagggcacagggatgcctgggtccacagctggctgggtggctgcagctgcacccagtagggcagggttcccccaccttcaactcggaaggggacatggctcccacttgttcctggctcccaccagctctgtggagcacaaagccagacaggctgacactgccattactgagaccctcttgctctcagaagagttttcatcgcctgctccctctgttttcactgcttggtgactgtggtgttttgttttgttcctatttccttttctcagaaaagaaagtctttagaattaaaatttaagctgacaatagatcccctctccccagggagcagaaatatggatatccctaaaggtcttgagtgtttcggtctttcactattttatactcaatattccatgatttttatctagatatgcctggtggacaacaggtgatcgccaaatataggttgtccctcccatctccaaattctgatgctagaaatcaggaatggctatgatagtccagattttcagaattgataagatatttatattaccctaagagatacggaagttgaacagaataaaaaaattcaaaataaaagtaaataaaattactttctttccctgtttagtttgagatcatgtgtaaatatcagtgaacgtgatgtcatataggatttttttttattgatcagaattaggttcaagttgtgttctggaaacttctaattaaattgagggaagatgctagcaggccagaatttgggaattagatgatctggctccaaattcaatacatattgtctatgtaattagctgtgtcacctaatgtaccaataatgccttttcaagaaacactgtgcagtctgttctgattcctccattggcttaattcctataataaatatagtttccaaagtttataacttaattttcagaatttatttattttaattgacagataaaagtggtatatatttatcatgtacaacatgatgctttgaaataagtatacattgtggaatggctaaatcgaggtatttaaaaatatgcactacctcacatactggtcatttttctgtgttgagaacacttaaaatctactctcttagcaaagccatgctggctttagtgatttttttttttgtacatgatactctcatttgggtcaataatttttttaaaagtctattggaagcagagaaataaattttttgacccagccttagatgtatttaaaagttcagggcataaaatgatagatgtctcagggtttgtgtcatcagtcggaaacacagaactcttttgaacaatgccacaatgcaatctaagtttgatctaattttcttcaagacaataatgctcttggtgccatcctacctgctctttatgatttctacccgtaggtagaataatcaagaggtgagattgatgttgtttttgattctggacattaactagagggaaaattcgaagccctctaagaatggtatctaacttaatagacacctctccattacctttactcaaaactaagactctttgtggtatgggcccaccccacctctagtagccagctgctagtccagtgtctgtctcactgaagcagtctagtggtacacataggtactgagcaattatgtctgtcatgctgtaattgaggaaaaccatccttacttcattttatatttttgaatgctcccttgattgtccttcttggtgttcccataaagctaaaaattcacactcacgaattttaaattatcatgagcaatttgggggatttcctattttatcactgagtctcctttgagtgctcagctgctttcaatcttgacagatactcatctgacccatctaccacccttagggtatgctatgcgatgccagggacctacagccttttaagagatttttgaccaaagccgtctctttggggtgtttcttgactcattttttactcattatttaattttaataacctatagtacttaaaaatgtacagtactatataaagcaccttaaaaattgatgcatggtgattttcttattttaaaattgtgtatgattttttaaattattataaaagcagcttatgtctattatagaaaataggaaatacagaaaagcaagaagaagaaaatataaaatgtgcatacgagtaattacttttgtaatatcattgtatatctactcatatcttttcctatgcaaatagtttttctacaaatgggtgatatttatataactgtttcataacttactatgggaatgaacatcacatacgtattttaaaaaatattctcaaaaatatatttttaaaatgtatattgaactagattctgagaatttacatcattattatagtaagaacattatccttgattttgattcatagtctaacataccaaactctaaatttcttctgttactcactttacataaacacattgcagccagtcaccaacccttacatatatccctgcacagtttgagcagttttctttattgaaaatatttttaatttaaaatcattttaagttttatattatcttggcacattaacccctgtggaaatgtgtaagacttctcttctaaaataaattatttcataaagagagagagtaatagaataagtcataaaccatgctgatgaatttttagttactactgtctttaaaaagtaaacaaaaaaacagaaaataaatattttacatcttttacagccaactctttcaatgagttcaaaaatttcatctctaataaaaaagtaatttggggaacatttaggaaaaaagcaaaatatataaagcaatgtaaacaataacttttaaacttgcttgtttagaaaatcactggggtacaggttagtcagcctgataaactctaacttgccttcacacctccctcctccagcagagcctcctctgacagccaaacatctaggcatttctgtgttccattatggtaatgattgtctttttttataagtgactatatttgtttgtctttcctcttccctccactccagttccattagggaaggcatagtctttccattttgaatatttggtgcttgagataaataaaaagttttgttgggtaaataaatcaattcacttatctattaatcaatggcagtatgctttagcaagagtaattatgaatatctaataagtagtaggaagaggaaaactaacatgtattaaaatgcaattacatgccaagtcatctgttgaatcctaacagactttataatttcattttttcctgctataatgacgttttaaattatctcacattttcttaaacaattattaactaataaaaacatacagcaacttacataaaaatagactctgttttgcatgatatagttgaaatttttatataacttgtatatccatatgtatgaatatatatatatgtacacagactcagaaagagaataccaagaatttattgtttaaaaaaaaaaacctctaaaaagcaagaaacaaaatatcttgcaactcaaagaatctcatttatatttcacatatgctgtagacacagctcaggaactcagatgtgatgcttatgaatatgtataaagtataattagcttagaaaatgctgcttcatcacctgtcctgatattgttgatgtgcttcaataacttaccaagcaatgctggaaaaggttctctccaaattccagtgagttgaaacggtgcttttcacccataacatgttagtgttttccattcccttatcatgtgaaaagcctgtcctttaaacccagattgctggcagactgcttgtaactgacagttgtatgccataagctctttactttaatattttagagagcttcttgaaacattgaggcatgtcttttcctccaaatctcttgatttttaacctctcaattccacggtgcttgcatgaggtgactattctcttttctctggcctatactattacaataaccaattgatggctccttttttcccacacagctgcccaattcatcttcttggactacagctctgatcacactctcctactcagaaactttcaaggcctccaaattgctcattgcccagtttccttactcgcacattcaaaccttccagaaattgactctgacctgtctaatagccttacttctccacattgcccttgacgaaccctacaaacttagggagctgaaatactcgctctcacatccacacatcaaaagtccctgcctgcctccctgcctttccttatactatttctactatatcttctacattcctgtatatactacctgtctcctttcatctgagcaaggaatggttgactaaggatccaggaagaaatcactgacttcctaaaaagcagggaaaaaaaaattgcctggaagcaaagagcaggtgatattcagaaatgcaagaagatagaaaattagcaacacggaggtctgtatcagtacatagccttcagtcagggctgtcatgtttctggatgaaggtgcaagagccagtggaaaatcaatacattgataatcatccagccagactaatcagaaaaaaatcagaaaagtcaccaactaccaatatcaggaatacaagaggtgaaatcactacaacttctgcagatagtaaaggatgttaagaggatattatgaacaattttatggcaataattcaacaatttggataaaaagggcaaattctttgaaaatcacaaactaccaaaactcacagataaataatctgaatagttctatattcattagagaatttaatttgtagttcaaaaccttcacacacacaaattcagttccagatgactttacttgtgaattccaccaaatatttaatgaagaaataataaactctttcagaaaattgaagaggagaaaatacatccaacctcattctacgaggccagtattactctgataccaatggcagacaaagatagtttttaaaaaagaaaattatattatataacaatatccctccatgaacatagatgtaaaagttcatggcaaagttataacaaatcaaatctaatgatttactcaaaggattatacatgatcactaaatgatattaatgccaggatgtaagattggtttaatatttgaaattagtcagtgtaatttaccatatagcaaactaaaaagcaaactatataatcacctcaattgatacagcaaaggcatttgacaaaatgcgtctatttttttttaaaaactgcctactaagagtaggggaacttcactacctgatcactataaaaacctattttttaaaaaaacctaacagctaaaatcatacttagcacaagactaagattaggaagaaggcaaggatatctgcttccattacttccatttaacattgtactagagagactaaccagtacaaggggcaagaaaaaggaaataaatggcatccagattgaaaaataagtacaaatgtttttattcacagatactatagaagtctaagcataaaatcctggtggttcatgcctgtaaccctagtgctttaggaggctgaggcaggtggattgcttgaggccaagagtttgagactagctgggcaacatagcaagacctcatctctacaaccaaaaaaaaagtttaaaaagcataaaataaaatgctatctattaaaaaaaagttactagaactaataagtgagcttaccaatgttataaggtacaacatctatatgtgaaaatcagtcatttcaaagactggcaaggatacgttggaagttgaaattaaaaggttacagtttacaatagcattaaaaatgtaaaagaccccctacactgaatactctggagataaataaaagaaaatctaaataaatcaagagatataccatgttcatagatcagaagattcaatattcctataatcctagtttatacatattgacctacacattcaatgcaatcccagtaaaaatcctagcaaggttttttcctaaaaatttacagatatgttttacaattcatatggaattggaaaggagaaaaatgttggaaaggttatactacctgacttcaatacttactaccaagctatggtaatcagagaatgtggtgttggtatcaatattgacaaatagattattagaatagattaaagagtccagatatagatccagacatgtatggtcaaatgatttatgacaaaaatacaaaagcaatacaaggtatatttaacaaattctactagaggaattgaatatccatgaacaacaacaaaaaaaatgaacttcagtctgtatcttgcaccatattccaaaattaactcaaaagagatgctagacctaactgtaaaacataaaaatataaaacatctaaaaatatataagaaaaatctttgtgatcttgggtaaagcaaagattcttagatacaccaccaaaagcatatcctcaaaaggaaaacaaaattaacaacttaaatttcatcaaaattgagaacttcttcccttcaaaaaaaaaaaagcacttttaagaaaatgaaaagataactacaaactagtagaatatatttccaaattacatatctgataaaggacccatatccagattattcatatgtatcattcaaaactcaaaaataagagcaaataacccaagaaaatttgaacaaaagatttaaacaggtcaccaaagaaggtggaaaataagcatgtgaaaagatgctcaatgttattagtcataaggaaaacacaaagcaaaaccaaaatgatgaccagttagaatgtctaaaattttaaaagacaggttataccaagtatcaacaaagatgtaggcacatgcagctctcatacactggtgatgggaatataaatagttcagatactttagaaaacaggttgataatttcttaaaaacgtaaacataaattaccatatgatccagccattctgcttctgtgtatttactccaagataaatgatggcatatgttcacccaaaaatttgtacacagatgtgtacatatccctatgatgaaataattaccaataaaaaggatcaaatatggatacacacacaacatagataaatgttgaaactatgttgagtgaaagaagccagacaaaaagagagtacatgcagaatgtttccatttgtataaaattctatgaaatgcaaacctacagtgatggaaagcagatcagtatttgtctggggacagagggaagagaaggaaggatagaagaaagagattcaaaagaaatgatggatatattctctaccatggttgtggtaatggtctcatgggtgtacatattcaaaacttatccaattgtaaattggtttgcatggtttatttatgccagttttaactcaataaaagtattaaacagtattagtcatctctggtcatagtccctccacaatttccacaacttagattttagcctctttcactgttgtttgggccatcttcctcttttctctcttaccaattccatttattttcttttttaaattctttttacttttttttaatttttgaaacttgtattttaggttcaaaggtacatgtgcaggttttttatataggtaaactcttgtcatggaggtttgttgtatagatttcatcacgcaggaactaagtctactacccaatagttatttttctctgtttctctccctcctcccactagctaccctcaagtaggcctcggtgtatgttgttctcccctttgtgtccatatgttctcatcatttagctcccacttataaatgagaacatgctgtatttgattttctgttcctgcattagtttgctaagaataatggcctccaactccatccatgttcctgcaaaggacatgattgcattcgttttatgactgcatagtattccatggtgtatatgtaccacattttatttatccagtctgccgctgatgctattccttattttcttatgctcagcaaatcaaccttttctctccactttaatcctgtgcctcactttgcacacctgaagttagctttaaaattatgacttttaaatgcttgtcagattacattcttacaaaaaggtattcacactccaaggcactggggaaagctgttttctttttttgtctagtttcatctagtactataaatggcctatattatcttgacaattcaggattgtattatcatccttggttattttaccacaataaggttggcatctactgagacctactttacctctatacattttatccctttccaaattgactcagactcctgagcttcaaaaattcctctctccactttttagagttttctcttctctttgctcattgtcggacagattgtcagctgtcacttctgctgttttcatgtgtttgtttagagaatcttcacacattctttcattgtaatttcctgtctctaaattgttttgattcagaaaacctataaccaagggagtaaaaatgacgtgtaaatttggaacaaatatagaatctgagtgggtaacctgaggcttacttcgtgagttaaagtacattgcatctgtgtcattaattttgacactcttttttttttttccaagatgaatgacacttatgtgatgttactgtatctaattcccaagagaactgtagcaatgagaattcctgtttttcccagcagaaaacatcatcagttttctggagaataatttgccaaggttgtcttttgcaagaactatgttcagtgttcttttttatttatgtagatgtttccaatatatctttttgtagatatgatagcattgtacaatcaatctgttctatgagcaatcaattatttacctgaaagctgttagaataatacattaaaataaatttgaccacagccataccaagttctgtaatcttttctagtttaatgttcaaataatgtgactgataaaaataatgtaactaaggcagtccagatgcctttaacgagtgttatgtctgtgataatctgagttcagatttatatcttcaacagtaagtatttagcactctccaacccttcttgcacttgcaatacttttccaatttaaaatttacacataagatcctgtttgatttatctcttggtatatatgaattatgtaatgattgctgaggagcaaacactattaaaatgggtaactagacattcaagttaaacattccttttcccatatcattctattaactttgtgtcaccttttttaatctgagtctaaacaaatatatctttgcttggagataattgtggctcagagattgtcatttagaagattgtgttttgccataccgctttaagatgcattttttaaaagaagcagtgttctttctcatttcagcacttgggagatacaggaaatgctcccctctcagtccacaactagagtgaaatttgcttaaggataaagtcaggggatgtgtttagttcttaatttgcttgacttctgtagcacgtcataatgctgctcagttatgtccttacaacaccgccagttatcatgcatcgagtcacttctgcatctcttaatttccatagtgttatgctctcctaatttctccttttcctctgtggaatgccagtcaccttgccagctccactttctctgcctactccctaaacattgaagttcctaagaactctgttctagatcttcttctcataccgtaataaacagtctcctaactttaactaccgaatatgtgctaataatttacaattctatatctgcagcccagagctctttcctaaaggcaaactctgtgtaccaactgccttctggatccctccactccattattctatggttttagatgtatgacatttgtttttctgtccacaggcaacaggtcctcggggtttattaaaggaagatgccaaaggctgtcttcagaaaagcttcaggattcttaacgaagccaagaagttagcaaatgatgtaaaaggtcagtgtggccatagtttttattatattccagttaatcgggttgttactgataagatattctatcacactattggagaatgtaatttctttagcatgatttttgtgatgattctataatctatttaatgcaagtaaactttctcactagttttacaaaatgttgtctacctatctcacttcaagtagggtaatatctcataatttgtaagtcttatttctatagcatcacttcacctatatctaatgtatagtaacttttagtgtaataagtttttaagagtatcaaacccaggccagccatagtggctcacacctgtgattctagtgcttagggaggccgaggcaggaggatcccttggtgccaagaatttgagaccagccggggaaacatagcaagatcctgtctctacaaaacattttttaaaaatttagtcaggtgtagcagcgtgagcacataggcatagctacttggaaggctgagccaggaggatcgctttagcccaggggcgtgaagttaccgtgagttgtgatcacactactgtacaccagcctgggtaacagagtaagatcctgtctctaaaaagaaaaacaaaattaaatacatttttctttttctgagatgaagtctcgctctgtcaaccaggctggagtgcagtggtgcgatcttggctcactgcagcctctgtctcccaggttcaagtgattgtcctgcctcatatctgggattacaggtgcatgccaccacacctggctaatctttgcattttgagtagagacagggtttcaccatgttgaccaggctggtcttgaactcctgacctcaagtgatcctcccgcctcggcctcccaaagtgctgagattacagatgtgagccaccgtgcccggccctaaatacatttttcttgtattttatttctgattcaggaatcaaaatgcacaaaatatctactgccatattatgggttttatgttaagaatatatcattaaacatggctgctctctatatgagccattacaattattattttatgcacttatctcttgtctcccatttgaattgccacctgtttctctcttcagtttcattccctaccattttctgtctcatatctgtctccctacccttacctaagtattcataattcctcccaaacatgctactattccaagccttcatgttttcagtattatttcttccccttggaatgccccatccttcacctctcttctttgcctaactgctttcttccagaccttcaggatttagttcaaatgccatcatttccaggaaacctaacacctcatctgatttacatgccccctctctggtatagttttctcataggcttgtcaaaccaccacaatcatggactaattaatattccatcttcttttacaatttttaaaacttttttattgatgcataacagatgtataaatttttggcattccatcttcttgaggaaagacatggggttttgctaactgtgtatttctagtatgcataatagtgactagctcaaatgaggaaatacttattttttacaataaatggtgttggcttatcttacttatcttagaaagagaagaggttttaaaatcatttatatttggcatgttttggtctcagtagaagctgatatgaaattacaagttctatctcgattataagtaaaattttaatagtacaattcttcaggctgtgtattacaggtgaaataaaactccctacacacataattctgctcagcaggtacctcttattacaatctgaagaatgactgtaagaagccaaaacctgtgttcctattggacaaatggactcaatcccgtgactttgcggtcactccttcctatctcatacccttgcccagggctgggaatagggaggaagggagcgaggtgattcatgcaagtgcaagaaccaatcctgtctttaagattttaataataccagggccgtgccctcgcctctatttccccacaaacactggtattataaaaatgaagaaagaattttattttcagccattttttttccaagagaaaaagaaatctaaagacaagcattgtaggaagggttaggagacagaaatgttcattagtttaaatttattttttttgtagttcaggtagtacattatttaaagtaatgaaaacccacaaactactcaagtaataattcctctagaaaaccaagccaaggctatgacggagatgggaatgttttcttgctacattatgacatttctctgatttgtggccaattacggaggttataaaatggctgttaatcagggaaatgccatatattactaccaggaactgctgaaataggccctacagagcaaaactcttgacagcagctattaaaatagagatttagtcatttctctctctatggtgcctggagttagaaggaataaaaatggtgaggccagtataccctccatatttctaatttgttgcttggttcaattcagtacagttcagttagtttgtgagcttcagtcatgaatgacttagtactgctccctgccatttttatgctgtccttgccttgagggaatctgaacttgccgggagcaatttgttttgctttttaatttttgaatatacatctgttaaaagtaaatttgcccttgtgtgagtttgagatttgaagcctgtctacattgcactgatcgaatgtttgtggagataaaaagtattttgttgatggatatgaggcttggtacaaattgatgactgaaagagtgaaaagatgaattagtaccaccaggtgaatgaacactgctttgcagatagacaagaaattttttaaggccgggcgcagtggctcatgccctgtaattccagcattttgggaggccgaggcaggcagagaagtgggagaataacttgagcccaggaggcagaggttgcagtgagccaagatcgctccattgcactctagcctgggtgacagagtgagagcctgtctcaaataataattaattaattaataataaaaatttaaaataatttttttcagtaaaatgccaacttcattttctcatggaatgtgtacgaggcaaggaagaagtagaccttggtttattaaaagtttgagaatattaagattttaaaattatacatcttaccttatattgactaacttttcagttttatttccttcttaatttatccccaatttttgtctttgcccaagataaatgaaattatttaattacttagaaaaataataggtaacatgttggccaggtgcggtggctcgcacctgtaatcctaacacttcgggagaccgaggtgggcagatcacctgaggtaaggagtttgagaccagcatggccagcgtggtgaaaccctgtctctactaaaaacgcaaaaattagctgggcatggtggtgggtgcctgtaatcccagctactcaggaggctgaggtaggagaattgctggaacccaggatacggaggttacagtgagctgagattgcgccactgcacttcagcctgggcaacagagtgagactctatctaaaaaaaaaaaaaaaaaactaggtaacatacctataaaatagataacacaggaaataaaaagacctattccctggagatctatgacagctcattttaaaggaggcggtttgtctcatagcactgtagcctgtggtatataattacagttaacccttgaccaatgcaggggttggagagcatggacccctgcacagttgaaaatccatgtataacattagactcttcataaacttcataactaaacttcataacataaactttataaactaaaaaaagaatctattcccaagcccaaataatgaatcagtgcattgcttgacatatggtgctgtcccacacagagaacagtatgaaacattattccaatcattaagttttatcaaaccagttgaagccttccttctatacagtggtcctccaaacactcagtcattccgttcagacaagtgggtcttgaagattctgagatcatggatgtaatacacttgcaaacgctaacctgttgagattctgtgttattattttatattttaaaaataagagaataaactggaatactgcagtgctgctaaaccaaagtatgatataggagtgcaattgtgactaagggatccttttattattaaagatatactccttttgaatttgcatattaccctttgcctgaatcagcctttccatagcaggcatgcaaaagacaagcaaaatctgctctattgaccacaattttagactaaaaggatgaaattaagcctgggtcccctggcctactgtggtctggagaacaaagcagtcttttccaggtgaaattgctgatccctcatacaaagttttgattcctcctttagagtgtgaatggtggaaataaaaaaataaaaccagggtggacttccattagagaaaaaacaataagtggcaaaatagtggcaaatatagaggggcaggttctattggaaagattatccctaagagcgagacgtagcttgtcatatccaaccccaccatgtgagtagaggacaagaaacaaacattcagaacactcctgtatatcatctcagcaagagacaaaggcctgtgcaataaaaatggggcttagagctaaaaacttatctgggctttgttgtgtgttcagaatcagagtctgagattctatggcgttttttgcaagtaagttaatttagaccagaaataaacagaaatgccttcaagagacttacagataacataaagggatggtggggcctgtgttaaaccaaagactatttgtcttatttaaaggtattcaaactcaattttcttgctgggcaaaagaaaacaagcctgcaagcccacagtcaccatgtcctagaggagccaaatgcaggtgttgatgtctggtggttttagtttttcattccactggctgcagaggggactcccttttatcccaatatcctgaatctttgcagaacctgctaccagacaagtacaccttccctcctttcctgaagctcctactatgaccccctagtgggaggaagagcatatgcaagcatggtgcttattgcgaacaagatctaatttcttactttcagatcagaagagggtttctccataacctgactccctgtgaaacagtcatctctgaggttcccatatgtggtcactctagtatgtatgtctgtctgtgcagaataagtaatcagatatacagcacatcccaaacttgtgacagctactagggaaagggaagcacaggagtaacaatcatgaaagaaggctagaaatataaaggttcaggaaatgataccgttccgaatcattgtcaccaaattcaatgattgcctgcataatgcagaaaattggagggattttttctaagaagtacaaagattgggtgtagcaaccttatcaaatcaatttgctggagacctaggagagaaatacagttgtagatttcaacttctattcttcctcactcgggtgctcttctttcctacccaggtctcaagatcctgcactgggtatttaggttgacttaggggacagggtctttagaaatctcaagaagccaaaatctgaacacagtcacttatgcctgtaatcccaggtcctttcaaaagtaatcacatttccatgaatttcacccttgtgaatggggcattctttcagggcatttatttgtgccctattcatattaataaaaaataaaaattccatttgagaaactcaactggatggaatttgaatagtcaaattaaacatttccattaaaatttataaaaatcgtcccgatatttagttgaaaagtgaggaatatatacataggtatacatatgtttaggaaatataaaaacgaaataaacttaggttctggaccaagtaatttaaataaaaaaggaataaagtcataaatagcattattataataaaaactggtaaaacacaccaggacaattttcaaaccaatgtcagtgtgttaccttttacttactgcctatggtaaatccagcactttctcatacatctcccagtttatttctcatatcagtcacatgaaggaagatgttttctttatttgccatatgtaaaaagggacagaaatgacatttgaacccacatcttccaactctgtgtcctatagtgatttcattgtaccagactagatttcagagaaatactgtgtagcagttttattttgagatcgtacatagttagttctaatataactaagccctaatttatatttagcatcatgtcagaaacatgataaacaagagtaactgctcattattaatgcaagtgacttgcaactctgccctgcgatttttattctggatatatctatcttgtgccatttcaatgggcatgtgacaaaggaaaattacactgtcattgtgttcccagtcgacccttgctactctgctgcttccattccctcattgtgagtcctgcttttgccaaactaattctagcacatttttcttctactctatgaggaggagatgagaaagggagagccagacttaaagacgtatgtgtgtgtagcctttgagttttggtggatgtgatctttagagagaaagtagaatgactaggcttctgttattgggtttgagagctgaaggaataaggagagggaatctagaaaataaaactatggattataaattaaatcttcttcttattctccagaaatcacaagtaaaaaaattcagttggattttcttttaactatcgataattctatgtcttcacccttgttacaattcaaactgaatcacaagagttctttcttacttttagttatggatacactatgcctcctctgtcttttatttaaaatcagcccaggagtgcttatttttctaggttttcctcgctattattttgtaagttccattttgaaatctgcaattcttctctgaatagcttctactcatctaattctatcaccaaagctacaaaatgtttagatgtagttcaagaaattccagaaactactttagaaaaaggtgatcagcgtaagaaagggcaaattaataaggatcagagtcaagcagctgaaacattaaaaaaaaatcagaacagggttggaatatacacattgtaacttgctagtacaaaaaaaaaatgcagagaatcaaaattagcgctttggaacttgagaggcagcagtaaaaatattcttcaggtcagtcttctgaataattggcccagttgttcagccagcattttgctatcagaatgcagaaagtggtataaacccagggatacccttcaaattaatgatctttctcaccatacatgaatatcttgcttgccagaacatttgaatgctccattattttaaaaactaaatccaatcaagaagctaagaaatgaaatttctacagttccattttcttaagtgttgaagactttcaagctaatatcaaaagagcagccctttattctcaaagaatttgtatagatatcacagtcataatcagactggctttatttcagagagtatgcttttggtagcctatccaaagattttattttagtataaacagtaaaaataacagaagtattataagaaagatgaattgtgattgacagaggagaaaatccaattacttggaaagtatattttgtgggcttagaattgaaaataataatatattagtgactgaactagacatattgatgttttagagccgtgctttgctggaatattttatgctttgtttttcagtgatgtcaggtctttggcttggaatttaacaacagacactttaaacaatgttatgtgcttatattagtataatctgtagtataacagaagtttaaggtgtctgcctataaaaccctttatatgaagtggagtgaatcattaattaatatgtcccgtactcttcttcacatccagacaccgatagttcagaatcctccatctatccacctttccctttgctattcttcacagatgcaggccaacaaagatgaggatagttctccagctgcccatggcctgcacagttcctctaatgagccacatgcacaacctctgagaggggtgtgcacacagtcaaatcaagactgctgtagctctattctttggggcgtattctctcccacctgccttctctgggtaccaggaaagtgatgaaaatcagtcttggtgttgacaaataacatgaagatagcaaataacattcttccccagttaggtggtttaagttttttaaaacattgaaaaacagaaatatatgcacacagaaagcaatttagccagcacaaccgggtataaaatgagaagttttagtacattgtccctcacggcactattaactgcctcattcattcccagtttctacccactattaattactgtaaaggtttttggcatgttcttctctacccagctcccaccagcccctaccatgccaaatgcttgtatatgtgtcagcatatatatggtgcatcttgcttattttcatggaaaggtcttaaggtttatttcacatccatatccgctcatctacttctttttatagattgcacctgtaccattgtatgaacatgctgtgtggatataaacagcactttaatcttattagggtatttttattcccccctccttttttttattacaaatgaagagctaatgagtatccccaaagataaatcttttacaggtatattgaagggtaaatttctatcagtagaattgccaaaccaaatacatgtctatttaaaattctaataaacttattaacttgctcttcaaacaatggaatcaatctgcacgtccactagcactcttgtgaacacttggcattatcatacatttaattttccccaatctcaaaaataagaaatgacatcttactgttgcttagttttacagttctttatgataatcttgagtgctttttacgaatttcataaatgattatgtatgtttattttattgtgaactacgtattcttatattttcctcattatccttaaaaatatggaacactttgcatatttgcctgccagttttgcacatagacaatgctattctactctgaataattacaacttggttatatatgttgcttaggtgaggcttctctgatttctgtaactgtgaccaatttctttaagacaacaaaggagaaaatgagaggaagacaaaggaaaggaggaggacaggaagaaaaggttgagggtgatggtgggaggagcattgctacccaaaatgctctactaatccctagttttgactatcaatccttggtagaatgcagtagttagcattgtttatggaatgggactatgtggatttgaataccaccactgccatttattaaccatgcaagcttaggaaatttactcaacttctctaagtctcaatttcctcatttgtaaattggagataatagtagtatatacatcatcatatacatcatacatcaatgttattgtaaggattaagtaaaacaacccactgaaactgaagaacactaaatgcgtgtaacatacacattcaatgcttgtcaggcattactcttactaaatacttgtccatcctatccaggagggactagaacaacttctctttcttggtcctttctcagtggtcctcctcacttggggactctgtcttgtatttacatgttgcatttctgtggagctaatttaaacaattagtacgcatgtcccaaaacaatttttatggcataagaaactattaaaaatttacctaaaaaatgagctgttgtatccagtcaagagaggtaaataatattgtgggaagtataggatttttcatattttgttttttcaatttgaattttcactaataaatgatgtaagaaaaagaagacagatgaactccatttcagtcttaagatatatttgcagtttaatgcatacctgagtaagatttctaaacttatatcaacagattggatctttattttctttccccttaatgatttcaaattttactctttatattgttgtactcgaatttaaactgcttagttactattacaatataaattaatctaaagtttagagaatattaaaaactagtggaaagcagctagaaaacttatatatgtaatattaaattatctctagcaaatggcatttttgaatattaaagataacattgctaaagtatcaagagaaaaaaactatataaaatttattggacccaatttgtaaaaatattgttttctttatgagaaaaatgactattatcagatatgtgctaaatgttgtttttccatttctttaatgtgtatttttgtccaaataaatattaacaaatattattatactgaagttggaggattctgctaaacaatcatatctgagattttgaaaatctaatccaatgattcattttggtaataaaagtttttaaataagtggaatcaatgggagtgataacaagagggcataattacaaatggaataaaagactaattctttggaggtttcttctctataggaagatatcaaattaagtcagataaagatcagataccaagaagaaaatgtcattgttcaacatgtagaagcatccaataattcaatgataataaaaacacatatttttaaaatatgattggaaatatatttatgtatagatgccaataaattaaatacattttcttgcttttaattaattttatattaaaataacctgaaattgcacatccaagtataagctcagggatgataaaacttatttaatccttttttttgttttttattcgcagaaaatgaagaccatctaaatggcttaaaaaccaggatagaaaatgctgatgctagaaatggggatctcttgagaactttgaatgacactttgggaaagttatcagctattccaaatggtaagcattcaggacactaccaactgtgtcagttgacctgaagttttgaagactgttgttaacttttaccatttttttctaagattattctggtactattatctggaaattagatactgtttttcttactcatgaattcttctttgtgagaatgagaaactaaaccatactttgcattatggtattttttatcttttattgcctttagccagtatccttaggaatgtgttacagaaaggaagatatagacatcttattattataaaactcatccttcagtattggcaggggattggttccaggacccccccccacagatatcaaaattcttgaatactcaagtcccttttataaaatggcatagtatttgcatataacctatgcatagcctcccatatactttaatccctagatcatttataatacctaatataatgtaaatgctatgtaaattcttacagtgtattgtttatgaaataatgacaagaaaaaagtttgtccatgttcagtacagacacaaccattttttcccctaaatatccaaatatccaactctccaaggttggttgaatttacagatacagagcccactgacacagagggacaactgtattgtcttctgtgtttcagcccaagaaatcgtgtattagtgaaatagaataaatcacatagacactaatctctaaaatactgatgtaccaccacaaagacacagtttattaaagtacctgcagtaataggtgatagcccactgcattctctcttgataaaattcaatttctttaactattccaactttcaaaaacattagtggtcaaaccatgtctgtaatatctttctacctattagaactgctggaaatttttgcatggtattagttcctgaaagcacacgttattttaaagatactacttttactatttttatattgttaaagcatgatataataacaacaaagattataaacacttattgagtacttaatatacttatgttaagtgtatgtaatcctcataccaattggagcaaaaacatttgcttcatttgcttgcatcaattggtcatatatatatatatatatatatatctatctcaattggttatatagataacataagtatagataacataggtaacattcagaatagtcacttcactactttaagagctaattaggtattcatacagatacagaacctactgacacagaaggacaacttgtcttctgtgtataacataagttagcactaacacttaacatcagttaagatactgttattatccccactttacaggtgagaaacagacagaggatactgaaggccattgttaaaagtggcacagaggaaacttaaaccccacagtttgatttcagagcctatgatcttaaccactaacctatacacactagtagtcatctataggtacaatatacaaattaggatcaggagacaaatgcacatatttatacaacacagttaatattaaaatctcggtggtttttacttttttaacgtttaaaaacctgagtaacttttcagattttcatgtccctttttcagtagtaagtatatagaaaatttccaatgctgaaaacaagtataaatgcatggcctaacatacctgaaaatgtttctctatcctaaaatgaaaatacgttagtttccctccaacccccaccccaacccctgccctgctttggaaatgcagattaaatcttaagcctcgttttcatgaagctcatgtggataaatttatctcgtgaataagttcagcagcaaatcacaatatgatcttatacaatgaacatttagaatagtcacgtcactactttaagagctaatcaggtattcatagcaaaagtccctgagaaaatttaatttacctaaaaaaatttgcttcatttgctacacctgaatgagacaaagttcagccttttccctttgtaaatgtgtccgaggtcagccagccacagcctcgctttgtcaagcatggattaagccactaactccacaccctttgttttgtttttcataccctcatctgctgacagatacagctgctaaactgcaagctgttaaggacaaagccagacaagccaacgacacagctaaagatgtactggcacagattacagagctccaccagaacctcgatggcctgaagaagaattacaataaactagcagacagcgtcgccaaaacgaatgctgtggttaaagatccttccaagaacagtaagatctcctttttcattgtgatgatgtcatttatttcctctcactgtaaaagtatcccagacctgtaaatgctcgagttggaaagaccctcatggtggtgtagtctgccttccttctttcatagattggcctcagaaattgagtgtcatgcagttccaaagctggaatccaagtcttctagctctgccccggtgcttttttcctctgaaatttttccagttgagaagagattaggaattctcaaggtgtgcctaacattcagcagagagatgcaaaacactttttaatccgtgtgtgtaattaaaaacacagttgtacttgggtaattatatcctcagaactggcgaagtgtcatggaacatagaggttaaggggcacgttcatgaacagacttgttagaacaggatatgaaaatgatatcaacttgaaatgcattaaaatttgaaaatcttgatattttattatttagattccagttacatcacatttctgggaaataaaaataaagcatttatctagtttctaaagactattcacatctcttatatattatataaaattatattgacttaaggatttactgagaaaacctgagagaaaatatcataacttatattattagttaaatatagtcaaaatattaagattttaaaatgcatttttccttttccgtcaaatgatacaaggctatattgggccaggtacagtggttaacacctgtaatctttgcactttgggagcctgaggcgagaggatcacttgagcctaggaattcgagaccagcctgggcaccatagcaagaccccatctttacaaaaaatttaaaaaatagccaggcatggtagtgacattgcacctgtgttcccagccacttgggagtctgaggctggaggatcccttgaacccagaagggtgaggctgcagtgagctgtgatcacgccactgcactccagcctgggtggcagattgagatgctgtctcaaaaaaaaaaaagggggttatcttggtatccttgttacatggtttcaccaaaggagatgcttgggtaatctgtgcttttcactttcaagagactagccctctttatatgccaacatttttgggggggtatcaaaatatttggagtataaaaacaaaagcactgtaattggtattatatgccataaaattcaaatgctgtttgagtggggaatggagcctgatttcagcatcctagcctcaaatcaaatcctatggatgctatgatataatagacattattaatacgactccttcatgagcaaggaagagtacaaacacatataacataaacttcagagccagggtgaaaaaggggagataaaaacattttttaaaattttttaatgtaagcccagaaatggcttctcttgtagctcaaagtttacataataacttcttatgatttatgccaaatcacaatattcccactaaaaatgaatgaaaacaaaattttaatcaaatattactatctctgctgcttacttcataatttaagatatatttttaacttttattttaagttcaggcgtataagtgcaggtttgttacataggtaaacctgtgtcatgggggtttgttttatgaattatttatttcatcacgcatgtattaagcctagtacccattagttatttttcctgaccctctccctcctcctgctctccaccctccaaaagaattccattctattttagattgattctcaactggtagtggccttttgtcatatctctgttttaatcctatcctctattatgagaaatagttaattatctataaatattaattaaattgggtctgttttctatcttactaaaacatagaaataatttttaaaatacaaatagtggccactaaattatatattttgtgtacttttatttgataacaattgcttcagttaaaatggggtgcatttataattagtacctgttatgaaaaataccatttttagtcactactttataatatttatagaaaatacttcctcatgaatttataatttttttttgttttgcttccatgtgaaattgcctgcagaaatcagtacgtatatgtttacttatataccttttagtaacgctcatgcttcattgcctattgcaaaaagtttcagctttgcatgtactatattttggttttgctttaaacattgcgtagctattctttccactgttacagtattaatggtagatgcgtaaaaggaatcttcctttataaaaaggtcatatgtggataaaggtgatataaaatgtttttaatagtgttataaaaagtttggtcaggcgaagtggctcatactctaaccccagaaatttgggaggtcaaggtgggaggatcacttgaggccagaagtttgagatcagcctgggaaacatagcaagactctatctctacaaaaaggaaaaatgagtgaaatatctgtatgatagccacataaaagtggaaaactgaatttctctatagaattaactagattatgctgtttctgataacacaaattcaccccaacacacgaatgacttaattgcaagaggattaaaatagataaggtctacactgttgttgtttttacccactgaagctcactttttcctctccttgtaattattctcaacttctgtagaattatatttggagaaacacataataaaactaggtcttaacaaatgaacaactactgggatatcaaaatgttctctcttaaacatcccacagtttaaattgaaagtcaagaaaaactaaaaaaatagctacaaaaaataataacaagaataacaaaatttaatatatcactatttgaaaaatatgaccaagagtgtcctcagcggaaaatgagagcaactacattactaaaccatcattgaaataacaattctaaacaatcaactttgctgactttagaaaaagcagagttaacttaaagaatgaaaaagatggaaaaattaatgaatttgaagacagaaaatattagacctgataaatcaaaaaggtgactccttaggaatatagattaaaaattaagtgattgtcaagtttcatcaagaaaaataaaggacaaataggcaaagctctaaaagaggtatcactagacaagggaggaaatttaacacataagagatcacttggaaaaacttcaactgctccggagaatagaggaaaaagaggggagaagaggaacttccaagttccattttgaaacatttggcaaaaacttctgagaacttgtgaataaaagggtctgtaatttgcctaagtctaagtagtctttaactacttttgctctttctcattaatctaaatctaaatcattttgcctcagttttagaataatttgtagaatgtcagaataacaatggagaattaaaggaagggaaaaatgaacaaacggtttattaaaagcatacaaaataaagggatcactgtgtttatgctatctgtatgatgatataacaaacatttctatccagataacatgcatttcaggaagaaaatactgcactcagttcttgatatagcaaatctattagttaaatttaataatagacctatgttctttttaaatgccgctaacagcataagtcatacttatgagttcaaaatacctactttaaaacctaattttaaaaaaatgataatttacttccctttgagcacatgtgattcgttcctgagggttagttctcagtggttgtatgtcagccgcaaagcagatcattcagagtctaacacagcatgtagccttgaaccttaagcagtttaactttttcatcagagtcacagtgacagaaagttgaacaatacacacttaatcagataataaatgacatagtgtggatgagactgccagcatcccagcaatagaataagtggtttaccacgtggcataggccctcccttgaaaagcacatactgaaagtctatggatcagtgatgaccttcaactattttagggttgaaactttgaaattgccaatatgtaaccctttattttttttaacctacaaaaacagctgtttaatataggtcaacctaatatgtaacacagggtaatcaactattcttcaaaatgaaattgaactgcaccatgaaagatttaattaaatgtaggcctttagtctaagggtttttcaacatcaaaatgttcttcaaaagacattttgatagcttctctctttaagatgtgcaaaaaaagacggtgagaaaaagaaagaaaaccaattttgtgtaaaaaccctgatttaaatacagttctggcttggacagactaggtgacattttaaagatgctttcatttccttgcttctgtgactaaagttctattctgtaaaggttaactttttggctgaagttagaaattaagcattgaattaagttcttcatattctctaccttcaatgctaatttttaccttaatcaaaaagaaaaagtggtggccctctgtcctaacatctactcccctggcctgcttgagtctcaactaaaatattgacatttgccatcacacattttgctttagctgttatggccatgctttgtcacattaataagatgaaattgtttggttaagcatactgctattctaattctgtgtgtgcacgtgtgtgcatgcatatacatgcacactaattttgttctatgcagttgccgatgcagatgccactgtcaaaaatttagaacaggaagctgaccggctaatagataaactcaaacccatcaaggaacttgaggataacctaaagaaaaacatctctgagataaaggaattgataaaccaagctcggaaacaagccaattctgtaagttctttttatcgtcagtatcagtaactgattgtaattgttggattattcatagagggaatgtctttccccaggattccccgttgaatgatcttgggtccttttcctttaactcgaagcgatttggggtaggaggggttggagtgggggagaggttagttttgttttgtttgtaaatttcaaaagacatttcatgagaatgataatcaccacttattgttttaaaactgggaattctggtatattctattactatttgcatagaataatacaaatagcaagaaagaaaaccttattattgtatactaaaaagccatggatgagagtaccttcctcttgctaaaaacaaaccaaaaaaaaaggccaactaatggggttatggcaggaatgaaggaacaatatacagaataagagcaaagagaaacaaacattttacatatatattcttttgtctggtataaacaacaataaaaatggctttggttatactttttacatttattttttgttttggagtagataggaaatagctgatttgtctcaaaattttgctctttacttacccaattagaagtttactaggatagaaacagagctttctagaaggtagcatgctaatgagccagggcagagttgctaagtggcaacgtgaaactttagtcaaaggaaggaagtaagggaaggggaggagaggggaggggaggggaggggaggcgaggggaggggaggggaggggaggggaggggaggggaggggtggtagaaagaaagaaggaagggcagttttcttgtttgaacaagaaaggcttgaactcaaacctttttagatacctcagttttccatgtcaaaaattctgttttttgaacaactttggaactaggatgatcagaaaagccctttcttagttcatcagtttatatttttagtagtatttaagaatacgatgctccagtaacagcatattctttttcctccttattcacatctaacacttctaaacaactccaagacagtaagttcaaggtgaacattgaaaaggaattcacgactgactgaaaaaaaacctagaaaacaacaaaaagattagtgaagatgatgttacataagatcagagtagtaaatcagtgaaaagatctgagaaaacatatattcagctagaatatgaaagccaggcagtatcgttgacatgtgatcattatgtatgtaaagcacaagattaaaagaaaccagatgttacttcaaggtttgaagttttatgtaagatttagccaacatggaaaaagcctctactatgttcagtgttactttccgtaaggtacacaaagacgaataaaggagttctttcactcacaaagtttataaaatagtagggaaaataaaatatgtacacgtaccttgtcacacaatgcagaatgttatgccacattatagaagccgtgagaagtgacataaaagttctagaaagaacaatcacctctagtagggcctgaagatttcctgaagggaaggatttgagccaggcattgaggtgggatagtgctggggagttgggggtggagtcaggtaacagggagagtattctgagaagagggaatgacttaaaccaaggcagtgggagaaggaagttttagggtccatttaggaaaaagaagtccagtttgcccagagtaattgataaaggaaacacataaccagaaagatcaacagaggccaggtctcgtcaggccttcaataatcagttaagcaatttcatttaacaacactggtacttgggataagcctcactggttaggataagctgaaagctttgagcatggaacacagtataatcagagctgtgctttttaaatataaatccagaagcagtgtatggggtagatgaaagaaagaagaatgaaggacccaactatagctgtggcaagagaaaagaagaacgtgatgtaccactcctatattttgcaatgttaacttggaagaagcaataagagtaaatattattttgtgaatctcacatttagccacattttctgacttagtcatcaagtggagaaatctagacatttttattatttcttcattgtaaagatttctgagtgcttttcccctcctcacaaaacggtgaaattcagacatgtaagcatataaaacctgtcttaaagtacaaaataaaagaaaagtataggctgggcatggtggctcaagcctgtcatcccaacactttgggaggctgaggcaggcagattgcatgaactcaggagtttgagaccagcctgggccatgtcacaaaaccacatctctacaaaaaattgaaaaattacctgggcatggtacatgcctatagtcccagctacttggggagatgaggtgggaggatcacttgctctggaggatgaggctgcagtgagccatgtttgcaccatggcactccagcctgggtggcaaatagaaaccctgtccccccccaaaaaaaaagagaagaaaaaaagaaaggtacaaaagtaacgttaagaaaaagtaatcattgtccatgcatttcaaagaaattcccaatcagttttggaaatggaattacaacacaatgccttattttttgtaagacgttagaaatatgcaagtagccaatttttttccaaatgagttttgtactaaatgaatattacattttctgatttgtaaatatggatatctggatatgaccttaacacatacttgacatgaccaaaacattaaagacatttattttaaagtagctttctctgggtttgttgattctgaaattgagtggctgatactcctttaaatgaatgacctacttactggatgaaaaatgcagtgaaaatccaatagatataataatgggatactcaataatgtttgagttcatcatgattaactggtaaataatgttgcagtattgaaatgccttaaagatacttaatgcttagtgatttttctttagatgtcttactaaggatctgcattagaaataacaataattgatagagccaaacattctaaaaggatgtttgaatttcagaaatttctttcctcttacaagagtgacatatcctaaagatttcttctagagatacagtattttgatttacctgatttcttctagagatatagtattttgatttacctgatttcttctagagatacagtattttgatttacctgttttaagttgtttaaaagaaatacctataactgaaaatcaaaacagaaagtattcaaaaggaaaagactactgattatgtactggctgtcaacagtttgggctaagtgaatgtttcagtttctgagagtatattcaaaaccagaaaacagaaagcaggtaatccaagagtattttctatatgaatgtgtgagagctgggcaatagattactgtctagtccacttcatgctgctgtgacagagtattacagactgggtaatttataaagaaaataaatttattctcacagttctggagactgggaagtccaagatcaagatgctggcaggttagggacctgtttttatgcttccaagatggcactttgaatgctcaggagaggaggaacattgtgccctcacatggcagaagagcaagagagagagagctctcacccctgtaagcctttttaatagtggcatcaattcattcatgaggacagagccctcatgaccgaaacacttcccaaaaggcccccctcccaacactgttgcactgaggattaaatttcaagcaaatgaattttgttggacacattcaagccatagcagttactctgtaggattaattgccggcatattgggtataacaacatcattttgcttcaagaatcatatttgttagatatgtattctatacaatagattggttgtaacctctagtgacattagatactcagttttaaaatggcttctctcttagacttggagttctcagagcagttagattttagtgctgctgctctgtctgctacacttttttttttttttttttttttgagatggaatctcactctgtggccaggctggagtgcagtggagcaatctcagctcactgcagcctccgcctcccaggttcaagcaattctcctgcctcagcctcctgagtagctgggactacaggcacatgtcaccacgcccagctaattgtttttgtatttttagttgatacagggcttcaccatgttggccaggattgtctcaatctcttgacctcgtgatccgcctgccttggcctcccaaagttctgggattacaggcgtgagccactgcacccggctctgtctgttacactttggcaacccccttttcaacacactaatcatggaatcccgtttttttttttttaccaggcttacctaagcaatgactgaaattcattctgtgaccaaatgatcacatattacatttatattgagtcatctcttctctaaataataactgagggatattattcaattgtgttgtttgttttgttttgttttgttttgttttgttttgttttgttttgttttgacatggagtctcactttgtcacccaggctggagtacagtggcacgatctcagctcactgcaacctctgcctcttgggttcaagcaattctcctgactcagcctcctgagtagctgggactacaggcacatgccaccaccatggccggctaatttttgtatttttagtagagacagggtttcaccatgttggccaggatggtctggatctcctgacctcatgatccgcccatctcagcctcccaaagtgctgggattacagatgtgagccatcacacccagcctcaactgtgttttttaaacaaaactgatttattaggaattaaactagccataatacagccatagggccaagctataaagcatttattaaataaaaatgaagtaaactacatacagtcgctttgactactaattcagccccattcagaattggatatgattgtctgccagggataacgcactatgctattcagttctactcatgaattccagtcagatcttgatttcttgttcactttgatcctcttatgatgtcaatggtacgtatagcctgcctcagatattaaattttctcaatgccaaggtcttctctgataatgattttggttcactttcagcagcttgctaaaaaatcactatatctgacaccctttcctgaacattaaaaatatctgaagaccatatttttcccacctgccctctactgtgctgtctttctcttgcttctctctttttatctctaatcccttggatgacccttggtatagctgccattgtatcacagaacaccctttgccaagtcccattgctcatctgctttgccatattaacatccaagtaaaaattgtacatttcctacctccattgttttgcaattcattttcactcacctactctcaacactgtatgtagaagggaaattccatgatttgtgaagcaggaactaacttcccaactgaaaaccaccctatccagaagactgtctccctaggacacagaacaaacactctgaggaccatagttggccctgagtcctgcacccagcagttggcaggctggccccacctttttggggaaggcaagaataagaaagtggtttaagcagtaggcttcctggaatgtccagccccaggccaccacactcaggcctccagcagtcaccctcctctgggtggtggaggaaacagcccctgtttctctccagaacacagtgtcctcttcatggagatacaatttgattagcagatcaggtgaggcaacaacaataaacaaataaatgacttatgcggtctgtgggagacgtaacagatcttctgtatccccagaaggtctcaaatctatatgaatttacctattgcaaaaatccctctttagccttctcttttgaatccaaccaatttggcacccaacctttgcagtatacttgcatgacccttggagaagggccacagttctgcccatactcaaacacaaatgaggctcttggagacacctcctggtgtcatgatcatatggaggctgttttggtttctaggctatcttgttgggagtctgcacagccctttcatggaggtaatgatgatgctagttggttttcttccaaatgtgcaaattacatgagtagcacaaaatgctagaagaaatgaaaaaatggaaattcactgctagtgaaggccaagagggcatttgaacaaatggcaaagagagattttacatcttcccctctctctgcctccttctggagcgctatcaatgaacaaagttacagattctctctgagtccaagcaactattttgctatcctgaaagtaaccctttgatggtgattttccatctgaccctacagaaattaaatcaaataatcaactagtgttatttatgattgaaggaaggctctctaaatataagtaaaaattggtatgaacagtattactctattcatataggcattccttttttagcaatttatagtaatttttaaggtattattcaaaagaaaagggagctgttaaatacattaatagtgatagccattggaaattatttccatttcatttcctgacaacttcatgaaaaggtacaatttattctgaaatgtatgttctgagtagaatgattaatattcttcttattgttagaacatctagaacaaaatctatttgtcctctttcaactgtaagagtataggagggttggtaatttcctcttgaaaactaaaagaaaaatagtttcttagtttaagtgataccaaaaccgctgaaatttcaattgtaaaatttcattaaacaaccttaatgaaggtcattctcattagctccatgtaaaatcacctgcctaaaacgttcccatattgataatggagaaatgtatgacgttagaagtttgttagttgcatgcttcaaaaaatagtatgctaacaagacatggaactgtgaacagctcatagtcaaaattctagtggaaaactgctcttctgtgccctcattaatgagtataatggtgtctgcatatgggtgtttaatgatagtatttgatgatagaaaataacttcaaagaagaaacgatgatggctttgtggttgtatggaagctacttcaaactttctgagagatttactcttggttctttgtatcttgttttttttaaagatcaaagtatctgtgtcttcaggaggtgactgcattcgaacatacaaaccagaaatcaagaaaggaagttacaataatattgttgtcaacgtaaagacagctgttgctgataacctcctcttttatcttggaagtgccaaatttgtaagtctaatattcaacttttcattaggctgctgtatgtgtatagctagaggttaatctgaaaatgtatagaatccccaaatgtatatggtccccaaatggtctaacgtaggctttcagatttgaaaacctcaacgtcttaccttacaaaattctgaagagtcaaattaagttagaaggcaaatgaaaggaagaaaactacagtgtttagtcacatttactttcatttgtcagtataccatcatttctgttaaattatactttcagatccagtgatttaagaatgctaatgagaataaagctattttatttacttcttatttatttatcttatttactgttcaaactaaattacaataaactcttccgttaatgaaatgaaaatagcaaagtgtgtactattttttttaccaatggaaactcttctaacttgtgttgaatttatgacctgaactgaaataacacagattatatctacaaaagcccacccataaagttctaatttcttccatttgaactatttgactttgcatgcatggggattttccaaaatgaatatgacttcttaacaaatcattcatggcataagtcaatatttgccatttgggtaaggaattctgggtcaatttgggaaataaaatcatagctgccccctcaaaaatgtcagtgtccttggtgaaaataataatggattctgaatttaaatatttgtttttatctttaccacaagtatcagagtgagaaaggctttggtctcaaaattagacttaatttgaattggtaaaattaacaaacatgcctgagcattatggactttttttttttttgctttaaggatataaaaataaaatattattttaataatgtataataataaataatattatttgacaagtattatcatgaagctcctaatcatttcacatgtctgcaaatggcgcttattgaaaaacactctgctggtctcctctttaaaggtgctttatatctgatatctcttgtttttgtatttctctgaactagattgactttctggctatagaaatgcgtaaaggcaaagtcagcttcctctgggatgttggatctggagttggacgtgtagagtacccagatttgactattgatgactcatattggtaccgtatcgtagcatcaaggtaaccaacttaataaagattaagataattaaatgatagaattttgaagtagtttcccagtttataagaaaactcctatttccatttcaataaggtaactgtgtatgcatgtaaacacatgtgtatgaattttatacatgtctgggagtgggtatgtttgtcatacttcttaggaactgacaaaccttccaggtattgaccagaggaacaactccatttctgaccccttcatcttgtgtctggtaggaatttgggggtgtcgctgtttcaggcttcctattttgcctgaagaaagtactgccacttattcttatgcaatacaagccaaagcataagagcaccattattgcttgtctttgttgtacacagctcctcctttagtctacatagccaccatagaaaaatgcagtttcaaaacactgaaattcttatgtaacataccaggtccaccctacttaaaatgggaagtaactgagaactgattcagttattctatctttggagctttaatgcaattatcaacatctagtaccatatagattacttatagaactatccctgtcttcagcacttccctcccattttctcttcttgttttcccaattctcaactccctgttaaacccaaagcagctaacagttgaaaggtatggttaagggcctagggctagacatgaagctgatcagagacagagaagacttaaagaactggttaattgttgactctgggtgatacatagagtttcatgctgtttgtagatacttaattttttccataataaaaagtttaaaagaaagagccatgtgcaatggcatgtgctgtagtcccagctacttgggaggctgaggcaggaggatcacttcagcccaggaattcaaggctgtggtccatgatgatcatgcctgtgaataaccactgcagtccagcctgggcaacatagcaagacttcatctcttaaaaaaaaaagttataaaaaaaaatgagaagcaatatttttagttctttttaaggaagtttttcagcaaaagtgtgtgtgcatgtgtgagagagagtgacagagtgcttgcgtgtttggtggtgttgagggaattaagtacttaaccgggtttaaggacatttatactcataaagtgcagttcttctttcagaaaagatacattctgttaaagaaggtgaaccttatttgataaattcattcttttgttaccatgtatttcacttaacattgcatcctcaaagaaaaaagattaccaaagtgagacagcagtcagggaaatatgacatcgaagttttgttatgactgcttgtctcaaaagagagaccagattttcatatttaacagctcatggaaatcaatcacttaaaaaagaaaatgaaataaaatgataatagctttcaaaattctgttaattgaatttaaaaatgaacttctatgcaatttgtacactgaaatctgaagggtggatattgtactgtatacattagtatgctgtgccaaacaataaaagatataccattctaggaagactacttcaacaaactgggatccaagatattataaagaattttaggagaaatcatgcagcttatgatatgaaagggtggctcatttggggtccactagctgaattaaattagacaaaatgctgaataaagtaatataaacttgcataaattgtatgtgttggtaaatagtaaattattatgtaagccataggaaaaaggctttccacttaaccaatagcaattccatcagttaactgctgctgtgtcatttcatgtcaatgaacacacacagaatcaggacctggtgctcactggttctggttgaaactgatgtaagtgttgagccaagatcagactctgagtattgattcgagatctaatgaatttggaatgttagaaactaaacagccagttttctcttaaattcttaaaaacaagtctccgcattttatatcttttaaatctggaattaccagaaatgtgatgcatatttcattttctgtatgttcctccccttcacttcaacacgtacccttgaagaactgggagaaatggaactatttctgtgagagccctggatggacccaaagccagcattgtgcccagcacacaccattcgacgtctcctccagggtacacgattctagatgtggatgcaaatgcaatgctgtttgttggtggcctgactgggaaattaaaggtaatgtgttcatcctcctcctgtttatttcatctttgttgacatctcctgacataattacttcaggagaaggtatgataaagctctgtaaaacttgatcacgttttacttaacttgcatttatgaaaacatgaatttactttgagtaagaattttcttctttgacgattcaacctggaaacacaatatttttaagcctatgtgtatttatttaaacagctgttgttttgtctttatctgtggcatcagttttttgtatattcttgttttagttgcctcaagagcaaagtgttttttaagtatacctcatcttctgaatcgatttatgatttatagatatgaagtgctataaagttcatactcacatctaattaaaagatttatgaatactttgggaaatatcacaggagctataagctttcaaaacatgatctggtttttaaagttctcaagttgctcttattcttataggatgatgcacttaatattcataattgcttcatgacagtccttgcgcatttcaaattgcagaatgcctgccttttaaagaagcttgtgttgattaaatggaattaggtgttgggaaaccactatgggtgagatgcaggagcacaaccaaatataatggataatcctgggcttgtcagaatcatcctgagttgagattagtcagaaaatgtgaaaagccagggtgaccccaaatttatgaggactcaaccttcatatagaatgaggttattttatttactttgagtacgagatgtgactctaaagtatgagaatttattccaaaaccacacgctgaagttatcctcgtttcttagaacttcatataaatgtatatggtacatagtaatatatagtcatattatcaactttctctccttcacagatagataaatatagggatagcacacagtagtacaaaagccatgaattttgaaatcaaatccaggttggatttcctcctcttccacttgctaaaatataaccttagacaagtcacttaaccccttgggctttggttatctcaactagaaaagaatgataaaaatatctaccttgcttgcatattgtaggatacaataatacattttttaatattcttataactcttcctatatgctaagtaatgttctcagtaatttacatgaattaacttgtttaatttttacaacaaccccaaaaagtatgtcttagtccattagggctgctataagaaaaataccatgaaactgggtagtttataaataaacaaacatttatttctcacaattcttgaagctaagaagtctgagatcaaggtactggcagatttggtgtttagtgagagccagtttttcatagaaggaggcttcttgctgttctcacatagtagaaagagtgaacaagctcctttggacctattttataagggcactaatttcattcatgaaggccctgcccctcaccatctaaaactcacctctcaaatgccctgcctgctaataccatcactttggcgggtaggattttaacataagaattttgagagggacacagacattcacactatagcaaggcagatactaatattctcattctgtagttaaggaatctgaagaagagagatgttaaatgtcttgaccatggtcacacagtaattagcagagctgggatttgaacataggttaataggcacagtggtcttcactctcaacatcttgcttcactgccacaatgaatagtgagacacacactaccatagagtgtgtgtataaaatatatggcaaatagctgagatgtggtagtcacaccttaaattgtaccttaataattattatgcaaatgtaattggcacaaaaacagtattctatcagtctcagaaaaagaaagaaaacatgaacaaatgaaatctatagcaaaccttaggaaatcattttggccaagaatttcaagactactgccacaccagaatatgaaccaaaagctgaaaacaactaaatgaacttgctcatgagaattcaaatgagcaggaaaatctctcaaatatagcttttcaggatgcaagaagaagcaaaaagcaagcagaattcacaagtaggataatcaatctctagaaaattaagaggttcagagtgatgacagagcattgcaaggacgactccaatgtgcaagtcaggggctccgatcaacaatctttctatgcggctgtgcaatacatggtcacagcagtgggaaatgtacatgttgatgggtttaacctaaaaccatagcagtaggctataccatagagcctaggtgtgtagtaggctataccatctagatttgtgcaagtactgtacagtctatgcttttaactattcagtaactgattttactatttaaaattttaactattcagtaactgttttcttatgtgtgttctaaaaaccaaatgagtcaatgcatgtttttcccagataatctgagtaaatatgggttcactttggcacagagtttttaaagttgtaggcaccagaatataatacagtcatgtgtcactcaatgacaagaatacattctgagaaagttggaattaggcaatttcctcaatgtgcaaacatcataaagtgtacagtacttgcacaaatctagatggtacagcctactacacacctaggctttatggtatagcctactgctccaaggctagagcctgtacagcatgttcctccactgaatgctgtaggcagttgtaactcaatggtaagtatttgtgtacctaaacataaacaaggtacagtaaaaatacagtattataattttatggaagcaccatcatatatgtgatctgtcatttaccaaaacatttgtaatgtgtcaatgccaaaacagttgtttcaatttacaacaaacttctctaggagggaccaggtcattctctttcttcatgattgtgtatcaagcctaagacttttcctgtgaaaatgacaccaggattgaatttgatcagattatttgtcgattctctatttgactccaggccctgtgctgtgtatacaagcaaacgacaccaatgtggtctcatttcctacaaagttgcttactttttctttattcccttgaactcgaaatcttcttggctgtgaacagaaatttaaaaatttacagcagcactaccatagagtgatttatacaagtgcttttaaaaaatctcttctatgtcatcagcatgtcccctttcttctgatctcaggggaaaaagctttgtgtatgcatggcccaaatttgcccaaagaaaattatgtaggagcactagcatttattgaacaccttctgtatatcaggcactgagattggtgtcataaataaattatctaactttattctcacaaaaattccacattacagacaaaagaatagaattgtggagaaggtcagcagctcacctaaagttagaagctaggaagtgtttatttactgatgatgaaaactggtatagcaaaaagtaatcagcattcgtggattaaatagttgagcttttcccctgttgttgactcatcctgtagtagctctaaggatacggacagactatgatgaaaagatgaatatgtacatatgccaaaatatcagaaagaatggataatgataactttagtttctgctgataataactctcatggataaaccaagattatttgtgaaattccaaattctagcaaataacggtatttctttctgcagaaggctgatgctgtacgtgtgattacattcactggctgcatgggagaaacatactttgacaacaaacctataggtttgtggaatttccgagaaaaagaaggtgactgcaaaggatgcactgtcaggttagttgagatgagaactctcccagggtctgtcctgtgcataataaaagcttcgattttattgcataatattctattatcatgtggatgatgtggagcaggtttgaaaggattatactcagaggtggaattaccacaaaactaatgaatcttcaagtccctgcctgcatttgcacaggcatttttcaaggccctgggaggtatactagcagtacatttgcatagtcatatgtttttataaaatttgcaaaggtaagagattttggctacaatcagttaagtttccactccaatgttctttcatgtcgaggggtttttttgtgtctgtgagtacctcattgttataatttttttttcctaaagagagctttccccaaactgattaagtttcaggtcttgctgagcatgaattcactatatttatgtttataacaaaattagaaccccagcctaggttttatctcttacaggatttttttttaattgacacataggatcctacaagtgcttcaactggaaacctatgggatttaatgattctgcttcaagagagaaggagaacaaggggccgagatagtccaggaggaaagttcctaatacatgacctcaattataagatagagggtagaatgaataggaatttgaaaatatttaacatcctatcatactaagcatgtgtagagaataaacacttttatataaaaatgaatacaggatataaaatatttagctataagtagaggatttctcagcataaaaatcttagagcccacttatcacccaagcctaaagcaattttgttaaattaaaactataaaacatactttaaatacctgcaaagttaacatgtcataacagcaactcaaaaaccattaagtgctaaggagtttgtgttattttccatttaaaggatatacatacgtttctaggacccaaatcctagcaaagtacacttcacatttctttctctacatctctagagtttcatagaagaaagtagccccaaaatgttatccctctaaaagtcttaacttccaactctttgtttctttttgacatcatggacttgtcaacatgaaattgaggatagtttgaaagcgtgacccattcattgtttaaaatggttttgtcaataatcttaaacaaaatttaacatggaaggttgtctgtaaaattctttcaatacatgaaagacagtgaagcccacattaatattctgctactcacaaaccaacaccaacttttccctaagcgtttctttggtaaacttctaagtaggattttcaaaagcctattatcaacaacaaaacatctaaggcatttaaatatccattcagcagtgcatgtcatgtgaaactgtaacatcactaattatcaattctgcaaagattttgcacttcaacacataaagtattatgctaatttatgattataagagtattcctatgtatacgtagggtgttttgtaggttgcagagattcacgtttacaacttctcctgatgctagaatgaatacagcctagtcctagccatgaaaagacatcaccaggaagggaggaaaaaacaaatactaaaatagttcaaatatcaggcataataaaagtccctttaaaaaggcacatttggagtatactacaattacccacatcagattaagggcatcatgatctgcttcacagaggaggtgacatttgaaatggtcttgacctgaggtaagagtccaaaaagaggagatagcagaagaaatgtgaagaacattctaattcctgaaaccagtaagagcaaagggaggaagagtgggaagccggagtgtttttagaaaagaacaagtgtgaattcactcatacaagattggcaaatgggagaatgattcgggtaagatgcagtggccacataggttcatacacacttcttcccagcataatcatgtttttttttctaccctataacggtagctgaatccaaagtaaaccaacatagctgaagacaccaacctcaaagtactgtgccacaacacagcctgtacacagtgtgcattcacccatatgcctgccttcagcttgatttagccaagcactctatctcggaaatgttcgtggcccacgtcttttccgtcattgtgcatttttgccccatcgctaacacttggcagtgtcagccctttcttataccccttgtcatcaaactatattcacattttccttttaaggtgaagtgatatgtatactgaaataatcctatattttttaatgttttagtgtatctttttgagctgtgctaatactttgatcaggattgttattgttttgtgagttctctaattacacacttgtgtaagtttttagcaggtcagccccaaccctattttcccataagccctgttatttgtaagaataatttttatagaactcctggtgtttgtttgtttgtttgtttgtttatttgttgctttcaggaaaacacttatcacatttgaacataaagagcaatcattcctactaaagagcaggagtgatttcatggagaagatgtaaaagtgaggctaaaagaggtagactaagaaaatgtcataaagaccttagaatgtcagttttagaaatttgcatttattcaatagtcagtagaagagataaaattgttgttatgctttagaaagagtaatctgtcaaagatatttttaaaagtgtatcttatttttctcatgcttctaaaattcacattaagattaaagtaaggggaaaaatctgctgcaagtaaaatttagttagctgagcattgaaatggtgatattttaatagacttagccccaatattcacctagaacgtagctgctccaaaatagcataattaatctatactaactttaccagacatcaaggttcaaaagagaaacaaaaggcaaattaagaagcctagcatttattaattatgaaagaataggggcttttttagtaaatgcattcagaatgaataggataactctattctattctatgtcgaaatattatagagtgtacctggaaggactcatattatttctcatcccatagtcaccaattcaaagccagacttaccttgtttctcctagtgttttctaatgaattaaatgaactggggggatctacagctctgtgtttagccactcccagtccacaactctttcccgcaggtatctccacaatcgcagtaacatcagacagataggtaggtagatagacagatacataaaaatagcctcatgtttggaaaaaatattttaaatgtattcacaagacttatcttagatattcattaattatgcatccaatattgattaaacatatattctctgtgaggcaatttgctatactaaaatctttgtcatcctacaaacatcaactggattctaggatccaagtactgtattgtatgtactagatgttttgagtttgtgcctgacataggacctagcccataatctcttagatggtctcatgaaatttacattctagtgaaggagacagaagaaaccataaaaataaatacaggcctccttaatcgtctgaatctaatttgttccagaaaaatttgttggaaggcaaatattcagagtaggatcctatatataagaaatgtaataatgtattctcagcccatccagaaaccccgcccctttgcccaaataccactaagacacccttaagcatcaatataactatctactaccaagtgcttttacaaaacataaagcacttaaaaaaactaatgacttagttattgcacacctcatgaaaggtgagaggtggtttttacttattctagcacggtggcagtagagatggagataagtggaaggaatgaagatgtatttagggtatttcctgccctacaacagcctatagtctcattgctattcagtgatgcattgaataatgacagactgaatagatatgatctgattcatgtgaaatgtctctcttctcagtcctcaggtggaagatagtgaggggactattcaatttgatggagaaggttatgcattggtcagccgtcccattcgctggtaccccaacatctccactgtcatgttcaagttcagaacattttcttcgagtgctcttctgatgtatcttgccacacgagacctggtaaagatcatatgcatagcagagtttccgtgactaaaatgcgtttgcttcttttatcagttattggtaaaatcatcagttattggtaaaattatcagttattttctaaaaagcctgggatgattgtctggcagccaagaatgggtgatacagatagtgcttatatattttcaataataactttaatcacagatacaatttaattactatttattttcaatacaactccccacataatcctttaagcaatacatccggtaataatttttcccagcatggagccatacagcagcaaaatgcttccttaatcttctttcagagacctgagttgaaaaggtgattataagtattctttggcctcatttttttctggtcagtatttcttactgaattctttctgggaacataccttttggttcacttaatatgttttcaaatgaactcacattttacgactgtaataaaaggatatgtcttagaaattttgttgtgaccatgtgcatcataatatcacagccacaaaaattcagaaaatagtaacaccaattctattttcaaaatggatttctgcaacagagtgacatattcagcaatttagccacaagaccctaacataaaccacacaagaaaagtgaacactcatatacttctctgtgtatctaaccactggggtatgtttactctattaatagagagatttcatgagtgtggagctcactgatgggcacataaaagtcagttacgatctgggctcaggaatggcttccgttgtcagcaatcaaaaccataatgatgggaaatggaaatcattcactctgtcaagaattcaaaaacaaggtgagtttttacagtaataatgcaatataggccttaatcatgaaatccaaagtgcacatgtacctgatcaagaggaaggctccgtctataattttagctactcacgagttcagtgaaaaatttatacagtcatttttttggcttagattataggtgatttgggttagacatgactgattgaagagccaaatgcttctctatcattttcttttgaaactgagagcttaatttgaaagcataaaactgtcttacaacttgcaaaattatatcctgtaatatgtttgaaaaatgttgggtgcttttcttttctccctattttgtcaagatgtttcctttaaagtggcccacagtggaatctataggagtggtagggcatagttatcagttctttgctcatttaaattgccaaacatttgtatgcctgcaagtaaataattgatcaatagtaacatgacatgtttatgattcggggacattttaaaacactttcacaaacattgttttatctgatcacataagcaggtattttgttccagtgttagagaaagtaaaatatacactcaaacttttatgtggtcacagacatatatataaaagatctcacaaccaagacagaaatccaagtctattaattctgagtgtagtgctattgctttttaagtatataattgctctaattctgtgtagtatggcattaccaatatctgcaaatgagactttgttacttctgctaatataaatagactcaattaatgttgccaatgccagtgtgacatttcatgaaaatttacgtttaaatttaaatttgtaccgtctttcatttctgcatttaatacatatctgccaggcaccttctaagtaccatgtaagaactaaatgaagttctaagttcttgccttcaaggaacttgcatcgaactggggagatagacaagtatcaatggttagaggatagagagctaattgctgtgatagagatgtatgtagccagcgagcaatctcagaagagagacacttgagtcaaacagagaggtcagtttccactggagtgaccctgaggcacaagctggatgaggagttagctggatgaaaagcatgtatggacatttcagagtagtgaaagttgtgtgaaagcctggagtcatcagagagaataacacatccttttccagctgcatttccaacaggaaactctagagaaacctctcatatgggacaaaaactggctttgcaattctttattttggagtgctgctgcatacattgttcctgtgtaagagaggcacaatgcacatttgcatgtcagaagctctgtgtagttagttgttcagtaagaagaatgtttagctgtttaacccagcatttcccaaatttctttaatcagagaaatccttccattcctgtaatactagcattctgctgaacacactttggggaatgctttagtaactacaagtgaatccatagcctacacgaatgaatgttggcaggaaattatcagtaggggccaagagataacagaaccagtgcataaggggacatatgagctaagtgagtgagtttcagctttatcctgaaagccatagggataccgagaactctaagagttttaagaaagggtgtgatatcataagacttgtgctttagtaaagtttctttagcagcagtttggagatatgtaacaatttaggatgctacggagtctggtgagcctagtgtctccccaccaacttctcttctatagtagtagaataacagatttgaagaaagaaggagaagatggatatgcattataaaagaaaaaaagacaacctaaatgtccatcaacagatgactgagaaaagaaaatgtggtatatatacaccacagaatactatgcagccataaaaaaagaaggaaatcatgtcttttgcagcaacaggaatggacctggaggtcattatcctaagtgacataacccagaaacagaaaatccaataccatatgttctcacttacaaggcgagaagctaaacaatggatacacgaagacgtgaagatggaaacaatagacactggggactccaaaaggggggagggaggagaaggggtgaagatttaaaaatcgcctgttgggtacagtgttcactgtgtgggtgatgggtccactagaagcccaaacttcactcttatgcaatatatccatgaaacaaaccttcatatgcaccacctggatctaaaattgtgaaataataaaaataaaaataaagacattcggaacactaagctgaattggctaatgctataaactctaaagatagtaatatgcttggtagatgtacggtataacaaacagggataaaatgattcaacaacttaggagaacaatttttataaatggtcatcttggaaacgctaatttccataatcagtctgctatctcaacttttattctatccattaaaacaaataaacaaaagatctgtgctctgaatcaatattagtcaaaggtcaagttacagaatcatataaatgtgaaagtagttaaaaatatgttttaggtttactgtaactacagcattccatcaattcagaaagttcttcccccaataggtctaatttttccagattttactagagctactaactgttactgttactactctgtggtccagaaatcagaaagaattttcctttatcccagcctactcagtatcttctgtgacatttctggtttctagttcaatccctttgacacagttggctgataccttctcatttataagtcttctccttggctttcaaattgactctagactcacattgctttttgcctttctgaatactcctgtcaaatgcaccaagcagtcattctcacttttattttgggtattaatgacatgaatcattctccttacttctctattgtatctctatggtatcaccgttaaaaagaaattaagccctatgaggtttagttgttcagaattttgattcttaaattagactgggaacttctaccttctgcccatggttgttacccattctctattatctctggtgtctcaccacaaatttctcaagttaaacaggtgaaattttttattataataaaactatagctgttctgtttttccacatgtcttctcatatatccaatatattttctctaatacttttaaagtattttattactatagcaggtcagttaatatgtattaatttttccttataaaaagaaaagcatcgaagctgcaatggaaaaagcaaatgttataaacaaataattcacaaaagaaaaatgcaaacttcttacataaagttgaaaaatgcaatctcaatagatgacaagcatatggtcattgacttgcagtagcaatatccaaagatcacacttaaagcagtaaaatctaaatttaaaaggaaaagaagaaaggcttggcaaaataaccttactacctgctttgataagattagctcttacaggacacatttattaaataccaactatgcatcagatgctgtgctgcatcagtgaagatgcatacggttcctacccttgagtaacttacctgctgcacaagtagcaaattactgtatctgtttaggatacagtaaacaccaagggagacatatggagggagagaaataaggcactaactgagccctaagtccttttttagttgagggggtaggaggggtggaagcagttgcaggcgatccaggccaaaaagcatcatatgaaaagataaacatgtataaaaacatgaattatttgggcagctgttgtaatcagtttgaattattggagtttaaatttcaaaagagtgatagaagataacgctgggcatgttggcaagggccagatcacaggaagctgtttaaactgtgttgaggagtttgcatttcatcttgatgaacttgattttaagtagagatgtgacagggtaatttcaatttaagtatattactcgaggtgtcagtgtggaagacatattgtcagaagaccaaactgaagacaaagcgaacaattggattcaataatagtctaggcaggaggtaaattatgcttgaagtaagagatgcagtgggaattgacatcaaagaaatgcagaataaatccaccatgtgataccattacacagctattagaatgactaaaattaaaaagactgaccatactcagtactggcagaaggtggagacactggaactcatacactgctgctgaggatataaagtggcataacattggaagaggttggccatttcttaaaagactaaatatacatctaccatacaaaccaatcatttcactcctaattattcacccaggacacaagaaagcatattttttatagaaagacttgtaccaaaatgctcacattacttttatctgtgttactcaaaaactgaaaacaaatcacatatccatcgacaggtaaatagatatacataaattgtggtatactcatacaatggaatactagcaataaaatactcagcaataaaaaataaagtattaatatagatacaaaatggatgaatatccaaataggcagacaaaaaaggcaaatttaggcagacacaaaaaaatacatttgtataaaattacatagaaaatgtaaactaatctatagtcacagaaagcagacggatgctacttgtgaatggtatatgtacgaaaaggcaaaaaggagggattacaaatgagcataaagaaacttctggggtgatggatgtgttcattgagtgtggtggtggttctgcaggtgtatacaattacatgttacaaacatggtttaaattatagcatgttaattattcctcagtaaaactgttttaaaaataggacagatattagaggtatttaggagaagaaattagtgaagctgttgattgattagatgtggtgaggagaaagtcaggatgactctctagtttagtagattgggtgggggggtcataagaccaacaaaaaaaagtaagttaagtaatacagatttgggagttagatgataattattttgatttggaatgtttagcttaaagtacgcaaggaaaatatagatgatggtgtctcacctgttgaatgtggacttttaggcaaaaatcaggtccaagcatacatacatttaagtcatcaatacattgtaagtagatataaacttgagtttgcccagatggctaaaacctgagatgtgggcaaaggaagggatattataaaacatcaacattttagaagtgttcaaaaatagaccccagggtaggagattgagaatgaaaggtaaaagaagccagagagcttgacattatggaagccagaagaaatttcctatagggaaggaaatgctaacagcattaaatattgcacaaacatgaattcagataaagtttaaaagaactccactgagtttgggtataggcaggtccctgaggactttagcaagaccagagatgacagagtagtgggagaggaattgaaataaggctccagcaatgtggatgattgctccttttcagtgaccagattatttgttttatatgaattattctcaactagttggcaagagcactgtctcttgaaattcaagtacagtccttcaggagtgttccccatctttcttgagtcagttacagaaccacagtccctgacagaagtgtgccctatcccctaaatgcatcaagtaggatgcaaagttgagaacactcaattagattttcagtggatcaagaaagagaacaaaagaataatagccaaagtaaaaacacttagcttataacaactcagcattgattataaaatatttcttaagtccctactctgtgtctattatttaataaaatccttatttccctacctacttataaatcacatctgaactcatcaactgtgaaattttgtgtcaatagcctacttttctattttgtaaagaaaagaaatagggtaagaaataaaagcaagcattagcatttactagcatttcctggtagaacccacttcatcgctatcactcatgaaggatagagtaaagcactccctttaagtcagtaaaaatatgccatcctgtctctctgccagttaccttttgggccagtgaatttcaattcaattgtgttgctgctctttaatcatgttttcttagaatgatttctaaaaatgcatatattcattcatggataaggaggaaaaccacctccagtcactggcttgcctgtgatagagaggcagaatctcattttcagacaccattaaaatacccaccaagtctgtagaaagagactattttcatcttccagtcaacagccccatatgaaaatacctttgccgatctagataaaaaggaatgtatatgaaaaagtcttgaaaacagttttataaatctattttcttttagcccccagtccagtcaaggagatatatgtgtatgaaactaattatgtatataaaaataataaaataggtgtgtgaaagtaattcaattttaaaatcttaacttgctagctatatttaataggacaattattcttttaggtatttttcttgtttgtttttacaaaagtctggtttgaggtgtccattggtatgtgtattttagtccttttttaataaggcaattgtgtttgattttattgaagacacatctttttgaaatgatagggctataaacttcaagggaattttggaatttgatgtttctctctgttttccaaagaacactgattctgaaagatgatgagttgagtgaaaataatagtatttcgtggtcaaataaatttgggaaatactttttgctctatgtccttctctaggaacattgcattgcatattagcatgctgaaagatctgggcagctataaaattaagaagatacatgtttaactttgtataacccagtatttgtcatatttatttgagccaggaacatccaagaaactagcatcctaaagaataaacatttagaaattcccttataacccactggttcaaatgcccattttcaaacccttgcttattcagatcctacatcagacaaaggtttagaggccaaatctatcatcttacgggactgatgtcaatacgcatcaaggatgcatatgaagtagttaaaggctagatctaaggacatgtggtagaaaagcatgtaattcagaaaaagcctagcttgacccctaagaagggggcggtagtgagagggatcaatgagataaggagttcctgtctgctttctaaacaatgcagtttgaacagagaagtgcctcatctttccttttttccatctatttctgaattcttatcttcatcacattaaaaataccttgagagacccaaaagaaaagcaagaaggcatgaggactgtacctctgtcacaacacttagcatcctggtctaaaatgtaatttacagtgtacctggatctcaccacttccttgtacaacatccccttccacttccatgtacaatcatattttacaacagtgacactttgcagatgagtctaaatcccagtagttcctgtggatagtaaaacttacagaaagagccatagattaggcatatttctaattaattatctgattcctaattagatatctttgttatttagcatttttaaccttgctttattttctaactacttatctagattatagaaaactacatcaaatggatctttgatgttcagttatagttatctcttttatcttcattggtttgccttcactggtgttcaagctattattttcatgctctttgggggatagtttaataatgtattttattgatgttatttctgtaattattaaattgctaaatatagtgcaagtgcttgagaaagtcaatgttaattctcgaattaaaccaaatttgtcttgaagtattaatgatgatatagatgtggttgatattgctcaaataaaatgttaaactttctttctcctttacagccaatatatcaattgtagatatagatactaatcaggaggagaatatagcaacttcgtcttctggaaacaactttggtcttgacttgaaagcagatgacaaaatatattttggtggcctgccaacgctgagaaacttgaggtaatttagtttatatgtaaagctaaggattaagttttaattaaatgaccactatgctcactagagttctgaagtttaattacaataagaatgtcatataacccttggttgcagaaaggcctaatcaaaaacatcatgttgcatgttagaacaacaccaggatttagaaaccaaaggactaatttgacatctttgttgaagagatggattggagtcgctgtttcctttatatgcacctgctgaaaagaattatgaaagtaattaaaggtagaagccagagttgaatgtggatcttgtaattgctgttctccttctacattcactggagataatggcactctgacattgcttagtgttccgaaaattagtcagtgttccaggatgctatgagtataacctattttattgctaagcattagcatcataatggcgtgttggagctttcccatatgcctaatacaagaactatattagttgttctcatgcccatgccaacatttttttttaatttcacatatgctttttagctagcagtatggggagacacatttgcttcctaatttagttagttcaaaaaataaagtaactaaaaaatgtcagaaaatactcacgtgctgtgtagttaatttactgctcattataaaacataacatagtctataaggatggtacttggtgctcaataaatgttaattacactctaattagaatgggattaattgatttggttaaaccgtaagagtttattacagactaccatgtttttaattttttgttttgtttaattagtttggtattttttaaagggtataaaagttctgtccaggtgtttctactccaaaaagacagattatgtttggaaaaatcccagaatagctgaaaagtgtgatggtcagttattttcacatttctaaacgagcagtgaaagttcagtctcattctatgacagctagtgtgcaggctgaaatttcttctccccaaatctaaactcatagatgaagcaactgtctaattatctgatgagcttcatggtgcaaataaattggctctgcattcattgtaatgtatttgtgttagaaaaataaatttaaagtgtcaagtcagaaaaacattacaaatcaaatttaaatagtaccacagttattacctagaaattcatttgccagtcattcaccaaaagtttgttgagtatctactatgtgacaggctccataccaaatactaggaatccagtggttgttcaaatctaagatttgctttacaagatcattaaccatatattattgagtgaattaaatacagccaaacctaaggttattcaaatctagcttcatttattctagtgatgattttaattatcataaaataatttttaggaattatctataaaggtgtgcctgttaaattctataaaatctgttaaaatctgaatctgttaaatgaatctttatcactaaaatgtttttactttcatgatacagcattgcataattacagtatactatttccatggtgtggcacattatttcaaaacagccattagaggtatatttgtgattgataaaggaaccaaacattcatagttacctgttattttgcctgcagacaggttctcagtatgacaaagtgcaaaagatgtggtaaacataaattatttttacatgcattgttaagctcaagctgtttgagaggcaatatttataagccattcatgaacactacagaatagtgacattgtacattttcccatttattagattgataagaacaagtactttaaattcatatttcaaagtaaaaattttccaagctgatattgtgagctacggtcatattttgattctaatttcactgccgtcaagggtataagtctatttttagttctattggggcttttgcatttctttcctttgtagatccctgtgaaatgattttttaaagatttatgattaaagtttattgttttactaaatgaaaatgtaattataagtaaattgtttttatttttgttttttttttcctctttcccgttatctagtatgaaagcaaggtaaaatttaaatttatgcatgccttcttcgagtgcatgggttgggtaaatgtggcttcttagataaagcagccgtgcagaagcagagcaacaccagtacagctttgttcatagtatgtttcacgagcaagccgtgcattctgtgagagttctcctgctgccccttgctggccgacattctgctgcttacccaccatcagttgggctgcaatttgagttgtctcaccagcagtgatgagatttgctctgctcacttgttcaaccatctgcacacagtgcccctggtgaccagcagcacacactcaaaaggcagctggtcaatttctggtacacagtctagttctgggaaacacggtaaagtggtctcttgagttgaaccccgggccctggcctccctagtgccatgctgtctgctgaagaatcaaactgtgctctcacatgcttaccactgccttcttgctttttgcaggcctgcagatatgcaaacatttacacagcctttgcacctcttgtcaaagctgtttatctattgacatgtttatttaaaactagctatggtgccagatgaaggaatctctggaaatactatatttaaaataagtatttgcgttaatagtaaagaagtgtgagatagttctcctagcttctcaggagcattttaattcttactagcattagcataaaagctgtgagcaatgggcctccataaatggctgaacaaacctcagagatgtgcagggctggtatcctctggctagagctaaaagcctggtgttttggcatttcagagcccagctgtgccagatttctggaaagaagataataaagccgaactgatccaagaaatttttaaaaccgaggctagatttttaataagagaaatagaatatacagaaatgaaagtagggaaaaataaaccatgcgttttatcatgatacagttgtaagaccactagttgtgctacatttgctgagatggctaaaaagcgaaggctggctttcatggaaatatatgttaataaaattctgggatggcactgtgtaggtttgtaattttgcctttgagtggtgaccctcaagaaacagggacccgtggttaccattgagtccagtcaccttatgtgactatttatcccctgtaattgtcctaatattgaggttgctaaatcatattttggaatggttctttgtgtttccatgaaacaataaactatataacttgtaggagtgatttactttagtaacaagacctctgaaaaaaatggtgataagtcagtctttccataaaggaaaatatggaagcaagtgaacactgttaatgaaattcaccttctctgtgcattatgcaagaaaaatataagcagaattctcaccctacagttgggcatgttctttataacaaccagctgactgactgaacgaaaagaaaaccttgggaacaaggaaaaattatcaatgaaaataaagaagttccagaaaggagtgcgggggtggaaacagacagacacctgacatgaaataaatcacctgatatacactgccaaggtctaatttgtttttccacctgtttttcctcatgccatgtgtttttcattaagataaaaaaaggaacttggcatcatgggacaatgaggagagaattaatcatcaccctatcaactacaatatattgatgccgactggacagtttttaccgatgctgattaccaccacataaagaattatctttttcacttctatataccttcactattcaaaatagtagccacaagtcacagtagctatttaattgtaaattaaatcaaattaaataacaataaatattcagtttctcattgagacaagctacatttcaagtcctaatagccacatgtggctagtaactactgatttggacagtgcagaaaacagacaatatccatcatcacaggaagttctgtggaatagcactgttataattaaagaagtatcatcatcactgacattctgatagcctttgtttgttgagcacttactgtgtgcagtgctattccttaatttattaaacctttgcaatttgattatgtaggtactatgattattattatcatgcccatttcacatataagaacactgagtcttggagaacttagatcacttgcaacatctggactcaagggcaaggacttcatttcctaatctgctggcacacttgccccattttatgaagtagtatgcaaaagtaaacattcaagtgtagtttgagtataaaagtcatttttcaattttattgaaaaaataaaatgtatgggtttttgcatttggttgctttattttgttattgttctaatgtagaatacagactttggggtcaatctgtaaactaaattaatctgttaaaaaaaaacatttttttattttgagacagggatctcactctgtagcccaggctggagtgcagtggcacaaccataattcactgcagccttggcctcctgggctcaaaagatcctctctcctcagcatctccaagtaactgggactccaggcacacaccaacatgcccagctactttttttggaggggagggcaaagacagggtctcactctgttgcctcaggctggtcttgtcttgaactcgtggcctcaagcgatcctccctcttcggcctcccaaaatgcagggattacaggaatgagccactacactcggccagtaaacctaatttttaaacatctgttttttagactatataatccaaaagaatgtttcttggactttgttttacttaaaagccttaaagagatatgtaatattatcttattttttagctatctcccaagaaaaagcctcaaataaaaaaaaatctttttcaaaataaataaacgttttcagatttttttttctaacttttgagcaaggtttttaaaaactttttggtatatagtttgtttatgctgcctatgcaattatcttctctttggtgaaaaaaataaaacttatttcattacacatataaagcatcaataagaagtcagttaattcctgtacctcatgtttaaatgctgtgggtgagattattgctaaaggggagaaggactacaaaaagactccttctgcaggataacatgaacatccatttagaccaaccagtagacaatggaaaccagagtttgctgggtacacgtgtgcacagtttgatagacatgtgcctgcatgtgtctgctccacaaggcttccttcccatagtcagagactacactaccatcaccctaatgatattgcttttgcttttcatttgactattcaataggccagaagtaaatctgaagaaatattccggctgcctcaaagatattgaaatttcaagaactccgtacaatatactcagtagtcccgattatgttggtgttaccaaaggatgttccctggaggttggtctgtttttgatagttctctaaacacatttatatcagatttcacttacttagtgtggctgctcctacaaggatcagtcttttgttaatatattttacttttctactgatcctactcttaaacgataaagcaagattaaagcattctctaaattaccatgataaaaaatggtattatgaagtcctagaattgtgatccaattttccaaatgtatagctctttatagcacatatcattaatactaatctcttttctgtttttctctttttttccaacactacttttcccttttccttatttttgtcatccattttaaatttattttacttttatgtgttgtatatagctttattagcaaccttacattttttctggaaccattgaagtttacacaagtagcaagtagtaatttacaccgtagccattagtgcatagtctgttgtctacaaacttgaagtctagcccccttgtctttgaaataacatagactgggacctgtggcaatcaactctgcaaagacttgtgtttgacatgcctgcaaagtcctttgttagctgatatcctcagtaactcttctttgatgctaaagcatcctagcattcccctattttcgtttaactattttgcactgtttcttcagttgacactgacccatatgtgagaaagaccccggccatagctctactctcttaaaatatccataagcaagagtcaatagtcaacagcaaatattagcaagaattttatagaaactcaatagtgatcagcttgtttttaaaatgaaaacgttaaatatgtcattctcatacatttttaattatcctatcataatacaattattcattttgtctgctgcttctaatcaaaattatcttaaaccactccaatagaattagggaaatgaagggaaaatgtgggtaaagaaaaaagtaaatccaccacttgaatgatgaggtttaaagactggaacagaactttcaggatcttcattgttcatagctacaggctccaatttggaattggccatagacacccactctgagaagtttgggaataagaaaagagaaaacacattaagaactaaaactgtaaggacccatactggcttcttaaaggaagttttactgagaattttaatcttcaaagcctaactctcattcacattcaaaagatatatacatgaggatggaaactgtccggaaaatgaatagcctctgcacgtggaaattatgattccctaaaggcactttgcagtaaccaggaattattttgcaactaaaatatgaggcagaaatttgatgtggataaatattgaaaagtctgcacagtagttttatctgaactatctaaaactccatgatttgaaaattggaatagaaaacagattatacattttaccagctcttgtgtcatttaactggtcttgaaacactgtgggaggaaaatagcctacattaaaggattctttgcttttactcctacaaaatctaggactttaaaaatgaatattttaagcactttaaattcctaactacatgggcttgcttaaataaatactagcaaattcataaagtagaaagtcctcctgccattaaaagtgactatctacatttactgagagagtgatatcttccacatatgtaagaaaaaaaagtcattaggaatgaacatgtctatcaagattcattttaaatacagggaggaggagagaggaagatggcaaggttgtgaaagagtgaatgaatgaatgaatgaatgaattatagaaagctatatgcttctgcacagctttgagattgagatggggagctgattttctcccttttgcaccttatttacatttctacttgaaatgtaactgttttaattttatactgagcaaggacaatggtattactttaatattgagaaaaaactagactatgcgatgtttgttttatttatttttaaggtttggtcttatcactggggaaaaatgcagacacagataatggtcatacccatctgtaaaacataaacaattaagtgatagagtttattcaagagatattcgttacagtgttttcaaaggaaacttagggacaatctccctagacatgtacctgcttgtgtgtcagtttgacttaaatctttggtttaaacaacaacaacaaaaaaaggtacctaacagtgataatcttctatatttaaaatcaaaagctctagaataaaagtagaggctataattctgattttaacaaaaactgctcagaagatttgaagttatcatataactagaaataatatttcttcaactgctcttaaactttccatgttttcctgctttctaaacctatgatgtatttcataatcacattaattgcatcgaggagggtgagtgagatggagaacttatttaaattttcatttctaatggtttctactcttcttttcctttactcacagaatgtttacacagttagctttcctaagcctggttttgtggagctctcccctgtgccaattgatgtaggaacagaaatcaacctgtcattcagcaccaagaatgagtccggcatcattcttttgggaagtggagggacaccagcaccacctaggagaaaacgaaggcagactggacaggtaccctcacacctagctgataatgcattttccctaatgcttatataaagcagttaacttacttttgtatttttagtttcgtatcatttatttctgctctcatcttggctagcaaggactgaacattccatatttccatgctggcctcctatttcactcacatcatctccccaggacaattgtcttctctaggatgttcctgttgatcaattgtaggtgcaaagtcaccctcatatttgcacctatatttcctatgggtttaacatatgcatatgtaaagaggacagcttaaaatatattcacattatcttaatttctactgtctccaagtccgactccttaccaaatctgtagacagtcagcttcggtcccttaaatttaaatgtaaattcctctaagatcattttcccagttgcacaagctgaagtaatagtcttttgggcctgactcatcccatcctctctggacacaaagaagggcagaaaatggatctgggagaaagcaagtagaacacaaccaacacagacagggacaattttatcccaatagcattcaaggatgttaaagcctaaagaatgtcaaccagccgggtgtagtggcccatgtctgtaatcccagcactttggcaggtcaaagcaggaggatcgtttgagcccaggagtttgaaactaggctaggcagcatgataagaccctttctctacaaaaaatgtttaaaaattaaatgggcatggtcgtgcacaactgtgattccagctattcaggactgctattcagctgttcacgccaccacactctagcctggatgacagagtgagactctgtctcaaaactttttttaaaaaagagtatcaattttgcaaggacataaactttagtatctatatcccctgtccatttgattctgttaaaagcaatccctcaactgcccagatttaagcatcatacctcttattgccttggtattctttaatatcttcaatcacattttttaaaacgtaattttccatttaatctagtttttctcaatgaaagggttcataggaattattttgtctgccatgaccaaaagaacacaatgctttacaaatatatccttaagtatgcacatacccttgtaaaccagatcatgttatttgtgattacgtgttttaaaaatcaattttagtatgtaacatttagtgatcaatcatattatgtaacaaatcttatttatttttctaaaaaatacaaagcccacacaaaatattcacaaagagaacccaaagatgtataaccacgagtaacttggattatttcaggaatgcagaagtggtttaatgttagaaaatcaaaatatcagccaggcacagtggctcacgcctgtaatcccagcactttgggaggccaaggtgggtagatcacaaggtcaggatttcgagaccagcctggccaacatagtgaaatcctgtctaatttgtatactaaaaatacaaaaaattagccaggcatggtagcaggtgcctataatcccagttacttgggaggctgaggcaggagaattgcttgaacctgggaggccgaggttgcagtgagccgagattgtgccattgcactccagcctgcgcgacaatgtgagactccgactcgaaaaaaaaaaaaaaagaaaaagaaaaaaaagaaaatctaaaaataatataatcttgtcaatagatagtaaaaacatttggtaaaatttaacagtcattcatgatttttaaaaaatacttaagtaaactaagaggaaggaacttccttagccatctataaaaaaaaaactataacaagtattcctgatttaaaaaaaagacattataaacatttgctataaaatcaagcccaagaaacagatgactattttgactgcactgatcttagctagcatagtaagaaaagaacaagtaaatatagcacaagaacaagaataagaacaaatatataatttaagaatcattataacaaaatagacataaagcccatatggagaaaattataaaatttcattgaatgataccaaagtatttctcaatgattatagtcaataaattggtatagtcaacatgttaatgaagatattaaagactcaatattaaaaatatgtcatttctccccaaaatgatatgtagattcaattataataaaaatatcaccttatttttctgtgaatcatgacagcttattctaaaatttatatcaaagatgaaattcctagaatagaagaatagcgtagttggggctgttccaccagatatcagcacattagaaggtaaagttttgtattgtggagctatcatgttaattcatgtataactgtgcaaataggaaagaattgagaaccctgaaaatacacaagcatagatggaaacagcatttgacaataagtggcattgcatttcatttaaaaaagacaacagtgaactgttcagtgaatgatttcagggcaattggttattcatatggaaaagatgaaactaaatttctttttcatatcaaaccaaaaaataaattcacaataaattaaagtcttaaatatggaaggacaaaaatctttaaaattcttagaagaaaatataccaggattaaattttgaccttcgggaaaagaacacttgattgaacaaaacaagattatgagtggaactgcattaaaattaaactctttggtcatcaaacaacacaaaacacaagcctcagtctggaaatgtacagtatatataatctacagggaatacagtccttgtccccaaaaggggaaaagctcactgcagtttataatgggatatcgaaaccatactggttgttatagtattagaaagaacagtattggaaagatgtgaatcaaagagtgcccttgatcactgctggtagaaaaagtaaatttctaaagtcactttggaaaacaatttggcactatctcctgaagttgaacatgtgcatactctctacaagccagcaattccactcctgggtacagacccagatttttgcacatgggcataataagacatgtacaagaatgtttatagaagtattctttataatagcagagaaactagaaacaacccaagtgttcatcagctggagaacagagaggcaaactgtggcacttttgcataatgggatatcaaggaataagaaaaaggaataaattataactaaatataacaacataataaatagaaaataaataaaaatgaaaaatgtgctatatggtaccatttttgtagatttctcatacaagtagcactaaacaacatattgtttacagacacatgtgaatttcaaaaatattttttaaaagtaaggtaatgataaacataaaatccacatttgtggttacctctgagatggagaagcaaggagatggtattagaaagaaactcataagagatgcaatggtattgtttctgaaatttggtggtagatttacaggtattcatgttattatacagtgttaacgcagcttcatcgtttacatgtatatcactcatattgtgaagaatatatcaaatagtcgtaataaaaatatttttgaagagtagagggagaaaagtgttattttatttcatttcttactacacataataagcactaaataaatataaaatacaaatgccctcgtcaatttttttgtttatcttgaaaaataaacttttttctcatattgcaaatgataagctagttataataagaataccagatcaaatattctgaaatagatttccactaaaggatacttgattccttcatcattgccagatatttaaacactacctactggctccaaatttctcctcttcaagataaaagaaatgaatgtgaatcaccagctttcaggatagtgcttaaaataaaacagattcctattaaaacaattacaataagaaaacactatgtagtatagtataaagtaagttaaaatgacattttaatgttttaacattttaataactcatatctactttataaaatatcatagtatatgctatctgaaggaggaaccaatgttaaatagtataagtctgttagacataattagatttagattcagtgctggttaaattgacaagttttatatttcaaagctaacggttttgatacccatagagttatttgtgattcctttctgctaaatgggtttgatatggcaaaccatccatgagctaaggaatttttaattgagtagtttgtgttttccctttgacagatggtgagcacttatccagatcctcaaaatgttctgtggtggacacgtaactacatacatgatttagtaaattattggaacatgatgatgtttgatggaatctgtctctaccaccatagatgactcatggagaactgagccatcactgtgtggcaggtgcccccatactccacaagaaagggagagcacgtggcatcagctctagggacaaggactgcattcaggctccctggggttcatgatgggatatcaaaaccacactggttgctatagtaacagtagcaagaagaaagcaggcatgcttgtggatgaaaaattatcttccttctttctaaatgtgggaggcaggttacatgtttgtgatagcgatctattctaccagctcagagaacaaattgaagtctaaatactcagaatgccacaaggttgggagtcaggcctgattctcagaagctagctgtccacttgtgaatataagggagagggattttgttgacaccctttgtctcctgatgggttttataagttagaggaccaacgcaagcacagctgttactttcagcatcacaaatctgctttgcagagaactgctatattaatatatccactttccagatcatctcacaagcaaaaatggtaaatgattagaaagatatttccagctgttttcaaaaccgtttgagaaaataaagtcttaatttctcaggtaagatctcagagcagacgaacctgtggttctgccagggaatctctaaagctaagccataaatgagacttctgtttaatcttcaataaccacttgctgttgcaggcctattatgcaatactcctcaacaggggccgtctggaagtgcatctctccacaggggcacgaacaatgaggaaaattgtgatcagaccagagccgaatctgtttcatgatggaagagaacattccgttcatgtagagcgaactagagggtaacaatagcactaaaatatttattattgtaactcaggtgaacttcctttgctagcatcggtatctatcagtatctgcctgaacctctgtgtgtgtggacctactatgcattgcaaaaggataccgtagcttaattccctcttctttacttttcatacttcgggaacctcatttgcctcagcccttaggagttctacccttaacatttttattcgtgcagttatctccacctttggaaaaaccaaatgcattttctgaagctataaataagaaaaatccctccctctgcccctcttaaatattacctcctcaaataaggtatgcacacagcaaaactcacaaatcagctccactggagccagcaggctttggcggtttctatctcattcaggttccaaagcagttatggcagctgcttagctgtcacagatacagagtgtggcagcagctgcaggacctattgagcctattaagtgcatatcttgtccctgtcccccttcccaaggtttgcagggtccctgcagagtggctttctgagggaacagaatcaagggaggggaggaaaatgactgctgccctgagcctggccacctttttacaaatctaccagagtgcttgccccagccctgggccagggaattggctttactcatgcacaaactgatgactttctttagaatgctgcaatactttatacttactttattaggaaagtcatctgtatttttcatcaaaatattgtatgacaactcagagagataattagtttagaaggacaattagagaaaaaagaaacagaagcccagagacttcaggggttcagacctccaagccagcaatccatttatcagactgaagacatagaaaagaactggaaatccaatttgatgaggcctcaaaacacagaggatacttttaaatgcaacgagtatgaatatgtagcagtagttcagccaagccaatactatcctgcagtgaaagacctacatttactaattatcctcttggggaaaacatttagataagcaataaagatttcttaccttctaagtaaacaacaaagctttcctcagtttttattattattattattaggtagaggattaggctgtaggatgaattgatacaaagcgttcatgcagaatggctactgagacgtttagaaaccatgatcgagacaaatgagggatcatttatttggacaaactgagaacttttactaatctaacagccagatattgtagtcatggtctctgaggagaaatgcaaactgaatgctctcatttgaatcttagaatgctttagaatcctggtttcacatgtcttctagattagatgttaggccctttgacaaactttaatccttttcattgcggaaaggactttttaaaagatttaaactttagccgggcgtggtggctcacacctgtaatcccagcactttgggaggccaaggcaggtggatcatgaggtcaggagttcgagaccagcctggccaatatggtgaaaccccgtctctactaaaaatgcaaaaacattagccagacatggtggtaggcgcctgtaatcacagctactctggaggctgaggcaggagaaatgcttaaaccagggggacagaggtttcagtgagccgagatcgcaccactgcactccagcctgggcaacagagcaagactccaactcggaaaaaacaaaacaaaacaaaaacatttaaactttaaggaatttcaataagtaactgcagatttgagaaattagtttaccgaaatcactcaaaatgtgttattttgttgagaaagaattctggaattcccaaatgcattacactattgtaccactatgccactatgtccttttaacaggtgcttcttcaagaagggcattttattatgccaacttcacagctgttgaccatcaatccaacctttatttgattaagctcagtatatagtacatcactggaaaccagtcatttagttaattggccatataaacgaacagttttgccattcattgttaattacaggataatatatgacatattagtgtgtagtcactgaactctgtgccaaaacagtaatacatttgctaccataatggctcattcggcactctaaggttaaaatgcaatctactctataagcaagtgccacattaaactgattgaccagagatcgcaagtgaccatgagaacttcacccagaaaaaatttttaatgctttatatgcctattctatggcatgatttgtgtcacatactagacaaagatgatttgttttcattgttctgaatgtatgtgagatctgtaataacatcctttcatcacagatgagaaaatattaactaacctgcccaaaatcatgtactacaaataacaggaccaggtattaaatgagatgatatatttgacttaaatacctccatctatgcacagccaatagattattcttacatttttgtgtgaccataaaggtttatattactaaatgttgattatgatgtatgattattaatttggagatatttgcattatcccaacacttttcagattttcagactatgcatgtcagtcatcatttcttttcctaaaatcctggacaaaatgatagctttaataccgcctcacaaaataattggattttcaccaaactgggggccaagcttctcaagaagctccttctcccttgtcctctgcctctctttactcctcctccctcattctctctcccttccaccccttcatctggaaaaatctccctttagtcactttggtatctaatttcttggcactccagtgacctctgcctcctatatctgctttgtcctctgatccttctcctggcatccgccttggtggccagcagttcttactggacaaaaacatcaaaccctaagagcctgaagtagttacttaagcaaataggacaagcaactgaactgagtttttcttctgggaaagctttcttcacacaggtacagaaataggctaaaggtcaggaagtagggtgagatattttaggagtcatttggggtttccagaatgagataaagattttaacactgaaccctaaatattttctttcttaacatccaaagtatgttcaaacagaaaaaagattagattctatttattatgtaaattacaaacattaggacacatttctcttaatatcttcttccacgtatgcaatccaactgatatggttttaaaaaaaatcttaaacccacattccaaacaaataagaaatagggtataagtaatcaagtaattatgaaactctaagaatcagccactgaaactgtaaaaaaaaaaaataaagctgacctattacaatactaaagtaatacaaagtttaatgtacctttttgcacatagcaggcctcagtaaaaagctgttaaataaatactttttaaaaatggaaaacacaccagaatcataatggacatattggcaatgtccttctcaataaaaactaaagaaatgatctagatttgatgttcctaaaaggtaaaataggagcaggatttagctgtagttttctagcaatgccctttttaagtaatacagcctcagggcaatcccttaattaatattttccgctgtttgaagtaggtatttttatctccatcttataaatgaatgaaatggacctgagcatgattaaataacttgcccaaggtcacacagctagtaagcttccacactagtacttaattccagtatgttcctcctgaaagcccacactcattctccatcaccaccctgtgaattggtttaaaaaaaataagggtcactatgatggtccttgtggcagaaccacactacagagagaggctacaccagaaagaggaaggcctctagctttttaaaattctaatcaagaacagagatttactctccttggacaatctttaacagaggcttatatccttcattaaaaccttagaagccctgtgatatcatgttgctaagaagaggctgctttcagctaaaggggaaaaagagtgtaggggaggggcttctcagtgagtcacacatacccggaagtgagtggttttctgaaattctcgtctcaggaaaccaccgacactcttagcaaggaagctgaacctcctgggttttgccaacacatttttccatagtttggtaaagaaagaaacctcaaaagtatgtcatttccccctattttctctttgaaactaaattttaccggtcccttcttcacccccttaacagtgacgtttttgagccacagcgaaatccattttttgtccctttctcttacttttgaattatcttacttgtaaagtgccaattcagagcatctttaccctggcttattgttttttccagttctacatgtggttttacttctttataaagtcaagtaagagggtactttaggactgaggtttccatccaagtactccggttttctctccagatatgaagtaagttttcagtaatccattcatgatccccaggctagtgactaatgcttatgactaatagcaccatgatgactgttaagaccgaaactcaaaacttgcttccggaacaaaagagaaaatgcctttggtcattttcatcagaactctttgtctccttctgattcttggcccagggatccaaggattgttgtaaataagtagcatgaggttctcaattagcagtgtgtgagttctctctcataagcaaattaggaaaattaatgaaacagccactaaggaaaatcattgcaaggaacaattagcagggtgtccttgcctgcctcttctattcaaaagccatcagctacattctttataaaaggtgctttaagtgtttgctgttgattcctgcaatctaagctctcaggagcatggtttgttccctagcaagaagataatagccagcacaacccaaggaagaccccatgctttgctaaacctgccaacccttatacggttagacattactgcacactgcagaagcctcagttctcacaggctcatgtgttgggctgcacagcgctgttgtcagctctacaagaggctaatgttgcagtgcgccatgacctggtttcagtaaactttcaggaagagtgaacgagggagtcatggaacgagatcctgagaacagcgtttgcttagtgtagaattcctaagcatccaattttggctcccttaaaagctatggttgagaggggtgaagggtggcaggaaagaatttgatttccaactgtattgaatcagatgtgacttatacttgtttatttttaatattttatcagcatctttacagttcaagtggatgaaaacagaagatacatgcaaaacctgacagttgaacagcctatcgaagttaaaaagcttttcgttgggggtgctccacctgaatttcaaccttccccactcagaaatattcctccttttgaaggctgcatatggaatcttgttattaactctgtgtaagtggatctcctcattactactactaattttttatttttatttcttgctattaggggtcccaatgcatctacattgtctacagctatgcaggggaggagggaaacaatgaggatcttcaacttagactgagaaaagcacactaatggacttaaaaaggcatgcggggattgggcttaattgtaaggaagcaaaaaaacgaaaataaaaaaatcttatttattacattctattagccccatggactttgcaaggcctgtgtccttcaaaaatgctgacattggtcgctgtgcccatcagaaactccgtgaagatgaagatggagcagctccagctgaaatagttatccagcctgagccagttcccaccccagcctttcctacgcccaccccagttctgacacatgtaagtgtttatattatccccattgctttctaatttttacccagtattctgagtcatttcagaaggaagattattcaggatatctagtacactctgatattagaattgaaagaaatataacctatctaaacctattcttacatcttcattgaatgacttacctatatttccatcttcaattttgtttacaaaacagtacattttcagttgaaatgttggaaaacacagaaatatccagaatcatgaataaaagacacttataataccatgacagaggcaaccatgttggtttccaggcccttttatctgcatagtagatgtcctaccttgtatacaatttggtgtcctgtttttagaaactagtaatacaccactaaaactgtttctaggccaggcgcggtggctcacgcctgtaatcctagcactttgggaggccaaggcaggcagattgcctgagctcaggagttcgagaccagcctgggcaaccacggtgaaaccccgtctcttctaaaatacaaaaaaatagcctggcatggcggtgtgcacctgtagtcccagctactcagtaggctgaggcaggagaatcgcttgaacccaggaggcggaggttgcagtgagccgagatcacgccactgtactccagcctgggcaacagagcgagactccatctccaaaaaataaaaataaataaataaataaaaactgtatctaaacatcatataaatgtgtatgtctaatatgattttatgttaagtatatatacacacagagacacacaactattttatagtattggaggtcatatagccttgattagagcatgggctcaagtcagactgctggtattcaaatcccagcactgtaaccgaccatctgtgtgaatttgggaaagctacctgtccaatctatttctcagtttcccatccaagtactaaccgggcccaaccctgcttagcttttgagatcagaaaagatcggatgctttcagggtgatttggccatagactatttctgtttcctcatctgtcaaatgaggatattaacagcacagacatcaaagactttgtatcagagttttaaaagataatgtttgttcaatgactcacatatactgaacgtttaataaatggcataagtactatgtagtaatgataataatgagtactttcaccagcccagggctaaacaattttcattcaatattatatgtaattctcataacggctctgtaaaatatagtctttctacttttagtcgagttaataagaattagctatcttaagcaaccaacccactcacaccactagtaaaaggcagagtaagaattttattctagcgagtcagactccaaagtctgactccttatctctggaacactctgcctttccaatttattctacttttaatagaccatggtaggctattgagagtgtttccagtttttcactattagaaactatactctgatgagctcctctatgcatcaagctttttcattatttccagttattcttaaaatagataagtagttaggaaattataaggccaaaagatgaatatgtctaaggttttcaatacacatacctgaattgtttcttccacaggctatgccaatttacattcttatcaccaatacaacaaagatggtcacagtcactacactctttacagctcatgtgttgtggttatattccataccagtaatgggtgggcaatgttgtcttgagtgcagatcttgaaaactcttgaatatctcattctcttccttagtgtccacgatggaattggttgagcaatgtgctccttgcactagaaatagttattcaatgagaggccagataaccatcattcaagaaaactggttatttactccaagcatcctttcatcctttgtaaaatagagatatttcatctatcttgcctacaacatagagttatgaaaaatcaaatgggataatgtatgcggaagttatctgaaaactggaaaaagcatacccacatagacactctgaggaatccctgcatttagtgaataactactatgtgtccagtactctgccaggcatttcatatctgttatttcattttattcccaccctattgttttatttacatttatttatattgccagaagtattatatttcacaaaggaaaatacctaagatcacacagctagcaagtggaaagctgtcagtcatggggggttagttccaggagttgatttcatcctaaagcattcctgagatctgccacatggatttcagaatgtttcctcagctctttcataattcagccacaggttagatctttgcttagcaaaggtaaggttaatgatcctcctcttcaccctcatatacctgaaaatcatgtgtttctcagactcataaacatgttttcagttgaagaattagaaaacatcatgagttgaataaacttttttgaccttggatcctaatgtccacttataaaaatgtttctaggagaaaacagcctaatttctaaatgactaacttaaaattataaactaaaattggcaagagccctaaagatcatctggtccaatcaccatcttaatgcatgggttccttttacatgatacttacagcctttgcttgaacatttcattgacaagattttccagtgttatgacaaggcaggctcgagttgttagaaagccatcggttacattaagttaaaactgagtccctaaaacttctatgtaatgattgtatttctataggcaaacacattacatttatgtgtcctctgtctaacatcccttcaataatttgaaaatagctaagtcttctccttccctaggctaaccatttccctagcttaggtattctttgtattatctcatttctaattactatcccctccatgatcagtattcttaaatttgaaatattcccttcataatatggcacctactgctcaaaaggaagtcaccagctcaggggacagtgtgacccctccctcccttaattgttaccatatttctattaatgcacctaagaatgttttaatgtttttaatagatatatcatgctactaattccaaatcgggtaccatattcaatcaagcagaacctcatggaccttcttctctaccactagaacatcctccaggcaggtctctcagcctgtgctggtttggatttttagggataaccctgccagcctccatggatcaccttacttttctaagtacttacacaaactgcattttatagggcctctcaagcacatttttctgtggtatttagagatcacactttttccttttttctcaaaataaagatacttgcccatctgggaatggagatttttactcatttaaggttcttttttttttttataaccttctgttctaatttcgatttccatttcctctcagcagtgtatgttttaacttttccgaaaacagagcattccacttagtagatgagacagaagcaaaaagttgagtagcatgccaaattggttggtttagaaagaatcacagaacattagagctagaagacaccctaaagattccaactcttaacttgcacatgaggaaagaaagccctcaaacttacagcatggcccagggggttacacacatgagcgatagttggcactaaaacccagatatctaaattccaactgctatttcaccttctttttgtttgtttgtttgtttgtctgttttttgagatggagtttcactcttgctacccaggctggagtgtaatgtcacaatctcgtctcactgcaacctccacctcctgggttcaagcaattctcctgcttcagcctcccgagtagctgggattacgggcatgcaccaccactcttggctaattttgtatttttagtagagacgggatttctccatgttggtcaggctggtctcgaactgccaacttcaggtggtctgcccacctcagcctcccaaagtgctgggattacaggcatgagacactgcgcccggcctatttccccttcttttgcacattataattagttatgactgtgtggtcagaattagattttttagaactttccatctctattaattgtattatattttagaaatcagatcatgaagccacacatatcttctgttttaatttgtttcctttcttatgttctttttgtgtgtgtagggggaaaagggtgtcttctttttaaaggttactaaaagttaaaagttttacagtttattttgtaacaaatatttattaagcacctactaagtgcaaagatgaatacgatattatcattgctagtcagagaaaaagagggagagttgctttttctgccatagccctcccacttttattccatgaattctggcaggttacttgtcccttctaaatgtaaaataattaatggacaaataaggataataatatcttccttctaggattactattatgagggaataagttatacattttatgcaaagcacctagcaccatgcttggctcaaagtaacattccatctctctatttattcttttgttagtttaactttaacttctgtgtttctttaacttaattattctagttagtttaacttttcacatttttagggtgggtggcaggtgctggaaaaaaagggatgtggtgagtattcaatttttaagcaattccaaacccttttattggtttgatatgtaatgatgatatatacattgtaatgatgtggttattaaataagtcctctataattttcacttctcaccattttccatttttgtatcagaatttagattctttattttttttttcttgctctgtcacccaggctggtgtgcagtggcgcaatcatggcttactgcagccttaacctcccaggctcaggcgatcctcatgcctcagcctcctgagtagctgggactgcaggtgcattccaccatgcccggctaatttttgtatttttaatagagatgggatttcaccatgttggccaggctggtctcgaactcttgggaagtgatccacctgcctcagcctgccaaagtgttgagattacaggcataagccaccacgcctggcccagaatttagctttttaagagttgttatttaagaactaagacttaaaagttaactcctgaagtgagaactgcctatttatgagctccatatttgtgctagcacagttgacagaaaagatctattctcagtgcccttctttttcttctttacacccatcacacccaatcctgccagcaacttacagcatgaggacaacattcactatactacagggcaatgtaagggtgtcttgagaaagccctgccttgtgaaatggattatgtcaatcttatgattaattcatgttgaacacgctagattaaagagcatttcatgcatattatctcatttgatattatggtagcttgtcttctctttatacttctctcttattctttagcccatcgagagctagagaaaacatttctacatgttctatttgtggatatttttcatggaggatggcaggaggtagaggtagataagaggctgaacttcaagtattacagaaatttgttgacatgtggaaacgtgacaagttctctgcaagtatgtgcactgtttagaccaagtctttttaacaaggatagcctgtgtggatttgtagataatgagctggctgcattcttttacttgaattttattgaagagttcagccgtaaacctcacagtttaaaatgtgaaaactaagaaaaacaatacaagtagccatggagaattcctgtactgatgagctctctttgggatttggggaaaagaagtgagcacagaaggaaagaatagaggaaaggaaagcgatttccctagcagctttagtgctacacctttaagacctaagtacagtcaaggccaaaggataaactgattggatactgatatgtatttaaagagaaaacatacattttccacttatcaaggaatccttgtttagacattaatgtataaatattactgtaaatgcccaagacccaccaaaagagcttaagtgcagtgttaacaataattcagtttctcaataaacatcttgagtagggcttttatattttagaagaagattaaagtcagtgctataaaaagtatcttccacttattcatccataaagaaaatcatgacaaataagcaccagatgtgattttagcccacatttattagagaaattaattattgactcatgaaagaagaaaattatgcaatttctatgatgattcattgtttggtgctttcaagaacaaagatgccagttttgataaatgtaatataaatctctgctcaggacccaggaaattcaagagatgcttatcaacgaatcatacgcactcctgaatctaagaactcatttccaaatgtcagccaccaatctgcagttagttagaaaagaccattgctttattctgacctgaagttaaatgagtgacagtgtgggggtgaaaacgttttggccccgttaccaatttggtgcactatctacttccctaaacaaggctttgggagcatggcttcctccataattattcccaaccacatcactgctctaatcaacaggtgcaccaccacgcgagactccccacccaagtcctgtctgcctacaacttgtaacctgccaagcaaaggcaaatgaaaaacaagcgtatctgtcctcctttcatatcccattttccccattatctatttctagtactttaaaaagtccccacaaggtggcagaattgtaacacgttgagattgatgagcctctactgagactgtgaatttttttttttattattattgttgttttaacacatttgagagattagtgcgtccaaaacaacacaggtaaagcatcacatccatagagatgaggacgccttcaagtatacactagcttagaaaaggatgattcatcttgcaatgaccattctttaaaagttccttaaaattacctcattagatcttttctcttacccttttttcttagcttagatttcagtggcaagcagagttgaaaacatcatccttagtgacaagatcattttatttctgagcaaagcacagggcagtttctattccatctcacttgttccccctttaaaatgctagaaggaaaaaagaagcttgagcagctggatgagcagctccacccactgtgggacatgaggcagaaggaagagaagaggaagcaacaccgggcaaagcaataaactggtgctgccctgaacacatcatgttttttttctttttgagacaggttcttgctctactgtccaggttggagtgcagtgatgcaatcatagctcactctaaccttgaactcctaggctcaagtgattctcctgccttggcctcccgagtagctggggctttcagcatgcaacaacatgcccagctaattttttatttttttaatttttttgttgttgttgttcttttggagagacagaggggggcaggggtcctcactttgttgcccaggctggtctcaaactactagcctcaagcgatcttcctgcctcggctttccaaatgctgggattaaaaacatgagccaccacgcccatcccttacacccatcagacttggtttcagtttacccaaggaaaagtgatgcaaggaagacaccctttaaccaagcaagggggaggtcgagatttgtacaaaacactaccaaattagagggtggggaatttttgtcccatttaaatcctaaggtacatatttttaaaaaccctcttacaccagcacttctcagtccttttccaactgccagtttaataaaggaaggtgatagaagttttattaaaacagtatccatcctgttgcaaatcaatgattgatagtaaacatcaccttggatgtccttaaaaacaaaggactatacaccataatggctttaaactttgaggttacatgttagagtgatcagtttggtacaactcttttccataacattggctcatctgagaataccgttttattaagcactgcttctgcctgcttcttgagggctgcccgttgcagaaacggaggatctaatccaggaggtgttcttcttcctaaatttcaagtggatgtaacctgtaatgattcttaaaagaactttgacaaagtccctgtccttttctggtcaaaggtttttttctaaaatggcttgaccagtgccttgtccatctagaaaatctcatagtatacaacgaaacaacaacaaaataaaaacaaaccaaaaaactgctgcttagctcaggaccagttttggatacacctgtccagtctaccagcaatccaaaagttccccataacatacagctgctaccgggagtgtacaactgccaccttgaaaattttttaaattttaatagagaagttatattgacatttacatatagtaattagacgagtgactgtaaccgcaataatatggacataacccactggtggttctcttttaagctacatgtaattgtttcctaattcctcagcatccatccacctttcttaatccctcaattttcagagctgagggtgtaaagatgtttcagtgaaattctgcccccagtggactcacagcagataggattatcttagtgatttctgaggaagactgcaagctgcgtgtgtttatcgagacggtcctctgtccgggaaatatcgtgagaggctgataaaagatcccaattctattaatagaagtattcatgactgagatcttaagctacagaggcctttccattcgggctctttttgcaggcagcgtaataagaaaggtgccacatgctgcctctaaaagaggccattcagctgtgcgaatgaatagcattttcctgtcctacccacggggttttgcatagctgtgtgaatttcggccacagtctgctctttataactgaccatctcctgggaagcaagaagggaaatacttccatgaagaccaattttacggcatttcaaaacactttaagccttttacctgctgtggcagagtgcttcgtttgactaagatcaagagaaaagagaacaaggcttttcctcatcaagtaaaaatttcctgtgtgctgatgagtcatctctgaggtacactctttgggaagaacactgtgcatcaaaagcctgccttgggctgcttgagaacctctgctgagtcagcactcactggggcagcggcccagccagagctattaagtgcagatcttaaaaacagatgtgttggtgagagtgtgcaggttattttctcatgtactgcatgttctaagagatgtcataagcagcctgtatatcgacctatcttgtgaaaatagagaacagggaaaggaattgtggctttggtaatttaaggagccttgattatttatggagctgtgtgttatggtagccaaatgtgatctactcagccaggactgctgtatgctttgcaaggcccagtgcaaaatggaaaatgcagggcccctcactgaaaaattattaagaatttcaagatggtgacagcagagcattaaaccatgtgactgcacagccccgcacctagctctccccctcagcaccctaggaagctgatctttgaacagtggcagttgaaatggtgtatggtgggttacatttttaaaatgtgctgggttgcctagcaactggcaagggcctgaatgggctgacgtgcaggtttagatacaccatcttgaaagtctacattcatggaaaccttctagtggactgataattttcaagaaaaagtaatatagtgggagatggaaatggggagggcaagaaaaaacacattttgctactcttataacccaagtggctagcttgtcattttccctgttcgatcttctaagaatagagctcttcatatgtgaaggaaaaatgaaagggaaattccagttttctcagaaatatacataaatttttagaggataatgaaactatgagttaatcaataaatatgtctgagcacattcctttagccattccagggtgtgatatgagaaaactgattcacacgcactgagcactcaataataagtacttactatgcagtagactacagagatgaataatgtagtttttattcttaaagaattacgctaatatgtaagaaacaattagacagcatcattacctttttaaagaacagtccataatctcctgtttttctctcctgggtattttacagggtccttgtgctgcagaatcagaaccagctcttttgatagggagcaagcagttcgggctttcaagaaacagtcacattgcaattgcatttgatgacaccaaagttaaaaaccggtatgtatcatcctgagacactgggaaagaaccgataaatgaagaactgagtatttgtgtttaatcaagttgaatctactacacttattaattaatgaagttagcttttcttttattcactgagtacaatagagaatagaattttatttgtctgagcctgaggagcccaatttaggaaatcagtagcctgataaagtcctcatctctgagaaggttttactctcctttatgaaaatgcagccacgatctgataccgctctattttagcatgagaatgctgttatttttctgtttgactttgcatgcttttgtttcacagtctcacaattgagttggaagtaagaaccgaagctgaatccggcttgcttttttacatggctcgcatcaatcatgctgattttgcaacagttcagctgagaaatggattgccctacttcagctatgacttggggagtggggacacccacaccatgatccccaccaaaatcaatgatggccagtggcacaaggtaatagtcccctggatattggcagtaccctaagggaattactgagtggcagccatcagcattctcctggtgccagtatattttgccagggcagacactgactctggcagaagctaaaaataaaataagtgccatatacaactaccacaatcttggaaaatgtgctcagacctgtgtaggtttgcatttgaccactggcatgcctcatcatggttccatcactgctatatggctgtggttttcaaacatctacccataaactgaggccaggtggctgaagacatttccactgctctaagtgagaaacgtagaacagagtgtgttcaccatcaagctcgatgtattcaattttaaggaataatatttattctgagattatattatagcatttttatggtggctaaaaggcctttctattatgaaatagtatttgccaaaagcaaaagttggcaacactaaaatgggtcccaagactccccacctaaccacacagtggtctgtgaaaaccaggaatccaggaatctctggttgatcgtgtttaaagggctctaaggtatcatttctactgacagttatttggaacaactttaaaaacgttggccttacacccagaaactggtactattatgggcacagaaggctcatttgccagcttactgtcctctttggcatgactgcaaatagataatatactgcctgattaaaacaaaatctcaacatttgtctctgcacctgcgatagcctattaaagcaaagcttccctaggtagaccaataaaatttttaattttcagagtacgatattattagatgttagatttggttaatgttaacatactttgacttgtcatattctagaaagccaaagaaccttaaaaaacgcgaagccaaccaatttgttatcatggaaataagaaaaggaatcttcatttttgctgggagcttatgactagcaaatacagatccaaatgaaggagctctcattaagagttcttccatctctagctaatagaataataaatatgacatttgagaaaaagacatattgttgaaccacaatgaggctgggattaagaaagggaacttaaatactataattagtcaaattaataacggattttatttttgatggtttttaaaaattacttcccaaaccagaatagatatgtgtaaaatgaagtgtgaaattactctaatcctgacccagactcatttttaaaccatcatggtactttagcatttcacaggctttcatgctcctttacctaaattcagactcaaggtttttatactccagccagtctttacaccccttatttcattctgtctcagaagataattcactccaccgccctaaatttcagcctcagtcacttctctatcttactcccccactttgtactcatcaggttctgcagaaagtagtgcagcttatttgtgccactctttctttaattctgcacaagaagggcctgttaggcaaagggatgtagcgtatctgaaattgtgttgggagcccaggctctttgctcaatcaaactaatgcacttttaaaactgtgcatgaattttgctacccacttaatttatgaaagtgctattagtctgcagggttccttacaacattcctccctctccacacatatccacatttggcaatctaccgaggagacttcgacctaaaactgacccaggaaaatttggtattcttttggtgatagtagtcatggaaaagacagaatttgagatattctgtaaaatgggtttaactttcccatatataatgggcttagcgcatactaagcactgtgtacattgtttcaatttttcttggtaacatcgttagagtccttatgtcttatactctgcatatgtgaaatttgttcaggattggcattaatgactcctttcttttttgtagattaagataatgagaagtaagcaagaaggaattctttatgtagatggggcttccaacagaaccatcagtcccaaaaaagccgacatcctggatgtcgtgggaatgctgtatgttggtgggttacccatcaactacactacccgaagaattggtccagtaaatatctgatttcttctttattacttaaatatatggctgattcatttattgatatattttgacttattaggtcacatgggcccatgaaaactgataggtgaataggaagtcatcttttctgataagggacagaagggtttgttgtttatttgtttgtttgtttgttttgagacagagtctcgctctgtcgcccaggctggagtgcagtggtgcgatcttggctcactgcaagctctccctcccgggttcacgccattctcctgcctcagcctccctagtagctgggactacaggtgcctaccaccacgcctggctaattttttgtacttttaatagagacggggtgtacttttaatagagacggggggtttcactgtgttagccaggatggtctcaatctcctgacctcatgatccgcctgcctcggcctcccaaagtgctgggattacaggcctgagccacctcgcccagctgacagaaggttttttagatagattagattatgagagacaatgccacggaacactgagtggggaacctggagccaaactgtcttggtttgaatacctatttaactattgactagctgtgtgttttggagcaagttaatcttttttaacaaagatttctcttttgcaaaacagggtaatgataatactaaacaaaaaggattgcataaagattaaatgaggtaatttatttaaagtgattgggttgggcatggtggctcacacctgtaatcccagcactttgggaggccaaggcaggcagatcacttgagaccaggagttcaagatgagcctggccatcatagcaaaaccctgtctctacaaaaatacaaaaagttagccaggtgtggtggtgtgtgtctgtagtcccagctactttggaggctgaggcaagagaatcacttgaacccgagggtcagaggttgcagtgagctgtaatagcaccactgcattccagcctgggcaacagagcgagaccctgtctcaaaaaaataaataaataaataaataaaaataaaaataaagtgattggaagagtagcaggcatataaaaagcactgaaagatgaaaatgatggtatgtattcatggtgtttcaggcatagagatttagcaaatattgagaggtgcagtagttacagtacagttatccaattttggattcagaatttaaagccctcacagttttgtaaatcaatattcacaaaataattttttattagaccgtgtatcctagtttgctttggaaagtgttactctgagagaagcacgggggattgattggtgcttttagagaacacactagatacaaatgtgatacatttctatactcaaattagaacacatgataatgtagatttgttcattcatcaaagacaatcacccattatagttgtaattctcagtatttggcttctcttgtggatgatcagtattacttttctttcataggtattggatatgctttttaggtctatcaaaaactaaagtctctgaagtgacactggtacaagcaattcacttgaatttctaaaaacagataaaatataatggaccagagtgtgattgagttacttctaaattccttgaacccccaatgtttcatgcaaactttcaagttttatgcatatttgcattttcttaggggagggtctgctgctttcattagatattcaaaaggaagaagcactgaaccaaacctaattaccttttcaaatagaaattgaacataggctatgacaaaatgggtatatagtaaggttaataaactattaatagaaacataaaatcaggaacgtaagagaccaattaaaacttatgataccaacatggggcccatagctctgtcaaaccaatggagacatagtgtgcagtatttagactatgagaacagtcatattccaggatagacacatccaagttgagaagcacaacacaggattttctgcatccatgccaggaggcctggtggtaacagagaacccaggcagctttgggggatatcccatcctaagacaactggataactacacacatagagcaccctgcaaatgactgtattctacataaaggcaaagttctgctaaaacctgacatttgtttcttctgatctgaatgtttaggtgacctatagcattgatggctgcgtcaggaatctccacatggcagaggcccctgccgatctggaacaacccacctccagcttccatgttgggacatgttttgcaaatgctcagaggggaacatattttgacggaaccggttttgccaaagcaggtaaggctctttcatttccttcctgttgattattaactagatacaaatactaacttcttgctagtaccaaataataaaagttcctagagtcctaaactagtatcctttatttaagccaaaaagaaacttatggaagtaatttcaaaaatgcctcttaaaaattcatgtatctgatcctgataagaattaatagaagaaataaagtaaaaggtctatttagagaatttattccatctccttcactggaggttaagaacagcaaaataaataattttgcaagaacactcatatgtttatactatgttgtttttctaccttccagtttctggagatgagatatgatttttttcttcaattccctgcaaggctgtatttcataatctcctccccatcaacacacacccatacacacaatgcacacccatgtctgtttcttgttgatagtgacaatgactggcatctttcctggctttctccactccgtttctaatgaacatttccagtatggttttatatcactggtcatgaaggtacagttaggaaaaagaaataggaaataacctctacataataattttttaatcctttaatttttaatttttgtgggtacacagtgggtgtatatatttatgggtgacctgagatattttgatgtaggcatgcaatgcataataatcatatcagggtaaatggggtatccatcacctcaaacatgtatcctttatgtttcaaacaatctgattatactcttttagttatttttaaatgtacaattatttttttttttttactgtagttacccttgtgctagcaaatactaaatcttattcaaactatttttgtatcattaaccatccctactcctccctgccactaaccttcccaacctctggtaactatccttctactttctatctatctccatgagttgaattgctttaatttttagctcccacagataagtgagaacatgtgatgtttgcctttgtgtgcctggcttatttcacttaacataatgacctcaagaaccacccatgttgttgcagatgataggatctcattcttttttatggcttattcatatccagtatgtatatgtaccacactttctttatccgttcatctgctgatggacacttaggtggcttccaaatctattgtaactagtgctgcaataaacgtgggagtgcagatatctcttcaatattcttttgggtatatatctaagagtggaattgatggatcatatggtagctctatttttggtgttttgaggaacctccaaactgttctgcatagcagttgcactagtttacgttcccaccaacagtgtacaagggttctcttttctccacatcctcgtcagcatttgttattgcctgtcttttggataaaagccattttaacttgggtgagatgatagctcattgtagttttgatttgcatttctctgatgatcagtgatgttgagccccttttgatatacctgtttttcatctgaatatcttcttttgagaaatgtctatccaaatcttgtacccatttttaaataggattattagatttttttcctatagaattgtttgaattccttttatattctggttattaatcccttctcagatgggtagtttgcaaatattttatcccattctgtgggttgtcacttcactttgttgattgtttactttgctgtgcagaagctttttaacttgatgtgatcccatttgtctatttttactttggttgcctgtgcttgtgggtattactcaggaagtctttgcccatttcaatgtcctggagaatttccccaatgttttattgtaatagtttcatagttggatctcttagattcaagtctctaatccactttgatttgatttttgtatatggcgagagatagggatctagtttcattcttccgcatatgaatatccagttttccctgcaccatttattgaagagactgtcctttccctaatgtatgttcttagaacctttatggaaaatgagttcactgtagatgtatggatttatttctggcttctctatcctgttccactggtctatgtgcctatttttatgccagtactatgccgtttggcttactatagttctgtggtataatttgaagtccggtaatgtaattcttccaattttgttccttttgcataggatagctgtggctattctgggtttcatatgaattttaggaattttttctatttctgtgaagaatctcattggtattttaatagggattatattaaatctgcagattgctctgggtagtatggacattttaacaatattgattcttccaatccattaacatggaatatcttatttttgtgccctcttgaatttcttgcatcattgttttatagtttttattgtactttcctctaagatctggaacacgacaaggatgcccactctcaccactgttattcaacatagtattggaagtcctagctagagcagtcagacaagagaaaaaagtaaacggcatccaaggaagaagtcaaattatccttgtttgcaaatgatatgattttgtatttggaaaagcctaaagaccccaccaaaaaaccattagaactgataaattcagtaaagctgcaggatacaaagtcaacatacaaaaatcagtaacatttctatatgccaacagcaaacaatcagaaaaagaaatcaagaaagtaattccatttacagtagctacaaataaaataaaatactaaggaattaaccaaataagtgaaaggtctctacaatgaaaactgcataataatttttaaaatctgcaattaatgtactttaagatagaatattcagtcccgtggtatcatagaaatacgtgtatgttcattagaaataaactaataagcacataatatgtggagattatgatgggaaacagaaataagtaacatagttctttctatcaagaatatattatcaactggtaagaaattgaaagaaggcaagtaaaaatgattaaagacaaaaaaagcacagttctgtagatacttagaaaaaaagattaattttgtttgggggatatcaggaaacgtttcatggaggaatcagcatttgagcaaggcttcaggtgattttaacactcccatacaaagtagtgggtgatagaagagtaggaccctccaccaaaatataggtaggaaaccccacctacagggaagcagaaaacagaaaaacacaggatatgttaaatattgaaacgttacaggttatgctgaaccccgaattccatgtgctatgaaagtctaaaagcttcccccaagatttctgcaaattcacagatggctggcattctcttagtcaaattttatgacaagtttcagcttcagcttttgcacttaatggattgacttgccatcctgcctgggctcttataattctggatcaaacaaaaccagaaaattactcacttcctctgtttctaatgtcccttgccatcccctgaacacacagtgtaatacaatttacataagacttgggtggtcagaagagatcacttcactggaaaacatacaattcatcttaacctttgacatctttgttcttaaaagttttccagcgacccaatcactggggcttttttttggcctcttcattccttctgtcctcagccgaacttcctcatgtcattcctctcttctccttacttctccctttctgttttattttgcagagcaattcagcttcttctaccctttactttattttttcgtttatttccagaaggggtgtcactatgttgcccaggcgcaactggctagcttttattcataaaatctgctataaacccacctttgccaatccaaacccatcaaggttctcagtagaacaaaagtctttcatgtaacagctaccatccttcattgcagacagccgtggctacacatagcatttatttcttgcctaataaatagaagacttggagaaaattcccctgagtatttctctgatactcagttcagttggtgtggtctagacagatcttaacatatcactttgttcctaagtgatgtatctatcttaaatacttgctcaaagattaaaaaaaaaatcaaagagtcaaatatggaaaatcatagaggaaagaattaactggatgaacaagataagtctatttatgtcccagaagcttcccatcaacattgtacttacagtttctctctttattaataaaatgtgtggcaacttttgaaacctttcagatgattgtggcaccatttagtgtgccccactaaaactttactgaaaaataactgaaatgtttttctttacccaacagagagacttctaagataataatacctgacagtgagattctttaagtcaatctcagtgtgtatccatttattcaaataatacatagtaaaccctcatgttgtgccagatactttggtaagcacagggataaaatggtgaaaaatatagacaatgcccctgatctcatagcacatacattctaaaagggaaggtagcccagaaaataagcaataactaactatggagtgtgttacatgatgcagtggtggaagataggccaggcaggatctgaaacttatagccctcattagaattagctagcatttgaattgaaatataataaaaagtcatgcattgtacacgtttgaattaacaatccccatcctctaatccaaaatattttaaaatcttcattttacagttggtggattcaaagtgggattggaccttcttgtagaatttgaattccgcacaactacaacgactggagttcttctggggatcagtagtcaaaaaatggatggaatgggtattgaaatgattgatgaaaaggtgagtgtcagcaatgcaaacatttctgatttcttcatgatattgttgatgtgtagatatcatccatgtgtgggaaactcgaatattttgaagcccggctgtattctttgttgggagaaagctaaattgtatgttttcatccttctggattacttcaatttgtgtatgttttcagcatgttgtaggccagtataaattttaaatgcattaattgtacagcaagccaatcgtgttgactaataatgaaccaaatagtttgagatctcgagttcttactgtgttgctataaacacactcttattctcctcttaaggaacacacagtctatgagactatggactccagtgggagaaaaggcagagaggtggatcatctaaaattagtctgcctcttttaacaggctaggcatctcttagaagccaaggtagccaactgacgcatcagtttctcaatttgtttaaaaaagcatccagctaccatttcaaaaaacagcaaatttataaaagtagtgtgtcagtttgataataattgataatcaaattctaaacacctctttcagccctgcattaagacaactttgcactataggcagcaggtaaacagagaagggaaaacaagaaatttcacaagttttctatttggttattaaataggaatcgtacttcaactcagttcacgtttccacccttagtgttgcctcccaagaagaaaaatcacacagtgacctaaaatagttttttcttgctttcttcctctttctgctcaattttcaaactgtcctccaacaaaggtaatataggaaaaaagatccaccagcttagaggtaaaaaggagtgaacaaataagtaacactcaatagttttaccaaattttcaaacatacttttactacatctttttcaagtaacatgctcttaagggcagttaccatcgatatgtcactatcatgtgcgtttctcaccaagctccttttacatgcaaaagcctgttatgcaaactccacccaatatagtaaacatttcattaataattacatcaatagagtttacaaacttttcacctatttacttgcatttttaatctttcttcttaagacttcatttcttttcttttaccttgtcgaatgtcttgccaaactgactaatgtttttagtgtttcaatatgtttcgtttcttcaccagcttcaaaagaattctgtcatctcaaatttcaggggcttttccacattactaaaaacagatttttctcatttagaccagaacttctagtctaagttcttcattgttaggaatttaactggccttctggctcaggtctttggcacctgtgacatgaaacgggctccaaaatgtaatttatgtaactctcaatcttgtatataaaatgaaatccatgaaggaaaaaaatataattaaaacatcaaaagtttaaaatttaaaaaatcctttactttgaatttgtaaaccaaattaatgagtcactttaaacaatatcttttaagaaaattttataaggttcagtcagaactctcacattctaaaaagacgtgaggtagaatttttccctgtgtacactaggtccttttcttgtcacctggcctcaaatttttctgaaagcagaattattaccagctttacgtatcttgcctattaactcccaacaatgccccaaagcaaagagcataatttgtggctcctggtgattagatttatactttaatttgtcaagttttaaaatttttttcaatatgcccagttacatccatttcaaatgattctggctgatgtctttcctagagacctgatcatttgtatgtgtgaaccatcatgatacttctttaatgaaaccatctgtgactgttctatttcctactttccagttgatgtttcatgtggacaatggtgcgggcagattcactgctgtctatgatgctggggttccagggcatttgtgtgatggacaatggcataaagtcactgccaacaagatcaaacaccgcattgagctcacagtcgatgggaaccaggtggaagcccaaagcccaaacccagcatctacatcagctgacacaaatgaccctgtgtttgttggaggcttcccaggtgagtgttggctaccccagcaacaatttctttgctctcttatgttactggttttgaaaacatttatatttacgtgtgtctaagaatgtgtgcttatgtgtacttgcttcctagctttagaatctgcttagaatctgcaccttacctaaaatttccagtgtgtaaaatgaacatattacttatataaaccacatgggactgaacttttcatgagagcccccaaagtttccttcgtggagagattgaagctggaggaaatgaatttggcttataaaagatatgaggcatttaacagcaattggagccaaacttggtgttctttctgatttttttaaaattaatataccagaggaatcaatcataaaatgttatggaacttatttcctcaagttctggaaatcattgggttaaacatagctaatttcccccttatgttattatagagtttatatttatattacaaagaaacgcaagcaataaatcctcattcagaatccttctctagcacattaaatatagcatgtgaactgtagagatttacctaaagtgcccataaacaagagtggccaacttgatgagaagtaagccaagtgcctcttaataagtactgtaataacatagcctcctggaatggtctttcatcattttgtcaagaggaacttttatccctgtttatataaagctcctttgctaaatgaaacaagcaaaatgtatattcagcaattgttgacagagcaatgttgatagaaatgcaatgggggcccaacgacagctcctctttccaaagtggcttctgtgttttaaaaagatcttttgcttcaatcaggataaattccaagatattatgaaggaggtaatgtacttctccattcagtctatgataatgggatcctaattaacacctagtaggcctactgaaacaagcacctctataataagaggaagattctacatgaatatccaacctacttaacctttagggatttatttttacaatgtaagaaagtgataaagtcaccttcaaaaagttctaagtaagtcagtacttaaaagtatttgatcaattgctttgtttcatgaagtaacattttacaattttaagtcacaactataaatttgttcatcccaaaccaagttatttcatgtcttaagatgtataattctagatgttttcatatgttataactattaaaaagttgaggctggacatggtggctcatgcctgtaatcccaacactttggaattacactttgggcatagatggggagatctcttgagcccaggagttggagagcagcctgggcaacacggcgaagggaggatcgcttgagcccaggaggttgaggctgcagtaagccttgattgcgccattgcactccagcctgggcaacagagcaagaacctgtctcaaaaaattttaagttgatctttctttctctacaattctattagtaaggctaaaaacaaaaccactaactttgcataaaacagcattccaatttaatctcaagctaacagttgactttgaaacatgctcttaatatttggtgcaggacatttcaaagctgagccctcttgcattgcctttttcagatgacctcaagcagtttggcctaacaaccagtattccgttccgaggttgcatcagatccctgaagctcaccaaaggcacaggcaagccactggaggttaattttgccaaggccctggaactgaggggcgttcaacctgtatcatgcccagccaactaataaaaataagtgtaaccccaggaagagtctgtcaaaacaagtatatcaagtaaaacaaacaaatatattttacctatatatgttaattaaactaatttgtgcatgtacatagaattctttctgtattcagatggtgctaattcagactccagactgaattttaattcaagttctttctcaagtctataaataatattaaactgattatttcattctaaataa

SEQ ID NO: 5304 - DNA, 643373 bp, Homo sapiens
aaaaaaaaaaaaagaaacccaaaagacatgtacattcaaaactataaggcactgcttagaatattaaacatgtaaataaatgaagacgggctatatttgtgaatggaagtctaaatattgctaagatatcaattatcccacaatttatctgtaggtccaacctcattacaatcatgttccctactctccttttttgggtagaaattaataagctgatatttaaaattatatggacttaagaaaactaaacatattcttaccatatgatccaggcaattgtgcttctgggtatttactcaaaggagttggaaacttgtgtccacacaaaaaccttcacatgtgaaatatgagaatagttataatctatagtgacaaaattagatcagcagttgcctttttctgggaatggaggttgggggatttattgcaaaaggtcagatgctgatagcagttgtatcaataattgtcaaaacttggaaccaaccaaggtgtttttcattagatgaatggatgagtaaactgtggtacttcaagataacgaaatattttttcagtgctaaaaagaaatgagctatcaagccatgaaaagaggaaacttaaatgcatattactaagtgaaagaaacttatctgaaaggctatatattgtatgattccaaatatatgaccttttggaaaaggtaaaactaaggggacagtaaaaagatcagtggttgccagtgtttggaggtggggacagggaggaggcatgaatacgtggagcacagaggaatctcagggcagtaaaattactctatatgatagtgtaatgttggatacatgtcattataaatttaatgtaattataaattacattaaaacctaatgtaaactatgaaatcggagtgataatgatatgtcaatgtaggttttcagttgtgacaaatatatcactctgatggggcatgttgataaagggggaggctatgaatgtgttgggtcagaggtatatggaaaatctctgtaccttctgctcaactttgttgtgaatctaaaacagctctaaacaatagtctattaaaattaaaaaataaaatattcaacttcaccaatgaatagatttttacctaaatattacataatatgtgaagaacctaaaatagtaaagataattttgttttgtaaaacaacattataggatttaccttacctaactttgaggctcactgtaaagctacagtaatagagactgtgatagtggaataaggagatatatatatatatatatatatatatatatatgccattatatatatatatatgccattatatatatatatgccattatatatatatatgccattatatatatatatgccattttatatatatatatatatatatatatatatgccaatgaaaagagagtccaaaaatagacccacacgtggtcaattgacttttgaaaaaagatccaaggtaattagacgaggaaattatatctttctcaacaaatgatgatgaagtgaatggatatctacatggaaaaagaaagcccttacctaagcctctacttcacagcaaacaccaaaatttgctggaaataaatcatagacccaactgtagaagctaagactataaaatctctagaaaaaaaataaagaagataatgttcacaactttggtgtaggcaatgatttctgaaagggacaaaaaatattaagcataatgaatgatttaataaattgtatttaatcagaattaaacacttctgctctttgaaagcactccaaatgcaaagtcaagccacagattgagaacaatacatattatagtaaatgtacttgacaaaggtcttttctctagaatatgtatttaaatcttattaataatctggcaaacaaagcaaaatgagcaaagatttcaagaagaatttcacaaaataagatatacaaatgacgattaagcacatgaaaatatgttcagcatcatcaaagaagtgcaaatgacaccaccaatgaggtatcaccacacaagcactagaatggctaaaatgtaacaatattagatgttaataaagccatagagcatctggaactcctatatattgctgtgggaggaatgtaaaattataaaacaacattggaaaagaggttcacagttttgtatagcgctaattacatacctgataatataactcctaagacttgataggaatagagaaatataaacatgtccatgcgaacactgtgtttaaataatcatagcaattttattcttcatagccccaaactggaacaacccaaatgtactttaatagttgaatgtattaaaaaattgtgatatatccatacgatatagaatgatagatactattagaatgatagaatattattcagagatgaaaaggaatgtattactgatataagcaacatgactatacctccaaaacatgttgcaaagtgaaagaagccagacacaaaagattactattttattattgtatttacatgaaatatgagaatagttataatctatagtgacaaaattagatcagcagttgcctttttctgggaatggaggttgggggatttattgcaaaaggtcagaaagaaaactttttgagattatagaaatagactatgtattgggtactttgtcagatgagtatttacatctaaaaaatgtttcaaatgagcatatttattgtgtgtaaattgtaccttatttaggtttatttggaaaaaatatagctctaaatatactggttcattttaatttgggttaaatatttaagaattttttccatgtgctgaatcaaacaagtagagttgacagtggagatcatagtcttattctcaaggcattttcatgtaaaataggaactcaggtaactgcagtaactgcagaaaagcaggtacaaatattgattataaaatcctgggaaaatgtaaagaggaaggggatagagggaacatggtatattttcattccacaattagagttagcagctgcatcattctgattttcctttttataaatattttttattatttattagattaactaatttgagttgaggccacaacatggttgagtaaaaataatcattttcctttttataaatattcaataaaacttttcctttttataaatattttttattatttattagattaactaatttgagttgaggccacaacgtggttgagtaaaaataatcattctgagaatagcaataggtttagaaggttaatttagggtgcctctctgctattagatgtacctgaaaaacacttctaggcaaaattagaccaaattaaaaacactggggcttcaattataataaactctcaaatataagttttattattgtttattataataataaataatgtataagtgtgcagacatgggcagactacattttgcaaatttccacagtaaggtaaaaggattacaaagctttctggtataatattaacagaactaaaagacatgaataatattaaagaatgggctttggctagtgattttcaatcaattctcttcaaagcaatactctcttaattttactgaaagaaaattcaactttaatataatatttagataaatcaatacatcttaactataaaaaagaaaactatctatataagacaatatgtatttcaacatataaatgcttgggtaaaacttccttaggaggcaaaataaaataaaagtttgcacctattcttagatgaccccagtgtaatcgatgggatgttgatattgtgctggtgactcaagtaccatgggcaaggttgttatcagtgatgtgcttctctgaaagtacatctttacacccattgacaaatgggtgtaaaatccaaaaacacaaagtaaattatcttctcaatgtatatagtagatgcatcctagaaaaaaacaaacaaacaaacaaaaaacacacacaaaaatttgatgtggaaacaaacttaaattaggtttcaaatataaggcaaggttttgttgttttgtttgtttgtttactcactacataaatgaccagtggcccattcagaagtctaaggacaaaatatgttgtaggactgtcctgaccactgagggacagctcacaccctgacccaacagtacactaatgcctgcagtacccaccgttcccggagtaaaccaaaagacatcctgcgactcacaaaatccattatggagttgttttaaaccttatgagaaccactgacctaggccataaaaaacaaatgaaaaaacaacaaaaactaggaatggcagtagttctgttgagttaaagaggagaaagaggagaaaccaggactggaagagatgaaattgtgagtctggaaggaaactattgcaaaggcctttattacctttaagtaaatgtctcctaactgaactgaaagccttcattctaaccattagtttggtcaggaacatttcagggacgccagggtggctgttttattttgcacttcctttactgccctcccagcagcctacctagcagtaagttccccagcctgcagtgtccccagagggcaccttccctcggctagtaacttctcagacactctggccttggggatgtcttggatcttctaggtacacagtggctgcacacagttttgccaggcctttctcaagaggtaaaagttcctagctgtttgcatttcccagaaataatgttttccatgtgtagggattttacagatttcaaagtgctttcatgtcaattactttctttaatttaaaagaagttcagataccaggtcaagctaggaatgatccggtctcagagggaaggagcgctctaggaaaggaggatcctttaatagagggccgtcctggggccgcgtgcccatggaaggcgagagtggaggagtgtcctctttctcccccaccctcaggcggcggcccggccaaagccagagggggctgtctcctcctcttccccagcagctgctgctcgctcagctcacaagccaaggccaggggacagggcggcagcgactcctctggctcccgagaagtggatccggtcgcggccactacgatgccgggagccgccggggtcctcctccttctgctgctctccggaggcctcgggggcgtacaggcgcagcggccgcagcagcagcggcagtcacaggcacatcagcaaagaggtacagtcgaggcatgggcttgggttgcatcctttgccgggaccgagattcctcacttcttccactcttccgagagttgctgtctgtggactgccgtcttgcttcgccttcagagagtgcgctctggggcaagaggaacttgaagcaagttcaagttcaatgccatgagagcgtagtgtagggggaattacctaagtcctgcaaaaggaacggggagtgcttttcattgttctttagtttcgaagaggtcttgctatcacgatacatcccgtaaattgatttctgaaatctttccaagaggaaaactttttccaattggaaaaaaaagaatttcttcaaatcagagcccatcctgcagagaaaggcttcccaagctgtgtggttcatcctgggactttatggagggtagctgatgcatcaaaaaaaaattatatatatatatatacacacacacacacacacacacacacacacacacatatatatatatataaagttttacagaactttgttttcaacttttaaaacaggatttctaaagaagttatgtggttttttttctttcatggcaatggcgcctccagcctcacctttttcaaacccacatcttatcttcatatcctattttattgtagtgaaatcgtgaaatttctccttttgcttaaatacagaggagacttctatgtcatgtgtactttaaggccacagtgactagatatacactttggaggactttggaagatggctgtatttaatgtaacttaaataacttattctcctcagagcctcttagtgtttatgtatatatagctctcatttctgaaactttggggagtctttgaagagttattttattatcatgaattttacaggaagcacatgtgcagcattgtaagacatactttgtaacacattatttcagcaaacaattctttaagttggaaaacctgtatcaaagtaaaaaaaaaagaaatatttattattcggttttaaatatgaaaatgtttaacctaagagtacaaaatctgtaggttagaagcttttaaaagttttaatgaggctgaatctgcttaagttttgaagtatacttatccttcttccagttaacttctagccaagtcaatagttctgatatttgttcttataatctagcatttttagcagtactattttttaaggagtaaagagatatcccaagctctttctataataataactccctgattaaaattcttggaataaaaatgaccttgcattcactatataacttttttccttctatttttgcttttgcttctctgagaggtaaaatggggccaatatgacttaattaatataatttacgagagtgattttaagagtatctctggccacttatttttaaaaattctacttttaactattaaactttgctcaattacaaggtgtgtttaaacaagacataatactttaataatgttaggcagctgggagaaatgaggggccaggggcaccaatccttatgtccacttggaatggggcagaaactcaaagcatgcagagtaaggatcaagtaaattgttgctaagaattatcctgaacacacacaggatttctcttttttcctctcccttcttatttactctcttttcaaataaggtaatattaactctgatttctatgacccaggcacaagatgaagtgaattcaggaggaagggtttatactaccattctgtcaagataccacttaaatgctacatacaataaggaattttattcaaaatagctacaacatacaatctactataggctgctataatctgcattctagtatatattattgtctttgtcatagaccatttacaatatatctggaggttggctcaaggataaatgacttaaacctgttaatgttgaaagtatgtaaaattcatgaaactttaaaattggatagtgatttatgatttaaaaatgccttatgtacacgatctttattcaccttcagatattattattctcaaaggacaaatttagaacttaggcttccagtagttgtaatttaagtttacataataataactttatttcaacaactaaaacacttccggtattgtttgtgctgaattcccttttttatggttccaaggtttctttccattaattgtttaggccatgttttctttttagtgttgttccattgaagcaagccctctgtgaaaatcacgggatatgagtttgactggagaagggttttcctggctatgatcaacttttctgttttcgattatactagcactgacctttctaggcaagcgctaattgtgtagaagttctatttccccttataattcgataccactttattaagaatttttgacatgaatcaaccatttttagatgttgcagttgagttagaaacataaccagactttttgttttttactttttctttgaaatcttatgtggtttctatagcatactcgattgtagtatgaatagcattgattcagcaagaatgatattccaaggaaattctttagctatatttaaaattgacgaaatagaatgatgcaatcaaaatgattctgcatttcagcaaggcagtgtctaaaatgttttctgatattcttgtgaataatatgtggaaactgaagcataatggcaggtaaattgcaactgattgaaaaatagttcacaaagaatattgcatagtggattaaggtcaatccggaaagaagtctctagcagtgcaacagaggttttcttatactcaactatcttggtaatggcttgatggaaaatgtaaaatccaagcttatcagaactgcatgtggtccaaaattgatagaggtggctaagctggttactaacaagttcagaaattttaaaggtctctatagccttgaccatgaatggcacctacatgaagttgcttttattattcatatccacatgttaaaaaaaaaaagtccatttgtgctcttctggaaattagttacattgtttatatgtttaggaatgaatatgaagacaggaagagaaaggccactctgaattgcagcaagttcgatatgaacatatagtgtaatatggtgacaaaaaaggttggctcacttttacacaaaactcatagaagcacataggtctgttgcttaacacacatttgggtatttcattgacaaatgggtgtagatgcagagaagggagagcagaatggttaagagtctgagaagattttcagaagaggaatgtcccaagtaaaatctttccatctgaacaaggaaagatttagggaaggcaatcataaggactgtcctcaaattttcagaagagtcgttatgttaaagagggactattctaaaggctgaaggtggatccatagaagaacatgacaaacaaccaggtttgaattttataatatggagaaaatagctcctctcctcacttcctccccatgccattttgagttgttcagaaatagctgaattgtgtttgagcaacttgcttctggaaatgaccatgcagtgatcagatgtacagttagtgagggatgctttatgagggaatgcctctactgagaggaagttaagactcatcaactgtctagccatttgtcagttctaagattctaatattatagtctattgcttttagagtgcatacttgcatttaaatttctgaattcttaaaatgtcaagaaaatgttaaatatataaaaatgtgtttttaaatcccttctgggatttaaaataaaaacatgtttgagacaatcctcacacatttttggcaagaatacttagatatttagcatggattttccacatcatcgtcaattgcacagttctaaaacatcttgtgttataacacgcaagaatactttataaattacctgagaaattttcaggggattcatagtggccataaacctggaattaatttttttaaatatttttctttgctgcatatgttaactttttggcttgtttgccatatactgacctaatcatttagtaaaaatgattcataacagataaaatgcatggcatttcaacatattcaaaatatttatatgaacatattcaacactgaatattatagatgtgatagaattaataaaatttatataaattttatattatgttatatttcacatatcaatgtgtacagatttctggtctatcttaagatttttctaccctaggatttcatgcaaactaatgaactgaatctatatcaagggatgctgggggctgggcaaggtggctcactcctgtaatcgcagcactttgggaggcctaggtgggtggatcaccttaggtcaggagttcaagaccagcctgaccaacataacggaaaccgtgtctctactaaaaatacaaaaattagccaggcgtggtggcatgtgcctgtaatcccagctactcaggaggctgaggcaggagaatcacttgaaccctggaggcagaggttgcagtgagccgagatcgtgtcattgcactccagcctgggcaacagagggagactctatctcaaacaaaacaaaacaaaacaaaacaaaaatttaaaaagatttgcaacttatcatctatccagtttgcagtagggccttatttagcatctagaaaccatgtgaaaaagatcaggaagaaattattgtaaataattattgtaaatggttgcacaagtggtttaacttctaatctagaagattcgggtttaggatttgtttacagttgcaacttgagcctcgatagctaaacaggaatttaggcagaagctccgtttcagtaaatgagaaaacaagacagagtttagagaaagataaaagtagattttccaggcttagtatataccaagcagatagaaataaaactaattctaggctttccccattggtaagactgaatttagaggtcagaagttgtgaaggaaattggtggggttgggcctatatgcattggaatgtggtaaatgaatgaatgtttacagtgagtaaagaagataaaaaaattcctgctcttgtggaactaatatttagttgggatggagatgagcagacaggactatgatgaatatatgatgaagcaacaaaagaacacctatattgtataaaatgtagttgatgaaaaatgtcctggacaaacaaatacaacggggtaaggacagtcaggagttctaggaatggagggaggttgatggctattttgttggtaaaggttggtaaaggttgacctctttgagaggatctcactttggcaaacacttgaagatgacgtgggagtgatttgtgcagttatcagggggaagagtactctctgtacagggagcaggcctatgaggatctaagcttggagcatggtgagaaggctcagaggagaaatgggaaactggaacacatagcattgttgaccttaattttaaagattttgcctttttgtctgagtgagatgaggaggcatcggtgagttttaacagagttaaataaatgaataaaatcacaggtttttttgtctcaaatacgcactaatccatgggactagaccaacagtccaagcatagaattattttagatttatctcttgtcccaaacactccactgatagaacacatttaagtgattctacattcaagagcattccacttcaaccatcttatcatggtgaagctcagatgtgtctttgtaacactcttttcttccctttggcaactcagtgctattccattattcaaaatatatcagtacctcagaaacaatttgtgtgcagggaacttccgcagcttttaaaaattttgctccagtgtagttagaaatatgacagatttttaagggtaattttaaatagtatgcactttaaaacaaaaatgaattattcacaatcccacatggacatataggtactttggagttcccttttttattatctatttcaatctcagacgctaaagtttagacacaattgttgaaaatgacatagtgatgtattgatctgatgatttcttttatgatatgaaatttgaaatgctacctgttttacattcagaaacttattctatgttctgtttccatttttgttactgttttaagaatcacttgtaagctttaacaataacgttttggactatagtaatgcaattttggcctaatttaattctgtcatttagaacaaaaaaggtaaaaaaattggatagcttttccttctctctccctctcttctctttctcccttcctttcttccttcctccctttctttattttccttttcccttagtattcttcctgtgaataaaataaggtaattaaaatagataattctaacaaatataacatttaggaagatagtaaggcaaaactttacttaaatcttccttattaaaagccacaggtaattactatctaaagatagtttgagacatattttcagggtgagttaaagctaaagacatttgcttgtcaaagatgtataatatgggtttaaaaatgtttttctcctaagtaatcttgagtgtggatcttaatatgggaactttatgctatttggattttatttggacacgtgacatttacaaaagatcattgaggattgcctattaatgggttattattcataatatcggcctctgtgacatgcctaatctagttcaaacaacaagttaatctatgcaaattcctgatgatgaaaacctcaggagctatttagtgcctggcacttaggaaatgtaccttgtgcaatgttaagtatgtctctgtatgtgtagtccactcaactgacccccgaactgtgtacctccccaaggctcttcatttagctgcgtcttgagtgccagatggtttagattggtataataatatgtagtgcattgtgagcattaacacatttacttacgtagcagagctgtttagtagattaatataattatcctcagtttgtagaaggaaaatatgcccagcaacttgtcaaggacaaacaaaaattccaatgcttattttagaattagaaattaaattacggtcctgctcttgactttgtagatgctaactatcacctcttttggacttttatatatttatctttcataaaataccctgaggaaaaaaaaatccatttctaagttatgttagtctatcatatccagagattcatttggtattatggaagaacaaaaaataaaatgtgtagtcttgaagggtctttttcatttaaatacacacacacacacacacacacacacatgctgcttattactatgtagacatatacacacatgtattacttaaaactatgcattaattcaaatgcattcatcaaattttagtgtttacattcttggaactttgattactggacactaggctataagaaaatattaattgattctttattggcttttctgaagtaactttacagaagttacttcagcaagctagaaacaacggtatttattatactgtataatgaaccctttaagaatagtcaatgtgtaaatgtcagtgaatgaaaagaacaagaaccaaacagatatacctaagaatcagagcaagattaatctcaaaattccttctgaaaagatgaaaaaccttgacatcttcataaaaacatttaaagactttcatttgaagttgaactcagttaagacaaaagtcttccaatctcccagattttgagagggtgtatttgtgtatgtatgtgattgcagcaccagtgcacatgtaccatttacagcctagcactcacaggacctaatttgtatatttagtatgttttctgtttgatttttgttgtcttaaggtattagattttgtttatcaaaatctttgaataagaaaatctaaaaattgaatttctagaaaactctagttgccttgacaaatgattatggaccaaagaataaattataaatgagacaattataatattccatccagtagctatactgttaaaattccaaggtataatccctttcgagttgcttgtaacttagaaggtcctattctatagaagaaatagagttagtagagtttgctgcatcaaatatattttttcaaatgcctacatattatagttgacacaatttcctggctttattgccttctgtgcaattttcaattattggatgaggctgaaagtttgaaagagaatatgaagcagtgcaattgtcatttcagtgagctacctcatctcattggtttgtcgtggtacatatgtaaaacactgaatataaaacatgaaacatctagtaaggcctcaataaatgttcattttcaaaatgcctcaaaaaatgaattaaacctaacaacctaacatgacattctctggctgaaagaaacactcttctccaacatcatgtggtataccaaattcagttgagactgtttgtgaaggaaggaatttgcttatatacttaaacacacaagtatttgaattctaattagaatttgtgctgcagtatttctttattctcaactttatagcttagcctacaataaaaactcttatcaatacgtacctctttatacctttagtttccacatacagtactcttctttggaggtaactgaatcgtagaaaacgtatggacttaggagaaggctagactcggatccatagccaagtcaccactttactaagatcaaaagcctgagtcaacggagttaaattttctattcgtaagataggtttaggttagataataaatgtgaaaatacttgccagctaatcagtaaatactagctcttttcttctttattttatgagcataaaactaaaaaaaaagatttgctttgcatatagcatatcctttttgcttaagaacagcaaaatattctaaaaatttctttgaggagaccctaagagactatagatggcaaactatttatctcattgccaagagattgaataattctgtcgaggttacacagcaagtcagtaacagagataagaagaaacacaagttcctataattagctaacagttatgttagtagctctgtgtgagaagtgatttaaaacaggcaacatgatggaaatttttgcaataatttgtagttattcatacttcaaatgtggtacaataaacgttttttctaggaatctcattgttgaatatgtatttattttgttgataaactattttttaaaaacttctttaatacttataatatgtttagataaatatatggcatatagtaagcacttcataaaggttagttattattcttagtctatgaagtatatgttttcattgacatctgcttgggtagagatgacaatgtggcgtgtttgacacacaatgtaagttaatttcagcatggccttcagtggaaagtctaattggattgcagaaaatctctcaatatagattgtctttatttggactctccctaattactatagtaaaaaaaattcttggaatacattatttaatacaactctggatagggaggattcttagtgtgtctacttgtgtattaaatttttagtgtgtctattttgtattaaatctactattaaaaaaaccaccaaaaaacaaaaccaaaaaacctacttcagaaaatcatatagtactctaacaaatctctagagaaaactgcttttctaaacttgggaacgctggattttgaaaatatttcagacaaaacacttcttaaaggcccgtttaccatcaaaaagtttcaatcttgcctaacacataatgtgcaaatattcattttttcattctgatacattagaaaagtcactggatttgtaattggaattccaaaatataaattttccctctagctcttcctaaagagattaccttaaacatggataagtcacttaactattctgaaattcaattttccatctaaaaaatgacaatgtaatgttcgaatctatttcatggggttgttataagggttaaataaggcagaccatacaaataccattattaatactatttgttattataataaatgacagagttggtcttaggcatcattggttatgaagttttgctccaccccctttctttgttttttttccccagtggctcctaaccatttgttattaattaataatgttatgtattaatatacatatatgtattaataatgttgttaataatgttatgtattaatatacttagttctcctgttttcaaggacccatgacacatagctttcaaacatggcacaaattatttgtttagtaaacatatacatactactgcataagaagaaaatatggtatctgaaagtgtacatcagcttcctacaaacaagtagcaaagagtaagtattcagtgaaattataaaactatcataaaaatagcctaagggctctgaaacattctatgtcaagattcctttttatcctcttaaaaataattgaaactttgatttatggtatatctactatttgattgtattaaaattaaaattgggaaatttaaaaatgtttactaattaatttaaaataccagtaataaaacaattacatgttgacaaaaagaacataactttatgaaaaataattttatatccaaaataaaactcttcaatgtctggcttaatagaagagaactggattctcatttctgcctctgcgttcaaattattacatgttattttagtttaaattattttggtttaagcatattaagaaatatataacaacaaacatagataagctattggaaaaaagaggagtctgtcagtgccttttaagatagctgtaaatattctttgattctataccaaaactcagtaagtggtagttttcaaaagattggctgcagtgtggtatctgaaactgcatcaacgatatttttgtacgcttttatattaaaatctacggatctatcttacacctggaaagaattttacccatgtgtgatgttatagtatcattcatagatcatttggaagatactgatttactagttatgcagatcagccacaacttgacagattttcttataaaatattttaattacattttttatgactattgatctcaccagaaaagtccctaaatattagaagctgttaatctcacaatggtagagacaaatttttcagaatttttattttcatttgtaagtttctgtagttattgacaaattttgttatttttcttgaaatagttactttattcattcttaagaaaatgtttatcaaacaaatgagtcttaaaaaccatagttagatcctttttgtagtacatagggtattccacgaaaaaagtggctagtttagcttgcagctgaaaacaactgtacaaatgcttttcctcaaatcaaccatcatgcttcagtatacagttgatgttaaaaagatgtacccaagatttaataaatttaatcattgttactacttcatcaagtacattcatctgtgaaactagttgtttttttcttctgggagtgtgtggtggtgaaaactaaactgaccactagcatggtttagtacccctgccttgatttgtgctaatgtaccatcagtgtttcccaccactattgcttttgcaccatcagtgcacatgtcaacacaatgaaaaggcagataataattaaatcttgttactaaaaggatttttgaacttgtgtacctatggataatgtattgtggactcccagggattcacagatctttctttgagctctacagggttggactacagttaagttcctcactgcctgcctcttcaccaattctacaaaatctatagccatatgaaggtaaattttgcaatcagaaaaagccaaaaccacttcagtttttacctcaggtctagtctaggagagtgataccatttctttttaagggggaagaaatccagaaaagcttcttctgtggaaaaagcaggaagtgttaaaaccagccagacatacatatagaaatcaaaatctctgccatatcatctgcccttcttaatttcctttcacttgcccaaactatagtagagatagtgtacttacccacagttggacatatgatgttattcctaatagacttaaaaagtgaactcatggcggggcgcggtggctcacgcctgtaatcccagcactttgggaggccggggcgggtggatcacgaggtcaggagatcgagaccatcctggctaacatggtgaaaccctgtctctactaaaaaaaaaaaaaaaaaaaaaaagcaaaaattagccgggcgtggtggcgggcgcttgtagtgccaggtactctggaggctgaggcaggagaatggcgtgaatccgggaggaggagcttgcagtgagccgagattgcgccactgcactccagcttgggcaacagagcgagactccgtgaactcatgagcaaggtttagtacaaaggaaacatactaatatctgtaattctgaatattagcagaagagatttttattccttgctgagctcctgaactcacatcaggaggggtcctttgttcttttcatagaaagaattcctgttggaagcactggatatcgtatttctcaaaatatggaatttccttcatttatttctagcctttgaagttttgtgatttctaaagcatttaaaaggttttgtaatgttgagaacctaaaacgtgattcttttctctgtgcccatctcataccattgtatgtgtgtcatatgatggatctggtttctttttcttatttgttgggagatgtccagagactcaaggatctatcctttgaccaaatttttcactcttcaagggcctcatactgctctgatttcagatgtatagatatattgcttatcaaacactgatgggtctgaacatgagtggtagtaagatatttccagattaagtagacaaattgtgcagaactttttagtatcactatttaaatgactaaatttttgaggtttatgtgtatccagcccaatatgtcctctccttatctagtataatttatctttaaaaattagactggcttggcatatgtcagattttgtatttaacagactttttatatatttctttgttaggaggtgttcaatgttagacaaagtgaacagattactttggaatccatgtcctggtcctgctgaataacatgtcctcaccctccttccatttttttttttttctgccatacacattccagtaacactgaaagagttaattgatgtgtcccatctttattgcttttgtaaatagctatagatacactttatatgtagataatggtatgttttaaaattctgcaaaaatagcttttcaattctctttattctctttctcaagctttgataaaatatttttcattcaacttttagggactgattttctccatagagttcctgatgtggtgctactggagtgatgctgagaaaacattattctaaatgttttttagaaacattttttagaaaacatcattcacccagaatctgaaattttatctttatttatttattcctttggataaaacattgccctcacaggctattcttttctaaaatgtttgctgtgctgttattattcactttaatggaaattaatttatctgctgacctcctttttgacagtttaggactgtattaagttttcagatctgctcggtgagaaatagtgaaataaaactagttaacatctatggaatacctaactatgggccagcactgctgtaagcatgtctcatgccttaatttatcaaaggtagatgctattaatctcatttaacagaagagaaaactgaaatgcaaaatgttaagtaactttccaaaagtaaaacaaccagtgaactggtagagaccaagatttggacctaggtagttctactttgtggcccattcacctacccatggcagcgtgtgacctcaaccctgaaagagtacaaattagtaagtaaagggcttcctttagtgacatacttcagaggtgattttatttcccttttttgtgagatttcctatgaaaagattaacaatttaaacaatatttgccatttagattcagcactatgtcctgatatatcagaagagtctatgaactttttttttttaaagactccttggagatagcaatgaatgaattcttaactgtgtcaggcatgcctgaattttttgagtcatataagagtttgtagcactcctagaattgttaacttaattggtaagaatgtgctttttttctctttgttgttgtatgaagtgttaaaccaaaaataatcaaggcccagggcttttcctggtccattaatggatatatgacaagtgatggcaaaaggatagttacagttattaacttaatcattaattggctcagggtatccccaaaaccgcagttggaactgaagtgctacaaaaatgaccattttgttgttatagcttttcttcacataaggaaataaataagcaaaaagagggagtgtcttatctatttgttgatcaaagatcttgtaattctgcttatggtaactcccagagtagagaatatcatccagttggccccctttatgaacttggattgcaatggaagtcctatcggccagtttactagttaacaggagctgtagtactagagctatgactgcatcagaagtccagcagtgtgggcacaaagcagcgcagcacttttgaagttagacatcgagagtttgagtcctagattcacaccttgctggctgagtgctgttgcaatagtgctgttgagtgagttatttaacttctttaaacctgatcatcctcacctttaagagaatgaaaatagtagtgcctttttaaggattaaatggaattaagtatttaatttgtattcagaagaggatggaatcatcattcaaagactttacaatcagtggtgttttcagcatggacaactggagctttaacttaaaagatctagaaactgggcttgttggccacagttttagtgtgattagaggtggtcatagggtagtcaaagttgccactatcctggttatggatggtaatagaactgcctatttatttgatgtcttcacttagttgtctcctaggtccttcacagcgaacatttgccaggattgaacataggtactctgcatttcctcaactcttttcccatcagcttttcccaactcagaaaatggtaccatcattcaccccttgaatcaaatttgacatctagaagttactattaacttctctctttccttcacctcccagattgaaataatcagcatgtctgtcatccacaccaccagagtttattccataaatatccacatctttttgtccctattgccttctagaccacagcactctttttttgcctatgcaacttcagcagcctcccagctgctctcccttcttttctcttttccattttacaatcaattttccatgcaataggcaaagtgaactctgaaaatagtaaatcagattagatctttcctctgcttaaaacctttcaatgcatttctattataagaataaattctaaattcattagattttaagtctattcatgacagctcttgtatttttctctgatttcaaattattctctttttctgttatttaccagcaacagtaaagactttttttccgtctcaaggcctttgtccttgctgttcctctgtccagagcattgttccattagatccctgatggctgtctccttctcaatattccaatctcatgtcaaatgtcacctcttacagaggcctttccagaggaccactttaaattagcttctgtcaggcactcatctccctgttgtaatttctttgaacaattaaatgtttatcttgaatacccttgtttatttacttttcttctttgttgtttgtctccccagactgttggaatataaattttgttataaaatggccttcatctccagagctgaggagatacataaatattttttattttgaattaacacatggctgtgttcaggctcttctgaatgtaattccatggaggaggtcaaaattggattcctgtatgtagtgaatctgtcccgtttatgattttcagttatataattagttagaagaccaatccaatcatatttcagataaacctcaagagcaattgctatggcagagaactagaagggtatttaatcaactagttccttttccaagatctttagctctttaacagttataaattaataaagtatgttatataatgctaggactttttgtctttcattgtttctgttgctttatctccagcttctagtctgacatatggtaggcactcaaaaattggatgaagaagcagctctttttggacagaccaagagtgttgccttttaaaacattttatgtgtactttttccccctgatccttttatagtatgaatgaatgtttgtataagacataaatttctacaaatactgaaacacagtatggacagatatgagttattattattaatatcacctagataatagataaaatattttagaaagtgaggctaccttaaattatcttgcttcttgagttttttttttcccctctaaggatattccagtaagagttgagcagtatttaagctttggataaggaatgcatatttcttggcttagtcagaacttttctggatggaaggtctttttggatgagaattatactacataagattaaaatgcccatttaagatgtaaattatagggataaaatatagataactcacatggggtgatttgattggcatctgttttcatttttctttgtttctttttagataccaccaaagtccttcctatttcaggcaaaaagatatgttttaaaaaccactcacaaggcctctacaatatgtcagataatgcatgtgcgtgaatgtccttggatgtgtatggtctcttgcttgaagttatcagccagcaaaatggtgaaatacttagaattaatcaaacatctggaggtcaagaaacgcagtacctatattcttctccttactttaagaatgaaactaataaaaaataaggcggagctggcccttcagcaaaggagggatttttattatatgagtgaatttgagagaaagggggacaagaaaagacctttgagatcagggcccaggtctgttttgttactactgtatccttactgcatagcacagtgcctggcacctagcatggtcacagtaaagattgaatgatagaaaaatagaaaaggaagagctaacttttaggaaggaacacttacttcccacttacagttattgaaaaaactatgaagatggttaacatcatgatactgtcggatgtaggcagttacaatttctactcaacgatagaaaaaagaactaaagagaatttaccaggacatgaaagaaaggtgtaagatcatggattcctgaaacaggatgttccaattaaatatttaaatttaagtgaggattgtaggagtttaacagctatttaaaatacgccctgctgctttccttcctaggttctccacaccttcaaagctcatcacttggataagattgcctctttactttttccaaatcaatctggttcatccattttttgcaaaaatgaaaactcccctctttcactaaggtatttgagccatcaagaacaccctcctgtctaggcatggtggctcacagctataatcccagctctttggaaggccaaggcaggaggatggcttgaggccaggagttcaagaccagcttaggcaaaatagtgagatccctgcctctacaaaaataaaatgaaaaaattagctgcgtgtggtggcacatgccagtggtcccagctactcaggaggctgagatgggaagattacttgaacccgggaggtcgaggctgcagtgacccatgatcacaccactgcactttagcctgggcaacagagcaagaccttatctaggaacaataaaaaattcattattcattatttgatccaaaacaaaaacatgttatagactatctatagattcaattttcaaaaatcctatgcttctcatctctaaatattgttataatactgcaattttcaaattagctttcacctttaagaaatgctactttccatattggaatgaataattaatatagaaccaaaatgcatgtctgggatttagaaaatcttgggattctgtttccatccttgcttattttttattaagctaagtcattcattttaagaaatgatcccctttaccccaactatagaggtatatactaccttatatactaccatacttaaaaggttagtgaagaggcatagaaagagtagtgaaacagtgaaaccttctagatgccagatgctatacaaatgtgaagcatatgacaccagcatggtgaaaaaggaagctaattaagaccatcagatagtatttgattttatctctccatagaaatcatgataactatgttacatagttactgaaatttagacattaagtttgtggaatctctctgacagttatattagctaatcactaaacagaaattttaaaagaagtatttaatattaattctcaagtcttaggagaatatttagctaataattctacagttgactgcagagtttattcattatttaattcataatgtcttttcaatcactttactgtttcttgattcatgaagaatacatgccaagtgtattagtctgttctcacactgctgtaaagaactggccaagactgggcaatttacaaagaggtttaattgactcagttccacctggctggggaggcctcaggaaacttacaatcatgacagaagggaaagcaaacacattcttcttcatgatgtcaggaaggagaagtgcagagcgaagtgggggaaaagccccttataaaaccatcagacctcatgagactactcactatcctgagaacagcatgggggaatcactctcatgatctaatcaccttccaggaggtccctcccccaacacatggggattacaatttggattacaattcaagatgagattttgtgaggacactgagccagaccatatcactaagagaataaaaatggacacagaatgccactttcctattccctttaaatatttccagttgaaagtatttccatgacctagtgagttcttagagaattcaatcactattgatgtcccaactggtataataaaagaagaaaacacataattttgagacaaattccacctttctcacactctcagcatataaacacataatcgaagcaagaaaaatgagaaaaaatcaaatatataatatgatgaagaattttacactattcattatgacatgtggggccaaagtgacaaaagtaattggacaaaggtagactcagcaatgaggacttggaagaaatgagctttcagtcccattttaaagtagaagagaaggtagggtatcaaaagtagggtgcgctacgcaaagtggagggtgtttttgttgttgttgtttttagagacagggtctccctctgtcacccatctttgcccactgcagccttgaactactgggctcaagtgatcctcctgcctcagtctccctcagtgctgggattacaaatgtgagctacccaacacccaatgttttcttgattgtaaaagaaaattgatggtttctcatgttcaccagagggaaacatccattcattttatcaatgtgtttaaaataattcttactccttctttcactttaaagtgtttaactcatttttgcattctattcataaatatgaccagtcacaacttagaatatgtatactgtattatttcatattaacacacacattttgttcttctataatagatttgtgtatggtttcatatattagagtgttaaatattgaatttattgtaatttacttagtgaaatactgatgttaacatctagtatgtttatttgagggatataggaggcttacagtgaaatcatcctttcaccaagatttctttgtaagacactgttactggaattgtgctttgtgcattacatttcattgacgtaattttaaacttccattctacttcactacaaatggaatttcattatatctgactccacaataagtgggttccagaatcgttgacatttagtagaattacagatcttagtgtctttgtacattctgtattaaaatgcattatgtgtgctttcaattctgttttaaagaaattgccattgatttacatggttgtatggaagagttttgtttaaatgccattgcctgatttcctggtggcttttattttccttctgaaatcatttacaaatatttcttagggtattggctactgttggtttgaaatgagatacaacttatggattataaatatgtttgtgcaaattttctctagcagtaattctaaaacctttgtggacattaagctgtaattgtagctttctcttgcaagcttctttatcctctgctttattattcccttgtaggaaattaagtattttatataataatgcttagaacatctttctcttttaaagagggaaattaagataaagagcttggcaaatataggatctttcctggattgtatgtttctgagatttggtgacagagcgtctgctgtggaggatggggaaggacggatctgggctgaagaagtagacagagacagtggactttggttttaagaggcctgctgctgggatcttctcacccatccctagcagagctcagaagtaggcatccagctgcaggtaattgtgttttgggctcaaaggagcccttagagtgccagacctaaagaggcaactcccgataagagtttcaatagttttatccattctagaaccgccatttccttaagagtctgaggcccagggaccaacgcccaggacatatatacactttgataggaggaacatttcaaattcatccaggtcaagatcactcactaggtcttgtgcacctcctccgcctcttttctgtctggagttagtaaccacctcaaaagacagctttctgactcgtcattataccacctacagtcttacttttagcttggtttgagggtgtcctgttcattacttacagaaacagatttggagtgtgaatgcccttaacaccagttttaataagcatttttaattctacaataatgtgattcagagaatttttttttcctttgtctctatctccctagatagaaatatgtggaggttggatttcctgctgagtttctttatttttttcctttcttttttttttttttttttttaagatggagtctcaccctgttgcccaggctggagtgcaatggcgtgatcttggctcactgcaacctccgcctcccgggttcaagtgattctcctgcctcagcctcctgagtagctgggattacaggcgagcgccaccatgcctggctaatttattcttgtatttttagtagggatggggtttcactatgttggccaggctggtctcgaactcatgaccttgtgatctgcctgccttggcctcccaaagttctgggattacaggtgtgaaccacagtgcccagccttcctgctgagtttcttagcattattgccaggtcggaacttaggcatagtaacatgaaacatgttctgcatctgaaggccagaatataataagcattgttaatttagttaaaggaaaaggctgctgttgaaggttagacttcttgtgtatgtgtgggagataacagaataacgtctcttttccaagatgcatatggttttcttttgcttatgtgccaattttaatcaatggagaaattaatatgttaaatgaaataattaaccattttataattttagtcggatattggttgaccagtacttatatgatggtataaagttctagaaactggataactttaaaaatctttccatataatgcattatattctgggtcatagtttcctatattataactgctaaacaacataaaccaattttattttcaaaatcaatctttggggtaacttctacttagagccctgacctaataaatgatgtacgtgtttatttctgacacgtattttgataatcatttagattagtcttatttatgtggatatgtgtaataaaatttctttggaaaatatggtttattgagtttaaacctcttacctccatttcactttcctaaattttaactatttttttctgttccattgcaggcatagtaccaattctgtgtcaggcattttattcactttgtttcaactgttcttgagatcccggaggattaggactattgcagttataagtctataactgaggaaaggaagcttatctggacaggaagatatttagagtatgatataaagacagtctctttttaaaaacagcattttaaaggtataatttcttttttgtttgtttttttcgtttttttattttttatttttatttttttcttttattattatactttaagttttagggtacatgtgcacattgtgcaggttagttacatatgtatacatgtgccatgctggtgcgctgcacccactaactcgtcatctagcattaggtatatctcccaatgctatccctccccactccccccaccccacaacagtccccagagtgtgatgttccccttcctgtgtccatgtgatctcattgttcaattcccacctatgattgagaacatgcggtgtttggttttttattcttgtgatagtttgctgagaatgatgatttccaatttcatccatgtccctacaaaggacatgaactcatcattttttatggctgcatagtattccatggtgtatatgtgccacattttcttaatccagtctatcgttgttggacatttgggttggttccaagtctttgctattgtgaatagtgccgcaataaacatatgtgtgcatgtgtctttatagcagcatgatttatagtcctttgggtatatacccagtaatgggatggctgggtcaaatggtatttctagttctagatccctgaggaatcgccacactgacttccacaatggttgaactagtttacagtcccaccaacagtgtaaaagtgttcctatttctccacatcctctccagcacctgttgtttcctgactttttaatgactgccattctaactggtgtgagatggtatctcattgtggttttgatttgcatttctctgatggccagtgatgatgagcattttttcatgtgttttttggctgcataaatgtcttcttttgagaagtgtctgttcatgtccttcgcccactttttgatggggttgtttgtttttttcttgtaaatttgtttgagttcattgtagattctggatattagccctttgtcagatgagtaggttgcgaaaattttctcccattttgtaggttgcctgttcactctgatggtagtttcttttgctgcacagaagctctttagtttaattagatcccatttgtccattttggcttttgttgccattgcttttggtgttttagacatgaagtccttacccatgcctatgtcctgaatggtactgcctaggttttcttctagggtttttatggttttaggtctaacgtttaagtctttaatccatcttgaattgatttttgtataaggtgtaaggaagggatccagtttcagctttctacatatggctagccagtttccccagcaccatttattaaatagggaatcctttccccattgcttgtttttctcaggtttgtcaaagatcagatagttgtagatatgcagtgttatttctgagggctctgttctgttccattgatctatatctctgttttggtaccagtaccatgctgttttggttactgtagacttgtagtatagtttgaagtcaggtagtgtgatgcctccagctttgttcttttggcttaggattgacttggcgatgcgggctcttttttggttccatatgaactttaaagtagttttttccaattctgtgaagaaaggcattggtagcttgatggggatggcattgaatctgtaaattaccttgggcagtatggccattttcacgatattgattcttcctacccatgagcatggaatgttcttccatttgtttgtatcctcttttatttccttgagcagtggtttgtagttctccttgaagaggtccttcacatcccttgtaagttggattcctaggtattttattctctttgaagcaattgtgaatgggagttcactcatgatttggctctgtttgtctgttgttggtgtataagaatgcttgtgatttttgcacattgattttgtatcctgagactttgctgaagttgcttatcagcttaaggagattttggactgagacaatggggttttctagatatacaatcatgtcgtctgcaaagagggacaatttgacttcctcttttcctaattgaataccctttatttccttctcctgcctaattgccctggccagaacttccaacactatattgaataggagtggtgagagagggcatccctgtcttgtgccagttttcaaagggaatgcttccagtttttgccaattcagtatgatattcgctgtgggtttgtcatagatagctcttattattttgaaatatgtcccatcaatacctaatttattgagagtttttagcatgaagtgtggttgaattttgtcaacggccttttctgcatctattgagataatcatgtggtttttgtctttggccctgtttatatgctggattacatttactgatttgcgtatattgaaccagccttgcatcccagggatgaagcccacttgatcatggtggataagctttttgatgtgctgctggatttgttttgccagtattttattgaggatttttgcatcaatgttcatcaaggatattggtctaaaattctcttttttggttgtgtctctgcctggctttggtatcagaatgatgctggcctcataaaatgagttagggaggattccctctttttctattgattggaatagtttcagaaggaatggtaccagttcctccttgtacctctggtagaattcggctgtgaatccatctggtcctggactctttttggttggtaagctattgattattgtcacaatttcagatcctgttatttgtctattcagagattcaacttcttcctggtttagtcttgggagagtgtatgtgtcgaggaatttatccatttcttctagattttctagtttatttgcgtagaggtgtttatagtattctctgatggtagtttgtatttctgtgggatcggtggtgatatcccctttatcattttttattgcgtctatttgattcttctctctttttttctttattagtcttgctagcggtctatcaattttgttgatcctttcaaaaaaccagctcctggattcattaattttttgaagggttttttgtgtctctatttccttcagttctgctctgattttagttatttcttgccttctgctagcttttgaatgtgtttgctcttgcttttctagttcttttaattgtgatgttagggtgtcaattttggatctttcctgctgtctcttgtgggcatttagtgctataaatttccctctacacactgctttgaatgtgtcccagagattctggtatgttgtgtctttgttcttgtcggtttcaaagaacatctttatttctgccttcatttcgttatgtacccagtagtcattcaggagcaggttgttcagtttccatgtagttgagcagttttgagtgagattcttaatcctgagttctagtttgattgcactgtggtctgagagatagtttgttataatttctgttcttttacatttgctgaggagagctttacttccaagtatgtggtcaattttggaataggtgtggtgtggtgctgaaaaaaatgtatattctgttgatttggggtggagagttctgtagatgtctatcaggtccgcttggtgcagagctgagttcaattcctgggtatccttgttgactttctgtctcgttgatctgtctagtgttgacagtggggtattaaagtctcccattattaatgtgtgggagtctaagtctctttgtaggtcactcaggacttgctttatgaatctgggtgctcctgtgttgggtgcgtatatatttaggttagttagctcttcttgttgaattgatccctttaccattatgtaatggccttctttgtctcttttgatctttgttggtttaaaatctgttttatcagagactaggattgcaacccctgcctttttttgttttccatttgcttggtagatcttcctccatccttttattttgagcctatgtgtgtctctgcacgtgagatgggtttcctgaatacagcacactgatgggtcttgactctttatccaatttgccagtctgtgtcttttaattggagcatttagtccatttacatttaaagttaatattgttatgtgtgaatttgatcctgtcatgatgatgttagctggttattttgctcgttagttgatgcagtttcttcctagtctcgatggtctttacattttggcatgattttgcagtggcttgtactggttgttcctttccatgtttagtgcttccttcaggagctcttttagggcaggcctggtggtgacaaaatctctcagcatttgcttgtctgtaaagtattttatttctccttcgcttatgaagcttagtttggctggatatgaaattctgggttgaaaattcttttctttaagaatgttgaatattggcccccactctcttctggcttgtagggtttctgccgagagatctgctgttagtctgatgggcttcccttccagggtaacccgtgctttctctctggctgcccttaacattttttccttcatttcaactttggtgaatctgacaattatgtgtcttggagttgcttttctcgagaagtatctttgtggccttctctgtatttcctgaatctgaacgttggcctgccttgctagattggggaagttctcctggataatatcctgcagagtgttttccaacttggtttcattctccccgtcactttcaggtacaccaatcagacgtggatttggtcttttcacatagtcccatatttcttggaggctttgctcatttctttttattcttttttctctaaacttcccttcttgcttcatttcattcatttcgtcttccattgctgataccctttcttccagttgatcgcatcggctcctgaggcttctgcattcttcacgtagttctcgagccttggttttcagctccatcagctcctttaagcatttctctgtattggttattctagttatacattcttctaaatttttttcaaagttttcaacttctttgcctttggtttgaatgtcctcccgtagctcagagtaatttgatcatctgaagccttcttctctcagctcgtcaaagtcgttctccgtctagcttcgttctgttgttggtgaggaactgcgttcctttggaggaggagaggcgctctgctttttagagtttccagtttttctgttctgttttttccccatctttgtggttttatctacttttggtctttgatgatggtgatgtacagatgggttcttggtgtggatgtcctttctgtttattagttttccttctaacagacaggaccctcaactgcaggtctgttggagtaccctgccatgtgaggtgtcagtgtgcccctgctggggggtgcctcccagttaggctgctcgggggtcaggggtcagggacccacttgaggaggcagtctgcccgttcttagatctccagctgcgtactgggagaaccactgctctcttcaaagctgtcagacagggacatttaagtctgcagaggttactgctgtctttttgtttgtctgtgccctgcccccagaggtggagcctacaaaggcaggcaggcctccttgagctgtggtgggctacacccagttcgagcttcccggctgctttgtttacctaatcaagcctgggcaatggcagacgcccctcccccagcctcgctgccgccttgcagtttgatctcagactgctgtgctagcaatcagtgagactccgtgggcgtagtaccttcccagccaggtgcaggatataatctcgtggttcgccgttttttaagcccgtcggaaaggcgcagtattcgggtgggagtgaccagattttccaggtgccgcccatcacccctttctttgactaggaaagggaactccctgaccccttgcgcttcccgagtgaggcaatgcctcaccctgcttcggctcacgcacggtgcgcgcacccactgacctgcgcccactgtctggcattccttagtgagatgaacccggtacctcagatggaaaagcagaaatcacctgtcttctgcgtcgctcacgctgggagctgtagaccggagctgttcctattcggccatcttggctcctcccctaaaggtataatttctataaaataaagtttttttacacataagaaatgtatgtgacatttgacaaatatatatatacccatataaccgtcagcccaacaacaacaaaaaatagaacatttctcctttcccagaaggccctcactgtttttttgctgtcttcttccacagccctgaaactcttatctgattagtttcatctgtcttagaatttcctttatatgaaacaccaactaagtacttttttctgtctgccttctttcacccagtctactgtctgtaaaaatcattcatgtttttgcatccatcaatattttgctccttttaatcgctaacattttccgttgaatgaatgtacctccatttttattttattggcctgttgatgacattaagactgtttccagtttttaattatcatgaataaagttgctatatacaagtcatgtacaagcttttttatggacatatgttttcatttgtcatgtttatctgggagtaaaattcctgggttgcatggaaaaaatgttcgtttaattttataatagacaaattgttttctaaatgaaggcatgatcttagtctagtaatgtttatttacttctatcaacatatgtgtttggtaagttaattttttggataatgaatgataccgtaatggatatttttttctcactacttcttcctttctccctctttttacacaattaaaaaactaaagataaaagttggctctatagggaaaggttttattttttacatttctggcaaatttgagatttctataaaattcttcataggtatataaaacagagtaagtatattttgtttaacttttaaagcagggtattattcatttgttagttgtttaaaatctactataattatgggtaaggcagtgatacaaaaggaagaaaagaaaaatcccaatttattcattaaataagaatgtgtcaatgcattttgaatgagaagtcattttaaactccaaatacaaagatgagcaagacgattttttaacctcaggaatggcatagtagggaaaaaagtaagtgtatgtatatcattagattcatacagtcaggctgaatgtggaaagggctttaagaaagttattaaaattgtttttacattctggggaagtagaaacatttccatctaacaggaacagggcagtttcacagaggagttggaatttggactgagttttgaacagaagagaatttcgatgggcagatcaggaaaagagcagttcaggaggagggaatggtgggctgtggagcatgggcgaccagaaaggcagattaagttaaaacagggttgacaaattgggagaacacaggattaagggactggaatttaagtttagatttgctttaataaagaaaaatgttactttgtgatgagagaaaataagctaaaaattaaaaatttaaaaaccaatccactctgagagattaattaaagtgaagatggggtctgctaatgtgttactgaagtgaactgcagagtacagtcactggcattgatgagtctagatgctgtgagaaagatcattagcgcattgacaattctaagtagctggagaccttttaaactttcaacttccatatttttagtaatttttcaaatgtgattaatttagcccatgaaaacacaccccatcattgatataaccaatcattataattatttattcgactggtgtactttgtctctaaatgacacatttctatgaaaaaaagatcagtttcactaactcctcaggcttctggctgtgacttttcataaatgtctgtatgaacgtaagctataactttgcttcattgttgtttagatgacattaataattggttttacttactgactatgggcattttaatacaagattccattttaaaagtgtgtacttgtagcttattgcaacacagtgaccaaagacaccatattcttacttctggaatcaatttgtgggcattgttaacagtatcttcacaactgcactagtcaagcaatcagagctaagctttcaaagcagattagaggaagcttattagcaataaaatatagtcaaaatataccaggcataatcatatttttatgtagtggaattacctcagcacatggagaatctaaattaaatgagtttataattgaggtttgtgtgcaagggaaaagaaaattcgtctgttatggaaacgctctatattttttacattatagccaaagtcttagttaccttttgagggtatctgtaggtgccattaaattcagctatcctcttctgctgtgggtataagcacatggcaaacccaggcaaaaattagaaaaataaaaaggattgtagagaaatggagatataaaaaattaataagagaagaggcaagctaactcccttatccatttttttcctcaaggttattaacagaaattatttccaacataaatgtccataaataattttgaaaatctagaaagaaattgcatttctactttaaaaatagctttctatggctgaaggtttgcttcagttgttttactgtcacaactcccaaaaaccagctggttctgggatgtcgtaacaatttgatacttcaaaccaatggtttgtgctcattggctccctggtgcaaacagggagataaatgctacttaaatagtaggtgaatgtaattttgcactttagaaaatgtctgcatgtttattagagaagtgaatgctgaaatcagcgaacaaaatgtaaagtgagcaactaagaaatacttataagggctcacttgtattatttaactgtgtaatcctctatctcatatatatgtaatactttcttcaagttcattatagctcccgggcccagtacatcctagtccagttccaaccatgtctaattttaaaatagctatgctcacttcaaacgaagatgttgctatagctttattttattttataggcttcaattttaaagttgtatcacctatagataacaaagacagctttcatggacacctcaatttagaagagtcttataggcactttgtgagataaactgtaagtgtatgtgctaatcagataattcttttactagagactttaggtgaagatagcaaatcttctaaaacagactgataattaaactgggttgatcattattgggttcattattatcaaattgaaatatgctttattttgtaatgtttaaaatgtgttcttaaattcagtagaatattaatattatattatacttttccatttttaaatcatattaaaaatagcaaaaatattacttcttcaaaaatgctttatacttcatgtatattactgattttaagtaaaagtacaattaagacaattagccagacctatttatgagtagctctaattggagcagcttgttgctggaccctattcagtggtagagataaggttgagatggctgaatagttcatctaatttgaaatactttggtgtcacatggaccttttcctgaataccatggctatgtactcactatttggccaaatgctgaaaatgaacatatatttgcctccgtcaaaatgttttgtaaatgttcactcagacattgacataaacaaggcagaaaggttaatggataaaaaattctttttctttaaaaaaatacatacacatacgaattttctctcttttagttgctaacctgctttttagattagtccatggttatcttggaagaggtgtgggagaacaaggtgagagctaaggaaggaattctatgcaaagcgtttctgattctcttagtattttgtggaacagcatgagacatgtcttccagttgtgtaggataagtacagcccactgaacactgcttaccagcagtttaccacaagccagttataacatcaaaaacatcggaaccctttcttttcttctatatttgaataatgataaatgccttcatgctgtgtgagcactattgaagtgtgtttctctgcaggtaaacttggcagtgtcttatataactacactcgatgggagtattacttaaacagtgtgaaatacattgtctgataaaaattgtatcacaatttggaatgacgtttatgcaagtggatagtctgccagttattttatagtctaaaaaaatgaacctgtaaggctacagtataaaatccaagtctttatagttgtatatttgtagtgaaaacaaccgtgggggaataatataagcttaatcatttggtgattagtctaccaactattaatgatgagagataacctatctgttctttatttctaaaataagatgtgtaatacagctaattagtcactattttaaaaggaatttaaatatagttttcattgaaattcaaatatttaattgcatgtgtacctaatgcctaattatttacatgttggctgatgttctctattatctaactgctgtgctgttcttaattgctgctagttcatctccgcccatctcccttggtgatgatagtcctgcatttcatggcaattttcaatagcagtttaatggtcttaagtgggtagcataatagccaggtgaacaacaaaaaaaacaaaaacaaaaacaaaaaaactatttggcaaattgggatatgagaattgaggccaaaacttttagtccttgccaattttttttaaaacttcaattatcttgattcatattcccatttgttgggttggtaggcactccaaaataaatataataatcagagagaacaccaactgtaggtactagttttagcaactgaaacaactggcgttaaaatcactgagcttctgttacatgaatacctgagtattatgtggctacttctgaaatggagtatgcagtgctcttataattgggcatttcagttgaacactgcttcagtaaagtaactggcatttcaagtcttccttctgtagtgattgctttgtctttattcaatgattgcttttttaagttagaatctggttgcatagtgctccatggttctttcctatgcagtggtgtttctcagtgttgatgtggagaagccaggagacatcctacaactctgagaagcatttgatgttggcagcagtggctgtgaggttagcccatgaacttagggctagaggtgagtcttaaccttccaattcagcatcttttccatctgaacattcaagtcaaatgggaaacctgttggccctccagctggatctttccactgttttaactggaatgaattggataagttataaggcagatggtaagattggatctgatgggatggagtttggtgaagtggaaacttttaagcattaggtttgagatagctagggagtgttgacctctctttccccctgacattatcctcacatttgtttttattccaccatatctaccttgatccacctgattcttttcatttttttctttcattctctttgtgctggctttctttccttttttaaaatcccatggtatctcatcatctcttcttgtcctcccattctacaaatagaacatgaaattgaagccttttttaaaaaaaaaaaaaactaattacagaattaatatatgtttactatgtacttactacaattagaaactatatataaacaaaaaagagagcttgcccatcaatccacatgcaaaattggttgagtaccttgaagatttgtaatagtatatagagaagaacattatttttcttaactatttaaaagtgtattctgcattctcaattaaaagtcattttatcttttactttttcttttattcctttttaagcaacaaatgaattaaatttcctttgttttatatatgacctattaacctcaatggagaaagaggctccctttgtttgcttcaggacttacatattgttacagttagtccttaggtaaatgaaatgagaagagcttcacatcagcactagttcttccccatggaattttagtttctccacaaccactttactgaatgtgtataattataagaattatttcattttcttacaactttttctctttattttatactctcaccctattatctgtcctttttcttttttttttctttctttctttctttctttctttctttttttttttttttttgagacaggctcttactccgttgcccaggctgaagtgcagtggcaggatcatggcttattgtgcccttgacatctcagtttcaagtgatactcccacttcagcctcttcactagctgggactacaggctcttgccaccccacctggctaatttttctattttttttgtaaagatggtactttgccatgttgctcagactgaactcctgggctcaaacaatcctccccacctcggcctcccatagtgctaggattataggcatgagccactgcacctggcttttatattcttaatatttcttgtttcttctatttattttctttactttaaactcgttgttataaagtggtatgggttaatcaagagtgatggaaagattagctctgtttttctgtgtgtgagtgaaagatttagaagtaagaaaatataattattcttcttcccaaagtaatgatgtttaccaaaacactggtaacattactttaaatttcctaaatttataattcaatttagtaaagtaggacttctgaaatggatttttagatatattggggaaaaacaattcaggatctaaggtaaactttttaggatgtatatatatttgcatgccattcatggttgtgtttatctgaaaacctaatacatttttatcataaaaatctacataattctaaatcatctcaagtgaaattagaattaatataaagaaataaacaaatattggaagttaaaattttcagatttattaggtgttaaactgaatttttcgtcttctactcctatcctcccgtaaacactatctagaaaattgtcacccaacctattgtagaactaaaaacctagtggtcttcctcatcttcattgtcttcattatttccactacacgaaacattcccttgtaacaaatataatattcacagcattgtgcaaaaaatgtacattttaaatttctagtataaaatttgatttgtgactctgagcccccagtttccttagggcaaacaatatgggtgctttcagttaattttagtccaatccagtaatttttcagttacttttccatttaaaacaagtagttcgaggttcagccttctgatcattttcctgatatggaatctgggagcagcagggaacataagtaatgtcacggtgtcaggattgggaggtgtgcattttggatcctgattaaatgtatcaacgtaggtaatatattgtgattgtttcaaatagtggagatcaggaatccttcctggtacaaattcagttccccacagtaacctcaaaattgacttcaaacctactgacttcaaatctgactcatgatgtttctcctctcccatcacttttcactgtgttctgctgatctccatactgtttcctcaatgatgggcccaaaaaatgctggaagttttcttctatttctctctttgagaatcatgaggcactcattgggattgtggttcttggattgtttccctctttgtatgtatttatgtatgagccatatacaatcaactgttctctcaatatcaagaggtagcaattttaaatgttctgtgttttaaactttaatgtataacttacgtcagtcaatcctgataataccactattctcactagtcatcaacatcattatcatcattgtcatcatcatgtaacaattatataatggttaatattggccacaaatcaatcctagttccttaaaatctattagttgagccttatgaaactgccctttttgtcggttcaaatggtgagtagaagcaatttcatatggttcaacttattattacttcaatttccttacaggcttacagccaacacagtgattcaggccaccatcatctcacaactagaaatcatcactgtggccttctaatggatattcttgcttgcaatttagccctcccccatttgtttgttgtacttcagctaggttaagctttataaaacacaatagtattgagctattcctctctctaaaatgctgtcatggcatctgattgaccttagtataaaatccaagctctgttaatgtgatttataagtcatgtagccgtacatcccagttagtctctgacagccctggtttacaactgctgccccagcctaattaatagtggtgttccctttattctcagaagtggactggtttagatgatgaattacatgaccaccttatttataatgtacctcatgctctgccctgtgcagttctctccagcctcatctctcaccactttttaaatcataaaaatgagctgtatccattctgaattcctttggatttatggaatatatcactgtctctttcagttcaaagcctgtgcccataatgttgtcactgcctaaaatatctctctgttaacctgactaatgcataccaattttcatgctcatttttcttttcttttttttttttttgacggagtcctgctctgtcacccaggctggagtgcagtgctgcgatctcagctcactgcaacctccacctcccgggttcaagcgattctccttcctcagcctctagagtagctgggactacaggcgtgtgccaccacgcccagctaatttttgtatttttagtagagacaggatttcaccatgttggccatgttggtctcgatctctcgacctcgcaattcgcccgcctcaggctcccaaagtgctgggattacaggcgtgagccaccgtgccggtccctcatgctccatttttatagtttctccaagaagcactttctgacctctagactagtttgaattttcctatttctgtacccatattggctctattcttcccctaatcaaacccttttcccaattaaccatgtttatatcctagtttatgtgcttccttttagcatgtaccattgtttctctagggccttataagtatttgttatacagacattacatatatatatatattatatatacatgtgtgtatatatatgcatatatatgcacacatgtatatgagagtatgtgtgtgcacatgttgaacaaattcatgagacaaaatacaactttaggttgcttttggactttgacatctgctcttgactttttatgttgagaaagggatgttgagagtatgaagcactatagcaagggagaagaaaagaaagagagaccagaaaagggctgattattgaatatcaagaaaggaacacatagaaaacaagtaagaggctttgaactgacaatttggatggacaactacattccatttctgatcatcgatcctgtctttgcactattgcttgcacttatcttagcaggggcacttaaaaagcctgaaacgcgtatcttgcctgcaatgtacaaacttatcagaacatctcatatagtaacataattttcagtataagtatagataggaattacgtttaaatttgagtaagtattggactaagattatctctccttttttaaaagttggtaagttatgttaaacaaaaacaaaacaatttctaaaatgatgactaaaagtaagggttgtttaaatccattttataagatttacttccagaagatgaaagtgggaagctgaagtggcatatcatttctaagctatttttgtaggttgaattgcatccttcaaaaagaaatgttgaagtcttaaccccaggtaactatgaatgtgaccttatttgcaaatagggtctttgcaaatataattaagttaaggtgatgtcatactggtttagggtggaccctgatccaatatgactggtatcatagaagaggggaggagatacagaaatacagggagaaagctgtgtaaagatggaggcagagatgggagtggtgcatccacaagccaagcaatgccaaggaaagaagcatggacattttttcttactgtgtctagaaggaaccaactaggctgacattttggtttcagagttacagcctcctgaactgtgaaatgaatgtctgttttttttttttttttattattattatactttaagttttagggtacatgtgcacaatgtgccgattagttacatatgtatacatgtgtcatgcttgtgcgctgcacccactaactcgtcatctagcattaggtatatctcccaatgctatcccttccccctccccccaccccacaacagtccccagagtgtgatgttccccttcctgtgtccatgtgttctcattgttcaattcccacctatgagtgagaatatgcggtgtttggttttttgtccttgtgatagtttactgagaatgatgatttccagtttcatccatggccctacaaagcacatgaactcatcattttttatggctgcatagtattccatggtgtatatgtgccacattttcttaatctagtctatctttgttggacatttgggttggttccaagtctttgctattgtgaaaaatgccacaataaacatacctgtgtatgtgtctttatagcagcatgatttatagtcctttgggtatatacccagtaatgggatggctgggtcaaatggtatttctagttctagatccctgaggaatcgccacactgacttccacaatggttgaactagtttacagtcccaccaacagtgtaaaagtgttcctatttctccacatcctctccagcccctgttgtttcctgactttttaatgattgccattctaactggtgtgagatggtatctcattgtggttttgatttgcatttctctgatggccagtgatggtgagcattttttcatgtgtcttttggctgcataaatgtcttcttttgagaagtgtctgttcatgtccttcgcccacttgttgatggggttgtttgtttttttcttgtaaatttgtttgagttcattgtagattctggatattagccctttgtcagatgagcaggttgcgaaaattttctcccattttgtcggttgcctgttcactctgctggtagtttcttttgctgtgcagaagctctttagtttaattagatcccatttgtccattttggcttttgttgccattgcttttggtgttttagacatgaagtctttgcccatgcctatgtcctgaatggtaatgcctaggttttcttctagtgtttttatggttttaggtctaacgtttaattctttaatccatcttgaattgatttttgtataaggtgtaaggaagggatccagtttcagctttctacatatggctagccagttttcccagcaccatttattaaatagggaatcctttccgcattgcttgtttttctcaggtttgtcaaagatcagatagttgtagatatgcggcattatttctgagggctctgttctgttccattgatctatatctctgttttggtaccagtaccatgctgttttggttactgtagccttgtagtatagtttgaagtcaggtagtgtgatgcctccagctttgttcttttggcttaggattgacttggcgatgcgggctcttttttggttccatatgaactttaaagtagttttttccaactctgtgaagaaagtcattggtagcttgatgggaatggcattgaatctgtaaattaccttgggcagtatggccattttcacgatattgattcttcctacccatgagcatggaatgttcttccatttgtttgtatcctcttttatttccttgagcagtggtttgtagttctccttgaagaggtccttcacatcccttgtaagttggattcctaggtattttagaatgtctgttgttttaagccacctagtttgtggtcatttattatggcagtcctagaaaactaagatacctaaattaggaaacaaatataactatattaaaaggggatagtatatccaatatatttaatacagaaaggatgaagatatagatagtagaatgatcagaggaataataatttttttcccactgttctcaatatcactgctaattcctataagaacacaattactcaatcactaatctgctgtagtagtctgattgatgctaagccatgctgcaggaatgaataaacccccaaatcttaaaatcttagcattatagaggtttatttctcaatgatgcaatgacaaatacaggtccatctggtgactcagggtcccagttgtcctccgcttatgatgtttccaactcaggaaatgccttttatggttgctatggcagaggaagagaggagtggggagctggcacctaggtcttcagtgcttcagctaggaagtcatagtcatgactctgctccacatttttacaatctaagaatagtcagatgcccctcttaactgcaaggggctgagaagtgtagggaacacaagaatattttttgagagctactatctctgcttacatataatggcagaagaaatatcctcctaaatctattaaaatcatactatgctctcaaagattctagctgctcccttaatttgatattttatccctgctataatttttacaagcttcttttcatatatatatacacacacacacatatgtatttatgtgtgatgtatgtatacatagctattacccaagtctttccattaacatggtgttatatttgtccttaccagaactactgactgctaacaacataaaactcttttccatccaaaatcattcctatttaaacatttattagtgttcaattctaataccattcaactgctcataaaggagaaagaggaagagaaggaagaggaggagaaattttccaggtaagtttatagagtaaaggaaacaacctgccattttgattgttttgagtatcaattaaattatcagttaataattcaagaaaatatatcccaggaaaaaaaaaatcccctgtataataaactaaagcttttttaacatccttcttaatccctcatatgaaaaatttatactcccctcttagatattaataaaagctcaatgtacaggtagctagggtgccccccgtcttccctgctggatttgtaggtcctgctcatgcagaggggttatttcccagcatgtggatgctctatttgactccactgtaggccaaccaccccttctcatcaatcatgttgcaattattttttacacaattacgtcttcttttagagaagagaattatttaaccagaaataacatcaacaagccttttacagaatatacatgcttaagtttcacaccatattgttgagatattttaagtgtttaaaaaatagtatgtgaatatatttcggttgtaaaaaattcaaaggaagctttatacccattaggatggctgccataattttaaaaatggaaggtagaaattggtgaggatgtgaaggaattagaagccttatgcattgttgatgggaatataaaatggtgtgacaatcatggaaaacagtatggagggtcctcaaaacattacaaatagaattacaataggatccaacaattccacttctgggaatatgccccaaataattaaaagcagggtcctgaaaagatatttatacatctctgtcatagtagcattatttacaatggccaaaaggtgggagaaacctggctgttgacagacgaatagataaataaaatgttgtgcatgtatacgatggaacattattccgtctgtaaaagagaggaaattctgacacatgctaccatatgaatggaccttgaggacattctgctaagtgaaatataccagtcacaaaaagacaaatgctgttatgattctacttacctagagtagtcagaatcatagagacagaaagtataatggtgattactagcggctgcagggagagaggaatagggagttattatttaatgagtaccgagtttcagttttgcaagatgaaaagcattctggatgtgaatggtgttgatggttgcacaacaatgtgaaggtactaatactactgaactgtatacttaaaaatggttacaatgatgaattttatgttatgtgtattttacaatactttaaaataattcaaaagtaacatcctcactcccagtgctctatacagagaaaaccaatgtctttattctttagttctgcgtttacatagacacaaattctcacatagcaatatatggtttattctttgattcatttttttttcacataaatgctatcttaatgcatatcttgttctgcatgttcaacaatgtctcagtcttgccatgagaaacggagcagggaaacttcctgggcctaaactgaataggccattttattctcttctctgccacattctttgtggttctgtctccactggactgggactctccattggtcctttaccaatgagccattctattctcatgaaatattcatgagaatgtttcaccagatctaggatttctacatattacttctaacatttccatatttctttgcctaaaattttccattctatttgaaagttgtgtgccttttttctttttctttttatcacctacatggggaggtagagtgttggctttcaaaggtgaaattgcatctttccacaactctgagttttctgagttttgagtctgttcttgacttcttttaaaaaaaaactctttggtcatggtggcaatagaggttagagtatgaataccaactcctctcgtttaggcctctgttctttagatatggtcattttaccgcttcaaggatcagaacatatcatatcccaaatttataatccccagaggtaactcagatatgtataattctttaataacaatctgatttgttctcaatatttaaagtgaacccaagatgaagagttggaaaggaaatttttaaaactctaatgctttagtaggctctcaaactgctgacagctcaagtgttctgtctctttggcaacatataaaaatccagaataacagttaaatattccacagctaactattatttaatactaatattatgtcttggttaatggaagacaccatagaccacattttgaatatttgtgctcctttttaatattggtaatcctccttctgagataaattcaggaaatctgacctttctcctcagcccttttgaaataaagaccacttttccaattaggaatatctaatgtagtgttaaagctcagagttgaaaagatgttttagtattcatcagatataacgttgtagtattattggtaacattgtgaaacaaattccagtacacttcagctctgctaacaaagatgaaatagagaataaagtaggtgtatgctgaatcttattaaggttgacatccagtttgaatacattcatcctctaaggtatagttttgggtataaaccatcgagcaagcacaaaacagtgaagctgagagctgcagaacatagagatctggtggattctaaaggactgagaatgatcgatggctactgaaatgaagtgtgaaatggtatccatagctgatatttgtctttaactgataaaatggctaaagcatttcctggtcaacacaccactctccctcctctcttctcattcctctagaacagtggccttcaaactcttttcttgataacaaatgcacttaaattggagaatatctctctttctaacacacacataacaaaaatgtcatgagatgtcttaaatacttagacattttacattcagtgtactccaatatttctattttatattcttttttaaatactggttttgacctattaaatggacttcaagaaatttttcagtctcatctaggcacacagatttaaatattacttctatgttagtgacctcttctgtgagtaagctccgtctctaactttctatctcctttggatatccttattcgcatattccttccagaacgtacaacttaacgtggcttaaacttaacagctaaacattctccctctgaagtatcccattctttccacagtcctcacccacctccatcaagttattttcctcctgtttccaaatttctgctgagggtcccatcagtcttccaggtgtaaaccattagattcctactagatccctatctttcttcccgttactatatcagtgagcaaggtcttgattctatttcgttttttgtcacaattaattattattaatagaaaataaacacttattccagtttcaaagttgttataattgaagttgctaattttaaaaaatgaattttaaataatcacttaataatccttctttgactaagacaatgaaatgtggctttaaaaaaagtaatcagcaccatttgcttataggtctttcagaatttgttcttaaagtttctggaactttcctctctgtaaagtacaggaaatactgagctacactggaaagcctctctgggacaggcaatggggagttaagcagtcatcataaaggaatcaatgtacattcagcatagtgacttggactacacaacaattccttctcctctacggtagctcaagagagacatgcttctaagcacagaggtatgagaagtctcagactgttatttgctgttagaattggtctccccatctaataacagtaaatctctggcacagatgctattggtccttaatgtcctgtgattttaggaaatagtttggatttagtttaatttattcagaaatcaaacatgtttaattaggttcactgctctggcagagtaagggtatgctggtttagtatctttataatatatatataatgagtaggtaaatcatagtcttaaatcatacttagaatactatattatttaaaccaatatctatttcaacaaaatgtttataaataaaaacagctgatgaaactaaatccaaaggtatgacaaagacgactcagctctatgttgcttaaagaactttaaaaagcatgtgcccataaagccgttcaaggagagggaaggaggtccccttctccttattcttacgatagaattcctattggggctgtgccagaaatgagcacttctaagtatttcagagaagtccaaagtgttaaaaagtcttttatgcaaaagaacgtctttctgaatcagtgaatagtaatgctcatcagaattttctaataacacaaaaacaaagccaagtccatacatttgatcagttgtcaaagtaatgggaggtggactattatgtcaaccttagtcagagctcctgctggcttctttgtatacactgttcaccaatttgagtaaagtggactttgtgagagaatagtgtttgatggccaggacctcttttgggcatttcttcctaagtggaatacacaacagataagggagtagaggaggtaatacagggaagctactcattccagctcagaaggagcagaaggagttagatgaagcccatatatgcattcaagaagccaatggtatcctctagctgtggatagtggctaatgtggtcatccagaatccacactgtggaccgcagcagcgttttcccgtacagatccaaaaactctggatagggatttacaggatccaatggccggtagataaaatgaatggggatagttacagaggcaagagctcccacccagcgccttctgagcttcttcctctgattgatgtactgtaagagaccgtcaatggctaagttcccgtcattgatgcggatccctgcccacatgtcccacagctcactctcacagagccaagtacacggcccaaagactggggtgagacctcgagagaatacaaagaagttcatcagtcatgtgaggatgagtgatagcacacctccatctttgagtagcttttggagaaggagtggacggtgagtctcaggaaagatacctccatttgacagacagactctttatggtatgccgaccagatcgattctgcttgtacctgtagagaaactcctgagcgacaattatctccatagtcatgagacttgatcctgcagttctggagccccagatgccgcaaaagcgcttccacgatgctgacctgctcaaatatggaatagtgatgcggtctcggtttgtcactgaagccaacgccaagaaatcaagggcaatcacccgatgaaacctcaaggtcagaccttcccaattcttgtaccaatcgtagctggatattggaaaacgtgtaaaaccacaactgtctcctgacttccaaccacacccacagagtcttggtagaagatacgcagtcccttgtaagtgaaaaacttgcctgaagacttccacgagtgaagatcaggtgacagctgagtgtatgggatgtgcaggtacgcagcaagcaggagcgcggcccacagccccacctggacccaccactccctcatcctgcggaggcgatctttgcgcacggcggcgttatcccacgctgccagcctcggcgttgcagagcacggggcgccgtggcgcccgcagccctgcagggccggccggcagcggggtctcaatcagcagcccacagcccgcacagggcggcgccgcgcccggcagctacagccactctgacgtgcacggcggcactgcgtttgctaggcgcgactgccacaagggaagtgcccgggtgtgctggttgccgtggcctctatttctaaagtatttcttatattttcctatttcttttcattcctactgcttacaccctcattgactgaactattgcaaccgcctcttgaggtgactgaaatattcatagatattgcagttattctccttttgggcatatagtaggattacatttgctcacccctgaaattaggcatagacaccgtcaatgaaatgtgaacagaactgacatgctttactcttagattgaatacgagttttacaagccagtgcataattcgccatgctatagagacagatgatcttccagatggatgcctgagtgtagaatatatagatcagttccccccacccttcacacatgggcccaaaatgtacacggagcaggagcaagaaatacacgtccttgctatctttgttagtttaatccacagagactttggagtctgcagttatacagcatcctagcctgtcctgactgatatgatcccttaactgatttttctactcaaagtctcttctccctccgattattctacatcactatcatattaatctttctgaaatagaactctaattatataaattccttatgaaaatctttgaatatttccctgttatcttcactggctttcaagaccatcacagtgtgcatctcaacttccttttaaaacacccacggtttccctacgtgtacacacacactttctaacacgttcgcttttctgttcctatgattctaagatgctctctgctagtcctgtctaagtgctacctattcttaagtaacagttcaaatgccagtatctctatgaggctttttctggatctctgcaaaaaaaaagggacaagaaacaccttcctcccaaaggaacaaagaatggcaattacttataagtaagccagattttagcaattggaccatttttgtcttaaatataactaacctgtctctatagcttacaaggtattcataaattcttcaaacaaaagaaatttatcataaaggatacaggtaaaagttctgtgaaattgtttaaaaaataactaaataaatgaattcccaaatgattttgagtctttattgtagttcttatcacactttgcagtggccatttctagcacttttcaggcaataaatggtcttctttcacttccatattattgaaaattcttttgcataatgcctagcaaatatcttaatgttgaatatctgaatgaatgaatgaatgaatgaacgaatgaaattaaggttgcattttattttaaaactaccgtttttttcttcagaaatcacaacgaggcaaatgttgccaataaaatagttattaagttaaaaaacataaatatctgagaaatgaactgagaaaaggagaaatccttacaggacatgaatggtacaggagaatagtacatatcaaagggtgaactctgggtcacagcttgtgggatcaggcaagaacatgtctagtcatagtctttcaaataatcttattaaaaattattttttctaagatccacttttactcttttctctgactaattttatttagctttcaagcatttctttgtggcttcagttttgacttcagtttttaaacaatttaaacaaataaaaattacattacagaattgttacttttaaactcttactttccacggggactgttattgtaaaatctgttcttattcttttaatttaactccattattttgttttaaatgtaatgattgttcattatatttttctccaactgctttaaaagcaccaatccttctttgctgtatatgtatcaaagtccataaatattctttgacattatcctagccttgaataataaaaggaaaaaaacctctcacaactttttattctacaaaataatattaaaatatgcccctatttttactgtaaatgtaatcttcacagcaacagtcaagagaacaagactgagtcattcttcatcacacattgcaagggctatgtctcctctgttgtgaggagaatattgccctgcagcaatattctcacaagtggagctctgggtcattgactgcacttttgctaataagaaatcttcagtaggagtgactgggccttgtgcaaatctctccagtagtttcttccactagtgacgcattagagcctcagaatcaatcactcaacaagtgtttactgaaagcttactgatacccagaccttaaactgttaccaaacagaatgccagatatgggatataattccagcctgaagagtttatgctcaagacaagacttacatatattacagagaagcgtaacagagcaaatgattaagttctaagtttcactgtacaccctaaaaaaaaggagaaattgatatggaacatgaatagtataggaaaatggtccttaggaaggccagacatgagagggtgagctctaggtgaccacctgtaggatcaggaaagaacatatctagtcctggagttaagatttctattttttctagatttatagaggtataattgacaattaaaaattgtgtatattctagatatgcatgacgatttaatatacatatacattgtgaaatgattaccacaaccaaattaattaatacgtgtatcacctcacatagttatcactttgtgtgtgcgtgtttgtttatgcatggaggacatttaagatctgtgtttggaaaattccaaataaacagtacaatattattaactatagttactattctgtacattagatccctagaacttattcatcttataactgaaactgtgtaccctttgacccaaacctctcatttaccccaattcctggcaaccaccattcattccaccattctactctctgcttctatgagttcaactttttagattccacatgtgagtgagatcatactgtatttgtttttctatgtgtggcttatctcacctagcacaatgcccttcaggcttatccatgtcattgcaaatagcaggatttccttctcttttatggctgaataatattcctctatctccctctctccctctctttctgtgtgtgtgtgtgtgtgtgtgtgtgtgtgtgtgtctgtgtgtctgtgtatgtgtgtatactatatttactttatccattcattcactgatggatacttaggccatttatttatcttgactgttgtgaatgatgctgctatgaacatgtggatgcagatatctccttgagatactgatatcaccttttaaaatatatagctagaaatgggattgctgggtcatattgtagtactattttcatttttggaagaatctctatgcttaatgctgttttccatagtggctatgcctatttacattcccaccaaaagtgtagaagggtttctttttctctgtttcctcaccaacatgtgttatcttttgtcttttatataatagccatgctaataggtatgaggtgatatctcactgtggttttgatttgtatttccctgatgattaatgatgttgaacactttttaatatacctgttggccatttgtatgtctctttttggaaacatgtctattttttagatatgtttaggtcctttgtccattttgaaattggcttattttgtgttttcttgctattgagttgtatgaattccttatatattttgaatattaactcctgatcatatatatggtttgccaatatattatcccataccacaacttgcctttttattttgttgattgtatcctctgctgtagaagtttttagtttgctgcagttacacttctttgtttttgctttcattgcctgtgcttcgggtgtcgtaccccaaaaatcatgaccaagactgatggcaaggagccttttctttatatttattttagaagctttatggtttcaggtcatacatttcagtcttgaatccattttcagttgatttttgtatatggaataagataaacatccaaaatcattcttttgcatgtggatatctagtttccccaatacagtttattgaaaagactatttgttccccattgtgtagttttaatggcctagtcaaagattagttggccatatatttgtgggtttatttctgggctattccgtttcattggtctatatgtctgtttttatagcactatcacactgttttgattaccatggctttgtatatagtttgaaatcaggacccatggtgcttctggctttgtccttctttcttaagattgctttggatattttgggtcatttgtgatttcatatgaattttaattattaaaattcttattcttttttttagaactgttttttctacattttctttctttttttctttcttttttttctgaggtggaatttccctcttttcgctcaaggtggagtgcaatggtgcaatctcagctcactgcaacctccgtctcctgggttcaagtgattctcctgcctcagcctcctgagtagctgagattacaggtgcacaccaccatgcccagccaattttattttttgtatttcttagtagagatggggttttgctatgttggacaggctggtctcaaactcctgacctcaggtaatctgcccacctcagcctcccaaagtgctgggattacaggcataagccactacacccggccattttttctacattttctaaaaaattgccattgaaatgttgagtgactgcattgactctgtagatcattttgggtaatgtggacattttaacaatattagttcttccaattcatgaacacagaaagtctttccatttatttgtgttgtcttccatttctttcttcaatgtcttatagttttcagtgtacagatctttcacctccttggttaaatttattcgtatatatttcattatttttgacgctattgctttggtttcttattattattatactttgagttctagggtacttgtgcacaatgtgcaggtttgttacataggtatacatgtgccatgttggtttgccgcacccgtcaactcatcatttacattaggtatttatcctaatgctatccctcccccagccccacaccccccccaacagaccccaatgtgtaatgttcccctccctgtgtccatgtgttctcattgttcaactcccacttatgagtgagaacacacactgtttggttttctgtccttgtgatattttgctgagaatgttggtttccagcttcatccatgtccctgcaaaggacataaactcatcttttttatgactctgtagtattccatggtgtatatgtgccacattttctttatccagtctattattgatggacatttgggttggttccaagtctttgctattgtgaatagtgctgcagtaaacatacatgtacatgtgtctttatagtagcatgatttataatcctttgggtacttaattcttttttggataatttgttgttaatatagatgcacgactgattttcatatgttgatttcatatcctgcaactttattgaatttctttattagcttctaatagcactttagatggagtttagggtttccttcatataagatcatgtcatctgcaaacagagacaatttaccttcttcctttccaatttagatgaatgttatatctttttcttgccgaattgctctgactaggactcatagtactatgttgattgggagtggtaagactgggcacctgataaggttaggctttatgtccccacccaaatctcatcttcagttgtaaccctcatcatccccataatccccaaatgtcaaaggaaaccagatgaaggtaattgaatcatggaggccagtttccccgatgcttttcttgtgatagtgagtgagttctcatgagctctgatagttttataaggggctcttcccccttcgcttggcacttcttcttcctgctgccttgtgaggaaggtaccttgcttccccttggccttctgccacggttgtaagcttcctgaggtctccccagccgtgctgaactgtgattcaattaaaactttttcctttataaatcacccagtttcgggcagttctttatagccttgtgaaaacgactaatacagcacccttatcttattcctaatctcagaaaagctttcaacttttcactattcagtatgacatcagctgtagacttgtcatatatgtcctttattatgttcagatacatttttctatacctaatttgttgggagcttttatcatgacaggatgttgaattttttcaaatgctttttctacatctgagatgataatatgatttttattctttattctgtgaaagtggtatacagtagtccccctttatgcatgggggatacattccaggacccccagagtatgtctgaaactgcagattgtactgacacctacatatagtatgctttttattctatgtatatacctatgaaaaagtttaatttatgttaggcacagcaagagattaacaacaatagagcaattataacaatttactataataagagttatgtgaatgttgtctctctcactccccctcaaaatatcttattgtattatactcatctttctccttgtgatgatgtgagatgataaaaggccaccatgattagatgaaatatggtgaacgacataggcattgtaacataaagttaggttattattgattttctgatgatgcatcagaaggaagaccatctgctttgagcgacccttgattattgagctatgacaatgttgatggttggatgccaggtgcatatgatatcaatgtccaacaggtcggttgtgatacagtttggataccctagaaaaaggaatggttcatctcctgggtgggaggaaacaggacagtgtaagatttaatcctgctactcaaaatgcacaattcaaaacttatgaattgtttttctgaaattttccacttaatattttcagaccatgattgagtacaggtaactgaaaccatggaaagtgaaacaaagcataagtgagaatactatatcacatttatcgactcatgtatgttgaattatccatttattccaaggataaatccctcttaatcatggtgaatgttccttttgatatgccgttgaatttgatttgctagtatttttttgaggatttttatatctgtgttcttcagagatattggcctgtaattttctttatttgtagtgtccttatctgggttagcattgtataatagttacctcatataatgagattggaagtgttccctccaagtgtctggtcttgaacttttctttattgggagatttttttttctgatttattctccttactcattatcaggtactcattacccaaatttgttcagattttctatttcttcatcattcagtcttggtcgattctatgtgtctagcctttatcaacttcttgtaggttattgtatttattggtgtataattgttcatagcagtctctatgatccttttttatttctgttgcaatgtctcctctttaatttataattttatttagttgaatcctcattccttttttcttagtttggctgaaggtttgtcaattttgtttatctttaaaaaaacaattcttacttatattgatcttttctattctctttctagtcacaatttcatttatttatgctctaatatgtattattcccttcccttttctatctttgtcttagttttttttttcctatttccttgaggtataaagttaagttgttcattttagatctttttttttaatataggcatttatcaatgtaaacttctctcttagaacgtcttttgctgcatcccagaagttttggtgtgttgtattgttattttcatttgtctcaagatacttttgatttctctttggatttcttctttgacccattggtcattttggagtgtgttgcttactttccatatatctgtgctgggattaatatttctgactttttagccaggctgcctgtattctaattacaacttcaccacttacaaggtatttagctttaggtaagccatttaaactctcagtgcctcagtccccttatctgtaaaaatgagtaatacagtgatattaataataataatgagagtatctacctccctgactgattgtgaagatgaaatgaaatagtcagtagaaagtagttagaatagttcacagcatacagtatttattatttttatgattaactaatgttttatgaggtccttagagtgctagacactgtttgcatgaattattttatatgatctcaccacaaccttataaaaaagtttttattgtccgatgttttagacggcgtagttataggagttagtttcagccaccagttgtatatagagaagctgctaggcaaacataagatttttttaaatctagcacaaggacctgaactttaccacatctgtctcccctgttgactatcaattcaatgcctaggtcccatgagggaagggtcaaagcatttgatgttaaaatgtacttctcagaggatgtccttcggagaagtattctttctcttacttatgttttgttaatttttgcttggttttgattgtagacatcagtttgtaatcagaaatgaagggaaggtcctgggagtaccaacatttaagagtgaccaaaagaatggaagccagcaaaagggatagaattctatcatcttgactcccaaacctactccatgttgatagtcttaatcttagttaatgatccctgctgcttgatccaaaaacctaacaatgacttcactcatttccctccttctgcactgttgttacctcttcagggacaaaatttcaatactttccacttagactttcactactgacttctaactcatctttttgctttctcttatttggaacagttattcagcttaccctaagtccagagtgaatttccaaaaaatcaaaggttctgcaacttttcatttctcttcaattccaactcaggttcacacgtttatcacctagtgtagaagggctttcctccacagttttgcttggcaaactccttttcatccttcaagactcaacaaaattgttgccttttcatgaaaaaggatactcttccatccttctgatattaataattttttgttcttgtgtccatgatagactttgtcataatgtattacagtttatcctggaggaaagcaccacaagaccaagagtttcctttttttttttcatcccaatgcttgatacatagtagccatttgataagtacatgttgaatgaaagcatgaatttataacatatataccttcacctgacttggagtttcataaggaatgcaacagcttccaattcatttactttctttttgcttaacaaagtatctgacacatagtacaaaagttaaatattataaataaaagattaattgcacagatatttttaaaggagacagaaaagatttgaatatccaggaattccacccaacgatgaaagacctataggcggttacaagtaggtaagcagagtccaaaatgtagggtcattttcaatggcagagaggaataggagagtcaataagaagcaaatgctcaaggagcttgagtagagacgggaataggcatctctttattatcttattggctgatttatacttcttgtaaaataattagcttaagctaattatctaagaaacaagaatctctcctaggcagattcagttgcctttcctggttctccctgagtgctctgagtaagccccaccattgccttctagaaaaactttctttcttctttcttgcccactcccatctgatcccttcacggcatccagaatgatgatccaaaagtttgggtccaaatgtgatgcaaaagtttacagtggtctaccatggttcctttacaaaaaaagaccaaaaatgttctgccattcttgctcatcatgattttgcctcagtttttcaagttatgttttgttcataatggatttttttttgtttgttttctgaatgtgttctgttccttctactgccttaaaaagccctcatcactgagtcttcctactacttccctcacctccacttaccctactgaattttcaaactgcaagtcaaatattacttccttaggggaatctcatcagactgtctccctagaccaccacaccccacccaacaactagatcacatccctttattaggggtactatgttttcagtataattgcaattataattattgacccattgaatgagttgattcatgtcccttccttctttattataagctttaagagggcaaaaactatttctgtttttcttaccatctttccctctttagtgcttccacattgtctggtacattgcagacatctaataaatatttgtcggaaggaataaatattagtgagagaataaatgggtaatgcattcatgagtgaataaagattatatcatatttttgtggtaaatattttgtttaccttcaatgactgaaacaaagagttccatatcctgaaatatgacctgaaagccatggaatgaaaggtttgataaagctggacgtggtagctcacacctgtgatcccagcatttctagagaccagggtgagagaatcgcttgagctcagaagttcaaggccagcctgggtagcacaataccttgtctctacaaaaaaagaaacaaaattagttgagcatggtagtacacacctgtagtcccacctactccaaaggctgaagtgggaggattgcatgagcccaggagttccaggctgcagcgtgctgagatcatgccactgtgctccaggctgggtgacagagcaagagcctgtcccccccaaaatttttttaaataagaaagttttaataagcagaatattagtttaattatgaatgagaagagatgtatagcatttgtaggggtacagaaccatgtattccataaaggaagaagttaagagcaatgatgtggaataagcatggggcttttaagaacttgtctgaaaagaggatattctttggtcaatagttgaaaaaataaaataagccttgctggagtggagcaagtcaatggaaagccttcacagttaggtggagcatttacactaaatgactttatttcgaacattcaacaaacactgactgattgtctattggttacccgccatataatgttaggtgctggggaaatagaagtaagtagaatgaggtgggggaggttcactgtggctcttggaaaggaaaatacataatcaaagtttgtgttagaagggtcaatctgaaggcttttgaaaaatggatctgggatagggaggatgtttgttgaatgaatgaatcaatcaatccaattaattcaataaactaatcatgattttagtgagtattctatgaaccctcacttagtttgattaccttgactgtgacatttaactttgtatttcactacttctttgcttctcttacattcagttaaaaatatttttaaaatacaattttcaaggttcagaaacaaaaaaaataaatgacattctggaaaaaatagatgtgctcagaactaaaaaataaaaataatggagatggtaaatatataagtgagaaatatgatgatgattttcattaacaagatacaccattaaatatattctcacgtgatccaaagtaatttcgttctctgtgcccagcgagttggtatctactgatggtggtttttcaaatgcaccgtgcagttagacgtcatcactgagacctcaataatagacctccatcactgagaagttcagaggtagaagatgcagggggacaatgttggcctgcattaatcttagcttgaaaagaggatctttagataacactatctaaatttagctgtgttcaaaatgctccaccacagaagagcagcaaaaagcaatctcattaaaacaagctcagaaaacaattccaagatatatgagtaaaagcaaactaaacaacggaagcacaaatagtatgaccttctcttgacttctacttgcacagctctacttattcaagctctgtttcggacattaagcttttttcatagccataactttcgtgttttttccatcatcctgtctattatatttccccttttatcttttattgagttcttttaggagaaacttgaaaaaaaaatctctataaatggaggttttttactcaagagcttttaaaataacagtacatcaccagatcatttttaaaaagtgttctattgtagttaagtgaatatttattgaaatttttctcgtcttcccattgaagactacagaaatctctttcttccagttgagctcaaaaggaaaagcaaaaaaagatggacagaagccagaaatgctgaataaattagtgtcctttttatttactttttaaaaactatgaattggctcatttaaatagattctaaaagtatttgtatgtgggtctgaacactgttgtcatggagattaaaacatttttgttgttgttgtgtacagtggagatggcagttttcttctagttgatgcttctgtagaataaaaaaaaaagtttagctgagaaaggtaggtcttaatggaattgttaatatgtagtcttattttggatgacattttaaaatcacttacgtatttaatctgtggattgtagagcatgctgggaagttatcaattccattggtacctgcctcagttgcagttcagccttaagtacttaccaaagggagctcatttggggtggcaggggtaaccgaaaagtgtgggagctgaggtattgtttgagagcctgtgggcagtgtgactgctccaatcgtagtttcagtgaggaagagcaccatctgtgcaagattttctcagatgtcctctataagactttcattgtcatcagttctatgtgctctcaaatcattgctttttcttctttattttgcacataagctataagctattttttaagacatataggttttatttctgtgtgatcaaaaactatgtctcgggcaacttctactttttggaattaacaattattttctttgtggtcttgtgtgtgtgtgtatatatataaacacatacgcacaagaagactgtctctctgtttgtatatatacatacacgcacatataaatacacagagagagtgtgtgtgtatatatacacagagagagagagagagagagagagagagagagagagagtcagtcttgctctgttaaccagctggggtgctgtggtgcaattatggctcactggagcctccacctcccagactcaagcaattctcatgcctcagccttctgagtggctgggactcccagcattcaccaccacacccagttagttattgtactttttttttttttgaagagacagggttttgctgtgttgcccaagctgatcttgaactcctggacctccagcaattctcctggcttggcttctcaatatgctgaaattataggcgtaagccaccttgcctgaccatcgtccatatatttttgaaaatgacctaggaacaatgagactttttgaagttttttccgtttgctaacttatcagagaaaactagtggaaataatatcaaaaagaaatcatcaaatgctacccatggataatgtacaagaaaactcagcaaaattatttggcacagatgaagaagacaagaaaaatgtctgctttgtgagaataccatagtaggtccttcagacaggaggtactttattaagaaggagcaattctcattaataaagatttagagagatcacttataagatgtatttatggcagcaagctcatttggtacatgtatgtatgagggaatcaagatctgaaaagattttcatcggttagagtgatacgtctgttatgatgcaattaattgtgatatactgtctactggagatttgttctccaaaacctgacaatctagtactttgtaggaactaatgtgtataatcttagggggcttagtggacagaaagttcattagccgttggtactgtgataggggaaaaagcaaatgggaccttaaacaatatgaatagacatggtttctcaaagaatagtctatggttcacctgagcacacatcacaaaggatgctgacaatgcacagttaaggtaccccacctagattaaatgaattaattttggacttgggtttagatatttacatttttatcaggacttcttatgttcaccccaaagtttgcaaaatgctcatctaaaataagaaagatgataggcctgatccatcttctgtttactaggttaaatctggaaaatataaacctcaggtgccagacttcagagggatatagaaaaacaattactttttgcattagtccattcttgcattgctaaaatcctaaagactggataatttctaaagaaaagatgattaaggcgggatgcagtggctcacgcctgtaatcccaggattttgggaggccgaggtgagcagaccacgatgtcaggagttcaagaccagcctggccaacatggtgaaacctcgtctctgctaaaagtagaaaaaaaaaaaaaagaagaaagaaagaaaagacgattaagtggttctagattctacaggctgtacaggaagcacaacagcatctgcctctggggaggcctcaggaagcttccaatcatggcagaaggttaaggaggagcaggcatgccacactgcataaacaggagcaagagagagtgggaaggtgctacatactttaaaatgacctcatgagaactcactgtcatgaggacagttccaagggggatggtgctaaaccacttatgagaaatcagcccctattctccaatcatctcccaccaggcccctcccctaacattggagattacatttcaatacgagatttgggtaggatcacacatcctatatcacttttggagaaagagtggaggtagctctgaaggtttgttacatcacagcatttgaggaatggctggggtgatggcaaatatcatacagaagagcaggcgtagacaagatataccagttgttttcaaatatctgagaaaatatcagtaagaagaagtatagtcatgagtgtgcctcacttgcctaaacattttgattaaaaatgcattttagtagatttaattatgcctttttcctctggtgaccatctgttaaaaatttttaaaaccttgacctatgaaaaaatttgtcagtaagatgcatttgttgtaccaaacttctcagttctggactttttaatcagtgtagttgccatcggactcacccaccagcttgcctgctaatccatctgatctgtgtcactcaaatacagcaggcagtgaagaacagctgctttttcttatttcattctccttctatctgtcataaaatccaggtaccaataactagggataagtgttttaccaagagcagttatttcaatagcttgaacttaaataccagattaattttcacagaataaaaataatgtttagtataagttttaataatggcatgtagatgaaatatttggacttggtgacttttaagttgtggttgctttttaaatgacttctctgtttgaggactttgtgtatacacatttcctatcacatttgtggtaggaagattctaagatgaccctcaagattcacaacctctggggtacacatcctatatgatcccctcctgttgagtgtgattggagcctgtgaatatgatgggacatcattcccatgattaggtaacattttacaacaaagtagaagatataattcggatataactcaggtggctaaattagttttcttcaagctactcaaaaggaagattattctgagggcacccaacttaatcaagtgaactcctaaaagagtgtctagttctcagagagcttttcctgctcttgaagaagcaaataatcatgtgagaaggccacacagcaagaggcttaggaggcctctagaagctgagagcagcactggattgataatcagcaagaaagcacagctgagctaacatggagactgcagcctctctaggtcgacaggaactgattatcaatgaatgttgttttaagtcactacgtttgtgataatttattatacagtaataaaaaccaaatacaaaagattaaaaagaaatctaagttgaagatatcttaaaccgaattgcatttaatacacctaacctactgaacatcatagtttagcctagcctacctttaacatactcagaacactcacattagcccacagttggacaaaattacctggcaacacagtacactgtggaatattgttggttcaccctcatgaacatgtggtggactgggatcctcagcttgctgcccctgcccagcatcacagagagaaatgtgcttcatatcactagcctggaaaaatatcaaaattcaaaatttgaagtatgatttatattgactatgtattgctttggcactatcacaaaatcgaaaaatacgaagttcaaccgtcataaattgatgactatctgtaccaccaaatagcccattactcaaatcctcaactttttctcttcaatgtatgtgacctctatttatatagtcaatacttcttgatttgaaaaaggattggatgataatagaagtgaaaagtttgaatgattatactcatttttctttttctttatctataaaccagcgcccagttggaacatttccatattttagttctaaggttgtaaattgctgaaagtttaggttttcttattgatgattctctgctaacatttgataagtaggtcccattgaatatcacaattaatctatttaagaaggttgagagatatactgttaaaccaaagggaaaatggtaaatgaaattacaatttatatttttcccctaattcatgggcattgaatattaacttagtggtctgcacttgtagcttgttaattgtttgacatctagctgaaaagtaaagtgttatatcacagatagcttttctaattgcaaacacatcaccctgtttattcattggttcactaagccttaattaggtatctatcctgtaccaaatggtatgccaggggtgaggatacaaagatagaatagaactttttagtacaatgtgaagaaagaaacataaagaaataagactgctgaagtattttaactaccaggtttgcacgttgacttctttatgcttcatttggattttctgaggctttaacgttttccgtttttaagactaagctcaagggtcaactctttcatgaaaattaattgctatttatgtttccatctataagaagagtgaaataaacaatgaaatctaatgacactgaaaagtgctttcaatgtactgttgagtgggaaaagccacatttttaacttgtatattcagtgtgatcccaattttataattttactctcaatccatatatgtgaatataatacataggaaagaggttggaagtaattcaatcatgaggttaacaagttttatctcagatgagattgtgtgtgatttttaaaaattatatttattctacctaataagcatttattacttttataacctgagagataaacattattgaaaaagaagagcatggatttaaagcgaggatgtgagactgtggctgttacatatttttttggtttggaccttggttaagaaggcaaagagggatagagattgtgggacatagagggagacgcaggcctgaggacagttacagtgttataaagggagaggcttaagtatcattataatatgagcagaaattgcaaagagtgagaagctaaaatggaagggagacgataaatagctcagcaaggtttttagggaagcagaaatgactcagatttgaaatataggtgacagaattagccttaaggaggagaaagaaaagatcttttgagactataagaaaggaggtgagagttgatgtagccataaaaaatacagagatgaaagggtggggagttaaaagagcctgtgtatgtagcctaaattcttgctatgaactagaaagccaggtcattagccgaaattgacaatgggataggggtggtcttggggaggttaaggctagaaaaatccaagcaaagcaggtaacaagaggacttgattccagactgtgaacagatttgaggcagggtcagaaagccaccctgaaatttcagtgctataaacctgtagtgggaactctataggaatactaatttctcccttcatcaacaaagatattatactggtcctgtgaagaggcttagtcacttcccagtttatgtatttcaagattatattcctaaaacacagaagtttttcagtttgttccctaacctgaccccagtctacctgtttccatccaagactatcactaccacttctaaaccacctccagccacacaaaaaacacacactatgcttgagtcattccaaattacacaccttcctctaaacattagtgtgaaattaggacatttgggaaatgtgattgatatgatttgcatgtttgcccccttcaaatcgcatgttgaaatggtattcccagtattggacgtggggactggtgggaggtgattggatcatggggacagatccctcatgaatggtgtagcaccatccccttggtgataagtgagttctcccttagttcccatgagatctggttgtttaaaagaaattgggatctccccctgctctctcttgctcccactccctccatgtgacatgtgtgctccagctttatcttctgccatgactggaagcttcctgaggccctcaccagaatcagatgtctgcaccatggttcctgtacagcctgcagaacagagaaccaattaaatatcttttctttataaattacccagcctcagatgtttcttaaaagcagtgcaaaaaatggcttaacactgtgatatttggtattttctagtccattagtgcacatccccccgatgtaggataaatatggtatgaatatttgaatatttttatgagtaataattaagcttattgaattatcacaactccagtgagataagtctaattttaatatcattagaaaggtgaagaagacaagaccagcgagggctactaatttctcaaggacacgctcatcctcatgtgagagctggaactcaaaaccagaccttgactttgtcaaaatgcacttttggttcccaatctgatattaggtgcagattcttctcttctttaaccaagggccaaataatacagccacccaccccaccctgccccagctctccttttagaaccaaactgttgctctctcactttagtgaggtggaaggaagactatttcaaattgactgatgaattaaccctatcgaaggtcagaaaaatgttagataacttaagggggaaaaaaagaaaataaatatcaaaatgtggaaatgtttgaaaaagaaagacaagaaggataggggaaaatagagaagaatagagagagaaaggaagaaagaaaggaggagagaagggaaggaaggagaatgtttgatgagcttatgaaggatgtctctttgcaactgagtgtgaatttagatgggattacataacatgaaacaaaatgaaaagaagaaaaaacagatacattcagtgatttaaaaatggggtaattctttctgtttttatttcacaagtcttttgtaacttattttagagttttaaaactttgtagacatatttaaaatgttcaattttcactaaaacaatcacatttttaaacataagggcatatatttggtgtgacaacctaacatttgccaccaagtgttaaagatgaaccagttttaattttaactagacgatttgaaacttttttgatatacttgagaatttgggactaccaaaaaacccctaaatatgatcctttatattttttattacttctaaaatattttgattctaaacaaatatatgtaaatactatgtggagaatttagatactaaaaatttaagtcaaatattgtttaagtacttacaatatgcccgggactgtacatgatgctaaaagtagccagatgcaatggttactgacttcgagtggcatctttttgaaacagagggcagaaatgaataaatctgagataacatgatgtgagcttgttccatactggagaatggggcactcagagaaaagagtgtgtgcaactgcaggtggggagaagctttgggtttggcactccaggaagatatgttcaaagcagaagggtaaagggcactgattgttcaagaaaagtgagtagtctggaaagggtcattatttcagaagcaacataccaagaaggaggcaggaaaagagaagacaaaacagcagcatggaagatgggtgaggagccaggccacgtgggtagaacttgagtatcataatatttctccatctaaattctactaggactagaagtcttatggacattttatttactctacaaagtgcccacgtcagtgacagataaagagtcaacatctgggagtagcttaggtgggttccacatggcccaggattgaacctctttctctcccttcttagctgtttgacctcagtcaagttatgtcacctctcatgcctctgttttcttgtctgtaaattgggaataataaggtaataataagtattgtgaggattatatatacatgtatataataatacatcatatataacattaatatttattaacacacatatataatctgcacatatgtttattatgtatgcccatatatatattacattatatattcatgtatacatatacatgtaaggtgcttaacagagtccctggtaccaaataagcactgaatcaacattaactattattatttggtttatctgaaacattcaaatggtatagcactaaggccatgtaaaaatatcatgtatttcaattattgaaactttttcacatttttgggtatccaggatagagaaggggaggaaggatctagtcacataatatttgagagtcagcaaattctttcaacaataatgtgattgtatttgtctgtgtgagatttctatgatggtcattttcatggagccagtcaagcattgactttgaaattaggcagatatgaatttgaaaagtagttttccctccactagccgtttgaccttgtacaagtgactttaactcattttttattattaaaaaaatagggattttttctttgtaagatttttcaagaggattcaatgtggtaacaggtataagtgcctgttagagggcctgtcatagataaatcctcaatgaagggtaactgttactaaaaggaagatataaggagagatatgacactacttccaaataaaaaccctggttcaatattggagcatggggaccccctttaagagaagcatcctcccagcataatgtccaaaatgaaaatatttcatttgtaagcataagaaaggggtcattttaagtgaaatgaccgacttatcaagccagtccactgaactgtagcttggagtctgagttacaaagtaatctatagtgatctgagggagtaatacaaactccaagttaatgactgtagaataaattctactgatatttgcagtctagtgtcatcaaggctaattctcctttaaagaggcaaaagcttcttattgtccccaaaactgttgatatagtatgtaactcagcatgtcacagaaatgttgtttatccactttggctattttgtttaaaaaaaacttttctaccctttttatttatttatttttaaatttctatatttcataagtaaaccaagcctcaacactcggcatttcaggccaggtatggtggctcacacaggtgtgtggtaatcacagcactttgggaggcttgtgcaggaggatcgcttgaggccaggagttcgaggctaacctgtgcaacatggggagaccctgcctctagagaaaatgaaaaataattaggcaggcatagtggcacatgtctgtagtccctgatactcgagaggctgaggtgggagaattgcttgagtccaggagtttgaggctgcagtgagccatgatcttgccactgtgctccagcctgggcaatggagcaagaccctgtcttgaaaaaagaaaacaaaaacaaaccatttcaaattcaaacatatttttctgaattaaaaaagaaaaaatactctctttaagtatatgaaaaagcaaatatctttcctagagtatattacattttaacagctcttgaaaattcagttaagtggtctagtgcttgtggtaatctggatgttagctaacaagaataaaaattaattccatacgttatcaacagcaaagaattttggagcagctaccataaataagaaactgctttagatgctggagatctaaatttggtaagatataatttcagccctcaaggatctagtttgttaagaaacataggcatcataacaaataaatgttcttgaattcaaaaaaaattaaagcttgattgttcagaaagcaatttcatctatatttaggagatgtttacaggtgttatattttataatgcagatctgagttcactttttgtacaagtagaagagtcacacttttatattaatagtgataatattattaacactgttggatttcttccatgtactgtcctagatattttacttattcctagaattttatagaataggtcattttgcttatgttagccttcagttgcaggtgatagaaatccaaattgagcatctattgacacctctattgatctgtccagggaagtacagaggagacctgccttagccatctgttgaccagaggaccaatcacatcaacaggactctcccctctctcttctaagctttcctctttgttgtctttattttcactagggttttctctgtaaggtgcctaaaatggctactagtagctacaggtttaggacctggtccttagcagtttaaatcggaggaggaaaaatacctcctgttcttaaagtccctattaatctctgttggccttgcatgggtgatgggcccaaccatgtaggaacacagggcagcttaggtcacatttccataaatatcagagaagtggtattgcctgatatgtatttcatagctagcaaatgacaactggaattgaagtccatgcttcttccgagtgatcactgtccctctaattgagtacctttcaattgaacctgtttcctggcgttactttaattttgtgtgaaaaactatcttcttgattttaagtaaaagcaatgaaaaaaggccctctaacattttctgctcacaaaaaaattagctttacagatagtagacttcatcagtagatacagtctttaaggaagaaaaacatagtttgtataaaatattactataccctttactatgtaatgtctcctggattctataataattggtgggctgtgtggtctgcttgccatcttccaagatgtgccccttattgaaaaaacaaaaacaaaacctatgtctgtagtatgtatatttgtgcatttaaatgtttgtgcccatggacttgtgtgtgtgtgtgtgtgtgtgtgtgtgaatgtatgtctatatatatatgtatggtgtttgtgtgagaggcaaagagaagagaaaaaagaatgacgttagcttatcaatatattataataaaattgtgttgactagtttctttatcgttctcttccaaactgataaaaggacaatttttggtgtgcggtttaaaagaaatgaacttttccccctatactgagggcaattttaaaagaaggtagtttctcaggtgtttctagtcaaaatgacaaacctacaaagtacatttgcattattttatgtatactttactgatagagtcctttaaatgttgagttcaagctaatttttcttaatcttcaaaaagtttagggatcaaattgtatcctgcagatttttgttatgctaaatttcatttcatctcttcttctttagttctacagagaagttaggtcaagattgtttgaaagtagacttgagtccagaaacttgtctcttcgaccagtggattatctaccaatttgaaaaaatatagcatgcatgtggaagaaaatgttacttttgcatgtcagcatgttgtcattattattagaagaacacatctttcaaagaaaggaaacataaactccataatgctgtctgatattattcttgaagacggctatcattttagctgttataaaacaggaaggaacatcatggagcattagattataatatctatagtcccactagcacaccattaaataaagtgaaggtatgaatatttaaattagaatttgttttttatactatattatgtcaggaagaaattgcaagctctggaaattctttgtgtcttaggaaaatgagattctattttttatagctctttaaaaaaaatacctgcatcagcagacaattggtaacagtcatcatatttggtgttatttagcatttctcaaaaacatggcagttgtttttatgtgggtgtggcatgttggcatttttacattatcgattccttgattcaatttctactctgtgctgacctgtcatatgggataaatctaactacagcaaagctctgttattcttcagtacagtacaacagataagtaagccagatataatacatttgggtgaaaaaactacaaaatcatagagggggatctttttaagagcttttaaaacaatcttttggtttaaggcagagaagtattctacaatgaaacactagattgcataagataagcctgtgcctgttccaacttaattttctttgttactctaagaactccccatatatatgtaaatttcagcagtgttaatgggctttctttggtatgtcagaagaagaatgtaatttgtgaactagataaatctataaggcacaggtgtgagcaaaaaaaaaaataataagaatcactcctcacaaggaaatactaaataacaattattattgagatgtttcatgcattttttttatccatagtagtaagtactactatctctataaagaggaaaaattcaatccaacagtcattaaagttgttctattaaatgtagtgataaatcttcagtttgtatttttaatataagatctgagggataatcaaagcaaaggcttatgtggatagggcatttattacataccaggaaatgtcctgaactctttacacatgattcattaattttctgaattacacttgtagataggaactattgttatcctcattttatagacaaagacacagagatagaggttaagtatctttactggggccacacagctaggaattggcagaaccaggatttaggcactaaaatctgtttatttaaccactagcctacatggccattggaaatgaattatacagagatgaaaagttttcgttatagattccctcgttgaaactcaaaaacagaaggcaaaatatgtaaaagaactcaaaactgagaatatttttaaaaatagaataaaatgtcatagaaaaaaatcacatttaagagtttctttcttctattacttttaccattgcagttatgggcgtttggatacagtttgggtttaataaaacccccaagtttggtttttattaaaataagtcaatctatcattggtcaatacatcacatttatctctcttttctagtagtgtcaaatctgaggagcaaatatatagctactatacaaaaatcaaagatttaaaagttttagcattgcattgagctattaatcattgtaaaaacattttaaatgcctccattttttagatgatagctacacattaaagatggggtgtaggtagggtggttgatcagtgtatctaaatagactatagtatgcaaaaacattcagtaaaaaatgttccttgagcaagaagaaaaaataaagacagctgatcaaaacacatgaatttatatgactcagtaattcttacattatcataaatttcgctaccacttttatgaaagcaattcacacaattcacaatgtgaggagcaattaccatcaaagatacataataatatgccatgtggtatatggagccacaggatgaagatggcaggttttcttgggccatcaattttactcaagggcattttaaaataatattttaatattaaaggaagcatatgatactgtagaataaaatttatttgcatttttaaaatctccaacctgactcttctgtgaaatttcagagctgtggctgttaaattggaactatgccaccagaccctggggtatgtctatttattcttctctgcctttagggaatttttttaaaaagttcaagaagccgtgagataatgcagccttcatagttattctgtttgtagattggtagtaaatttttgatacttattatgaatccaagagtggaggtgaaacatagcactggatatttttatatgtgttggtctatgtcaatcaaataggagagataaaatgatagtcttgttagtgaaagaaaatagggacaattaatgtataataaacttaaagttacatgatatgacagcatagaattaaaaatatgtctgtctagtaatttttttctccttcgcaattattgctttcttcataggcttttcctattgttctctgtcaagacactgcagtctgttttaatcattatcatctactgcttctattttacttgttatgtcatacaaattcatgtttggttctccactaatactgtttcaagaggtcacgaagaaggtatttttttttttaaaggaacaccaaaatcgaatgatggtatgatggattttatgtgtgactgagcttgtgtggagtgaagaaaaattcaaaataaattcctctctgagacacactgcatggaaatatcaaagcagtgcaattctttcataaattaaaggttatactctcattctgttttgggtccatccagaagatgataatgtttcgagagcagcagtttctcaggacactcttctgtgtttcactatggtaccaagaaatttgccagggaaagaaatgatttgcctttattctgtcaatattatcaaattaagaatgtttttccaaaaattcttttaaattattgagtgtttattatgagtatttatgatgtgcaaggtgctaggctaattgctggttgtatataaaggtatttggactccagtactattctatttttattttgtagtctgtgtgaatttataaaccactaaatcttacaggtttaatactcaaaactcctcttgtcttcaatatacctaccatagactgtaagggattatttcgagtagtcagttggggtttgatatggtgttaattctttatgcatttacatcattctatcaatttcaagtgtgttcttttattctttttcttttttctttaatttttccaggctgaaatagttatcttttaaagtctgttctacagcagctgctccaccccagtcattgcctttagctttctctagattgccattaggccttcttgaagtcgtgcttattacagatatgtgaggagtgctttttttagggggggaaggggagaaacagatgtagaataatccttttttgttgttgtttttaacacccttttctatgatggccagtgtttcactgatgatcttgttggctgtctccgtggctggatgagttgtctcgaagagcagtttacactcagtagtgaccaggtccttgagagctcttagctcatcatcctttaagtatagtttggagtattcttcccaggctgtactacttcatgcatttttttttttttttttttttttgcctattgtatttagagtttttcctgaaatgaatttctcactatgtatttgactatcaagaagagttgtatcatctgcaagtttgaggtttcacttgaaaatcctattagcccatacagggaataattcattccagtaggttcttaatagcccttccctgttccctgtttctaatccatttattgctctttaaagattaccatgtactcctttttcttattataaaatattgcatattcatattaaaatctggaaaattcatagaagcagaaataagtaatctaatgaatcaaaaacaatgtcaagtagtgtttcttaatcattacaattatttatgaattttggttttaatttttcaacatttggtctacttgatgtgtggcacacattgttctatgaaatccaaacagtgttattgtaaagtctctgggcttcttagagcaaaagttttaaaaccatcatttatatgtttaatatatttttatctatttctagatttattttaaaggcagtaaaataatctaacaggctcctgggtacccatggtgtttattatattatgaagaaataaaatattactcatacagtcgaaaccctacaattaaattcctttccctcccttcagagggaacctattataatgtgtgatttgtgatcatgaatgatttcaactagtttttctgatatttatatttattctgcaccttcaccctcatcatcatccttacaataggctttatcttttggaaatacatataatattgatgtgctctggttttaatcatcacctgcctcttgcctcagcaagctctaggttgtattttaaaggagattaaatatattttcactgaatttaattgtatctaagtaatacctttcgaagagtcaaataatacagaaaagctcataacaaaaagttgcaattcttccatccctccttcactctcagagacatgactgatctatctcagctgtttcttctagcatttacccccggatttaaaaataatatatttaaacaactataacttaatttaaacattttagacattatctcttcctttcctagtatggaagacaaagattgagcactctcatctgaccctcacacatttctgcctacatcctgcaacatatacttaaaataaatatataatgctaacattgttaaaaccatataaatattactcacagctgagctctgtggtgcactgtgtctctcttttcttttttgtacatcgttgcctggcattaataattgctttgttttgaaaaattagtcttagtttactacatacattttactaattttaaactacactttctgacagaattattaaactcccttcagtatgtttcatcacatttggaaatctattaattgatgatttttgttattatttgtgtttcattgttaagaaaaccatcctgatgcttttctctcccacatttttgtagcttccttagaaagagtgaagaaaaggtaaatgtttttaataaattatgtgtctgaagatgccttaattcccccctcttttagatatcagctggctctagaattctaggtagaaagcatctcttctcagaattttgaagatattgcttcatggctctcaattcttcactcaccttactctatgaaccccagggtctttacatcccttgaggactgaagtgtgtttccacttcaggtgctttgcactggctggtcttctatctggaatgcttctccccaagatatcttctggctaactctcttttcttcttagaaaactgctaagatttaccattcccaatgagccgcctcttgtccttttatttatttttgcaaactgcccctgcccactgccattcctggtctccctaaacaagtcttagtatttcttccctttctcttttcatgttgaaatacactatatagtttacttatgtattaggtaaactttttattgcctctctctgtactccccaagctacttcttgacccttgaaaaaatgtagattccatgatcgtataaaatttttattactttaaaaacttttctaaattaataaattataaaaaattaatatattcaaagcaactagatgtatgcctaaacacctagaaaagtgcctggcgcatgttagaaattagaaagtatttcttatgaacagttttatgatttttcacattgaagttgaagagtcttgccaatttcccctatcttatatatgtgatcagatttttgcctctgtaaacttttaggattttatcttgaccccaaatgttctgtagtttgatcacaatatgacctgtgctatgaattttttgacccgggaaattcatacacctaacttaaggattttaatttttcattattaattatttaacaatgtgttatttatctatggaactcttctttgttagatattgaatttcatggattaatcccctagctttttgtctttggtttattttgattactctttttttttttttccttttttttttttgagacaaagtctcgctcttgtcccccaggctggagtgcaatggcatgatcttggctcactgcagcctctgcctcccaggttccagcgattctccggccttggccccaccccgcccccgccgacccccatgagtagctgggatttcaggtgcctgccaccaaacccggctaatttttgtatttttagtagagatggggtttcaccatgtgggccaggctggtctggaacgcctgacctcgggtgatccacccgcctggtcctcccaaagtgctgggattacaggcgtgagccaccacgcccagccgatttctcttttcttttatttccttttctttatattctattgtttcccctggggagacctcctcacctttatcttacaacattttaaatattaccataatttaataattcttttgtgctttgagtagtcttttaaaaattaatatctcatcctgttcttgttttgtgcatgccatatgttttgctagttctccgagaatattgactcatttttgaagtttttaatattatttttgcctttgtttcctctgttttgttttctttcatgggagatacaaaatttctgggaaaattttgctgtccaataatgtttagctgagacactaaaattgttaaatctctgtatgtcacgaaagcatgttaactcaaatatgaacaaggtatcatttcattggaagactcccaaatatcctctcggtaggctatttttatggacaggtattttccaatctttgtctgctagcatttttgttgagaacggagtatgagctaaggatgagaataatcacactctacaatatgtagattttcactttttcatttttagtatgaattcttatcctcacccctcatccttcactgcatggtaattggacactttcttattaaatttccctagagaattgtattagggttctgtagagggacagaactaatatgatatatatatatatatatatatatatatatatatatatatatatatatattagtttattaagtattaacttatacgactgcatatatatacatatatatatgtatatatcatgggagtttattaagtgttaacttactcgatcacaaggtcccacaataggctgtctgcaagctgaggagcaaggagagccagtctgggtcccaaaactgaagaacttggagtctgatgtttgaggacaggaagcatccagcaagggagaaagatgtagactgggaggctatgccagtctctccttttcacattttctgcctgctttatatttgctggcggctgattagattgtgcccaccagattaagggtgggtctgcctttcccagcccactgactcaaatgttaatttcctttggcaacaccctcacagatacacccacgatcaatactttgtattcttcaatccaatcaagttgacacttgtattaaccatcacaagaataaattcccagtggtctcttgccaggtcagcaatgggatagtaacgaggtttatagggttggcagggggatctggatacctaactaagattttgcagcctcaacacttactctagccttgtaaattatttggtacttaaaatttcagagacattctggggatcagcagctcaaataacacttcttgctgtggtttgctcctccccttggcagacacatcctatccccagcttcctctgctctgggctagtaccactcactccatccactttccttccatcctatattaatttgttgacacttcttttctgatgtcatcctctggaccatatatatatatatatatatatatatatatatatatatatatatatacacacatacacacacacatacacatatttatgacttaactcttattttagaagatttgtaggttataatagcatttaagtgtgtgtgttcatggtcaggtttaaccaaagtcctaggcctgagtatttcaatgtgaagaacaaacagaatatgatattactttcatacctctatttttgatagtctgtgattctgagccctatctatgctttcagtcaaattaccaatggtatgaaactctttaattttgtgtgtctcacgtttagagggtagcttaagaggttctttaactgcatgactattgtgaggaggatacttatgagttgttcttcatttccatggggacaaggacaatgaaaatacagtataatacattcagagtgttattagaagttaggtagtaccttttaattgttaaacaataaagtaataacattgctcattaggcatgtgcttatgaagacaaaaaggcctgatttactgatttagtgatttagtccaaggctttgacatccatatgatgtggacctctgggtactaaagaagtctataaatcccaatcacaactgtgattaattacaaatatcttatgcatgtatttctttagctaaagacagaggtagaatcaaataaaaattactccaagtttactggctctatttctcttcatttgaaaacagaattttctcaaaaggcaaaggaaaagtttgtcatccacatctcttattaatgaaagtgtaacaatcatatactcacatttctccttctgaataaaacaaactactgatgagagataaagataattatttttagtacctctgttgtcttttaaatattccttttttggaaaagcaaaacaagacatgattatattgggagaagaatggtgacccaagaactagatggccttcttctggtacggttctttcactatctggtgtatctctgaagtgtgatcaaaggtaactgatcataactagataatcgttaaagcccctatcctccctccctttctgtatttttacctttcttcccttattgatactaagaccttgatactaagttgttcacaactggcccacattctaggttgaaatgatggtgcatgttggagacaaatgtacaaataaataccatatggttatattactactgtgaaaatgtatgtagaaaatgctggggtaatatggactattttcttaataatctaatttcttacctagtagacagtcaacatttccaatcatggaaatgaactagtgtccacataactgaaatccttcacatctggctatctttaggccctaaattatgtgaaattcactgagtattttccacagagttgtttactgttgtaaaatcttaaatcaaaatgttacatcaaaggaagagttgcatcaaaagaacctcagcaaaacctcaaaacaaccaaacactccacttgtctgtttaaattattagcaaaagcagctctgttatcccagcttctaagctaaccagactcatcattttggcctttcatgtatgcttttcctatggccaaaacgtccacaaattactaataaatgctgacaaggagagaggttaaaaccaggaagccatgccttttagctgacaaaacattcattgaaatgctatctgggtgaagcactgagaaattaatcatctgaatagtctaaattatagtacatgaagaatgcaacttgctagggagacataccttcagcattattcgaggttaatttaaaccaacatgtaaatgtttgtatgcttcatgtgtggtatcccaaaaggttgtgttttctcttttgatctttgaatatgctgatcgcctttcatgaacagtggcattcaatgcactttgaaaaaaacacagtctttttctttgaaggtaagttgtaagaaagagaaatcattaaagcctggagtgcagaattgttgtcgactgaaatggtatcaagtgagttgaatgcctcatattttaaaaatgggcatgatctctattattactaacaaaaaaatctgcattttatgtgatatctgacatgggaaagggatgcttgatgagtagccaatgatgttgaactggctgtattttccgactgacttgtttttcttatgaaggcagcattttagtaaaattgtgtttgtctttctttctgataggctctaattgaagtttgaaggttcattacacaatgcctgggaatatgttgtcaaatacaattcacctctcccacagtgaatattggcatgattttataggacagggtactctagagctcagctgtcataatatttggctccaatttcattcataatggacagaatatctacaatgttttgaatccctactttcaaatgtcagcacactggaacaaatattaaagaatgggtttgaatctaagtagatgagtatttccttgaagcaacatgttatagcctaaatgttgtttccttcaattatgtttaaacaatgtaaccttaaatgtttcacagatgtatcacttgaaatccaaaacacatactactcatcaaagtcatctttatttaagcttaggaagaaaaatagaaatctgaaatgtttgctcttagtccacacacacttctcatctggcaggacatttctgaatttatttgggaaattgaatatatgtcaggtaggtttgggttgctgggtaaatgagtgtacttcagtgtcaggactgtttttattaacagattttataaactggcttggtagtttccagttctgtggcaagaacaatctatcataataaacctgtaacataaaagtacagaatacattcctgtttcaagagtctgtaagaggagtcccctcatgaacagtttatatgagaggattataaaatgaagttcagcagtagcacaagcaactgcagtgaatggtgtgttgttaaggttctttaaatcatgaaaaaaatatactttcaaggatttattaatcttactccaaatatatatattttggtaaatagcaattggaaagaagggtttgtatttcttagaagcactgagctgaccaatatattggaaaactaagtaaagcaggccagtgatctctattctgagtgaaatattttgctctgtttgacatctgggtgcaatgatggctatgtcagtgtcactttatttttctcttgtgcaagtttgataaaactctttaaatactaatgtgtattttagaaaacacaaattctgttatattccaggaggaaggaaattgccttaggatatgaatcagatttgataacatgaactatcttatttaattattctaaattgaaaacatcatgaaagataattgggatttttccatttttattttcctcttgtttcttgcttatttgaatcattcgttttattcttctttctacttaggctaagctctcaaaaggaaaggagatgtaattcaatgtatgtaagtttctaagtgtaggtatttttcaacaaacacataaacaatcatcgatgacattattacttatgtcacataaaaactgtgtttaaacagattaaaaatattttctggagagttttatttattttacaatgtttacaagtgaattgtcaagatgtctcccaatattatttcctttccagacagcaatctttaaatcctgcttgagtcatcttttattccagttttcctttttttgagtgtaaaggcaataaattataacaataaaagacttatactctttgtcccatagtttctcttttctgttgaaatatagcttgctctttggaatattaacatgtaaaccagaggtttttttttttttttttttttgaacaatctgactattctaaaacactttttaggatatcactaattgtcaataaggaattgagatccacagataaacttatcaggaacagaaaattgttttgaatacatttttaatatttaaatagtcacagatcaaaactaaatttttttttaaagattctgttgaataggtaggacttcacattggattcaacctggtatttaaaatgcaaatactttttgatttctctttttgctaagtaatattctaagagattagccatacattttaaaatgttgtgactgtttttgtgtttcatgtttgtataaatgtagagattagacacttgtttaagatccttaaagatctgaggtaaattatttttgggaaatacaaatttctttctgtaatttctaccttctgtgaacaacttcttgaagactgttctgttgctcttggtttatacgcaggtcccttaaaataacaaaataaaaaataagaaacaatacataaggacaaagactggaaataaaagaaaaataatttaaactcaagggattttcttgggtaaggcctcagagaatgttccagctgttcttaagaaagacattgtatataaaggccacatttagctgaatagactgaaaaattcttattatttgagaaatgattcaattgttgtctcaatgctaaatattcataaaaactatccattcattaatcctttttaaactgaagtaattagaaaaagcaggtcaatgtgcaaagaaatgggcttttcttcatcaaatggttaattctttattaaatggttattctttaaaatgagcaaagatgagctcagcaaataaggtacttgtaataatgaaagtactatatgcaggaatactggctttttgtttttaatctgcaattagttaattaaatttcattgtagatgtattgcataaaatacatttgaaaggcaccattcttcctcataatacagctagtgaaggtccaaatttcagtgactcaagtgtaggtgggaaaaagtcctcacaaactttacgcaaattgttagaaaagcttatgtaaacatgactactatgaatacagaccagggatgtgccccagagtcaatgagttcaattcacttgctgccacaatgctttcaggcctaggctctttgcagacagagagcagcatcagggaatgattattacctgtgcccagcagggtttgttcaactgctaatggtcaaggtagattcaagccctctatcattcccagagacatacaaaatcaaatactgacttaaagagaaatataaatgaaataagttctaaaaggaaaagaaaacaaagaaatgtcttttacaaggcactaaagaaagacacaagggaacattcatatagattattttattaaatatttattgagcaaaatatttgtgccaggcactgttagattggcctcatgagctttgcatgggcacccacttgctatacatcaggcttggaaacatactcctgaccagcatttatgctagacatgatttatgtctcatactgtgctaagggggtgactaaaatctatattgaccaatacttgatgagtatatttgacagatgtttaaaagttaaccctgctcaaaaatgtaacgggatctttactaatcaggatcataggtttgcatgggttcctaggaggaaaagaatgagtgggaccagtttatacaccaagcatcaaaggactccattctcaccctagggaaacacggattttactgctcaggggatgatgaaaattggattccgacttttacacctcagattatttctattaattacacctcagattatttctattacacctcagattattatctcagattattatctattacacctcagattatttctattattcagtcttagccgaagattcccagccccaggtccatcgttgctcaagggtaagatcacagacctagtgcctgcattatttcccttctgtgcaaatcgtgagggccaattttgctctctaaaaatttgcattaaacagaccaatcactagattccttctacagatcaaaatgcatttattcaatcaaacaaaagggaatccatgtgaggcaactaaggaagggctttccctccagtctggtgagcagtggctgtggctctgctggctctattttgtgaggtctttataaatgaccacaattaagctgtagatgtactcatgccctagatgtaaccatccgttctggggaatatggcttgataaacccattggtgtctaacacttattcatgtcactcattcattcattcatttattcaaacaaatatttttgagctcttatgaggtgccaggcactgttctaagcaatgggaaaacaggagtaaacaagtccccattcttatgatgtttttattttagaggggataggaagaaggagaaaaagccaatgaataaggaaagaaataaatcaacaagataatttcatataatgctaaggatgggaagaaatgaaaacaggtgttggaatagatcatggggtgggagttaattgaaggggtagtcaagaaaggccctgctaaagaagtgttgggttggttagagcccagcaagggacttttcagctctggagatgcttgtagagaaatgcagaggtcctaatatgggaatgaacatctcatgtagggtatagcttctcatgtttgaggaacagaaacaaggccctaaaggctctaatattgtgagccaggataagggcagccagggtaagggcagatgacatctggagacaggtaggggccaggtaggaccttgtactgtgtacgtaggaccttgtacatgtaggagtcagatcacgtgggaccttgtgcttcgtttgaattttattctaaatgttgggaattgattagatgattttaaaaataatactttcttaatactgtgtcactctgcctactctctgagaaacagatcataaggagacaagggttggaggcaagcaatgcttctacagaagactttggtaggttcggtttctataatttccaagctctgcaggagaccactacagcttcctcctcagttactcttatttacttatgggcccaaacccctgagcagttaaaatctggcatcaataacactatcaattctggctaacaccttggccagtgagaagggttaatataacaggagggaagatgacagacggaaaaccatttcttttacctcttttttggtctccacaggttgacaataacatgttgtaataatcacatgtatgcaatttaccagaagttttgaaatcttagattaccactaacattccaatttctaaagacagtggacatgaattcctgcagctctctgagaatagattttagctgttaatattatattacaacttcctacatagttgtaaaaatttaggttaatgattcctgtgaatttatttttatttttttgaaatggggtctcactctgttgcccaggctggagtgtagtggtgtgatctcagctcattgcaactttgcctcccaggctcaagcgatcctcctgcctcagccacgagagtagctgggattacagattcacgccactacacccagcaaacttttgtatttttagtagatatgaggtttcaccatgttgtccaggctgttctcaaactcctgagctcaagtgatccacccacctagacctcccaaagtgctgggactacaggcatgagccacctgtgaatttaaagtaaattaatattatgtacacagaagttacaataaaaatgcttctatttggataaaacaaaaaaattaaaactactgtaaaagtgaaagatactacatactttaggaacaactggtatttgtatgcaagtgggcctaaatctaatgttgtgtgaagatcaaagccaagtacaattgtagctcatgttgcagttatttcgaggtctcaaaagggataacaacaaaaatctataatagaaaacagaatctgggttaaaatcagtggaaataatttttatttcagaattaaataaattgagtgaaatgaagtatctggctcttggaggaaaatatggtatcttattctttaaatgtctttaaatttataagtcataagctgcaagtcagtagcatcattatgttgatgaattacccagtttaattcttataaaaattgaaattatcttctgaactctaagtcatattttagccacaggtatttttttgttttgtttaatcaataattcctgaaagaatgaaacttattcgacttttattacgtgacaaggtttaaaaaaatttgcttgaataaaacattatggagtctgaattcaaagcataaaggcagaaagtaaagtatgaagatctttcaaacgtctgtcacttttaataattttgttctatgttatatgacctacgaatgttaagagtctgtaagagtttcttcagctgcatttgattttaccaacaccttgtgggtacagttaagaagatgacttatttgaggctttataactgaaattggatatggttcaaacgttcaacagatataaacatattttaattaagaataaatatttttataagattgctgaaatgacttctctcaaaaatttatgccggaacatcaacaaataaatttgcattacaaaatagaaaattcaattgtggaaaatcatattctaacttattctgatgaagtagttcccttgtcaggaagctttttcttaaagtgtgttttatgatttgtgatagaattaccatcactaagtcgatcattgcccattggttagtctacatgtactgccttttagtgacatgagttcaattctaattaagaatgagaatagcctataactatgaacacagatagctacatgtgtctctagtgagaggtactagtcctctttgacatttctcttaaagcggaatttatttggggtagtgatggttttactggtagccataggggaagataagaaaagggggccaagatattcatttctactgctggcatgtggaatgctcttttcctgctccatgccagtctctcacttgatttagaaagatttgtgcgtccttagctttgaccatcaagaagagtccatctcctttgccttcctgtgcctggtacctgaaagacctagtgaagactgaaagaaaagtttttattttcttacatagtgaaagcactttgaagcattttgttacacatatctataatttaacatgataattatattgatcatttacaattctacacattattttagcaagtaatgaacgttcttaagtgcctagtgttgtcataggtataaatcaagtaggatacctgccctcaagaaagtgtataattttatgcgtagagataagagatgagtactttcgcagaaacaaatgaataattatataccaacatggagaacttaagctcataggtgaatgtgggaatatggaggagaatgaaaatcattgccaggtgagtgatcaaagagtgcattctagaaaaggtggtacctgtacaggggtttggaggatgcattggtattaaataagagagaaattagagggaagacacatcttccaggcagagtgtctagaagcagagccagcagcagattttagtgtaagcaatttattgaaaaagtcctctcagaagatatctatgagatggtaagaaaagctgaaaaaggtaggggagaaagtggacaaagatgtgatctctaaagttgagcctcagactgatacatggcatggtctggagggaaaattgcaccacagaaagaggtaccccttaaggaacaggatgccaggattttacccctcatatctgtcagttatcggctacaagtccaaggggcagggggaagtgcaagtgatgtatcttgctggaagtctcagggtcaggaggctctcattcaaagaggcaggtctctggaatgatgcagctgcaagccattagcagccaacccttgcctcagctgagagatgggtaccaggatgaaaggcctggtaaagggttatggctgtgccaccagtggaatttcctacactgggaatatacatgctaggtgcatagaatgttaggtgtgagaggggagaccagcctgttggaaagtattcattaatgcatatttgtcaagaattctagctggtaacactttattaaacattagatattgctattttatgtgctttgaagcaattacactgtttgaaaaaccttattttgtaaaaaaaaatctgttctattcactgtctcacagatttaggacagtttattaattaagaacactagatttcaagtcaaacagacctgaccttaaaccttgaccttgttctttgctgtataaatggttttgtatgagttacttaaccacactgagcctcaaattcccatcagttatatgtggattataatgtctgcctcatgcttgttgtgaacattcaatgtaatcattcatatgaagaagcaatgaacacagggtctggtgcacataaatgttcaacaaatgatagacattacttccttctggatgagcaaaaccttgatgctttcagtagaaggtatttggaactatggttgaatcttttctgggggtattgatgggactagagtcaggatgaggtggatgaaatgccaggtactttcatctgtatgacttgagagtgtatgcatcaaattttgcaccctcgagcacctctctcacctccacattgaaaaaaatacatgccagattaaaaaaaatgaaattggaaaggatggtttgtagaactgttagagcatccataaaactcattacaaagtaaaatatattagtaataaaatgattttagtaatacctcgggaaccactctaattccaaatcatctctctgtctcttgtaatggctttccaatattctttgaaaaatattgaggttattttagttatgatattggtactttgatttggtttaaatatccttttattcttgagatatacaatttcaactgaatggcaactatgacagagttgaaaatgtacagaaaaataaattatagattagacaacgtattaatttaaaagcagttgcaagcaagttactatattgcaatgaaaaaaaagttcctaaaattggtaattcaactattgctgtcctaatagctgaagtcatttttatgtatggcaatcctaaatcaaagccatcataagatgctgcagacctcttaatagcttggctccagtgataatgagcccaggacattagagctcatttgagagcaggattcataattttttttactgtgcaattttcctacctctggctttgtctcaaagacatagccacacatggagaaggacactgataataagagagtttgacattctttataatttttcttttgccaggatccttataatccttgaatcaaaatgattgaagcagttatttttaaaaatagaagctagatttaaaatgtattattttgtgcctcttttgacattattttgtttagagcacctttaaaaactctactggtgattaaaatattgaaactataacagtatttttggcatgatttttaaatacttctttcagctatatacttctctaacttattggcttattatttgatttaattgtccttaggcagtgttaattatgagagtttgccgagtttcttcttgggaatttgagaataaaggatgcgggaaagaggaggtgggtggaggatggatataaactgttttttcaatgtactgaaggcatttcagattaccagaagaatcacagagacaagggaccatttagccatagggttaaacctgtcactttacctaccccacaaataagtaactatggcaactcactgaaagtgcttagctaccatgggagtggatggagttcgtgctttgtggggacaatgctgtgggacctctatgcccccatccataagggaccctgggaattgccttctagcagagaggccaactcacatttcaaataagtatttttccctcctcaactgcttttctaagctttgcacattaacactgacctagtgcaccatttaaaagtcctaaatatatcacacagtcgccagcccaatcaaggtgagtggtcagacaccagcatgctgtgcacagtatgctagttggccttagagtaatacagggtacaccatttatgtccagttaaccaggtgaccctctagttgctttattaagcacaggcttgactgtcaaacaggtcacaaggaggacaaaaagtgtccttgcatcgtatgaaaagagttgcttgaaatcacagaataccctctattaattgctaaaatccaatttccacctgaagacatgcctccatgactcgtgagaaaaatcaattatttaggtaaataggatctgcaactcaaacactcagacctattagagtatctagcagcatgccaggagatagactgagctgcaagataaatatggaaccatcttgtggaatataaatttcagttaaaggttttaaggagtatataataaggaaagcattgttttatattaaaatgtattcaattatattatgggatggaactgaaagttcacatgcagttttcagatgtgtcccccaaagttaatatatttcctgggtactcattcacactcttctgccaatagtattaatgctttgggaaatgtttgagaagtgttgttccagtggaaatgagcctgtgggttcactgattcatttatccattcattcatttattccttcatacagtatatagctttcaagccacttttatggactattttattaactttgaatatcaaaaccaataaaatagactttgtgtctgctttgtgacacaatttaatgagtaacaattttttttttttttttgagaaggagtctcactctgttgcccaggctggagtgcagtggcacgatcttggttcactgcaagctccgcctcacgggttcacgccattctcctgcctcggcctccggagtagctgggactacaggcgcccaccaccatgcccagctaatttttttgtatttttagtagagacgaggtttcactgtgttagccaggatggtcttgatctcctgacctcgtgatccgcctgcctctgcctcccaaagtgctgggattacaggcctgagccatcgcgcctggccatgagtaacaatttttaaaataaaaataaatagcaaatgatgagtaaagtacaacaataaatcaaacaaaatgctattaggaccatatggcagaaaaacaacagaatcttagaagagttagggaagacttcccaaaggaagtggcaattaacctgagatttttaaagatgagcaggagaatttcaggcaaataaaacttgcagtggggttgggagtaggtggatggaccatgatattccaggtgaataattgagcactttagcttgggaggagggccctaaatgagaaagtatatgacctatttcaggaactgaaagaaatttggaatgcttggaatataaagtgtggggcaaatgatggaggacaaagaggcagcagggataatatagtttggctgtgtctccacccagatctcatcttgaattgcagttcccacaattcccaagggtcatgggagggacctggagggaggcaattcaatcataggggcaggtctttcccatgcttttctcatgatagtgaataagtctcacgagatctgatgattttataaaggagagttcccctgcacatgccctcttgcctgccaccatgtaagacgtgactttgctcttcaagtactttctgccatgattgtgaggcctccccagccatgtggaattgtgagtcaattaaacctctttcctttataaattaccctgtcttgggtatttctttattagcagcatgagaatggattaatacaaggcattagagggaaagagtggggagaggtaaagttgaaagacaagcaagaagcagatcatgaaacgctttgtgagccttgttagtgagtttcagggaaatccctctaactgcaatgtggaaaatgaattggaaaagtcagaagaggaaaattcattaaaaggatgtgaagtaattaaagggatttaggataatggcctgaactaagatggtggcagtgggaatgaataatatgaatggactgacaggattttttttgtattttgactcagcaggtgttggtagcattagatatagagagtggggaggaagaaggctctaggcatgatgctcagattgctgatttggttaaaggaagcagagaaagatacatctggagaggaaacaagaatccccactttttgttttgttttttccagttcctgatagatagccatgctcaagtgtcccagtggcagttgagtatttagagtcaaagctcaggggagaactctagctggtgataatgatttgggaattttggcataaaaatactcatttgaacccagggaaatgggaggtaacatccaggataagcttgtagaaggaagagactgtgtagtaggaacacagggaaagatatcaacaccagagaggaagagatgctttgcttgagggtgtactctacatttaaatttttctctttgagagaagaatcatgacaataagaaatttgatttattccatatttcagattgttttgaaagtggtatgtcactaatgaaaggagtgtgaagtgaatactgttgacattcctgagaaatgtatctggggggccttaaaatctgtaaatatcataaatatcatacgaatcctaagaaattctgggatttaaggatgagtgggagacttaggttcttggttctgtgttgtaagtcattctccaagtgtagcaggaccatagcactgatgaaaatgatttatacagtagtcttatgatccaatgcccatgtatgaacaaaggttactgttcctgtcttctaaattggggttcccagtgtaatacaggaagactactgtgtgctagtaaacagaaagcacaatccacatttgaccatattttcctcgttggatgtgtttatggatatattttattctgcttttatctttctgagattaatgccttatctggccttttttcctatgagtacctttggttataaagaacttcgcattgctacattatcaattttcagcctctcttttttatttttaatttctttgccacctcttcttaatacataatgctctttcttccttcgttcctccccctctctgtttcttccttcctcctttctttcttgctttcttctttcttttctttattctttctttttttttttttttcaaggtcttgacgtgttgcccaggctggagtgcagtagtgaaatcatggctcactgcagcctcaacctcctgggctcaagcaatccttccacctccgcacccccaagcagctgggactacaggcaagggccaccatgcccaactaatttatttttgtttttcatagagatgaggtctcactatgttgcccaggctgctctcaaactcctgggccaagtgatccttctgcctcagcctttcaaagtgctgggattacagacatgagccacctcacccaaacttttctttttttttgagagattcttaaactagattgtacttacgataaatgttgactgattcattaccttcaacagtgctttcagcctctgatggttcagagaaatgattgtgtatactttatatttcacctgaatcaggtttcggttgagacaataattttctgagtatgtctccacttcacaaaattaatttattttcaacttttctctagttttaccactgttttgataaataatcttacagtggaggaagacttattgaaacaatttcatcacttttttttctcttgtttgcctcagagtatggttgattcattctctccctaggttggagccattgcagaatcaatattttacttttaactgactccaaaatatatacattctagctaagtactttcagcactatgagttgtccttcttttaaagagaaatttttttaaaatgatatcattaaaaacaagccattccatgatttattgtataagagaagataagtacggagttgtaaacctgcaatagaataataccctggatatccaccttcactgatgagtttaactgactcattcttacctgttaaccaaatgcttttgagagtcaaaggcagggtctgagaggaattatcaatgaatatttgtaatgaatcattgaggtcgcttgtgaatagttgaaacttccaatattaaggctgtgtaggccaagaatctagttatcctttcagaaatttttttttctgaccacctactctgtgccttaagcaaaagtacctgcccttctttctttcttttttttttttttttttgagagcatggtgtggtctcggctcactgcaacattcgcctcccgggttcaagcgattcacttgcctcagcctcctgagtagctgggattacaggcgcctgccaccaagctgggctaatttttgtatttttagtagagacaaggtttcaccatgttggccagactggtcttgaactcttgacctcatgatctgcatgcctgagcctcccaaagtgctgggattacaagcgtgagccaccatgcccggtcagtacctgcccttctctaaaggcacttgcttgcagtctttggaggagataagctttgatcaactcatcaacctaatggcaagtatcatttgacttgagaaaagataagaaacagggttctcaatagtgtgatctacaagatagacagcagtcagtagacgcttgcttctctgaggaagtgactcttggaagaattagtaagagctaggtgggcaaattcgggtaagacagaaggttgagaaagatgttttcagagaaggctccacaggaacatagttcctctcctgctgtattatggagagaacatggagccttcagagatataaaaatgtcattgtggctggaatgcaaagatgaagggaaagagtttgaattgaggaagggatcagagcatgcaaggatttaaagattactttaagaatttggtgcattatactcattaaatgatgtttgccacttgggtcaacaaacattctgtaaaggcttagatagtaagtattataaatattgcaggtgatatggtctctgttgcaattactcaactctgctgttgtaagggagaagcagatataaacaatatgtatgtgtgagtagatgtttccataaagctttatttacagaaacaagccatgacagtatctggcatatctcctgatcagataaatcctcatgttgctgccttatttcccaatgtctccgtttgaactagtgcagggatattttggagactttagcaatgcctagtcagcaagcatcagtgtactttagacattgaaaatcgggttaggaaaaaaaaaatatggactgctttgattttcctttgaagtaatgtcacaagaagaaaacagcaagctggttcatttgccaaggaaggaagagcatgaaagacaaaatgaaatgccagtaactaggtactagaggaaaggagtgctaagaaaatgttcaaaagggatcttgaaaagcaaagatcacttggtagatgaacttgttcaaagtgttcgctaactcacctcttgcaagaacaaactatcttgcaaggctctactgcaacatgtctgatacacagcacctgcagtcaacagactctgtagttgcaaagtattgagttttgtgctcaagctatagaagttaatggactgtcataacattgttcagatgaaacccagcaaagcttaacagactaaggtggattttgcctccccttttaatccagtgctaatttctttgagtaatctcagaaaacttttttatgctaaagtgattcatttataaagttcttgtcaaaacaaccagtgtatttaaaatattttggaattataatacaggacacaaatgaaagaagatatttatactaggcagatgggctaggttatgctgcaataatgaacaaccccaaaatcttagtggttgcaaacaacaaacttttttctcccactcacaatacaggttcatcatagtcagcagggggctccaggaatcataattgctgatatagccacctgacagatcagtaacctcagtgtagctggtggccatgagaaaaggcgataatcatctttcatatcaaatattagaacaatgcaagagaaatatggtgattttactctctatatcaatatcacacacactaacacttggtgtgcattttagaatatcttgctggttcccagtaaatatgtcaactttttgcactatataccgcttgaaatgtcaatactgcacaaatacgcgtagtctgctgacagtaacctgccaggttctagacttccatattgattactgttagcaaaatgtgtaggtgaaatttttgtagggtacgcacgtgaccattcacagaaggcaagaggttctctttggaatttaattttctgtgtgaaaaataaatcacttttttgtgtgtgtggaacatttctcatggaataatgggtcatattaggttaagtttaggaaactgatgtttattgagctgtgcacatatctgctaaaggaatttcacatctataaataaataagcttatttttccatggtgtcagagagataatgagactttcatataaaactatttttgccagctgaaatatcatgattgttattctaatatttcctccacaaagacttagtgaactgcatgtccattttagaaagtaggagtagatattttaattttttcttgcttcttgagaactactatcaacaataaaaaaagctttgattttaacgtgtatatcttaagatttcttttgatcaatactaatgaaaataaacctgaaacgcgaatcattggacaaatgtgagatttttcctttaatttatacattaattgatgtaagatagtatttagaaagtttcaatcctttccagttacaattgtaattgtcacttacctcaaactaaacaaacggactctttcccatatttttctacttggtgaaggacattctaatcatctagatgcctaagtcagaaacctaggcatcatcccttcattctttctgttcctcacagtcacacttaattaattgaacgattttcggtccctacatacttcctgatttcctcccctgtgccctactgcttctctccctaactcagataatgatttctcgactatcctattttaagatcaggctattttgtctccttgcaatgatctctctataacctagtaatatcaagccctaatgaaaagtctttggtcggcttctgtcacccaggataaacgtgaaactcctgagagttggatctacttcctttcagcatctcacccttgcctgcacttctagcctccactctcaaaactctttcacacatcatttgaacctgagacattaaaaatgccttccagggcttggtgcagtggcacacacctgtaatcccagcactttgggaggccaaggccagcagatcacttgagctcaggagttcgagaccagcctgggcaatatgcgaaaccccatctctaccaaaaaaaaaaaaaaaaaaaaaaattgctgggcttggtggttgagcctgtcgtcccagctactcaggaggctgaggtgggaggatcccttgagttcagaagttcaaggctgcagtgagcagagattgagccactgcactccagcataggtgacagagccagagcctgtctcaaaaagaaaataataataataatactgccttccagttcctccaaaataacatgtctttccttggtaaatactcttcttactgctttcagcagacattcaacccacaggtcccaggtcgttgactcattctcatctcttaattgctagccaggcctttgggaagccgttctctagttcctactcagttaggcacccaacctctctgctctcatagcacataggctgtccctctaacatagcatgagtcacacgctttccaaactggtgtttacctgcttgtcttctttactgcattgctccttgaggtagcaaggatgtcttctttattagcttttttatactgagaaaattttaaaatacaggaaaagaaacatgataaaatatatacccacattcctaactcatagaaataactgttgacattttgtcatgttttcttttcttactagagaaagaaaatgagataaaactaacctgcatttctatcctacttttctgcctgtcttagaggcaaacaccaacacaggtttgttgtcaatttccttcccattaaaaatacttttacatacctactgtgtatctatagccaacagatcttatatttatgtggtgtttgcgtttttccaattttagaaatggtttcctacctttcttaacctacgacttctgacaattttatttcaaaattatgccaatatgtatagatctcaaaaacataacattgagtgaatatgccaataggtagaatgtcatgtaaagtttaatttttgtcaattttatgagtgaaaattgtatatcactgttgtttttatttacctttttttaccagtttttttccagttttgttttattattattttattttattttattatactttaagttttagggtacatgtgcacaatgtgcaggttagttacatatgtatacatgtgcctgctggtgtgctgcacccattaactcgtcatttagcattaggtatatctcctaatgctatccctcccccctccccccaccccaccccacaacagtccccagagtgtgatgttccccttcttgtgtccatgtgttctcattgttcaattcccacctatgagtgagaacatgcggtgtttggttttttgtccttgtgatagtttactgagaatgatgatttccagtatcgtccatgtccctacaaaggacaggaactcatcatttttttatggctgcatagtattccatggtgtatatgtgccacattttcttaatccagtctatcattgttgtacatttgggttggttccaagtctttgctattgtgaatagtgccgcaataaacatacgtgtgcatgtgtctttatagcagcatgatttatagtcctttgggtacatacccagtaatgggatggctgggtcaaagggtatttctagttctagatccctgaggaatcgccacactgacttccacaatggttgaactagtttacagtcccaccaacagtgtaaaagtgttcctatttctccatatcctctccagcccctgttgtttcctgactttttaatgattgccattctaactggtgtgagatggtatctcattgtggttttggtttgcatttctctgatggccagtgatggtgagcattttttcatgtgttttttggctgcataaatgtcttctttgatgaataatgagatttaactttttcccattgaccattcacatgttcccaactctgaatttctagtaaattcatgtttttccagagaatgaaagagtgaatggccactgtcttgaggaaatgggagtattctagatgcatagtcaggcagtgtgattagtatagtgcaagaatggtaggaaaggatggagaggacaatgggaaaacaccttgctaaaaagtttggattttgtcttctagtgatagaaatgtactgatggtccctgacatgggtaacagctgctttagagctgaatttcaagaatcagcttgtgaacaatgctttggagattaagacagtaggaaggagaagatttgaagcagtaaagtgatttagaaaactatttcaatggaccagacaagaaatggtaatggcctgaaatgagtggagggagtggaaatgaagtcacatggctgcagttgccatttattggagaaactgaatttcagggatttggatcaggtcaaggtatgttatgcacataaaccaaatattaatgatatttatttagtgtgcaccagtgatatttgttttttccttcgctaaactgaagattaaggcaatcagaacctagtaaacattgctgaattcaccattgtatcccccagtgctaatacacaaaaagtatacaatgaattctactacctacctttcgcagtgtggctatccttgcaaatttcaccctttcccttcctttcagtcattcttgtttccccatgctccatagatcatttagccaccacatctttttgtgttattttgttttctgcaatgatgctggtataattcagaactactagcaaaatctcatctctagcttcatgtgatattttcctgcttataaactacccatattcttgctgtgctatagtcaatatgtgtaactcttctgaggcctcctcattcattgcagatgtttgcaaacttacctctcttcttaagggcccattcgtatgtacttaaataggaagatcatcagagacaagtatccacatgtgaactcccttagctactgttcttttctctaaatttctctttttctctgttcaaaaaatttccaactttcaactttgtggacacttctggaaaaaaagaaagtcgtgtcttaccaattttgcagaattgaattacaagtttctcatactaagacatttttctatggaagaaacaaggttcttttgtagagatgagaatttaaatgatttttttttttttttgcaatgggaagagagatttctcactagtcttactggttttcatctgactttatagtttaaaattgatagccattttgatggcaacacacatggtttagttaaattttactccgtcctcagttttcctgagggagtgtcagctactgtgttttctttacaaaacaacataaattccatgtatccaccctgggaatcacttcactgcgttgaatctggataggaaataaagattcatgaatatttcacaatttactaggaaccatcactttcttgctcttccgtgtggattttctactaattagttacttggtatgtctaagatacgttatttttattatacaaagactgtatcactttttattcctttgatataaatcataatacagtgtctgataagtacagctttttaaaaactcttttcatagactgtcttattctttttagatttatgcccatgatgtgcatggtcctgaatgtggaatgggtctctctgaagaaaagtgggtcagatggttgcttgtgcatattggaaagaaactgatagcttcctggtctcttttgaagggtgctgttgtaaaatacagattagtcaaggtttacagtgctgttactagcctgaacacttcaaaccaccatgcagtttaaaactattcagtgcttatggcaaaattcaggtcttttgatgttggggcaggagtagacattttattggaatgtaaggcaaaaatagagatgaaaacattgaatcatttttggtggggggattgacttaccttaataataattttttatacctttaaatccagaaatgtcaagaaaatgacacacaagaacaaaacaaaagaaaaattcagtttagagcctgcttaaaaatctgacattgatcttccaatgccttaaaaatgtttttattatgaaaaaatttgaacatataaaaaatggaagatatggtataaggaaccctcaagtacacattacttgcttcaataattatcacccatcaactaattttttttttcatctgtaaccctaccaactgttctcctttcccactggaatattttgaagcaaatcatcatatcatataatctgtaatctgcaaatatttaagtatgcatatctaaaagttagaattctttttaaaatcataatctcagtataatgacacactaaaaaatgaacaataattatttcatcccatcaaatattgacaagctattattcttttactatatattggctagaattttatgtaaagaaaagcttttcaccattgactcttatttacctacaggtagaattcaaacaggaaagcagatcaaatacttgattctttctttttatttcccagtttttagaaaaaatgagttggtttactagtatcctttaatgataaccagtttgctttttgtatctctatgaactcatagattttaaatatatttgatatgtttcgattcattgcagttatgattcttttcaataatcaaattgtctcatctttggttggtaagagtgtcttcaacttggctttctagtcctttaaactcagttttccttaatgattctcatgcttttcagtgttaagatgtggtaggattgttttgcatatttcctgtcctggttttagaaacagtcatttcttggaggagccctggttccttatagtgaaaaagggtatttcaagaccacaggtcggtagggctgttcactgttaatatgtaggttgtttctaggtcttttcagtggatcaggtgggaaatatatatttcaaatagagaaaatacattatagtttattctgacatgcccatttaggaatatgaggcttatagttaaattcattaatttcatatttgtatcttttttctcatccactgaaagttttgattcctaataacttatttgctctatcatagctctctatatatcatttcataataataatagaaatattatcatatacaacatagtggctgaaatgactttgaaagatttcttagccacgattttatatttataaagcatcccactaggcatctacaatcaaattacctttttttaaaaaaaaatcacttgaaaaaattattttatggttaagccaccaaacaacttcatttgcttcatttgactttttgcctgaaagtattttaaatatttgttttataatgatgtaaaaacttttacatagtttcaaggtcaaatttgcaaaataagttatattcagagactagactctctagatccattcatcctgttttcttcctcactaatgtgtaaccattttatttagggttatctttccatttgttagaaatattatatatataaatagtttgtttaaacagtccgcttaagaatatttttctagtcttttgctgctacaaataatcttgcaatcagttgttttgtgcacgtgtcttttgctttttgtcattgcatctttaggatagtttgtttttttttttttgttttttttttttttttgaggcagagtctctctctgtcacccaggctggagtgcagtggcaggatctcagctcactgtaaactcttgcttcccaggttcaagtgagtcttctgcttcagcctccctagtagctaagactacaggcgtgtgccccacacctggcttttctttttttcgcatttttggtagagacgggtttcaccattttggcgaggctggtctcaaagtcctgaccttgggatccaaccgcctcggcctcccaaactgctgggattacagttgtgagctaccgtgccctgccaggatagatttctaaaagtgtgattactcagtcaaaaggtaaaagtagataaatttattagatgttgtcaaattcttctttgggagtaatgccattttccaatcctaagatcagcatgtgagaatgtgttctgtttccataggttctccaacaaattatattgccaaactttatgttccaaagctttgtggggatatgtctggtagttgattggggcagagaaaatgagaaaaacttagtatgaagaaaagagtcttaggcttgaaattaagacacaggtttaattcttgaccattgctgatcacttgtttcaccttagacaagtcagccaacttttttcatctgctccacagatctgtggtaaggattaaatgagatgacatccatgaaacatatgacagaataccttgccatagtggctactcagcatgtaagttttttgtttgtttctttgagacagagtctccctctgtcaccaggctggagtgcagtggcgagatctctgctcactgcaacctctgcctgctggattcaagtgattctcctcccaaatagctgggattacaggcatccggcaccaggcccagctaattttttgtatttttagtagagacggggtttcaccatgttggccaggctggtctcgaactcctgacctcgggtaatctgctcgtcttggcctcccaaagtgctgggattataggcatgaaccactgtgcccggcctagcatgtagtttttaaaaggcaaagcaattgaaatttgtaaagcatttggatatctacaaaagttatttgacgagaacatacaaggggacatctcttatggactggtaattttaggattgtctacttgatgttaactaaatatccttcctaatgccaaaccaacacatggggtaagaataagtgatgctggactaaaaaaaaaatttgatttctctatcaaatgtacttttaggtaaaaaaaaatatgcaaagtataaaatatttgtatgggcaaatgttttactaagggtgtttgggttattttctattgaacaaaacctgctaaaccagcataagatgcactgaactaaagtgcagcagagatgctactgtcagcaagagaaggattcaaagagaggaagcccaatccgagcattacctggacaattaaacagtcagttattgggattttcacaattcttagcttttttaactttcacaattcttagcttttttaactttgagttttaaaaatcatgatggagagaaatttagttcttaacttttattttctgggcttgatgaagattgaatttcatcagagatgagctaaacaaattaaaactgaagcatttaatttagaaaactcaaatttcttcagcctaaaattgttcatttaaacaagtttgttagattctcaaattaataggatactgaataaatatgaaattattctttcctggaaagttaaatggaaaaacaggacagaatcgctattttataactaatacatattaagtcaagaaatagtaaaggattatttgtcttcaagaaaacatcctgtaaagaatggcaatgttggtggtatatagatgtaaaatgcttaaaaagaatgattatctagaagatgttatacatgttataattatctttaagtctgccttctctaattctgtaagttaaacacaaatattgatactttaatttttaaaatatttttaaaagtagctgaaaatggggctccatccttcaaagttctaacaatacaatttatagtaaagaatatgtatgagaaacatttgttcttagaagttcagaaaaatcaaatatataatatgaagatagaataatgtagagaagttaaagaggagaaaggggtgactgattctgaatcaagtgagttttagcttcttttaagtgaaatcatgcatgctcctcacatatgctaatgtataaaacatcaatttatagaatagtatttgaattacctgcctaggctttgcaagcctagacctttgaatttgcattcaaattcttgatgtacattttctagctgggggactagaaagcaagacactttcctttcagtaccttgggctccccatctattaagtggagatcattaaaatctgccttgcaccgctgtcctaaggatttgagataaagcatacaaagggcttggcacatagtaggtgctcctaaatggtaactttattcttcacatcaggctttgcttatacttataaaagccagttttgtagataatttgctgaatagaactaagaatagttataaatattgggttagtttatttgagctgctatgataacataccataaactggatggattataagcaaagataatttatttctcacagtctggaggctgggaagtccaagaccacagcagtggcaaattcagtgtccagtgagtacctgctttcctgtttatagacagcacgttttttttctgtagcctcgcatgatgaaagggagcaagagggacctctttcagacgctggtcacctccctaaagccccacctcctgatatcctcacattggagattaggtttcaacatatgaattttagggggacacaaacattcataacatagaaaatacatattattttaaaatgctttcttattctttattatgaccactattaaaaccaaacagaaaactgtagaactagccaaggtatcttacagagatatgtttcagaggagtgtttattagattctgttgtatacactatttgtttagctttttctgttttttaggtcctcggcctatgctattacagaaagaatattactctcttttgtatttactattggtttcctgagggaagcaattattttaattattgattatttatggtttaatggggaaccattgtattctaactcacaggaataaaacaataacaaataggatgcatgcaaaatatctcataaatgtgtacctaacaaataaaacatacatcttcaaatacgaatatgcatttagagcctggcttgctgtctgaggtcttaacttgttctgtgcttcaactccctattataatggatgctacacatggaagctcttgggtcaccattggaggtaatagcgccctatagagttttgtgtctgggaagaagtggactttgtagttaggcgattaaatatttaccagcttgccttaagccaagtacatgttaaaggactattttgtattattattttgtttttaaataggcccctttctctcatatttatcttgccttaattagggagtttattgtttattaaaaagctttaatctgaactactttcattgtgtgggtgtgtgtgtgtgctgtttgaaacaaatgaactaaaaatgtttttaattgagctgcaagtgaagacttgtcaatacataaattatacagtattatatatctctatatatgcataaagaggatattttaatcagcacatgtccctgtatttaaaagttaaaagaaccgctctacagagctaagaatacaggtattttaattttttaaatgattataacgggggaaattccactgttgtttctttagtgtttgatgagggattgtaatctaatcagtttaaacgactataaacacagcgatgatcatttaagttggattttgattcgaaaagtaagttcttggaatttagggtattgcacaatctgtcccatacaggggaaaaaaaaatcacctacttgtgatttttactaatttttttccgtgagaatagaatcctgctgggaagcttattttattctcttagatttgcttcctcctttttttccccctccggagaacgatgactggtttacaaatagcaatttatatcaactgacacagtcctttttccttatactgttgatctcagaactgttctgcagtcctgaagtatgaaacactattgccattttttggtacagccagtgctctaaaaaatgtaaatggatgaaagcgattcaatctattatggaagcagaaacatcttcctatttgctttacaaatttttccgagtaaaatgcagtcaggtttgtaacattgcataaaaacttgttttagaattctttacactaaattaaagatgataaagcaatctgcttttcatactaaacagtgaagtgaaaagcattattttaaagaaatatttctgttttgttagtgtacgaaattctgtaatagtggctaacttctttaggaacctttttaggtgaaacttatgattgactatgaaatctattctaggacaaaataaaatgagaatagaattatatgtctaattaaatgatatatctaggcaaactaaccattcaagttttaatttttatgaaaactttctatgtgcccctgacatctgtacatgtgtttaatttccagtgagctcaaaatacttcaagtgatctcatttgagtattaactagggaaatacattcacagtccagcaattttcttttatgtctacattattttaaatcatagcatagattttccactgtgctttatgaccagaacacatttatttgcaaagtattttcacttaccttatattgtagtatgtagtataggacaattgatacggtcaactgtttaaaacgtcagatgcaatgatagagccttagcatttatagatgtagcattcacagttgcaactctttcagtttcagacatttgtgaggaatctcataggtgtgtaatatggtttgaaatttgtgaggacagcaattcgtgctctgactctagtcattggcggccagtgagcaagcgcaactgatcacccagtatcaacttcacaatgtggtttccactaatcggcaccttatattaatttttatgaaataataaaaaccttatttcatagcaggagcgggtacccaaaaagtagttaaatggctaatcctttacagtttttatgtttttggaaatttgtgatctcaagactatccctcaagaatgtcaaggttttgctgaagttaaagacatttgttattctgtggtcagattatttcagtagttgagatgtagtctcacattaagggagaaatctgcaaactagaaatggtttgcaaatggcaaggcaaagcattcaaataactgttacatgtgataaaaatctcttttgggtttcaggatgacaaggtacagggcccagggactggcatttaaagagaactcctatacacacacttaaattcaacaaaaaagtctgtattctataatatccaattaccttaattgtgtagtggggaaaatgaagagttgaatttctggttagctagactagggtaggaagacaccagctctttgtttgttttgtgctttgacatttcaattttcccgcttggctttgtccttctgtcttcccttgacattgatgattttgttgtaggtacgtcacctccttgaatctactgatatgaagagaaagctataactaaagttaagacaatgttaaagtaaggtccaattctcagttatctacagggctatccaaaagaaaaatggaaatttcatttaaaatagctgcatcttttaagtaggaatattttgggctattatatgccagactcatcactggtgctatttaatttctcctcccatcaatgagagctctccctgagacacattgtgagatctttctgaggatgaaatcacttaaccccagcaacgccactgattattttcagctacaacaaccacacttctatgcacacacatcaatcacgccaaaaaacattctgactaaaaagctcaaaagaaaataattaagcattctcttttccatatgaagatattactgaccagcagaaagtggaaaaatgtatacataatgtttatagatactgacttaacaatgagtgaacagttgcgtctcacaaatttcagcagcgttgtcttgacagtggatcatggtgcttctgtgttgctaggcaacccgaggggatggaaaatttaaactcaaatttacttatgtatgttagattttagacatattatattgagagtgtattacacatgtcattacaggctagttgtacatttctattctgtcttttatgtgagtttctcagtatatacatgaaagacactctgcctgtatccttgctcctctatttttgaaaattaacatagtcctaatatgcatttttatggttgacagtcgtggtatatgagagaaaatatgtagcctttgatgtaaaaagattgtttttaaaaaaacataaactttacaatatatgcttgtgtgtgtcagtcagagggggaggtggagagaggcagtgtttctgaaacaagagatctatgaaagaagggaacagtctgttagttccacctggttcttctcatttaattactataattaatatatgcagaagaaaaattaatagggttcttaaatccagggagatattaaatgtcaaaaatgtggatatttgaattaaagactaatcaacttgaacaatacattataatgttaaagaactggtagcatattaatttcaagtgagagttttaaacttgataactgcagtggttttgtgaatccaattttaagagttaaatgttgtgtcaatgccatgaatcagagaatagatatttataacaaaagatctgtatgaaatgatgcataatagatggtgatggctgaagctgctgaaaattgatggtctaaatcaaaaggatggattaggaatctttgcggaattattacagacctgtagttttgtgagaaaagcagagaatgtcaaggtcttttacttcaaggaggatttgaagtatttgggggtatacattattgcattagcttagtcagtttacagctagctagacagtgcaaacttgtgaaggaggatgttttcagtatatcacactaggatcatggcaccagtcctgaagaaatagggggaacttttgatctccatcataccatatacacacctatgtgtgggaatgctaatgggatagaatctgatacagttagggtctgaaacactacgagttcttatggtactttgattcaatatttagttgagtaattcttgttcacttatttgtattatcctcattagattgaacctgtataggtttatctttgaaactaaagattaaattgaatttaagttctactgtattttttatcaagattatttttaaaatagcttgtatcacaggaatcctgagtacatacctaatactatcctctactgtatagaaatttagtaataatgaaaaagtatactcctggatttggttttctgggcagagaaaattaaaaactttaagcaggtatcatgtagaataacatactcaacagatattattttgtgggtgacaatttttatagacattatatgtcagatgaaatagctaattaacattaattctattatatttaacataacaccctatatacctcggtgaataaagaagatttctaaaggatgagtttaagaggtattgataaggaccagatatttagtaaagaaatcccatgattccctagatttgtgactcttcagtgacacatttaattagttaatgctttgtgaatcccagaattctttgtatatactgtgatataccatatttttgtcatagtaacaacaatttaattctgattctcctatagatgaatctctgcgttctatctttcatgctactttgaattcggtttttaaaactgaatttaaatatcacagtacttatcatatgatattcaacaacctgactgttttccattttattttattttatcaacttttattttagaatcagggagtacatgtgcaggtatatatcacacaagatatattgtgtgatgctgaggtttggagtacaaatgaatctgtcattcaggtagtgggtatagtacctgataggcagttttgttttgagacaaagtctcactctgtaacccaggctggagtgcagtggcacgatctcggctcactgcaacctccacctcctgggttcaagcacttctcctgcttcagcctccatagtagctgggattacaggtgcctgccaccacgcctggataacttttttgtatttttagtagagacagggtttcgccgtgttggccgggctggtcttgaactcctgacctcaggtgatccgcctgccttggccttccaaagtgctgggattacaggcatgaaccaccgcacctggccccagtaggtggtttaaaccctttctccttctctctctcccctctgttgtattgcccagtgtctgttgttcccacttttatgaccttatatttttcttctttaaatcagtaattttttatgttgttaaaatcaatttttgcagagattagaatgtatttggcctaatttctcattcttaagtaaaacaaaataaggacataatttatagacttgacatatactgattttttggtatagatcactaaataagtactgaacttttttctttaggacgtttagagtttttgacaggtatatagtcaagccctgctctcttttacttcctttttattctctctgatgatttgtatatgaattcattctttattgatagtatcaacatgacaaaacatacaaggcctttgtcctaatggatcttataaatctaatgcaggaggcagacagtaactaaacaatataattgtatatgcggtaagtgctatgaaggaattaaacaaggtgacacaacagaaagtagttgtgtcgggcaattttagataaaatggcgagtgaatgctgtgcatggaggtgacatcttgccagagacaggagaatgagaaagagtttggcatgtgaagatcggggaaatgagcacatggggcagagggagggaaatgtgaaaaggcatgatggtggggagtgtttgaggggtgagagaaactatcatcagagtaacaggcaacctacagaatgggagaaaatttttgcaatctatccatctgacaaagggctaatacccagaatctacaaggaacataaacaaattcacaagaaaaagcaaccccatcgaaaagtgggcaaaggatatgaacagacacttctcaaaagaagacatttatgtggccaacaaacatatgaaaaaaagctcaccatcactggtaattagagaaatgcaaatcaaaacgacaatgagataccaactcatgccagttagaatggcgatcattaaaatgtcaggaaacaacagatgctggagaggatgtggagaaataggaatgcttttacactgttagtgtgaatgtaaattagttcagacattctggaagacagtgtggtgattcctcaaggatctagaaccggaaataccatttgacccagccatcccattactgggtatttatccaaaggattataaatcattctactataaagacacatgcacacgtatgtttactgcagcactattcacaatagcaaagacttggaaccaacccaaatgcctatcaatgatagactggataaagaaaatgtggcacatatacaccatggaacactaggcagccgtgaaaaaggatgagttcatgtcctttgcagggacatggatgaagctggaaaccatcattctcagcaaactaacagaggaacagaaaaccaaacactgcatgttctcactcataagtgggtgttgaacagtgagaacatatggacggacacagggaggagaacatcacacactggggcctgttgggggaggggtgggaggcaaggggagggatagcattaggagaaatacctaatgtagatgatgggttgatggctgcagcaaaccaccatggcacatgtattcctatgtaacaaacctgcacattttgcacatgtatcccagaacttaaagtagaaagaaagaaagagaaaagaagaaagaaagaaacaaagagagagagagaaagaaagagaaagaaagaaagaaagaacgaaagaaagaaagagagagagagaaaggaagagagggagggagggaggggatggccaatgtgactagagtgaagtaagagaggggaagaatagtattagtcaaagttgaaattgaagacacaaactggctattcaagactttatgcctgtgatgtggccaggcatggtggctcacacctgtaattccagcactttcggaggctgaggcaggtggatcacttgaggtcaggggttccagaccagcctggcaaacatggtgaaaccctgtctctaccaaaaatgcaaaaattggccaggcatggtggcacatgcctatactcccagctactcgggaggctgaggtaggagaatcacttgaacctggaaggcagaggctgcagtgagccaagattgcaccattgcactccagcctggccaacagagcgagactctgtctcaaaagaaaaaaaaagtttatacctgtaatgagatgagaagttcagattttccagtgtgtgttgtataaatgaaggacccaattttctcagacagaagataaaaggagttgaggttcgtaacgaggtgattttaaggatggatcatagaatcatcaagccaggaaggagagagtgaaatcaaggagaaggtgatggataggagaaaggaccctgagttattataacagagtccaagagtcagagagctgcacagatggggtgggatatgccaggtcaaggaaagggccatgggagtgggtgcctgatgcggagaggaggaaaagaggtcagcgaggaggtaaagagcctgggcacagtcatgttggtagattttacagttacataaggagaggtaggaaggaagatggcgaaccagaaagtaagtcattaataatggctggaaggtggttttatgagggatgtggattttcagagagaaagagaaaactgattaagaagtagcatcaaagaggagcaaagttgatgcacaacctatctctagatcttgaaggtcttatagaatattgtttctaagtcagaagtatgatgacagggggaggagccaagatggccgaataggaacagctccgctctacagctcccagtgtgagcgacgcagaagacggtgatttctgcatttccatctgaggtaccgggttcatctcactagggagtgccagacagtgggcgcaggccagtgtgtgtgcgcaccgtgcgcgagccgaagcagggcgaggcattgcctcacctgggaagcgcaaggggtcagggagttccctttccgagtcaaagaaaggggtgacggacgcacctggaaaatcgggtcactcccacccgaatattgcgcttttcagaccggcttaagaaacggcgcaccacgagactatatcccacacctggctcggagggtcctacgcccacggaatctcgctgattgctagcacagcagtctgagatcaaactgcaaggcggcaacgaggctgggggaggggcgcccgccattgcccaggcttgcttaggtaaacaaagcagccgggaagctcgaactgggtggagcccaccacagctcaaggaggcctgcctgcctctgtaggctccacctctgggggcagggcacagacaaacaaaaagacagcagtaacctctgcagacttaagtgtccctgtctgacagctttgaagagagcagtggttctcccagtacgcagctggagatctgagaatgggcagactgcctcctcaagtgggtccctgactcctgacccccgagcagcctaactgggaggcaccccccagcaggggcacactgacacctcacacggcagggtattccaacagacctgcagctgagggtcctgtctgttagaaggaaaactaacaaccagaaaggacatctacaccgaaaacccatctgtacatcaccatcatcaaagaccaaaagtagataaaaccacaaagatggggaaaaaacagaacagaaaaactggaaactctaaaacgcagagcgcctctcctcctccaaaggaacgcagttcctcaccagcaacagaacaaagctggatggagaatgattttgacgagctgagagaagaaggcttcagacgatcaaattactctgagctacgggaggacattcaaaccaaaggcaaagaagttgaaaactttgaaaaaaatttagaagaatgtataactagaataaccaatacagagaagtgcttaaaggagctgatggagctgaaaaccaaggctcgagaactacgtgaagaatgcagaagcctcaggagccgatgcgatcaactggaagaaagggtatcagcaatggaagatgaaatgaatgaaatgaagcgagaagggaagtttagagaaaaaagaataaaaagaaatgagcaaagcctccaagaaatatgggactatgtgaaaagaccaaatctacgtctgattggtgtacctgaaagtgatgtggagaatgaaaccaagttggaaaacactctgcaggatattatccaggagaacttccccaatctagcaaggcaggccaacgttcagattcaggaaatacagagaacgccacaaagatactcctcgagaagagcaactccaagacacataattgtcagattcaccaaagttgaaatgaaggaaaaaatgttaagggcagccagagagaaaggtcgggttaccctcaaaggaaagcccatcagactaacagcggatctctcggcagaaaccctacaagccagaagagagtgggggccaatattcaacattcttaaagaaaagaattttcaacccagaatttcatatccagccaaactaagcttcataagtgaaggagaaataaaatactttatagacaagcaaatgttgagagattttgtcaccaccaggcctgccctaaaagagctcctgaaggaagcgctaaacatggaaaggaacaaccggtaccagccgctgcaaaatcatgccaaaatgtaaagaccatcgagactaggaagaaactgcatcaactaatgagcaaaatcaccagctaacatcatcatgacaggatcaaattcacacataacaatattaactttaaatataaatggactaaattctgcaattaaaagacacaaactggcaagttggataaagagtcaagacccatcagtgtgctgtattcaggaaacccatctcacgtgcagagacacacataggctcaaaataaaaggatggaggaagatctaccaagccaatggaaaacaaaaaaaggcaggggttgcaatcctagtctctgacaaaacagactttaaaccaacaaagatcaaaagagacaaagaaggccattacataatggtaaagggatcaattcaacaagaggagctaactatcctaaatatttatgcacccaatacaggagcacccagattcataaagcaagtcctcagtgacctacaaagagacttagactcccacacattaataatgggagactttaacaccccactgtcaacattagacagatcaacgagacagaaagtcaacaaggatacccaggaattgaactcagctctgcaccaagcagacctaatagacatctacagaactctccaccccaaatcaacagaatatacatttttttcagcaccacaccacacctattccaaaattgaccacatagttggaagtaaagctctcctcagcaaatgtaaaagaacagaaattataacaaactatctctcagaccacagtgcaatcaaactagaactcaggattaagaatctcactcaaagccgctcaactacatggaaactgaacaacctgctcctgaatgactactgggtacataacgaaatgaaggcagaaataaagatgttctttgaaaccaacgagaacaaagacaccacataccagaatctctgggacgcattcaaagcagtgtgtagagggaaatttatagcactaaatgcctacaagagaaagcaggaaagatccaaaattgacaccctaacatcacaattaaaagaactagaaaagcaagagcaaacacattcaaaagctagcagaaggcaagaaataactaaaatcagagcagaactgaaggaaatagagacacaaaaaacccttcaaaaaatcaatgaatccaggagctggttttttgaaaggatcaacaaaattgatagaccgctagcaagactaataaagaaaaaaagagagaagaatcaaatagacacaataaaaaatgataaaggggatatcaccaccgatcccacagaaatacaaactaccatcagagaatactacaaacacctctacgcaaataaactagaaaatctagaagaaatggatacattcctcgacacatacactctcccaagactaaaccaggaagaagttgaatctctgaatcgaccaataacaggctctgaaattgtggcaataatcaatagtttaccaaccaaaaagagtccaggaccagatggattcacagccgaattctaccagaggtacaaggaggaactggtaccattccttctgaaactattccaatcaatagaaaaagagggaatcctccctaactcattttatgaggccagcatcattctgataccaaagccgggcagagacacaaccaaaaaagagaattttagaccaatatccttgatgaacattgatgcaaaaatcctcaataaaatactggcaaaccgaatccagcagcacatcaaaaagcttatccaccatgatcaagtgggcttcatccctgggatgcaaggctggttcaatatacgcaaatcaataaatgtaatccagcatataaacagagccaaagacaaaaaccacatgattatctcaatagatgcagaaaaagcctttgacaaaattcaacaacccttcatgctaaaaactctcaataaattaggtattgatgggatgtatttcaaaataataagagctatctatgacaaacccacagccaatatcatactgaatgggcaaaaactggaagcattccctttgaaaactggcacaagacagggatgccctctctcaccgctcctattcaacatagtgttggaagttctggccagggcaatcaggcaggagaaggaaataaagggtattcaattaggaaaagaggaagtcaaattgtccctgtttgcagacgacatgattgtttatctagaaaaccccatcgtctcagcccaaaatctccttaagctgataagcaacttcagcaaagtctcaggatacaaaatcaatgtacaaaaatcacaaacattcttatacaccaacaacagacaaacagagagccaaatcatgggtgaactcccattcacaattgcttcaaagagaataaaatacctaggaatccaacttacaagggatgtgaaggacctcttcaaggagaactacaaaccactgctcaaggaaataaaagaggagacaaataaatggaagaacattccatgctcatgggtaggaagaatcaatatcgtgaaaatggccatactgcccaaggtaatttacagattcaatgccatccccatcaagctaccaatgactttcttcacagaattggaaaaaactactttaaagttcatatggaaccaaaaaagagcctgcattgccaagtcaatcctaagccaaaagaacaaagctggaggcatcacactacctgacttcaaactatactacaaggctacagtaaccaaaacagcatggtactggtacaaaaacagagatatagatcaatggaacagaacagagccctcagaaataatgccgcatatctacaactatctgatctttgacaaacctgagaaaaacaagcaatggggaaaggattccctatttaataaatggtgctgggaaaactggctagccatatgtagaaagctgaaactggatcccttccttacaccttatacaaaaatcaattcaagatggattaaagatttaaacgttaaacctaaaaccataaaaaccctagaagaaaacctaggcattaccattcaggacataggcgtgggcaaggacttcatgtccaaaacaccaaaagcaatggcaacaaaagacaaaattgacaaatgggatctaattaaactaaagagcttctgcacagcaaaagaaactaccatcagagtgaacaggcaacctacaacatgggagaaaatttttgcaacctactcatctgacaaagggctaatatccagaatctacaatgaactcaaacaaatttacaagaaaaaaacaaacaaccccatcaaaaagtgggcgaaggacatgaacagacacttctcaaaagaagacatttatgcagccaaaaaacacatgaagaaatgctcatcatcactggccatcagagaaatgcaaatcaaaaccactatgagatatcatctcacaccagttagaatggcaatcattaaaaagtcaggaaacaacaggtgctggagaggatgtggagaaataggaacacttttacactgttggtgggactgtaaactagttcaaccattgtggaagtcagtgtggcgattcctcagggatctagaactagaaataccatttgacccagccatcccattactgggtatatacccaaatgagtataaatcatgctgctataaagacacatgcacacgtatgtttattgcggcactattcacaatagcaaagacttggaaccaacccaaatgtccaacaatgatagactggattaagaaaatgtggcacatatacaccatggaatactatgcagccataaaaaatgatgagttcatatcctttgtagggacatggatgaaattggaaaccatcattctcagtaaactatcgcaagaacaaaaaaccaaacaccgcatattctcactcataggtgggaattgaacaatgagatcacatggacacaggaaggggaatatcacactctggggactgtggtggggtcgggggaggggggagggatagcattgggagatatacctaatgctagatgacacattagtgggtgcagcgcaccagcatggcacatgtatacatatgtaactaacctgcacaatgtgcacatgtaccctaaaacttagagtataataataaaaaaaaaaaaaaaaaaaaaaaagaagtatgatgacaaatggtcattttccttaaaataaaatcatatatcactacttactgacttgcacctatatgtacttctgggaaatttagccagcatgtatttccacaatacagggatagtttttgttctgtggactgctaaatgatcacagcctaatgtattgccttctcagtaaacacacgttgacttaaatcagttgggtaaattgtaaactcaattccttactttgactttagtttgcaaattaagaatagtgtacttttcttattttcaggccttatttataattcctaatgctatacactattatgttacagcttgcacttgtattttgacactttctaattattgtcaaattataaatactactaattaatatatccttgattcttcataatattctattaaccagcacttaacacctttttcataaaacacttttcaggatatatatatagttagggcttgttgacactatttcatcttgatttcaatttatgcaatccgaattttcaagtaaaacctcatggaattatcagattcatcactaactttcaaaacttttataacacatctgctgagttttcagacattcattctggaaagaaaaaacatgctggaaagaaaaattttacttactctaatgtgttttattttaaataaaaagtcctataggttatgattttactgtcctctttttttttctgaaaaacattaaggtttctttcccaaagcttattagttaattgtcagtttttatgtaagcccatgaggttagacctatataaggcagtaatttttaattctccctctcttcccacccttccttttcttccctatctcctttattttcttccttcttctttattagtttttaaatatgcatatctctttttataggagaaaggatggataatgattgcagcattctctgaccactctaatatctcaccctagaaattttaataaatgatttactaacattctcatcaggctttttattataaaataatatcaaagaaaacctgctttttaaaaaaatatcttgatacttgtattttaccaaattcatgggtatagataactttttgatttctcattactttcaagtatcttcttcatgtaaaattttaatcaaatttcagatcccatgcttaacacataaaaattaataaattgatgttgagggactatcacattattttatactgaaaagttgttcaattattctaaagttctatatattaatccaaagccgtctctacttgggggaaaaatgtgtgtgtgtgtgtgtatgtgtgtgtataattttttggatctatctatctatgaggatgactgccttattacaagtttcagtacaatttatatatatggattatatctacatatatattttttggttatatatatttttatatatataaacgcttggccattttgtctatttacctatctacctataaacttcagcattttttgtttgggtaattaatattttgaagttttctctcttgttttccttcttgtttggaatgatctgtttgagactgtgtttttaacaaaagtatatgtaagtttgatatacttaaccttatttttcgctaaacaacaacaagaaagaccccctaattttgaaaagtgtccatcaatatcactgtttggcagtttatcataaagattcaatcagtatacagtaaatctataattgaataaataatgttagaagcaaatatcacaggctaggatcagcttaagaaatctccaaaatgtgagcctacataattgagaccaagtgacatttcatttggtgttaacatatactatgtaaaaatggtattatattttcagtgttttaatggaaattttaacatgctttctgatagtttaatatcttttaacttgtgccaatagattgttttagcaagaaatgagtgataatcttaattttattttcttttacccgattcaaacattcttgccttgatcttagaggctggagaataggcagcatgacctctcatctcttccgttctttcctcagccttagtgaagggtgtcccattcacccatttatccacaccatgagccatactgtggatcatccactcagccaccaactcctgcaggtgctgcctctttccaattttacagccactgccttcattcagaatctaaatatttctgcccttgatttctgaactgcctctgcagttagtcttctgctgccctctcctcattcctttcatctgtcattcctgcttaatactctcctagggctctccatcgtgtccagtataaaatcgtactgaaacttgtaatcaggaagacatcccctttgtaatcagatctccatcaccagtccaacttggtctttgacctcttctcactgacattttatgctcctgtcatgctggactctgcagttgctgggcagtgtacccgcatgctttcctgcaggctatcccatctgactctcttctcctaaacctcaccatatttgcatgggtaacatgtcctcaccttttaagaatttcctgaagctctccctgacatcctgattcctgaacaaccacccctttgtgctcacaaaggtctttgtagttacattatttatcatacagtgtttccactgaaagtttaagtgcctgttccccatcgtggctcctgagtagctatgcagagggcgtaggggaagcaatctggtgaaactgggccaaggagacttgtctctaagctacattggcagagcaatgttttacttagattatatctatttaagatggatttagggaggctcagggagattattggagagaggggaaatatgagagaccctaagcacctcttggcagcactgctgtgtttcctctactgtggagtgagctcctggaaaacagggactctgtctgtcatctgtgtgtttcctgagcaccacatagtgtgtgccagatagattgtatgcctgctacatagtaggctcttaataaataagaagtgaattgaggattctagatgctattcatcttcccatattaaattgctttcaaaatgtaaatcctctgtggcactgaagtctatttaaaatatgctcttctgccaaataaaatgtctcctccaggtgatttgaggaagacatgtgggctcaaataagattaaaccaaaccattgtcatgtacatgtaaatattgcatgagtaactagtcttacattttcttcactaatggggatttattctaaggaacttttttgttcagtattttctgatgaaggaatagtcagaaatatcaaaatccttcttactccattttaggctgccatttttttcctaagagctgttatacattgagcatacctaaattgcctttctgaaatacaggaacacactgtattgtcagtaaaatggtctgtgttgattagtttgtctttggggtgtacttgattcatcagatgatggagatcctgctggcgtttcatgcaacctgctatggtatgtgggctttattggcttcccagcagcgacactgacacaaattgtcagattttatgggcagttttaaacctaatgaaatacatccttgagaagcttccttcaccattttagtagctgtacaatttgaaagaaaaaagtcaatgtacaccacacagggtagttcactattgaaatcatggaggacaatgacaacacgcttattttgctcttgaacatgctgtcattaactgcacaatgggatactgatgctgcctcagaggctggtattaatctttgtgccaaaccttgcagaaactctgtgtgcatttactgacgtaagcattgctctccatctctttgatcttaagattactcctttggggatagaaggtaatataaggctgctgaacttaaaaaaaaaatgctcaaagtgagtgaaggtaagagatgttcattttcttccagtactgaaaattaagagtacagacccacatgctattatacaagagaaagtagtcctatgactgctggataatttacatacattatctaatttatcataaccctgggagagtggaaatattgctattcttattttactagtgagagactaagtgatttgctggtttttgatcccgggtctacatgaatacaaagctacatctttaattagttctctatagggtctcaaagcagtcattttactaaatttttgatctttattaaacatagatgcaaaagtaataataatatttccacaaataaagggatgttaaccaaaattaatgttcaagaatcctttcagtgtttctctacctctttaaatattccagaaatggtgatacagtcaggagcaatatattgccaggaactttggcaggacgagagattactttttggatagaatcagttgcaggaattttccaaacgattcacacagcatcaacttaatcttctggaaaacattttagggaccacaaatacatattgtacccaggatgtagtgtacttactgcagtgtggtctatgatttttcttggcatgcataattcaaagacccagatagaaatgactgattttagcacttctaacaataaaacaaaagctcttctacaagagaatatcttcattcatgttaaacatatcaatatctcaagtaagtatgatgaattttgagatagggatcatgccattggggtctcatctggtggtcatggggaaatggtcctctttcttggatatctttggagagtatactatttgactctttagtcaaactgaggatcagtattttaaaagtctataaaatacttaagccatcttgtagaaataaatagtcttcccacccagaccataatctctgaaataattattaggaattttctttttctttcaaacactttggaattataatttagattctttaaaaactgagttttatgactgttttttcaaaaaagcttcaaaattttggcaaatgttgcatttttttttccaattaggataagtaattcaaaaagtcacaacatgcttcagccaaaaatccattgtgaaaatagaaattagaaatgatctttcaaaaaattaagaaatcattttttgaaaaagtgtggagtcattaattaagtgtttgaccttttgtgccttctcaaatgtccattttcaaaaagacagatgcagttagaaggaaaagactatgaatgtaggttcagggccagaggacaaaaactgttgaaattgccttgatatagattcatagattgcaaatgagcactttttaaaatttaaacccttgaatatggtatctcaggcacagagtgagttctttatatatacaaaatgtgattcttaccgcctaccagctgtcttccgatttcaccagatgaccttccctataagtttgacacgtaactcataaaatgcatggctctggagaacaattatcatgacgggagtatgctttcttgattatatggcaggatcctctttcccacctctgcttttgaaggatattaaaggtgagattaaaaatgctccagttgttctgcttgtctgattgtaacagtgaaggagacaaaattgattctagcttatggctcagtgtttcaatgttattctgcagcacttgtttgccagcagctgttagggattattgcaggtttctttgtcaggaacagtgtggcaacaataataaatcagatttagactggctactgaaggggtttgtttaaaagatttaaaaatctcttcagagtcaaagatgttaattctacctggtgaaccagaatgatcctgcatatatcttgggacagacttatattttctaaatctgggtaatgatcatacatgcactgaaaagaagaccatcttctcccagaaatatacaacactgaaagattctctaccaaacatgcatgaaaagatagcaaaggtacaatatttctttaatttgtttctttcctctttcgtttaggtgaaatagaggatacagctctgatcattagaatttcatatggcaaacgctcacacacatagtggatttgaggaaatcaattttcactaatctagaaaattctctcctcaagagaaaagggatttaaaaactttcatgatgtatttaaattcaacatatcttttgcctactttaaatagggaaaaggtgactctaaggtcataacgtgaaattgactttacccttcctggtatagaatggcatttcacattgagaaaaactagggagaagcactgaagaattaatgggcagtggggagagaaatgtagttcattactttattatttgtcgtggtaacacatactttatacaatctatcactcctacttgtccaaatatgtgtttctcctgaggtaaaatttcaaaaattctagatgatgttttggaggttctgtagagaaggtgaatggtatagagctaaagcaaatcttgtatgatttttttatttaatatgtttacttcctatacctatgtctttactgtgtatacatatacacccatatccctatatattcgcgtgttcacttttgatttcaaattttatttgtgaaaaaagcagatttattcttttttttctttgagatggagtctcgctctgtcaccccctggctggagtgcagtggcttgatcttggctcactgcaacctcagcctcccaggttcaagtaattctcctgcctcagcctcccgagtagctgggactagatttattcttaatcccatttatccatgtggagaatatgtcaccctgctcatttcactttgcaaaccgacttactattctttgtacctctctccttctctttttgctctgtcactaatagagctttcagctactaagacacacaggagtcctttctagagagtaactgaaattaaccacatacatcattttggtggcaaacctcacagccaccagtcatttatagtaccaagtccctgctctttgggtaacagtggataagaaatgctacacaagctccttatgtggagaaaagactgttctcctatttggaagccttgtgcccatatccatgccctttgcacatttatcaaataaccgtgacttgtcctttatgttttttcaagcatttgtatcattaggcaaggctctgcctaatggaagagatttactcttactctgtgcccaggtggctcgtccatctctgggtattttcaagcattggaggtggcaatagtgtgcttagcctcaagactgagcaaagaaatgaactttccagagattactcttaaaatatcccattctgagagcacatgtttctcttagtactgtttactccggactttcagggtcagtaggcaagcttttcaacaaatttggtttcttttaaaaactatttttggtagttttgttaaatgtgtctggtaattcattttaagtggaaaagggatggagataaagggtaggtagaattgtaaatgtcctaagcctcttttatcatcctatgtttttgataagttttatctggtaacagacaaacattgtagaagcaagaaggggtttaatgttgttaaataaagaaaatgtattaaaagagaaaaacgaggcactgggctcttctactcttgtttatattcttcacccttgtgttccttctactcaggactccattgtaaatgctcaggattaatttttttgtcatttgatgcagttctatactgtaccttgtctttctgcaaagcaaagataatattgtagtttaaaacttggctatccaccaccatgagggaatatgcttctcttatttttctgcagaaacatttaaaatttcttcagctatattttgtacttacctgaattttaaaaatagaatatagataatacatttccctatttttgtgactcactcactgttattaatagttatttttctaatttgaatattatgctttgttaagttatttagaaccacttaccccatctgtaaataaccccgaactcctatactgtcatcacctttgtttcttctaacatgttgtaatgtaaaatcaaaattattaagttataattatttatgatataagaagtattctgtggataaagtatacatttattttggatatttagaataatttttgtttgtttttggcataattcctttttcttgactatttacaggaaatagctagttataggttttacctaagtctcattcaagctaatggattatgcaaataaagtttgctcactgaaggacaagaatattctgtatcttttttctggttcttcaaggtgatagttcataaagaatatgttccattgacaaagttagttatgttttttagcttattaaactaatttaaggacaaagaagagaaaataattttcaaacccactgtgcttggccctcactaattatgtttttgcctgtgagatacggattttggaggctgtatttgcaataagtgacacatacacaatttataaatgataaaatataaaatatttgtcttaaatagggagatgctgtaatgtctctttcccctcttcaacgtatcatattacagtgattcctcaatgagcagctgaatttccacctgttcttgacgtattacctatcaccatcaggctatgttatgaaactcacttttagagataaagcaaattgtccaaatgtcaccaattattgaatctaaatgtgggcatacaggttttatttgaagcagtctttcagcttttctatatgattacatttttatttaaaaattttgaataggctgggtgtggtggctcacgcctgtaatcccagcactttgggaggctgaggcgggcggatcacgaggtcaggagatcgagaccatcctggctaccacggtgaaaccccgtctctactaaaaatccaaaaaaaattagcccggcgtggtggcgggcgcctgtagtcccagctactcgggaggctgaggcaggagaatggcgggaacccgggaggcggagcctgcagggagccgagatcgcgccactgcagtccggcctgggcgaaagagagagactccatctcaaaaaaaaaaaaattttttttgaataaatagaataatgtgatagcaaatggctagacagctattaaggtggtcaaggaaaacccactaaaagaaaccagcatagtattttgtatgagcatagaaggtgtgggttagagaaatccaatgtctctattttagaaagaaatgtcatcaaggtggacagggaccagaacatgtagcactttgtaagccacgaaaggcattttcattttattcttgtagattttaagtagagatgcagctttcttctcacatattttagaaatatttatttggttaccatatagagccagttctcatatagagaatttattctctatatgagaatagagaataaatttggtgcaagaaataaatatcgggtgcaagatctaaaataggaagacaggttatgaggctgttggatccccattataatggcagcttggatgagataggtttcatgaaaatgggaaaaagcagacatgtgtgggatgttttaggcagctggaatcaatagtacttattaatggcccagaggtctgggtagtaaaggaaagaggagaaactttagataaggcagttagagaaggaaaatcaaggatagattctagatttttgtcttgagcaactgcatggatggtgatgtcattgaatgtgatggaatagatcgggaggggtgcaagatttttcatggagggaaggccagagaagaaacagttctgctatagccatactgaattttaggcaccttttagacatctaaatagaactattgatttaatatttggatatgtaagtctcatctgtatgccatctgttctggctatcttacattcggatcctgtgtattttttacactggcctggaaaagctggcaaaacctagaactgcatttgtcccctctgcgtttataccatttcagttgacaggtctaattttaagttccaccttttcataattgattattcatttgtacacaagtatttgttgagtaccagaaatagcatttagtcatttcaagctttagtttttcatcatcctattctccagatttcagcagcatcagaagccatataaacactgccttcggatggcccttagatggccaccaagatcccctagttacattttctgtgtacaaagcagaagaaagatgtccttcattctgtacacagtgtgctacactgtggtttagtttattattaaagagcataattaaaagaaaaaatatgctatttaggtttggattactaattttaagtttaaatgcctttatatcatatttctttgaagctagacatgtattcaaacctcagctcccccaataattagatatttgaacatggtggaaatagtgaacctatcatctttaaaacaaaggatataaaatctaatagagtggataacatgattataataaagatataaagattataaaatattaaaagttcaatattgtcattagactctaatcaataatgagtatatcacgtattatattttgacatgaagaactatttagccttagagctttgaaatataactaagaaatctattaaaataaattaaatagaatatattccaaagtaactaatgttttcccatattaactcagaataactttgtctgaaattaaactgaatatatatcatttatagatacaagcatagagtttaaattcaggtaatcttatttggatgtacaaaccgtgaatagagacattaaggaaaagtagtcataattaattatatcgaatcttcagagttcacaccattcctcttcctaaaaacacatacaggtttaggctgatcaagatatcaatgtctgctctgagatcatcaaagtaatgcgtccattctaagaagcactagtggcatatatgatcacggtagaagagcaagaaaaggagccctcacttagaaccccataagacaggaaagatacagcatcaacctctcctctccagtttatctgtgttatggattgtaagagtgttttgaaataatattttacttagtaaagtaatatccacaagcatttcaccatgaaaaacattaaacattttaagtatataatatgaaatataccatctctgatgattatttttattgaccatattcttgccaactctaaggtactctaacactagaattttaaacttgttatatttgttactttggtacgaatgtcaaagaaaggtattacctgtaagtattagagcattcctcattgttcctaaacaaagaatttctttttatgtagtctgcactaggaattggaaatgatgcacataaaatacagctttttaatctgtgagattgtttatgcatcttaggtttgcttagttttgcaaatgcgtgcatttaaaatcaccatttgtattttgaactcttctggcttttaactgtagtggaaatttggattgaagacaatggaaaccgtgaggtacaatatataaacttgcatccaaccgagaaaaaccactactcttatctgcacttcaatcagcaggaggttctttttcagtttgtttagaaaaagtagggcctgtcatctgcatggcatacaatctttacaaagaaattttcttttgccctttgtgttttaactactgagtgctgcagaaacttctgtctaactgcaaaacagtttaaggtatcatctatgacaatgttaaaagtaaaacccaatcaaagtttatattatcatgcataatagaccaagcaccattatctgaataccaaacggggccaaataattctctatgattcagatgagacataaaagtgctttaaaaacaagtatgtggtaaaaatcactttggaaaacctttggcattatctaatgaaattaatatgtgcctactctatgatgttgcaattcaacttgtaagcatatactcaagagaaataggtgcacatgtgtacaaagacatattcaagaatgctcataacagcactattaataatatctaaagctggaaataaccaaatgacatcgctattggcatgaataaatatttcatagtatcataatattaggaatactataaagcagtaaaaatgaacaaacaactgttatacccaacagcacgggtgaacccttaaacataatcttaaggaaaagaaattagacataaaagagtatacagtgcctgattccattcatataacattcaaaaatagatgcaattcaactttcatgctagatagaagtcaggatactagttatctttggaaagggtagagatagggaggattcttagtatgggcaatattctcttttgatctatatgatggttacataggtttttatatgtaggttattaaaataatatactgataatatgatcatacattgaggtttttatttattacaataagttgagattattcaaaggtacatttgttcatttttctatacatatatacattatatattacatatacatatatataccaatttttaaaatgttctaagagaaagaaaagctcaataaataaaaacaccccatttccttgtcactagagatgaattactattatgttcaaatcgtatatacagcatattttttatatatgtatctaaaatatgctgaataagcaaatcaacaactacatctagacttctgcatcgcaaaccagaactacatttaaatgcattttatctcacacttaaagaattaaaataaaactcttttctgaacaatcttccaatatattgaccataagtaaatgtaatatgagtcaattattttaaccgttttgtaactcaatgtctgttggatttatcttgatttttataaagttcagcaattcaatttccacattttcttttgtttctatttttgtgaggcactatagtttttatgtaataaatgttactgatatggcctcctacttagaaaatgttattcatgagagtatattgattttagcaaaatttacatatttacatatgtacatccacaggtttgcatatgtaaaaatatagattatttacttactattgaaaaagtgtattatggaagataaaaggttttcatctctgtcagatacgacaggtgaactttggtaacataaggcctagcaaagttttattgatcttacatatatatatatataaaatggtttttcataatttcatgggatgcatcatccaagagaatgatcacagtgatactaattactgccattgactagccacctgccacatgccagacacatggtgacatggctgatgataacatgtgataggtgtttcccaagagagtccctttaaacaaggtttttttcctgtcttcatattgatgaagtgttttttctaacgccattatttcatttattctatgaaagacaaaattggcattttaaaagtagaacacggtcttttgatacctgtcatctgagatacccaaaggattttttttttaagttagcatcaagggtaaataataacaaatgaagttattttatgttagatcttgtaggtctaaatatatgcacagcaatatttaacatcctgaaatcagaaattttgtttctgatggcatctctttccattatgtgatttgaaacattttagggatattttcctgtctactttgcatggaaaaaactacagactttgtcaaatctagttgccttggaagaagaatgaataagaggagatgtgttaaacaatacaaaatatttttgctatttcaagtttgaattgattttgaaataatagtttcaggctaaataataaactgtctttttaggaaacaaaagaagtattttagaaaaagacattaaaaagactttattaaaatagaggacatgatgatcttgtttgttgctttaagcagtttatgtagtaactttaaggtggtagaaagtgtcaggaaatcaatttgaaggcaaatcttcacatatgaaaagaatcagaaatgttaactcaggtcttaaataaaaaggaagaattaatatgatatattaaaagtgatacgaaagtcaaaggaaagattgatgagacttattaatatgaaatgaggtttcttcaataaatatgtaagtacaaaaaagttaaattgtattaagaaacttgagatttaaaaaaaaaaaaaagcgaagtatttaaactacccctcttgagctcccagccacattcctcttagttgtctaataataacacttcttggctatttcactggatatttctaaatgatagggtcctattcatatatctcaacttgtcaatttttaatatcatcaattgacattccttttttagaaatcatgacttagctacttatactccatcttcagtgcttatccttctaatgtaatactatcataattttatttaaatactatatgtcttttatgacgtaaatattgtctaatactaaaacatctactattccatgtttctgtgttttatcttaagaggttaattttatttgtttatttttcctgggtctttagcttttcttgtattcttgtcctatttgccattattatattattttcccactaacatttcaaaatattagttattctaaatagtctgacttttctttagagttcttcactcaaagtcctctatgttctgcctgaattaggattgattattccctatgcccactgtactgtttttctacattggatctaccttgtcagggatccacaccttcctctttcttggtttactttctcattttgctggagcacatcctcaaatggcttcttaagaaatattacatgggcagtgaattttctgagtccttccagtttaactcattgcaatatacaaaatggcaggcccattcaatttatatacttattccttcaagttttggtaatttatctgcattattattaaataatatattaatatattacttaaaatataaattaaaacataaattccttctaatttctccagtctacttttttgaaactcccatgagtcaaatttttaccttgttgtattggtgattgatattatcatttctctcatattttcagtatttttttgtttctcttttgtgggtgatgccttcaacttttttgtccaagagtcatattaaaactttattttaaaagatttgtatttttccctttttaatattattctatttttcttcttgaatctcttcaaaaatattaattagcagtttgcttttaaaaatattatcagttttttaaataagcatttgtcctccagattttttcccctgtttaatgttgattcttcttttccatgagggactatttacgcaacaatctacataatctttattccctactaacatttaactgtgatatcctaaaatggcctgattgaggaactgattgagatgattaagagctctgtagcagggcgcagtggctcacgcctgtaatcctagcacttctgtgaggctgaggcaggcagatcacctgaggtcaggagttcgagaccagcctggccaacatggcgaaaccctggtctctactaaaagtaccaaaatcagccaggtgtggtggcaggcacctgtaatcccagctactcaggaggctgaggcaggagaattgctaaaaacttgggaggcaagagttgcagtgagctgagatcgcaccactgcactccagcctgggcgacaagagcaagactccatctcaaaaagaaaaaaaaagaaaaaaaaaaaaaaaaagaagtctgtgtatagggcaggacgaaaggtgatttggtagaaagctagctgttttgccaggcagcattaaatgtaagaatgtgcagattttttcctctgggatcctgtcatttctccagaatggtaatctccatacttattcctggaggagaggtggttacaagtattctggggccacaactattcttggccttttgtctacccctgaagtttccatcactggaataaactggacagttagacagattaacatgagaaaaggcatacacattcattacacgcacatgtacctggaaggcaacaaagtatgagacttaaagaggggccagatggttgaaatttagatagcatctggagatacggaaggaaggaaataaggacttaaagtctcttagtaggtggtggcaacaagctgtgggagtgtgaggagaggaactgcatggcaagcaaaggttgtcatatcatgaagataaagtctctaaggtagcaatcctcagaagaacacgtgaaaaggtgtcccaggcgtggtgtcccgggagtttcctctcctgagataggatttaatcttctctagttcatgtagattccagggaaggggttcatgacaattacattccttctggaggaacttcccttagataagggggaacttcagagaaagcctctccctgtgcttgaggagaggcagaggggcgagagatgggagtggaaggcaagtcagagagaacttggttctaaggtggcttctttagtccaaagtgctcagctcctcaaagcgccatactttggagtactattttctgagccctaacagccacaaatggaagaagtattcccctgtacagaaaagtttgcattacttttgtcagattatgtctcttaatataatcacattttatgaataagttttatttcacttaacagatttatttattttttaaaaccacaactttaattcccaagtaactcttagaagtttctcctttttggattttcattttgatgtttagtaggcttaaattccagtgtttaacacaacccccagcttttgagtcacagtttatttcattatagtagacccctgattgccaaattacaatatcttatgaaccgggcaaaatgttgacttatttaggacattatgttacctatttattccaaaatatttcatttgaaaatcagctacattcccatgtagacttttctttatacaaaagttaaaataattacagaaaggtaaattattctgatgctaaaattagcctttcattgatttcaagtagattgtaattggctaggatcaaatacatgctttatgtaatacagtttatttcttaaactgatacagaaagtgcacataattctggaagtaaaaatgttcaaaagctaagaagctctcatgttatttttcttcaatttgctacaaacatatatagagtgtagttattttctagccataagaattagcagaagctttggagagaaaaggtaggagactgaatgccctgagcatccctttgaatagctcaggcaagaagaggtgctattatcccaggaggagactgtaagtgacgtttgtgtaattcaagtatgtcctgcctggataaggacttgtgggtaaggaaacagagtagtaaatagccaaagggaagaaagtcagaaaagcttgctgtgttcctccacttaaatatatgttatttctttagggactgcaggttttacaaagagatgaagactaattcggaatgctacttacctctgtttccaaaagaaaaagactcctccagaatgtggttttaagtaggccatggaccaaaagtaggccacaaggcatggcaggcagctttatgaacttcaaggttctaggaaatttcatccattggagagttctccagtgctttaaacaatattagaaagaaaacagcggtacaaatcaaccatgctagtaaaaatctctcctgcaagacattactgagtggtgaagactaagtggttttgccattgttgttgtattgttggttggatggtttgccttggatatttgcttgcttcttttttgttgatttttagcatataaataaaatttataagcccaacaaaagaaaagaaagcaatctttcaagaggctttaagataacatcatacattttcgaggtttttaaggctgagattctattttgttttacttaaaaggaatgttacaatgctgttaacgtttttgcttattctacatttttgcttattcatgaaactcgggagaaattctgtctattggcaggctctcattgtgtattcatcaccacactaaccactcatttactccgaaattaagtgctcagtgatatgcatgttataaattcattctcagttgcaaaattttcttggtgcttaagaaattgtactttaatcgcttttagccaaaaagtttagcaaaaatagtactttgacatagtactgacagcctgtgcttagattttgataaatgtggacaaaatcaatagatagatgcataaggagtgcccagataaaatcatcatacttcaaaagctttttctaacataactcacagctgtagacttttcctttcaataataagcaaaaacaattttcatagctacaaaccgccgacacaactttctatttaaagaggacttctttgcaggaggcagaataataactcaacaaaataaatagaatctctaatttcaaaatactattatccccaaaagtaatgggaattttaaaaattatttagtgtttccagtttagatatttaagaacaccactcacatctacatgccaaataaattgactccaccctccacccgttatatcagggccccactccatccattgtcttttttcttagttatatcttgatatgtcaccctattagttttttccttgcagcatttcacttgcttcttgctttttttaaacaaaaatttatgcactaccctccctgcatccatgttcctgctgcctcatattcattcattcttcagctggtggcaatcagcattcagtttctctccataaaactgttattaaatccaataagcctttcatttctgaatcaagtgaagatttttctctatctttgctgaattctttatggcatttaacatgtcttttcactccatctttctttggggactctcttccatgacttctaagacaacactttttaattctcttccaccattttaggtttgtctttgtaggtaacctttatagattcttctgtgtaatccttacataccaatgttctgaattccattctgctcctctttttccattccatagagtctgattgtgtacttgcaaacacttccatggtatctatttcaagtgtattttgaaaagtctaacatctaggctttcaacttgatctgttgtactttctgtattctatacctgagtgtcagcaaagacgcctgggagctgtctttgagtcttccttctctcttacctccatatttaatggattaccattctcattgattttaccttcttaatttctcttaaattgattttctttctctatacctaatgttagtacctttccgccatgtttctatctggtttacattgctggaacagcacctgatttgctatcttgttcttagtcttgccatcccaacttagtccattcctctgatgtcttttcctttatacagttatcataccatttatcaatttgcattatatatctgattttatttacttataagtcatgttctttgttagctcattaggtaccaattttatatcaatattatttttctgtttgtcattcagtccatttttgttgttgttgttttggtttggttttagagacgaggcaggtgaataggtatagactgaatgctcctaagctagatgataatgaccaaatgattactgagacagggatgagcgatggtcagtgaaattgaaaggatattttagcagctgctttaacaagtatctgggaaaagtccggtctcttccttgcatttctgaacgttaatttgtattaaaagcagcatgactcagaaattttatataaaactcaaataaaccttagaattggatcttatcgagtattgtgttatacagagaatatggagaatatgtgggataaatgagtcaaatggtatgttaaaaaaaaaagtaggaagcatgatagactcaattcttaattcctagaggaaacagagttatgtccaaggaacatattcaacccaatcactgtacagctgtagctttttcttttctttctttttttttttttttttttttgagacagtctcagtccattgcccaggctggtgtgcaatggcatgatctcagctcactgcaacctctgcctcccaggttaaaacaattctcctgcctcagcctcccaagtagctgggattacaggcacctgccaccatgccagctaatttttattttatttttttgtatttttagtagagacgggacttcaccatgttggccagcctggtctcaaacccctgacctcaggtgatcctcccaccttggcctcccaaagtgctgggattacaggcatgagccaccgtgcctggccaatttttctaaataaattaatatgatgatgataatggtatatccaaatagctacccagtttttgattaggcagaagtatgcttatggtcagtcagagtaaaaagtgagaccagcatggtggcatgcacatgtaatcccagctacttgggaggcggagacaggaggaccctttgagcttaggagtctgaggttatagcacactatgattatgcctatgaatagccactgcactccagcctgggcagtgtagcaagaccctatctctgaaaaaagaatcaaaggccttaagaaatattttatttttacctcagaaaatttaaaaattaacttagagctaaatagtttgggtttcattatgtgtagaaatgaatcttgcaacagtaacagtttcccattacacattataagtgtctgttttgagtaaatttgttgaggagtctaatttagtttgaatcactgggaaaagacacaattgaggttttataaaatgtaaaaaatcaaatgaactctgtacttccacttttttacataaagtacatcttccacttctagttacaaaaaattttttttttctcacttgagtcgtttatctgtagtaagtaaatttgggaaaagtgcaagtattcatatacattgttttgcatttaaaagaaaagtgataatgttcaaacccatgctatttacaaaaatcaaaagctcaaatcatgaattctgtttgtgttaaggatttaaaaaaatagtggcgtgagaatggttattgctcttcaataaagatagagataccacgttttgctttaacatatctagaggcaactttttcatcgatagctttattagtaggtcaaggagaaatcatacctaagtagaaaggtccgtggagaaaagagacaaaccatatcagagttaaaattaaattgaaaaaatttaaatcaaggaaaccattttcacttctttcgatatgatgtgcaaaatcatgcattttaaatgggaaatgggaaatttcatagcttcttagcaatgatgtgagctctgtggtctgggtggatgcagggcatgtgggtgcttttgctcatttaaggaaattgcatttgaaacattctcaatacattatgtagccacaagaaaatttatagtgatttctttttggtggaacaaagtatatgctcttttccagctcaggatccttttccagtcttcctacacttaacagccagtacaaacttagtccatagaacgtatttgttgtgcacagacctgcacaaacacacacacatgcaaggtttcacgaatcaggtatgtattttgtgtatgtgtcaaacttagccatcaactggaatttgtgttttagtttggatgctgatttacctcatcagtaaaatgcccttcacttactctccctagacatagactattttccgtaaaatatgttagtgatttcatatttaatgtgatatggaatagaatgagaggttgtgtgaaattaaaatcatgatatcaattatctttctgtcatgcagaataaaataagtgttttgacaagatataaaaaatatttatggtaattaagtacattcatactgtatcagctaaatttgtagaatattgatttctgtattaaattatgtaacattttaattaaaataaatatattgtcgagttgtgagcagcacagtggtaagaatattttgcatgaagatggttacataaatatgcactaaaattgagtctaactgcaaaaaaatgaatgcagtagctacacatttagaaagaagttctaagaataaagcagtttacaaacaaatagtatatatacatgtatatgctttgttagaagaaagagaatttattgtgagtgggatactttaactctttcagatgttaaggattctatttcccaaataacttcattcatgtaagaagtatatttcatgtgagtcaggttttattctctaggtgttttctaatgtgggaaagtgaaatacaagggtttgaaatggttctggggatgcagtctttcctgtcagattccagcagatgctgatataatttaatattcgtggaagacagggcaaatatagaatagcatcaaattgattttgcagagttttcaagccagatgtcccttggcatttacatggaagaagtctactgtgtaccaagttgcatatttttgtgtgtaagttctcagccatggtatgtagtcattggtgttttgacagccatctgctcagacctttatttctctgttcagccataactaaaattgaacatttttcaaatgttccaggtagtttcaattttaagataacagaaaactagtattcaatggttaaaaagaaaaaaagcaatacctatctttggcttagtaataacccctaaattgaaagttaatttcttataaatagcagtgcaaaatgaacaaactttgagaacagaggcctcaccttattatcaaatgagtttgttttaatcatgtggaaggctctcagctagacactgaggaagttatagaaatgggtaattccaaggtgaatgttccaaggatagctatgtcttatacataacaagcacttcatcattatttgctgaatgaatgcgtatgttagaatccatatgtaatagcttgtccatttgcacatattttcaccccactgatagtttttaatatgtggaggtacacatacatatctctgtgttttttgtgggtgagatatgtaggctaacatgtcgtaagtgaatgaaactgtgtttgataagaactgtcaagtgttgactatgcacctattggtgtgctagacattctgaagattcagaagaagtatacaacattatttctaatgttatgattacatctacagacaaagaatcaaacaatgattctttttaatggtaacttgtgttttttaatgttaaagatatgggccaaatgataaagaacaggaaaagatgagtttttttctctatcagaaggatagattttgagctaatcttgaaagaaatactaaatttagacttatggagaataatttaggaaagcaattgaacactacccaggggaggtgggaagtgagatgctgtgttcagagtgagataaggaaataatttgaccagagcatgggattttaattgagaatattaagagataaaattataataaatgtagggaaggtgtatcagagtgagattatgatatactatacttgaaatatctaaatgaagtatttatgtttactctaaaagtcaagtgagagagattctggagtgagacaagaatgtgaggaatggggacttctgtggagtttaatctatagtaatgcacatgaatctgataaattattataatctttgcttttagtagaaatggggatttagagtacatcagtacaggtggcgaaaaatgtgaatttaaaacatattttgaaaaacaaggataagaattagtgtttaaaagctaaaagagaagaatttgtgtcagctgcaaaataaagtaaatacacatacacatacactacatacatgctcataatttaaattatgaactattttatcacactctgctgtgtaagtttttctaactcatattgtatatcagccatgttgtattcttgcattaattaatgtattcattaaatatgtcttcagtacttttttgggtccagcattacattaggcagatatattattcagcaagttttcaatttagttcagggaaagagggatgataaatattattatgagtgtttagaaatattaagaacccgaatccatttatcagtttcataacaatgattttcaagcttgtttcatttctcacagggtagacaaagacaaaatatatatctcataaaagtaataatctaccaggcatgtttgttgtagccaagcaaatatatagaattctaaaaatattgtttatagctcttgtttcaacatgcttgggacaagttaatgtttacagttttgtgagtgaatgaatctatatactgaaaacatttcattcaataagttgaccttcttgaggtttgaataaattttggagcctgagggaatcaatatggtttttaagttgatctcctaggtatgtctaagtttaagttcttaatataattatcaaccctttattattttaatatttcattacattaattatcttttggaatattttcactgatcagtaacttctagtcataagccgttctggtaccaatcatcaaatttcatatttgtaagaaaaaatgactagcctttggctgtcttgacatgcccaaatccaccaagtatatatctcacttccaaaatagtctcaggatatgttttctagatatgatcttagatgatggagtgtattgttaaattaacaagtagtataaaaatagacaaaatattattaaaaatacaaggagaaaggaatatgttagaaacaagtaagaagttccatatggaaaactgataagcaattttttagaagcaaaaatctcatgacgctaaaacaagatgatgaagaaattactctgtgtgcaagtgtggagaaaaatagcttgtgataccatagtgatcttagagctcattatacatcagcaatgaagagctttaactaccatgcaattaaaatactagagagtataaataagattgtaccatgtgtatgtggcagcatataaaaactcagaagtggaaggaattttagtcaagtgttactcttgaaaaagcaaacggattaggaatatttaattggagaacaacatagacaccttctgtaatattattcaagtaagaatgtctcattttggacatcttacttatagtcagattgattctcaaaacactttttaaatgtctagaaatatttacaatggtatttatcctgagaaatgctaaaaaaaattagaaaatgtaaaggtgactgaagttaggaaataacataaaattggtaatgatgagcaattttcttaatggctgttcataactggaaaaaaacagatatgctccgaaatatatgaattgtgagataaactgcagtaaaagaccccaagaaattgagggaaactatggaaatgattgtagcaagtggtagcaagctatttttgtttgcattttgaaagcagtttttagaaatttctaattttgaaaatcttaaattgatttttaggaattctggggctacttttttctcagacctctagggcaaccaattgtagagacttcccccttctgttaattgactcagatctgcttacatattaaaggccacctctggttctcagctggaaaaaagagttcctcccttttgaaacagttgactcagaatcagttccttcctttcagatccttatctttaattactttgtcttctaacctggggtcctaatctttgcctaggaatttaaagtaaagattggccgaatcttatttctcttgacttgtatctacctttactttagctcaccctctgggcgtggcctctagccagtctcactttgagtatctttgaaactctctccttattgtcaaccccttactttgattattttttttaatttaatgtttccaatgtagaaatacatctcaaaaattatgcagaagttctatcatataatgttcttgcatgggtctgaagctctttgaaggcaagggtccttgactatgttgttcattgttgtgtaattactgcctagatgagtacttggaaaggtggagtgattcaatgaatatgtgttgcatatagtttaagaagaactgggactggaattagaaacacatgttccgtctttagcaaatcacccatcattactaatcttccattattttatctatgatattgagcaagtaatgcctatcccatctatattatagctttgttggaagactcaagggataaagtgaaaatgctttgtagagttcagtgctacacatttattatggtcaatgaactgcattacccaaaccaacattaattgtacataacatgtgacaaagaaaggcttatggttttggagtttgtttattttagaagaccagataaactagaacaaatattttccatgaagaagttttttttcgtgttagaactcatgtgattaaattgattcacaaaatttgaggtcatttattaattttatgaatattttactgagcacctatatgatgtcagtgactctaattgtctctgaaaataaaaagattaataaatcatggcttctgccttcaaggaacttagagtttagtggttatagaatgttggtttaaaaaaaatggcaaaaataaaattctgacaaaaactcataatatctgagagtttatatgtgcttgctaaatgaaaagaattattagcaatactatgctgaatgactgtaaaatgctgactttttacttgaaatatttacaagaggaaacagaatatttgtgggtttccctgcatatttatgtgtgtgttcaaacagctgctagagaacaaagtgttttgctataaacactgtcaaatctcactgtgaaaaaaatttgtctataaaacaagtattttcatagatatactaaagctgcatagaatttgcttttatagcataaaacagaattagatgcttgagtcagctatgaaatactttttcatgcaacactcattctaattctttacactatgcattaggctgaggcctggtgtaatttgaaagtgataatgcaatagagaaattccagaagctgggggtggggggaatagactggatattgcaaaatgcatcagttagtcaatcaaactcctaatttatcaaccaaaccaacctaatcccatagagaattcaaagtgactcacgaaaagacacacaaaagaagaaatgttttgtttattttccaagatggaaaatgtaaactatccagaggacagtggtatgggtttagaaagacaattcacacaataaattttaaggaaataatggttttagtctttgatgctaacattatttctgggcttccaagtcactaaaacaatacatacatctttttaaaatgttatttttgttgtgttgtttggttttgtgttttagtctttttattttctgacaaaagaaagtttgccatgtctccagaacaggcacacaatttatgtactaaatcctgatatgaatttcttttcttttcttttctttttttttgaaatggagtcttactctgttgcccaggctggagtacagtggcacgatctctgcaacctctacctcctgggttcaaaatgattctcctgccttatcctcccgagtagctgggattacaggcatacactaccatgcctggccaatttttgtatttttagtagagacagggtttggccatgttggccaggctggtcttgaactcctactcaggtgatcctcctgcctcggcctcccaaagtgctgggattacaggcgtgagccaccaggcccatcctctgatatgaatttcttattggagaatccctttatgtgtccagccctgtggtaggctctgagaatatagtaatgaacaaggtaaacaaaacatacatagtctctcccatcatgaagcttacgttccagcaaggaagctagaccttcaatagataattatcatttaaaattataccttgtaatcagtgctatgcaagaaaaataaggcagaattaggggctgtaatgaaggacctgtttacaaagcattaggaaagccctcatggaggaaataagacaaggaagaaacacttgtgaacaataggaaggtatgtgaagtgaaggagcgttaaggaacagagatttctagacaagccctaagcaaggaaaaagcagagctttattctagaatcggactaaaggcagtattcgttgaatgtgatcagaggacattgtaagccaggataatcattttgaattttaacctaggtacaattatgatctatttttaagaagactgacttgatcagatttgaatcttaagaaaactcattatgtaaaaaaagggctaaagaaaggataagggtagtcagcaggccattcaggaggctattgcagatgtccagatgttacaaatgcttgtgacttggccccaagtattggcaatgaccctggagagaagcagatggatctgatatttatttcggagttagcataatatgaaatgatgcaatggcatcaataacgactcccggttttctctatgagacactgggtgggtaaactaagatgtgttgagcttgagagaattcaggagtagctaaatctgggtgtcccttcgggtggggattagaacgctgaaaaccacgaactctactttggagagtaatattaaatttgtgatgttcctgagacgtctaaaaaaatggagatttaaccaggcatttggatatatagctctatactttcagaaagatacctggtctggagatataacttgggagttattgactctacagatggtgtgtaaatgggttggaagtgggtaagatttggggaagagaagaatgaaataagaaaatgatccaggattaagccctgaggaacgataatagttactgataaaaaaaaaaaaagaaaagaatgaagtaaatgaatgtgacttttctgtttcattttttctaagtcttttaagccagagaaaacataatgtggaacagtgtttttatgtgtgttttatcactagagataagaaattgtcaagctgtccttaaggaccagggagggcccatggggaacagcatctttcctgatgctgttgtattcatcaaagcatagatgagtctcttctgatatttttgtttgaggaacatgaatataagctcatgctcctagcatagcaattagtttagagatttatcattgttttatttttattttttgaattattaactgcagacaaagccctaaattttttttgttttctatatcacaagtacctttttttggtttaaggttctaaatttcattttccgtgacttgaaactgttttgcacttcctctccttgctttatattttgagtttacacactaacctgccaaagagacatctagtttataggcttgattttggaagaaagacagaagagagcagatactgaacatatgttccgctgatattgatgaagtgaggttggaagaagcttggaagcagtctatttctctccaactgccaccccctctatgaatattttgggtacccttatgctggaacattccaaataagtgccccagctatgggttttttttttttctcataatgattctgaaagcctttgggatgatttaggattgttctacaagtggaacataaaccaaaacaaagcagttcgtggactctaattttaaatgggtgatggatgagatttcaatgcaaattgtaaagactgaaaatgatgtgaccagagaagggacccctagatagtaagtactcaataaatgacagaagcagggtatagtatgaacctgtttcttgggaaaatagacttgaagttagacaagaatctatttaatcaaactctagatatgatgttttgctaacttttgttttttgttgctttggttttttggagtttttttgcacttcaagaagtctttttgatctgaggtagtgtagtcaactctaatttattaagcatgaagtgattggttacaggtattttaacaagtatttggaggagtttggggaagttgaagtacgaacacattatttgaagtcactgttacagaggtgcactattttgtccttcctgatgtagccattagtgttcctacaagaaatctggattatcatgacagtttttttttcttttttcctttttctttttttaattttagatttaggggatacatgtgtgggtttgtgacatgggtatattgtgtaatggtgaggtttgggcttctactgaacccatcacccaaatggtgaacattgtattcagtcagtaatttttcagtcctcattcctctcccagcctcttcccttttgtattcctgggtgtctattatttccatctttgtttccatgtgtatccattgtttagctcccacttagaagtgaaaatgtcatattcaattttctgcttctgagttatttcacttaggataatggcctccagctccatccatgttgctgcaaaggacatgatttcattattttttatggctgcacagtattccatggtgttcatataccacaccacattttctttgtccaaccaacacatagattgttgagcacatagattgagtccatgactttgctattgtgaatagtgctgcaacaaacacacaaatgtaggtgtctttttgatatagttagttcttttcctttgggtagatacccagtaatgggattgctatatcaaatagtagttctcttttttgttctttaagaactctccatattgatttccataggggttgaactaatttacattcccaccagcagcgtataagcattcccttttctctgcaacctcaccgatatctaatattttttgactttttaatactagctattctaatttgtatgacttggtatctcattgtggttttaatttgcatctccctgatgattagtgatactgagcattttttcatttgctttttggccacttgtatgtctttttcttttcttttcttttcttttttttttttttagaagtgtctgttaatttcctttgcccacttttaatggagctatttgtttttttcttgttgatttaagtttcttatagtttctggatattagtcatttgtcagatgcacagttagcaaatattttctgtcattctgcagttgtctgtttattttgttaattgtttattttgctgtgcaaacgccgtttagtttaattaagtcccatttgttcatttttttttttttttgcatttgcttttgcaattagtcttagtcattaattctttacctaggccaatgtcgagaataatttttcctaggttttctttttatggtttcaggtcttgcatttaagtctttaattgatcttgagttaatttttgtatatggtgacacatagggtccagtttcattcttccgctagccagttattaaatagggtgtcctttccccattgcttatttttattgactttgtcgaagattagttgtaggaatatggatttatttttgcattctctattttgtctcattgccttatgtgccatttttataccattaccatgctgttttagttactatagcctcatagtctcagagcatagtgtgaagtcaggtgatgtgatgcccccagcgttgatctttttgcttagaattgctttggttatttgggctcctttttgtttccatattaattttagaattgttttttctaattctgtgaaaaatgacattggtaatttgatagggattgcactgaatctgtagattgttttgggtagcatagtcattttaatgatattgattctttctatccatgagcatggaatgtttttccatttgtccatgtcatttatgatttctttcctcagtgttttgaagaaatcataatcaattcctggtagagatcttttacctccttggttaaatgtattcctaggtatttcacttttaatagttattttcttatgtatgtctaaattttaatcacagcaaatttatggtgtaatcctatcttaattagatggatgatgtcctttgttgggaatttaataaaatctaatactgcttagctggaccaagtggataagatgacatttgaatccatagtggaccttgtagcccttcttttatttgggtatctactatatagagaaaacattggtattctataaacatgcctaagatccattggagtatgtatggttagctctgtttattttctttttggttacaataaaaatacttaacattttcactgtaacctgtttggaaggaagagagtaagcaattttaaaaattaattcaacagagaaacatgtactactttttctgattaaaaaaaaaaagaagaagaagaaaagagcccacagcagctcagaagcctccaaaaatactcttttattttagaagctgaaaagggcagatctaactaatggtacaagacaaattgaaagtcctataaacaggaatagaatacttactctctttggttttgtttgcttctgaacaactggattcaaccttctttctttccccccagctcttaggcattgttgtgtcaggacagctatggttcaaattgggctgattttccagttctattaaacccttcatctgcatcgtggatcaaatacattaactagctgtctgcagtgcacagctggaaatcattctcttccacattttgctttgtgccatttttgttttataccaatatgctctgacacacccacatagctcaggatttcagcagtcaattatctccttttcttccttgataggtcttagaacattttaaattggtgtattctcttttgtcttttaaatattgaatcacttgcaaacatctctgcttgcatgaatatttttcaaaatgctccatagacctagaagctgaaatggaaagttagaatcattcaaacacaaattttgattttattcctttgagagatggtaggtgattggcatgaaatagcaggataaatattgtctaccaaaagtaagatgagagagagaggaagacagagagacagagacagaaaggataaggatcagccatgtattattgtaaacagtatatgatatcttagagattattttaaaatgaatatattgaagtgaattgttgcattgactgaatggcttttccatagaaagactccagctatcatcagttatcaattacattattggtggtctttacaaacttgactataaatgttgagacatttttcgagaaatacatacacatgtgtgtgtatgtgtgtgtataagtatctattggtatctccgcatgttagttaaaaatataataatatgccaagtacggacaatgaagacagctactccacaatattcatttaatttaatttttttttttttttttgagacggagtctcgctctgtcgcccaggctggatggagtgcagtggcgcgatctctgctcactgcaagctccgcctcccaggttcacgccattctcccgcctcagcctcccgagtagctgcaactacaggtgcttgccaccacacctggctaattttttgtatttttagtagagacagggtttcaccgtgttagccaggatggtcttgatctcctgacctcgtgatctgcccaccttggcctcccaaagtgtagtttaatatttaagctgataaaacaagaaaatatatttaaaaaatttttgctagactacattagaaagattttctttaaagatgtgagctagatagaggtcattttaaaatgatgatttatcaaattttacacagttaaagatagtgaaaataaagagcacattaaaaaataactagatggaaattttcactgtgaaacagaatttctgaagtgacacggtgttcacttctgatcatggtcattgtacaaccattgagtctttgtataattgctgtgagtagtgtcactaccattttcccttcactttttttctatagatatttaaatgaagcaactgtatacatatttattcattttgtcagttataatcaagttattctatcctaatctttctatcttcactctgtgtgtgagtctgtgtgtacataacatgtgatatttatatccatcttccttcttgatcatgagcaacaggaaccaccaatactattttacttaagctgaaatacatttgaaatataccatataacttgcagagttgatgggaaaatttgaaaaccagggtgagaagatggcagacatcaaggtcatccctaggttttgatacctgtacagaatagtcattgcttactgctgccgccatcactactttctctttcattcctctgatatgactatctctactcctatcattatctgattttccttatctctctagtctgtgcttcacatgcttaatattcaaattcctaggccaaagtcacatgtacatgccctaactgctatagggtagggagaagaaaggtctcctctatttacatttccttggcaggaggtaggacactgcataccctcaatagtagacacaatgccaattactcaagaaaagaaatggaggatgaatgttggacagccaagaaatgatgaaggtctgccacatttttcatataggttggctttttctttgaatgttttcacttagctagtgtaccaaaacagttctacatttccaccaaattaaaggtctgattagtttaatgcccttcatttgccatatttttctcaagaaagattatacagtgcatgaactcattcttattcagtaaatttaaatttgagtggcattatattccaactagtgctatccatgccctcagtaattttatagacttgagagccaccgtaaaaaatactaaagttacagtatgatgagggttctactaaatatcaactaagtaatatacggacaccaagaaagaaacagaaaattctgtgtggcaaagtcagaaaacactttcacagagcagggaatatttgagctatgaaagatgaacatgcaacaaaaagggagaacattctttgttgaagggacaagataatgtcatcacaaagcattttcaaaatgcctgctatatttgtaaataggaagagatcagttcactagatgtataagaaggcatgaaggaggatagcaacagatgagttcagacaggtagaaagcaggcctgattataaatgtttagatcaccaaggagtttgtctacgacactacaggtgacaggcaactcacaaaagtctttaaaaaagaaagtgagttttagggaagataatttcaacaacaatggggaagattaatgggagtagagtcacgcaggaagactaggaagggcagtggtgctcaacctgtttggcaccagggaccagttttgtggaagacaatttttccattgacagggataggggtggatggtttcaggatgaaactgttccacctcagatcatcagccattagattcttataagtagctcacaacctagatccctcgcatgcacagttcacaatatggttcacgttcctgtgagagtctaatgctgttgcttatctgacaggaggcagagctcaggtggtaatgcttgtttgccagccactcacttcctgctgtgcagccctgttcctaacaggccacaggctggtactggtctgcagccctggggttggggaccccgggttaggatgctactgtaataaatgtaaagtaaggttaggatatctgaatataaatgttgatgtgtttgtgtggcggggagcggtgtgtgtagctgaatttgaggtagagacaaaaagtaattaaactggaagcagaaatcttagaatggggaaaagtaaggcatatttgttcacaaagtatcttttaacattttctggtttctgtggagtcacattttattaatgctggttgacatttatctacctagaaaaaaatgacagaaatttcaggaacaaaggtgactatgaattaggtaccaatatttttgtggatgatcttcatgaagtcagccaataatggagatgagtatgtggaaaggatggattatttggactttttgaaaagaagttattgggtgaacatgatggctcatgcctgtaatctcaacagtttgggaggttgaggtgggaggatcacttgaggccaggagtttgagataaacttgggcaacagagcaagatccatctttacaataattaaaaaaaaaatagaaattagctgtatgtgatggcttgcacctgtagttctagctactcaggatgctcaggcaagaggatcacttgagcctaggaggcagaggcttcagtgtgccatgatcatgccactgcactccagcctgggcaacaagagtgagaccctgtcttaaaaaaattaaacaaattaaaaagaaatgaagttattgagtgacagttaaagaaactgatttgcaagtggccttcaggaggcagaagaaggctacttgtctttccccagtgattttatgaatccattgaggagatctgcagaagtgttgtcactgctggagaaaaccaaggcttcacttgcaaaaaggagtactttcttaaaactgagaaatttggaaatatatcataggacttgtaaagctatgatggaagttagcccatgagtgtgtttacagaaggcagagctagatggcataagactcagggatgatgcaggaggtgataaatatttttgtttagagtagtgagaagagtgaaacacagtagatctttaataataaaattttcactcatttggaattatgaaaattgtgtttgaaaaccagctgtgccatttaaattctgggtatatgtttcttcatttgtaaaattcaagtttgaactaggcttctttgaactaaattcttcttgccaccagacaacaaccttcttcttcatcacctagaggaacattgcctgaagcctaaggaagcagccttccctgtgccacacagaagaccccttaattgttcaatgaatttctcattgacttgtgtagtgcttcaaaagaaaacacttacacatcaaacatgattctaagtcaaagttcttcatttatatgagattaaagaactggaaaactgtacaagagaaatagtcacctgctgattgcaggcctgtgggtttcttggaaaaactcagcaattttgcttatccaggactatctttttgcccagttcctctgattctgaaggaagttgaaaagatagttttcctttgctgtatccaacatccttttctacatttgatttaagaaatgtcaatttaactttttattgatactgatattgaaaatacataaaatccaaagaatgagataaatcttacatatgtgtcatatttctatagatttttttgaccaacattttattttgaaaattttcatgcacttggtaaggttgaaagaatcatacagtgaacactatgtactcgaaatctagattctaaaattaggccaagcatagtggctgatgcctgtaatcccagggatttgggaggctgaggtgggagcattgcctgagggcaggattttaagaccagcatgggcaacatagtgagaccatgtctctaccaaaaaaaagtaaggccagcacggtgctgcatgcctgtagttacagctactcaggaagctgaggcaggaggattgcttgagcccaggagttcaaggttacagtgaagtattataatcatgctattgcactccaacctgggcaacagaatgagaccctgtctcaaaaaaaaaaaaaatagttaatgccaggcgtggtgactcatgcctgtaatcctaacactttcagaggctgaggcaggtggatcagttgaggtcaggagttcaaaaccagcctggctgatatggcaaaaccccgtctctactaaaaatacaaaaattagctgggcgtggtggcaggctcctgtaatcccagctactcgggaggctgaggcaggagaatcacttgaacctgagaggcggaggttgcagtgagttgggatcatactactgcactccatcctgggcaacagagcgagactccatgtcaataatagtaataataataatgataaattaatttaacatgtttgagtagggaggagatatgtgctttatcacatatctatccatctgaacatatctacccataaatccattttatcttttaatatactgcaaacctcattcctatacacatgatcatgaatatcattaactggagttaaatactgctaatttttttcaagctcaaatttatctacattgaaatgcataaattatcaccccgtgtaacattcactcactgaatgtaatatttaattaacaaatacatacaccattataatacaaactgctatcaagaatattatcatcatcccagaaattttctttatgcctcttcccagtcagtctctgcccccaagctcccaaaggcaaccatttttcctgttttattttcctaaaagattaggtatgtttaaaaagatcatataaatgaataatagagtatccactctttggtgtaaacttatattatgtggcataatcctttttggagtcatcagcattgttgtgtgtatcagtaatttgttccatttttatgttgaatagtatttcattgtttaaatacaccacagtttttgtatcatttcccccattcatggaaacctaaggtgtttccaggtttggctattatgataaaaacttctatgaacatttttgtttaggtctttttaaggacatgtaatgtcatttatcttggatatgtacctaacaggggaaaatttgaaggacttttatatttattaaaaactacctgttttctaaaagggttgtgctaatttacattcccaacagcaatgcagcagacttttgattgttctacaaactttttaatatttgatgttgtcaatctttttaatataatgccatttaatctaaaacatgagaactttgtcaatatataggtccagttactgtgatctctcacccaccatttctttattatagttgtcatatatattctatttacaaacatatgcaatgatgtgattttttgccttaaatattaatatgcatttaaaagaatttaacagggaaaaagtctattgacatcaaatgtacttatactgtcttttatcatctccaattttctattaatcacatgtagtggatttttttttcattctagatactgtgttacatttttcagtcacagaatttatattcaatattttttgttgttaccatttcttttttgctacaagaattttcgtatgtgtgtatgtccttgagtatagtttaaaagctgcttgaagatgcttgtttgcttattccaacatctggttgatctcagtacaatctccgttgattgctttttctcataagtatgagttactttttattgcttccttgtatgtctagtatttttttttaattgcaacctggatgtcatgaataatagcacattgtagaaactctgggttttgttatgttcctctgaagagcactcacccattcttttttgttgtcgcatcagttggttaacttgactgggctcaaagtcccaacttttttctttcctgtagagtgcagaacctaaaatctctgttcagtttttcagccctagctgggctacttggaatctgactagggcaggtgtaggtctggcatcagtgagcaatttggacagagtttatgcacagattgaggctccctttctgtggacctctctttacacctgctgtggctatttttagttttgttcactagttcttcaagccagtaaaactgtgggtttctatttgagttttagccattctggagctcatccagtgccttttccttctaagtattcatagtcttcctggcttacctgttcttaggtgcactccagatatctggtgtttgctgtgtgtatatatatatatatacacacacatatacatacacacaccaaatatatacacagaatttatagctgttatctctgggagctttgctccaataaaagctacttcacaattattaaaaatagaacctccataagtagattttaaaatgtttctgccatttgaaaccaaaaagtgggattttgagaatgtagatcatcaaaatcatgccaacatgtgtgaacatactacattatttgagaaagcaaatatggtataaacacatccaaataaaaacagtggaagttaggtgatttttttcaaatgtttgccatattgtagcagaatttcagtttttcaaattttcacatgatatacacttagcctttttctagatatcctattaccatatatatatatatacactatagaacagaatatattattctatatataatatgaatattctaatctctaataaaatacatagtataaacagaatattgtttgatttttgttcagacattgttccttataaccagaactccaactaaacttatttagtctagtgctattcagaaaaaaaatgtcaatcatagttgtatggataatgatcactggcttttatgtcattaacattacaggaccttaagttgagttaagaagatgtaagtcaatactctctaaaggttcatcagctatttatagttaatttacactcctaatgtttacataatcttaaccaagtaacacatattgaatatggaaataaatattgccctggtgcttttgaatgggaataagtaggcacagcataatagatttaacatataatgaaaatgggttgcaatctataataagacatgctgaagattcaataaaagctcagatattgattcattcttcaaattggtcattcattagcaactaattggagacctttgctgaccaatatgcttaaccgatttttaaaaataaacagcaaaatagcaatgaaatttcataaagcaactattccctgaccataaaacaaggcaattaaattgtgcaaaggttaattttgagcacataatcagtaactgtaatagaaacaaatcaaagaaaagaattgaaagatcctaaatgtaaattttattagtgtctttagttttatggttagaaaactctatgaagcaacaatggcatggtgagggataagttatttgttttattaaagatttaaataagctttaccaaggaccagattttggttctactttaggccctgacaagaagtcttgtaagctttttaaagagctcacttcaaatcatagttatcaatcttactaattcataactttgtacatatcatttatcttctctgagctgcacttccttcatttttataaagtggaaagaattaataaaatttatacaatgggttatatgggaattaaataatatgaagaatatagaatagcttcagaatcaatgtttcttgtactctgtaatccctttgtagctgtatgcttttgctctctttatttatttaattatgtgggataattggtacataatccaattctatattttctgaacatacaacataaagaaaatactttatccctggtctcttttcttggcttcctcccatgattgctgaggcctgggaaagtacaggcctggcctgctccaatcaggtctttcagggcagaccaaagcagggcacagggagtcttacccatacctgcaaaacaggaatgaggccatggtcagggtcagaactagtcagtgctgagggaggaggcaaaaatccgagagaaaaagtgacaatgccctggtgaagttttagaaatgttagcacctgcctgagatggcttttgtgtaagtaagctggctgtctttgaagggggcagatggagctagactgcttaaactcatcatataagcgagcaagagaagtataattttgctctcctttaaacagaattcccagcatgtctctttgttcttactacttatttttctatactgtaaattaaatttttaaagaactggagaaaagtccactaaaacaaattactaacagtgacaaataagcagtgctttatgttaatatgtaagtgcaccattgtattagtccattctcatgctactaataaagacatacccaagactggataatttatagagaaaaataggtttaatagactcacagttccacatggctggggaggtctcacaatcatggtggaaggcaaagaagtaacaaaggcaggtcttacatggtggcaggcaagagagcatgtgcaggggaactgcactttataaaatcgccagatattatgagacttatttactatcacgagaacagcatgagaaaaacctgccctcatgattcaaatacctcccaacgtgtccctcccacaacacatggggattacaggcgctacaattcaagatgagatttgggtagggacacagccaaaccatatccaccattatgtttattcaatgtgtaacctatatgtatctgtatctatagccacatctatatccagacaattacataatcttatatgttgaaacaattacagattcaagtactctgactcactcatcatttacataagctttcagcagagagaccatacttatatgccattccctctgcctgatatgtttgttttttctttcttcattttccctaacagataaacttctatttctccttgaaaattcagctcaagattacttcccatgataagcccatcttagtaatatttttattctcagatcctttactgtctggcataatatgtgctcaaaacatatttgatgaaggaatagttgtaccgttaaatgcaaaatggtgatgaatgacaaaatagaaagatatacagacaaactttatttaatcgcatatcatttattaacctagaaaataaaatgtctaagatagataatggcgtggagaccatctaattatttttaaatttgtaacctgacaaacgtcacaaaattgttaggaagttttcactaaggcttatatcatggaaaagataaaaaaaaataaggtaaaaacttttaaatggtactctactttttataaaacattacattttctaatgaaataaataatactttatgaatgtttaatatttctctaaccaacaattacattagctttccttatgtcacactgacagaatgtctcattgtgttggggccagagagcacagagatgaggggggaataaatgtatcaggaacaataaatgagatagtgattaagtgaaaaagtaagtaccattggcaaatcaggaaaaattgggaacctcaactttcagctgaagaaaaacacaaggcaggaggccagatgagagttgggggtcactattttggaggaacaggattaagggatttttaaagacatatgtataaggagggagaaaagaaagaaaagattctttgggggcagctctttgggagatcttaagaatgactgagacaagaactgagttgtcacttgatcttttgaattcatttacctgtggaattttttggagtgattacaataaagatttaaactatttataattgcaatttttactgtactattatctttttttaacagaaaagaaaacttaatagtcaatacatactctaataatcaaatattataaaaatcttcctaatttactttcttttttaattttttgtttctttcaatgcaattctaaggccaaccaggtccgcaaggtagcactagatctatgctggtttcataaaacattgtagatgccattcagtagagtgattaagaggatagactctggagccagattgctttggttcaaatcatagctctgctacttgctagctgtaatcaggagcgagttacttaacacctctctgccttcttaataaaatagagataatagtggtatgaagctcatgtggatgttttgtgtagcaaatcattgtaggaacagtgtctgacaatagtgcttggcacattgcaaacattcaacgatgctggctattatgattataattattattattatatgcagatgatacagacaaacatttatgagtccaatatttataatctaattattcgtttattttacaaatacattgagtgcctactctgtccctactatgtgccaagctttgaggataaggcagaaaatacaaattcaagatctagagatcttggtaaaaaaggcagaaaacacaaactcaagatctagggatctcagtaaaatatcaagccatgagatttagtcaggaaggtttcttttttcttttctttctttctttctttctttctttctttctttctttctttctttctttctttccttccttccttccttccttccttccttccttccttccttccttcctttctttctttctctctctctctctctttctttctccttccttctttgcttccttccttcctttctctctctctctctctctctctctttcttgacagagtcttcctctgtctcccaggctggagtgcagtgatgtgatctcagctcactgcaacctccacctcccgggctcaagcaattctcctgcctcaggtttccaagtagctgggattacagatgcccaccaccacgccctgctaatttttgtatttttagtagagacagggtttcaccatgttggccagactggtcttgaactcctgacctcaagtgatccgcccacctcagcctcccaaagtgctgggattacaggcgtgagtcaccacacccggcgaggaatgactttctatcagaagttgaattgatatagacctacttggcacatatatagagctgaaacaacctagatggtcggcatattttctccataaatagagtcaaattatctgtaatttcaaatgtactttctccaagaacagatttttcagttaaagagtggcttttgatgagtgactttgctatactgttattgaaaaagggtctataatatgcaaatgctagacatgtatgaagcacaattgacattaacttacaggaagaaaagagactgaatttggttctcagagggaataaaaaaatctccccagccctacacttagatggacctctgagatcgtatctatgaaagttaaaaacttctattatatctaagacataattactggtgtatgatcatggaccactataatggcttgtttctggcaatatattgctttattatattgctggatggcatggaaagcagtaaaaattggtattccaaagtaaacattatctatcttctctagtctgggataaagaagttttaataattatttacactgaaggataattagagcatgaaatgaccatgaaaaaatatatttgcatagttgtgcagaaacattaacatgcaattatgtcttgatactagatataaaatatctgaaatggaagatggaagatttagtgggatcttttaccaataacttcaacagaagatttgtgttttagaatgtgtcctagagacaggaccttcttcctagctaaatattagagataaaaaattaaaaagaggcttaaagtccatacttaagacccagaaagaaaaatagtattcttttgataacacatagtatttatgtagtatactgaattgtcaggtatttatcattaattatctcatgttgggttactttaatgctccgaaaaatattttatctcaattgcttttaaaatgtatcaaaatcctaactttgtttctggtctacacaccttcatttgtccatctttttcaggtttattccctgctgtcctgaatcttgcttctaatgctcttatcacgaccaatgcaacatgtggagaaaaaggacctgaaatgtactgcaaattggtagaacatgtccctgggcagcctgtgaggaacccgcagtgtcgaatctgcaatcaaaacagcagcaatccaaaccgtatgtattttagtgtgtaggtgtgtggcgctgggtaggatctataattgtgagatgttgaggccaagttgcattaaattcaagggtttgtaatactaagaattcctagaattctttttaccattaagagcttcttcctggcccctctctgtcattcagcaaacattattggagttcctgctatgtgctaagtacagtgattggagatgattcgccagctgaaggcctgtggcagtcattgggtttactaactccagataccaaagtggtttctgagggtgtggttattaactcaggctgtcatcattcattggtaatttatgtgccagatattgtgcctgagatccaggaggaataaggtaggatatcgtctttgagctactgatatatagtgtggtaagtacaaaggaaagaatgagcacagcgttctgcagaagagagaggatggccacaaaggcttggtgtaagtaaaggcttgccagaaggagcgatatccaagctgatgaccaaggacatgagctaaacaagggtatgagataaacaggtaaagaggtgagggaggggaagaggagaagtcatgccaggaagagaaatcagaattagacagaaaatcctagttactcggggagctacaagtaggaatgactagaactgaaagtgccaaagggcagagagtagagatgagactagagcaaaaggctggagccagattatgaaggcatttaacaaccacaggagaagtgatttagggagaggcaccatgtaaagccctctttccagcctctatgaaccacagtgatacctcagactcattgatgtatttattcaacaggcctttgaacacctcctactagcaaagcattgtattggagcataatgttaaattacacataacccctgattcagaggacctagaggggaaatagaggcaaaagaaaagtaaattcagtgctaaaataacatgaatgctccatgtagatgctaaagtcatctaaagatttctggctaagaaatctttatatctatatatctctatctgtatctatctttctgacatgccttcttctcttctcctcgcttacctctctctctctgtatatatataatatatatataaaatatatatagcaggtagatatatacttatatgtaatctacataaaggtaaaaatatatattatttatatttatttatattatttttaatgaacagatatattattttatttttattttgtttttgaggcagaatctcactctgtcacccaggctggagtgcagtggtgcgatctcagctcactgcaaccgccatctcccgggttcaagcaattctcctgcctcagcctcccgagtagctggattacaggcacgtgacaccatgcctggctattttttgtatttcaagtagaaatggggttttaccatgttggccaggctggtctcaaactcctgacctcaagtgatcacccgcttcagcctcccaatagatatattttttgttaatattatttcatatataatatattaaaaggtagatatatattatatgtagagagatatattttacatatctatagatcgatctatagatatctatatctatagatcgatctatagatatctatatctatagatagatatatagaggccagaaagtaaatgaattgatggattattagtttcaggttcattaggcaagatgataaagcctgatggagggaaaccaccattggttcagagactggtggccttgaaaatttcatgaagaatatgagaaagcccaggggcatgaacggagttgtggggaggaggtgcgagtgtgtagatgtgtgtttaggatgggctgtgcagacggggagaattagagagataaaatatgtaaaaccataagtgtgtgtatatgtatgcaggtatatatatatatatgtagagagagagagagaaaggaggtaataacgtgaatacttaatgccaagtgaggtgaactatgatgggggtaaagcttcacaattatattattttaaaatttgcttagtatttcttctcctttttttttttttttttttaggcagagtttcgctctgtcgcccaggctgcagtgcagtggcgcgatctcggctcactgcaagctccgcctcccgggttcacgccattctcttgcctcagcctccccagcagctgggactgcaggcgcacgttgccacgcccggctaattcttttttttttttttttgtatttttagttgagacggggtttcaccgtgttagctagcacggtctcaatctcctgatctcgtgatatgcccgcctcggcctcccaaagtgctgggattacaggcgtgagccaccgcgcccggccttttctctgtctttttaaatagaccttatttttagagcagtttgaggttcacagcaaaattaagaggaaagtacagaaattccccatatttcccccgccccaacacatgcgtggacttctccattaccaaaatccccctccagagtgctacatttgttacagtccatgaacctacattgacaacagcatcacccaaacttcatagactgcattagggtttacttttggtggtgtaccttttatgggtttggacaaacttataatgatatatatctaccattagagtatcacgcaaagtagtttcattgctcttttttttttaaattataaaatgtataaaatgagagctttttctcacaatttacattttttatcccaaaaagaaaattgaaaggcattgtgccttttttcttggagctggttaaagagaggcatgcatagtcccctcattatataatttaggaatgcagaaaacattactatatttcagcaattgacacttgtttgattaaaattagtggtcgtgtgtatcacagaatatcagaaaacatgttaagacaccaaagaaggcaaccaccagaaacctttcctattaatgactctggttaatttctttcttttttgttttgttttgttttgttttattttgagacggagttttgctcttgttgcccaggctggagtgcaatggcacgacctcggctcaccgcaacctccgcctcccgggttcaagagattcttctgcctcagcctcctgagaggcatgcgccaccatgcccggctaattttgtatttttagtagagacgaggtttctccatgttggttaggctggtcccgaactccagacctcagttgatccaactgcctcggcctcccaaagtgctgggattacagacatgagccactgcgcccggccgactctggtgaatttctcggatgtaagttgttatggtatgtgtgtaggagtggggagtatagttgcatacccatgtgtttgctagctcttgtatagaatgtaagaggaaaggacatatgtcagagccctttgcttttatgtaaaagccaagggagttcaggtaaatggagtcaaggcaataaagggaaacagatttcaagggaaaaaaatcaggaaaatgaggcattaggtatgtgatgaaggaaagaatttttaggaagaaaaagtaacagttttaaatgcttcgaagataattgagtaagaaaagcataaaataggtttcccttgcttttgacaacatggccatccattgaacacctttctaaagtactcagcagattcatagtggcaagaggcacactgaagaggtaataaatgaatgatgaagaagaagaggggactatagaaatattctgtcaagtatccttgatgtgaaagagaatgaaggacagaggaggttgtggagttgcaaaggttttcaaagataagagacatttgagttggtttagatgcttggggggaaaggcagggaagttgaagaccaagtggtggtgggcatggtgtctctctagaagtaaaaacatatgggtcattaagcataggcaaaaaccttatattagaagatacatacttttaactcaccaaatcagaaagaagaaagaatgaatagcagcagtcagcagaaagtgttgggagaaatttcttatttgatgatcttgatttcttcattaagatgtaaatctgggttacctgctgaggaaagaagcaaacatttagattatgagcctctcaggggaataggaggggatcactgagccgtaatcagaataaagtggcaattccatatggagtaaaataaagaatcaaacgtgtggactgatactcttggagcattacagggaaagtagaatggaaagagaagatggcaagaaaattgaagaaaaggtcagaaagtaaatgaattgatggattattagtttcaggttcattaggcaagatgacaaagcctgatggagggaaactaccattggttcagggactggtggccttgaaaatttcatagagaatgtgagaaagcccaggggcatgaacggagttgtggggaggaggtgcgagtgtgtagacgtgtatttaggatggactgtgcagacagggagaattagagagataaaatatgtaaaaccataagtgtgtgtatatgtatgcaggtatatacatatacttatgtatttattaaatatttaaattaaacatgaaatatatgatatgtaatataatatacttatataatattaaataaatttatataaataatatacacatataagtataaatattatgtatatataataatatgtacctatgtgtatataatatttacactagaaaggcaagaaataagaaaatgtatccaatcataaaaatgggatggaggaatgatgcaaagattggggtagaaaataatttagttctccactcaattatttttattcttggctggaaaaatggatgagatgcattgtcagattgagtccaaaagctattctgtctttcaccctcttgaaagttctacattcagagtatcttttgtctcgtggaagataaatatattcagccaatactatccatgttttcacattgaaaccaaaaatgaatcaattatttcagtaaagcaaggtgtatataagttatgatttgtatttccccatttttatttacctgtagtgttttctaaaccagtcacagtctggatttactttacattattattatttattattattattattattattattattatttgagatggagtctcactctgtcacccgggctggagtgcagtggcacaatcttggctcactgcaaccttcgcctcccaggttcaagcgattctcaagcctcagcctcctgagtagctgggactacacgcgtgtgccactgcgtctggctaatttttttgtatttttagtagagatggagtttcaccgtgttggccaggctggtcttgaactctcgacttcacatgatctacctgccttggcctcccaaagtgctgggattacaggtgtgagccaccgcgcctggcctgcatgattatttttaaatgaccagattcattccacatttccagattatgctttgatactagaaatttagaaagaataaaaccccacaagaataaaaatctagcaatcaactgcatgaatatattttagtaaaagttggagcaacagatgataaaattccacaaattcagtgaactctgagaataaatatggaaggtccgcagttaattatcctgcaaagaaaacgaaccttgaactttctgttaatagactttgcttcccaattaaaagctagcagtttgaaaggtttacctcatcagcgattccctatccagttttcagatgcagttagcccttggattgacttgcatatttatccctgttgaggatgttatacgtttctatctccttttaaataagggaactttgccaacaattcgtcagtatttgcaaattaattatgattaaactttcataatagggattatggttaattgttgattcatctcccagtcctcctttttgtgactaattctcttatcagtttgacctgaggtggcagataccacaatttcctattagacaacttctctcacaattacctaagagccatgaatttgatttagaaatggggttgtatgtgtgtgtttttctatcacatattaaacgcacaatctgtaaaaaagattcaggaggatgtttgggaaatgttttctgtgatatttatttttcttcagaagaagtgccaacaatatttcatttatggttttgattccccatatgccaatttcagcaccctcttatttcaccagggtcatttatttggtatttagttatgcttctgatatttgctgtcatcataaagacctgacatcttccctagcttcaaaagaacaatttgactaatgctaacatttaaatatattcagaaattttacttttcattaatgagacaggaagcctcatctctatggactgctaacatgatgatttggtggaaaataaagtccagccagctgttaagttgaattaaaaaatttaccaataataatggaatatttttgccctgtcttgtacagtcatattaagatttgcaatatgaatatccatatctggaataggactataataccataaatagcttaaaacatagtcttcatgttttcagtaaatgttatgacagtgtattatatattaattataaattaatatgtaatacaaatcttcacaaatctgaaaatgccaaatttagtgaatattcagctttttaaattttgaaatggagtctcactctgtcacctaggctggagtgcaatggcgtgatcttggctcactgcaacctctacctcctgggttcaagtgattctcctgcctcagcctcccaagtagctgggaatacaggcacccgccaccatgcctgtgctatttttttttttttttcatagagatggggtttcactgtgttggccaggctggtcttgaactcctgacctcaggtgatctgcccacctcagcctcccaaagtgctgggattacaggtgtgagccactgcacctggccaatattcagcttttaataaaatttttcttttaaagatgattttactttctatcagattcctattgcattgaggacttagttttgctttatttttattgttttttcaaatgttttaccaagtacaacttgtctctaagattcaaaacagtgtacattttgaatagatgtatcatttattttatgtatatgcataataatggttagaatgctcacagttatactgttcatcagtaaccctgtgaatacagggttcacatccaagatgttctcactggtccgtggcaaagtaagaaaatgagaacaactttccacatttttcataaaaatagaaaggatacaatttaaataattgtcctccattttgatattatgggttttaaaaactaatgatggtttttaaatgccctttgtttcatgaaataataatgatgctttattaaatgatagaaatatattggaggttattattacttggaaaaactaagagctagaactcctatatcaatttcacaaatcgatcacacatttatttttaatttcatattttttctctgaaaattatgaatctggaaaccactgctgtgagcggaattttgttattcctagatcagagatgacacataatgttgaatgatttgtctgtggtcagttacgtactaagtggtggagccaggaggaatatcagctacccgtgtgccagcacctcatggtccccctctcatcaccattattattagaatacatggctagattgcaatattaggtaggcaaattgagagtccatgtttgttcctcatagcaatgtgatttgttccttatgtgaggtattccttcaaatttaaaaaggattgtgttctaatctaaaaggtcattcataagccactcattcgaaacatcttcccagatacttagttttatgaaattctcaagactgacaccccaaagcatccttaatctataataaacacaggagtacagggaagctcacctccactttgtttacatttctatgggcaaatgtgccgactttctagtgagatgtgaggaatttaagtgcccttactgcagccttgggaatagaaacaggatcatcaacagcctccactcctgccatcctcacccatgcatgagcaaggcctgtttagagagggagaaagaaaaagaccttatattacttggaaaatgagaagcaaagattttagacaagaaccaatgactgggaaccaaaatgcaatgagggcttggcagcccaggagtagtggctgctgttgtgagacacatggagctaaaatgggagagatgagaaactgtgagctttgaggattgtaagaaggaagggagctgcaacaaaggtcacaggtctgtggggttgccacgcctcctattttctatctctaatctcccttttgattttcacaattggtcctgttcttatatgtctgggtgaaagtaagggaagatctgtggtttttggtaggatagagtttcatgtgccatcatctccttccttgccattattgtaaagattcctccactagagttagtgatgatggcaacagacaaatgccggatgagaggtttgggttatctctcatattattaaatagtgatagaaaattggcaagttaaagactggccgcaaaaagcttctgtaagggccaagggaaaacttctcttttgccctctgaaggtttgctgaaaaatcaactgaaaaaagttagcttggtaggtgaaaggcatacaaaatgtattttaacatgcatagcatggaagaatcacaggaggatgattacccaataacccaataggagcatagatgtagatatacccttcttcacgggggagggaagatggggaaaatatggcaatttggaaaatagtaaatgattttttaggggaattcaagaacctacaatggcctgggacaaagtctgttgggcccacagagcagatagtggtttgtaacaaaagtctgttcaggtgtgccgacagacttcagtctctcttcatgtgaaatgagttaaattaatgaaaacttaagcaagagggccagaggaaacttttcctcctggtgggatcagactgtaagtagatacgggagtatcagagtaaaacttatttcagcatttgctggtctccaagagcctttaatttaaaataatcagcataccagcatgctatattttcgggtattggtttctgagcctcaatatctcatagaatgaatttaacagcattttatgttaaaaccagatatatattggactccctacgtcttaataataatgaatgtgtcagaagggcaagtgttcaagtgtatttcaaccacaagtcaggattttatgtttctgttaacaaggttgatggcatactagagctgtctcaatagttagttgttgcttttttgaatgattgacaagtcaattagattttaacattatatctttacacttaatttctgtagttacctttaaaattgcccattttggttaatggccagagtgctgaccagctcattcccctgcagcctaagcatttaaacatttcctgctaccttgtatggtgctatgagacagctgtcattgaagaaattctgttgagaatctgaattactctccttctgtattattttaatgtttgatattcacatgatggttgttttaaccatttttttttactttaaagaaaaagctataaactagttatatgatcttttcttcttcctttcatatgatgctgctaactcaatagagagacacccgattacaaatgctattgatggaaagaacacttggtggcagagtcccagtattaagaatggaatcgaataccattatgtgacaattaccctggatttacagcaggtatagttcctctttttttgtcatttccacttttgaaattgcattttacatttgctatttgtttagttagtggtttgtgggtgaaaggatactctttcttatcactctccattgttttcttgataagatgaacaaagggtcctattcatatagcgtattgttatttacgagtattcagcatttaattataaagcacaattcaaatggaagcacgtgaagagcttagaaatgaattaggtgctaactctgttttagctagctggacttaatgatgaaaatatggatcaataaaattttacataacaaaaatataatagtatcatttttaacttttaaaataatacattgctcccactgtgctgatggtgtgtgcacttaaaggttcttggataacaaggctcttgagcaaattgcctctcattactgagagctgagaaagttttgacagttgctttcaagttaaacttgggtgactaaatgaagtaacaagctttgtagttatacaaaattgatgccggaagttgttcaagtttgtcttgcataggcctgggtgccttctatgcttaatctctttcttccttctcttcacaatattcaggtcaggctgaagttattaatcaggaatcgccagcacctcaaattatttaggcttgcaattaggatggaaagtggacaaatgccacattccatcctatttgtatgcctaaataatgtgcaggggtgatggtcaggatagttaatgacagacaccatacactgtaaaggtcatggtttttataagttatcactgtgtggggaagcccccagccagtgggccagatcagcacaagacattttcctaatggatgccatttgccaccagcatgagtacaatctccctcctccagtgtctaggttcattttggtgagggctgcatatattcaagagccacagaaagctggctggagcaaacaagctggtggattgcacggtagacctgccttccacccatatgggcctcctcgggatatgaggaactggtggcggcaggggctcagtgctgcagcttatatcaccaaatggcatggacttatttctaccctcactaatatacagcagctgaatgtcagtcctgagttaataatatttctcaggaagtctcagagcactatcagagaatggcagggcaagctaccacactgatcaatcatgctttaggaaaattaatcctgtgcatgaatcccctggggatcttagcctcaaaatggactgcataccactcctgataaagacaactttgtcctttattggtcacaagagttctcccccttcatgtgatcattgaaagtctagtctcccaatcaagagtgagtctgctgtgcattgactcaggtcatctccagggacaggcaatcaataaataatgatgctttattgttctggtttattctccatttattcttttagattgcacatagaacaatggggtcaattattaatataatttgcacaaatcacttatagtactctttgagctgaacagcaatattatttacctgttatcaaacatggcagcatttttcccctcctaatttacaactggatggcgcaaccacaagtttttactaaatcatttctaacttgcctgtttttatcaattcagcaagtcaaagagtttacctgaaagcctatttttcagtgatgtcattgatattttcctaaatttactttgcatactcactcatccattcccacacagtatcttaagaattatgtggatttgtcgttctgttttctcttcctcccatttagtttaatggaggtaagatgagtgaatatgccaagacatattttatgcttcattcatcataacaaagtgccagaattctgtatataacccaggtctacctgactccaaagtctgaaattcaccaagtggaattggtacagagcatatgtgttcaaattgtcccatattccaggatggtgtccatccatatccttatttattccagctttctatttcctgaaaatcaacctactgtgtgtgtagaagaaggggaattcaagtaatctctaaaaatgtaataaatccttatttctacttgactcaagattttaatttagtcagttatttagtgatgtgaaaagttaaacaggttttgtaatcaagtttcgtgatggaacttctcagacaagaaagagcttcagacttccaatttggcctcaggctttggaataacaaactgtgagacatgtttataatacttattcagctatggatggtatattgtactgcactggcaacagagaaaatgtggacattcttattatgtaactcctcacaataatcctgaataaaccagctaatattaatattcctattgcatagttgaagaacactgtgctttagaaaagttcagtgacttggccttctttctaaagcttattatgggcagggctggggcaacatgaatagtctgaatccagacccaaatacactatcttttctaatgggtatctgaagacataatcctagggagctcaggataatttttattatatattttcaagggctccaaatgtagttcaggttcaagaaatattgcactatcttctcctggcttctatgggataatatagccaacaacctgtttcgttataaagcaggggactagaaccctcattttctagtatactctagtgtgcctctaaaatggcaaagcttctgtcttttctacctaccgcatgaaggattaataggttattcaaaataagatgagctattatccaactgggattaaaaggcagtaaaattataatgaataggtaaatatcactaaatgtttgtttgtcatttattcagcaagagacttgaccatttattagttcttcttttgtataaatttcaacaagtgccagtattgttgttgataaatgcttggctcctctgtgacacattttcataaattagtatcttaaacataacagaaacgattgcatttatttgattaaatcactatagattacagtgggtttttttttttttttttttacattttaacattcaagataagcactagaaaaaatagcaatttgtttggaagaaagtagctacttattttataagtagattgttcttagatacgtattactaagggattattaacttttctcattctatttactcatagcatattttgagcaagtgatttaatcatgctgtgcctcaacttctagattagcagactaaatattacaatatcttggcaagaaaattaaagtaatgataatggcaatatagcaactaaattccatctcacaattacagctattaaaaggatctagagtcagcatgaacttaaagaaaagcttaactgttccagtgacgtgtatataaaaactcaatataattgcgaacaaaaatatacaacaatttaaaggagacagtaatagggactcaaacgttaataagatgtctaaaacattctattttagtctttttcctaccagatttcaccagaatatgtcattatgtctgattttatttatttcttttaaaatctagccattatctccgtcatgccctttgatttgtttcagaagaaagctgattggcaggcggggtaaaacagagggaggcagcttttcagtagacttttcaaacacatattgaggtgatactcactcctggctaatccaggaatgccattaattagttaagctcatgtcttaactaggagtcttctcctcaataagcaattcacttctcttcctggtctatccctcaaaactaagaatgcgtttaccaaacaagattatcttacagctacagagatcacactccacatattcttaacctaaatattttattcactgatcttgcagagaaaaatttgtttggacaagttaacagttttaactggaatttatgttttaggaggaggataaactactatttctatgcaaatattactatacttttagaatccatgtgaatagtataaaatgatttttctctaaagcctagaatcattaatgtaatggttaaacatttctgcaataataaaacataaaatacgtggaaatactttatatattcaagttttaacaatcatttaaacatattaaaggtgatccaattttcagtcttgaaggaaggtcattattctttcatgtcaattctttcctcatgctcttcttactgattcctgattactgattaaaggatgtgttgtacaaggagggaattttggaaaattcacaaatacatggaaattaaacaacatactcccaaacaaccaatggataaagaaaaaattaaaagagaaatttaaaaataacttgagacaaatgagaatggacacactaacactgataagaagaagcaaaagcagttctaagaagaaaggctatagtaataaatacctacgtcaaaaagaagaaagatctaaaattaacaacctaaggttacatttcaagaaagcaaaaaaaaaaaaaaatgaagaaaagataaaagaaagaacaaactaggcctagaagtagcagaaagaaggaaataataaaggtctgggtagaaataaatgaaatagagactagggaaacaatggaagagattagcaaaactgtcacttgggttttggaaaatataagctaaattgacaaaagtttagctaaactttctaagaaaaaagatcagaattgaaagaggagacattactactgatacttcagaaatacaaaggatcataagtgactactctcaacaattatatgccaacaaactggataacctagaaaaaatggaaaaattcctagacctactaacactgaatcatgaagaaatagataacatgagcagatcaatgaagagtaaggagattgaatcaggaataagaaataccctatcaaagaaaagcccagaacctgatggttttactgctgaattctaccaaacatttaaggaactaataccaatccttctcaaaatcctccaaataactgaagatgagggagtacttccaaacttattttatgaggccagccattagcctgataccaaagccaaagacactgcaagaaaagtacattacagatcaatatttttgatgaacatagatgcaaaactcctcaagaaaatactaacaaaccaaattcagcagcacattaaaaggatcattcactgtgatcaagtgggatcactaccagggatgccatggtttaacctttgcaaatctataaatgtgataccttacattagtagaatgaaggacaaaaatcatatgatcatctcaatagatgcagaaaaagcatttgacaaaattcaacattgtttaatgataaaagctgtcaacaaattagctatagaaggaatgtacgtcaacataataaagactgtatatgacacatcctcagctaacatcatactcaatagtgaaaagctgaaaggtttttctctaagatcaggaataagacaaggatacccacttgcaccacttctatttggcataatactggaagacctagccagagaaatcaggcaaaaaaagaaataaaattgtcatcaaaattgaaaaagaaaaaggtaaagtgtctctttttgcagatgacataatcttacatatagaaaaccctgactccaccaaaataactgttagaactaataaacaaattctgtaaattagcaggatacaaaatcaatatactaaaattagcaacatttccataaactaacgaggaactatctttaaaaaaatcaataaaataatcccattcaccatagctaaaagaaaaataaaaaatttggtaataaatttaaccaagaggattgctatgatttggctctgtgtccccacccaaatttcatcttgaattgtactccaataattcccatgtgttgtgggagggacctggtgggagatggctgaatcatgggagtgttttcccccatgctgttgtcgtggtagtgaaaagtctcatgagatctggtagttttatcaggggtttccgcttttgcattttcctcattctctccttgcctgctgccatccatgtaagacaggactcctccttaccttccaccatgattgtgaggcttccccagccacatggaactataagtccaattaaacctctttcttttgtaaattgcccagtctcaggtttttttttttttttttttttttttgagacgcagtctcgctctgtcgcccaggctggagtgcagtggcgggatctcggctcactgcaagctccgcctcccgggttcatgccattctcctgcctcagcctcccaagtagctgggactacaggcgcccgccactacgcccggctaattttttgtatttttagtagagacggggtttcaccgttttagccgggatggtctcgatctcctgacctcgtgatccgcccgcctcggcctcccaaagtgctgggattacaggcgtgagccaccgcgcccggcctcaggtatgtctttatcagcagtgtaaaaacagactaatacagagatgaaagactggtacactgaaaactgtaaaacagtgatgaaataaattgaagacacaaataaatgggaaaacatcctgtgttttgtggaataactaatattattaaaatgtccatactactcaatgtgatccacagattcagtgcaattcttgtcaaaattccaatgacgtttttcacagaaataaaaataaatcctaaatattttatggaaccacaaaaggtgctaaagcaatcttgagcaaaaagaacaaagctggaagcatcacactatctgactttaaaatatactacaaagctgtagtaatcaaaacagtatgctgctaacttaaaaacagatacatagaccaacagaatagaataggagcccagaaataaatctaagcatttatggtcaattgatttttgacaaagatgccaagaacacacaatgggattgaactgtctgtccagtgaagggtgtttggagcagtagatgtccacatgcagaagaatgagtatagacccttatctcatgccatataaaaaatccattcaaattctaaatgaattaaagactgaaactgtaaaactactgaaagaaaacacaggggaaaagttccatgacattggtctgggcaatgattttttaaagatataaaccccaaagcacaggaaacacaataaaacatagacaaatgagattacattaaactgaaacacatctggataaccagggaaacaatcaacatggctgctcttcaaatcactgaatttattttgttggtactatttgggtcactgctaaattggtgaataccaaactaacacagaagagattataatatacatgttccaaatgtagattataccttacctgagtataccttaagtacaacagaatatagttaaaatcacagttctttacctgttttaattgtatatagatttttaagatcatttgttcagtatcacaagtagaatctgtggttaattagaaaatatattttccctttaaatgaatttgtgctgacttttaaaattattaataaaggtgacagctagctttggtgtctatattgaagaaaatgttcatcctaattggtttccgtttgtctaccctttggtctgctttcaacacagcagtcacagcaatctcattagtacagatcacataacactttccactaaaagtggaaatcttattagtacagatcacacaacactttccactaaaagtctctactggttttccatcacattcagtgggaaaagcacaatgacccacaaggccttaaggaccttttcctcacctcttttcatctctggcctcatctgatctctcttcctcagttgcccagctggtcatcccgctatgtcttgaacactcacacctgcctcagggcctttgcacttgatatttcttatgtctagaattattttcttcaatttcaatgtagcttgtttcctcacctccttttggtttttattcaagtgttaccttctcaacaagggcctccttgacaactctatttaaaattgcagctcccagcctgtccacttcctaaaccactttcctgctttatttttctccataaaatatatcaccatctaacttactatgtacatgttactgttcagttgaatatttatctttctaaatgcaatttttttgtgcgtggagctatttgttgttgtaatcattgctttctaagcacttagaatagtgcacaacatataggaagcattcaatgtgtttgtattaagttaataaatgactgaatgaataactagtacaaaccaccaatccataatttaagaatcttattgaatctgagaattaaaggattaagtgatttcactgtgcttcttatgataaaacacactgcactttttctaattatgaaatttcctttaaggttgaatggcattgttttagtctatttgggctattataacaaagtaccagatgaggtggcttataaactgcagcaatttatttctcatagttctggaggcttgacgtccaagatcaaagcactggcagattcaatgtctggtgagggtctgcttcctggttcatagatggccttcttcttgctgtagcctcacatggcagaaggggcaaataagctttctggggtttcatttataagggtactaattccattcttgggggctctgtcctcatgacctaattacctccccaatccccatcacctaataccatcacattaggggttaggatttcaacatatgaattttaggggaacagaaacattcagtctatagaaagcgtgaagtaaattttcttccagttcctatgcatgttcttactctgcttttaagcgtattctaaatttcagttgtatctgtcactatgtgactttaccacacttacagctttatttaggaaaagagatgttaattattttaactcttcttttgtaacagagaagtctgggactgtcattttttgttttttgcttgacattgtattttttcctcatagaacaaaagttagtataaaagaaagggaaaaaaggccatacaatgatgctgtttaaacaagagtgtaaatgtaggatatgtattttgatctaaaatgttgataaaccaaattctagcaataccatgaaaatgtaaacattttggagacccagatcctatttcaaatagagtcaagatgactgccctagaaaatgcttcttgaagtcatggaataaattagatgattgtttatttaaaaaaaaagaacaataatacataggagatctgttaaaaaatctgtgaggaaagagctgttaaaatgttgaaaccacatgaattctgttatggaaagtctgaacaagactttctaaaatagattgaatgtgggcagttttcacagctgcctgatgacttccacacacaaaacatccacatttcatccttttggtggaatactgtgtattttccaattttattcttagagtttaattttttacttacatattatgcttatgtatatcatatttgttatatatattatatataactaatatacaattatattatttatttaaaaataaggaattaaaaacaattatattatttgtttttaaataaggaattacaaaataatgaagagaccgtatttattatagatcttgaaactgtgactaaaaaccccatgcacagagaaaattcttgagtcaaatggcttcattgatgaatagaagttagaatactggttattgttacaaggagagggaagataatgactgggagagggtatgaggaaagtttcatttcttatttttgattatataattgtacaataataatgtgttagtacatagaactaatataattgtaaataagtgtgtttatatataataaaatatacaaaatatagataatatattgtataatgtataattatatacaatataataaaaatgtgataaataatattgtataatatataattatatacaattatattaattatatgtactaatgtattagctatatgtatttatatgtacctatatataagactttttctagaaattgactacatatttgaattgtgagacagcatgtatgttttgattcatagataagatatgtttccaatattacccatatctctaaaatacaaacatggcaaaaaaaggctggagtgagactaaggagaaaggaggagctataagtgtgcccagattccatttctttacctatgacttatgcgttggtacatttaccttaggtaacttgtcccacttttatgctcttcaatttggtctagtgtaaaatggagcaaataggcccacttccttattacgaggcatattataaggataaagtgatgtgttataggcaaagagcatagcacactgctgcactttaggtgatactcagaaaatattacttttggtcttccacattgaaaataatggtgaatggagaataaatgggctaagttgtaatgtgaaaaatggaaaataacaaaacaaaagctcaaaaatgctttaattactggatattgaaatgatacctatgaggttcactttgtatatcacctaagaatattattttactcaatatatttttagcactttatggacattaatatttctatggagaaagcttaaaaagtgtcacttgtgcattgaaactcttttgtaacagcttctttactcttctgttgttgtcatgatatcctccagattacttaaatttttaaccaagaagtaaccttacttattactagtatgctctttccttaaaagcttttctgatttatgttattttaattatatcaatcttgttattatgtacagtttttaattattttaataatttcaacctttctgcaactttccattttagatatgtctcattaatggcatatagtgaagttttgacgttttgtctagtttggcagtgttggtcttttaatgaaacatgcattttcagtggatctgtgtgtatctaagtgaagcatgtacacagaaaaggtgacaaataaaagtctgagagaatttttgctaaatgaaccttcccaagtaactactactgagacaaaaataaccagcaacccagaaacttccctcatgccttttccaatcactatcttgccttctcccctaatagtaaccagtattctaacttgtattcaccagtgaagccatttgatctaggagttttctctgtgcatgggttttagtcacagattccatatctataataaatgtgggactcactggagttttcatttcttatattttcagtttagttgagttgggcttttcaagaaattgatccacttacctaatttttcaaatatatcgacatgagttgttagtgatattatcatcttttaatttacaatgatctgtagtgatgccctttttttattccagatattgttgtgtaacctttgtttttcctttacagctttaataggtcttcataatttcattagtctttttcaaatagccagttttgggcttgattgattttctctatcgtgaaattgttatattgtattgaatcctgctcttatatgtcttgttttttacttctcgttattttttattttagtttactacattttcttagcttcttgaaatggatacctatgttattaatatttcagttcttttttcctaatatatttattaacgcctacaatttgcctctacatagggctttagttgcctcctacaagtttgatatattgtatttttcattatcatttattttaaaatatattctaattttcatagtaaatttttctgtggcctctgagttatatagaagtgaagtgcttaatttctgaacaattgagtatttttctaatcgttttgtttttgttgttattcctttcctcactaattccactatggtcagtgtattttcaattctttgagactaaactttttgagacttgtttttatccaacatatggcagtgacttgaaaacaatgtggaccagttgccctggctcactcctgtaatcccagcactttgggaggccaaggcaggcggatggcttgagcccagaagttcaagaccagtgtgggcaacgtggtgaaacctcatctctaccaaacaaaacaaaacaaaacaaaacaaaaccccaaaacaaattagctgggtgtgtgcctgtagtcccagctattctggagtctgaggtgggagaatcacttcaacccaggaggtagaggttgtggtgagccgagattacgccactgcactccagcctgggtgacagagctggacatcagaccctgtctaaaaaaaagcaaagaaaagaatgcagattctatagttgttggttgcagtactacaaatatatcagtgagttatatttatatatattgatacttttaaattagagacatacaaatttaggattattaaatttaataatttaaattttgtattaactcttttgtattaaccacctttttaatactactgccagcagtacttctatctttagagtgtacttttgtatgtagattcactagcttccttttttctctgtgtttgcgtgatataggttttctcatatgttgagtgtacttatatttaaggtgtatcttctgtgagcagcataaatttgaattgtttatttaactaatctgataatcttttcctttaaattggatacttaattcatttacatttagtgttactatactgatatatgggttcaaattaccatattctcatctgttttctgtttgtcttatcttttgctaatttttcttcctcataactttcttacttttggaatactgaaggtttttccctatttaattattccatttcttctttcattagcttgtcttctgtgaagtcttttattactcatactaattaccataaatatggtaacttgcgtccttcatttatcagaactttgtaatattttacctcagtcccacctccccatcagatttaattctatagttctcatatgtttaattctatgtatatattaaactccataggaagtaattgttaccatcataaacatgcagttttcatctaattttaaacacctttaacttttttgtttattttttgttagtatactttgtttatttatttatttctgttagtaaacttccatcaagaaagtatcccatttcttttctgccttttttaaatgaaagcctgctagtgataaatctctcatcttttgtttgttttttcacttttctttacttttgagacttattttccaccaagtataaagtagaatttcttgcctggttggaattttgttttgttttgtttttttccagcactctaaatatatcctatcattattacttgtttttcattatttctatcatgaagtaagcggaaagtcttattgctggttcttggaaacaagatcatttttcctttcactccattgaaggctattttttttaattttgcttttggtgttcaggggtttaccacaatgtacttaggaatgattttattggtattaatactatttgggattcaaaagcttctagattctgtggatcaatgtctttcaccaatttggtaaaattcttagccgatattttctcgaatgttgttactgtccattctttctctccactctccctgagacttcagtcacatccctgctagaccgtttgccgtgctcattatgtattctatggcttcttttcatttgtcttctcttcttttgaggtttctcagtctgtacattttctgggtgacctgttgtttggtataaataatcccttttttctgctggattcaatcttctattacatacatttactggatttttaatttttgtatttttattttttagttttagaatatccatttgatactttaaaaaaattagactccaaatatctctccacttagtcatctggaacatattaataacagttattttaaattatatgtctgataactctgacgttggaaacaactgggagtctgtttctattgtcttttcatgcattcctgttttatgacaagcttggtcgtttttgattaaataatgtatgtgtctgaaaatgtataaaaattctggaagatgttatttttctcttaaaatgatttattttcattctgtcaagagttagtgtagaggcaagttgctttgcttcagtcagcaactcaaatgttttgtagcttagttagagattctgatggttgtttctagtttactcttagttctagggatagactttcaggactccagtggaaaccccgacttgtttaccacactctttccttcttggctgactcttaactccaaagtttgtcttcccaactctgggagacttcccaaggatcttcttagtttttcacttctcatgagttcatttttgcatgatgtttatcttctggctccttcaccacttagaaattggcaaatctcttgaaggcaaaagctgtgaagaatgtaggtctcatttctctatgaattatggtccctcacatcctagctgacttcatagccctgaattctaatgtttatcttcttatcctgtgagattgctgaacacactaagatgtagctttctctataacctcctattcaactgtcagcaaatcaataaaagtaccctgagaggaaaatggctagcttaccttaatttgcttccctttacttaagtctggctgccttggttgcttgctgatgccttcaaactgctgtttttagtattttatccagcttttatggttgttgtctttgagagaaaatggaaagggaaaaaatatttattttatttacagttttaaaaacaaaaatcagcatattatctgataaaattattattgctttttgtgaatttaaggaatgttctgaattattgcttcaatattaaaacaataattattggaacattttgatggattatgaagaaagaatatgtaaaattgggatcgtgtggaaaatctggtatgcatgaaattggcatataaagtaggcctaaacaaagcaggtgctattcttagtaagaagcttcatgccccttatggcatatctgccctgaataatacataaagaaaataatttaacaatatgcgtttgaaaaatatttgttgagcaactactgttttttaagcagtgttctaagcctgtaggtctgtccatgaaggagacaggagtccttgcattccagggttttcaagtaaacaatttagaatagtgcaagttcatgaaaaaaaaagcataagattataataagattatagacggtgatgaaagagctaatttacatgtatgttctatgtatgcatttttcaggaagtgatatttgagctgagaattaaaaaccagaaaataccagtcatagaaaaatctgggtagagtttattaccagcaggaataaatgtggggtgctgaggaaaggaaagaaggccaatgtggctggaacctagtgatcaagagcaaaggtggcatgagatgctgtcacggaggtctccaggtcttcttagctcctgaagggagtagtcagtcatgataaacagtttatattgaattctgggtataatgagaaacccgcagtggtatttaagcaggtgtaacatgatttcctttatctcattagaagtaacattctgctaaatggagaatgattatagtgagataagtgtgaaaactaggtggcagtcaggaaaccatagtacttttttagcaaagagatgatggtaacttggaatagagtggtagtagcagagagaagtggcaggctgagatttatctggagttcggcatcacccgaattgatggtggaacaaatgtggagagtggggccaaaatgttgactcctaggagtttggcctgaagaaattttcctgaaatagtatggattaaaggaggagcagaatggagatactgggtggcaattaagggtctgttttaacgtgttatctttgaagcattcgagtggtgccaggcatggtggctcactcctgtaagcccagcactttgggaggttgaggtgggaggattgcttaagcccaggtattcgagaccagcaaccagcccgggcaacaaagtgagacccctatctctacaaaaaaaagcaaaaaattagccaggcatagtagtcccagctactcaggaggttgaggcaggagaatcacttgggtccaggaggtcaaggctgcagtgagccatattcatgtctctgcactccagcctgggagacagagcaagacgctgtctcaaaacaaaacaaaaaaattattcaagtggaaatattaaagggacaattggatttatgagtctggagttgagtgatgtgcactgggaaagagactgtacttaacagtaaaggcctgtttaagatcatttagaaagcaggtatagagataaaaagagggcctataattgaatcctaggcacttcaaatttaaaggtggtaagatcaaatacatcaagaaagagggaatcttcagctatggcaatgcagatgctgtgaggtacaaattaaaccactcaggtcttggaaatacctaaacatagggggaaaaaacacctaaattgtaatgagtatatgtgtgtatatatatataaatatatataatatattatatataatatataatacatatataatatatcttatatattatatataaatatatatatataatatatataaaattagagaatctttaataagaggtgaatggctccaaacacagatttaatttggaagctcccaccctagcaatacctactggtgttcattttatttatgtaaacacacaaatgttgactatgtaatttttcaattaaggaaatagccaataaaattgtgtggaaaaaagatagcggtagcagataataacatcttttacttactaaagagattgtgtctaaatattaaaagtaatacattcccttgtcaaaacacttcatttttgtttgttttcacaaatattttaatgtggattttgagtcaaattttctgtaggaaggtcatggtagattaatgtcaaattagctgaaacaataaacacaatgaaaagaaaaatcagccttgtaagacagtacaactaaggagatcagtttaaaacactaatgaggagttgcctctcagcactgggtcattatgattatactaatataataagttaggttcaggttagaaagcaaagatgaataatcttcaaaaggcacagtaaatagtcaatttagttgtctaccttcataatatttactatttccatactaaaagcttacagttgtgggctagaatatatgatattcacgtaataatatttaaattgaatttcatttttttgcttcttcattatccttacctctaccctcctcaataaattcatctcaaatgataagattttccatccatcattgtgaagaataatttatttacttaatgattctggaaatatgggaatgtttataaaacgaaatacaaaaattaagaaatggagtgggcaagtaaaaagacattttcccactgattttagaatatactcaagaaaattaaactagtgacaaaatagatttatttaacttataagctaattcataaattaatggcaaaatttatcacagtatacataactgagactttgcagatttttttgtaaatagataacattctgatacaattaacagatctccatcagctgcattagatttcaagttgccctgctaccactgtatatatgcacatagataaatatgtatatgtagtgcaacacagatgagaagatataaagttgttttattttgttcgaatatgtattacagagaaccctatgtgctgtatagcaccttatatatctttcttttaagagaacctcataggacttccaaattcttcactgaaatagctcctacttcttatattacctttcgatatgtcagaaagattctttttctggaagctgttgttctcatccacatcattgcacaggctgacaatcaagacactatttctcactttctttaaaactaaatcaggatttgagggagtggagggatgactaggcagagcaaaaggatttttaaggcagtgaaaatactctgtaggatagtataatgatgggtacatgtccaaacccgcaggacgtgcaaggccaagagtgaagccgaatgtaaactataggctttgggtaattttgacgtgtcaatgtcatttcatcagtcattacaaatgtactactctactgggggatagtgataataggggaggttatatgtttatgggggcagtgagcgtatgggaaatctctgtatttttttttttttcttttttgagacaaagtcttgctgtgtcgctcagactggagtgcagtggcacaatgtcggctcactgcagcctccgcctctagcattcaagcgattctcctgcctcggcttcctgagtacctggaactacaggtgcgcgccactataccccgctaatttttgtgtttttagtagagacaaggtttcaccatgttgcccaggctggtcttgaactcctgaccttaagtggtctgcccatgtcagcctcccaaagtgctaggattacaggtatgagccactgcacctggccaaaatctctgtatcttcctttcaattttgctttgaacctaaaattctccctaaaaaataaaatattaaaaaataaaagaaactctatgtaccctactgactctttgtcaaagattatctattttttttctcaactcatgcaatgtttaacactttggaccatattatcacttatggttagcctcttataatatggtatggctatttttttaaaaagtcatggtaaaatgacataacaaacaattttttatcttagccacttttaagtgtacattgttgtgcaaccatcatcaccattcagctctacaatgcttttcatcttgtaaaatttgaaatactgcacccattaaataataactccccattctctctcccccagtccctggcaaacactattctaccttctgtctctataaatttgatcattctgggcacgtcatataagtggaaccacacagtatttgtccttttgtaactggcttatttcattcaacatagtgtcttcgagattcttccacgttgtagcatatatcagagtttccttcatttttaaggctgaataatattccaatgtctatgtataagtagactcacacacacgtacatatatggcacattttttgtccattaatccattgatgaacacaggttaattccaccttctggctattgttcttaatgctatgaacatgggcatatgggcttcaatctttaaggtttcagttactcatggtaaactgaagtctgaaaatattacatacaaaaacattttaagagagagagagggagaagctacattcacataacttttattatattatattgttgtattttttattagttattgttgttaaatctcttactgtgcctattttataaattaaacttcatcaaagatgtgtgtgtatagaaaaatacattgtatatatgggcttcacgcattgaatgagggtcttaggatgtatcccctgaggataaggagggactactataattctactgttaattctttgaggaaccactatattgttttccatagtggctgcaccattttacattcccatcggccatacacaaggattctaatttctccacacccttgccaacacttctttttctgtttttttttttttctttttaaatagttagcatcaaatgcgtatgaagtggtggtggttcatattttcagtcatcgtttcccagtatttcttgagacaattttgaaatattgtaagagatataaaataactttgatgttggaaagaatagcagtgaagaatgcccatgtaaaatttgagaatcttgaaacatgacagatacaacattgcattaaaggaaattaaatcctggacaattttgcttagcttgtaagtacatatacaacacatatacaaatacatgtacctataagtacatataaaatatatcctttctaaatttggctatattgtcagatacctgagaaaattattatctttatagcctctgtgatatgtcgccaatgcaaggcccatgaaaactcaaaaagagtcagttagtaaatgaactcttttattatttgtataaattatagtttttataatttaaatgtaacatatgaatacttgtgtctggaattacaatagacacatttttatctccagagagttactactggcactttttgaaatcctgttttgtcctagacactggacaaaatattttacataaattatcttatagaacttttcaactccgtaagaaagatactattataattagtacattttgtatcacagaaattaaacaacttcctcaaaatgacacagttagaaaacaatagagcacaagatgaatccagttctttctgatgtcaaagcctgccgtgtatactccagatgacctgaaccttagagtaactaaaagcatcagggcttctctgatatataattgtgagaatctcactaaaaacaagattaaattactacagaggagtcttagaatttaaaactctaaaaagtgaaacttaggatttaccaaaaatgtttctaacttctcatatacatgtatggatgtaacctgaaatgctgggttgattattgaaatgtccatatgaacttacaaatttaccagaaaaaaatcaaactaccccatcaaaaagtgggcaaaggatatgaagagacacttctcaaaagaagacatttatgcagccaacagacacatgaaaaaatgctcgtcatcactggccttcagagaaatgcaaatcaaaaccacaaagagataccatcccacaccagttagaatggcgatcattaaaaagtcaggaaacaacaggtgctggagaggatgtggagaaataggaatgcttttacaccgttggcgggactgtaaactagttaaaccattgtggaagacagtgtggcgattcctcaaggatctagaactagaaataccatttgacccagccatcccattactgggtatatacccaaaggattataaatcatgctgctataaagacacatgcacacatatgtttattgtggcactattcacaatagcaaagacttggaaccaacccaaatgtccatcaatgatagactggtttaagaaaatgtggcacatatataccatggaatactatgtagccataaaaaatgaagagttcatgtcctttgtagggatatggatgaagctggaaaccatcattctcagcaaactatagcaaggacaggaaaccaaacaccgcatgttctcactcataggtgggaaacgaacaatgagaacacttggacacagggtgggtaacatcacacaccggggcctgttgtggggtggggtgaggggggagggatagcattaggagatacacctaatgtaaatgacgagttaatggatgcagcacaccaacatggcacatgtatacatatgtaacaaacctgcacattgtgcacatgtatcctataacttaaagcataataataaaaaaagaaacttaaaaaaaatgaaatgtccgtatattttcttgattttttccaaatgttttgaagaaagtttttgtattattaaatgctattcattggtcaatttaagtaatcttcttttaagaaatcattcagaaattgtaggtccttgatcgtaattctttttgggtaatttcaattgcaataggttaaacactgtgctggaagatttgagaaagattatcattggtccattttgtcaaaatcatttccagaagtttaagtccttttttcttcatttttagtgtgattcattgattttcctaaggaagaacatttaacttctctcagtattcacaaggaatacctgcttgaatgtttaagtaccaacagaggatttaaagttcttattacttatgagcattaaatgaattcaatactccaaattttatagaagaagcatttctgaagatagaaaataaggataatttttaaacacaagaaatcacatgcttttcatatcattatcaatgtggaaaatgctaaaacaacttgctattaaaaaccatttatcagaaacttgtttaattaatatgtcaaatatctgggtttttaaatcatgtataacaatcaaaatattcctaaaaacatattgagaactttaacaaaacattttacagttggaatgaaattagtactggatgattggattaaaagccagtagaaattatatattatcctatttaaatgtaggactatataagttattggtaatcctttttcgtaattttattactttttccagtacctaagtggatactggtgactggtatataataagtaaccaatgaatagatattgaataatgcattgctttgctcaattttctcatctctgagctttcctgtctgtgctactgcaacattactttcttaattatattctctcactccactgcaataatattacagatgttattccctgattaagaatagtataaattgacaatccaacccctcaaatgaaattttttggtgatccaaacgttttaaacatccaataaagatataacatgctagttctctagtaggcacccatttccaggtttccaaacgtttcaacaaaaacatttatatatttctctattgattgcataatgtggagattctgttttgagaatgcacataaagtatattatattctgaactgtaacaaaatgagactctaatttattcacagtcctttttaaatttgtctgtatttttgttttcctgagaaaaatcttatctttatagcctctctggatattgaatatcttgagactagctttaattctcttgatttttattaaaacttctaattccaactttattcgtgaactacatgcttatataaaagtacgtttcatcaaacagctttctctttatctctttaaaatcattaccttttattattttcagtatgctttaatgctttaaaattttattcttgaaacatttggtttttccattgctactttcctattgattgttttcctcatatgtatcttgagattttagtctaggttttataacaagcatagctatatttacagatattttttctataaagttttcaatatagattctgatttttttatcttataaaaaatagttaacaccattaacgtttggatttatttctgtctagttctcctctgctcacacacacacacacacacacacacgtgtacacacaaatacatatatataaaatgggcagcacactaataaagataaaaataaactttataaagttttacattttgtaactggatattatattgtgaacatccccatgtaactgtgtagtatttgaaacttagttatttaaaaattaaattgcaaatgtatgatcttatagactattttcctgcttccaagacttctttggaactgtggactccctgaaatgccagggtaacataagcgagacagaacagctagcagaacctcagggaataccactgactttatggtgtcagccagtatcatgagagcccacaatgttgcctttcaaaccaagtgatacatttctatcaataattaaataaatttgaaagtacactgccattgcatttgcaatcttctttctttgttctttattcattgcaataataaaaacaaacaaacaaaaaacaacaccaaatcaaatgactgttgatgggggaattataagaatagatgggagtgaagacccaagctgactttacctccaactcaaagatttttgtccactaatctaatttctctttctctctgtgtttgttaaaagtttcaaagtagatgtaggttctcttgccaagttgatactcgtgttctttccttttcaagattacataaaaagtatagcttagatccaacgtatcaacctggaataggtgaaaatatcactattgattataactagtatttaacgaggcttaatatggaccaaacactgatctaggtatttcacatgtattatgttttgtaatcctcacaactttatgaaggaagtatatgtgtgagaaaagatacacacgattagattttgagagccagtgcaaactgcaccgcaggtgtattgcctgttcaaatttttctttaccactctatattaacacctaagttaaaggccggcacaataagcaatgtgttgcttgataatatttgtaaaacaaatggattagtgaacaagttaatatgtcactctgtggtctttaaaatatatatggaaatgcagaatattaaaatctgcaatacatattttgaaaaacaaaggtgagagtaatgctagccaaagcaggtttgactgcaggcacaactgtccttcccactcttcttaattgaagagtcacctcaatccccatttgaatgttctcttttcaacctcctaaaaagattactgagaatgtagatatttaaatgtattctgttcatctttaaataatttcatttatgtttaagctgcaaaaattgatctgaagttagtctggtatattgtgtactttaagcatgtgatacatttctaaaatgttgttcatgtcaagaatatctacaattcaaatcatgaccttcttttggcttgtattctaattttgaagtttctgacctagacacaaaaatgattaactgaagaattttaatagttgtactgttgttcttcacttctatcagtgatgatatttgatagtgtaatatgctgagcaggcaaacaatgaaaaagtcccctccatgcaaaatgtatgtaaaatcagctttcaataagtgaacagtatttactacctgctgttccttttcaccatttgcagtaccattcttagactcactgcaggcataaaccctgggataaggaaaagttaagcctccattcttcatacctctaataaggctttgccaatggctgcaatcattttacaaccatccacttatgtttaggtttaacagagtcttggcttcataatgaaatacttcattaaagtatttttatgatatctgtttacacatatgttcatagtagaattacatggtgttctgttatccagtctttgccattcacatggactcagtttatagtgtctggttatgctactgaagatcttcctgctttaccatttgctgttaagtaattgtagtcagacagactgcccaggaagccccatggactcagttttatcccttgggtatcacaaatgaggaagagtttgattccatattggtgaaatactacttctgtttcctaaagatatgttgttttctaagatttgcttctagattttgtgattaaatgttttattggacagggatttaagaatcagaatttcatgacattttgtcctactttaaatggaaatgtctatagacttttctagtgaaggcttttacaaatgttaagggatgattgaatgctcacagcaggacacatggcattacagaaagtctccaaaattattcatccttttggggacaactataaccatgattttttgtgacactcataacctgttgaattggaaaaatattaatgttagaaatctgttctcatgtcacttttaaaattcttctccttttttgcctcctgtagcatgagtcctagtttgattaaactagacacttgattttctccaatggtaacatgtttttaaaaaaggacttttactctgttggaaccaattaggccaatgtgaggaactttggaaggaacatgagcagccaaacttgctaacagcaaaacgtatttttctgaaggcagcatgaaaaggacggaggagttctctaaggactgtgagttccacgggtccttttgagcttcagaaatccagctctcagcacttcataaatcatttctgacctgatgtcactgaagttgtattattatgtggttagtataaaattcagaaaaattgggagaaaatacaaggagaagaatttgcagggtgattgttgtaagatttttatcatgtcctcttaaaaatggtagcttttcagaaacttttgttaactgctttgcattccatcttgagaaaatgtctgtatagttagatgagcatcatctcctctccttgtttttaaatcacatccaaaatgacatcaggcttgcagccgtctcattttttccttttatttacactcttcacacttcattggcaattgaggtcaccactttaaaatttagggtgaaggctaaagaccagcttgacaaactgttggcggaatgctctcttttgcaagtcttcgttttgaagaaagaatgtgtgatttagaaatatttaagattgtcattttggtagaacttctcatctatcaatgcagggtgcagcatccctatttattaatgttgtgttggttagatatgttcacccattaggtacgtgcagaggtacctgaaaccatctgagaggtggtatcccatttttcataatctattcaattgaactttaaaaataactgagcatcttttatatacaagacattaacagacatttatattctatggtatctactgctagcaacttataacagttttggtggtaaaataaaggcaaacttgcttcataacaaaacaaaattaaattatcaaaaagaaatgctcagttgttaatttaaaatataaaatgagacatgagaataaccttaggttagaaattcagatgtagaaaatatctgtataaagaagttagttgaaatactcataggcatgaaaggtattttgcaaaaagcaaaagtaggcaaaactggatctatgaagttgctccataatgtactagtcaggtgaagtagcacaaattacctagtgtatcagttttcttttgttaacacaacatattaccacaaacttaatggcttaaaacctcacaaatttatctcacagtttaataggttagtagtctgacacaagtctcactgagctaaagtccaggtgtgggtagtattgcatttctttctggaggctctaaggtagaattcattttctaaaattcattcatttaggatagaagctgaaagaatcagtttctacaggctacctgcatcctttggctcatgaccccttcctccatcttcaaagccaggaacaggttgaatccttcgttgtaccaccctaacctcttcttttgcctccctcttatacttttcaggacccttatgattacattgagcccagtggattatccagggtgatcctttcatctcaaggtctttaactgaatcatatctacaaagttccctttgccataaaaagggtcatattcacaggttccaagaattaaatatagacgtctttgagggaccactgtttactctaccataactagcctatctcatttcaattttctaatcagttactacctgtctcttagagttcttgttagcagaaacaaatttctgtgtaataaagtgcctggcaaaaagtaggtcctaaataaaatgttattttccccaagggaaagattattaggaattataacattgggacacacctttgtttaaaaagctctaattaacaagaaccacagcaggggcgcacatacaggggttggagagaaattcagttagtgctgtcttctggacactccttctatcttcattctctcctctgccattgttaaccttccattttaggcaaggagctgtattaggaaaatgtggtttccttttattaaaagaaaatctctaaattattaatagatattacttttccaaagaaaatttcagaaaggagaagaacaacataatcaaaatctgtggacactttaaagataaggatgatggagaaagactgaattttgcaagcaggttataataactcctgagagtgattgtaatagggtgattaggtcatgcatggactacaagggatcaagtagaaaaggagtggtaaagtagtaaacagcagagggtacaggctactcttaagaaagtccctagagaaggataagaaaatggggcaatacataagcttggaaatagatgatgatatttcttttttttttaatttaattttatttatttattttttttattaatcattcttgggtgtttctcacagagggggatttggcagggtcacgggacaatagtggagggaaggtcagcagataaacaagtgaacaaaggtctctggttttcctaggcagaggaccctgcggccttccgccgtgtttgtgtccctgggtacttgagatcagggagtcctgatgactcttaacgcgcatgctgccttaaagcatctgtttaacaaagcacatcttgtaccgcccttaatccattcaaccctgagtggacacagcacatgtttcagagagcacggggttgggagtaaggtcatagatcaacagcatcccaaggcagaagaatctttcttagtacagaacaaaatggagtctcctatgtctacttctttctacacagacacagcaacaatctgatttctctatcttttccccacatttcccccttttctattccacaaaaccaccatcatcatcatggcccgttctcaatgagctgctgggtacacctcccagatggggtggcggctgggcagaggggctcctcacttcccagaaggggtggccggtagaggcgccccccacctccctcccagacggggtggctggccaggcgggggctgccccctacctccctcctggacggggcggctggcagggtgggggctgcccccacctccctcccggacggggtggctgccgggcggagacgctcctcacttcccagatggggtagctgccgggcggaggggctcctcacttctcagacggggcggctgccgggcggaggggttcctcacttctcagatggggcggctgccgggcagaggggctcctcacttctcagacgcagcggccgggcagagacgctcctcacttcctagacgggatggcggtccggaagaggcactcctcacttcccagactgggtagccaggcagaggggctccttacatcccagacgatgggcggccaggcagagacgctcctcacttcccagacggggtggcggccgggcagaggctgcaaactcggcactttgggaggccaaggcaggcggctgggaggtggaggttgtagctagccgagatcacaccactgcactccagcctgggcaacattgagcactgagtgaacgagactccgtctgcaatctcggcacctcgggaggccgaggctggcagatcactcgcggttaggagctggagaccagcccggtagatgatgatatttcatttgcaatagctaaaattgactaagtgttaagtgactctgatctgttgaaagaattcatgaaccaagatcagaaactttcttctgtctttgatttgttattctactctgttaacattatacttctaacacttcccatcactacaaatctttgctattagtccccaaatgctttgaactagagtgattcatttatgtgtgtaatgtcataaattggagaatgtgtaggttcatcttaccttggtaaatacagaagcacaaaaaacaaaggcaatgccaggtatttctccagggtgaataaattttagaaggcaaatttaaactgtcatatttctgattgcctgtgattcacaccattgttgtactctgtgacagtttcattgaaaggactgtcatgttccatgaggaactcagcctacctgctcttttaccagtagctggtgggaaagccatgctgtgccaatgacttattcacaggaggcaggtcaatcttttgaaaccacagattgtttcaaatgagagaaaaatatgtgagaagagaatagatgtcaagggtagtgctaaagacaaggaaaatgcttgcctgggttttccctgcagctgacgttgttaaaaatgatagcaacttaatgaagcatggcgtactaaatgcattaataagctgagggaggaccttattcattccaatttggactctgctcactcgtgttactcgttttcttaagactggactaaaattgtgagaccttatgggccaacgataccctttagagctgataattaatttgaaagaattattaaagcatatttcttgagctaagaatgcagtgtattcacagtaagaggcagagttaaccatttatcaagataattaagaaaatgcattaaatgtttgctccgtaagagcaagcactaaattaccagtagtagtaatattattatgtgaaagggaatcaatagtttgtttactaaaatgagatgcattagcaagcttttttattctgatataaaaattttcaaatatacacaaaagtatagagaataccgtggactcaaatgtacccaacacccatccataagtattaactcaggacccctcttgtatcagttttcaacccatccacatcctactccacccctccagattattgggaagcaaattccatatgtattactcgctttgtaactacttcattatgtatctctgaaggataagactcttttataaaggaaaccattgtcacatctaaaaattaatactattatactgattctttaatattaacaaatatttactcagtattcaaattcatcacacctgcttccaagttttttaaaaacagttgaatcaggattcacaagaagtcacatactgcatttgttcgatatatctaggtctctcaatcaataacattttaacttccttgcaacttatttttttgaagaaaccacgttgtgtgtccagtagtgtttcttacatcctgcattttgctacttagggttcctgtagtactgtttgcatatttctctactactatatttcctgaaaactgatagataaatttagagagttactctgattcagggttcatatttttggcacaaccactttatagattgtgctatgtgcttccatcacactgcagaaaatatctgggtgtctcttttttggggatgtttctggtcattgatcagcattaatggccacaggtccatcattttatgggggctcccttcatagtaaactgcacagtaaactatacacagtgaaccttgtggtaaactgtagcatcctgtgtactatagcaatttactccatgttgcttttttcatttaacaataaatcccgccattcattgctcttccatctcagggttttcttgcttattattgcttgttaaaattcttccaaatcacatttataatcaagtcgttcagcactaaggaaaaaaaataacattttcatgaaaaaatgaaattgcattacatttatatattctcttagggacattgaaaataagtcttgctatttttcagagctagactttgagatttgcttttttgcagagtgagatagagaagtccttcaaatactgtcccttgaagagttaggcattgatttaaacccttttgaaaaacaatttcaacaaataattgaaaatgttctcttcaaagtattatcattagtcatccagttagattattattattaggaattctgaggtggtggaataattcattttccaatgtgttaacttctcatgagtttaatgtgagtataaaaagtctgttttaactgagggcagagtattcctttttctcttataatacaggagccagttacaacacaggaggtgaaatggcctgtttgcttacctgcaacttcaggaatttcatgcttagcaattaattgcagtacacacttgtgggggtaggggtaggaggttggataagtgggttgcacttaataattcagtgacaattacaaatcgtttcactatatgtgaaagtatttgaagtaaatttacctgaagatagaaaatatgggtgggcaagctcctcctgaactccccaccacattattctaggtttattgaagtaaatgtaaacttataaggggacataaaactcacacagaaaataataattagacatatttccacattaatgtttttaagtttaaaacatcatttaaaaattttatcactgatgcttgacttaaacaagtccacttatagcattgtcagaatctgtataagtatctcttcagggaatttttaagatgagagtgaacaattttctgagattgcctacacatttttgttacacagtaagagccaggttctatgtggcttaggtggggatggggctttgagtgaatcctctgttgtacacagacttaatacattctccatttcagcccacttttcacctctgttttcatcagacctacctcggtgaggttctagacttctgccctgctgcagctactcagtactttaggccatgacctccgctctccttcctcagcaactcaccacagaccttccagaaaaatgttaaacccttctcatccttttcttgttattggtttctattttctttctttcttttttctttagcgtcacaggggaagagctgataattgtattggctatatgtatcaactcaaacagagagacattacctgcagttctataaagattcccagattattccaatgggtattaagcttgaaaacatgatgtctatgatcctttctggttctgatattgtataactctcatcacttaatgaaagccaccgttcctatttggataaataagagaattgaaaaacgcactattagaactgagagtacagatgagctttccaaatatattagagatggcatcacagtacatggaaatgttaaaatccataacatgggcaagagcacatactagaaaagtgcagaacctctttagaagtgaagcattttcgttccatgcacatcaatttgctataggagttcagggacaaatagcaatatgggaaggaggcggagctcaacattgagcagaaattagacacatgctgttctcttgagagattaagaaagaataaatagaagagagtaagtcaggtcctatgagaaggataaagcattgtcttccatagagagtgaccttcattaatattttttacggcttttgtggagatcagcctaaggaaacagaagtcctatggccttattacatcattacagaatcacactttggctgggtctcttaactgtgtaacagtggtgctcaaaagtctctgtaaatctccaaaacacaatactctttagtagcatttcttagatttgtgattcttctggggacaaaggatctgggatacaatgggttcccgagtgcagtggtgtgatctcggctcactgcaacctccgccttccgattttcaagcgattctcctgcctcagcttccggagtagctgggattacaggcgcccaccaccacccccgactaattttttttttttgtattttttagtagagacggagtttcaccatattggccaggctggtctcgaactcctgacatcgtgatccgcctgccccagcctcccaaagtgctgggattacaggcgtgagccaccgtgcccggccgaggatttttttttttttttaaatcaagacttagcaatgcatgttctagaaactgattctggttttcagacttaactaacatgggtataggtgagctaagatattaagctgcagggaagggtctagagtagctagagttcctgggctgctcacttcaagctatgaggtctcctgaacactggtaaaaaccccagtgctgtacaaatatcattttatcttagccatgatgttcaagattggaaagcataactctatgtgatgatcattgtccgttgcttattattttgagactaaaggattcttaagaaagaccctattctccatttccacactaaatgagatcaagttcttaatactcttcttattataggaggaacatctaattcaatgctacatcagtaattaaatgatattttgttaggtgacatgcaaatgagtaacaaatggaatatgaaatagaaagttccctttgttatgtaaattgtcaaacacttgatattgtttttaaagttatttgggatttttttaagacaccaagtttgtaacaagtgcccttcaacagaaaagacacttggatatcatgagatgttctcttaggttcctcaaagcctagcagtcatagcattttaatacttactagtggggagtctgccttccctgctgcacaccagaacagactggggtgggggttaatcatctggaaatgaggtattataactactgattttgaagagtctttataatgaaaacaagacacagttaataaaagtagcatagaaaacattagagagttattttattagggccattaaatatttggagtacagtacttagaaaatcactgttaaaattgttacagttactctctgaagcctgctaagaatactgctatttattacatttttaataatgctattcactacattttaaaagtttactcaaaaactacatgactttcaagtcatttaagaagtccaaaagaaattccatgccaacaaatttaattaattttgcatggaatgtgaaagaacccatagaaaataaatgaaagagggatattgttttgaaatgggactcattcagtcttctgtaaggcggtgactgcttttccgtgtcactgctggcagttatgttgaattatagaaagagtctgtggggtctctagtagaacttctcttcgtggattatttttatctattattccagagccaacacaggagctatgaagtcataaatccacattgtagctgcatgagaacttggccttatcacatatttgcatactcagtgctttctaagcaaagttctttatccataaccttagtgtagtcttatttttcttagtgggtacctgtgatctctaatatgctttgctatctctctttttgttttatatctttaaaaaaatctctatgtttttattttttctggaaggaaacaggctcacttggaatatttacctagattctctctttcacaagaacacgcagtattttgtattcattatctcattatctcttccctggttgtgtctttagaaaagaaacaatggataacagagggtaaaagagtttcagtaattttctcagctcacagagacctaataggacaaatactccaggaacgtatgccttagttcctgcagatgacaatatatgctaactgggattcaagctctaacaaacaggcaagaccaatgtcaaactaataaccataacgtggaagcacattacagtgattttggctatccaactaaatgtaataaatatcaaatgcccaccatttcagaagaattataataaggaatatagcatctttaacccatttctcatttgcctgaagaatacttgcagacagcatttgtggcttaatgtttaccctgagataacttgtggcttactgtcctaaccttatccccaaagtttgccatgaaatatctcacttttattattatttttgcataggtctagcatattgactttggaaacaaaagacatcattctatttgtagcattctgtgtttgatagtagtatttccatatacaaaatatagtaattattgattgctgaaatcaaatcctagaaaatacagcattcctatataaaaaattattaaattctgatcatcatatacatttctgttacattaggattagagataagttttatttagaaataactctaagaaacgtttttatattttattttcacattgaaaataagtcagatttgcttcagcctcaaaaaatgtgtttatgtaaaattaaatgagagctggcagtgagctgtacattttttttcctaatgggacatgggttatgggttaaagatgtacaagctggccgggcacggtggctcatgcctgtaatcccaacactttgtgaggctgaggcaagtggatcacctgaggttaggagtttgagaccagccttaccaatatggtgaaactccatctctactaaatacaaaaaaaaaaaaaaaaaaaattagccaggcgcagtggcacctgcctgtaatccagctacttgggaggctgaggcaggagaattgcttgaacctgggaggcagaggttgcagtgagccaagcttgcgccattgcactccatcctggacaacagagcaggacgcagtctggaaaaaaaaaaaaagtgtaaaagctagaggccctggcctccacaagcccacaatttagttattcttcttctttatgattttaagaccttgtcaggaatactttgggattatcagtagttaggaccaagatatttcatattttatagcagagacaactctatctgtgcattttataagattaatccattggtatgtttcttgttgaatttctatataaagacattctacgtgatgagttgttcaatatgaactgtctaaaaaacaattccttatgaataatacctaaaaatgcataagtagcaaatatcttttatagtggttgatgtaacatattctatgttgttcctacttttgccctttctctgttacttattttactttgtctttattttaaagataattttatttaaaagtaaaacatttatgttcatacaaaaaatatagcagaatacgggatggaaaataaaagtcctcctcttttcttgactcctaaaggtggcagctttaatatgttcacataattcctctcccaaaatgtcttggcatattcaagcagttacaggcacatacatagatatgtgtgtctatctgcagttatacctatctatatgcctttgtaaatataaattcatcagtatttctcacctgcagtgatactcaataaaacagaatgctcaaagcccagacccctcaggacaaatatcttggctgtccttgctatgctggggtcaatcagatggtctcaggggagaggaggcatttgggaggttgggcagcagtgatttgtcaacaagtacagaagcatttcagtattttatccactagttgttccacaactgtgcctaaaaggctaatactaaccctactttgactcattcgatgggtgatttcccctccatggctctcaagcatgcatgcattcaagtaaacatcttgaaggaatagcatcagagccacctgtattaccgcattccataccaaatttttatatttttaaatctagtcccttagggtataccatagatcctatacacgtatgcatgagttaccatgtcaaaactatgaagcagataaaatttgtttctagagcatccctttcaggattccctctgtagctcagcagtcctgttaatcacattgtagtgagcctgtcctcccaattgtgccccaccagtgacctcatccacttagagcttagagctgccaagctctcatacctcatagcatttactagtcaagaacatatcatactgttttattattatagcacttttcatttgtctcattattacaatatattaacaacacattgatggtggaatagtaatttaaactaattcatatctgtctttctacctagaacattgtacataaatgtcattccataatgtttcttcactattcttttggactacattggtaaagacacagatatgcactaccacaaaacatctagaatatttctttttttacgtcttcaaattctatataaatttgtaaatagagcattgccacattcctctccattgtcactctgttaacagtaacaatacctctttatttcaccccttttcttgcatgtttaccttttgtaaagagaaggtacagaaacccttcatttaatgtgtttcaggttcaatccgttgtcttcataacactggaatttctcctccattattttctatttggggatgtaaaggaatggacatttattgaggatttactgccacaatgctagaaccacaatctgaacataggaatgtgtttatgttgtttttgctgtaccatactaactgcctctaaatggcacttttttgaggattatgtgatataagtaaacaagttttctaaactatcaagcactattcacactgggaatttctagcttgtattttacagtctttaacacagtaaggtgagtaaattggtatgtactattaataaatgttttaggtggtaataattataatggaactttaaacatcaggtgaaatgttgccaatgagttgttactaaaatccagtcttaatccatttcttttaaagccatggttgtcaaaacaaaacatcacttcttagcaaaaaattattagatatgaacctgtaatagtaaaatcatttcagagaacattataagattatagaataaaatctgaaataaaatctactgtagcatttagacttatatttgacataaaatgatgagaatatttgggaattcaatgttattgttgttgttatacttccctaggtgttccagatcgcgtatgtgattgtgaaggcagctaactccccccggcctggaaactggattttggaacgctctcttgatgatgttgaatacaagccctggcagtatcatgctgtgacagacacggagtgcctaacgctttacaatatttatccccgcactgggccaccgtcatatgccaaagatgatgaggtcatctgcacttcattttactccaagatacaccccttagaaaatggagaggtaagatgagaaaactcaccatttaagcacatttgatacggtgaaataggcctgtcagaaagacctgaatatatcagtaattaatgtcagggagattttaaaataggatttagcaaaagtacatttaaatgagttattaaataaaaaagaaaaacctgaggtgattagaattttaactaccttcatgtgtctcccatctccagtaaagatcagagaagaggaaataggtttaatctggaaagtcaatgattaattttacatataaagagactttctcaacaatgaggattgctaatgattagagaaggattggagaccttaaaggtggccttacatttgagtgtactttggtctgaagatggagacaaaagaaatgaatttgtgaagaaatgtaatccacatgaaagacccaaatgaaaagtaattctttcaatcttttgatgtttttctgctgtcaccacatagggctacagtggggtttcttccctgggtcaggctttgtggaacagtaatgtgcaggaagtcttaggttctcagtgatgtgcaagctaggttacgtgcttagttcaaatatgttcttctccagtgtctgtcatcctgtggttaagattttagattcattcattgattttaagccacatattctaaccatggcttcagttgttattagtttattagttgtatgtgggggcggggaggttttttttttgttttttttttttttgttttctggcttagttgtgtgttcttgatccagttacttaaattctctgcacctcagtttcatcgcccataaatcaggaataataatagttcttacctcatataattgtcaagaggattaaatgcattattgtatttaaagcattagaacaatgctgaaatgcacactaagtactctgtgctatttttattgttttgttgccattaaggaaataataaccattactactattatttttattattatccttagtcttctctcaaatacccaaactttgacttagtgactctcttgaattattcaatatttctttagtatgtttccctgacttgtctccctttagtatatgtgacccacctcctttcatgctacctaattatgtatatctccattgatactcatgtctgatattctctcccacatagtccaaacatctgaagctagtatcatcatttatatttacattttcagaaaacccatattcacattctatcatgcccaccccagccaatctagggttatctctcaacacttctagggaaaattagggttttggcataaatctgtcagaccctcattaggcactatttttatattaatgtataccagtgcttcactatattttaaattccatgttcaaaaataccagttttggggaaaaacattccaaatggtactctcagcagaaatctcaatctgccaaatgacaaggactcaaatgcagtgagtcaaacagctgttcaacctgctttgtgcctagaggcatccaattcctggccagtttggcctgaggatatgggagtagggagtgcagaaagagttttgagttgaatttttattattttttatcctagattcagtttacataagactaataattctcaaacaatttaagactattctatacctttaaaaatgattcaattcagaaatttattaagcaatataaaatacacttcggcaggtatgtaacatgcgtgtcacaagcatataccctacccattctctcccttcattaataatggttctccattccttaaaccaagtcagcctgccaatatgaaacaaaagacatgtttattagttaattagttagtttctttaattggctatattgttttcactcctaaacaacacttactaaaaactgcttattgatggtaactattaggagcaactgactgaactgtctctgtgacatgtttccttacgtctatttgtcactcatggggaagtgaatgaaataaggaacagaaagtaattcaaaatatttgccatagaatgataagactgaagaataagaattaaattcagacctctcctaggctatctattcattttatatagcttactttgtggaatatgttacttttttgaatagacaggtgatatcctccaagactctcagctcaatgataatataactgaaataataattgaggtctctgattctcaggtaaatatttcatccataatctggtaaggattaaaagttgacttttaaaagttgacaatcgctaaacttaaaaatggttcagaggagatacaatattgctggatctaatgtaagtagaaagaatcctaattctgatatatcatggcatagaaaaagacacaaggaattagaagacctggattctggtactggttccagttatttgtgggaccttggtcaaatgatttaatctctctgggattaaatttctttaatagatgaattagttcaatgcccagattgttctaaggcagcatggtattttctaaaataatatagctttggctatcatacaacatttgaggatattctaaaagttttggatacttttctctaacattatccagacaaagtagctgtggaataaatctcactcgtcagctttagttttaaaattatgtactttcacataatccctggaatacaattattaattgtttatgttcaaaactttacagagaagtgacagtcaaataagagaaacaaacatataaaccagtaaataaaacatgattgcataagtactgtaacagtagtgtatacagagagcaataaatctccccctgcttgagtggaaggaggcacattgagaagataacttctcagaatatgggaaaaccagcaacaactcttatctcaaaagtctcaaagccaatatgcaaattcatctccaataatgcctatgtgttaaactcggtacatacagaatttacctccattgttgagggatattgttatcagatgtagaattctaggtttgcagttattttcttttggcacattttattgttttctgatttccattgcttatgtagagaatgcagctatccgattactatcttttggagtgacttttctctgatttatttaaatatttttttctttgttcttcagtagttttactatgatgcttcagatcttcactgcccactacaatagccactagccatatgtggtaattcaaatttaaatttcagttaatcaaaattaaattaaaattccatttccccattacactagccacatttcaagtactcagtagccacatgggactagcagccaccacactggattgggcagaaagcaacactgccattattgcacaaagttctgttgggcaatgctactttagattgtacctttttattttctacatatctgcaaagtgatgtctttcatcagttcagaaaactgttcagtcattacctctctaaatattgcttcttccgcattccctctgctctatgattctaattaaaaatgacttggaactttttactgtatacactatgtattttaaactctcttctttagttttcatccttttgtctttctgtatcttcattctaggtattttcttctggattacttctagttcattaattctcttctcagctatgtaaatattgctattaaagttattcataggattcttaatttcatatatttttcagtttctaaatttctctggttcattttctttttttctttctttcttttttttttttttttgagaccgagtctcgctctgtcacccaggctggagtgcagtggcgccatctcagctcactgtaacctccgcctcccgggttcccgggttcaagtggttctcctgcctcagcctcctgagtagctgggattacaggcgcgtgccaccatgtccacttgatttttgtgttttcagtacagacagggtttcaccatgttggtcaggatggtctcgatctcttgacctcatgatctgcccaccttggcctcccaaagtgctaggattacaggcatgagccactgtgcccagcctggttcattttcaaatagaagttgtttctcattttacattgaaattttatatttatagtaaaattttaatttaataatatgatttattctaaaattttcaatattctatttttaatctccttgagcataaagtaaaaattatctttaaaagtttttgtctgataattctaatatatggcctttttggatatattttattttctgtttcatctgctgattctttttatgctgtcttacattcttgtgtgcctgattatctttgtataacagaagttgtatttgaaagagaatgtgtagaaataatttgagagctagtatattgtcttcatcctgtgtgaactttctgatgctactgccaggcaatggaaatctggatcatcttaattcaattttagggattcaaatttctgggacattcagatgattcaaagcattgctataacccagtgacagctgctttaattccagtatacgctcattcccatgctgcttatctttggagtccaagccagcgtgtgtgggaattacgaaagtcccacccatgcagtcctggaatccaacttttgtcctcctaatacagcagggctgtcaaaagagctgctcagtctctcagccatgtgtctggacaggaaaatgctcacaggacaaaagctgtcacaacgtaccaatcacctgtctagacatctcttttgtccttgatgttgagaaggttatcttcactctcttgatagctctcacatggctttaaacatatgtttttgtatatttatccagtttgtctagttgttgtcattgagagtgttgactcttactgtataatctaccataaatagaagcgaagttgcacatgcatttaattttttttattttggaattatgttaagtttacacacatgtatgaagattatagagaatcctcacattccctcatccagctatccctaggaataatatcttaaataatgacaatgcacatgttaaaactaagaagttagcattgatacattattgttatctaaaccacagaccttattcaggtttcattcattttaccaatttcattttttctcttctgggatccaattcaggtactattttgcatttagtcactgatctgtgacagttttaagagatattttaagaaatattttaagagatatttagagatattttatagactattattcagtttgggtttgcctgatgttttttcatggttaaactgggcttctggattttgggaaccaatactacagaggaaacagtttctcattgcatcaatcattttttattaatatatgcatatttttttcttttttattggtttatggggcttgtgcttctattaataggtagatttttaaaatgtttttaatttttatggttacatagtaggtgtatatattttagatagatttttaacgtggacagcagtatctaaatatttactgtgatttgtaatgtatatttttcactaagcattgaatggtcattttcttccagaccttcaaaatattccttaaatatgtcagaaataagaaaaacaagtccctccctctctgccttcctcccttccttccttccttccttttttttctttcttctttacaaacaggttctcattgtgttgatcaggctagagtccagtggcatgattatagctcactgcaggctcaaactcctaggctcaagaaatcttcctacctaaaaaatcagcctccagctaattttttaaaatttttttgtagagacagggtcttgctatgttgcccaggccgttctcaaactcctggcctcaagtgatctttccaccttagtcttctaaagttacagtcttctgagattacagacatgaaccaccatgcctggcccagaggaatttttaaggcccacccatgtaacaaggcattatgaaataaacatgtctcaattgttacacactagttagacaacaatgttcatgttttaggcttagaacattaataggaaatagttttcttgtgactaatgccaaatccactgagtctaaagtttattacatttccacttgtctaaagaatttttgagacatgtgccaaaatctttagaacattagagctgaaagataccttaggtaaatttctcatcaatctattaaaggatattcaagcccccaatttcagcctctgtatccaaacttcaatactgccctatgttcatatcatcactggagaggtctggcctttccttatggcctctttaatcttaattgcatcatctctgatgttttatttggctttgtttgttactccagttactcccacctgtttcccttcatggtttggtttggccccttctctgccctccactccacattgatttcaagagatcaacaaatgttagagaactgggttcaactactaccaagaaagagcttaaccctgaaacctagcatcctaggcctgcacccaaagggagaagagaagcttattctgagctatgagataatcgtaaggtatcaagtctcagggcctggcaaaggagggataatggaggatataggcaagataataatatgactgggtatgtcgttatccaggctgcaaatagaaggaggctttgagcaaaagccttaaaacagttttattttagaagggcaattttctatcatcaatgccaagagaaggctcagcagggaccctactttgtcctgctttgagcaaatgatactgagctccctaataggagttgcagggtatgaagcaacagactgcaggggcctccattactttgaggccaaccacagggtagagctcttgtgggaacagctacataacatgcatgtccagcagtgccccagggaaccaagccatcgagagctactatcacagcccaagtgctgcctctgcagaaagcagtagcccagatgctattgagaactgcttacaagaactgccacttggaagcaccctgagaacttggctttacttggaaatcacctaggagcatttgaaaaatagctactcctgagaccagaacttttaattcattatatttgtcagaggctcattaagccctatgtatattttaaacaagtactcttggtgattcttatgtctgtattcctggcttaatgttcagctatttccagccttttaaaccctgtaggagaacagggcaccagttatttagggaaagaatattggtcattctaactacttccaactgaagaaagagactaactttttctgtcaacaaatgtgataggttttggtggactgagtctcttggcaggtttgagttgagcaaataaacttcgaactaaaactaggttattgatggtcaaaggggtatctgagagaagaatcacagtaataatattgaggaggacgaactttctagatggcactgctttagagatcctagaattaaaattataatatttttctgttgtatgagacttttccctttctttgactcacattattgcttttaatttatttggattgtcactagactgctagctaaatattcgtggttaccatagtgattttgcttccatttcctcatacagaggcctttaagttatttacatatgatttcctttccttcttaccaccaccttctcactctcctggactgcagctcaatggaacttagattcactttgattctgctttgaaacatggcaggcttgtataaaaatccctggagaaaccatcattaaatcttgaagacacttttttttttttttgtaaactgtatgtagagctttgatattattttgatttcctatgtgacagaattttatatatacagacagaatatttttcttcctcttttcatcatctgacattatggtggtccttagaattgcaaatacaggagaaggaagacacaaacccaagactgtattaaaaaatgtttcagaaattctcctttgatataacattgttaaggttataacatgattttgcatgtgagtttgtatggaaatgagggaatggaaatgaagacctagcctttctcaattacccttgcaattgttcctttagggagaaacagcggagtattactaatttgtattggttttcaatagaaatttaggtaaataattatttggggtttcaggcttcctttctctaaaaataattctttttagaccaatgtggggccaatcagtacctggagcaacaatattaaagtacctccttacagtgaggtttatatggagtcctctaaaaaatgaaatgtttcaactctggttggaatacacagagcagctgaaatattttgaaatgacacacacataaaatacataatttatttaaggtaatttattgttacattttaaaaatacatctttttaataaaataaagataaaattaagaggattatattcctcctttttctttgttgatcagttactagactcccttactcctccaaaaaaaaaaaaaaatatatatatatatacaatgcccagaaagtatccacaaatccctgttaaattaatgcagtattgttgaaaaacaaagatggccagagaaactgaatgagaatggaatcctgaggagaaaacaccaatatttaagagacctggttctctcagtgttgtggaacaggatccactgatatggaacagaagggtaagcttctgttaagctaggtaaggaagcttagggttgtgaaagaaggtacaaagacactgcacactgacttttggggaattacctggatttggctttcaggtagctctgccaaggattaacaatagggttcagaaagaagagtaaaccatctaatatgtgccccagccagtttacgtggttataataacgatcaaattagatttttatggcaaaactctctttaacctctacgatatgatagtatttccagcctttttattctcaaggttcagtagctaacattggcttaagcccactcctaactatgaaatgactgagctggctcagcctggaatgagagtggggagcatgagagggacacagccataccacatgaggccatggctagggaaggcagaggctactgaacaagactgaaggaataagcaaagcaaaaaaccacaagcttgctgaagttggaggaccagaaggaataggtgagggtctcagtgctaatgtagggttaatccagggccaagtagacaaaaataataataaaaccacaacaataataataataataaatgatggctagcatttgttgcacatttattttatggagggtgttaatctaagaaatttcccatgtataaattcatatatactaatacttgtcgcattttacagttgagaaacaggtattacagagaggtcaaataactttcccagggttccacagctagtaatttttggagctgtgatttgaattcagtgtattctcagagcaccagaaaggtacaaagctaaaagtttccttctgtgtctggggtttcctggaaaatctgctctgccctataagctcaggagtcccccctcctagcagttcctgctgaagctctatgtgagattgcacagacctgagtttgagctgctgcttattttttattttggggttttagtattttcatgttttaggttaaaaaaattctttaccttttagctttgatgaattacttcatttttatatctaataggtttttttaaccttcactttaattgatttcttaacctctttatcttgctcattttttaatctttttaatgattttaaaatgctgattttaataattttatcttggcatatttatatttatcagtttttctgcttcaagctttattctggcaaatgatgtatatttatatttcttttgtgttgttttttaaatattttttatttttgtttctggaatttaatgtatgtcagttgtgcaatagacttgttagaattttgtttgctttaataatttttaaagtgactttttgcattacttttgatcattttactcttagcttattttgagcttttgatgtctaaatataactttgtttgtctagtgttttagtgtctttagtcattgcttctacatggcaataggaaatatgaccataaaaacctcagtgaaagtaacccacatttagagaaggcttgtattccttaatcccgcccctctacacaccccacccattcaacccatctgtagcctccctttcagctgttcttaaaagaccttcccttttaagggaacttacattttcccttcaatactaaatcccaaaagctaatagcaatacagaagatccactgaccaacatttcttcccaagacaataatagtaacttatatgcataattgttaaagcaattttaagattttgttttgttttttgctatccaagttcctaagacatgttattcctctaaaagtttactatatgaaatgattgactaatggttgaacaaatactataaacacataaggaaggtgatatgggttttactcacagaagattcctcaaaacgcatacctgatttggttttaataaggatcacattacaggagatccaatagaagctacttaaaaagtgttttagaaaatgtttttaaatattaatttgcatccattataacattactatttgaatttaacttccttccaatatacctgtagaatgagctattgagtttaacttctttccaggcatggttatggagcctgctagtgtgtgggtgtcccggggccacaccgtattaaataggctagtgataaaatggataggacaagatttctcatcaggaacatttttaaacacagaatctgttgattctgtgttgggggcagaggctgggagaaatagggagatattagtcaatgcattacttttataagtgggcaacagaacccatgttgtgtggtcaaagtactgcagaacttctcaagcattgtacacgtttcagtttttgactacgactttaatggtccacaagaaaggcctctaagaatctttttcgtgtccatttctataagagagaacataatgctgtgttagacatagttgagatccattataataatgtcactacattttgaaataaaattctgaaatgccttaatacataaatccttttatgaagtctttaaaattggctgctaaaaccaataaaattatatttttggaacatagttaaccactttgtgcacataagtgaggctgtagaaactagggtttttaaatgacttaaaagatatatatttctccaaactataggtaattatatcaatattactttgacagagatatagtaattctccatcttatagtaaaatttatgaaaacattaagtaaaccaacaggtaaatacatttttggtcaaacaaaactttaaaaattatgtttttcttttatttggctcaagctaattctttctgttatttttattattaattgactactcaggtaaaattctatctgaattgaattgacatcattgatcccattgtcagaaaagacagccctctatcccattcaatttattaaactgctaatcttctggacttttcttcaaagcttgtcagttttgatccaaaaaaacttcagatttcattgtgtggacctgttacttcttgtgtgaaaaacagtatggtttcatggaatccactcttggccattgttaatattgtacagataggcacacaagcatttaaatatgctagcaccttattgcaaaaaaaaaaaagttctacttatattcattgcaatttattatagaaaatgttttctgaactgaaaattataaactgttgtcaataattcaggtcccaattctgaagtgtattgagattaccaaactgtgaagcaggaacaatatttattctctacataaagaaagaaaagaactattaaatgaacttgatattataagaagcacttcaggttgtcaaaactcatattatgacatctataatctggcctaaaatcacaagcaaacattccatgatggaatggcagatcatgctagatttgctggttattatcagttttattttacgttacctaagtagaatttaagcctttcagttaaaatatgactcccaagcaaaaggaagaggattaatggattaactattgtttgtgttatcaataatattggcaataactatttgtctatggtgctgtgtcagttacaaggcactctgccatgcattcttccatctgatcctcaccaaagccttggagatgcttcaagccaaaattgttattattctcattttacagatggaggtgaaggaactgatttgaggtcacactgtggtaaatgttcaacactaatctctggtccaggtccagtccagatcttctgatggcaaaccttataatcattccacttcataaatggaacacttaggtccaatcagtcattttctaaatgtgtatttactgttggtcacaagagtttgtgtgacactgtgtggataattaaatgccatccaccatctctactcggaaaaacccaagggtgtgtcagttaatcagtcttaacaggaaagataatgtactattatcattatggcaaaagtacacttgaaaatacaacaaaggatattgaagctattaaaataagcttcttatccttagggaaactatttcaacactagagctatcatcaaaagtccttgagacaagtaacccaggagtggaatggttatgattacactttataagcaaacttaaaaagatatcaggagctgctttactaggcccctgctatgaagtgaaaactggagaaaaatctacagcaaagcattctagcctgaggatgtgtactattttgcaacacagcagactgactacagccaaatattttcattggaaaaatgtaaatgaaaaatgttgctcaattctgctacctgggtagtacataagacatgtaatttaaattctaatcagggataacaaaaatcctatgatacttattttgcaaaggaaaatggcagtcctggcaaggttataagttagaaaattatattttctttgtgtaaatttgttctttagcttcattcagtaatcagaattatttatttccttattcaaattgtaagtgccttctaaacccgagcctactactattatgttgagccatgggaaattgccaatatttgactattttagtccattaaaatgcagtttcatatggtttaaactaatatgtgccaaagcatgaatagaaatacttgcaggaatactgtcctaagtataacctcagatgcacacagtattttagcaaaagtatcaatgggaaatcaggcaagtcctttcactgaaacaatttataagtataataatttattttgtgaaggccttttctttaccaaattagtaatatggtgaatattaaactaaacctgagtcatactacatttgtttttaaattttgtagggaaggggggaatagcaaataatattttatgctagtaatcaggcattatatcagttgttgtaaggaactacatgaaagttggtggtatacaggttaccagtagtaagtttgggaactgtgttgttttggctcacagaatataaagcgtgtatgtatatacctgtgtttccacatagacacactctgttacccttatatgtattgtataatcacatgtgtagatgttcattgtatctggagtgacagttgacaccttttaggggcattttacatgttttaaaacctgacatccacttacagcacttatctactactctcttcaggataaactacctttattgcaagacttttgctaaaaattcttagattatgtcaagggaaaaaaatcctctattgctttttaaagaaaaaattatcagaatgatttaattttgtgttattttttatctccacattagtttgttatttcagtggttatttcagttaaagacatttttctcttccattatttcaatttgttacattgtatccatttatctcatagaaagataaacttttgtgttgaattagctgtggaagaccagctcacacattaatcactactaagcaaatgcgttacaaaaaagagaggacaacaaaaatgagctggaatacagtttcagttcaaccaccaaacgatttgatatcatgaataaatttcttgggtatatgtagccagtaagtagacctcaacatttagctatttttttcaataaataaatattgagcactgtctttatggcaaacactgtcttaggtgcaggggataatggacattatgcttttgggggattagataagagaggaaataagtcagagaaaagatctctagcacagaaaagtctggttacaagattacagagagagagagaaaaaaaaaactgtagtgacttgtctagggaactgtgtggttgccacatagaaaatgtggaagggagtgatgggagacaggctatgttcctagcaattgccttgactcaccataattatttcacctactgaataactgaataaattgagtagagaggctgcttgtaccaaactgtaaaacagtttcaggatgagaaaattacattttaaacatacacttagggaaaacaaaaacaaaaacaaaacacctgccttgcagaaacatgtcatagaaacagattttaggcagaattatttccctgtacaacaattgtgattaagtaaatgttaaaataaaaagaaggatgtttagcagcataaggaatagaaacatttggagttttagctttagcttatacaatgcatcctgttttataattgttttccaacaatgtttacataatgggagggtcactctttaacatgaggggctctgtcactagaattgcagtgtgttagcccctcattttctccagtgtttttgtaaatctttccattgacaatcttttaataatttccaaaacaatcgggggtaatgttcgaattctaagttcttgtcataaatgaatcaatccagttggcaggagatggatgtagtctttttgctggtgttccgtgctaagaaaagcacacacatttttcttgagagtatggctagccgaaaagcatctgagaattgatggaatcctaaggcagacagaaacgccaaaagtcaagtaactggttttgtctccagcacttacagtttgttgtctgggtgccatgacataccctctactagttaattccattaagcaacatgggccatttaaatataggcaaaacaacaacaaaacaaagcaaacaagtaaaaactctgtgaccacagaaagagcctgtaacatagacagaagactacaaatagtgttcttagaagataaatcattaagacagtagcaaaatgagaaggaatagtgtcctgggcaacataaagtgtgtgtacccttctacctgcacaaacactcaactgaaatttgccaaggctcactagtgtctttgaggcaccctagagaggggaggctagaaataaccatcatcctcagctgttccatggtaaggccctacactaggactcagaggagagatagtttggaacattttatccctatcagtggaaaatagcacagttggtgcctaacttcctttcgttgaaaataacacaggtaattttttagccaaatgagatttttatcaaaaaagcaagcaaaggcagaatgtgaaaaggagctgatatcagtaattccaaggatactaaaatttgttttaaataataaagaaatagcatcttcaggccctttagactttggactccaaaattggatgcagatcaaataggatatttatatattaaaaaatcccaagagaacttgtacagcataaggtaaatacaaatcaaggttgaacaggtataaaataattaggtcaagagcaatcagcaaaatatatgcagaaccaaacaatactttgatattctggtctggaaagagaatttggggttattctgaaaaatactgtcactacaactctgtccagaacccacagctgcagaaatgagtaaacaagtcatcttattagaagactgcaaggttaaagaacagctaaagattcaaaactaaatgacattcttgttagttcccattgatacgattataactcacacaattccctaaaggaaaactacaaaaaggatgtttcttgagataggaatacaaataaacttttgcttgtttgtttgttttgttttaaatccagtgataagaatgaatgttttctgtatttgctttttttaaaaaaactctatattttatgtgcagacatttaacataaaatcttttcccaatgtctttcttagatgattaggtagttgaaagacgctactgtttacgaggcattgctaaaagcttttgggttccatgagggagagggccatgacctactcctttgtacatttccccactcctccgtttacatcacataaacatatatgtatggtcttccatgcagtcagccaaatcagacaaatcatgcctaggagttgaaagtgggaactgatttgtctagtttgaatattctgattagtgaactagctagcttagaattttgtggtatttgcatatgtcattcatttatgtactacagctacacctaaatcccagaaaaatcggtaacaaaataacctattattctagatttaaattttaaaatccacataagaatattaataacacaaattatttgtatgacaatgacttctatttttttcatttcaccctcagagatctatatacttcctctatccaaaaacaacacagaagcaaaatgttacagagacaccagaatgttgcccagaaaaccatgcattaattactcaagccaggaaattcccaattttgcaactctattttatcatttaagagagatctttccacatgtgtgttctaaaaaagaacagagaaataaccagtcctctgtaacttagcaaaaatacaaattggtgtttccactttgatttctctttttgaaataaattttcagcttgactttcttttgcctcgggtattctggattatcattttgtagcatctggataattttacattaacatctggagttgagggtctttttatttgtcggatgcatatagaatacttctgtaagaaatgtattttcccagctgctgtttattcattttaaagagacatggttaagtaagtctaacagcctccttaggaaattcaattcctaaattccttaggaaacacaaaccatgtttaatctgaagtcctgccagtctgttttctctcctaccagcttttcccatggcagaaatggttgagatctgtacagaaggaggactttagtctggtaacaggtggtgttgctgagtgcaagggcctttgaaatcaggcctggtttggaatcttggtccagcaatcaatagctgtgtaatcttaggtaactctttgaagtttagtttccgcatctaagaatgaggaagtataaatacatatctgcccacgttggttgtattaaatgagataatttacataacacatccgactaaggtgcagatgtaataaatgacagctgttattatcatttatttcagcacgttgcagaaagcaacttacaatttcttcttttcctgacctcctagggcttttatgcatgcaattagcaatttgggatttgcacaaggtttttccagagtacaagatttttgagagctgtgactgaatcttattctttagaaacttgctctttgagtggaggaaaaggaagaaactaagttgactaatgacattataaaagcaggtagagaatcatttctttctgagcttctgtagcacaggctatgaagtgtgctagtaaagtaaatacaattttaagcaaagtttcagaaatcaccataataaaataaagtctgtaagtcccagctattaaactggcagggacctacattcattaaattaaatgcaatgtgcaatgttgttcgaaagttgttcaaaatgtttttagaatttttcttggagttgattgcttttataatgatgacttcacgtcttgactctcagtgattttgtttgtctccttagccccaaaattattcaccttaaaagatgaaatttggtaatattaagacagtcaaaggaatgtcctgaagttctgatcacagctatgaatagttctaaaatcttctaaatatttttgggatatgtatagaaccaagatgatttgtgtgaagggtttttccattcacttagttgtattatattttaatataattgtttaaaaaagattcatgttatagtcacagattaaaaggcagtttttaaaggagatgaattaacagtttcagagaaacaattttaataacatgcattttatacatttatttattctgaaaacagtaattttcaatatactattttcttataaccactttaaagaaattaaggacttgcaggttgtctggttttttactatttttcttatccatagcaaggttggtgctcaataatactagatgagcaactgaatgaagagatgacaaaaataaatgaatttattaccactgcatgttaaagaagtgtacttttttatgcttgtctttgagaaaagtgtcaaggtggcatacatgacaaaacacaactttaaaatgacaacaaaaaattaaaatttcactgaacaaaataaaataaaagaaaaatgcatactagctgctcatctgggatgagttagttattgcaattcaacttgtaatttaatgcagaattttcagacaattagggccaaaaaagaaaatgttaaattagctagtgtctgacaaagaagaaagctttcaaactttcaagacgaacattttattagcaatgaattctcagagcaaatttaatgcagtccttatgtaaggatgtcagatagaaaaaagtaaaaggatttcaagcatcactagtgcaaaggacaatattacttgcttatttctgcagtgtaacaaagatgaagatattctcttaaattttttactcaatgatgattcatgtgtctctgagaaactaagataatatgatttaattctgtgcttttgggatagtctaacttaattcatgaaggagtacaggggatgggcgctttgtgtgtccactttgtttgtcactctcaaatgtcagatgtgcaggcaaattctcagagttaaattacttgacaggaacttaagcatccgtatttgttgccaggtagtcttctgtgtggttaaagtacagaatgtactcctacaaaagcagagaggcggcccgttgccacacaaaagtgttttttcagatggcttatggttagaaccaatatatttttctagcatacagtttgagtgataatagctcacattccccgatcacatgccttgtgccaagtaccattctaaatgccttgcatcttgtaactcattaaacctttacagtaacctcatgcaatgtacactcttgttgttcccattttgcaaataagaaaactgatgggcaatattaccttgcccaagtttatacagctggtaagtggcagagtcaggatttgaacccaggctgatggtatagtctgcgtgctcagccacaatcatgaacttaccctcaaactgcctgtgtttgcataatcatgtggatactacaggatagattctttagactcatcttatgtaggaggaatagtgacatgaaccatcataagaggagcattaactaaactttgcttgtcttacccatgaaagaacatcagtgtgactccctgccaaatatctgataatgaaaagaaatgcattgtgatcagcaagataaaatgaagaaaataaaaatgtacactgaaatagctgaacgaatgaattaacaacctattttatagcattgtgctggagaagaatgctcatcttacagaggtgattgtgtctaataaaaactgcactggatttgaagtaaaaaataaaaaacaaaaactggatctaatttccaattctatcactcgtagtctctgtaacctcctagtctctttcactgggatcttagatgtgccttcttagaagctaaattttcttatctgtgagttggtttacgattccttcttcctctatccactcactttattgtgatatcaaaataagatagcatatgtgcatatccttggagattttaaagctatctgaaaatgtgccatatttaaacatactgaacatagttaaaagacatgcatctgattaatgtaaaaactataccaatttattgtagtccacttggaaagacaagtagcttacttaaagatctattttgttgcatttaaagttggaaatgaacctgatataaatctcttcccaactactgtgatcctgtctttaatacaactttaatagactggaacatatgccaagagtatacagtcagaatctctctaagaatcaaagactgatgagaaacctctgaaagctgtgaaaagtgtgttattgtttttaattgcttccctaaagaatgagagaaggcaaagctgggaccctagtggtattgatgggctgttgctccttatccatgatgtgtaagagtgaggaactaagtctgaaaactttttaaggggaaaatagcagtatagcatactgaaagttttgttgtaatatttaaaaatgccaattaaaaaatagtgcaaaattgtataacgcaattatatgagaattgttttgggatcagcggtccaaagacaaagaaagtcccctcttctctccatgttcttttcactgctagcagcaattaacatttggcatatatcctcctagatttcattttttatgcataagtgaagacatatcaataaaatgtgttcttgttatattacatagttcttgttttaacacaagtggaattatcctctacatggtgtttatgatttgtttttgcacttatgaggttgtgtttaaaatgttgtacatttttttaattttagcattggtaaatttactttgtttttattttaacatagtattccactgaaatgtaattatactgcaaattatttatcatatctccactgacggtccttcaggttatttctaacttttcttgattataagcaatgttgtaatgactatcttgtacaagtatgtttatactcttccattaatacttatgtaaataaatctgataagggaaattgtaggctaaagcatatattatacattttattttattttttattaattaattaattaattatttatttatttttgagacggagtctcgatctgtcgcccaggctggactgcagtggctcgatcttggctcactgcaagctccgcctcccgggttcacgccattctcctgcctcagcctcctgagtagctggaactacaggcgcccgccaccacgcctggctaatttttttgtatttttagtacagacggggtttcaccgtgttagccaggatggtctcgatcttctgacctcgtgatctgcccacctcggcctcttaaagtgctgagattacaggcgtgagccactgctcccggcccacattttatttttgatatgcactggcacaaaattgtgtgaagaaccaattaataaatatgtctaaggaatatagtttccattgttttaattatcaaaaaattatcacttacatgggctctagttatacccatgatatgaccaatttaagaaacttgaaaatataatttctagcacgtgtatactaatgcgagatagagaagttttatttacaaccagaaattgttgggtccataaaagaaacaaatatgtctagaacattttaaagttgccagagcagatttcaagatattccagcctgagtccctcagatatgtattttggtgattgtaaaaatatcaaaagaaattatttgtgtccgaaagtcacaatatgcgtgagtcatcaacacaataagataaggctaaaattgagtttcagatattttgggatttctgaaaaaaatttataaaaatccataatgtaatcatttgtaaaattttaaagtttatcattacgaaaaggaaagtcaaaatcaaatgaaataaaacaagctttgttccatgggatagtgtcagtcataaagacttactagttaggtgctaattcattttgagcttacagggttttatcaggatcagactaagtaaaaatgtataattattttataaataaaaatgttttggggtttcagatttaaaaatcaagagtaagaagttttacaatatttactaaagattacgattagtataccacaaaacatctgaactttagatattatttatatgaccttaaaagtcagacctttccctgccaatgacttaacttctgtctttagtgctattttgtttgaaggcttatttatctgctatgaagtgatttttctacgactttctacatgtctcttcacattgggttaggaaatcttcaaggaaattaatatcctcgggtatacacaaccttttgctgtggtatttgctctgacatggaacaaaggcaaaagatacgggaaaatgtagaagtgggcattatagaagaatccaaatgtgtctaatgtcttcttcatactaattccttctagcctttatttaaaaaatagcttctgaattgcaaggatatttttaagccacatgaatcagtatgccccttcagctggacttttcaaggagcctgtgaatgctgaaatgattaacattatgtgaagctaaattgcactgaaccgtggaaccatgtggtgtggcaatagtgggtggggagacatattagtctagaggtccctgctgagcaaaagacaaagacctccttctccattgtcccgcactgatggtgggcttgggatgtattttcagaaataattatttgcagggaacttataaaaacaaatgaatcaccctcatcactgtgcttgttccgttttgggatgtttgtctactagactttctaaattgggagatttagaaattcagtaagaaagatatttaaaaaaattttttgaggtcctcagtgtcttctgcaagtacactttcaatttttattacagacagactctcttgatgctgttgtttaccattgcatttttatttaacttgaatattttaatttagcatgagtcattcccatggattagcaactttgtatgctagcatatctagttgtatcttctgtgtgttttcaatggtgtgtctgctactccaaagatcttcctgaattttacatattagaagtggcatagcctcatgacactttatatcaagcaggaagttctggaagatgatgctaacaaatacctcaaatctggaaattgtaggctttagaaaaataaagtcatcttgttagtgaatctctatattagactttctaataccttataaacaggttttcagaaattaattatatttatagcctcgagaaactagggaaaaagctggatctcaaagacattattacaaagcagtagtaaattataaacaatatattttgaattcataattaaaattaacgagtcaattttctgaggcattgacctattaaagatttatgagttacctaaaatcccaaatcttccctgaggtaatagcttcagttgagataaagggaaggtatcttatttgtcgcttcactgcaggaaaaaataaaatttgtgattatgactcattatcatgatgcctattgcaaaattacagctcactcttaaaattatgtgaaaaaagatcattaaatgttttagacatttcttaaaacttataagcaaaactttcaagttttttaaactgatttactggttgtatatgtagctaattgactatgaaaacttgaagcttaactctttgtagaccttccatcataccattgctttataaattattaccagaatattgaaggaaataaacttttttctaaccatatttatgcaatcaatatttattaggtagtttttgagaaaatcttatatgagaacttattccttgtataccaaatgtttcatggaacaccaccagcatagacatttttgtttactctgtgcaactggatttcgttctggggagcttcaatttgtacatgagctcattttcacaaaccatcttaccgatacttagagtccaaagtgaaattcaggaactatggcccagcaagctttcatgtgctattctttgcttcatgactttggaaatctatgggagaccctgtatcactagacagaatactgaaaagcaggattacatatgaagtttaccatctgatttttttcctaagggtttttacatgaacgtttattccttgtctttttgtgtggattcagcaatctccaggtttactgaacaggggttgtgaagggcagttgttcacaactgagctcattcccactgtgttgatatactccggttcccccacatagctccaccccgctaactcccaacctcatgcatagctccaccacactattgggcttgaatctaggctctgccactttctagctggttcctgagcaagttctttaacctctctgagcctgtttcctcatccacaaaaaggatgaagaacaaaaaggacgaggcaataccttcttaacactgataattaaataagataagcttaaattataaaatcagcacagagggaatgtaaattggttcaaccattatggaaggaaaaaagtaggaaggttcctcaaaaaattcaaaatgggactgcgaggccgggtgtggtggctcaagcctgtaatctcagcactttgggaggctgaggcaggcagagcattttgaggtcaggagttcgagagcagcctggccaacatggtgaaaccctgtctctactaaaaaacatccaaaaattagccaggcatagtggtgcacgtctgtaatcccagctacttgggaggctgaggcagaagaattgtgtgaaccgggcaggcagaggttgcagtgaactgagatggtgccactgcacttcagcctgagcgatagagtaagactctgtctcaaaaaaaaaaaaaaaggaactaccatatgatccagccttctcacacatatatatatgtgtgtgagatatatatatatatatattcaaagcaattgaaatcaggatctcaaagagatatctgcatttccgtattcattttagcattattcacaatagtcaagatatggaagcaacctaaatatctgttgacagatgaataaataaggaaaatgtggtatatacatacaataggatattacttagccttagaaaaagaaggaaatcctgccatttcaggcaatgtggacaacatgaaggacattatgttaagtgaagtaagccaggagtggaaggacaaatattacatgatatcatttatataaggaaactaaaatagtcaaaactcagaaacatgagagtagaatggtagttaccagggtctgggttggagggggaaacaggaaagtattagtgaaaggataaaaagttttatttatacaagatgaattaagtcctcgagatctactgtaccgcatagtgcctagacttaacattactgtatcgtatgcttgaaattttcctaacaaagtcaatcttacaaatgttcttatcacaaaataataataataaagagagtgagagaaaacttttggaggttattgatatatatgtggcagagacggtggtgatggtttcgctggtgcatacttatctccaaactcattaggttgtatacatcaaatacgtaaggctttttgtatgtcaatcaacctcaacatgttttttttaaagcagtatagaaatacctattttttaaaattattacaactgaaagccttctaacttgtggtgttttcttgaaataataatcgtatcttggttaatagttgagatctaaaagcttaggcctaaattcagatagaaagcttggcacatctgttgtaagttttgaaaccaggtgcacagaccatctttgttccagacgatcttctcagggatgtttgtaaagtgaacagccttggaaggtagagatgatgtccccctgggaagcaaagggtaggtttactcatagcttgggaagagagagatggtgtctccctccagatgaggggaatatatttaccacccataagaaaagatttgaacccattaagctgagggttcctcttctgtaacaccacccactgtgagtggaggcatcagctggcctgctttctatctctctgcaggaagtagagcccaggcaactggcaccaaatatgccaaagcttatgctgcttcctgggctgtgagtaataaagtcccttttccctcttttagaagtctcatatgttctgtcagcagccaccaagctgtgtcaggctaaattgctgtcttgcaagtagaataaaatcccagaccctttgcaatctttttcataaaaaaaattttaaataccatatatttaccgcatacagttcagaattatttattaatagtatattcacagagttgtgcaaccaccaccacaatccaattttagatcatttcaacaactcaaaaagaaaccttgtacacgttaagtgtcattcctgtacccactccctgaaaatctgcttgctctagctgtgttggattgatgtcagaacacaggagggaagggcaaatgcaagggagcaggtaagaggctttcacagcaactcgggacaaatgatagtggcttggagcagggtagcagcatgaaagtagtgagaagtggcggaatagaagatacattttcaaagtggaaccaatagtatttcctgaccaattggctctgccaagaggatgtgctgatcaattttccgtgaggtgtgagaatgagatggctgagggatgagtccatggttttggcatgagcaaagggaaggattgagttgctttgaaatgagttggggaagactgtgggcatagcaggttttgacagagaagaataggagttcagcattgcatatgttaactgaaaatgtctattagacattttggtgaagctgaatagatagtgtatagtattctggaattcagatgagaaatgctgcttaaagatacgaattagagaatttaaaatcatgagactgcataatatcacccaggaagtacaagaagacctagaaaagtaacagtctgagaactgagctctaaggaacatctacctttagaggtcagagagatgaagtagagcttgtaaaaccaaggagcaagcacacacagttttggacacagagatttcccataagagcattgcaaacgttacatattctctttgttggatgtgaaaataatcttttgggaaatgtgtgcttagaccttgatgtgatgcatagggacaaatttctaattctatttgcttcctaagaaaatgaaatgttactaaataaacagcgtcagggcaaggagtccaggtccataaagaaaaacttgcacagcatggtgaataaaattaataatggtgtattgcagattttaaaattgctaaaagagtaaatttcaaatgctctcatcataaaaaatattagtatttgagggaatgggtatgttactagcttaattgaattattccacattgcattcatatattataacatcactttgtaccccataaatttacataattagaaattgtcaatttacaataaaaaataaaaagccatcaaaaaacgccaggcaaaaatatgtgatatacttatacccatatttaaacctacaccataaattatatttaaatttataattctgcctgctgctgttttcagtaattaatatcattaagaaagcacaggttaaatcaaatttcaacacagtatcatttcagtataaaatctcatattttgaataaaacaaacatatctttacacattattaaatgaactacgctgacaaattttgtttctttttttgagaaccagaaaaacaattatacttagatgggccatctaaaatgtccttccagcttgtggagtaggttgtgtttgtttttcaatgaacatctgtttgacaaattgaaatgctaattatgatttatcatttccatgacatcaaatatccagatagtaataaacgttgatgactaactatatttttcagtttcagccagatgtttggcatcacgtaagataccaccttagttttacataaaaataaaatgtttcttgagtctggcttatcataatggggaggaaactaatatgaatgaagcagaatggttcattttttttctcaatgtgtacaattctactggtaagacttttacaatatcataaataaaattgtactttaaaataagtgtctttcaaacttttacaaatacaaagaaagccagaatcaaaacccaattttgaatatcaagtgttaaatatgaatatcagaaactgaatatatcatcaatacaaattttaaaaaaaataagtttgtaaattcagagtttatccctcagatgttatttcaagcatatatcatagtgacatatccttgaatatatatttaagatccgatagggactgggcacagttgctcacaccagcattttgggaggctgaggcagatggattgcttgagctcaggagtttgagaccagaatgggcaacatggtgaaacgccaccagaaaaaatgcaaaattagcaaagtgcggtggtgtgcacctgtagtcccagcgacttcggaggttgagctgggaggattgcttgagcctggtaggcagaggttgcagtaagctgagactgtgctactgcacttcagcctggatgacacaggcagaccctgtctcaaaagaaaaaaagaaaaatctgatatgataatttagaatatgggtcctcagggccataaaacagcatatgctagtttgttggcttttactcaccatgctgtgcactaaaagtaaaaaaatataaagtaaagcccattcttttaactgagattttgtgccctttgacataatctctccattcccacagccctcagcctctgtaacttctatttcactcactccttctaagaatttgattgttttacatttcacatgcaagggagaacatgtaatctttccaaatgacagaattttcttttttaaagctaaatagtatttcatcgtgtatgtgtacgacgttttctttatccattcatctgttgatggacaggttgatttcaaaatgtggctaatgtgaagtgctgcagtgaacatgggagtgcagatatcttttcggcaaaactgatttcacatcttttgggtaaatacctggaagtgagattgctagatcgcatcgtgattctacttttagttgttttggaaaactccatgtagttttccataatggctgtactaatttacattcccaccaacagtgtacaaggattctgttttttccatattctcgccaacatttgttatcttctttttgatattacctattctgacaggtgtgagatgatatctcattgtaattttaatttgcatttccctaatgattagtgattttttcatttatctcttggccatttgttagtcttcttttgagcaatgtctattcagcttccttgctcatttttaatttttttttcttcctcttaagttgatggaactctttatatatttgtggatattaactttttattgaatatatggcttacaaatattttctccacattcatagtttgtctcttcacattgttgcttcctttgttgtgcagaagctttttagtttgatatgacccaatttgtttgtttttacttttgtggcctatactttgggggtcaaattcaaaacattattacccagatcaatgtcatatactttctcccctgtgttttcttctagcaatttggagttgctggccttatacttaaggctttaattcatttcgaattgagttttgtatatgatgtgaaataaggggccaattttattcttctgcatgtggatacctagtttccccaacaccattcattgaacagactatccttttctcattgtgtattcttagcatctttgtcaaaaataaattggttgtacatgcataagttgatttctgggctattatgctgcattgacctatatttcttttttgccagtaccatgctattttaattaatactacaatagctttgtagtattgtttgaagtcaagtagtgtgatatctttatttttgttttgtttgctcatgatgattttgactgttcttggtttgttgtggttccgtgcgattttaaaattgttttttctatatctgaaaaatgacatcaaaatcttgatagtggttgcactgaaatctgtagattgctttgggtattatgaacattttaacaatattaaattcttccaatccatgaacacaggatatctttccatttattcatgccttcttcaatttctttcatcaacattttacagtttgcagtgtatgcagatcttttcaactccttggttaaatttattcctaagcatttaatcttttttatagctattgtaaatgggattttttaactccaagtatatttcatagatggcattgatacagtaaaatcctttattctgtaaatggcatttatatagtaaaatcttttccatggtgaatgattattagtcttaagtgaaatacaaagatttgattttataagtgaaatatttcttaagtaaactatccttggctgccagtttctttcttaaaagtttaatatttcccagcaacttcctgtggttgactcttaaggatactgaagctgaaaggagcccagcaattctgggtgatggaggaaatacgtggccaggctctgctgtccgtatcttcctcaattttcaacttgaattttatacttctactctgacctttaatttttgtgatctaatttccttttccccaataatatttgtttttgaactagtcttcctcatgccatttaaagaaaaatttcaggaataaggaaaaacacaggagtattaaaatggagaaacatcaatattgttataaacagagcaccccaaaataattattttgaaagagatgcactcatttgaatttataaactctggaatgcttattttaaaattaactaatgtgttaacctacatacaaatttgtatttttacttgaaggaaaagcagcattgctggtagtgcacatgtgcttctgtacatacagattgtacacattgaggatgatgtttatgccataagagaatcatttcctctctttttatcagggccattacatcatttctcaaatagaccactgttaggaagtagggatatataagtataagggaggagactcaagtaaaaccagagtggtgcatatcctacaaattgagaataaggcatattttatcttttaaaataacatattttggccgggcgcggtggctcacgcctgtaatcccagcactttgggaggccgaggcgggcggatcacgaggtcaggagatcgagaccatcccggctaaaacggtgaaaccccgtctctactaaaaatacaaaaaattagccaggcgtagtggcgggcgcctgtagtcccagctacttgggaggctgaggcaggagaatggcgtgaacccgggaggcggagcttgcagtgagccgagatcccgccactgcactccagcctgggcgacagagcgagattccgtctcaaaaaaaaaaaaaaaaaaaataacatattttagagactcagtaaaataattttaaaggggcagaagtacagatgtagctgttaggaggaagcattatttcagctacagcacattattggaggataggaagagcatatggtattccagtgaaagagcttaattataatagagcagaaaggattagaaacagaaaagaaggtggattatcaggaataaagtcaaagaagggactgaatattgatcagattttcagaaaaacctgcaaacaaaccccaccacatactagcactagtcataggactgagatttgtcaaagctagctctcttctggtgcactctggttcactgtgaatataagtgggccatagagtgtgaccattgtggtctctggccctaggccatggagtgagataattgagacaagagaagtctgtatatcatctctccacataagcaatagagctgattgggctgcctgtaaacaagattttagagactcacttttctttttcttaaaagactgccacacttagccatctgatatggaatggcatctcctcttaatgagcctgtgtctttatttgcaccttatcaaactgggagatactgaagatggcagtgatgctgatagtggtgagacatggaagatgtagaggaaacctacaaagaagcctgagataggagagaaagggtaatttttagaagtagattgggagaactgcattctgggcaataaatattcactggacttacagcgtattcctttttttaaggaaccaagttcacagttgttagaactacaagagcacaacattacataatcatgacatcaaataagcataaaaataatgcttatttttaatttttacaggtgccattttataaactatctctataaagagattaatgttagcttcttgttttggaaataagataatgggagggaaggataaatgaaacagttttgttgccatctctcattgtgagccagtttagaaatgaaaacaaacaaacaaaacaactcttaagcccaacagcaacattcattataattttcctaattacactcccttttctttttgctaagaaagaacggttgtatttttgtccttaatagaaaagggaacagtgcctaaacaacctattataaattcttctgggaaagcatattacaaataattgaaaacaaccctgattctgtgaacttggcagcaaatgtataaaagaaagcaattcagccctggcccctggatgattgattaaatgttttattctttttacctttcattcatgctgtgtttgtcaagaggaaagagaaaaggaatgttgtgaaatgaagtccactttagacaaataacttacaataatgatcagtgacttctcatcagctgtttattcatttttcttgagttgtaatatttcttaatattagctatcctgcatggacccgacagaaaataaggtcctgagttttagcttgtccccaactccctgccagctaaccatcaacacaagctgtatctgagcttctttgagggcatggccctgcagctccctgtggtcagttattagtctgagtccagcaaaggaacaagaacactgtgtgcttgctaaatctacagaaaacttcatcttctggttgtgtgggaggagaggtccctttgtgtactctgtttctttgaaggaactagggatctgttggtgctgtacagatgtcgaggtgcacagagccaacatcctacaaaactagtaaatagatgattaggatccaactctgtacagaataatggtaggaacctaaaccttggggtactgtttacttgtatcaaaattgttgttgtcctataagccatgtaaaattaactacaaatctcctcaatgaaacactttcttagaactttgatatttttaaatgatatctcaccatctgtgtacatcacaatgttgagctacaaatgtggtggctctaacaaaattttaagtatgaagtcagatgtatagaggatcccttctccatcacgttcttctgtttttcatttcccgcttctcacaaactactccccagatgtcaataattctacaatctcctcttcctacaaccttcgtgttggtccttagtcgtctactctgatctcaaccgcaaaagtcaggggatgagactataggccatccccagagcaacagcctcagcacctcagcacagatctggaggggatttgagctagaaagaactctgaccttactcttttttttttttttttgagacagagtctcgctctgtcacccaggctggagtgcagtggcacaatctcggctcactgcaagctccacctcccgggttcatgccattctcccacctcagcctcctgagtagctaggactacaggcgcccgccaccacgcctggctaattttttgtatttttagtagagacggggtttcactgtgttagccaggatggtctcgatctcctgacctcgtgatcggcccgcctcggcctcccaaagtgctgggattacaggcgtgagccaccgcaccagcctctgaccttactcttaattgcttgcatgaaaattggatatggataagaatgcaaacccaagaacatgtcctgctttccttgatgcacattctcctattgatgttcagtgaccttagcatttccagaagcacctctttattgtggatggaaacttacttattcatgttgtctcaggctgtccaggttggtaacaggtaactgctataaagggtggagcacatcctgctaaatggagagatccagtgtcatttacattttttttaactctttcaagggtaatggcaactaacaatagtttctcctgtgtgctagatattgttctaatcattttacataaattatttcttttaatccaccaaacagcactataagatagatattatttttatttacctttgttagagaaaactgaggtatagagagattaagtaaattgtctaaattcacacagatagtaagtggaggagccagaatttgaacacaagcaatttgtctccaacaaatttgatcttaaactatggttaactctctgaacacacacacaaacacacatacgtacatgcaatcacacaaagtatcaggcacatggggatagacaatattagaaaagcatatacatacaaacatccttacagttgtacacatagactcaggtttataaacccactgaagtgaagactcatcatttatgaaaatatacaattttgttctgcaaaataatttaattttttaaaattccttgtgcaatgagaaaagatcagagaggcctacagtttccttttacagagctaggccaggggctgtatttagagtaattgaacacatgattttacttgaatgcggagaaacttgaccaactgtgaatatgcaatttcactctacagatgaaataaaattaaacggggcaaaagtaaagaagaatggagactaggtaaagtgatggaaagagacaccaaaaaattagtcatgtgaaagcaaaactaagaggagagggaaaggtggcaaaagaagggaacattcagagaatgttgatatattgagaggtgagaatagggagttggtaggcaagtgtcagagtgtgggaggatggtgacagtcactaggaactccagtttgcatacacacaatgttaagaacattagaaattagctagccaatggaatgctcagtcttgaagagcttgtgtctctgcttaaactcctgtatgcattagtatgattccataaatttaaagtctctgacatcttgagttttaagctttctgaacattaaatcagtggaggctgctagtagctatcctgaaatgctgcttctatacatatgagtaaaaatccaaattaatgtatttatacagcttttcatttgtgtactcgtaaaatacacacacacacagagacaattcaacacacacacacacacgcgcacacacaattcaacttttctctgaagaacctttgagtcagagaatgagaatgaaggagactgaatttctcttttaagttcctgtctaggttttgttccaatctaatgacacaggatctggcactgtatttagacctcctgctccaagattttatttttattttaaacaagtgttcccacacggggactgaaaacaaaacaggaaaatgttgcttaagttttcctttgagctgctgttatctgactttcaagtgtactgattgttccgtctcaccaatgtaggtcattgtactctcagttactttgttttctatcggaactttctctagcagctctccacattaagggagatcatgttatttcacatatttatttttgttattaacatattttcttcatctccctataatttgaggttttagcactttcttctttgtagaatttaccataaagcatacgtatttttgaaaactagggaatagcttttacttactaaagtacttaagtactaaacctatcataaccaatttcatttattaagatgttagtaagactttaggagttgttggttcttttccggagaataatgctttagcccagcagtccccaacctttttggtaccagggattggttttgtggaagacagtttttccatggaattgacaggggggatggggagtggggatgggtttccagatgaaactgttttacctcatatcatcaagcattagttagagtctcataaggagcctgcaagctaggtccctcacatgcacagtttacaatagggcttgtgctcctttgagaacctaatgccacagctgctgatctgacaggaggtggagctcagacacctccttctgtgcagcctggttcctaacaggccacagatagtactggtccatggcccagcagttggggacccctgctttagccctcaactcttaggcatgtttcagttctgattttggtcagcatagagctttccttctatttaccaggagggtctctactgatatggatcaatggcaggaggtgatattgggtctggaactatcctttggcttagtgacatttgtactctaatctgcctcactcctgccccttctcaggggacctgggcaccgtcggatcccatgacaggtcctacatggtgacctagggcacggtaaaaagtctaccccaggaagcctagaatggatagaatacaaattcatccaacacaaattcatgaagaaaagccaagatctgcagaaaatcaaacagtaaagactattccagaagagcaacaggaggacgataaagaggagatggagttaaaatactgggtctgtcatagacaggattggaatggaatcccaaatcagatgatagaatgaagggaaggtacatggaatagactctcactagtggtgagctttcggtcactacaagtcttcaaaaggggcctagatgaccagttctttttcatccaacaaatgcttattgaacccttcctctgtgggtagtgatgggcacattcagtgaattcagactggaatcgaacacattgtaaccattaaatgagttaatcttatatgagttcatacatacagatcacatgcaagagtgtctcatatccagtaagtttgcaagaataactactattgtttttgtgtacaagatcttgtgtattgtaatttctgaaatagcaatgaggttggaatacatgactaatgattttatcctcttatgatatctctggttggggcacacccaaaacaaaatttggagcaatgcaaatgttcgaggagagtgagagaacttccttctggtgtttttctctaatgacttgctctgaagctactcctcttagattctttcctagctgtgtattcctatatagtcttagcttaacagcacaaagatttaacagtggtgtctgcatttgataaaatgtaaatgagaagctcccaaaagagattgagaagctctattttgacaactcttcttttatctgtgtaattattatatactttaactgaagaaagaaaaacacaaagataaatacaatatttcaacttcgagtactttttaaaaattatttgaaagcatttaaaaatagatgtaaaatgaactcctgtatgtcaaattcctttcagagaaaaaaaaaagtgagagggaagggggaaatttgcatttagtaattttttttgtttttttgaaaatttcaggcacttagtaatcactgttccttttgtacgtcatgcccaatgggaacgataccaggatctttcactcaattctgtggattacaggtcacccacctgggcatgtttcagatgaaactaacctaagctcatcttgagtaaggggcttagaagtaaatgctttgttggttgctttgagttgtacaaagcaggacgaccaccagaggctttctaagaaaaagaatcatagagactttgataaaattggaactcctaaagcagctaaggctttgcttctatttttgatcatttttaaaaagttagttcttctggtgtttggtagttccatagtagttagaaagcactgccacatgaaatctgctattggtagaaaaagaaaatgttacagccaactctgatacaacatgagagagagacagagagagagagagaagggagagaagagacatgttcttctttgaccagcaggaaaaaaaaaaaagctgcacaaaccttttaactagtttcactagcagaaaagaaaaataaaaatataaaatagcaaataatctttaaagaaaactgattttcttattatgctgaaatttattaaagactgttgtgttgactgaagaatatgtttaaatattttgtggaaggcaaagctttcattcaggaatgacaagtgcaaggactgtaattctaaagaaattaaagaaaagaagaatggcaatttaagttcagggacaattggaatcaagcagtaatgatttacagctttttaaaattttcaggcacttagtggtcagtgttccttttatgcgttatgaccagtgggaaggataccaggatcttccattcagttattatgggttacaggtcacccatccgtgacctgtggtcacagtgttaggtatcgaaagcataataccttcttatctaagaaggaaagacctgttaagtctaagcttaggggtagagttgtcaacgatacagtcatatttgttgaacagttcaagttgccatttcttgtattcttggaagaggtaagttaaagaaggttgtgcacagttcttgacattttattattacagcactacctttcaagccactcagtagtcatcggacatgtaagagtggttgttctatttggtcgtgtaaatttctagtgacagtaggaaaaaaaaaaaagacctttattaaagaccttccaaactaattcagtgccctacatgctgcatgaaaatgaggactttccagttctgagtagaaggaatattaaggcacctgaagggacaaatccatttataaaattatttttctttttgtgataaaaatataaatggctctgctagtatactaaaaaatataaatggctctactagtatatttaataatccttcattgatttacctaaacgtatgaagatacccatataatatttttaaaaataagttattgtagctctaaaataatttattagactagaataaataaatttatactagaatttatgatgaacagtcaataaatggaattaaaaatataggtaaaatacagttaaaatatatacaaattttaagtgatacatgcaatgcacaaattgtaaatgtttgattgaggaaagagctaattcattggaagctctagtccagtctatagtatttggggactgctattgatatgttcattcaacaaataattactgataatatagtatgtactgaaatcattatgctaaacactgagggtttacaataaataagaaaatgtataacctcattgaacttaaatctagtagcagacacaagcaagtaaattggcaataaaaatagggggagtcaagggagtttggataaattatagaagaagctcctagacagtccatggaggtatttgtgggaggatggaattggcaacacagctgagattttaaagatatataaagtacatctgtgtaaatggcaagcagtgagaacacagaaaaggtgtttgaggaaagggcctaaagataagatagaccatgacacagaaaggaaagtaaaaatgattcagtgaccatctagtagatatccaatacatatatttgagtgaatgagtgatagactgactatatgaatgggaaatattgaaatataaagaggaaggccagagataaagctctgaaaggtaagcatatattttaagacttcagagtacctaattttctgaatatgcaaatgagcagtattagaattaataaaaataaccctaaaaatgagaactcttggttggagaaaataacaaaatatgaagtaaaggaaaattgacagaatacttcaaaaactgtgcctgatataattggaaataatgcctggaaacagattgagtccataatcctgtatgtgttcattaaggccaggaagattcttggtaaggaaatgtctagtctgaaaggtctaaagattttattaatctgtataataaattatatcttatgaaactcttgtcatttatccagtatatttgaattacccgtgcattactgtttcatatattcatggtactttcatattttataacatttaaaaatatttcaatattccattgatttgaataagattctttaaattacagtgaaagctttctgataaggtatggtaagattatttttcagtaattatgctgatacatataataaagctactgacaattcataaagatgataatacacttagtacaaactgagcttcaatgggattactaaatgagtatgtgaggacagagcagaggaaaaggccaagggttgagcactgtggtgctctattatgagaaagttaggaaggattaaagttggcactgaaggggattgagaaggagtagctgaagcggtagaaggaaaacaagaacagtgtgtcctggaagtcagtggagtaatcacttgtctcaaatgctgctaataggtcaaatatggtgagaactgagaactggacatttcatttagtaatgtgaaggacgttggtgactttcccaagagcagtttcagtggaatggaggaagaccaatggaataataggagcattgtggaggaataaaccaaaatgtacctatttaccatccagagccagactcagagcctttactctgtgctagaaacacaatgaccaattgttgcattgttccctttccttgagctttctacagctcacctcgcttcttcaaacatgtacaatcagacctctgaatctgtggattccacatccatggattcaactgactgcagaagaaaaatgttagaaaaaaatctgcatctgtaccgaacatgtgcagacttttttcttgtcattattccctaaataatatggtataacaactatttacatagcctttacattgtattgggtatttaaagtaatgtagatgtgatttaaataattttgaaatatgtgtataggttatatgcacatactatgccatttcatttcaaggacttgagcatcctcagattttgatatccacaggaggtcctggaaccaatccccacaaatcccctgaaactataactgatgaggggtgatggtacttctttttttacacagtcaaaataaaagagattaggcttgtttttgttatttctccccaaataatgccatattgagcatgactggatttaagaggtccccagatgtctcagccactcatttacataaaaattctttgtccatatctgtacatccttaatctcaagctacacatatggatttactgttctgtctcctggtgtcagcttactttcaatttgttttacctgtttcattggcacacttgtagagattgataatacaaaaatgttttaggagagagcataccacacatcaagttgtcaacttcatccacttctgctacttatttcaaagtttctgatacttattcatgatctttcagtagccttcattctcccatccatccattcactcaagaaacttgtattgttagggaatgtattagaattatagctcttcaagctttccaaaacaaatgtagcaacataaatagacaagcataataatggaaaatcgtctatacgagaaatctaattattttaggcacaaatcattttttaaaatgtattctaaaataaaaatgccattgaggcacagaggtcttactaatctgtaaagcaaacatgatttatatagtatgcttacattagtaaatcaggattatttgggtgaacagagtataatattgatatagttatttggttataaaaagagatgtttctgataaggtttccccccctttatttgccttggaaaacaaatttcaaagaagagtgtcattttaaactctaaaaaaccagttgataaccatagtctgatatttgcagttggaatgaattcctgtgacagcatgaacatacacccaccaacatgtctgtaatagaaaccactttggaagacactagaggctgccacagatttctcaggtcctcacagcaagacagtggtggtcttggggatggatacatttcatcttccttgaagacagataccaccctctggctgtcaccccataggaaatcaggaagtatgctaagctatccagtggacttggaattacactgtgctgtgctagtggaaatatcctatccaacattatgatttattttgaaggagaaaggaaaaaaaaatacacacaaaacggtggaaggaagctgcacacaacatcgccaaacagctggcttgttttatatcccagaaacagcttgggactaactatattcacaagatctcttggcagagtagcttgatgaaaataccaaagctgtgagaagtgttcttttgctgaatccttcatgtagctatcacacggtttattaacctaaatgagaatatgtacaccttttttccaaaaaggtcctttgtatgtttaagtgagaaacttactgattcttcatacggcacaaacatgattcaccacagcattcacaccaaataaactctaataatgttcagaaactataatcctagacatgtagcgatttcctcctttctttcaagtagtatttttggggacagtcaagagagaatttgatagaaatgtaagcctgagttcaatggcactggtgacttttttaggtgccaaggttaatctcagagggaaattagttttaatggcttcatccatatatttatccattcttttaacatttaactctaacctccttaagccaaaaatataactcaattctaaacacatttctggctcacctgctaggtgccagaaatgcggatcttgaggaatatacaagatctgcttcactcttttagaatccctgcattagagaggattcagtattttcagattcatattttagaagacattgcattctattccttactaagcatcccaggtagattcaattaggtggaacatattcatatttttatcatgaggcattttgagtctattctttgtgacaccagaattagtttctcatctcagagtttgctgtatttctctggtgactcaagtagtttattggcagtcagtttgtaaaaggctccctgggattatctaaatgcaggacgttaggaatggaaatatgtatcattgcctctcctgtcaaaaaatgtaattaacacacatgatatatcatcttacaaagtggatgaaaattccagtgggtgaccttgagtcacagctcctcagtgcacacactgtcctgtacccaagcatctcccagatagcacagaactcccacttcctgcatccctgtacctttagcactgtgtgcatgtttgtgtgtgtatgtgtgtgtgagtgtgagtgtgtatgtgtattttcagttcaaaatctaccactcaatttcactttctttaacaattttggtttggttcaatttgttgcataggtaataataatccatttacagaatacaaaaatagtgtaagtatgtgcttcttcctatctgtatgttgagagattcctcattcttttttatggttgcagataattcattatgcagatatacaatttatttaaccagtcccatattgatggatattaggttatttccagtcctttgatgtgaccaaaaaagattataataaaaaatgctgaaagaataatattgtctttgtcagtttgggcggccataagaaagttccatagactaggtgggttgtaaacaagagaaatttatttccccacagtactggaggctgaaaatctgagatcagggtgtccgcatggttatgctttggtgaggactgtttcggggcttgcagactgctgacttcttgtagcctcacatggttgaaagagagctagctagctctctggcctctttttattaggtcactaatctcattcaggagggctccaccctcaggatctaattacctaccaaacgccttgcccccaaatatcatcacatttgggattagggtttcaacatatgaattttagtaggggggaggcaaacattcagtccattagccatattcagttcacctgtaatatagtatctgtattattttatgtctgtagaataattcctagaagtggaattgctagctcagaattactgtgtgtttctaattttgatagttactgctcaattgactttcttgaaatttgtatcattttacagttatacctgtaaatgtaagaggtatgtatctactctcttagtctaaccatcagagagtattaccaatatttgtggggtttgccaacctgaaaaaatgggaagtttatcagtgtgtttttaattaacatttatcctattatgagggaggatcagtatcttataaacttttaacagtcattttaattttcttttctttgaatagggccctcatatatttgtgcattttgttatggtgttggtgcatttctttattgatttacaagagttctttgagtattaggaacatccttcctttatccgtgccaacagtaccttttattttgtcacacagtttattcttcatcagaattctttgctcttgagaagtccctgtgagagcctgccagccttctacacctttggagggcagtttgttggcaatttctcaatttttctttcacatagaaaatgatctgactgaattttatttctcttgatgtcaactgtgctgaattattgtcttaaaaaattcaccattccattcaggtttaacatattttttagagtgtgattttcatagggtatgttacattcttgatgaatttttatcttcttgacctattaattactaaaaaaaaaaatacagataacgacaacctaaaacaacctattgaaatatctcactgtgatgatagatttgtctagttttccttgtaatttttgttctccatattttaaggctatataatgtgatgttttcaagtacagaattattttaagttcctaatgggttccttttttaatctgatattttataactttttccccaagttttctggtttcccaccataccccagattcttaagtaatttagggcacaataattttcagagaaagaatgattaagaatttatggaaatcttaggaaggtcgaattgacgcagtgccttggaagagagaaatataggtagttgaagtataaggagaaatgcctatgatataaacaaacaaattgcatgtacatgtattaagaagactataacatatatcagttacttcactagatgccagtgcataggcatgtacctgaatctgcgtaactaattgggagaatgggaagttaactttatttttccaagaaaaagaaacaaaatcaatatttaaattttggaaaacataattgttaaattatttttcatattgtgtagattcacatctctttaatcaatgggagaccaagtgccgatgatccttctccagaactgctagaatttacctccgctcgctatattcgcctgagatttcagaggatccgcacactgaatgctgacttgatgatgtttgctcacaaagacccaagagaaattgaccccattgtcaccagaagagtaagttatgatgaatcatattagagcctacaaatgatatcccacttatctttttgtctgttaaatactttaaaaatgttttcagtgatttgtaggagtggttattatcaaatttttattttagaattgtagattattattattattattatttgaaatttgacagactttcctttgttcagatccaagctgtgccgcttattacatgtgtaacatttatcaaacattttagccttctcaaactttaatttcttcttttgtaaaatgagaatcacaatgtctacttaataatcttatttttcagaataaaattagcctttgtcaccttaggggatctatactactattataattggctttggcgagttactactggaagtgcaggggctttgaaacatttttttgccaccactgagccagtatacacacatgcacacatacagagagcagtatgtcttaaaccttaatgtgtatgggattagccagtgatcttgtggaaatataggttatgattcagtagggcagagctgagacgctgcacttcaaaaactttccaggtgatgctgatgttgccggtttgtgggccatcaaataatttggttttatgcttgattaatgaatcacaagccatagttttaaaaatgcagtgctataggagaaaactgattctacatactgttttattttcctttacaaataaaatattaggggaaaaagtttaaagcatcttttcaaaagctttttgaacacaagagctaacagaagtgctgtcttccagtgttaaacaggaatttgtgggattacaagatagatgatcaacccagattgctatgagtgataaccgtgcttcctcctgtctaccttctaccatattcactggtttatggcacctcccacatatgctgctacacaaccaaggcattattaccagggaagtcaattcagccataactctataaagtaaactcctgtgaatagagtatctactgtatgactagaggtatagctaagaaaaaagactatagggagaaattaatattgtaggacaaagcatttaattctagaatgatcccactaaggtaagaccaccgtcatcggttgcaaaattgctgaatcactagggttaatagttacagatcctaaatactcctcacatgttttctttcctcgttacttaacttcccacacccaacctctccatcatcacaagataacttttaaggctttagttagtcccatgcaacatatgtcagatgttttagtgccctgtattttccaaacttgaaataatttccccttgtattatacctcaacatattgtaaattgtctcatgcaaaactaatcattattttatagcaatgtttggatttttcacttgtttaagaaaacattttcaattctaattttggcgggacttaaaaatatacaccaaggaagactggtgtgaaattggagtgaaatttaatctttcttgacagtatgtctatcagagaaaaaaaatcaatgaaaataaattagtgttctttctatcatctcttgcaggaggtagagtgggggttggggtacacatctattatttataactttatcgtacatgagtctttaaaataatgcagtataagtcaacatataaatatgttttttgaaagtactcaagttcaataaacactcatttaaatatataaaaataagatagcaaatttcagctcttcttcatgactcaaaagcaaagcattatacatttatatttaaaatagatttcccagttttaaaagcatttacaaatactactgtatcagctttttaagcaaatatctctatttgtgtctatattattaagtgatgaggttaaatggaaaaaatatttttatactatccaaactccctagccagttccattagttcaaggtctaggtatatcaaataagataacataacaaaaatattttcaaagacactatatgtatgtaacaaaaacaaatagaaggaaaaagaaacaaagaagtaaattggaaaaaggggattcttagtcaaggaactcagatatgtgtccacctacatattctagctaaatctgttttttttgtgtgtgtgtataattggaataatagaactatctaacgctaagatgattatttgaatatgataatgtaaagtgctctgacaattataaaatgttatatacacattaattaaaattttaaaaatagtctagcctccataattatccttaaaaaatagctgggtagattaaaataattagtaacatagctctatgttaacttcatatacaaaggtaattgtatggactatattacatagtaatataaaaatgcaaatgttctgcacaataaacttacagttaatgactttttaattttcttcttaatatggttaaggaatatattgttatgagcacaatttctacccagattttgttggttcttttcaaatccatcaagtaaaacagtgtgcgtatgatttgtgaatactgcagttgctataatcacaataaaagagggtttcttgcaagaaactatgtaaaacaacttttatgaagaatagctgtccttagccccagataaaaactactgtcagccacaggtactctagcatggacttggtgctgactgggaaaaagatatttctaaaatgcccaactagcttaaattaaaggccactcttcctttgggctaagatcacagtgctaagagttactttgtcagttttgtgagtcctcacttgtcctcaagaaacacaaatgtccttcaaactaaggataaaagcagaaaataaagtttttactgaatgtccccttttgttactttgaccttgcagtcatcttaacaggatttctctctggattgctttttgcagtattactactcggtcaaggatatttcagttggagggatgtgcatctgctatggtcatgccagggcttgtccacttgatccagcgacaaatgtatgtatatttataggatgcttaggcaaaatgaagccctgagctgtaaaatgtttcatgacagtctttgctgacagagaacgctgtaaatgggagtcaggtccccacttagacagtgtaacagaaatccatgccagggtgaaataagagctggcagttaggatgatagactttgaaatcagccatcacagtataagaaaacagattagtttttcctttttttttttttttttcaaaaaggctccaaactggtctattttgaaatctctctagctatgacagcctgcctcatgatatagctttagagaacgcctgccatcaatcaacctgaccatttcttttaaagtttctaatcaaaaaattaatgcaaatgagtaaaaaaatgtgcagggaagtaaatatataagtgacaatggaacaggaggataaaatagggcaggggcaataagggggtggagggggtggagtgggtgagagagtcaagagagtactgatagtggcaagccggaaaatgccagaatgctttttgatagaattttttcattaatgacaatgaattaagtgaacataacctaaaggagaagatgaatgagcatctatttttcctgtcatagacaaactggtgaaattcaaactcatctcctgtatagtatatggaaaaatacattgaatagtaagatcagtgaatgtaaatcgggccacagattttttttctcaaatattgtaatgcaaatgacattatactcaaagctagttttctgatgattggattataatgttatctcctaggaagattaaagtacactaacatatttttatgggcaaagctgcagtgctgctttctgcctggtatgggtgctttcttcttttttttgttttccattttttaaaattttactttaaatcctggatactcgtgcacaacatgcaggtttgttacataggtaaatgtgtgtcatggtcatttgctgcccctatcaacccatcacctaggcataattttccacaggctttacagagtccctttgtctcactggctttctgcattttaaaaatccctttactgttattttatttggaggaagtgaaaaaatgcatatgccaccatagaatactacgctgccataaaaaggaatgagatcatgtcctttgcagggacatggatgaagctggaaaccatggtcctcaggaaactaacacaggaacagaaaaccaaacactatatgttctcactcataaatgagagctaaacaatgagaacacatggactcaaggaggggaacaacacacaccagggcctatcagatggagggaggcaaagggagggagaacatcaggacagacagctaatgcatgcagggtgctttctatcaggtgtacagatgatcagtgtttcccaggctttaaaagtccacaagacaggcttggaaggccaattccaggtggtaaattgagactgtattcagagcatgcacagacaggagatttagtcctagagacattagatttctggtttacctgcacccctagaggcctaggaatcaactccctccttcttgccatatccaaaaatattaacaacattttgaggggagccttaaaacaagctaatcgacccccaaaaaacacatagatcccaggcatcagagaaggagaattcagtcttcaagaccactcccagctgggccttcctgctttcttctgagcctaaacccagtgattaaagaaccagcctggacttccttaaggtgatgttgatcaaatatacccacttcaagcctggcaccactttcttcccaggctggctagttttacattttagtacacagtccagatgttttctcttttcttcatagtacctttagagagaggcttcctttatggttctaaatgaggctaaaatttgtgcttcctccctctttttgactagaaatctcgctgtgagtgtgagcataacacatgtggcgatagctgtgatcagtgctgtccaggattccatcagaaaccctggagagctggaacttttctaactaaaactgaatgtgaaggtatgttctttagaagccaacaaaatatgtcattcttcctttccaagaaaaaaagccagtaatgaaaaatagtgaaatggctggttatgcaaatgtgtcaacaaatactcatttatattatcacttcgaagacaacccatatgtctagcttttcctaaagggaaatatctaagaaatgtagcagatgactttatagcctaatagtgacaactggtctttttaggtgacaggtatcatggagaaacctgtgtttctggagattttctcaacccaagaaaagacctaaaaatagtcttgggctgaactgcaaacctaaactagtatgaagtccaattcaactgaatgcaaatattaatattacagtaaatcagccctaaccacatttttttcagctcactaagtatatatggccttcaaaaacagcttgatagacattttaaattaataccaacactatatatcctttgaataacaaattaactcaactcacatttatcatgtacaatgtgtcagacatgacaggtctttaaaactattgaatcataacacaccttaatcacaaaatgttccccacctataagatataaagtcggccttccatatccatggtttctccatccatgggtctaaccaactgcagatcaaaaatgtttgaaaaaaagttgcatctgtactgaacttgtaaagacctttttcttattattatttcctaagcaatataacaactatttatatagcatttacattttgttaggtattataagtaatctagagatgatctaaagtgtacaggaggatgtgcataggctgtatgcaagtactatgccactgtataacaggaacttgagtatccttgaatcttggtgtttgagggaggtcctggaaccattcccatggatattgagggatggctgtattttctttttagtttgagattctgcatatatgctattagctctccttattttctgcactcacttcatttgcttttggatttgtgtctgcctgtttataaagatattatggattagaaatctcccattattacaaaagcatatctggaggcatgagccaccattggatcatcactcaccatgcatggtaggggaccattggaagcccagccttttgtttccttcaactacttccagccatgttctggctaatcccttagttctccacagcttctccatagagaacagacatttgttcttaatagtgactttaaatgtaatgccacccagggatgtttgctctcgagctcctttaaattttaattaaatttctcttctgtttgtagaatatcagtaatcataagtgggagcagcacttgaaggtaggggtcttcctgttgccactgacatgccttcacacagtgataattgtgtaatgttaagtggctctgcaaaatcctttaccactctttacttgtgtttctacgtttaaatacaaaacaaaaacaatcgagcaacttgttagcaatagaggtagactaagcaaggcaagacatttcaaactgctactgtacacatttttaaaatagtggaattgtgaaacactttttttctttccctgtagggaagaggggaggtcgtatttccaaactgaaaaacaaacattttaaaaacgcagaaattcaagatggggatcttagccataaagccatacataaaaatcacactttcagcaatgagtacattcctgaaagcttaagtaaaaattttcttttccaagttgaatcatattccaatcaccttaatatttagaaaaatccttccatgacatgacaaatccctccataaaatgaataatcacattctaattcatttgagtttaatttggattttcatcaatctagcttacataaggcaagataatatctctaaaaagcatagaatattcattcagttgctgagcctttactaaacaacagtttcatatgatatatcttggacattctgtgaaatagtaagttgctgatgatagagaaaaaacatggctttgtgatcagttactagccatattcttgaaggttacagacagagcggggtaggctgcagcctacagacagaaagtggggctgtaggtgtagggtcctggctgcacagagtgtgtgatggaccgtttatttggcatcagggttttacatatagtagctcatagttctaaacactcttgacaacacgaattctaaatagtgtgagaataagtctatgttactttatgttttcctctgcttatactggcagcagaagttttgactgttttttgaaatacactattacaacaaagcttttaagaattcatagccaggtccagtggcatgctcctataatcccagctactggaaagaagctatggtgggaggatctcttgagcccaggagtttgaggccagcctgggccacatagtgagaccctgtctgtatcactccgttttcacactgctgtaaagatactacccgagactgggtaatttataaaggaaagaggtttagttgactcacccttctgcatggctaggaggcctcaggaaacttatgatcaaaggggaagagggagcaggcacatcttacatggtacaggagagagaggagaaagtgaatggggaagagccccttataaaaccatcagatcttgtacgaactcactcactatcatgaggacagcatgggggagctgcccccttgatccagtctcctccctccctccatacgtggagattacaatttcaaatgagatttgggtggggacacagagccaaaccatatcactgtctttctgaagaaaaaaaaggaattcttgtatgttgccctaaagatataaaactgcttacaatgcctagtgatttgtattgattactatgtgttccctaaagtttgaaactctccattaacatagcaaaactactatattctaaatcaaatgtcagcaggttgggaaaggtatttacaacaaacatgacaaggggataataacctttctatattaagagatcttacatatcaataagaaaaaagttaacctgttagaaagatcaaaacaggtattcctcagaaatgacatataactttgtaaaaagataatgacactcataatgaaggaagtatcaattaaaacaatgacatattatttttcacctatcaaagtgtttattcttctactcaacaaatatttgaatgcttattatgtccaggaattgtattcaagggttgataacacacaaggttggtggctatggagaaagtgttttatcatatctactagaggaaaagtcatttgtcatagcgttcctggaggggaattttttaagcgattaaaatttaaattttacatatcctttgactagaaattatgcttccaggaatttaccctatagatatattcatatagatgtacaggcatattatcatgatcctcgtcattattatacaagtgctaccactactgctactaacatttattgagctcagtatttagtatgtttcaggcattctgctaagcattctcaaaacatgtatgagacaagtactaaagtgatgctaggactcgagtttttgcctcaaagtcactcaactggcaaataggaaacttttctaacattagagcgcctccctccacccggcatccttgtcctcccagtatgtgtgtggtgttatttgtaaagggagaaacatggaaactgtgtaactgttcattaatagggacctgataaataccttcattcaagtagtaccctgtgtacccttaggggatacacatgctaatatggaaagggctccatgatttactgttagtaaaaagaaccggttctaaacagtatacaaatgccccttcccttttgtagaataaataaaaagattgagctgtatgcatacaagcacacctacacacacacacacacacgtggaaataaatgtaagtactcctaagaaactcaacatgtcaggtaggaaggagactgcatcgatatatttccctggttctatcctaatataaattcttcatatttagaagagtcttacccaatcctttctggagaaagtgatttttcacttcttggaattcttctaatgtaacatgaaaaagacaaggaggaagaaaagaagaaaaatcaattgctaacttctttataagacattacgctaatgatttcacatgcattatctcacttgtgcttttaaatatcccaatctagtaattactattgaccactccatgtattatatggaaactgagccttcgtgaaattaagaagtttccaatgtcatatgactgctaagtagaggagagcacacccacatccaagacagttggttgcaaaatagcatgatcttagccaccagtaaactagctctcggtttgtcttaattccttggcacctgccatgtatcttatttcattcaccgggtaggatgtgaagagattctggcagtctttagcagtgcagactctggagtctggcttcagaggttggtttccaatactgattagaatatcttttacacgttatttcacttctctggactcaggtttctagtatacaaaaataggttaataataataatacctaattcctaaaagcatttttgaggattaaaatcagtagcaacaaatatggagcatttagaacagtgtctggcattgagaaaacctatgttttagttgttattagtattaaaagaaaggaattatattatacatacttttctttacccacaggctctaatacagaaatttccatatggtagtaattcattacagattacctagctgttaatcattcagtgccatcattgaataatttattatttgttataataggaaattgtaagttgaaccatataaaattgcacgttagtcaaaaccaaatattggcaattgcatatgattgagcttaatttatatgttttaatcatttcaaattctattaaaatgtgtgaatttattaatacctccaatacatccagatactttctggatatgtttgtgtgtgtgtacgctaaatgtaatttcccgtatggtataaaagtctaggccgggggcagtggctcacgcctgtaattccagcactttgagaggctgaggcgggtggatcatgggtcaagagttcaagaccagcctggccaacatggtgaagccccatctctactaaaaatacagaaattagctgggtgtggtggtgcatgcctgttgtccccagctactcgggaggctgagacaggaggattgcttgaacctggaaggcagaggttgcagtgagccgagatcgtgccactctgcactccagcctgggcgacagagtgagactctgtctcaaaaaaaaaatctattatgtataacagaaatgatttttaaatgtatctgaaatcaaattgatgtttattaatttatttttccttaatgcagcatgcaattgtcatggaaaagctgaagaatgctattatgatgaaaatgttgccagaagaaatctgagtttgaatatacgtggaaagtacattggagggggtgtctgcattaattgtacccaaaacactgctggtataaactgcgagacatgtactgatggcttcttcagacccaaaggggtaaagtatgctttttctttcataaagagttatttttttgctttttcatacaaaaatgttttatacaaaaaaataataattttgaaagcttctgtaaacagttgaacttcaaattaaaaggtaagtaggaacatttcgtagttgaaactgacctaaatctttgaggatgtaagataaaacttttccatcactccagaaagttttatcatggctccttccagtcaaggagtggacccctaggcaaactctgttctgatttttagaacgtaaattagttgtgcctcttagagaatttcataaaaatgaaatcatacagtacatactagtgagtcttttttcactcgacataatatgttaagatttatccatgttgtttgtgcatcagtagttctttttcttttgaaagaaattgctgagtagtatttctctgcacgaacatatcaaaattttaaatccattctcctgttgatagaaattaggatcatttccagttttagcttagctcctacaaataattttatactagttattttatagtcatatttttatttaccttgtgtaaatacttaggaatagaaagcttttttcataggataggtagatgcttaactttataagaaaccgtcaacattttgccaaattagtaataatgtataaaatgttcaccaaaaagttatatgagtttcagtcattctatatcatctctaatatttgatgttgactatctttttggattttagtcatctagtgggtgtgaaatggcatctgattatggatttaattttaatcgtaagggcttattgaccattcctgtatcttctcttatgaagtagatgttcaaagtctaaatatttttttatcctaaaaaccaaaattttaacttatagagctattacccatatcaagtaaatgtttgtgtgtggtgtgaataagtaaccagatttatatggttaacctgaagttctagcaccatttgttgaaaaatcaattgatcatattacatggatcaatttctagaacctcagttatctatttttcctagcatctatttttccctctgcgtgctaataccatactatcttcattgctttagtaagtctagaatttaggtaatataatgtaccaactttattttttattttcaagattgtctatagtaggggcttttttgtgtgtgtttctatacaattttagaatcaacttgtcaattacagaaaatattaggattattgcttagactctatatacaaatatggaaaatggagcttgaggagatgttggtcaaagaatataaaatttcagttagatagtaggaatacattgaagatatttattgtacagcatggtgactgtagttaataacaatgtatttactcttaaaaaatgctgagagtagattttaagtgttctcaccaaaaaaattgataattatgttaggtaatatgttaattagcttgatataaccatttcacaatttgtatatatataatatatatatacaatgatattcaaaatatcatgtcacacatgataaatatatacaattttgtcaaaaaggaaattaaactttaaaagcaaacaagtattgaggaaaataacatcataataatattgaatcatttaaccaatgaacatagcatatctctccatttatttctatcttctttattcatgtcagtgttccagtacagagatcttgcatgtcttttgttaaattaatctttagaattttgctttgcatgactgtaaaaaaaatttttaaataattttccaattatttaatgtaattgttaaagaattttgaatattgactttatgccctatagccatccttaatttctttttttttttttaaataacttcccttttaaaagttactgagaataaagaatacagaacatggttataggcacttacattgctatcaaatgcaggaattcacttcaataagaagtgctttctctgtaagcatggttcatggcaatagaagctccaacttaggagaggatgttttccgtgacaaaaataataacaacaaaaaaaatggtggttgaaggaaaacagtccaaatttacagatgctttaaacttcttttggccttggcatcagctttcatgttaaaaaataaagctggtggggaagctatctcacttgcaaagtaaatggcttgtatgagattggcgaatcttggtcagatattgcatttttaaagcacaaaaccaccggccaccaatatcttcctgtgcatgcatataaattattttcttctaattcaaatggcaacagaggaatcctggcgtgcatgtgcatggagacacacacacatcactaaggagacaggacaaactatcataaactaagcagtatcccaaacacatcatcatctataggctgttttacaaaggtggaatacaaacgaactgaatgtctcaggtaaaaggcaaagtctatttctccaactctgctgcactcatttatcttcttaaggctttcacagaaagcaccgttttatgaacaggcaattcagtacccagagcttgactggagacactaatcaggattgaagtcttgatgcagttcataaaaacccatttaaaaaaaggcatcaaaaaccacatttaaaataaagttgtccatatataaagaatgaagtgtttagaagttcccagcttgtatcctaataagagtactgaaaggtttaatattagcagcctgtgaacacgtagtgaagaaagagtctgagaaccaagttaacatccttattccactctaattccacccatgccatgggtaaaaacagttcttgcagtctagagtttctcctccgatggtttaaccgtcagatttttacatcttgggattcaaccatcttggcaagcgtcttcttaattctcaacgctgtgagtctgggggctggattgtgggcccagcattctgacattagcttcaaaactgctcgtagacattcatcactgttccaccgattagacacaattggccgcaaacgtttgacacacacaacctcacgcatatcttcgtatgacggatcactcggtaccatgttataatatggcaattggtagtcttccacgatccctcctgtgatacaacgacgagccatctcccaaatgattaggccgaagctgtagatatcagccatgatgtagggctggaagtggtttttgttcaggctttcgtccagcacttctggagccaggtagcgtttggtgcccaccctggtattcaagggcacatcaacttcatttgtgtcactgttgaatttaacagcaaggcccaggtcagcaatgcagcaactcccatttttcttgatgaggatgtttttgctctttaggtctcgatgagcaattgcgggctttccttgggtgccatacgtttctgtgtgcaggtggcacagaccacaggcagctgaataagccaatttaagcagggctctggtgtccagcgtagcacatttcaggaagtcatagagagatccattttcatggtaatcagtaatcaaatagagctgagtccaggaacctgtacctttaatatctgccgctatgaaaccaagtatgttttcatggcgcattagcacagtttggtagatttctgtttctcgaaaccagctggcttcttcagtggtaaagaatactttcaccgccactctttcgccatgccatttgcccatccgtacttctccatatcggcctttaccaacttgccggaccatctgaatctgtttggcaatagttcgctgaaccaataaaggtagtccagacccactaccagaactttgtgactggtcaataaggtcttttagtgattttccaactggaataaatgcttcatcctgttccaaatcacgattgtaacgacgtctgcttgagatgctcttgcaataatgtttgtaacaaaagcagctggagaagatgatcatagcaattatgcagacagccatagaaatgagcaaaaccagccatcgaatgctgccatcaaaaaacggacctatgacaacagggggcatgtgggttgcaaatactggttacataaattggtccgacaacattctattgtccggcgtagctgggcttttggagaatctttgcactgaaaatcagatccttcatatttcatacaccctgaagctaatgtggtttctccctggtcatcttcttctatgatggcaaagcaacgtccattagttatgcatgtgttattaatagcatcatctgggcagtgccctcagcaatagcacttgaaaaaaggcaaggtatcctctggtgctaaggttactccattttctgactttttctggtcggagtctgatttcatcccagtgccgtggagcatactatccagattctgtccttgaacacgagaaatgatgaacaaataggctcccaataatctgatgtaaatgtatagctgagtcattgttcaattgtaatgtttcctgtgtactgtcacctttagtaattggtcttgctacttcaccaatttaaatgactgtcattcagtgagattttcttgtaaaagatcgcaagcacttgacaatgacttcaactcccactgctttcttacgactcctccaagatgtggctagataaaactgtacttccgattttctccaaacagctttgacctatgcttccatctcatgaattccaagacagtattaaactgatgcatattttcataagtcgctcccggcgtctcttcccgggctccttgccagcgtgccgaggcgcaggcagggtgatggaggcgccccggccgggaggatctgccggggagagcggctttcctcatcgattcgggagcacccaccatgcttaatttctttattaattctagtagttttaaactacatgctttagaaacgtacacataaacaatcattttacctgcaagtacattcaggcttacttcttcctttgcaatctttatgccaaggttaactaaaaatggcgagagctgacatcttcactttgttctgaattttaaagggaaacctaatatttcactatggagtatgatgtgaactgcatatttttttatggacaccctttatcagattcagtaggtcccctactattcctaagttgcagagagtttttataacaaaatggttttgcattttgtcatatgcttttcgaaacctactgaaatgaacataaggattttctcctttattctgttaacggggacaatttatgcaaattgaattttaaaatatgaaggcagctttgcatttgtgaattaatctccatttggttatgatatattatcatttttatatattggatgattcaattgactaatgtttggttaagaattttgacatcctctcataaaatatattggtctataattttattttcttataatgtttttgtcaggttttttattggggtatactggcatcaacaaatgatcggggaaatgcacttcctcttctgttttctaaagtaacttcagattaaaattaattctctttaaaatgcttgataaaatttcctagtgaaactatctgagtctctagttttcttcgtgcattgtattggctattttttattagacatagggttagataggttttgtattaatatctttagggagggtcaatttttgatatattgtatttttcaagtaatttgttcaattcatctaaattgtcaaatcattggcaattggcagttttaaaaattgccttattatcttcttgaagtctatagcatctatatagatatcccctgtgtaatttttaaaatgattaagttgtgcttttctccttttattgatcacttatgttaggggtttatcaattttcctaatcttttccaaaaaaacttctgcctttttattttttgtgtttttattgattctgttctatttattatattattcatttgacctgttttggttttaaatttcattttctttttctacctatcaatttggaaagttaaattatgattttacacctttcttcttttatcatataaacttttaaatatagatttccttctagcagttctttagctgtttctcatgaattcaggaatgctttatgttcattgtcatttatttaacataacttctaatttctcttgtgatttattttttgttaatttccaaatatttgagctttattaaatattatatttttgatttctacactggatgtttatgatctgagaacatactctctaagatgtcaaactttagaagtttattgaaatttaacttatggctcagtgcatggtctctcttggcaaacaaataaatgtggatttttccaatctgcgattatggattcctacctttctttcatttttttcagtatttcttcctgttctttgaagcactgttatgaggcacatacatatttagaatattttgaatctttagatttttatatcttataaattaatattttgataactgtgaagatctccacttaatctcagatatcactttttgtcctaaagtctactttattttttattaacattgccacagcagttttcatatgcttactctgtatggtatgttttttctgattttgtttaactttcaacctatctttattttcatttaaaagatttcttataaagagtaaaatagatggattttttatcctgacaattactgtgtgtttagtccctaaatttaatatagttaataatatgattgggttttgctatttgtttcccatttgtgtcacaaaatttttgttcccattcttccttttctgtctacttttatgttaaacaaatatttttcagtattccattttatttcctttattatctttttagcagtacctctttgtataattttccattccaacttttattttaggttcaggtagtacatgggtaaattatgtgtcatgggatttggtgtacagattattttgtcacccagataataagcataataaaattttcaatcttcacccccctcccacccttttcaagcaggccctggtgtctattgttgccttctttgtgtccatgtgtactcaatgtttagctccactcataagagagaacatgcagtatctggttttctattcttgcattaattcacttaggataatggccttctgctccatccatgttgcttcaaaggacatgattttattcttttttatggctgtgtagtattccatggtgtatatgtactacattttctttattcagtccaccaatgatggtacctaggttgattccatgtctttgttattgtgaatagggctgcaatgaacataggcatgcatgtggctttatgatagaatgatatatattcctttgggcatatacgcagtaatgggattgctgagttgagtgctagttctgttttaagttttttgagaaatctcccaacggcttcccacagtgtctgaactaatttactttcccaccagcagtgtataagtgttccctttctctgcaacctcaccagtatctgttatttttgactttcagtaatagccgttctgaccagtgtgagatggtagtattttaagctcatgatatagtgatatagtcctatcttttggactattgttttcatatattgcacataatttgtaagccagcaatacaatgttgtcatttttgtttgaagtcacaaaactatgaaaacaatcttaaagaaatgaaaagaaggaaaaaaatttacattaaccatacctttcccattttccatactctgtggttctagcttatatatattgccctcctgcttgaaaaatttcctttaacattttttttttggtagtgcagagctgctggtgacaaattttctcaacttccctttatctgaaaatgtctttaatctactttcattattgaaggatattttccacatagttacagaggtgtgtgttttcttctttgtttagcactttaaagatgtggcaccattattttctggatttcattcatccttatgacaacatagccattatttgtttctttgttctatatatatatatctttaattcactagatgatttcaaaaatttttttatatctgccttttgacacttataccatgtatgataaaactttggcccgtagaccaaatctgactcatggcctatatttgtatgatctgtaagcaaaggatgtttttacatttgtaaaggtttgttaaaaggagaagtagaagaaggggagaatgaagagaactaggaggggggggaagaagaggaggaagaatgaagagagtctttatatggcttattttactatctggccctttacagaaaagttttccaacctcagagttaaataaactatgatgtgtctatgtttggctttcaagcttaccttgcttgattcacaaagcttctaggaactataaattgagattttattccacatttaggaaattttaggctattttttttatttttacttattttttttaggcttttgtttaaaacctgttttttgaccagtgtttttccttctctttctaggactccagctgcatgtgtgctagggcgttcattgtatctgaggcagtgctaagtaattttttttctttctccgttctttagattggatcatttccattcatctgtcattatactttggtctacatataatgtatctttaatttactagctgattttaaaatattctcattaggccgggcacagtggttcaccccaggaatcccagtactttggaaggccgaagcaggcaagtcgcttgcggtcaggagtttaagaccaacctggccaacatggtgaaaccctgtctctattaaaaatacaaaatttagccaggcatggtggcaggcacctgtaatatcacctactcaggagactgaggcaggagaatagcttgaacccaggaagtgaggttgcagtgggtcaagcttgcaccagtgcacttcagcctgggcaagagagcgagaccctatctcaaaaataaatacaaataaataaataaataaattctcattatatttacttttaacaatagtatcatgtttgagaaaactttggcctgtagaccaaatcctggcctatggccagatgactacaaaagtagtcattaggttgactactcttcctcctatcatctctacctgatgttaagcatatccagtgaattattaaattgaggtattttacttttcagctttctggagttcttatgttccttacagcttccatttctctgaaatactccataccttcactcattataaacattgtttcctttatattctcggacatatttacagaacttacgttgacttccttgtatgctaatttcaatatctgggtcacctcaggatctgcttttatcaacttctttttttaataaggtcaacattttcctgtttctttcctgtatatctaatacagtagtcctcctttattcacagaggatatgttccaggaaccccagttgatacctgaaatcacagatagtaccaaacctatatatactatgttttttctatctgatacctgtgatgggactaagtgactaacaggagggtagtgtctatacagcatagatatgctggacaaggggatgattcatatccctggtgcgacagagcaagatggcccgagatttcaccacactattcaaaatgacatgcaaattaaaacttttcaattatttatttctggagttttccatttaatattttcgaactgtggttaaccatgataactgaaacctcagacagcaaaactacagatgaggtgaggactactgtaatttatcatctctacaggacatttcggagaatacaatgcagacactggtttctgttatgttcctctgaagagtttgaattggttctaattagtaataaacttgctgagtgatcaccatgaagtcatgaaagtttactttcatactttgttaggacagattagtggaaaactccaggtattcatcaaacatttctaatgtagttaacttaaagtctgaattctctttactttatggttggtagcacctgaaaactcttctcaccttgttcagtttccagcggttgctttccactgaatttcctagaatctcctgagtgaatatacaataaagggatcagttaaggctgggaagggtattgttatgcaaattttgtgaattgcagtttaacagctaaagaatttatctctatgatgttcataaaattattgtcttaaaatttgattttagatttttccacttaatgacatttaatttatatgtgtatataaaatatgccttacctattctgtgcacagtcccaacttcataatgggggaatgaatgaatgtatcttaaacaaatgatgattttgaaactgacctgtgaacttagttaattgagattcagtgaggtatataaataagtctaattttaacactctgatttatagtagcaaacaagttttcatttgtaaattaagcctagatatatatacatatgaactatattgaataggtgggcatttcttgggcaaataatttagttttttttttttttcctattacatctggaaaataaatcttgtatatacagtatatgaacacagtgtagttttgtttaagtaaactagctttgttgatatactatgtatacaagataaaaaggaataaaacatgaaaatatcaataagtattgaatctaagtaacaaatatataggaatttattattctattatctttacttttgtgtaagcatgtaaaagaactggattttagaaattataaacatgtattaaaggtaattcttatagttttctcaataatttgctgctctgtattattaaaactactttgtctataaaagtttgctgaagtgaaaaatattgctgtttctattacacttcgttaaattcattttaatatttttgttaggtatctccaaattatccaaggccatgccagccatgtcattgcgatccaattggttccttaaatgaagtctgtgtcaaggatgagaaacatgctcgacgaggtgagagctgcagcagaatgtcactgctctgataaaaggacaactaaaagccaaatatgattattttcagaagaatattttgcagtaaatgttattcatgtaataaatttattctttaatctatcagtgtattagcgttccctccaggaagtagtttttaaactcatctcaataattactttcatgtttaattataatgttttcatagcaagaagagttgaattatgtattttgagatacacacacacacatacacagagataaagaaagagagagagtcaatcacaaatctgtggtatatgtaattttttcatatcgtgttatttattagattgtttgtagcttctatgagttctagcatgaaatgccagcgttcactgaggaatgtgtgtgctgtagtgggaaaagcaaatagaagaactcacacactgagatgtaggcaataatatagaaagcaagaagtgttcataaaggactaagaaggtagtagtcatgaattaatgaacagaaagaggctgacactaatttaagctaaagccttcctttgaggaatgaaattcatgaactccaaacattaagaaatcaaatgccaacataactccttgatataaaagcgtttgggagctacttccagggcagttgctcgccaagtttaagtaggaaattcatagaatgcactgggacgcttcttctctagaaagactaaaattaatcaaggctacaatgtagtgtttttttccctaatgactttagcgttaaaagaccagcaatgtttcttaggtacaattcttgttacctgctttctttataaaactgtaggattatcaatctgagcattacatgtagactaaattttgaaatattaaaaaacggatacgttttgatagtcgaatgatgaattactgagctcacttttcgttttaagccttttctctttgtgtttacaagtaaatcacaatgttgttttcattaatatcatttaactcttccctacccctttttgagtaatgagtatatgatcacagaataaaaatggaaaagtagaaaaataaatatacaattcagtggtaattcaggagagataccactattaacattttcatatatttctgtcataatgcatacaaaaatttctgatattgctcctcttaactttatgtgatgagtttccccaaaaatctatgaaaactttctctgaagtctggcttcagcacctaaataacacattattatatggtcgtgccataattatttaccctctcaactttatatggacattaagattgtttcaaatttttgtttattttaaccaatcctttaataatacttattccatataattacttttcaattattgtaaaaacaatacatagtaaaataaattcttaatagtaaagaaataaaataataagtgtcctcttcaacctatttatcccagtcttacttccaaatttaaaaatattgagccttttttccgattcagtttttattttttttaattatactttaagttttagggtacatgtgcacaatgtgcaggttagttacatatgtatacatgtgccatgctggtgcactgcacccactaactcgtcatctagcattaggtatatctcccaatgctatccctcccccctccccccaccccacaacagtccccagagtgtgatattccccttcctgtgtccatgtgatagcattgttcaattcccacctatgagtgagaatatgtggtgtttggttttttgttcttgcaatcgtttactgagaatgatgttttccaatttcatccatgtccctacaaaggacatgaactcatcattttttatggctgcatagtattccatggtgtataagtgccacattttcttaatccagtctatcattgttggacatttgggttggttccaagtctttgctattgtggataatgccgcaataaacatacgtgtgcatgtgtcttcatagcagcatgatttacagtcctttgggtatatacccagtaatgggatggctgggtcaaagggtatttccagttctagatccctgaggaatggccacactgacttccacaatggttgaactagtttacagtcccaccaacagtgtgtaaaagtgttcctatttctccacatcctctccagcacctgttgtttcctgactttttaatgattgccattctaactggtgtgagatggtatctcattgtggttttgatttgcatttctctgatggccagtgatgatgagcattttttcatgtgttttttggctgcataaatgtcttcttttgagaagtgtctgttcatgtccttcgcccacttgttgatggggttgtttgtttttttcttgtaaatttgtttgagttcattgtagattctggatattagccctttgtcagatgagtaggttgcaaaaattttctcccattttgtaggttgcctgttcactctgatggtagtttcttttgctgtgcagaagctctttagtttaattagatcccatttgtcaattttgtcttttgttgccattgcttttggtgttttagacatgaagtccttgcccatgcctatgtcctgaatggtactgcctaggttttcttctagggtttttatggttttaggtctaacgtttaagtctttaatccatcttgaattgatttttgtataaggtgtaaggaagggatccagtttcagctttctacatatggctagccagttctcccagcaccatttattaaacagggaatcctttccccattgcttgtttttctcaggtttgtcaaagatcaggtagttgtacatatgcggcgttatttctgagggctctgttctgttccattgatctatatctctgttttggtaccagtaccatgctgttttggttactgtagacttgtagtatagtttgaagtcaggtagtgtgatgcctccagctttgttcttttggcttaggattgacttggcgatgcgggctcttttttggttccatatgaactttaaagtagttttttccaattctgtgaagaaaggcattggtagcttgatggggatggcattgaatctgtaaattaccttgggcagtatggccattttcacgatattgattcttcctacccatgagcatggaatgttcttccatttgtttgtatcctcttttatttccttgagcagtggtttgtagttctccttgaagaggtccttcacatcccttgtaagttggattcctaggtattttattctctttgaagcaattgtgaatgggagttcactcatgatttggctctctgtttgttgttgttgtataagaatgcttgtgacttttgtacattgattttgtatcctgagactttgctgaagttgcttatcagcttaaggagattttggactgagacaatggggttttctagatatacaatcatgtcgtctgcaaacggggacaatttgacttcctcttttcctaattgaataccctttatttccttctcctgcctaattgccctggccagaacttccaacactatgttgaataggagcggtgagagagggcatccctgtcttgtgccagttttcaaagggaatgcttccagtttttgcccattctgtatgatactggctgtgggtttgtcatagatagctcttaatattttgaattacgtcccatcaatacctaatttattgagagtttttagcatgaagggttgttgaattttgtcaaaggctttttctgcatctattgagataatcatgtggtttttgtctttggctctgtttatatgctggattacatttattgatttgtgtatattgaaccagccttgcatcccagggatgaagcctacttgatcatggtggataagctttttgatgtgctgctggattcgttttgccagtattttactgaggatttttgcatcaatgttcatcaaggatattggtctaaaattctcttttttggttgtgtctctgcctggctttggtatcagaatgatgctggcctcataaaatgagttagggaggattccctctttttctattgattggaatagtttcagaaggaatggtaccagttcctccttgtacctctggtagaattcggctgtgaatccatctggtcctggactctttttggttggtaagctattgattattgccacaatttcagatcctgttattggtctattcagagattcaacttcttcctggtttagtcttgggagagtgtatgtgtcgaggaatttatccatttcttctagattttctagtttatttgcatagaggtgtttgtagtattctctgattttagtttgtatttctgtgggatccgtggtgatatcccctttatcattttttattgcatctattagattcttctctctttttttctttattagtcttgctagcggtctatcaattttgttgaccctttcaaaaaaccagctcctggattcattaattttttgaagggttttttgtgtctctatttccttcagttctgctctgattttagttatttcttgccttctgctagcttttgaatgtgtttgctcctgcttttctagttcttttaattgtgatgttagggtgtcaattttggatctttcctgctttctcttgtgggcatttagtgctataaatttccctctacacactgctttgaatgcgtcccagagattctggtatgttgtgtctttgttctcatgggtttcaaagaacatctttatttctgccttcatttcgttatgtacccagtagtcattcaggagcaggttgttcagtttccatgtagttgagcagttttgagtgagattcttaatcctgagttctagtttgattgcactgtggtctgagagatagtttgttataatttctgttcttttacatttgctgaggagagctttacttccaagtatgtggtcaattttggaataggtgtggtgtggtgctgaaaaaaatgtatattctgttgatttggggtggagagttctgtagatgtttattaggtccgcttggtgcagagctgtgttcaattcctgggtatccttgttgacttcttgttgactttctgtctcgttgatctgtctaatgttgacagtggggtgttaaagtctcccattattaatgtgtgggagtctaagtctctttgtaggtcactcaggacttgctttatgaatctgggtgctcctgtattgggtgcatatatatttaggatagttagctcttcttgttgaattgatccctttaccattatgtaatggccttctttgtctcttttgatgtttgttggtttaaagtctgttttatcagagactaggattgcaacccctgcctttttttgttttccatttgcttggtagatcttcctccatccttttattttgagcctatgtgtgtctctgcacatgagatgggtttcctgaatacggaacactgatgggtcttgactctttatccaatttgccagtctgtgtcttttaattggagcatttagtccatttacatttaaagttaatattgttatgtgtgaatttgatcctgtcatgatgatgttagctggttattttgctcgttagttgatgcagtttcttcctagcatcgatggtctttacaatttggcatgcttttgcagtggctggtactggttgttcctttccatgtttagtgcttccttcaggagctcttttagggcaggactggtggtgacaaaatctctcagcatttgcttgtctgtaaagtattttatttctccttcgcttatgaagcttagtttggctggatatgaaattctgggttgaaaattcttttctttaagaatgttgaatattggcccccactctcttccggcttgtagagtttctgccgagcgatctgctgttagtctgatgggcttccctttgagggtaacccgacctttctctctggctgcccttaacattttttccttcatttcagctttggtgaatctgacaattatgtgtcttggagttgctcttctcgaggagtatctttgtggcgttctctgtatttcctgaatctgaacgttggcctgccttgctagattggggaagttctcctggataatatcctgcagagtgttttccaacttggttccattctccccatcactttcaggtacaccaatcagacgtagatttggtcttttcacatagtcccatatttcttggaggctttgctcatttctttttattcttttttctctaaacttcccttctcacttcatttcattcatttcatcttccattgctgataccctttcttccagttgatcgcatcggctcctgaggcttctgcattcttcacgtagttctcgagccttggttttcagctccatcagctcctttaagcacttctctgtattggttattctagttatacattcttctacatttttttcaaagttttcaacttctttgcctttggtttgaatgtcctcccgtagctcagagtaatttgatcgtctgaagccttcttctctcagctcgtcaaagtcgttctccatccagctttgttccgttgctggtgaggaactgcgttcctttggaggaggagaggcactctgctttttagagtttccagtttttctgttctgttttttccccatctttgtggttttatctacttttggtctttgatgatggtgatgtacagatgggtttttcgtgtggatgtcctttctgtttgttagttttccttctaacagacaggaacctcagctgcaggtctgttgcaataccctgccgtgtgaggtgtcagtgtgcccctgctggggggtgcctcccagttacgctgctcaggggtcaggggtcagggacccacttgaggaggcagtctgcccgttcttagatctccagctgcgtgctgggagaaccactgctctcttcaaagctgtcagagggacatttaagtctgcagaggttactgctgtctttttgtttgtctgtgccctgcccccagaggtggagcctacagaggcaggcaggcctccttgagctgtggtgggctccacccagttggagcttcccagctgctttgtttacctaatcaagcctgggcaatggcggcgcccctcccccagcctcgctgctgccttgcagtttgatctcagactgctgtgctagcaatcagcgagactccatgggcgtaggaccctccaagccaggtgcaggatataatctcatggttcaccgttttttaagcccgtcggaaaagcgcagtattccggtgggagtgacccgattttccaggtgccgtccgtcacccctttctgtgactcggaaagggaactccctgaccccttgcgcttcccaagtgaggcaatgcctcgccctgcttcggctcgcgcagggtgcgcgcacccactgacctgcgcccactgtctggcattccctagtgagatgaacccggtacctcagatggaaatgcagaaatcaccgtcttctgcgtcgctcacgctgggagctgtagaccggagctgttcctattgggccatgttggctcctctccccgattcagttttttagtgagttacctttagtatctaaataatattcttatcagtacttttatcaccattacatattgcctattgactctccgtcttgaaaggtgaagaaatgtatcattcacaacacctccctccttcattccaccatccatacatttttattatgtgtttcttctacgatatctttatcatgttcaagagagcttacatgtctatttcatcaatgactacatttagactttctcttgaggtcctactatataagatgtgataaagactatcatccctacattcttcaccacttgtcagtgtctgtcaattacatatctttgaaatcttttcaaagattttcacagttacattcagctctggaccaataattaatgcttataattcaaaaatagaaatataataatcaagattgtaatactgtaattagatacatattatttgatacaggctcgaattgcaaaattggacacatatttgtaggtcatttttatcttcatgcttgctctgataacttatttaggaaagagtgtaagatgtggtctcatggtttgcacttcttcatcagattacataaccagatagtagaaaaggatattttagtgtattactggcattcatttgattacgagggaaatacgatgtatttcttctctgatttttcttttagttttcttcattttcttttagtagaaggaagttttctcccttgtagatttgtaagagcactttaaatattaaaaacagtgatagtatatcattttttaataatcagttttcagatttgctttgtgtctcactactgttgataatttctagtgcacaaacttcaaaaattttatgtaatcagctgtcaaagttcaggtaaaattctttacttataataatgataccaacccatgattattatatattttgatttttttgtgtatttcttacatgctttataatcctagaactctcatctatcccaagattagaaaaatgtatttgttttcttcatttgtatgatttcattttataatacttaattttttattccatctagaatttattttgttatatttcataaggaaattttcaaactacattttgttttccaatactcttttttactcatctacatttaatattactttcagctctttagacatattaaatatatttattttattttcggaatctgttagaagcactctgttattgagtctgagtctgcatttttatttctcttctaactcttattcatatggacttcattttcttatgtttcgtaagtgtgtgtgtgtgtgtgtgtgtatgtgtgtgttttgtggatgtatgcgtgcatatgtatttcttagtttattctttcagaagccttgaatttacatgaagttatgtgataatgacctaccttatataggacctagaattttttgttgttcttctgtaaaaccatgctccctgaactgtagtctagtcatcagaatttgccagtcaactccaggaaagacattgttttaaagaatgacgtaagctttctagaagtcaattttgtagtttctcatctccaaggggtttctttatttcttgccagcgcaacgattctgttatctgccatctgtctttcgatctatctacctacctacctacctacctacctatctatttttctacgtttaattttattctgtatcttcaactgttctgaacaggaggggttttttggacatctagtctacaatacttccagaaataaaagttaagatagacattgtttaatacatgaagtacttctacatttagcctcaatttctggaaattttaacatcagaaataatgttaaactatttaatgcctttgcaaactttattaaaattatcagatttatttcccatttggtctattgggtaatctattagaaacgaacttactaatatcaaacaatatttattttaccagagtatgttctacttggacatcatagaggatccttttaatgtactttaggattcagtttggtgttttgctcatctggattcataagttaattgcctgtgactcagacacccaccagttgtgctcctttggcaaatcacttaatttctccatgccttagttacctcatctgtgaaacaggaaaaataatagtgtctatctcatatagatgttttgagtactaactgaattaacccctgtgttttgtgtaatgctaagtataatgactaccataagataagtgctatttgagtcttagaagttttgtttatttggggttatcatttgcatttgggtatcaagttagaatttgcttcataaattgaattacatagctctccatttttatatgaccataagagtttcaagttttgaaaacagtctgtaaaaattaactagcattacagaaaaccaaacaccgcatgttcttactcgtaagtgggagttgaacaatgagaacacatgaacacagacaggggaacatcacatgccagggcctgtcagtgggtgggggtctaggggaggaacagcattaggagaaatacctaatgtagatgacaggtcgatggctgcagcaaaccaccatggcacgtgcatacctatgtgacaaacctggatgttctgcacatgtattccagaacttaaagtataataataaaaaaaattaactatcattaaaacatgtttgtggtagttctttgataatttgtcctcttttgatacccttgattagctttgtttaccgtttccttttgcttgcttttctttttttcaaatctctttacttcctgtggtgtttatattttctcttttttatacttaaatgaattaaattttaatttatctatttttaaaataatggactatttaagcctataagtttacttttgggtacagtttttccatactcaacaaaaattaagttccttttttactgctattatattctacctagatagctatttatttttaattgaagtcttgattttctctttaacccaagagttattaaagagaaatatttaggcattaatttttagaacagttgaattttgcataaaattctctcatcatgtttgatattcagaactaatttaatcttaatttttgtggcatttgatacacatctaaaagtagtaatttatgttaagaaaataagccttagataatttctgctttgataattgagtattttttatagtcaatcacaaactatggtaaatatttagttatataccacataatatgtaatttgatattattagattattcaaattttctgttttttcttacttcatctgtaaatacttaagatgagtaagttagcatcattttcagccattgacttttaaagtttttatttccaatatattttgttgtccacatatttttgtactgataattagtgcttatttgaagcataaacataataatttaaatcatgtttttattatatttttatcaatgtaaaatgagagcttgccttactgaacctagtttatttgagttctactttggccctatttaatatttcacaacttttttttcttttccatacgctttcttgacacacattcattttcttttacttgtaatattttatttgcaatattcctgttcattttgtttatctcttgtgcacattacatgtttatgtttttaataagaacagtaagactgcttaactcattagtatgtatttagtatgcatttctgacactaattctgtcattctgctttttgctttctctccctaatgtttccttgcctttttttccctcctcctttcttctttctgatggactatatatattactgatttgcttttatctttctccagattttgaaggtctgttagttgtattcattcatcctgtattatttctattttttaatcaaagacatgaataaacattgtgttttgtatttctgtatgttaaaaaagtaaatttaaacttttcattcccctcatctattgcttcttatccccaaaatatcaattccaatgaacacctttattttctttagtaatactgccagtggcatgttcttagagtatcattgttaaactgttattttaagtaatatgtctttattcccaaggctactttgcacctgtaatagtctggtggagcaggcttgttccgtgagccactagttttgcatttgttactgcttattcttctcaatgtagcatcatcagcattagcgtttgtggaaatttctccttggtcattgttttctatagccatagtttggtagatgctttgagatttcatctttcttgtttacatttttaatatttctattgacacttagaagatgctatgttcacgtaatcatagaaagcttttaattaaaccctctactctttggttttaacttttctttattgatatatataaaaaatctatttttgtgtcaaaatagcattttaaaggttactgtcattaaaactttaacaactaaattatgtacttgttttagaaatgttgatatgtggctcatctttctttaggtttggcacctggatcctgtcattgcaaaactggttttggaggtgtgagctgtgatcggtgtgccaggggctacactggctacccggactgcaaagcctgtaactgcagtgggttagggagcaaaaatgaggatccttgttttggcccctgtatctgcaaggtacattgtttattccagtaatgtcccactgtcaagacagaaggttatttttcttggcttctctgttgatttccttggcattaagcaattttaatgacttctggaagtatccataatctattctacgtgtggtgacccaccaggttcactgtagcaggatgtttataaggcacttatctaaaagcctacaaatgcacggaggataaaccacgtttaaaggcttgttattttataacaaaaacactttcaccccattgcccaactagtgtgttaatttaaaaatatacggcactagaaatagcaaccctttaaaactaaagtgcattcaaatctacctttgcatctaattcagtaatgaattctgtcaagggttttattctgaatttttaaataatcttctaaagtttgaacccagataagccttaaaatactcattatattcaaatttttctgttcaattataaaaaagtacaaagccctaatggaattaattaaaggctcaatattttcttccaagattacttttagaaatgcaactttatttgttgtacatgctcacctaataacaaatcatgttaacaccaagggatgcattacctctgcagcttataaacattatgaagcatacaggcatgcacaagtgaaaaatgaaaagactgatttactttacctatagtaatgagttctataacattctgaccagacggtgtataactacattagctgagagaatgaaccattctttgaaaaagttagcataccatacttatgtaaaaatgaaagttactacttttttctttattttcaattaaagagggacccttattaaaaatatttttattaacctgttagtcttatcttggcagctataaaatattatatagttatatttggtacatgtgagcatatgtgtacatatacaaccattaagccataatataagtagtaaatattagttttaatgaagtgtttatgaattgggacaagaatgtctggaaatatcaagctaaatataataataatagttacataataggtatatgttacatcaggggcaatttaggttcctattttgaactactgaaataataaaactcctgtggacacagtaagcagaaaagtccacaagcccatagtaaaaagttgccatgtcctggaatgtagtaaattttctaatctattacatttcattccaatattatctgaaatgaaaaattgcttgagttgaccaagattgtgtagcagtgtgtgagtgattgcttgcttaaggacacctcccctctccatcttgtatgtctctgtgggcaatcctgcaggctcttagtgcatcttctctagtatttatcaaaacatgtcttgtgtgtgctttattctcttttcaaaactccacagaaatctctaacctttaccacttgctcaaataaaggacagtcaaaactaagcttaaaatggaaaagaaacctcctgagtttctagaatatataaaatcaaacagggaagaaaaacaagtgcttttctacacctaccactcatacagtggtgatgtctggtatttgcaaggaaagggagtaataagcgagttaattttctttggtaaatatagcgagaaaggctggagcaagagagctgtagtgattagcagggctccaagggaaagccccttgagctacttactgcctgctctcagccgaactcaatattgtactgagaattattataatcctaataagaaagatgcctcctgtgtagacacttgaagctctacacagacaattaaaatgcaacaataaacagcaattaagaaatcataaaagagaatgaaaattaagtaaatagcattattaaaataaatgcctttctaccatgtgatatcttaaatagaaaactgtaagttcttataaactaaattgtttcaggattaaaaacttgcagaaagcaagtttcataaaacatctacataattataaaaatcacaaattatatgcatataacatgaattacatcacagaattatatatcacaataatatcacaatatgccacgatgagttatatcaaaatgtgcatgcaatgtactacaattaagtgcctacagtctcttgtttaaaaaataattaataacctagcatttcaacaaaatatgcatacaatttaaatactgaaaagacacttagtgtagtgtatttaaatactgaaaagacacttagtgtagtgtatttaaatactgaaaagacacttaatgtaacagttcatactgtttcacaaaaacatgatttgacatagatatgtcaactgattgtaaaaacagcatggatcaaaatgctgcttaagaagcaaaattttattgaaagactaaaatattggagatataaattcaaattaaatgacaggtttttagcagaaggggaagaatatatacataagtgtccatatatttctatccaagttagtaactttaaataagtatttatctgtaaatagaaataatataaatcacatatgaaataatgtgtatataagtattcatctccaaaatgcttattaaccttaaacatttgtacctttattctcttatactataacatatgagtttttaaatagtttttttttatcagaaagaaatatcttactgaagtgtgaagacatttttaaaaagagcttcattaggaagtcttgggcctaattgttttttgttttataaattttaaatgactgctctgtgatgagcccatttcagttgaggctgtattatttttcctgtgggtaaaatgacatactgagctgatatggacatcacttctcccacttttgctattttaaaaatacagatatgctgcataaacatagcaaatagatttataaacatttagattcaagaaagaaagggaaattcctagatgtcagaccaaagagggaaatctaagttaagcataagcaaaagctcaagctaaactgagcaactggggtcatggggtggagggtgggagacaagtcttagttctaagatcagggctaaagtttggagttttaatgccctcactaggacttgacactaggatttggacccacagacggaaattgcagctgaactccctgaagcagggacactagaaatgctttcagacagtgaaatgggggctagaaaattcttcctgcaagcctacagaggcagctagaaaatttttctcttaggggctctgggtgggtaaaagttactaccttgtgtaggaccgaatccccaaacctgtgtgccacgtgggaatgggatacatttttattctccccttatgtgctggcattcttcaacaagtcaaggaaatgatattcccataggaaaaataatacagcctcaactgaaaatgatctcatcacaaagcaagtaaagtacacaaaaggaaaataactacaaaaggaaaccagtagccacaaaaatgaggatatttgtacacaaagaactagaaagggtagtctgaaataaatttgtattcataaaaatctgtgatcatattcttatcacataaatcataaaaatatgtttaaaatgtacaattataaaagcatgattagaagattgaagaataaacaaagaaggaatagaaaaaagtaatataaaatagacgctatattaaaattcaaaagtaaccaggtttggaaaagaaacatgtataatttacttccagaaatgaaaaaaatatgcagtcattgaaattaaaaattcaatgattgggttaaacaagagatgagaaactgcaggatagaaaatcagaaatataggcctgaaaaaattacctataaattgacatagggaagtaaataaatatgatgctaactgactcacagaattgtaaaattgaacagaagtttagcagaagttgccaaagaagagattagaagaagttgagggaaacaatattcaaaaaaataatgaaggagagaagaatgatcatgagttaaaaactattataaatcctcagtttgaggatgataaaaaataagtctacccctagtagaaaacctgtcaaccagcaagacaaagagaaaaatattaaaactgggggcaaatatctttattgtgagtgtttaccactcacagtccaacttcatggaaagaatattaaataatatatgtcctttagtaagaatattgaacccataagacagtttcactagattatagtccagaagaatcaatctataaaaagcagtagtatttctatatgtcagtgacaagcaaataaaaaatgtaataaaaatacttagaatagcaagaaaaacttcatgatacctaaaaataagtgtttgtaaaattgagataatttttaaaggttattgaagaacataaaattctaaatgaggagacagctgaggatcaccaagtaccagtgaaaatctgtgaaatttgaaatgtttaccatttctattaatagagttaattagtaccacaatttaggagggcaatatggtattatctagtatctttgaaggtgataaaaccctgtcaaccagcaattccacatccaaacatttaccccaaaaaactcttacaatgtatagagaaaaaccatctaaaatgtgctcaacgtaaatgtacttactatgatgaaaatgagaaaaataaatagcaaaaataaattgtagtgtttcctttaatctgataaaagaaacagttaaagtggttgaaatagatcttcatgtataaaccatgataaatttcagaaacttcaggtggaaaaaacaatgtcattatggtattatttatatcaagttgtaaaacataaaacaatgctacattgtttgtgaatacatatattataattaaaaaatttaaatacacttgtagggtaagtactaatttcagaatagtagttacctctagagaaacaggaaagggaataaaacagaagtgaaatgagattcatttgtatctaagtatcattgctttaaaaatatatctgaggcaaatataaaatataaatattttgttacctctaggttgcatgggtaatgcatgttatatgtgctttttgaatgtcttaatataatttctaatttaaaatttctttaattgaatgtaaaaaagaattccagatttaaaaagaggagaatgaaatttttaatacaatgtcaactacattattacattttacacataagattttctcttcaacaatgatgttaatgaatattatcatcattatatttcaaaatgtgaaagcagtgctagctcaagacactcaaatgtttataatatttttgcattgttaaaaatgttgaaatttctctcacgaattacaagaggcaagtcaatctcagatatatgacaagtcattgactataagtgctgtctgactctcagtatttgtttatttcaagtaccatatgctagaaattggctcttttgcagtttggtgtcatattatttatgcaaaatcagttggtatgtagaatctcacacataatataaattgacattgatctagttaggaacatgtgcttttatttttatcaaagtcttataatagaaagataaatagtgaagtagaagactagaaatcaaagtctgtattttcatcttgttttgctttgtttttattgcattttccattaagtccttacaggcccacgagactatgtgatctggccttggcttacctctccagaatgttcttgagtttcagtcactgtttttcagctttgcttaaatttcttgagtctcttagttgtttgtagcatctggaattttataagttctattcagatttcttgggatacctcatttctagccctattcctttgcttagccaggcatttttaatggctcggcttaacttcaactttctcaggaaagctgcccctgcatcctcaagtcatatcattctcatggcataatcacttttcaaacctttttcttttcttttatgatctcataatgagtaattctgttttatgtctatcttacctctggtgatgatatggaccctatatattttctttaccattgcacaataagaagataacacaatgactcatacaaaagaaagaaggaaggaagagaactaaaatctcgtgaagctttgacagtcatttagcctttccgattctgttttataatctatgaaatggtgttattgaatcttttctgcctctcagtaggtataattatcacactgaagccctgtacaagtataaagtataaccataaatacctactggattactttttgttgttgtttatattgcttttcccaagtagagataagtttctgttctttttccctgaaaggatttttatggtgtgttaacatttttattggttttggatttccctcttctttttcatttgtgtacaggaatggtcacttcattaacttgtagacttgattcctgggcatttttacaaatggacttcaatgtgtacatttaatcctgaatctaaattacagatgtagaatttttggcataaaaggttcatgcatgaatgaatttatctcttgcaacccctacagttcaaataatattatgttagtcaattttttacatggacagactctctccttgaccaaattttggaaagtcttctctgagtcctctttttgatgaggcctcatcgttgacccttgtcctcaaacctagcttggttaaagcaagaattctgctaagtcagtgtgttaagaacaccttacccttgatatctgatccctctggcctgtcttcaacaagaatcctgttaatttggtttagcaagaatcccccctacctacccctgatgtctcctcttaatgattgttcgcccctgatccttgctcgtggctataaatctctacccttttccttggcactgaatccctacttgttcatgttgtattgggaatggaggctagttctttactaaggttgctttttctctattgccatagtttctcactgaagcctattttcatcgttttaactactgtccagctctggttctctttcacaatattaaaagctgaacttgtgaaaattgagaactaatgtttatgtatttccttctccctccctaacccatcaactattatctagccttggaaaagtgtgttttaggagtaagtcctcaacaaatactgctaattaactaattatccttcttttgttaacttattttaatactaggatgcattagtctaaaggtcataacagaagaaaacctgtaattaactacaaactaccaaaaaaccaagcatgactgagaaattcctgaagcaattatcacacaaaaaaaataacttaaatgtcactggagctattcctggtaactttgtcagtagtactcccagctgactaacaatcacagttcaatatgtactgctgaagttgtacctagtttataaagcagtagcttctatgagaaagaatacaagaaaactacggtgactatttctccagagaaaaactgtactgaggaaactatagcaaaaagaaaattgatgtcaacacaatagtatctcacttcaagaaatcaaaaacaaaagaacttagtaaaatttttctaattcaactttgtttttaaagggaaaagagaactaaagaaaaaaaagacagccatgattttttgtagcgtaggccacaacattgagctatgttcaaaggaaatagatgtctaaagcacacatttcttcctaaaagaatgaaaattggttctttgggaacaaaaatatcatattgattttatgtaaaggcaaacattcacatggtgcatctgtacataaaatatatctggagtattaaagtttcatggtggggatgattatgaaaaaatgactatataggctccatagggacatgatgataaaaaatagattaagtagattgaaaacactagtctaaagtgaagtgatgtgttttaatatcataatatgtgagaatataaaagtatttacgtatggattatttacaatggaaaaatgactattatagttcatatttcattttattaatgtaattgattagaataatggtatagaaatagcaaaagcagaatatttggttttaagaaaatatggtgatataagggaatgaatattaatttctagagtggaagtctgtagcgttctagaaattaccgtgttttataggctgtagtgtgaaaattatcattaaatacgcaaattgaaaagaatcactaatggactctatacaaataaagtgttaaaatgaatttattggatcaataggagcttcccagtaggaatgctgagaggtttaatagattagactccattttgtttagattaacagttaaaacaactttaaaaatttttattaaattatgtttttgcaaccattgaagtatagataaacaaaaaaagaaaaaaattaattatatgttaataactttttaaaattcatcagtacaaataaattatagaatcataaaggaaaatagaaatctcatgatgattaaaataacattcagtctggaaggtacaaaacttttaccttcatcattcgatatttaggttcaattatattcccatctatgctttagggactgaattggatggtggtaataaggtataatatatggtctgtgccaatcttatggatggcaagaaaagaacaaaattatggttttactgtgtgtatttatttatttatttatttcaataaatgccctttagtagatatttttacatctggagacattctcacatctggaagaggacactgcaacagtagcctattttaatcttgtcatgaaaatcttgggatacatcttttttgctcaactccctggtttttctgtcttatttttttcttcggggcatagtggacactggtgatgaatttggtgtcagatccagaacatgttgtctgtacccctcttacagcagtgattttcttccaccttgtaatataattatctgaagtccgcctcatcagaaagtacatagggaaactatcgtgactctatttctccaagtagaaactgtgctaagggaactaaagcaaaaaagaaaattcctacttcctttgctataatcctcttgagggcatttttatattccctgtgatatctcatatgtcttgtatatagtagttcagctatgagttgatgaacgaataatataaagaataaagcaacgataagaaataatgagcagagcatttattaataatttgatattgataacagaggaagttaaattattcaaagagctcaaccataaagcagatggcttcactttcaagctgggaatcaaaaaactttaagtgctagaatattcatgtcaagaggatcttccaagaataagccaggaatgcaattaggggctgactcatggatgacaatggtcgatgagtcacaaagaaattttgaaaaaacaatgatgtccctggggacacatagaaagaattggaactagactgtcaagatcatatatattaacaagctaatagaaggcgggaaattttggtctctatgaaaatgtgcacaaaagtcccagaacactatacttctgtgtttgaactgtgctactctaaattatataaaatatactctataatgtagtaaagaaagatttctttatgccaatgtctcacattttatagacattttacctgctactgtcaacttaagttactcaagtatagttctgttgatttatctcctaatgaacaaccgctaatgacttaccaattcctaaggaatatctcttaggatggactttctgagggcagggccctggatctcaagtaccaagtgaagttctagcatacaggaagtattaaatacaggctgagtatcccttatccaaaatgcttgagaccagaaatgtttccgatttggtattttttcggattttggaatatttgcagaatacatactggctgatcattcctaatcagaaaatccaaaatctgaaatgctctagtgaacattccatttgagcatcatataggtgcccccaaagtttcaaattttgaaacatttaagattttggattttctgattagggatgctcaacctgcacatttgtcttgaaaaataaataatgaataaacctccaacttttaaaatgaattcttgttcccaatgtctttgctaacatcggtctctcattctatctatgtccacaagttgaatttttaaaccatgcttcaaggatcaggtcaaactccactcctgtcataaagcttccttaagccttatagcaaaaattagtgcttcctctatgttcccgtaattatttatttctcagatgcacttaccatattccaccttgcattatagttgattgtgagtatatctttttacccaactagatattggcctttaaagacagacttatttaaagacagaccttgacttatttatcttcatagtgcctagaattcctaccctaatgtgttgcttcaggttattaaataaaattgaatgtgaaattatttaatcatattttttcaaggtcattttactaggctaaaatggagctaaggaaaatgtagctaatgtctgcaaatttctaattgttgaacttagtctgaatctcagaatagtggcattataagctttcaaattagagtaaatgaaaagtagattagaccaagcgcataagaacacagtatacagaacagctgtactgtgtcctcaacgggataaactaaatcataattacagatatgtttcatctttcttgcctttatactcttttgaagatgctctcaacttcagtgctttggggatttatttgtcactgtaagtctgaaattagtttgattagttttgctgatatctatcatttcaaaatgtctgaaatctgccttaaaaagtaagctggcacaaatcttggggcagtgcttattaaggttcccacatagaagtggctgagtttgtaaatgagtcatagaaattcagtatcaaaaagttaatttaaaacaaattattctcttggatataaggaggactgctttgtttattcttaaatttttctccttacttcttcatgctatttttctcttctcttctgattttccttatatgttctcagattttatcatccctatcttctgctcaatctgggtttgtttaaagtgtttttattcagctcgtactatgcgtatagcactttgctatgcatgaaaaacatgactgccaagagatttatttgaacttaataaattttatgaagctaatgctcagtgctgtaccaggaaccatgttattttctcagactataaagttagtaagacagaatttctacctctgaatagattatggtagatagctagagagaacaatctttgagcaatacttttttgtggttgtgatagggtaatgtatacagggccacgaaaactacatggagagagaagttagttgtccaagggaattttttaaaaagcctcagtattgataataagggaattcaaggaagaggggaaatgtagagaaaatgcgtatgtagggaatattacaaatctgtttcctggaaagcaggatgccttcctttagaattattagttaagattaaccactctttaaattgagagattatatccttccctgtttttcattatatggtcagctttcactggcctgagtccacattttaagctcaactatatacaaataatttttcagtatactgagagtaggattaatgaaaccagtctggagagcagtcacagaatgagaatagatctttcccatagtatcactatgtgactaactgattgtactgatgtgttacagaaaacactgtaaaaagttaaccagaggaaaactttgctttctactttatctgatctttaccccagtttctctacctgtcaaattcctatgcttgcctcaaatgtacatatttttaatctgaaatgtgaaaagtatttataactggtgtaatatcaatgttctattatacatccatgcattaatgtctttaattttaccatgaaattaaatgaagtacctcaataacagaacagtgaactttaaatgaagtagctcaataacagaacagtgaacctaactggccccattttagtcaatctaatgcattcctgcacaggtatttatcatgacatttactctacactcaacctacatgaagatcaacatagtcacttttacgagagtagatttgcatccatccaataatctttctcaccagtgtaattagaaaggatacagcttaacacatagcttttgagcagatttttaaaaatatcattatacgttaaatatagttgagagggtaaaatgaagaatgtacagttaatattttccttatacagacatggacgcagctcataatgttgaaggatacctctgttgctgatacatctctttatttgcaggaaaatgttgaaggaggagactgtagtcgttgcaaatccggcttcttcaatttgcaagaggataattggaaaggctgcgatgagtgtttctgttcaggggtttcaaacagatgtcagagttcctactggacctatggcaaagtaagcaagcaccatttggttctgtttgctgccccagcagccttctttgttgctttcatcgttgttcttttgtatgaacagtttctgatagtgaacttctacataaagttacaggaagaagtaatggaattttcttcaaatgctgttgtgtatttttgctcaaagcctttgaggttgtatttgtaatattgtgtagactggaatttcttagaataggtagacatagtctttttagtgtccatgattactctatgaaacaataatgcaattaaggtttcaactccaagggtgcatgatttaagagagaaaacactacattgtgatatgaattatattttccattactagtatgttcgtatgcaagttgagaaaaactctgtatcatctgtatacataatacatattatccaccaacgctttagttactatttgatgttgcctaggctctttcattattaaaaggggacattaaatataggcaataccttcattctgagttggtttgaaaaattattacttaaactatttaatagcaactgaaattttctttctttaacgtaaatgtgtttacctttctaacttcactgcctacactacccactgccttttcaaatctgtgcaaagagcatgttgtctccctatacagaaaagtgtcagaggaaaatgggaccttctgggaatttcacacagcctgtgtggctggacttaagagtgcagaatggtaggaaatgggctggagagagaaagaagtctagacgggggaatgagaatctagaacttatagggttgaatatactaagaatttgagatattttacttggagtgtcattgaagaaatttaagctaaagactgacattatcagagttgtgttttataaagactactatttagataaactatttcctaaacacttcttcctttcaactttaatcagtgaactaatcctgaacagagctataaaatattttctctgcctgcagtgcttttaagtcaagcctcatattatgaaatattatctatacgttatcaactgtattgctttcagagcagacttcaaagaatcaaccacagatggacatctagtctaacttcctcttttgtttataaagtcccaccccaccctccagactgccccactgatagatcaaagtttcatagccagccaaggggcagagctggtactcaagctttgatcatcagatgctagagacacagaatcccattcaactgtcttacaatgcctcaagggtgacgttagaaagggaagaaatgcaaggaatatattacttgttgtccagaaagtcaacaggttgtacctggtttctatttctcatttaactaagggaattgcagtgattccacagctttgggataagcagagtcaaatagtctatgaagaaattttaaaaaatatttcagccacatagagtcacccttagcattctgcttcccatcacccacaacatgaagcagctcatgcatgtctagtaggttcctggtagctggtaccctaagccctcagtaatcagtgttttgtcctgactaggtaggatgctttaaattagaggtgtagctgtaggcctgaccttggctgaagcataaagatgtaaaaacaaatcattatgcattcccagattcctcctttaaggttccttccatttctgggccagggatctaggctgtaggtccccacagcacttctgaccctatctgaaggaatacatacagtattgccaggtgttgtcatagcaccaaggctggtgggttcaaatatccttaagcctcaaagtagaaattttaaaaagtgggaggggtggaaatactgaatgaaacaccacctttcaggtacttgcatagtttctttctttttccctctgcattacaaatacatacgcaatactttttcaggttgttttttccaaaagcaacaataaactactagtggagtaaaaaatacggaactgaaagtccaactgtttgattaagtgtatgttataaccattgtatgactttgagtgaatttctatttttaagaaagtggtatttggaaccacaattttttaaaaagcataggttcaatgaaaacagattattatagaataccttggaaactcctagaaacatcaaggaaaaaaaataaacaatggaagcctatgtgagtacatataatatgtctaatgatattcataatgctcaggtttttttctaaatgtttgtggtttggttttttttgtttttaatttccaaaagtggacacgaccaggaacatgaaagagaaaagcagctgatagatattttttaaaaattaatgatgactgtgtgttttctctaagatacaagatatgagtggctggtatctgactgaccttcctggccgcattcgagtggctccccagcaggacgacttggactcacctcagcagatcagcatcagtaacgcggaggcccggcaagccctgccgcacagctactactggagcgcgccggctccctatctgggaaacaaagtaagtccacgcttgcttcccgctattctgctttaactgactgatcgtgagaatgggttttagttggtaattcttttaaagaaagacaaaatcaaatacacactgaattggattgccagaaccagctaaatcacattgagttgggcgtttcttccatgttgcacaagaccttaaagagccacggcatccttaatatgcaactttgtatagctgatgttctatgtaaactttttgaatgggcaaataaattaatgaagccgctagtgtattttcgtaaagcaaattataggtattggaagaaactgtgttgtgtttatgtgaaaagagctgttttctggagttgtctgtggtgggatacttactaaagtttttctcatcggtttctatttcatttcaaaactgatactcaggagatttacttttccttctacctgatatgaatgttaattggaaaagaaatgtattacataactaattaaatgcttgccatgaggcttatgtaaacaacatatttgctggagctcaggcagaaactaccctaaaagtgccagattggaagcacgtttgttttaaagcccacacatatgtaaaaacatacacagataaacaaatgtagcagcctcagaaatacaggcttatttttttctgttgtggattacttctatctagatagatatcctggggtttagaattttattttatcttgcctaatactttgttggaaacaaaatttggtgacttatttataaacgtgaatacttgcttgttctgtgaaagttaataccttctcagctgatagttaaaatacctgatcacaccagaaggtgtgatgggaaaatcccttcctaaattaatgttgtttaagcctagtttacacctaacaaaatatagcattatttatgaagaaatcataattgattaagcaaataaaagtatgtttatagtcagtggttttcttgcatgacatgtgagtattgaaatagaaaaacttagtatctcatatgctactcagtgaatgggaactggtggtgttggctggttgaaacacttttaacttatggccagtttcttatatttaacagaactctgaatgctattacaaaaaatgtgtaaatgtctaaaagacattttcaatgaacatgtattttaagagacagagtatgttgcataaaattcaatagctgtaaaataaaaatcgaattaaacttttatttgcaaggccctttacagcaagaagtcattttatcctattctatttaggaaactctggtattcccaaaagaacaaaacagcacataagacttgaatttctactgcttaaaattgccaaaaaaatataaaaatatactgtcaatttaaaaaaaaaacaactgagagctccaagaagagccttaggtcaaaattggatgaatttcagaggccttatttcttatatgatggcaacacttaattaaagtagcttataatagaaatattctttaccagattttccatcctttcttctttggtcatatgcatttttttttctgttggctgacaatcaaactgacagaaggaaagcaagcaaatggaatattcggtagaatcagaacaaagaatttggacatcccattagtagttgttggttcccgaagataacttcccttatcctggctgaaatatttttcttataacccacagtgaagctcttcatattcccctaccgatcattttcacatcaaaacactgttcttgcctgtactgccgtttccattcagtgaacaaaataacattaacagggtgtgcaaattgtttgaatacggaggacatttttaatgtaacgtggaagcccttggtggtttactgtcaggcatctcagtatgaatgaaacaatttgccttaataactgaaccatgtaaatttttgatactacaataatactgcaagctctcagaaattaccacagtacatcttaactgtcatgtcacatcacgtaaattatagtcatgatgacatgcttagcttggttgatttaatatcttgctaaggaagtggaaaattgtagggccttgttggtaaattcaataaagccacttttctaaatagttgaggctaaattctttaccagtaattgctgttcgaatcagaaccattgccagaatctgacagaaatagcgtatcaagatacaagtgcatctgcttaaatattgaattttatttacatccatgaccaggagtctatggtacataatccttcctctgcttttttagtgttatttcctaattggaaaaaattatgagatgctattagcttttcctaaatatttatatacagactttcaaacattttccaagttgcttggttataaggcttcttctaacagaagggcgatatgctgtgcatgttctcttataatggagatgccacatgctgttattctttttttaggagcctaatcccaaataataaaagtggctcacatgggacacatttttgctaacatggatgtctgcctggttgtaataaaactcaagaatactagccaatttagcaaaggagtgctttgtatcctgtgaaacatttttcacatttttactgttttggaataatgaagtataagtaagtgattataagtgtatgtgtggataatggatgaggcctaggaaaacttagcacgtttttatactttctatttttgaaattcccacagtctcagctaggagttgttcctccaattttttcccctatgtaccagtgaatatttggcacaactggcagaatcaagtgttaattttcccgcctcgttcttgatagtcaaagagaattaaatcaggcacccacagggctatcctaggtgcatttcattttcaaaatgcttggcaaatgttaatgcttggttttagggcatttgtttaagcaactaggcagcagtggaaagagctagaggacaaagaatcctgctggtttgctgcaggctacagctattcagaaacagtttgggaatttcagagttgggataatttactgccctagtaaactaagtgctactggaacattgcaacagtcatttgcttaaggttgccctagtggtctgaaatagttgaggcagcttccaaaagcaattctctttgcatctgtaaagttctgggagaagctagcttggcttgtctgctgttcctgcattaccattaaggtttgaaattctctctctgaatattattaaattaatcttatgtgatttgttctttaccaaaacctgcttattttctacagcattatgctatctttctgtttctagcttagagaagcctttaaatttgttcatatagttgccaagaatacctatagtctagtttaagatgcacattaggagagtctgctgacataatagcatctggcttctaaaagtaatctctggtaaactcttttgttttgttgttcttgcttgactttccattctacttcacggatctcaaattaaagctatagatttgaagaaggaaactgatatttgagatttgtaggacagggtagatctcatcatataaaagaagctcaacaaataccttgtaattgatgctacatgcttaacacaaacaaacaaaactctaagaaattgttttttttaggttgctcagaaatgcccattgagttggatttgtgggagttgaaagatgaattctgtcttgctttacaaaataattaaaaactcgctaacaaatatgttccactctcctttgagcagcatattttgtgacttctttgctccatagtcctcaaaattattcagaagtggagttcaaacccctcctcgccatccataacttcctcctatttaaatcttggattaaatgggttagttaagaagatcattatgcaagtgaagaatggtatggctataaaagtaaataggataaatcaactgtggttgattttttattccataaatcagatcccatcaagactaacttggcaatggagtagaaccaggaagaaggtttgctgcctagaataaactgaatgaatttgtaaaccaaaaataaaattctaagacccctgactgaacggacccccttcttggccaagggaatcccaaagaaacctaaagaaacctgaacatcatgggaagggacgattacacattcctcattataccctgctccctttggagtttagacaccacagaccaacagtaacattaaaacagagattttaaaactgactagacagacactttacagcaacaagataccaaattctaacctcactctggtatagcataacataacagatagcaggccctaaaagaaatcaaagtattttataccaaaatatatttatttgacatattctgaaatgaccttgcaaagctgtctcttggggaaatttgcattctatagagaatctccttcccttactaagtcttttctggagagtcagataccttttaaggtctggcaagagacattcaccatcagcctgctactttaccctactaccttgaggcttcatctacatgacaagaaccgtggcttccacaacccactctcttaactcaagctgacttcaactgttcaggcagaattttactctttcgaccaattgccagtcagaaaatctttgaatccatcaatgacttggaagcccccacctcgcttcaagatgtcctacttttctgggccgaaccaatgtgtaacttagtactggtgtatgtctttgcctgcaactttcgtctccctaaaatatataacgccaagctgtaacccagtcatctttggcacatattctcaggacctcctaaggctgtgtcacaggccatggtccttaaccttgccaaataaacctctaaattgattgagacctgtttctgatactttttggtttacaaattgttaaggataaatgagaaaataagtattaaaaaacaaaaaaaatcaaggactcatttatttcccatagctatgatagaatctgctgtgtaaaagtaacacaaatgcaggagctcaaggtcaaacatagaaacctctgtcttacatatccgtcataacattctcttgacgtttttcctaattaaatttataaagcattagttctaatgttaaaaattgttatataaaaagcattttaatattcacatgcatctgtctacagtgttttacattttgtttataattcgtcaactgaatgaatactagataggagaatgttccatttaataaaaactcttgagaaaaataaaatagcttacttaacagtaatttcaatgtgagttggtttgtgatgtggttggcaacaaaacttacgtaatctagggctacattggcaggaatttactggtcaggacaaaggaggtagtgtttatacagattctgcacaaaacgcatgtcacctaatattattattaaatattattaaatattattaatatttagcttacttgtgaatttctctttttatctttgttaatatacatgacccaagtcatcagctaataaaccaagaaatccaaattaggaagaaatagagccaggattacaatccagatgtgtctatagcccattccagttaagcattttttcaatcagttaagtttattagttcttgcaaggcattgatctttggaatagagatgctgaagcagcttattcaaaagaaagggaacgacaaagatatgaatttataaaaatacaaatgaatgagatgaataacaaatgtcaatagaggggacacaaatccaacaagttttttaaatggtttcaaagctctggcaagattaatcaagcaaaacgtgggtaaaacacaaataaacaattttagaaatgtaaaaatgggcataactgcaattacttcaaaaataaacaaataaggaagtatcagaaaataaacaaattaagagtattatgaaaatttacacacaataagaatacaatttagaaaaaggaatatccttctaggaaaatgcaacttaaaaaaactgactcaaagaaaaaaaatctataatgtcagataaacattaaagtaattgaatcagcagtcaaataaaccttccaatgaagttaactccaagcctattgatttgcaagtaatatcaatcaaaattcaaaaatttttaaaaatgcaaaattatacaaactttccagagaatagaacaactgggacgtactcctcacataattttatgtggcttgatataaaatcttgacaagaggactatgaagaagaaaacccctacccaaagtcactcatgaacgtagatgaaaatatcctaaataaaatattaacaacccaaatccatcagtttataaaaatagtcaggctaaattggccaagtggattttatcatccgtgtttgaggttactttaaaattagaaaaccagtttaagtaattgaccatattgactgattaaaagagaaaaaaatcaattatctcaatagacacagaaaaagaaatgggtaaaattaaacattcttcatgtctgaaaaattttgaaaactagaattggaaaagcactttaactgatgaaggctatctacataaaaatcaatagcaaatatcttatttaatataaaatgttcaaagtattgtttaagatcacaaacatgaaacaattctcactataacgactcccacttaacattgtgctagaagatgtggacagtgcagtagataggaaataaaatatatagggatcagaaaggaagaaataaaactcacttatagatgatatacttatctgcttgtaaaatcaagagaatctacagacaaattcttaatcagtgagtcaataaggagactatatgcaaaattaatatacaaaagtcaatcatgtttctttatatcaacaacacttttcaaaaaaaatttttaagaggccatgtataatagcaatacatataaatagtaccaaggattaaatttgtagggaaaagccaatggccaagaataatcaaaagaaattatagatggggtgcgatggctcacatatgtaatcccagcactttgggaggccaaggtaggtggatcacctgaggtcagaagttcgagaccaccctggccaacatggcaaaaccctgtctctactaaaaatacaaaaattagccaggtgtggtgacaaacgcctgcaatcccagctactcgggaggctgatgcaagagaattgcttggacccaggaggcagaggctgcagtgagccaagattgggtcactgcactccagcctggggcatagagcgagaccctctccaaaaatatatatatacacgtgtatatgtgtacacgtatatatatgtgtatatatatacgtgtacacatatacacgtgtatatatatatacgtgtacacatatacatgtgtatatatacatgtacacatatacatgtgtatatatatacgtgtacacatatacatgtgtatatatatacgtgtacacatatacatgtgtatatatatacgtgtacacatatacatgtgtgtatatatatacgtgtacacatatacatatacacgtatatgtgtacacatatacatatacacgtgtatgtgtacacatatacatgtgtatatacatgtacacatatacatatacgtgtatatgtgtacacatatacatatatgtatatatatacatgtacacatatacatgtatatatatgtgtatgtacacatatatatgtgtgtgtatatgcatatatgtatatatgtgagtgtgtgtatatatatatatttagaaattctaaaggaaagaagtggggctttttggaaagggattaggtcatgagggttctaatctccatgaatggaattaatgcccttatgaaaatcttatctgatataaagagttaggacttactttaaaagatataatgactaaggcaaaatgctatcagtgtgaaaataaaccaatagacctgaaaaaatagcccatagatatcacatacatagatgaatacttaacttttattgaaataggcattgcagatcaatgacaatgggatagaccctatacagtaaatggtctggtaccactgattatctagagaaaaaaaataaaatttctgcatccttactccacattatacataaaaataaactccccttgaaacaaatcataaattttcaaaaattatgctaaagacaaacctttataaagacaacacattgagatttctgctcctgaccataattgaataatagtatctagatttccttatctaccttaaacaacaacaaagcctgagggggaaaaaatgtggaacaacagtttttagacactcttccacagatagcataaaactgtgatctctgaaaaagagaaacaaatggggtgaggtttacaattgccccaagattattgcctggggacagtctccagggtgaagtgcattggtatattgagaaaaaagccaaacacagcctggccttgccaaattgaaagacagaggttagggttcatggaggccaaggcagctagcatttgtgaggcagcatacaagggaagaggaacctgacctgcacagagagagagacgaggagagagctgcagctatctgcaaagagaaaccggagtactgagttgcaaatatgtgaaagaaaactacctaaggctaatgaaagaatcactaaaaagtagtaagagaaacaattcctgagctgatacagggctgctaatagtttattttcctaacacccaaagtggaatgtcttcataagagggactaaattagctccaaactacaagctactctaggttcaccccaacaaatcttgaaaacagccttaaaagaagtcaacttattccaaataaattaactgcatgccagaacaaagtccaatactatttaattacaacaaaatccagcactcaacaatgtaaaattcatgatgtttggcatcaaatcaaaaactaccaggtacataaacaagcagagcatataagccactaccaggaggaaaatcaatcaatggaaacagaaccccaaatggcaagaaaatcatgtcaagatatatcagaatcaaattattaaaaagacagataactggaaaattgtaaaagcaatcagaaaaaaactaacatggccaggcgcggtggctcatgcctgtaatcccagcactttgggaggccaaggcaggtggatcacgaggtcaggagttcaagaccagcctggccaatatggtgaaaccccatctctactaaaaatacaaaaattagctgggcatggtggtgcacacctgtagtcccagctgctcaggaggctgaggcaggagaatcacttgaacctgggaggcgatggtttcagtgagccgagatcataccactgcactccagcctaagcaacagagcgagagtctgtctcaaaaaaaaaaaaaaaaaaaaaagaaaagaaaagaaaacacaacaggtgcagaggaacaaagataaggaagaatagtttcttgtcagaccctatatgctatggtccaaatgttggtgtccccctaaaacttatatgctggaacctaatgcctaatgtgatagtatttagaggtggggcttttgggggagtgattaagtcatgagggctctaatctccatgaatgggattaacatccttacaaaagaggttgaggatgctgccttgccctttcctttacgtgaaggggcagcaaggaggtaccaccttggaagcagagagcaagccctcaccacacatcaaatctgctgatgcctggatcttggatttcctagtctccagcactgtgagcagtatatttttaatgcttaaaaactacctagtccctgttattttgttgtagcagcctgaatgcatcagtacactttgcaagccagaatacaatacagagatatgttaaagtattaggaaaaaacaacgcaagcaatcaaatgaacaaaacaaatactatcagtctataattctttaccaggcaaaaatgtcttccaaaactgaagaaaaaacaaagattgtttcagagaaatagaagttgaaagaatgtgtcacagactgatgtacacaagaagaaatgtagaaagttcttcaggcaaaagaaaaatgttaccagatggaaatttactcctacaaatagaaattaagtgtatcaaacaggtgaatagcaatgctttgtcactagtgctagctgtcacaagacctctagccagtcatgttttcagctgtagggcctaacaccatggttaaggaatggttacctaaatacacaaacttaaagtagaacttcaaatacttcctgtataaaattttccctctgaagttttaaaaagaaagactgggttgtaagaagagtataaaaaaggcttgcttctccagctctcatttctcatttcaaacttaaagaaagaaaaccagcaccaatttgaaagtgtttcaataaactctcaatgtaaaacttcacgttgttttctgtagcttttcagtaacttcttacactcatgttctatgtgcggctcagtggggaactatctgtatccagtggattgttggttctgacacactagcctacgtgcatatggggcaacccccaacatgctggcccctgccacttgcaatagatcagacccaccccttgtggttgagtgaggcagtattatgtcaattctaaacctggcattttgtttactgttgttgagtgttgttggtagtgggagaagaaaataggtcacagacagtgtgaagacacaaggagaagacagccatctacaagctaaggagagagggctgcaacagcttaattccttgtagtgttcataaagaaccaatcctgctgacagcttgatctcacatagcaaaataatacatgactttttttcctccttgatttccatgagaattgggtgaaagctattactcatataagcggatgacctgattctctcatttttgtggttacctttgattagtgttttggtctttatgcgtttcacagacctgattcaaatgctggatctctgctttattagctttgtgatcttggacatatcccttaatctagttgagccagattctcattatctgcaaaatgaggcttctagcacccctcagaattgtacaaagctctcgaaaatgtccttagcacacagaagctgtccgataaatgccaattgctttatgaatttctgtagttgtatgctgcagtaatttattttggagatcttccttatatcagtaaaagacgtttgttaaaaaacactttgtcacctgtctgacatagtatctggtggtagtaaggataagacatcattaaaaataaaaattgacaatcagagagagttaattttagcaagtacgtagattatatgcctttaatggcagctttgcagcaaagtgcaaaacataaataaatcagttaaccagatttgtgaaatacccgcagagtgttttagactttattttgaaggtgccaaattagagctaacatgcatcgcttcatgtcttcccaagaaaattacatgacaaatatctatctctgcttcactgacaacctggcagtgaaagggatttgaggtttgtgcccatcagtaactaattagagaagtaaatgttataactagtcagtattctgtggctacaatgtggcaagttaaaataatatccttaaggtgggcgctaacgcaatatgactggtatccttatgaaaaaaaaaaaaaaggacaatttggagataaacacaccgacagggtaaacaccatgtgaacatgatgatggccattcacaagcaaaggagagaggcctggaacagattcctcttagccctcaaagggaactaaccctgccgataccttgatttcagacttgtagcctctagaactgtgaaacaatacatttctgttgtataagccacccagtctatggtattttattatggcagccctagcaaaccaatacaaatcataaaacatcaattatttttaaaatctcataattttcattcttgttatatatatataaaacaaataaaaggtgactctctctaatgtataaagaagttaaagaaattgataacagaaaggccagcagtccaacagaaatgaatgagcagtttatagagaaggaaatttaaatggctcttaaatgtatgaaacggtactcaacccgactcatagtatgctaactacactgagaaatcattgtcttctaacatataggaaagtcaaccaaatgaataacacatgccattcctgtggcttcttcaggaacaaaggtcctcctaaattggtagtgtgaatatacattgatgcaatccaaaaaaaaaatccaaagttatagctgggcagggtggctcatgcctgtaatcccagcactttgggaggctgaggcagatggatcacgacgtcaggagatggagaccatcctggttaacatggtgaaaccccgtctctactaaaaaaaatacaaaaaattagctggacctagtggcacacgcctgtagtcccagctacttgagaggctgaggcaggagaatcgcttgaatccaggaggcagaggttgcagtgagcagagatcatgccactacactccagcctgggtgacagagcaagggattccatctcaaaaaaaaaagaaaaaagaaaaaaaaatccaaagttataaatgcacagtcttacatacttctcttctgggaatttattctgtaagtatatatatatatatacacacacacacacacacacacacacacacacacacacacgtgtgtgaaatgacatatatgcaaagtgattcattccagaaatgtttgtaattgtcaccacaaagctgccaatcactgagagactgattaaatgagttttggtacactcgtgccatcaaacactataaaattattaaaaaaggaaggaagatttttgtataataatatggaatgatccaaggtgtattttaaataaattaaacttaggaggccaggtgcactggctcacgcctgtaatcccaacacttttggtggttgagacaggcagatcactggagaccaggagttcaagaccagcctggccaacatggtgaaaccccactctactaaaaatacaaaaattagcgggtgtggtggtgtgtgcatgtagtccccactaccagggaggctgaggcatgagaatcacctgaactccggaggcggagattgcagtgagctgaaattgtgccactgcactccagcctgggtgacagactgagactccatctcaaaaaaaaaagaaaggaaaagaaaaaaaggaagggaagggaagggaaaggaaaggaaaggaggaaggaagggagggagggagggaggaaggaaggaaggaaggaaggaaggaaggaaggaaggaaggaaggaaggaaggaaggaaattaaacctaggaacaaagtagtttatctatctaatctatatgtatgactactatttgtcttttaaagtggagaaacgaatatgtccttgtaattataaggtgacttagctatttagagtcacatctagcatttgcatcaaggtgagtttgtctcaaaagctctgttctagtgccccactcaagaacagatattgtcaaatttgtaaaagatattttaactggaatagacttgatttttattgctgatttaatctattacaaactattgcttttctattctaagctgttgtaaaaattattgctttaatatgatcacttaataagcattaaatgccccaatcctatctgctaaaaattgtttggcatgtttaattgatcacaaggatttgaatagcactcttatcttttcaagtatcttcaagaaattcttattttcagcagggcatgttgaggaaacataaagcttacattttttattcctgatgtcttctcatcacttccaacagtagccactgagtcaaagcagttgctctctttccttactttttctaaagctctccctctatattagctgtgtctgagattgcaggcagttaaaatccaacatttggcacactgaaaaaggggctatgtgatagggcctccaactgaaatgtgatgaattattaaacaggtagtttgttgggtgattgaaaattacctgtgaaagagtgcttatctccttgaggcacatcgaaagctgacggaattgagccaattagactgactgtctcttcaatgagttgtgacctatcaatggtaatagcttattatgatgataaatgaacccatctctcaaactgaagcctgagtacacacttcagcagttgccttgaatcatgaggccattgcctctcaacttcagatcgacagcagtgacagccacaggagcagagagcatgcatgactagacacagatgattgttttactcagatgaatatatttacagctatttccaaagaaacgggcccttcttttgcattgtgtattcgtatctgaaatagttaccatatgacgtttccttcattaggaagagaacccctccctggctgtagcattctgaaataactggattttgaaggtcttttttttttcttcactttttgtttattgtttacaatgttttaatttctcattcttgtgagtaataactcaactcctggttaagtaaaatttcagaataaaaatattgttttatagtaaagatgcttgtaatatcaaaacaagtatgtttttaaaaaattaatttcatcctattacatttcacattttatatttgatgtgggttggaggagccccttagagattcttttttctttgtagagaagttttgtagagatcaatagtgtaagaatcatacaagtgtaaatagttttgtttccttttaatttttcaaaatatttgaaaattctttaagtagttactgaaatttggtaagttccatgtgctgctatattgatacattttgttttagaagaattaggagcaaaagggttatttttataatgaaatacaatcttccagttcctaataagtattagacacctgttagctgccaacttcccaaaaatacccctgagaaaaaaaaaaacctgttggtcaagaaagttcacgaagttattacagtaaacaagaacatcaccttgatattcttagtaatgtctcagaaggtgagggtcaggggaagatatttacaggctttagggaaaaggctggttgatttcaaggcaaatcttgagtgagagggaactggttgggattctgcagggtttattatataatagttttggatttgtcaccagagtgaacaaacattgaagaacatgttatgagtctataaggaagttagcttagatggatcacagagcagacaaggttttcttggagattgctcacagcattcttaaaatagggggtggacatttttcttactcccagcattatttagcacaggaaaggaaattgtgttagcgttagaagaaattgtgtttgctttagttcttacagacaatatatttacttaatcttctgtgacactgtttcttaatgtataaaatgaaaataatatgaatacctactttatagtgttattttgagggttaaatgagttaacacatatgcagtactcaagatggtgtctgaaaatgataagcatttggtattagctattattattaactccaactgggcttaatttgaggtcaggcattattttgttgaaattttagaaagactcccctcacacataaacagacagaaagagagagaggaagaaagaagaaaagagagagatagagagaggcagaaagagaaaaagaaagaaagagagaaagaaaaggaagagaaagaaagaaagagaaagaaagagaaagaaaggaggaaggaaagaagagagggagaaagaatggaagaaagaaagaaagaagaaagaaagaaggaaggaagagagggagaaagaaagagaaagagaaggaaagaaagaaaaaggaaggaaggaaggaaaagggagggagggagggaaggaaggagggagggaggaaggaaggaagaggaagcagggagggcaaggaaaggaaaacaatggaaagaataaagaaataaatgcagcaggaaaggaaaaagaataggaagaatttgctcatatctgtctaatttttagggtattttgatatacaaagtaactgactgtcaggacctgtcttagagatgatctggtaggacagtaaatggcttttctttccagttttcatctgggactgggtttgaagtgatcatcagcctcagtgttctggaaataagtcatttataatgaaatggaactggaaataacccacagacaaaaagctttgcaagccattgaagttcccctaggccatttactgccttaagctcgtttttactcatactgcaggaaaaaaaagagtgagtagggaggtggtgttcttatatcacataattttaaattaagatgtgatggttttatataaaagcaaaaatgctttattttgctttttttgttcaagacaagtacagggatgaaatgtaaatatgttaatatctaatcttaagtctgctcttgatccgaaactcttttgaaactttacctagaaaatgatagagcaatttaatgtgtctcacaatctagcagagatttggagggtgatggatagaataagggcttaacacaagaaataatttctgttgtacaaagctcatgagcttcatgcatggtgaaagatatttaggctaaagaaaatgttaactatgcagggaatgaaactcgtgacagcttgatcccataaaactcagcaaggatgaggtttgactctgcatccctgatttatatagtacagtatgtttatttaaaggagataagccaggttaaggggttcagcaaaactgttaaattaactcctttaaaaatctagttattgctatgaaagtctctcaagtgcggtgctcaggcttttttgcatcagtcatctggagtctttatttaaaatgtttattattggccgggcgcggtggctcacgcctgtaatcccagcactttgggaggctgaggcgggcggataacgaggtcaggagatcgagaccatcctggctaacacgatgaaatcccatctctactaaatatacataaaaattagccaggcagggtagcgggcacctgtaatcccagctactcgggaggctgaggcaggagaatgacgtgaagccgggaggtggagcttgcagtgagccgtgatcgcgccactgcactccagcccgggcgacagagcgagactccatctcaaaaaaaaaaaaaaaaaaaaaatttttactattgacccttactctggattcacttatccagaagatctggggaaatctacgtttttaatcagctccccaagtgattatttacccataagaatttggggggcactcttttatgactacttttttaaattactgatgattaattatctgcagatagttccctagactttgactttccaaggctttaaaaaaacaaacaaacaaaaaaacctgcagtatgcttttagtctgaattcagggattgactttcttatccaatagtctatcctgtacaagggaaccctaaaataacctcgttagccaccaccaaagactatgtaaatacaaatttatttatcaatctcattagaaaccgaaccacgcatgtgcacgcacacacacacacacacaccacaccaaccacacatttacattggaataaaatgaatcttagaaagcagctatttttaaagaaacaggaagtctaacatgtactgccattaatttggaatgggagagaaaggagacttggcagaaccagaatattgcgtgaggattgaagatagcttcagattctagaagagtttctagctctttctgaatatgtgttaacagtttcgctgtttgagctctgctacccactagccagttataaacacaggtaagacccttaacttcacagggcctgttgggaagaggttataattttttagcaacagaacctgtttttcaaacaaaatcctaattagaacacccaaaaacaaacaaaataaaggattcaaatgggtgacatggccagtcctggttacagtatgagacagatgccggttacggtgggcaacagaacagatgctggctacagtggtcgacagagttcattttagttcaagcagaaggtagggctggtgcttgttacagtggccagtaggcctggtttctggttatagcacatggcagagttaggagctctacctacattatgtccccacggcctcatctgtggtttccccataagaaaactaccttttgggaaaacatgatacaaacagatcaggtgaattagaaggtctcctgcagatttaaaattttatgaatataatgccaaatataatcttacactcagttgactactaataataaataaccctacaaaatatggtaaagtgactccatgacaacaattgaaaagaaaataattgcactcagctgagctattgtccatatctagatgcactgatgatacacaaacccagccacagaaaatgtggcatgtgtcagagcaaagcaactagaatgattcaagacactgaacagccagtgttcaagctacgtaatttcttacctatattacaggaaaaaaccatctaactctttttctacctccaacctccctcctctgaaatgttattcacatacctggtggagaagaatctttataaaactcaaatttgattaccttagtcctctgcttaaaatttcagtgtctttcaatgaaagctcagagaccattctggacttataactcccttgcagctcagaagggacccgtggtccagtaattaaaatgcccgtggtaagtgttcaatgctctctcatgcttttcttctcacaatgtcccttcagtacgggatttctttctaccattttcctgagtaattaccttctagtcatcattcaaaaagcatttaagcattgaattctataggaaatgtttctaatcaccctatcccccagctctggctgagttaggccttctctgcacaattcccatgaaagcacctaccacccagcaggcagaaatatccctctttgactttctcactaaactgcaaattcctggtgagtgacaactggattctattcttcttctaacctctagaacctagcagattgctttggagaccttaggaacttaataattctttgttgagtgaataaagggatgctttttgtggacagcagttatttctgtttacacaaaagataagagaaaatacaggtaaaattatcctaaattttaaaaaatttgaaacttacaaaaagtgttggatttaagttcctttgtctgtctggatttccgaaatatttttaaaagattttttctgggatcatttaaggcctcatctgttcagaaccaaggggaggaccgaaatagtatgccaaattcttttccagccctcaaattttatgagcctgagttgcattgtgtgggtaaaagtcttgtgctctgtggatcaggaggaagttagatgttttggatatttacatagaaacaaagaatttgaagactggaaagaacttgagcaggactctattaaatgtgttttgtgtgagatggttttcaccctgtgttcttgtggttcctccatgctaggggcaggaggtaggatggagcagatagggagtctcttttcctcttaaaccggatgttttttttaaaatcagttttatatgttgagagtccatggaatggaatgtggaaactgagaccctgaaagattaagtcacttgaacaaagatatacagcttctccagagaccaggcagacactaggtttatgatttcctgacttccactgcagatctcttaccatttttctatgagagtcataaaaaaagaatcagctatttactttctagtcaaggtgggttaaaatcaagccacttgttttcaaacatcgatttcgggttcatgccatcaaattaaaaaattcacttaactgagtttaatttgctttcacttaggaagcagctgcctttcaagataataaaataaacagatacaataatatttggtcagctgtggcttttaatttaaatgtttgatttaatgttgtttagtttgctggattccaaaatattctctgcaagagaagcatacacattctaaagcatttcaaatgtttattatgatgtcctagaggtggctgtctttctgttgctgtgcataccctgagcagacttgacattgctttggaagcacatattttctgatagacatattactctcataatctaaaatttttcagaagtgacaaaagtggggttgaccattttcttcttcgctgtctccatgattttgctttttccaagatgtcatgtagttagaatcatacaatgtgttgtcttttcaggttggcttttttcacttagcaatatgcctgtaaggttccgccatgtcttttcttgccttgataattcatttctttttagctctgaatactattttgttgtctggatataaccacagttgaattatccatttacctcctgaaaaacatcctgcttgctaccatgttctggcaatatgaatcaagctgctataaacacttatgtgataagtcttgtgtggatataaatattcaacttatttgggtaaataccaaagagtgcaattactggatcatatggtcagagcatgctagttttgtaataaactgccaaactatcttccaatatggttgtataattttgcattctcaccagcaatgaacaagagttcctgtttctccacattctcaccagcatttcatattgtcaatgttttagacatcagctattctaatagatatgtagtggtatatcgttgttttaatttgaaattctctaatgatgtaagatgatgagcatgttttcatgtgcttattttccatctgtatataagctttgctgaggtatctgtttagattttttccaatttttaaatttattttcttgttgttgagatttaagagttctttgtatgttttggaccatatcaggtatatcttttgcaaatattttcttgcaaatggtagtttctcttattctcttcacagtgtctttcacagagaagatgatttttaattttaataaaatctaaaatgaatttttatttcatggatcttgactttagtgttatatataaagagttactgcaaactcagggttatttagattttcttctatgttatcttccaagagtcatagttttgcattttatatgatccattttgaggtctatgatccattttgtgttaatttttgtgagggtctatatctgcatttatgtattttttcacaagttatctcagtcaattttctgttgctataacagaatacctgagactaggtaatttataaaggagagagttctatttagcttgtgatcctgggagcttgactaggagatccaagttaggacaggtgcatttggtcaagttctggtgagagtcttgtgctgcatcttaacatggtggagaagtggaagaaaaagtgggcatgtgcaaaatgaccaaacacaagagggagccttcctttttaacaacccaccctcgaggtagctaatccagtcctacaagagcaagaactcactctaagaaaggtattaattcctttttaaaaacctaatcacctctccaaggcaccacctctcaacatcaccccattaggaaccaaacctcactatggattttgattgtgacaaaccatattctaaccataacacaaatgatgtccagtttttctagtgccatttgttgaaaacactttcctttcttcattgaattccctttgctcctttgtgaaagatcagatggccatattcatgcgggtgtatttctgggctggctattctgttccattgatctaagtgacttttttctgaccagtactatattgtcttgataactatagttttatactaagtcttgaagttgggtagtgttagctttacaagtttgttcaatattatttaatgatgtgttggctgttcttggtctttcctctccatataaattttagaatcagtgtgttgatatccaaaaaataacttgctgggattttgactgggattaccttgaatctacacaaattgggaagaactgacatcctaccttgagtcttcctatttatggacatggaatacctctccatttatttaatttttctttgatttctttcactggagttttatagttttcctcatatagattttgtacataatttgttagatttatattgaagtgttttgtggagcatgctagtataaatggtcttgtgtttttaacttcacattccaattttctttgctaatatataggaaagcaattgacttttataccacctttttcttcagacagatggaatcaagtgacttagaaattggctttgttgctctgcctgagtatcttgaaaattctcatcttccttctgagaaccataacctacatatctcaaggttatagataaaatgctacctacaaaatccttgtaatgcttacagtctaaaagactaaataaggcctcaagagattattcaaaatcagagttgttgattcccagtagagtcataaagggctatgttatgttagctgcaattctaatcctatatcaaagcttctgacttccactcccccatatctaaggaggtttccctcaacagttgaaaaataactgcagatactgctttgccatcccatgccacaaaaatgcatttctgaaggatgctgcagagagatatatatttcttaagcccagctcatatctatttctcaaggctgtgtgatatcatagaatgaatgatggagtcaaataaataaatatttatttatttatttatcagtcaaataaatctgatttaattttttagaacttaacatttagtagctgtgagatcttacagagatttcttcaccttgtatcctttgtcactttatctataaaatggagagtgtaaatactacttcttagagttatcatgattctttaatctaataactcatgagacactggatatgtaataggaactgaataattcttaacccccttgctttcccttgacatttccagaaaataaaacttgattgagtatctaagattatataacagatcccactagactaagtgaatctgagggaagatgtatttgtcacttttcttctcttctttggtttttaaaaagtatcattagaaatagaatcagtaactataaacaaatttctgtgtactgatccagtattaacagagaaaataatggttgactgtgccttactgtgcaaggcaaaaatgagctcaagatattatcaaagtcatgaatcagaaagagaatttcgttttacaaatgatggatagccacaaaacaactaggacatacaatctctgattacacaactgcagtctatagctacattctgcagattaaacaccacagtagagatggaaactttattgtttatattttatgaaaactgttctcttttgtttttatgtcagtttgagagtagaagaatatccttgagggcaaaacatgcctttcatacattagagctgcctagagcatagtctggcacattatataaatattaaataattcctataattaaactgatgttctttggaatgaggatggagacacatagttatctgaattgccttaagctagttttgcaataagtagatttttactattctagaatatgtaatgaatgaatcatgctatgttacaagtaagtattaattaatggttgaagtacaaaaacatcttccttgaattatatgataatctacatcacagtgaaaggaatttatcatgacaaatgctagtcaatgttgaatcacagagggctatatgagatccattttcattcttaaagaaaattattatatctttttattaatatggtggatatttactcagtaaataataaagaaaactaatatgaagtgcaatttgtaatattctatttatgatgcatgatttttgttgcacaattagaaaatacttaagttcttgagaatagttggaaagggttgtaatgatcagaaacacatattatacctaaacatgtattaagaccttgttttaaaaattagatcttggagcaagaaggtaagctgtatcattacgttcttagaatacagggttgggcgtgggggctcatgcctgtaatcccagcattttgggaggctgaggcgggtggatcacgaggtcaggagatcaagaccatcctggccaacatgacgaaaccctgtctgtactaaaaatacaaaaattacctgggtatggtggcgtgtgcctgtaatcccagctacttgggaggctgaggcaggagaatcgcttgaacccaggaggcggaggttgcagtgagctgagatcgtgcctctgcactccagcctggtgacagagcgagactccatctcaaaaaaaaaataataataataataagggtaaatacaaggagtgtgttttgaatacaaaatatctatttttagaatctcaaacccatgagttactttcttccatatataagtcccaacatgttttctataatcagtctatgtctattagatgtgtaattatattaattatgtaaatgcacatgaataccaaattatttggttaatcttcgaatttcttttagcaattatatactctcctccaggttagattgagctttcccttcaactcagagaaatcagtgtcaacaggctaccttctgtaagactaccagagagctatgcattactctgtacaaaggatatttctcctataaatagtgctttcaatagagaaaatctgttatcatgttgtcagtaaattcaaatattttctcttttggaatactctgttcctattaaaacaagagctgtttccttctttgaaacaagttatttatatttatgtggttaagatatcctatcttaaaccataagacctttttgaatacttcacatacagaaaaatgaaaaaaattaaacaaatatcagagttgctgggaaccccaggatataatctactgtggatagtcattcatagacaaagacacctcctatttataggcttgggacagttcagcttctccaacttgaagagagttttgaagatcaaatacaaatgggtcttgtgaagtttcaaaaaatgtttctcaaagtcctttgagaaaaataaacttgggcctgtagccaatagtttgtattccaggcttttaaaaaaaattcaaatacagaaacatcagattttcattgccataggggtcatgacatcttttaacataagtgcagaaactatctgtaatgaatcaaaacttaaatcagatgacattaagaccagctttgctattaccacagatggcatcacaattaacttttaatatatcaaaaatgtgagtgtactcatatattatcagtcatttgatcatgatattccaacattaacatctcagtgtattgtgaaaatgattcatttgtacaatatttttcttcttctagacttttaatttcttgaaggaaggaacgcattttactcatcttgtagtgaccctccctgtacatgttgcctgagacataataactattcaaaaatgtttacagtattcaatgaaattatataaatcttggtttaaaaagcttgatatacaatgaaacatacttgggcaaattataaagctgttcctgagaatgagctaatacatatttagttgttaaaattctgaggggaaaatgtaaattagatgtgaactacctctacaatataagatagcagtaggctgtaagttaaaataatcatttttctcatttttcagtaacattcattaaatgcctgatacaattctgtactttctgaaaattgactataataaagaaatcctggccattataaaattgtcatccactcataggtagaataaatgagagaattatggtgatctaaatatagaaagcatttaaattagagaacagctgaaattgtgcttctaaaacatttcagtgttgttcattttctatatgttatattgaaaaaagtaatatggaaatgtaatgttttcatttgcagatgcttaaatttagatacatgtttaatactgtaatcattttgatcaaacagcagctattatttattattcaatatttatatgtaaaacctgaaactttcatctaccttaatgatggtattgtgataaaagtacccatgtatcaccaagatttgccaattctttttattccttaaagaatatctgacaatttgctggtttgtataagtttgagttaagacaccgtaataatgtcctgcagtatatatgtcaaaatacatgggtcaaaaagacactctaaaatagcagtctccaagaacccaggaagtatgtgatccataggagtgtacatattttattttctttaaaaaataagacagacacttctcaaaagaagacatttatgcagccaaaaaacacatgaaaaaatgctcaccatcactggccatcagagaaatgcaaatcaaaaccacaatgagataccatctcacaccaattagaatggcagtcattaaaaagtcaggaaacaacagatgctggagaggatgtggagaaataggaacacttttacactgttggtgggactgtaaactagtttaaccattgtggaagtcagtgtggtgattcctcagggatctagaacttgaaataccatttgacccagccatcccattactgggtatgtacccaaaggactataaatcatgctgctataaagacacatgcacacgtatgtttattgtggcactattcacaatagcaaagacttggaaccaacccaaatgtccaacaatgatagactggattaagaaaatgtggcacatatacaccatggaatactatgcagccataaaaaatgatgagttcatgtcctttgtagggacatggatgaaattggaaatcatcattctcagtaaactatcacaaggacaaaaaaacaaacaccacatgttctcactcataggtgggaattgaacaatgagaacacatggacacaggaaggggaacatcacactctggggactgttgtggggtgggggggaggggggagagatagcattaggagatgctaaatgacgagttaatgggtgcagcacaccagcatggcacatgtatacatatgtaactaactggcacatggtgcacatgtaccctaaaacttaaagtataataataataaaataaaaataaaataaaataagaccattaaaaaaaagttcatcgtatggattgacactgggctgctccctggtggagtaccagctcaagatgttttgaggaaaaaatttgcatttaccaagtgggaggatttatagtggtgatttcacttgttcattgatttagacatatgaaatattatattttttgcacaactaagttggctttcagattatatgaccatatttttaactaaatgaagctttgctgaataaatacatgacttaatatattccttcaaaaaacatatagtgaaataatattaactacacaaagataagcaatgagcaaaaaaacactagtgcttaccactgctcttggtaagagctttccttcaggcacaaaatgagataaaagtaatgacaaggtaaaactggatgaaaattggtcaacaagtgaggaattaactgccttgcaaaagcagtttttattatacagaaaccattttgaaagcagttattcagaaagtttctatcagtatatgatttgtagctcaaattattgttggtctatcaatcacaaatactattttctgcataatatagctagaaaatataattatctaacttatttttaaagtcttctaaacatgaagtttcagtgagctttgaagctttttgttaaatatgttaaaatgtcatactttccaaatagtttccaattataaccaattagcatcagaaaatttattagccaaatttcaccaagaacctaatttgtgagagaattgaaaaatgagtaccataatttagtatgctcagccactgatgtaatgcttataatgggacctgtgtattttttgtctgtgctgtatctcttttcagctgtgaaaactattattactaagtattaaaacaaactgagggcaaggcacggtggctcatgcccgtattcccagcactgtgggaggccgaggagggtggatcacttcagatcaggagttcaagaccagccttgccaacgcggtgaaaccctgtctctactaaaaatacaaaaattagccgggcatggtggcacatgcctgtaatcccagctactcgtgaggctgaggcaggagaatcgcttgaacctgggagacaagaggttgcagtgagccaagatcacaccactgcactccagcctgggagacagagcaagactccatctcaaaaaaaaaataaaaattaaaaaaaaagcctgaacctagaaacggacctacaaatgtcaatacttagtaatatttttaattattaagccaagatttccaaaaataagaaaagcataattgattatactggtttctttttttttttttttcatttggaacatataattgagaaagctttagtatcaagcatatgtaaagactcataaaataataaggaaaggccaaactgcctgatagaccaaaaaaaaaaaaatcaacaataaacattttacagaggagaaacagagaaacatatacagctaaaaacatatggaaggatcttgagtcttatagcaatattgatgagcaaatcaatatgtagaatagcaaatcagtatcattatcaaagagataatggatatctctttatactcaatttattggcaataattaagaatttaaactacagaaatattgaaaagtatttgaatcaaccagatttcttatatagtgctaatataaattggttaaccacttgacattatcttttaaagtttaatattcacacaccctatgacccaacaattttctagatgtatatactaaaggaaattattacatttgtgcacccagataaacacataaaagtgttcataaaagtactgtttatattaagaagagccgacagcagatgcctatccagaggtaaacaaattgtaatatatctggaataacttgttgcaatgaaaataaatgaactacaggtatacgtgataatatgatgcttagtgataggttctcagatgatcacagcatgatggtctttataagcaataacatttttgagcaaacatatatttgctgaaattatctttttaaaaatgtaagaaaataatataaacacaaaattcagcatgtcagggttatgctgcagggtaacggggtggtgaggattgtatagatagttgcaaacattgctcatgttcaacttcttgggttgggtagttggcttttatcactaacaaagtaataagccagggaatacaatgggtaaatgaaaaaataaaatagagtcacgattagaccaatgatgatagtatatcataaatcaagtcttctcatctttaaaatggaattagtaggagtacttagcttcctagggttgttatgaaggttgaaattcttagaataatgcctggtacatagcatttttttttttaagttaagttctagggtacatgtgcacaatgtgcaggtttgttatgtatgtgtacatgtgccatgttggtgtgctgcatccattaactcgttatttacgttaggtatatctcctaatgctatccctcccccctccccccaccctacgacaggccccggtgtgtgatgttccccttcctgtgtccaagtgttttcattgttcagttcccacctatgagtgagaatatgcgatgtttagtttgttgtccttgtgatagtttgctgagaatgatggtttctagcttcatccatgtccctacaaaggacgtgaactcatccttttttatggctgcatagtattccatggtgtatacatgccacattttcttaatccagtctatcattgatggacatttgggttggttccaagtctttgctattatgaatagtgccgcaataaacatacatgtgcatgtgtctttatagcagcatgatttataatcctttgggtatatacccagtaatgggatgactgggtcaaatggtatttctagttctagatccttgaggaatcgccccactgtcttccacaatggttgaactagtttacaatcccaccaacagtgtaaaagtgttcctatttctccacatcctctccagcacctgttgtttccagactttttaatgatcaccagtctaactggtgtaggatggtatctcattgtggttttgatttgcatttctctgatggccagtgatgatgagcattttttcatgtgtctgctggctgcatcagtgtcttcttttgagaagtgtctgttcatatcctttgcccaattttgatggggttatttgtttttttcttgtaagtttgtttgagttctttgtagattctggatattagccctttgtcagatgagtagattgcaaaaatcttctcccattctgtaggttgcctgttcactctgatggtagtttcttttgctgtgcagaagctctttagtttaattagatcccatttgtcaactttggcttttgttgcccttgcttttcgtgttttagacaaaaagtccttacccatgcctatgtcctcaatggtattgcctaggttttcttctagggtttttatggttttatgtctaacatttaagtctttaatccatcttgaattaatttttgtataaggtgtaaggaagggatccagtttcagctttctacatatggctagccagttttcccagcaccatttattaaatagggaatccattccccattgcttgtttttgtcaggtttgtcaaagatcagatggttgtagatgtgtggtattatttctgagggctctattctgttccattgatctacatctctcttttggtaccagtaccatgctgttttggttactgtagccttgtagtatagtttgaagtcaggtagcatgatgcctccagctttgttcttttggcttaggattgacttgggaatgtgggctcttttttggttccatatgaactttaaagtagttttttttccaattctgtgaagaaagtcactggtagcttgatagggatggcattgaatctatgaattaccttgggcagtatggccattttcacgatattgattcttcctatccataagcatggaatgttcttccatttgtttgtgtcctcttttattttgttgagcagtaatttgcagttctccttgaagaggtccttcacatcccttgtaagttggattcctaggtattttattctctttgaagcaattgtgaataggagttcactcatgatttggctctctgattgtctgttgttagtgtataagaatgcttgtgatttttctacattgattttgtatcctgagactttggtgaagttgcttatcagctttaggagattttgggctgagacaatggggttttctaaatatacaattatgtcatctgcaaacagggacaatttgactacctcttttcctaattaaatacccttcattactttctcctgcctgattgccctggccagaacttccaacactatgttgaataggagtggtgagagagggcatccctgtcttgtgccagttttcaaagggaatgcttccagtttttgcccattcagtatgatattggctgtgggtttgtcatagatagctcttattattttgagatacatcccatcaatacctaatttattgagagtttttggcatgaagggctgttgaattttgtcaaaggccttttctgcatttattgagataatcatgtggtttttgtttatatgctggattacgtttattgatttgtgtatgttgaaccagccttgcatcccgtggatgaagcccacttgatcgtggtggataagctttttgatgtgctgctgcattcagtttgccattattttattgaggatttttgcattgatgttcatcagggatattagtcaaaaattctcttttttgttgtgtctctgccaggcttttgtatcaggaggatgctggcctcatcaaatgagttagagaggattccctctttttctattgattggaatagtttcagaaggaatggtaccacctcctccttgtacctctggtagaattcggctgtgaatccatctggtcctggactttttttggttggtaggctattaattattgcctcaatttcagagcctgttattggtctattcagagattcaacttcttccttgtttagtattgggagggtgtatgtgtccaggaatctatccatttcttcaagattttctagtttatttgcatagaggtgtttatagtattctctgatggtagtttgtatttctgtgggatcggtggtgatatcccctttatcattttttattgcatctatttgattcttctctcttttcttctttattagtcttgctagcagtctatcaattttgttgatcttttcaaaaaatcatctcctggattcactgatttgttgaagggttttttgtgactctatctccttcagttctgctctgatcttagttatttcttgccttctgctagcttttgagtgtgtttgctcttgcttctctagttcttttaattgtgatgttagggtgtcaattttggatctttcctgctttctcttgtgggcatttagtgctataaatttccctctacacactgctttaaatgtgtcccagagattctggtatgttgtatctttgttctcattagtttcaaagaacatctttattccagccttcatttcgttatatacccagtagtcattcaggaacaggttgttcagtttccatgtagttgagccgttttcagtgagtttcttaatcctgagttctagtttgattgcactgtggtctgagagacagtttgttataatttctgatcttttacatttgctgaggagtgctttacttccaactatgtggtcaattttggaataagtgtgatgtggtgctgagcagaatgtatattctgttgatttggggtggagagttctgcaaatgtctattaggtccacttggtgcagagctgagttcaattcctggatatccttgttacctttctgtctcgttgatctgtctaatgttgacagtggggtgttaaagtctcccattattattgtgtgggagtctaagtctctttgtaggtctctaaggacttgctttatgaatctgagtgctcctgtattgggtgcatatatatttaggatagttagctcttcttgttgaattgatccctttaccattatgtaatggccttctttgtctcttttgatctttgttggtttaatgtctgttttatcagagactaggtttgcaacccctgcctttttttgttttctatttccttggtagatcttcctccatccctttattttgagcctgtgtgtgtctctgcacatgagatgggtctcttgaatacagcacactgatgggtcttgagtctttatccaatttgccagtctgtgtcttttaattagagcatttagcccatttacgtttaaggttaatattatgtgtgaatatgatcctgtcattatgatgttagctggttattttgctcgttagttgtttcagtttcttcctagcatcgatggtctttacaatttggcatgtttttgcagtggctggtactggttgttcctttccatgtttagcacttccttcaggagctcttttagggcaggcctggtggtgacaaaatctctcagcatttgcttgtctgtaaagtattttatttctccttcacttatgaagcttagtttggctggatatgaaattctgggttgaaaattcttttctttaagaatgttgaatattggcccccactctcttccggcttgtagagtttctgccgagcgatctgctgttagtctgatgggcttccctttgagggtaacccgacctttctctctggctgcccttaacattttttccttcatttcaactttggtgaatctgacaattatgtgtcttgaagttgctcttctcgaggagtatctttgtggcattctctgtgtttcctgaatttgaatgttggcctgccttgctaggttggggaagttctcctggataatatcctgcagaatgttttccaacttggttccattctccccgccactttcatgtacccaatcaggcatagatttggtcttttcacatagtcccatatttcttggaggctttgttcgtttccttttactcttttttctctaaacttctcttctcacttcatttcattcatttgatcttcaatcactgataccctttcttccagttgatcgaatcagctcctgaggcttgtgcatttgtcaggtacttctcgtgccatagttttcagctccatcaggtcatttaaggacttctctacactggttattctaggtagccatttgtcctatcttttttcaaggtttttagcttctttgtgatgggttcgaacttcctcctttagctcagagaagtttgatcgtctgaagccttcttctctcaactcctcaaagtcattctccatccagctttgttccattgctggcaaggagcttcattcctttggaggaggagaggcgctctgatttttagagttttcagcttctctgctctgttttttccccatctttgtggttttatctacctttggtctttgatgatgatgtacggatggggttttggtgtgggtgtcctttctatttgttagttttccttcttacagtcaggaccctcagctgcaggtctgttggagtttgctggaggtccactccagaccctgtttgcctgggtatcagcagcggaggctgcagaacagcagatattgctgaacagcaaatgttgccgcctgatcgttcctctggaagcttcgtctcagaggggtactcggccgtgtgggatgtcagtctgcccctactgggtggtgcctcacagttaggctattcagggctcagggatccacttgaggaggcagtctgttcattctcagatctcaaactccatgctgggagaaccactactctcttcaaagctgtcagacagggacatttaagtctgcagaggtttctgctgtcttttgttcggctatgtcctactcccagaggtggagtctacagaggcaggcaggcatccttgagctgcagtgggcttcacccagttcaagcttcccagccacagtttgtttgcctactcaagcctcggcaatggcgggcgcccctctcccaaccttgctgccaccttgcagttcagtctcagactgctgggctagcaatgaacaaggctccgtaggcatgggaccctccgagccaggtgtgggatataatctcctggtgtgccgtttgctaagaccattggaaaagcgtggtattagggtgggagtgacccgattttccaggtgccgtctgtcacagcttcccttggctaggaaagggaatttcctgaccccttgtgcttcccgggtgaggtgatgcctcgccctgctttggctgacacttgatgggctgcaaccactgtcctgcacccactgtcagacaagccccagtgaggtgaacctggtacctcaattggaaatgtggaagtcacccatattctgtgtcgctcatgctgggagctgtagactggagctgttcctattccaattatactggtttctaaaaaagattgtaatatattgttgagagtgaagggagttttatatcaataattaaattattttaaaatattgtttatttcatttctcatacttcaaattacttatttacattttaataatatattagtatcataacacatgtgtataatacagctagaaagagagagcatatataccctgaaggcatttttaattataatattgtaaaaccaaactctaaagactcctgttctaggtaattgattagtccagtaaatgtaggcataagaaaaatgtatgaaatagatgacgttaatctttcatgcacaataacacctttctccagctgtggctctaactgtcctgatggattctttactgctctcagctaatccattatatggttttagacatccaggatagacactgaaaggaataactattacaaaagtaattttaagaggagcatttgattgactgatgctcctcttatgtattcattgtgtgtatgtattgaatttgtgtattcattgtatgtattcaatattcaatgtatgtattcattgatcctgcatatacttgatgatttgattggtggtttgattccagttatattaacttgccagaaactttctagtttccaaacagtgaatacaacttagacctcatgaagcttacattctagttagaagagagaatattaattagataagcacataaaatatacatgtgttagatagtgataaatgacaagaaaaaaagtagagcatggagggcctaggaaggatgatagtggttgaatagactttaattttatatagaatattaggtcagagatctgaaggtgactaggaaaaagttatgtgggtatctggagcaagagcatcttaggacaaagagaaagtaagtgaaaaggccctaagatatgaatgtggctggcatgttcaaagaccctcaaggatggggtaagagtggggaagagttgaaggatatggggaaggggaaaatatcgtaggtctttggcacactgtagttaatgtcttcacatttttcttgcaatgcaatgagaaacacagacatgtaatgatctgagttatgttttaatagggttagtatgattgttactttgagagttggttgaatgaggacaaacagatagaccagttaagagacttggcattcatccagtcattagctgtgaagtcttggaccacagtgataatggtgaaaatgatcaagtgtggtttgattccagatacattttgaaggtaatgctgaaaagatatgctaatagtttggctgtggaacatgaaagaaagaggagttgaggattatttcccaactatggacctgagcaactaaaagacttgtcattgatttagatggggaagactgtggtaaaaacaaattttttacaggagatcatgaactcagcttagctaattatataaagttagagatgcctattatatatcgaggtgtaaatgttaaagtgatagctagtatacaagtctgaagttcattgggtcaggaacatctgaactgaagatgtaaaatgtttgaatcatcaatccatatgtcatttaaaccagaagactagatgtgataaccaagaaaatgaataacgagacaaaatatgagatctaaggattgggccctatagcaccccaacatttagaggttaggaaactgaggacgaactagaaaggagactaagaatcagtgaccaaaaaagtagaaggaaaaccacagaagtcatgtattgaaagtcatttgaatgaatcaagtgatcaactttgtcagatactgttgatgggccaaataaggtaagaaatgagaattgaccattggatatagcaatgcattcgaccaatgaccttgagaagagtatttcagtggaatgaagggcaacatggaaactagagtggatttaagagagaataagaagaaagaatatggagatagcaagtgtagacttgtctttttctagaaagaaaataagggcatagatacttttatgggatgtggaatggtgctgggacatgtggaagtctcttctattggtctgtatattcttagaaaatagaaaataattgagtatgagaacatgggaggaaaatgctgaagattcaaggagaaaagagaaagtatgaaaaagtatccaggaacatagcaaagaacatggaccagacagcattagggatctatgtgagtttagtaatcatgaatttgaagcaaggtcagtcaacaggtactatgagtttcttcagatgtatccagctcagcagttgcaggtacagagaagatagaggttagatttaactgacgttgtggttaagccaagtgaatacagtaaaactagagattaaaataattgaccatggaatctaagacagtgatgagaaaccctcaagctacagcgatttcccattgtctccctaaatgctattagtactgtagccaagacaagtctttcttttataggactatacaaggccttagaggatatttagtatccttggcctaaaggataaaggtaaagtggtacagtacacatttagtgtgctgtacactaaatatcagtagcactttgccacaaattaaaggaacagtatataatccttgacagtgctttaactccattgcatttccttcttttttagaatggaatttttttctatatgttccccaaagcaaggctagtttatataacattaaattacttatgcaaatgcaaaaattaatctgaacatctatttattatatctagcacaaaacatagaaacaaagaaggcataggttattattttgaaattatgctttactgaacacataggaattgctaccaatcgtttaaatagttgccttatttcttagacaaatagtaactgaaatgtatggagcattcatgcatatatttggaatgtattaagtgttcatgtgtatacctggcgcagagttaattgttttgcctgcattatctgatttgattttcccacagtgccatgaagtatgaattatcattatcactattatatagtaaacagtataaaaatgtgtctatgacttggagaatggaaaaatgttttacaatattacattctggttgttcacttcccttccattcatgttgacattgaattgttctaggctgctaaggcagcactgtcagaagccacgttttttctaggcatacacacactttattcctttgtcctttagttccttaaactacccatgcactttcctcctctttctttttacattgatgattaaaatagtgagcctgaatttttttaaataaaaaccaactaagttttttattatttattatttggaggaacatatgccctccaaaatatcatttagtgcatcttagacataaaacaatttaactgcttgaagaaaatgtccagcttctgaaatggcatgccattagatattagtgacatttgtttataaacaaataaatgtcttcaacctctatgtagttactatcaatatagccatgcaatatatatggagttccaaatacctttcaaaaagtaatgttgatacagtagtgatcacttatgtccttttgattgaaactgcattatacgaagttctttcctttcagcacaataacctgaaaaatatagctgtctatttaaagaagacattttcttgtttggcagaatattatcatcatacagcatatgtacaatatggtcctaatttgtgtcgatatgtgctaggcttagaaaactcactttaagttttactaaatttattttggagtttaactcttacttttgacatgatttatattctaaggagatctcagcttcttcctgcttaaatgacattacatagatagaaaggtatatattcttattatagcagtgtctgccagggctgcagtcctgttgttagaaggctgtcagaattttaaatgtaagccttcctttcccaggtgttataatttaatcttctaactcctattaatttctgaagactgtggggccatcctatatcttagaacaaaatatagatacgtacattcctgatttttttctccatatttaccttcccccaaatgttttaattttattatttcaaaattataataatagcaatggatttcaaattaaaattctggctagtgaatccctcaggtatttctttatattgactgatttgtatgttgtaggctaaataatgccctcctccaagatacccatagctgaatttccagaacctgtaaatatgttccctcttacatggcaaaagggactttgcaaatgtgactaagtttaagaaccttaaggtgggaagatgatcctgcgttatccaggtggaccgaatccagtcacatgagaccttaaaagtagaagagggggtcagagtgatgaaacaatggaagaagaggaaggagaagtttgaagcatgaaaaatatttcattcatcatttctggctttaaagatggagagtcccttgaaccaaggaatgtgaatgacctctagaacctggaaaagagcattggctgacaaacagcaaggaaatgggaacctcagttccacaaccacaagaaatgaattctgccaacaacctgaatgaacaaggagatagattctcctctagagccaccagaaaggaatgtatccatgccgacaccatcattttagtcattttagctaaaggagacccatattggaatattcgcctacagaactgtattccaacaaggatgcatatgttggaatattcacctacagaaccatgagataatatatttgtgttgctttcaattgctaagtttgttacggtagcaataggaaactaatgcaatgtacagttgacccttgcacaatgcagggattagggatgctgacctctacacagttgaaaatttgtttataatttttagctccctaaaaacataactactaagagtctactgttgaacagaagccttactgataacataagcaatttattaacatattttgtatttcatatgtatatatgctgtattcttataataaagtgtgttagagagaaaagaaaatactaagaaaatcataaggaagataaaatatatttgtgttaatcaagtgaaagttgatcatcttaaaggtcttcatctgcatcatcttcatgttgaaaaggctaaggaggaggaagaagaggaggggttggtcttgctgtctcaggggaggcagagacagaagaaaatccgcgtataaatggaccggacttgcacagttcaaacctgtgttgttcaggtgtcaactgtatatgaaggctttcttctttaaacagaaaggaagtattttgtgcccaagatttggagaaagcaatgggataaaaatatcatagagattttatggtatttgtcctttttttccttttccccttcactaagggtcttgaaaaactggtctgaaactccgctccagtagagcaaaaagaagaactgaaagttaagaagatatttttgtgaaaaatgttgtgagacaaattttgacacagggttgaggaactctttttttccgcatctgaccaagggcaggcttgatatcctgaaggttaagagcggctttgcctgaagcaaagttctcactatgggaagttgcagccgagtagtgaagagttatcttgatgggaggccggaacaaatttgctttggagacgtaaagggaactaagaactattcttactggactccaatatgagactttatttctatccattggtttgcaaggcctggagatatatgcattagataaaaagactgtatttgtaattagaaaagcctccagtaattaatgtccaaatatgcaaccaatttaaatgatgtctacataataccacacatagatgaaaatccaaaaagtcaaacattcattataataattcttccaatctagttgttgttatatagaagcccctcagagggcaccccattttgctgaatttcttgagttttttacttatatcacagaatcaggatgttcaaagtataacaaagatgagaagtaagttgaaaaaagaattattagtgatatttcttctaccatatacatgttatcttggaattggaattttttcataataagaaatccattagcataaatacagtttaaattgaataagtaaatttcattaaaaacaaaatatttatttgggggtacattttataaatagctgcaaaatcaaaactgcatttttgaaatgtaagccatattgatgctagtaagtcaatatgctcattatcaattgtgtatgtacttttatgttatttagaaaatttaattacacgtacggtgtttcaagtattcaatagataaaccacctaggaatataacagggggcataaaacatattatcgactctgtgtctttatgaaactagataaagcaaagaaaaatctgtcaattactcagccagtttcatcttagtagcctactgtaaattgaggtctatgtttttgagtgaatgaaatctagtaaattaagttcaccaggtcttattctagtttattttagatggaaatgtatgatttttaaaagtgggagtaaaatcttacacatatttctgaaatgttaagaagataattttataattcaaacctgtacaagaacttagtttgcctatctgagcaaattttacattcactagtgaatgcccatgtgaaagacaagcaggaaacttccaggggccaaggggcttagaaccaactgaactggtacaaaataaacattaggtatttcagtacgtagagtttgtggacaaaaagaataggctcttaccaattactatgctactagaatatccaattttgcttttaccaagccttagtgaaaagtgaatgaattctaacaagaagactcaaagacactggtgctccccctgtgtctcccttcacttattctgcatggtcagcacctcttcaaaagaccaataataatggtcccctacaagaagtatacaattgctcctctgatgtgaaagcatatgaagaaaataagtgtccaaagctgcataaatatttgcacccctttgagagtatgagaaagtgtgtgttttatgttgtgattgataggacaactttcatggcccactttgaactcttagcaggaactttggaatgtcctgagggtctgtctgcctttgtatggcaggaactctgttttcttagaaaatagtaaagaacagtttgtactcctttgttctaaagggtacctatagtttatgggaattggggaacttagtagaaaaatcaccaacgctctcatgtttctcataaaaaatgctcagctttatttggaaactttggccattgttttctttttcttctttcttcttctccttcctcttttgggttaaaaaggccacagtctgacctacttatatgtgtgatgaaatgtgcagactctgccaaggctatttattctaatgatttatctactcaagataaaaagaaataaagtgaagacaaatctgaaatactgtgcaatgtacttacttgaaagcagtaagttctcatgttagaaaatttccctattaagcaagaaatcttgaacacttcattaaagtcatatgatctgatttttattatcatttaagtcagggaattttagaactaaatgtgtcaattataaaactgtacatatgtatagcctccaaaatgtgttaaacattagttcatatgaatctcaaaatactgtaacacagtaaaatgagcaagaaaatttttgaaatttgcacagtagagacgatgctgttaatgttcaccgaggtaaataatttgtccaaagttctatttctgtgagatactcaactgagacataatctcagcttttttcactttcatattctatattttggttttcattttgttcttaagaaacaagtatttttaaaatgaaacatctggtttcggcagtgctggctaatgctcagaactcccttcccttgttttcttcaatgtcacccttctataaaaacctctgaatatctgaatacgttttaagagcaccccttataaaacactttttgctttgttatgtttcattttgcaggtgccaaagtcacaaatatttcacctcattcagatattccaggtagtaaggctgatatttttatgagtcatttcatctgacaaaattaatttaagaataaataacattgaaatagtaagtagcatgtattttggacttaactcttattttccctatttctattcttccatgttttaatagattaatatatactcatgtgtatatatgtacatgcacactcacacacatataagtatatatatatttatttttcctcatcttatacaagtggaaacatactatacacattataagagcacagtataatttttatgtaatataatttgaagttaattccatattggatagtttcttcattatatgtgtaagtatatgtaatatatcatatgtatctatgattgtgtatttcattgaatgaatgcactcaaacgtgttcagcaatcagcacagaggttaaacattgactctagtactagactgtgaaggttcaaatcctgctttcaccacctgccatctttgtaaccttgaacaagttatgtaagtactcaatgcttcaattccctcatctttaaaatcaatgtaacagttataagattcttaccacataaggttgtgtgtggtgttttgagaatgtaatgaatgaacatatccaaagccacattgtagagtgcttagcacttgcaaagcataatgtcagtgtgagttgtcatttccatcatcatttttaacatgtttaattgcaacccctattgatggacgtacggacattttcaatattttttactacaaacgttgttatacattgtttttctgttgttgttgttgttgttgttggagatggagtcttgctctatcacccaggctggagtgcagtggtgtgatctcggctcactgcaacctccacctcccgggttcaagtgattctctgcctcagcctcccgagtagctgggattacaggtgcttgccaccatgcccagctaatttttgtatttttagtagagacagggtttcaccatcttggccaggctggtcttgaactcctgaactcatgagtcacccttctcagcctcccaaagtgctgggattgcaagcgtgtttcagtgaatagccatgtgcccagctgtttctcacatgcacccttataactgtgggataaatctctgaaggtgaaactgctatgtcaaagtatatatgcatttataattttaacagatattgccaaattgaacccatatattttagacatgctaccaccaatgcatgagagtacttgtttccctaaacccctctctaatagagtatattatcaaacttttgggtctttggcaatccaatgggtgaaaaatgacattttgggctgggtgtggtggctcacgcctgtaatctcaccactttgggaggctgaggcaggcgaatccctgaggccatgagttcgagacctgcctggccaacatggtgaaaccctgtgtttactaaaaatacaaaaaaaaaaaaaaagccaggcatggtggtgcacacctataattccagctacttgggaggctgaggcatgagaatcacttaattgcttgaacctgggagacagaggttgcagtgagccaagatagtgccattgcactccagactgggcaacagagcaagactccatctcaaaaaaaaaaaaaggaagagagacaattatatttttttccacacaagcatttaaaatctaattcaaaaatctattctgaacttactgaatcccaagaataattaggagaggaaaagaaataatgtttaaataaattctatctgcctgttactatagaacatgaagaatgggttctgtgttcctcttatgaatttctttttaaaacccttcaaagtaggtattttcatgcccttttagacataacataacgtataattcagagttgaattaattttcccaaaatcacacagcaaatatatagactacaattagaaagtgggtaagtctcattcttaaacatatacttttgcattatagtcacatgaaaccactgagcgtgttcatgtgtgtgtgtgtgtgtgtgtgagagagagagagagagagagagagagaaagcccaagagtgagagtttgtcttgaggagaagtgtttaaaaggaatatataaatcaaggatgcactatagtatcaccaaagtaacagtgtgaacttgaacaatttaacctcttagagccacgattgctccatctatacaatagaataataataataaacctacattatacaatttccggagattaaatgaggataaagagtacttttgaaattctaaagttccatgaaaatgttagctttgattacatatggttcagcaattgggtctccttattttttgagatctaccttttttttttgtattatctgtagcttgctaaaataacataccagatgtttttgttttcaaattttaaaaatccagatcatactgatttgttgccatggtatagtagtcagagaatcttgctctgggcagttacaatattttggagattgttttacataatagcaacaataacaggaacaatgataactgctaacttgtttacatttacaaaatgtcaaatactattctagattattcaattgaatcatcacaacaacgctatgaggtagttactgttatattgttttgatttccctgatggagacttgacacaaagagagactaagtaattcactcctgtcacacacagctaaaaagtggcagagctgagtgttttgccccaggtagtccagttctagaactgtactcttttccactatgctataccatcttcctaatactatctgtacaagaaattttctcctaatgaaatgtattgctgtaccctatataagctttagctctaaaattgcagagcaggaagcaggtggataaagctaattgctattctattaccctacaatagaaatttcagtggactaactctaatatttaaataacccactgttaataaactggcatggtgcaattgcatgtttcccagtgagatcagatctagtccaatgtctcagcagatataggaattccttttctatcaccccagacaggtggatctctactcatgtatcttcagagaaatggataccctacaaagcagcacattccattttcaacagctctagatattattttatttatttattttagatgaagttctgctgtgttgtccaagctggtctcaaacccctgggctcaagcaatcctcctgcctcagcctcccaagtagctggaattatagttgtgtgccactgcatctagctccagattttagaagttaattcttacacagggttttctggagggacagaactaataggattgatgtatatatgaaggggagtttgttaggagaattggctcacatgatcacaaggtgaagtcccacaataggccatctgcaagctgagtagcaagaaagccagttcgattcccagaacctcaaaattagggaagccagcggtgcagccttcagtctgtggccgaaggcccgagagcccgtggcaaattactggtgtaagtgcaagggtccaaaagctgaaaaacttggaatctgatgttcaagggcaggaagcatccggcataggagaaagatgaagactagaagactgcgcaattctagaccttccacgttctcctgcctgctttatcctagccacgctggcagctgattaaatggtgcctacccagaatgagggtggttctgtctttcccagccctctgactcaaatgttaatctcctttggcaacaccctcacagacacactcaggtacaatactttgcatacttcagtcaagtagacagtcaatattaatcaccacattctccaacgctttctcatacaggttctatttctccactatgaacagtgagattttttttctggtatacttgataggccttcaaatgttccaagaaaacaatcatgcttttcctaagtcttctctttttaaatactcccattacctttccaaaccttttgttcagctgttgggaccatcaacatcctggtcacacctctatggatgaagtctaatttgtcaactactctcttaaatggtggtgtcatgaattgatcacagtgctctggatgtgctctgactagctatgactgctcctggatcgccgtttcctttaatctatacactatgtgtcttcctaatacagagagtatgttgtttgcctatatatcataacaaattgaaaatgcatttataacttataaagtatatattactaggtgctagaatttacactattatcctaatatacagaagctgggaaaagtaatgccatagagttgatttatgtgtgtaaatgtctaagtgacttaaatattgatttttctccttcaactgcagatcaaacttcccaaacactaaagcttccttattttaaaacaaatgcatttgtggttcaccagtctgcagtacagtaagctttttataggtaagctcaaatcacagaaaagctcaaatagatacatctcctttagcctatttttaggactgataaagctaagaacagagaaaccaataaagacatattttaatgatggcagggtatctcatggggtagtacaaatttatcccagttttttatgccttctctatgtgtaatacattgaagtgatatatggtgttgaatgtgattaaaattcagcagatacttatgcaagatctactatctataagatgcttatgcaaaattccatagggaaacattaagacgtgaataaaatctgaattgggccatcactatgatctctccccaaaacgtgggattttcaagtgcatttagaattatgaaataaaccactaggtttttagtgtgaaatgtttacagtattttaattttgaaaactatacttattaaaacagtatgacaacatttattgaatacatgttatgtgctaggtaccaagtggggagttttatgtttattttctcatttcatcctaagagcaaacttcggaggtaggtgtgattcgtctcattttagtgaaaattcactgatgctctgaaagcaaaattaactttcccaagggccttgtagtgcttaaaggcagaatcaaaatccacaaccagctctggaaaatctccagaaatgagcttaattttttgtgtgatttatatatgactccaatattaacagacatgtcaaacaactaacacaaccctttacctgtttattttggaagaagacacttaaaatgtattttattaccctgttgattctcctctggagtgtgacttagtatccattgcacctttgggattcttatcttctaaaattcacaaccactttctactgctgtaagaaagaatcacctgcagagttcacgaatgagggaagagtgaaaagggaatagtggcagatcaataccacttggcatcacatcaaaatagtattccaaggttggtgttctggcttctgcttttctgggaaatacgttgtctgctatttcaaaatgccctccatctgaataatgtaacctgaaattcattcaactcatatttagcactttaggccatatccagggttgtggaaggtgtacgtaagcaatgaggattgcctacaaggcaagatgagaactctgttttctatactttctattgttcctccctttgcaacagaagtagaaagggccataccatagccatctactgtccaacatgatgaatatccttaaagacaaaatctttaagcagtaagtgaaaggttaactacaattctcatttaaaaagaaaattgcattgctgatatctctttgttacataaattttccacaaggattatacattttctttttattcatttgttatctatttgacaatagcaagcctgtttctctttagcttaaaggaacttggattaaaattttttctgttattttaatcagcattgatgttgtatattatgagcgtgtggctttttgttttcttggcagagaccttgaaaaaattttgaaccctagtcaataagaaatctctgtattaatataaaactataacttatggtttatttgattagatcaatgtttaattatggataacatgtattttttgcactgaatatttacacacaaattaatctagcccatagtaaaagtgctaatggaatgtttcatccaaacataagttagtaaatggaaaacaaacagctgttgcaaagaccctgtttttgggtctgggcctaacagcacgaagcacttcagagaatttcaccactaccatttactcacatctgttgagattgtactatttcaactcaagatttgatcagtgtatgtcataaagtaacaagtagtacgctaagtcagaaaacttaaaggaaacattaaatactcatttcctatatggaatgttgcctttctaagcacatcatcttcttctatgtgatgttttgcaaatctattcataggagatttatattttcaagtgtgctcaaatggatctgtgttggggaaagatacgtgaaataagaaaataaaagctaatccatttgttttaaaattttgtctgcctaccacattttgttggacttcttgttatatgagaactcctaattgtctggttttcaattgcagccaaaagcattcttacctgatcaaactcttcaaattctatttactttgaattatagctgagtacatggaaagtataattgggccttactttgttacacagcagacaaaacatatgctcaagataggtcagtgctattccagtgaataaacattttaacaaaaatttgtatgagaaattcatgttggcctctcattcctctctatatgcctttcacagttactctttttccccttgccaatcaaaacactataatgaatatctcttggccttaacgataagaaacactgtatataaatattgtctaggctgtattttatgagaatgtggagttatatgaaatgtaggaagaaaaaatatgagtgagtaatcctgtgagcagtggacgggctgagcttctaggacactgataagcaatcagtgttagttacacttgaggcagtatctctggtggtctgttccagaactatgtccttgactctgtcacattcatacttttcatcactactttttatacttctgcaatttaggtcacccaatacaggttatcttatcaggttaaactgattgtagtggtcacattgaaaaagaaaaaaaaaatcccaaattcaggacttttcccaaccagttctaattaatgcacgtgtgaaaggacatagttattgtgaaaagaaatgctatcaaaacagtctaatggctacaagaagaaaaagaaaagaagaagaagaaggaggaggaagaggagaaggagatgaagaagaaagctaaggagaagatgggtaacaggaaaaaaagagggcaggaaaagcagataggaaggaaaaaaaaggtggaagagagaaatgaatgcaggcaggcaggatgttttcctcgaggttttttatttatatcccctggactgcataactcagtttattcccttctaaaccaacttttctagaatgtgttgtctctgttcgacacctacaactctggttcattttctatgcattaaggatgatgtaactttaaaacctctcatgtaaattctgcctgttttctaattctacaatcctcttgtttatgttctattctaataattatcgagcttttaaagaagagaaatctgttcttaactcaaatttatacatacactgaaggaaataacaaaaccttgaagtaaaacactgtttctatgataaaagagagctctacaaatagatgcatgaataaacacttctatgggagggataccttttcagagtttaaggctcgcgggctttgggatctaagaagatgaatcgcttgccctgtttgtgatcctaaatggaaattgacagatatgtttaatttatcctgctcagtattataaagcctttttctcatttgatttttgtgtatccctcctgaaatatttgctctggtaagcaaaagcaaatattaggttttacactccatttagtgaaataacagtgatgataatctgacatcagagaaccaaatgttccaggcttatttcatgaaaaggatttcctctccagaaacattatcctcaataggttatcccatccttcattcctcaattcatatttcttgagattgagagggaaaaaaaaagaggccagaccacaagtagcctactgctaaattcttttatgaagcttagttttatgaattaccttttagccttctccagtcatgtgggaaaactttcctgcctcattaaatctttaatgcaatgtgcaccatgcacactgtattgttatttgtgacattaggttatatattgcatagtaactataatattacttgcaaacaagctggtttttccccctgaaggtagaattaaaacaggtactcatgggaaacagctacttgtgttcttcttttcttaatggggtgaagctgaagaacaggaaagtgaatggcttagcctagaaccatctccaggaatggaggtaaattttttcctgcagtgccttctcaatttgatatctgaatctccctgaagagaatttgccttagtagatatggagaaagagggaaaaggccaagcctttggagacccttatgaaatggaatgaaccgctctcactaaattcactttctctttgtattgaaaagagatataattttcatccctagtaaatatagtcgaatccatccagtaatataagaattgcctcaaagtgaactaaaattgcacttactcctacctgtggaaaaccatatttctctagccaagagaacaatgacagattagttcctaaatagcaggagaaaatgaaatgttctattggctgaacacacagtgctctgtaaaatcagagaaatcaatattgtccccaaaatgaactaatttgaaagtctcaaagatgttcaattttatgaaagactcgtaaaattaataaatgagtctgcaaagtccaaaaatgtggaaaattacagttatttgcagtacgtataacttaccaagaccacttatattttgttagaatttttcaatgaatgttaatggatgaatttttttatatagagttctccctgtttggaatcttttagttcccttatttactgtggttgccactgactctgcatcaggctttggaaatatcactaaaaaactgttttttctttagtcttcttactagtcaaatatcagctaaacaaacaaagaaaataagtgtttgaatggtcagagaactataagaatgagaattctggcaggaaaattcatttttaaaaatccaagtaacagaatggataaatataaaaagaggctagatcagacatacccagacattctcagttcagaatgttcatagcgtattcataattttttcatagtgcctccttgaccaacagaaataagccacagttctatttcttaagtagttagtgccaaacaacttaataaatattcatgttttaacaacctagcaattgtttaaaaagaaaatggacagaaaataataatttttttcataaataaccagaatcacttactgatgggatgtggtacctttggggtagtatataccttctcaaacttgagtatcagattggataatgctatccttatttccttttccacattgacttttgtgcagttcttgcttttaattacagtctcttctgaaaacctttcttaataaagatataaagtggcctaaagtacaagtaagcagaaacatggctcaaaatgttgagaacattcttaagtggaatatagcatgttctaaggtttcaacttgtgaaccaccttgaattagttattgcagtgcccaacagatatttagtattgctgtgtgtccttcaaatgtttacaatattccactgtgcctttgtgagttcactgcagcaccctggggcacctctacacacagtttgtgaacacaggggtagatagatcctagaggcattgaaactacacggaaacttgaatgacgttagggatcccagagccactggggaatcttcattagggaagtgcaacaacatatgaaatagctcattaaactttccctatcaaaaaaactgaagtcagagagatgaattcagatgcttgatgagaacctacttggtaatggatttgaaggagagagtaaacgttaggatactgaagggattctaagagagtgcagaagcgagggcaaggaggcacaaaacgaaggcggcacctggaacatggaggagtggacagatggagaagaggcagagaattctttatctaaagcaagaggaaagggcaacgtatactcagaatattctcaaagctttttccctgaataatagcatccttcagaaaagaagtcttgtaactgactcattgcaaagtctcttacacaatggtatgtactctttggggaagacacaactggaaacaacaccaggaaaagcttgattttacagcttatggaaagattgtggagttgaaggaaaaatagaaggaaagaaattttaaaaagaataagttaatattcctaggggtgcatcctctaaattgcagagtgatatcttaagcaatccttttaagaattacttaagagcctgagcgtggtggctcacacctgtaatcccagcactttgggagacggaggtgagtagattgcttgaggttaggagttcaagaccagcctggccaacatggcgaaatcccatctctacaaaaaatacaaaaaattatgcagtcatgatggcacacacctgtagtcccagatactcgggaggctgaggcacaagaactgcttaagcctgggaggaggaggttgcagtgagctaagatggtgccactccacatcagcctgaatgacagagcaagactctaggtcaaaaaataaagaaagacagaattacttaagtaagtacttgactaactggttatataaatgtgatcataaacgcatacctttagggtaaatgaaaaagacattgattctaatattgtgtaaatgggtaactgtggcttgggaaaaaaacatctagtaacagtatcctgaaaattgtttaaatggtccgtgtttcacacaacttaaatggaagtaaaacagcttcgctcatgacaattttcaggcaattcaaaatacgttgtaataatggcaaacatgagtatcagagatacacaaaagagtttagaaaaaaatcattttatgaaatatgagctaaaacaatgttttactattatcgctattattattagccctcagcagaatagggtaaattatttctattccttagttcatgttttatattatcgctgacctgcatgaggagcccctatttttctgcgtatttatttgttcctcttttcccccttcccacctctaattcctctctcatagtattttagtttatgtcagggatccccaactcccgggctatacaggtctgtggcctgttaagaattgggcggcacaacaggaggtaagcatcaggcaagtgagcatcactgcctgagctctaccgcctgtcagatcagcggtggtattagattctcacaggagcaggaaccttattgtgaactgcgcatgcgagggatctaggctgcacgctccttatgagaatctaatgcccgatgatctgatgtggaacagttttatcccaaaacccctcctctgtgtccatggaaaaattgtcttccacgaaacccatgcctgatgccaaaaaggtggggagtgctgcaagtttccattatatgtgactttattataaataggtatgaaaaacacattagcaaatcaagtatcataggtgatctttttctacttcatctatagtcgtaacagctttgacattcaaattatacacactttgactctttttattgacaaaatggaaaattatccttaattcaaaatgtattttatttgagcatatgtggtgatttcatatattaagttgatatttttctttcctttttagagaagccatattcaagaaaaatagcatgtaattcaaattttaaataatcaaaatagatttgaaagctcaaaattttggaacattataggcctatgtcccaatattcttcccaaacctcctttcaaacgtatttattaatttagaaaattctaaatagttcagtccttgtttgaaatatatacaacataaaacttttttttctcctgcctttctagaatccttttattgagaaaatgtgtagctgatctgaagaagcatgctgtgtgaaattttgaatgtttatcttaatagaacctaaaatcttccacataggttcacccctcattactcacaataatgccaagtgctgtagtccaggcagatatttattattttatatgtgaaaagacattcgaataaggccatttctcagtggattaggggaatcagagttttctgaatttaagttccttatagagccccatgtaatgagctcttagaagacattgcagagctgcaatttaaaatcctgtttaatcagccgtagcgagctatgtgccattctctgtggaacactaagaggaatcagggttcttcctcctccatccagtacattcccaaccaggaattgctgtctggtcagggttggacgtgaaaggccatagagagccaaccctgcgaagccaagtctctgcatgtcagcacagagcaagcagcagaatacagatcatcagctttgttttatgaatatctctatttacagtgctggagtggaattttaaaaaaaggattgcagcatttgcattgaatctgtcactcacagcttcaattttgattcctgtcctataaatgatcttgctttcctatttttttctgaatttctacaaggtgactgtcaatgtcagaaaatgtaaacctcaagtgtacattgcatggggcttggcatgtatattagaaagaaagaagtttgcttaatgaaaagaggataatatttattcaaactaagcctatttaattgcacagaggaaagtataccttctttgcctgttttgtttgaattttaatataaaataaaatttgctgctaaccttttgtttttctttgaccaataacatttctcagcttagtgtatgggctatgtaaagtgcctgtcaaatggagggatgtctttgttgaaagaatccagactcacagaaagtgagtgactttctggtcagatggttagaactctcccaattttgacaaagatcgttctctgtttgggatttgtaaagctcaaactgtagactaagatgatgacaggaggatctgctgtttggcttcatggaacttaacctatttcagcaagcctgcaatactggggaaaataatacatatatttatgtttatgtcaggcttgcagttgatgggtaaggttcataaaaggttactcctaaataaatgcctatcattcccactccgtactccagtgatttctgcgtcttgcaaatactgccctatagaacaataaaattcgtatacaacagtaagtaaaatatgatttaatagcccatctcctatcccgtaatgattatgcatcttctgtcttgtagctcccagcagtaggaggacagttgacatttaccatatcatatgaccttgaagaagaggaagaagatacagaacgtgttctccagcttatgattatcttagaggtagagtactgagagcatgttcacccgtgttacttcctgatgttacttaaggttaccagtactgtattttttacctgcctggtttgacactgacttacaggactactaaaaaaaaatataccttaggagatttttgtgccactcttttgtttcactctgagacatatctagaagattgagtatatttgttgggtttgaatgataaaggagaactttagaccagacttgaaattaaatttcaaacataaggaccatatttccaaaatttaaatattatgaaagtgtttaggtacatgctaatttacatggttgtgtttttcctgttttctcttgcttccagatagattttattgtctactcccttgtttatattagataaaataaaatgaaacaggaaacttgtttatttagctatagttaaatcttgacttcagaatcctgttttaggtaagaaaggtacaggagaaactgctttcaagatttgaagggccataggcaacttcaaaatgctcaaagcctgaagtttccttagaggctctctgccaccctttcttatcatatccattctttccaataatgtatctcctccccttgacactgatacgtattcagaggcacacacatacatgcatgttcattattccaaatgggtagatgttaatttagcaccaggctctgttgtttcctgtcttgaaactttcatgcatgtgaatctatgacaaaatgaaaaattcttttctcaaaatggacattttccagtattggatgaagtggtctgctctctctctttctgtctctctctttctctctctctctgtctctctctttctctctctctctctctctctctctctctctctctctatatatatatatatatatatatatatatggcaactagatgtatactttggaattcctttaaggtgaaaagagttctctaaatgtaaagtgttgagtgaaattatttagcattcatgtgaatgaactaagacaagaaggattacctaagtgtcataggtcattcaatatactccttagatgccattgtcctattttgagaattagactgcagtcttttttgttgtttgttttttcccatgtagtaagttcctttaaaataatagcttaattcagttttaagtttctttccctattgttctacacaacccacatccatctacagtttgaaatatgtaactttcgtgcacttttttcaattcaaggtgtttgtaatcacatatatgtttatgagttgtcaggtagctattattttagttaacagggaactaaggtcatgccaaaccaagaagcatatgcttcataatgcatttggctaaggctaatattgaaattgcattgccttcccttcatgtataccacaaatatattccctgaatgacagggaaagccaacctgaaaataaaagtctactaaggccgggtgtggtggctcatgtctgtaatcctagcactttgggaggctgaggcaggtggatcacctgatgtcaggagtttgagaccagactggccaacatggcaaaacccccgcctcttctacaaatgcaaaaaattagccaggcttggtggcaggcgcctgtaatctcagctattatggaggctgaggcatgagaatcgcttgaacctgggaggcacaggtggcagcgagccgagatcgcgccgttgcactccagcctgggggatagagcgagactctgtctccaaaaaaaaataaataaataaaaaataaacataaatttttaaagttaaaagtctattgagggtggaggatacaaatatagatatgtttgacacttttgtaccctcttttcagttttactcttttttatttcttttttttccccctttagggtaatgacttgagcatcagcacagcccaagatgaggtgtacctgcacccatctgaagaacatactaatgtattgttacttaaagaagaatcatttaccatacatggcacacattttccagtccgtagaaaggaatttatgacagtgcttgcgaatttgaagagagtcctcctacaaatcacatacagctttgggatggatgccatcttcaggtaaaatcaagaactgcagctccaacgttcacacatttactttggggccaaggtgcaggagccgccccaggagtgaattttttaaggcacctaggatttgctgtcttcaaagagcagataagaacggagccctagttttctgaaagatttttctcttaaacctttacagttttaaatatgcagaataaatttgtctcggtttttattattattgatgattctttcacaattgtcagaacatgtgatcaataacgattcctatattgagaaatgttatattggaaaataaagtctcctttatgatggctcatagcgtgggaagctaaaaagatataaattccagggcacccctatttggaaagtggtttttaaaatatttccttccagtagttgttaactagtttctggcttaatagtatatagattgtaataagaaaagtaagtcttttcatttaagtgaccacccatctcactataaaacactttaagactataacagccatatggtataaaggaaagaatatgaactttggagccaaactgaatagaaattcaataagctttattgcttattttatgtgtgacctttggcaagtgattaagccttgaggaacgtttcttttcagtgtaaagtggatatagtaatgcctacttttcagggtctttgttaacatgatatgtgatcattaggaaagtactcatcacctagaacactttcagtttttttcttgttctccccgccccctttttttaaaagagtgaactacctgacttgaaccaaatatgctcgggtctgattaactgctgtaaggcggctttgttttttttatttttaaaacaatgacatttttatctgacagaattttaacttcaactgtgtctgaatgagctctttacgcttctcgttttctactctaataataaataacacaaggtgtcataggaacttccttctaaatcaggttaagttagacattcaaatgtgaccccagcctgacaacccggtatacctttaatgaaagcaatgtctccaatattggagtttttattgctgacaccaccacctctcacctccctgtccctcatcatttccctgtgctgcctagtttgcctttcactggtaatatttcaacttagtctaatcatcattaccatttcccaaaggagagaactgcagaatcataaacagaaccattgccaaacaatgtacctcttttgcataggcaattcttctagaagctgggttaaaatgccatggagatgagaagcagcacttaggaattaattatgtttttcacatttagcaaatagaggttgtcatgatgtttaaacagtacaaagaaatgagtcctccagctttcaaaatgaatgacaaccaaattgacaaaaaaagtgtctggggggcttatatatttttgtcagcattgcttttcaggctagttaatacaaagacatttccccctgatttatgttggacagtttcagtgtctacccgtcttaaaatcactggtttcatttgcagtcttctgaggtttcgccatacaggaggaatgcattcacagcgcggctctgtgaaatgacacaagagctaatccaagtaggtggctactttctgtcacctacattacctaaagcactgtggttcaataagtaaaagccaatgtcaaatttgaaactcctacccactcaggtgagctgaaagtcggcatgaatctggagtcagtcagtaagcttgttatattttatctttgatctactagtagattgagtcatatttgtaaaacatcacttgaattgatttcaacttgtcttgcacagtaggctttcgacttggtatactgtttgtgtacaagcacaagtaaattgaagctcaacaaaaattcatattcagacttatttacagtggatttacttccatggcagttctttcagcaaatgggcttaggttcctccagttagttatatgattagatggaattgtataacagaaggagaactggactgcgggtcaagaattttgacttttgttttcaactcagctatttaatagttgtaaacataagtatggctttgacctctttggacttcaatcacttcatctgtaaaataaggaggaggacaattgctctgccagcttcaaaaagtcaccgcaagaattgaattagagagctgcaaaagcacttggctagtggtaacccagcacacaaatatgaagcatttctatcttatctacttcatcccaaaggatcacattttctccaaataccattaagacttagagacctctaaagaaaggcacatactggcatttccatacatatgacagttcttactatcatttttatccagaatgctgagacccattagataaaattaatttattttcttctcgctgtcttcactaggaagatgaaggcacaagtagaaaactcttcattcttcttttaagaatataagagaaatcaacctaactgaactgtgcatctttcacctttaaattatccaagacttggatttagtaacatccttggtctttaaatcaagaaaggcttttatgaagcacctatattagatatagaactctgcacaaagtgtattttcctctaactttacagtagacattagtagagttcaccaaatttccaatctcatctataggggatattgcatttctctaatcctggagggtagatgtgtcacatgacttggtttagccaatgaaatgtggtagaaatgatgtatttttttttttcctgaggtaaacattgaatttccaatgtgagactctctgcagcttactcagcaatcagaagattaaaaaacagcctggggccgggcacggtggctcatgcctgtaatcccagcaatttgggaggctgaggcaggcagatcacgaggtcagttgttcgagaccagcctgaccaacatggtgaaaccccatctctactaaaaataccaaaattagccagacatggtggcacgtgtcagtaatcccagctactcaggaggctgaggcagtagaatcacttgaacccgggatgtggaggttgcagtgagccgagatcgcgccattgcactccagcctgggtgacagagggagactctgtctcaaaaaaaaaaaaaaaaaaaaaaaaaaaaaagcctggaatactgatttagcacacagaggtcagctgccctaacagtcacccaggcctgtagaggattttacatgagtaagcctttgttttctgttaagccattgagattttggagttgttaccacagcataaccgagtccatcgtgacttcatcacgatataactcatgagtattgcttgaaaataaatacagaatcttttcaaggcaagatatttttacacaacttttagtgtaaattttgcggtttgggatcaaaaaagattatacagaatttatataataaataatctagaaaaattcctttgtaaacaaaggagtctttgataatcatagaaatagtattgataggtacacagtatacctctgccttctgaagttaatgatttgggtaactacattttgaagacattttactgataacactaggacttaaaaagatttttgcagctcacttggcatccggccattggtaagaggtgcagccaacattttaccctacgtttccttcccattatctttgactacctcccaatgctattccataagtgttggattcgttcagtctgcaaatatttactgagcaccttccatgattatctctgtaaatctcagttcctcttgtatacaatggcagaaacaatgtctaaatttcaattggcaattaagtgaaaacataatgtatgttaagcacctgaaatagtatctaacatatgttgggaggcaatgcagggtaacaaggagatctttggttttggagtcatgcttgggtttgaatctatgctgcaccctttgctaatggtattatgttggacaaggctctttactcctctgagcctcagattcttcatttgtaaatgtgaatagacatgggttgttacattgtttattgatacttaaatgaaatgtctttccagcctgtatcatagtacacagaaaatagtagacagtaagtagtaactattaaaaagcagtcattctaggctaggctataaggatacaaaggtggacaaatgatcattcagttcaaagaaggcattgtacagtagagaagacagatatacatatacatactgtacatttatgataatataaatagtgcagaagaagtgtgcacaatgcatataaatagtgcagaagaagtgtgcgcagtgcatactggtagaactaagaaggaagcaatgaattcttgtgttagcatttaatacacttttaataaatagctgcaaaagtatcagtttctgtcagttactgctcttactcgatgtgggattgaaaatgtttaaagaaaatatcttgctatatatatataaaaaacaaattatatagcatatatatatatatatatatatatatatatatatatagtgggtagaaaaaagacaattgtaacatcaagggtatttttgttgttttaaagtgtcatgttttgtgctggttgttttagtgtaatatagcatatcttactctggtgggaaatgtagtaaaacaaaaatattgagaacaatctttaaggcagcaccaagacaacgtttctgaaatagttccaatattattcatagtggcttgtataattatgtcctctctcttcatccatcatcttttctgtattttcaaggcataaaaataagagggaagagtcagctaaagcatttgacttagttgacaattctttgatagctcatgcatctctaaaatttagtactatattattgccaacattatgtatttaaatgaatgcagcttgatatcaagagaatgaccatactgaaggggaaaaaaaaataaactgcagccttcttcatgagtaacacttgaaactgttaaacacattaaaatcccatttaacaaatagcagaacctaatgaacattgggattgctcagtgagtactaatgtggaatattactgggaaagatgtttgagtgttgaagtttctcatagctcagaatggttacacagattaaggagaggaatgtctgttgttcaaaagacaaatgaaatttgtcagttcactgaaaatatttttgtttttgtatcttttttaaaactgtttcttaaagtagtcaactgctcattcttctattttgaaatttccagaactctttgtttaagttttgcatgtcaattttatatgagaaattcttggactgtatctagatacagttaatcaatctgctgtttagtaaattgtggtgatctattgtatgataatcaactagtgtatcaaccatgaaatcatctaattctgaaattaaaaggatcagaattataggtttatcaagtgacagtccattaattccaggcagttagatttcacaatacattcaggcgagttctggtctctggcctcaagttctaatgataacagtttccatttatcttctatgtcaaatcaaacaagtaatttgtcttttacttttctgattttattcatctgaaatgtggctagtagtctttattgtatcctttgccatggagtttgttagtcattgtttgtaatagaactgttttccattcatctattcatttattatttaagtatttagtcagttacttttgtatacatttatctgtctatctacccatccgtccacccatccatccatccatccattcatcaattcacccattcgacaaaagtctactgaacatgaacatgtatggagatgatcatcctgcatatatagatggcaagataggtttctgttctcaaggagtagcccataagctcatgccaacataagtactggctttagtaactcttcaaaaccccgttgtgttaaggagacttatcaggcccagaaattctgtttctagatatatatccaaaagaactgaaaataggtattatgtgttcatgaatatgaatagcaatattatttatgatagctcgaaggtagaaacaatccaaatattcatcaactgatgaatgaataaacaaaatgtggcatgtacatgcagtgaacattagtcattaaaaggaatgaaatactgatacatgctgcaatgaagttatctagaataggtaacttcatagcaacaaaagcagattgttagtttacaggggttagaggaagaggggaaaagagaatgactgcctaatggattctgggttttcttttgggctgataaaatgtcttagaattagatatatgtcgtagttgcacaacattgtaaatgtactaaatcacagaattgtacaatttattttttaaattttaaataggtttgaaaattttcatcctaccccaaatgtcaaagttcctctctatgtacaacttgaaatgcttaattttatatgatgtgaatttcatctaaactaatgacaagaaaagtaaatgcctgtgacactgcatttttcattgacagggttcctcagtgaggggggaaaaaagcatttaatgattttcaaatgacacatgtaacctaaacactataggacagtgatatttgcctaatctagaaccttctaccaggttgtccaagatgtgcccctagagaatatagcactcaattaatagtgttggatgagtttatttacaggtaaagataattgccttgtgtttagagggtgccatctggcactcagcagccaggatgattccatccaactgcctatatctggtgatttcagggttaatttccttttctgcttcctgatcatatatgagctcatacatattcaaaagtactgtcaagtgtctaggattagcaaagtgggggtaaaagcaatgaaaattttagaaatctattgctgaaaagcttacaatttggataaagatcatcacttttgaagatatgtttacaccttgtaatgagccttttagctttgctctctggcttgattcccaaattcccagcattgattcccaaatctaacaagttatttggtaattgtgaatcactgatcaacaaaaatctaccatcactcctgagaaaggaactgaaaaatgcaggccatagcgagaatcagttgcttctttcttatggttacaagatgccatatcatatgctataaaatgtctatcggtaatttttaaaactgtgattattatgagtcaatagtagtcatttaattatgtgctcttagagtttatttaaaatttattttcatgcactaaaatgatttggagatacaaatagtgaaaagtatatttcttgtaatgttttgtagtaatttttatttggtttcaacagtcaatgaaaataggttaataaaatgtctagtatttcataataacctactgtgtgttacatattataccaagaagtttatattcatttccttttaaatcaagctcatggtgtatggactattatattatctccattgtatagaagaaaaaattgaggcctagaaagaataagttattttcttctaggccacaaggctggtaaatatcagagacaggatataaatcttggtctatttgactcacaaaactgtattcttaataattaagcttttaagatgtccttttacacaaaaataggaaaagcaagtaagataccaataacatttatttaaaatgtgaatgcatagtaagaaaagaaatatgtgtgtgacagcatttttttccaattttccatttggccaaaccagcttttctctaaaataatgagttatgccaaatcactctgctaaaatcaccagattgtacaaaagtaccaataaaatgaaggccatagatacagagaacaatggatttaatttaggccaaaaacaaattccagagatcattctaagtcagtcaactgagcactttgagaaagtttagcttataccaactacaaacaagcagatttatctctaagaaaaagaaaacaaaattgtttccatcttttatttcaatttaaaagctaagatggaatattaatattgcctacttctgctttccttgtttaagcactaaaagaaatcaagcagtcattggaatgttttcttttttaaaagaccctttaactatatgattttaaaaatgtctgtctccaaaaaatgaaaatcaaaacacatagccaagagccaagagacgaggaagaacattctcatatcttttcagcatttggaggtggtggtgattgtgagcactttagactgagccaacttgacctaatatgacaaaggaccagagcttttggttatggtattcatcagcttcctttctcagcatgcataattggcttatatttatgtcattgttgctgtacgattcctacagctgtataatacctaagaactttacttattcaccatctcttttttcctctgccataggttgagctctgttaaccttgaatccgctgtctcctatcctactgatggaagcattgcagcagctgtagaagtgtgtcagtgcccaccagggtatactggctcctcttgtgaagtaagcttgcaagaatgtatccttagtgctttcaaagttccctcaacattgctttcaataacctattctaataagagctgttttttttctatcaataattacacaaataatgtgtatcacttaaaaacaaaacttgaatatctaccaaaagctgtggctttcaattagagtattaaccacataatttcattttgtaactctttctctctgagatattttgcctataactgaaaatctgatgtttctgtctttgctacatatttgatctattgtatgctggatggtagcagaatagcacttcaaaatattttctcttcattttcatcataatgttatccaaaatttagcactctattttttttttacttttctctcattttttaattctgtatcacacttttcctctacttcatttctaagaatacaaccaaatcacaatcatctgaagcatataatcttcagaatgtcaagaatataatatatggaaaaaataccttgatatagaaaactgcctacaggtctttgatttgtttagcacctaatgtttgagatatttattgttgtctcaatatcctagatttataataagattaatggttcttacttaataccgcagtgtgtcatcctaaggtaacaatttttatttgcttctgtgtattttcttttacacagaaaactggtgtgaaactggttttacttgaaacctggtcaaaaaatgtgaacactatttccttgacagagcgcatggctagcagataaataggagcttagtttctttaaaatggtgcctttaaggaatcatttgagtgtactgagatgttccacttcagaacactacctcattatgccatttatagaaatactctaggcattgctttgtcagttctctcgtacttttaaaataatgcatacatctagagatacgcattatagtcatattcatgacagctgtgtttcctttaactgagctcagattcacctttctagaaataaaactagatataacttatagaagtacttgcttttccaaaattcatgtagatgagagaaaaataattatggatatcaattagctatgtcaacccaaatttgattttacatataaaatacacaatgtatttgatgaaacaagagccttttgctcttgattccaaactatttgaacttttaagatcctctctcaattggcataataaataacttaattctactcttgttttaaggcttgtttccacatactttgttctcatcctttgcattatcttttatacaaattctaagtgcccactgaatataaaattacttgaatattacaattgcttaattggctatgcttttagtctcttccttctctccttcaaaaatattttcaatacattctagatatgtttgataaattctgtaaatttacctgtataaattattaataagtacatacaacataatccctgtcctatctgtttagggagacaataaatatctatgaaaaatgggatctcagcactgtataattaagggagaggtatgtgctacagaacatacatgcaataatcattcaaagggatgagctactgcagtggagagagatgcaaagtgtcctggagtggagaaatcttaaattggatgctaaataatggtaacagatagatagaagcatttgagtgtgaaaaaaaaaggagagataataaaagcttcctgtatctgtcacacaataattgtttgataaataaaattactttgtaatccataaaagaacttaattgaatcaagagacaatgaattttggaactttggattttctctctgacttcttcatttcttctactctctaaaattcattttttccttatcaaaactttctgtccctaaattcactattattcagtcctatcctttcattatttcatttgcttttcaattaagtgtagtttgtaaggccagtcattctagccttgttatcactaatatcctgggatcccttaaaagctgagtaaacgccaaagaccattaatgtcttaattccagcttgctgagaacctctggccaaaaaaggatcaaatgactccattgtagacattctcttttacttcatttggggccatagtgttgattcaggatcttttttctcatttctacttgacttcttgtgaagtgttctgcagttaaatctttcaaaaattttcttactttcatagtgctgtcatcatagatttcacttgacagatgagacaggggatatactattaaaaagagtgttatgcaatctcagtttcttcttccatgaaatgaaaataatattaaccacctcatagaattgtttgtttgttcgtactttcatttagctgactagtatttgatgagcgtgtattttgagacaaacaagaccctacacagggaaaatagtgccattaacaatacagatattgtccctgtccccaaggacgttgcactgagtggtggcattaacgatatgccagaaagcaaatagaaataaacgtgacaaattctatgaaggaaataaacagggtgaaataaacagggttctatgataaagttactgcaagtggttgtatgaaggttagaaagtctactttgtaaaagtttgtcaggaaaggcttcctgaggtggtgacagctaaatcgagtgttgaagaatgagagggacaacgatgtaaaaccagctgctaaggaagcagcatagatcgtggagtctgtaaggactggaaagaaggagcgtggctggagccttgtaagcaaggggaaaagtgggacaagaagtgattggaaaagcaaggccatgaggagatttgcacatatgataagaaatgagcattttattctcatggcatggaacatcattacaagcctttcagcagagtagtggagtagtgtaatctgatttacatttttgggttttggggtgttttttgttgtttgagacagggtcttgctctgtcacctaggctggagtgcagtgatgctgtcatagcttgctgcagcctcaaactcctgagctcaagtgatcctcctgcctcagcctcctgagtagctgggactacaggtgtataccaccatgcccagctatttttttttgtttgttttaatagagacaagatctcaatatgttgcacaggctgatctcgaactcctgagctcaagcaatcctcccacctcagcctcccaaagttctggggttacaggcatgggccaacgcacccagcctgagttacatttttttgaagaaggcattatggctacagtaggaagaatgtgtcttaggagggcatgaataataggaaggagaagggttaatatgtagttgcagtggaacacagcaatgacagtagttgctgttaggatcatggcagggaatataaaaagagttagcatattctatatatattttgatagtagaacaaataggacttactgattcgagactgtatgtcaggggagagattaaagaaataaagagtttaagaatgagtcatagatgaccagtttgaatgattgatcagttggttgtggtgtcatttactgagctgaggaatagttggtgtgtgtgggggggtgggggcatggaatccatagtccagtttagaaattttcgatttgaaaacgctgtgaagtgtaaatgtcaatgtgtatttataatattcaggtcttaaattcagcatgtctgtctggtctagagatatgtttttggaaggcgtcataaactatggaactgaataaaattacccaggagaaagtgcaattgatttaaaaaagagagaaaaatagcccagcccaagccctgaggagctcctgacgttaagaagcagggtcaaagcagaggagacagcaaagaaatatgctagaaatttgggaagtgtgatgtcatgaagttgagaaaagaaattgtgggaggaaaaggagtcagctaggcccaaggctgatgaaaggttggataaaatgcaattgcagaattgtccatcgaatttggctgcatggaatttggtgacaaggacaagagcagttttaattgagaggtggtgacacaaaacagattagaatggaatgaagtgtgaaaaagaggtgaggaatataatacttgttaagagtagtgttactgaaaagaaaaacatagatgactagaaaagttatatgaggctaagaggacagttttgtcatttgtgttttgtttatttttgatggagacactagatcatatttttttgtgctgatagtaatgacccagtagaagggaaagttattactaatccatcagagagagtgaatattgagaagataacagatgctggaatcagatgacaagtggagtaatatttctttaggaggaaggaccccacattccccacatcacttgtttggaatgggaatatggcaacaaggtttggagatatatgcttagatctctggacttgttagtgcaaaggcagctttaatttttttctgtgagtaataagttaaaatcactggctaaaagagaggtgtaaggagttgggaagtttgaagaaagaagacgtggtatgagtactgcatttgcagagtattaaaacaaaacaaaaaaacttattaaggaaaacttcatgaatatctgtctgaaaacagtagattagttctctcccttttctcaacatccttaatttctacccccttatgaatatgtagcttcaccagcttttaaaaatgtatattacagaaggaaatcacttctataatgaatctagggaggcaaaaaatgtaatggggagaaatgggaagggatttaattgggagaaatggaaacggaacaggatagaaatttgacaattttgggttggttgtgggggttgaaaaatgagaacacatggacacagggaggggaacattatacactggggcctgtcggagggtggggggctaggggaaggatagcattaggagaaatatctaatgtagatgatgggttgatgggttcaggaaaccaccatggcacgtgtatacctatgtaacaaacctgcacgttctgcacatgtatcccagaacttaaagtataataataattttgaaaacaaatttgacactttttttggtactgttcaaattaaggggaaagttcattttattttattttcagatataaagtatcagtacataaatttttttatgtgttcattattgatgttcaaatttgagagtcctcatatcctgaggcagaaggaacatttccacggagcataacacaattctatatcctttattacttcagtggtttctcttctgttttctttttcaactggaaaagaagggcttttcatgatatatgatgttgtactcgaccatccagaaatatagtaaataacccacaagatgcaatttcactggagggtgatcataagctcttagagggcagcagtatttgcctcatgcttattttgcatctcatccattttgtagtaatccccacagatggaaaacttaattaaggatgatggggaacttagagcaggcactgacacagggaatctaagactaaaataccctgttttaatcagaattcagtttttatataataaagtgtttcacattttaaacaaggaatgaaaaatacaagcaaagttacagaagaatgccataaaataagctatcaagaatgtgagaaataaatcataaactttttgtgtaaatttgagaaagcataataggatggaggaaatttagcatgaaatacatgaattatatatgtgtagaaattagctgtgtatgtggtcaaatataagtgtgggtgctgcctttcttccaaatcatgtcaaagattttctggaaatgatgacgttaagggcaattagtatatgggcaagtgaacacattccagagaatcaaaattgcttgggatgacatcgggtactctcttaggctaagactatatgatgagtccttttatatcagctgccttttttacagtactttttcttctactttcctgtctgtgcttttttctttgagactgtcacatttcaattctttatatctctgctttattttaccatttcagaagaaacaccaagctaatgcttcctctaatctcatacctgccaataacactaaggtcagtgcaaagccccagtgtcaggaggaatagctctgttgcaatgtttcaataatggcaatgctttgacaagcacatttgatgagtttcctacctgttattttctgttatcagaaaacaaacacaaacaaacaaaaacacctttttgttttaatctccaagactgactaaagccttatctttctctcagtcttgttggcctaggcacaggcgagttaacggcactatttttggtggcatctgtgagccatgtcagtgctttggtcatgcggagtcctgtgatgacgtcactggagaatgcctggtaagtgctctcttctttggggatgctgattgacaaggctgaaatcacctcgacagatgctacaattcagctactaccctggggaccttaaacacttgagtcaagaagtgctttgacaaagatctttgtattgaactgaattggaactgagaatgctctttcatatgtgatctccctaatgaatatgaggaagtgtttattcatattaaatcaagaattaaattagaatcagatatatttttataaggcataacttctgattggaagtataactaccatgaatatatatggtttcactttcttccataaatctatgaaaagtacagtgtacttttaaaatagaaaataatttatatccccataatatgaaaagtgtaaaatataacctttatagtaaacataattaagttttcttcatgttgaaaatgaaaacatactacatatttttatttaaaatgttcataatttaactaaatgcatagtgtcatttgtagattaaaaataaaaacaatatgtaatacatattcaccagagctgcttctcctttgcaattaagtctaagctttaaccagaaaataggctttacaaagtgcaaagcactttccatcctgctaagaaaccttaggattggagaattacactgaatagaccattctgattaactcaagggcacattagttttatattgtctgacatggcatgaagcttgaaacaacacttctcctttcattagtcttgcagaaacacaatttaaaatggtgccaattaaggaggatattatactctcatttccctgaagaatttaaggcggattctgttacctgtaattcttaatgttctatctttctcttgctcattttcccccatttctcttctacttaaaagcttctgggaaaaatccaaaatgaaaattcagggcttttgtttcagtgtaatttggcatttaggtttgttgatgctctttcccttttctctatataagattttgtttaattgcattgcattatgaagcatgagagccttaatttgtggatcagtggatttttgaaatgacatttttatgaatagaaagactaagtgattttcattttaattatgccataagtcttttaaaatgtactttgggaaaaatattgggttacctttaaacacttcactaacatgcagtaggaaataatactcagcccaaaactgacatggaattgttttacttaccctaagaagacaaaaataagtatgtcataataccaaactcatgatgttccatatagtcatatttcatgaattcattaggataaaatcaaatcaaattttcatgctgaattcattaggatgaaagcaaattagtccatttgttgatgtgatatttctaaaactagaagccttttttaactaataaaacagtgtcattcagcataattttgagagaaggaagggagagaacagaccctactaatgatgcctagtttactgattttgtttcatgaacagggagataggaggtctccttcaaataacagagcgatcttgaggaaacagtggacatcttgatgataaagacagaatctggtgtttcctgaattttccatcatagctagtaaataggtgatcatgtaggatatactgactttcaagtgccctttctccaaaattgtattgataactaagtgctgatattccattttgagtatatgggttctgatacaatacacaaagaggagaatatttgaatgttgctcatcaagggcattcttactgttcagctgaccctgcattttagcttcttgtttatttttcatggttttaacccagcattaagtagcatggtttttagcatgaaaaataaatttataaatttataaagcttaacttgctttaaaatttgattataaattatctgaaaaatatttttggcaccagaacaaaatctaaacttctgcaatagtgtaggtctatatttaaaagacattttaactcaaagtccatttgaagtaagccaggaagtattcaatgtcacatgggaagatttcatgcttgcttcttctcatagttcttgtggtatgtaatgtgagcaaaattttgtaaagcactttcgtaacaggacacctgtaaaaataaccaatccatcagagtgaagcttccatcttttttttttttttatttccattatataggttgtctgatgcagttttctggtttccactacaaaaatacttgagttttaagatgatttttatttgatgaaacgtgacattagaaaatgtaagaactacatgttatttgtcttttaaatcaataattggaaataaaaaaccctctcaattatgcaagattttcagttgaatgttagaaataccattttcaacatgtttaaggcaaaattaatttttgattcaattttttaaaacccttaagtatttgaagacataattttagttgtatcagtgagataacatgcaaataattttacaaaaaaacaagcaattcttcagtaatagcttagtttagctaaacttaaaaattgaaaggaagtaaaacaaaaatcaaatcggggaaaaaatctttcttcaaatggatccatgttttgcacattaaatcccaatatactgcattattaaggcaactattcatagtgaagctgaccttaatgctatcttttaaaaagttttgttaaaaataaatttgagaaagaattttaaataacttagagaaaagcctgttttcaaatatcaccagttactacagaaatacatatccacatttagttgatgaaattggcacgtgatgtttaaaatttttcaattttctccatgtttaattatgagtcaagcaagcttctcacagatgtaatacagtagtgcattgtccaaaccatcagagtccactgaggccaaaattcatgtctgagctaagaggccatagccccggaggatttctatgattagccacagttcccattaaatcagcaatttcaagctgaacaattgatttttacctagaatcagctacaatttccattaaacatatgttattagtgctctatgactacacacacacacacacacacacacacacacacacacacacacacacacacgcaatatcatgtattttcttaaggaaaataaagaaaaaatgaagtaagatttgcataatgaaaaacattaaaatgaatttcaatcatctttttgtaagtatgcatatgctgaaactactgtgttgtttataagctagatattaaattaactttcaatgctatttctctgctgtaaaattgaccatttaacatggaaaaattattcttgctggcagggagcagactaatgacttcgtagacctatttttggcaacatgttgatccctgacaccaaaataataaactctgatgctcatttctttctcagaactgtaaggatcacacaggtggcccatattgtgataaatgtcttcctggtttctatggcgagcctactaaaggaacctctgaagactgtcaaccctgtgcctgtccactcaatatcccatccaataagtaagtaacaaacttaccccatgaataagctcagcatccatttctgcaagtacacttttcatagcaaatatacacttccttttatcccatgtaaataaataataaacacagacatgaattttttcaggaaaattatatgaattttttcaaacctaagatatttaaaactatgaggatttctaagaatttgtaatttttttagctctagttttggtgatttaatttctaagagtagaactcaaatagaatttctacaccaattccaaagaacataaatattttatacaaacacatacatgtgcatgcatgtacacacctacacacagacacatacccatcttcataccttaataaaaggatataaatacagctaatttgggttctacccatacactatttttttgtgaatcttgggcaagtcgtaaacctctcaaaaagtaaaatgaagggactgatttaactgacttttaagtacccattctatcccttctttttagaaaaattcgttgttcacctagaacaaccacctcttagagcagatttaaaaaaacaaacaacaacaagaaagaacacttgacttcctcatttccttaccttttagaggaatgctatatccagctgcttgaattcacattccctcagggcagcctctctcagtaaacagctaagcacaccccaaccaaaaatgttgttttgtttttaaattgggatactttttttttttttttttttttttgagacagagtctcgctctgttgcccaggctagagtgcagtggtgcaatcttggctcactgcaagctctgcctcccgggttcaagccattctcctgcctcagctggactacaggctgtgttgaataaaaatcaacaatttttactcaaaagtgattataaataactatacttttaaataaaaggaaattattttctgaagaactctcttaaaggtgagcttagtgcttaataaggttcatatcgtattgtacactttccagctatctctaggcactgtgacaacactgacagagcaaaaattttcaatgatctttaagggaaatctgtcagctatagtcttttaatgtgtagatgtgatcaagtaggtcatacttcaaactcttacccagaatgcgcctaattaaaatggtcttttgttagattcaatgaatactataagctaaagactttgagataattctaacattaagtttaaatgttctccttgaaactgtgcttcctactgttaatccacatgaaatgcttatcctcccaatgaccttctttactcagaattttttaccttactcattgtttggaaaagaagagaaagcactactatttaataaaagcagactactatattctaggccaaacactgtatttggtattatttcaccttcaactataactcagtaaggtagatattattatcctcattgtatagattaagaaatgaaggccattagtagaaaaatggcattatgatgccaattctggagccagactctttggtttaaatgctgggttccatactttccagctgtgccactttaggcaagtcactgaaactctctgtgcctcaattttgtcatcattagttataataggactctcatagggttgatgtgggaaagacataattaaaatgtgtaaaccacctaaactgtgactggatatgatgaacccaatctaagagctgattgttattaacctgctcagagtcataaagtattaaagtatcagagttggaattttagttttaaaatccatgtgctttccaaatctctacggtctacaatgaagacttctttaaaaaaaaatacacactgcattttaagtgataacactaaaagcagtaattaattcattggataagtcaatttatctagcaaggttttgagaaaataagacattggtttaatgcaggggtcctcaaccatctatagcctgttaggaaccgggctgcctagcaggaagtgagtggttggcattaccacctgagctcagcctcctaacagatcaggcaggcattagattctcatagaagctcaaaccctattgcgaactgcacctgcgagggatctagcttgtatgctccttatgagagtctaactgatgcctgatgatctgacgtggaacagttttatcccaaactcctcccctgcatctgtggaaaaattgtctccaacaaaagaagtacctggtgccaaaaattttggggaccactggttaatgtatgttagtgatcagaacatttccagggcctaaggcatgagcctgaatgggctcaaaactgaagattctttaacaaccaaggatgttagagaagaggaagaaggcaagagagaaacctgttggaaaataattactataggagaacaaatgaaatatattccttcataattaaaggctactcaagcctatgatagtcataacatgacacaaaacctgcactttggtatatatgcgaagggttagatcacccaatggaagacctacttgtttgccatggctgaatggcattctcttaaccatcttcatttacatgaaactcattgttcacgactaacttgcatttgaggaaagcagaagtattgcatctggccactcgtattgcatctccttctcagccaagatgtcatgagcattagcaccactatcaatccagcagagctggctgcccattgcatcatgtgaattccagctgaatacatattagaattatataattgattgagtatgcaaaccctatggatttaccctcaagtctgaccaacattactataaatgcagaggaaacattagggagataattttgcttggataattataggcattcatgacccattgttgtctctttatttgttgtgcatttacttggataatgggttctaattgttgttcctgaaaaagaaagaaagtctgcaagcattaaaacacaatccatcagtgccaaagggattgggtttccagtgtccaataatattatttcctaaaagatgtatattctaatttggtataattacgttgatcctgatttttaaaaatgcatataacacagtgataacaataccagtaacaccaagtatttaatgattctttcattttcaaaatgttttcacttagagtaagcaattaataattattagtaaatattaataattaccaaattatcaaatattaatataaaatattaaaattagcaaattactaaataataattttacttctagcagtagaattgggactagaatagcaatttattttaaattccagctttcaatgtggtattttaacaagtagaaagagagggcagtgataattcacttagtttataaatcctagaagttttgtgagagggttataatgtcttttacatttaaaacaattttacatttaaaacaattttacatttaaaacaactagaaaattatcatggtttagttgcacaactgtgatgagaaaaatccattttcatctaacaacctgaaatgtttaaaaaaaaaatcactaaacaagacacttaatgacctagggaaactatcctttttaaaaatattttataaaaaacattactgttataatgtgagctagaaactctgagatatgaattgaatatttgcatacaatcctgaagacgagattttaatttccacaggttattcagagaaaaaaaaaaagggagctaaaggttgacgcaaccttcatgggaagtctaaagcttagtgatagttttaccttggtgatttatctatttaatccctggtcataaatcttatagatcacaagcattttggctccaaatttcttagataatattgctaaataaatcaaatatgtaagaagatagagatagattggtataattattatgatgtatgaatacagagaagcatataatatttaaattatacatatatatcaacttcatcaactatttatggtgatcactatgcttggccttctcatcttgttgatgtatatattctagctataggttgtaactaggcagtaaaagttatctggagagaagcaaataacaatgtaactatttcgaatgtttatattctttaatttctggcatcacatagcttataggttaaataaaatatgaaagagacatgtgaatctctgcctttgaatacttaggatgtgtttgaatatataatattattgaagttgttatagattttcatcagttatataataaaatatattattggcacaaggctggacagagataggacctcaataagttctatctactaatatcactgtaaatactactggtttgtgtgggtcaggaatgctgaaatttaagtttttgaaagaatgaaactcaaatttgagttgacctttgggctcactcaagagatcatattgaatgcacgttgttaaaattaatatagagaaatgtattccaagacaataggtaaatttaaggaaacaatcaattcagccatattctctagaaaattgagaatgctctagatgttttagtgctctttcctacacattgttttatgtgcacatgggagattatgatgggtcttcctggttccatatgccaaaggaaaaaactaaagttcagagaaattaagtgccttgatagtgattatacagcttgcttgtggcagaaccaatattggaactcatatattttgactcacctctctgtgcttcttccaatggggctacagtaatagaaacaattacagaaacattgaaaagaagcaaaaaaaaatcaatagaatttaatgtcagacaaactgtaaatgttcactgtaaaaatcagtaaatcttcactgtttggcaagagttatgttaattatgctacatagttacagttatattaacagctatgttaatataagggactagagcaggatgagaaaactgcagatttaattctttaactattaactaaatacctttcacgttaaatcaacatatcttattttgtttaaaaatttgtaaaaaaaaaaaaaaaggcaaagttttttaaaaaattaataagtcgtatctataatttattatggcaatatgctttcatactttttcagtataaaagggtttatcaaatcaatcatattattccattttgcagaatgggaaacaggtttagagaaatatatcgttcaaagacatacttagaaaataaatcaagtctaattaagaaatgcaattgtggagattaaatcagatttcatagtacttaaaggtaattaaagaaataagtgtttgcttaatgattctcctgagaataagtaggagagatcattgaactgaagaagaaaatacttagaaacttcagaaatttatgacgctaacaccaaaatcatgaagtaaatgaattttttctttttctcctcttcctctcagtccctgccccttttcagttatgtgtgaatattctcattaccctcatctccagcttctccactgacattgtgtagccactcaaaatggtttctcttatcctacccaactgttcaagataataattagttgaaaggagtcctgatcccctgttgtgtatgcaaatacagaacatgccctgattttctaaccctaatgatggaagttttaattttatacccatgattaaaggagtgcttgttttatatcacatacaatcccaagaagcaattcattatattttatttcaaatgcatgacagttaaagacacacaaaatattctcacacattgacttaatatgtgtttaattttattttagagtattggattaactctctgtgggagcatttaacgttagaactgaatttcaggacccacagaaggacccacagaagaagtttccctaatgtctgataatcaggaattgttgagcttctattgagcaattgttttgcttttggcttctggctgctctgaatcatttacctgttgattgttcccttttgcattagctgtgaaaaacctcaaagccaaatgttgatccacccttatcaaatgaacatatgttataacatgcattttgaattctaaatacacccttaagtttatcttttttttagtatttttttctctttaaccttgctttattcttaatgcacatattttgacagatagaattaaattctttttagaacaaggttaattgtttctctatgtatgcattcacatacataaacatatatagattgttgacatagtcacatgtatacacatgtatgtacacatatatatgcatacatatatacatgcttataagtagattataaaaataaaagtatatattcagccattaagagggattattttcatgtccagctttttattggttatcccaataacagcttcccctcctcccctatttgtggaaaatgcccgctgctcttggctttcttgtgtttcctgtggcgtggtttggataatccgggatgaagaacattttctgctggtgtggagctagccaaatagagttaaatgacataatcttggaatcacttgaggtcaatgatgatctcacaatttcctctttgtgtcacggaacaattagcttcatgtcttggccaaaattagtgctaagtgactgcatttgccaaggcaaattctgtagatgttttttattgtgcatgtttatttctcactctaattttatttttgttgttgaatgccatcttctgccatagctgtaactgcaattacagcaataagagagtgaatcttcagtttatgttgttgaaagaatatcaaagcacaaatacagatatattttatgagaaagttttatttggatgcgttatgtcgagtatctatattactagaaacttaaacttacttaattcttaccagtaggtttcaatgacaattggttataggaagaagagaatatcacattaagaatctaaagtcctagatcccatactaaattctcctggaaattttgtatatgaccttggttaagaaaaactgtgcctgccctaaccagctcataggattttgtgaaaatgtgataaaattgtaaaagtattctgaactgtaaggagctagtcaaatttaacatatttttattgcctaatttttttctcgaaaaagtgttgatttttgtcagtgagcaccttttacttatgttggttttaactgacatgtgagtgtatttaagaatctgaaatctattttatgaatagctttaaagtgtcaaggccaggtgcaatggctcatgcctgtaatcctagcactttgggaggccaaggcaggtggatcacttgaggtcaggagttcaagaccagcccggccaatatggtgagaccccatttctactaaaaatacaaaaatgggccaggcctggtagcacctgcctgcaatcccagctactcaggaggctgagacactagaatcgcttgaacccagtaggcaggggtttcagtgagccaagattgcaccactgcactccagtctgggcaacagagcaagactctgtctcaaataaaataaaataaaatatttttaaaaatgtcagaagccttgtcaaccaccattgacaagagttatgataaactgatttaggattataaaaaacaattggtatggttttctttcaatcagtgtagtcccacagaggtgggaaacccagtgcttctggttggagtcagtttctcagtagatgatgagatagttacagaatgccaattttcaaagaagacatatatatgctacagagatgcagttctcacttttatgtctgaaaacagtaacagcaaatcaccggatgtggatgagaggaaatcctttttttttattttattttaacctgtgcatcttcagtgcaatcacaatcccgtcaagaaaatcacccatagtgaactgtctttgggtcatgcgtagcaaagtacaggatgctttataaaaggagattctttactcgcagtgcacacgctgggtatgtcttgtctgctgttcatcacagctaccagaactccttaatgtggaatctttgatccagataatatttataaattcaaagcatcccagaccagcctttatctccttgacccagcagattcatttagactttccactgagttgaaatgtttaaaatgatagacttacctggtcctaataccttgctagtatcccaaaaataggaagaactattaaatctttacagaactaccctgagttaagccagagaaatactattcagaaatagtgttcatgatctgatctgcaccaaagttaagaaagtatttcaaagtaattcaagtgtcaggagcaggatcaaatcaggacttggaatgtttaatttgttgttatgtctttaattcatttagccatcaagcaagtctctattgaattgccctgtcatatataatagaaaacaaatctacttagggaaaacataataagagaaagattaattgagggcatttccctttaaaacggtagcgcaacagaccttacagaattcaaaatggttgatggcccttcagagagccagtcgagaacgcattaccgtgtgtcaatcttggggtaggggttcatgtatgagaggtgcctctcacaaggcaaagaagcatggctggagtgaaacatgttgctgaaagctaaagctagcacctgagttctctgttggttcttcatctggtgttcagctctattgcttcagacccaaattagaaatatgtgcaaagagagaagtgaattttgaaacatgccagagggtatgagatggcaaggttgcttttgtttggttaggtttatgataagtttaggtagaatatgcacacttgatctcttctgaaagctttcctgaggattccatcagtgtgagggcatacctgcaaggaagcacatgccgcagcctgcacacaggcacgccccactatggcagtagctgaagaaggaagcactgccaccaccactaccacatactgagatttccaaaatcactaacaaatttctccaggctgcttcaaattcagagggatttggctacagaagaaagtatgtgaggctgcatatgtgccaggcctggaggaatttctaaaaagcagctatacatttccacttgttactgatgatcactactcagagcagtcgaaagtcagttaataacatgtcacagggatactgctctccactgggctatattcacgtctgcagaaatagcaatgtcatttcatcctccattggccagaccctaatctctgtctctggggtgagaatgaccagcctgtactcttttgtcagagcagtagtggagagagagaaatgagaaaatgctaatgactttgtgtatgtccttcttccttgtccctgttttccgcaacaacatcaacatagctttagcccaacgtgccatttagaccggagtcttggattgatctgtgatggatgccctgtcgggtacacaggaccacgctgtgagaggtaagagtatactacactgtcttgcaaaatgatttctaccttgggagttataaaaccgcagatacaatcatcctttgcatcatcctttggagaaaaaaggccacactcaatgaggtgaaataaagtttctcaacgcacttgtcaaacaaatgcattatatttttgtaatttatttatttttcagaaattgcttcataaatcttcattcactcagagaatatctgattaatgttttaatcttaaaggttaagtattaacctacaatctttgtagaaagcattgctcaagtggaaagtcatgcactttaagatttatcttactgtctgtgtaggcaccatttatttttcataattagctttttgtccttaaaatgtagcttaaatgcatagttcatagttcagcaagtggttcataatttactttaaatatacttgaaaatagaaacaaaatgtaatttattatcatgatttatatcctcttctaattgctcctaaaccagtattttaattcctgttgattttactgggttgctttgcagcagaaacaagagtattattttatgtaatttgtgtgattatatttccttctgaaatgtttttgaagaaataattcttctatatattcagcctcagcataaaagtgatacaaacttcccccttgacatcattgccaaaaacaaaaacctccctctggtttcagcactggaaatagtccctgctgccacccttcctgggagggaggggtgcaaaggaagtgacctactttcactcatcatcactgaggctaaccctgaagagggctgtttctgcccgtcttttcctgtcatcttggcagctatcacccctgtttcaaccaggatgcataaaattaatgaagcaggagcctatcacccagagagaatttagctagcaactagcagtctgtggacaaagtgccaatgacagttcctagcagcaacaagtactatttgtgagtatggaagcatctgtaaattaggaatgaaagaaaaaaaaatgaaacaagcagcatttatttgcaatcaagaaactagatatctttaattgtgtgtgtgtgtctgtgtgtgtgtttaaagaaaggcatgtgcatattacttactataataggagaacatatcattgccaagacagatttacatcaagtgcctaaaccccccagttcactacaggcaacctttttttagcaactggaaaatgacagctgctctgtcatacaaggctattaaatccacttatctaggtgagcataatctctgatgtacttatattgctttgctttatgtactatactccctatacatgttagacaatagtttctgaaccatctataatttaaaaccctacattttatttaacaaacatctgtttagcaactaccatgtgctgggtacaaggctagacattggatataaatagatgcattttcccatccttgccctcagcacctcacatctttctttaatgcaagtgaggatggttgcttgtattcttgggagaattccatttgaatagtaaaaatcaccaaggagagaaatacctgacagaaagtatgatttcctgtctaaaatctgtattaatctgattcagaagatggcaacatgcatatgcagtgtaatgaatggcatattttatctccagctcaagtttttccacagttgataccatatttttctagccagaatttagattagggttttccaggaatatttaagatttataatttcattgtatttatgtaagccaaaagaacaccttagatagatctaaaatatgagggaaacattttttgtttgagatgtgcctgttgaagtagaagagagggaagataagggtcagggtaaggaggagatactggttgcattaaaaatcttgtaatcaaaaccattctgtaagtgatttgtgtgatcagcttatgcacatcatctaaataagaccagaatttaaaaactaaatcaacatttcccaaattgtagatgttcctggaataaagaattctgtgatcacatgagtttgggaagcatccatttgcatgttaaaagttctggcatgtcctacagtgtgtaattaagaaatctgttcaatttgtttagctcagcatttcctaaacttatgtggccataaaccctctgctttaactatatagcaagaatatatctcagactacagctcaggtgggacaagagttataactttatagtctttatcacaatttaatttctattttgagacccctttctctatatgtgggaactgtgaggtcttagaaacataatctgagcccatttcaagttgttttcttctcctctctcccagctagaatcaaagttctattaagcttacctagtaccaaaggccttatatgcaagggtagaggggagggtataatgtctgtgtgtatatgttgagcaaggggacatgtgatagggccagccagtactgagtatttcacccaagcatgtttctgctgacctatccctttttctccgtcctcctaattacctttcctttcaggtctagaaagtctctcaactactttcattccattcttagaggcacaggaatcattcagcttctttcattccatgctaagacccaccaacatctctaccatcatcatttttccatctgcctttccaaatccatcccattttctatttgaaaaaggatgagctacatttgtggaactggtggctttcagagctcggggtctggcagattcctatgtctctgccttttgccctgtcaaatcccttcattcaaacatgtagcacaagatggccttgcttcttgaatcgagggggtgaagagaaacagtgaacaggggaatggccaaacaagatacaacaaaacatggattggtattctgtcacaagttgaacactagttacagcttggaaaacattcacttagggccaaaacaccactatttttgaggtatcactgctttgctggggaatgatttaaacaaaggaaaaaaaagagtcagagagtgaggggagaaggtattcatgatgatacctttgctaagattctagacttttatcatctggacaagaggagaacaaaaataacaaagagacagaatcttgaagggctaaaagagattaagtaagcaattggaatatcaagagcaattaaaaagactgttgagctaaaagtgagtcaaatgctgaggatacctgcctgatcggacactaagttactttcagaataagtttgtaacctcagcaacatgtcatacattatggagaaggcatttcaaaaaggcaggcaagttcatctggtggattctataggacaacatgaaacttaatgggatacatagacttcttaagccctccccgctccccagctggcaaatttttaacaacttctccttaagtgatgagagaggggtcaaaagccaggactaatctcacaattgccactgaaaatgtggaaggtgtttgaatctaattgcttaatattttgaaaattcatctacagttttatcctcaagattcatactagatatcaaagaaattcctttttgtatcttaaatttcagttccaaaatcccatttagattttgtctgcttcagaatgtctgaattcgaatcaagtctaatcacccctctgcttactatgctcatgggaccttctattcacttgtgagtctccttgtgcctttgggtcctgaatgcagagcatgggctacagaaataacagaggaggggcagttatacctacctgtagtactgttagcaaaattgtgactccagttgaggtgtcaagaggccactcatatgtggttgtgcagtttgtacactgcacaaaggcactcagggaaggggaagattgagggcttgaatccagtttaccctcttcttttccatgaagtccctgggtgtctagtctgtttactttttctgcatatgtctagaaaggacaatttcttccaacttgtaaaaggcaccatgtgagcagggaaacaccctcagtcttttgctgattatgtcaaatgggaggaagtaagaacacagcattacagccacgcctctttatacagcagccaccctcttctgtgcctttgccaatactgttccctctgcctggaagattgcagccctttcactcctccatccgagactaactaatccctgttcagctcccaaaagtcagcactatcatcctgaaaatgtccttgattgggcctaatctgagttggttgcccttttgtgtgctgccataatagcatttgcatatctccagttgttctactgctacgttttaaaatgtgtgttcattctccatggactgtagtgtgaagactgtaccttatttgtattagtaccgtgtaaaagtgctcagctgattttttttaatgggttgggagaaaccagagcttttctaatttgcttggctagattaagccagcattatattgtttcattgttttcagtgtatagataatagaaatgtaggccgtgattttagccaaaagttgctgaaaaaatgatggggcagaatgagacaaaagtctcatcagtgtggttgctttcttctcattgttgcttgtctgcacgtccgctctttttctacctctccctctctctcttcctctctccctccctccctctaacattgttcctaaattatcaatagcagcaagtgtaacaaataactgcatgtgttatctggagtcttatttacatttaaacggccctttttcaaaatattgcaatttgatttgaaaaagttaacagatgtggaaaggaacaatgcctttgttatgtcaagatatccgtttctagcaaggcattcattcgataaactatttttaaaaatgcactcattctgccttgcatatgaaaatgagagggcttgacatttcacattacaattatttttggtggagtgaaaaaccaaaggactgtgatttaaactaattttaattaggtgaatccaacttgatcagactctaacacactatttttattaataaaagttatatgattagcagtattatattctctgaccctcaaattactttttaattcctaacggaacaccttcagaaatctctaatactgttctctgtatagaaacacacacccatacaccagtaatgtgctgaagtgttgcagaaaatagtcccactttcagtaacatggcatatgaattttctatcacgtatattcacaaattttccttacacgtcctgcaagaaaaaataaataaaagacagatgcttctttagttattctatttaattatagttattttcctcctgaaatgagtttttttattatggagaatttcagtcttattaattgctatctaagttaagaaaaattcccagatctcgttatataaagctatctctccaaagggcagtaactcatcttgaggaaagtgagctgaaaataataggttttcgtttgctgtgataatgatcattgtatatccttattccagtggcacaaagtcactctcttagtggtaaacaaaatgagatgtgaatatatgtggatgtgatcataagctctgaatattaaataagacaagaagaatcaggttaaaattcaaaagaatctccttcttatctttatcaaatgcctctcttgaagggattttgggggaattttgtgcactcaaattttattgcatattttataatacagaattaacaaacaattatatctgtggttggcaatattcttctaagcagtatttatacaactcataagtgtataaaatcttttgtgaatataagtaatttcattttaaaaattatgataaaacatcaaatctatgaattatagtacctaagtacctatacattttctagaaaacttagaatcatcaatgtatctgcaccaaattaatggctctgccccagaattgggatttgttaaagtactctcaatataatgtactggatttaaaccatttttatttcaaatggtagagagcctttctctaaataatgactgcatatctgtgagtagatgagcataaaagtggtgtactactgaggaaattatattctcccacattgtttttgatccccttcaattttgacacttgctgcaaaagactttatcttggtaagatggcaaagataacagagctagcctgaccataagattcagatgccctgttctgtttctcctttggcaaatgtggcttagtataaagtgtgagcaaatgtcattgaaagagaagacagagcagaatataaataggcgctgcctataaggacgtttctgcacacctgtagcagtaagttgcattttaaaacataacatttaggtcagagaaaatttgctgctatcgtttttaaaaatcttctttgccatgccctataaacaaacttttgtttttccaataatataatatattatataaatagttttatattatattatatttatataatatatataataatatataatatattatatttatataatatatataataatatataatatattatatttatataatatatataataatatataatatattatatttatataatatatataataatatataatatattatataatatattatataatatataataatatataatatattatataatatataataatatataatatattatataatatataataatatataatatattatataatatataataatatataatatattatataatatataataatatataatatattatataatatataataatatataatatattatataatatataatataaatagtttttggtaagaaagaaagagcaggagacaaagaaagaaagaaacagagaggaaggaaggaaggaagggaggaaagagggaaggagggagagagggagggagggagggaggaaggaaggaagcaaggaaggaaggaagggaggaaagagggagggagggaaggagggaaggagggaggaaggaaggaagagagagagagaaagaaaggaagaaagggagaaagacctggagtttgctaatagagttggcaggcacagttcagtatcaccttatggcatattcctataatatgcaggcatgctttctcagacttccctttagtaaagccttcaatgaaaatttgcctctgaattcatatgcaaatacatacaaatagattattaattcagatatacccacagctcccatccaattaataagaatcttctgagtcacagtttctagttaataaattctgaactcttattactgaatttccttgcgagcctgtttcctcataacaagttctggctgcaacaacaacaaaaaatgtgaaccttacatatttgtagagaaaataaccaattggagtagagacatatgatgtgttgtactacaaaggctttccaacatggacctggattcctccagagtgccagcagcagattcttattatgctttggtctcattttcagtgccagtgacaagattatatatttttttcgggctgaaatctaattactagtgggctggcaggatatcatcttgtatctacactgcagttgtagaaaaacatttttttaatcacgttgcgtttgagaaaaggaacacttaaaaggaaaatccatcatcctgggagaaggggagaatgaaaaatatgtaaacattgccccaactgaggtccccccaaaggctcactgatgaaatttcttgccttaggtgtgcagaaggctattttggacaaccctctgtacctggaggatcatgtcagccatgccaatgcaatgacaaccttgacttctccatccctggcagctgtgacagcttgtctggctcctgtctgatatgtaaaccaggtacaacaggccggtactgtgagctctgtgctgatggatattttggagatgcagttgatgcgaagaactgtcagcgtaagtcctgaactattgatgcccctgacagaattgatgtattgtacctcaaagtagctgatgagttcttgagtgtggattgaagagtaggaaattatgtggaatacatggttgatagatgcatagaatatacagagtctgcatattccagaacatttccttgtactaactaatagagtaaatacctttaaaattgctgtggtattgaagcatcactgttttccaaatgataaacatgtttttatttacatgcggaaggaagatttttttaatgaacttatgtccacagcaggaaagaagaatttgcatattagatagacaccatgtatccatttttttatctcaattctaatcacttgctttaaataattttttctgcccatgatatttcagtagtagccatcagaaggtgttaatcagttatgctttcatatgttaactttacagtgtcgtattttgtaataggtataaaattctgccaatattttcgcacacaggcatttgtcattgttgaatgattaacctcattttagtttcataatagtcatttaaggactatttctagaatgctctttcagtgttttccttccacaaaattagctactctagggcttcatccatattagtataatacatttctcccctctttaccttttttgctgtattaatactacatagaatttccaaatccttaatgtcagtgggattagaatatgaaggcggatcttgttgcagaagatcaaatggaaagtgaatccaatgttagcatttggccatcatcagcttcatttactatcataatgtttaagcagagtaggttatgagaccagcctatccattcatttctgtcaaatttatgtgagagactcttccaattattcaggtgggtcccaggacatgcagaattatagaaaccactgtaaatgtagcctattatcaactctactgtaagcaccaaagacccagtagggtaccctatttcattaagaaatgtgtctctctcatcacaggtttagaagatgagttctagctttttgttatttaataatgataattcattgaatcaaaaccaaatcactttctggaccaactggcagctgttaatataacctgtaaattgatctttttttaaagcaaaatttccaacagctcagtgcctttaaacactggattcctgacaaatgtataaaatcatagaaagcctaagaaattcttcctttcccacagatcatctaggatctacattttctagctgtgtgctcctgagcaagatatttgacctccttgagacacagttttctagtctacaaagagagtcatgaattttctgtggggactaaaggatttggcacatagagggtatccagtgagttcccaagtcctggagatgctcacacatggtagctgtctttggtagcagtgctcatagtagctgtgcatatcagttgttcaccagtgaattctaaggctaagttagtcatttactgacattttatcctgtcttccaataacccccacccccataaagttagggatattattccactaattttattatggtaatttattgtgggattattttattatggtaattaattattattttattatggtaattaattattgtagaaaattattatgggattattttattatggtaatttattatgggatccatggcatgaagtcttaagaacataaaaaagaatgtgagaataaaaacattttgaccattaccagttttcatactacttgccgtgagtatagatgtgattataatttttaatgctctttgccatataatcacaattaaaagtataagaagcacatttattacttatttttataatttttcatggatacaatatcacttctatgcataagtggtaaaacctcaaggaaagaaagttcctggaaatacattattttggttacctatagatttgttcaagaaaagtacaccactacaaagaaatatattttgcattttaaatttgtgtatatcgttggtgtcatatttttccattaaaatgacactttagcaaaactttatactgctttgttgtttttacgataacattaattaattaccatcatatttatggtaaatttaattttgtagtttacactccaagaaaaagtgactcctaaagtctaaataatttgatattttaaaaatgtatgatatgcataagaaactttcataaaataataaaagtatatacaaattcgataaatcagatgaaaatggatatttaaaggaaaaattttcagcctttccttgtatttcagctatagactatccgtaggctctttcagtttctcaatggcccttactctagtatccccttggcagacactgaagacaaactttgctggaagataaattaagcagtttttagaaaagcagttcttttgtttgtttatttgtttgttttttaaaaggagaacctagagccaggagaataaaatattagcataggctgatagagtacctgtttatagcttaattttaggttgtgttcaaatcaaaatattcagaaatttaacaaaatcatctatgagtagcctaaattcccatgtcatctcctccttgtatttttattctgatataaatgcaattatatgtaccattaaaaatatagggtacatagtaaacaattaattactattctatttgtgaaaaggtcacttaagctttagactgatttactctacgttttagaataacctcagacagctttataacaaagcaaaaaagacaaaagattacttaaatgaaatatgttttgtatgtttggagatagcatataaactgtaaaataaaagtgattcttaaatgttataatgctatagtcttaagatacttgaaatgatgtttttgttgtcttttaaacttctgaatcttaaaaaaggcataaatatttcacctcaaaccattttttaaacttaacacaaaaccggcacacagtaaatcattaaatcaaaaaaactaactaaatttttctagattaatagtaacattaaaattttgccaggggtgctattaattttgaaaattcctcaaaattattttagttctaaagtcagtatgcattacttacaatgggataatagtattttaagtgttaccctgatgtatctgtaaagaactaaaacagcgttacaccttgagtcaagaactccaagttcctgtcacgttctggactcacctatatgacacagcaggcatgtggacttgtataagctatggcttctttgaatttcagtgtcttcatgctcaaaattggaatgatgatgatgacattaatattttaatggcatatgatgggccagacatgatgctaaagcctttatgtgaattatccctacagcttgtagagttgttatagggattaaatgatagaatgcctaacagggcacttaacaaatcagaaaacattctgttactgaacttaggcgtccatgttaccatgtggggtatattattatttaacaagcctattaagactattagaaagttttcctgatcacaggtctctcttctctttgcagcctgtcgctgtaatgccggtggctctttctctgaggtttgccacagtcaaactggacagtgtgagtgcagagccaacgttcagggtcagagatgtgacaaatgcaaggtaaggagtagaggctgacccataaattactttctccttacagattttcactggcttttcatgacatgttttgtataccttcgtatattaaaaggaaggtttgggattatctaattctacaattgaaatgactgtgatcagtgaaaagtttttttcaaactagaacaaaattcattgtacattaccatttgaccttaaacatttttttttggcagtgaatgtgtattatattcgctttaattcagacatttctgaaacaaatagcaggcgaatttaatcttaatctgtggagatactctttcctttgcctttacatttttggcagaataaaatgttactcttggggctgggcgcggtggctcatgcctgtaatcccagcactttgggaggccaaggcaggtggatcacgaggtcaggagttcaagaacagcctggccaagatggtgaaacaccatctctgctaaaaactacaaaaatcagccaggcacggtggcaggtgcctgtaatcccagctactcaggaggctgaggcgggagaatcgcttgaacctgggtggcagaggttgcagtgagccgagatagtgccactgcactccagcctgggcgaccgagtgagactccatctcaaaaaacaaaacaaaccaaaatgttactccctttgctttttagcaaacaccttcttctagttccatcatttaaaagctacttcctgtgagcagtctacctaatggaagtttcagtagagaagttaatcaagatatttttaaagatgcattattttgctaaaacaaaatattcaattaaaatacagcatgttgttctcagtccctgaacataccgattgccctgctttcagtatggcaagcaacttcagattcctccatgagggtggacagatttgctctagcgctttcacaaaaatacattgtatttgtgataaagacagctaagcagaagcaagcatttctccgatgtcaaactggccttactgtaggaagtttgaaaatatcatctgcttctgtctcttgaataatatcattgctctgttttgtttttattttattttatggttggtttttaaagcccaatatgtggcgggatccagagaagcgattctgtgtgctatgtgactgcgatcccgttggctctgtgtcaccgcaatgtgatattacaggaagatgtgtctgtaaatcaggcttcgtagggaaacagtgcaacctcggcaggcaggtgcaccaacaggaggagcagccgcggagagcgcaacgggtgctgggttctcctcagaggtgggctatcggcagctccagcgggtgccctcggggagcctatcgggccccagctccggtaatcccagaggcgctgcatggctcatgcctctgcatgttgtgttctgtgtgctgtggctgaagttccctggtggcattttaccaaataacagttgctaagtgtgcaaattgcaaatgcaaagattagacaattcctaattgaacccttgcccttttaaaaataaccatccgtatgctttaaaaagcatattcaagttcatagggtcataaaactttcaattaaccaaactttcaattaaccatgaatatgtggaaatcaaataaaaatctacttgagagaacctataatcttagaaatggaagagacttcaggcaacctttggggaaagctaactttaataaatgaacaaatgaaggaaaatctagcagagaaattgatttgtccaagaaaactcagcccatttatcaggcatttcatcataattaagaattttgttaatttccacatcaattgtgcttatgtgtacaacaaatgcaagaaacacattttcacacactataaatggacaaatacccaaaacggggaaagttgtttctaattacaaaagtgtggttctcatatcacaggacaaaacaaaacaaatgctggggaagaaggaagagagggagggagggaagaagaggtcccaggctgagctgcagaagagtaggagacaagacttaccagtatagagtcaggacctgtagagaattgaggatagggcatagaagaaggagagatggaaataaaaagtaaagaagaagaagtaaaaaacaattcatggttttatttcttggctcattatcacacattttttaaaaaacaaattttgatgtcagactgccttagatcaaatcctggcctcattacttcctagctataaattccttgaatctttctgtaattcagcttcttcatctgtagtaagatccacttcagagggtttatgtctgcttacgtactccaagaagcaaatgccaagaggtttcctgggggaaaggccaacgaagcatgaagtgggagacagcatagccttctgctgcaatggggttctgactcccgggaaaacacagaaagaaagactgggtaggaaaagccttgtttggtgcattttgtcaaatcttaaattcttggccaagccaatgggatatacccaagcaaattttacccactaaaggaatcctgaattggtcagggaggttctagtatcttacagtaatcagcctgagagaaggatactcttgtggaagctcatcttaattcattcagagtgctataagagcataacatagactaagtggcatgtaaacaatggaaattcatttctcacgattctagaggctgggaagtacaagatccaggtgctggcagatttcctatctagtgagggccctctttctctagacagtcatttacccactggaacctcacttgggggaggaaactctctgaggcctcttttataagtgcagtgatcccattcatgagagctccattctcatgacctaatcacctcccaaaggccccacctcctgtctataccaccaccttgagggttaagatttctacatatgaattttgggggacataaacattcagtccattacagagcacctctgatgggtccaaaagacaagaaactggaggctttcagtcagtaaaattccacactgtaggttgtcttgcaggtagatcggatgaggcgcctccaaggctgtctcagggtagcagtgagaacagtgcatcaggcaggagcatagagagtttttagtaaatgttaggcctgattactattattattaccaatgttgttaaatgaagaaatgtttaaaataattttttttcaaaaacaaatgcatacatttacaataaaagaaaaagataataactgattaaaatgtctcctaaatataaatttagcagaaagtcaacgttcattcaagccctacatatcttacagtactattgtatgaagcagggttttgtcccgagactattttttcctctgcagcagtatgtgtgagagctgagagctcagactctggagccaacctagctgatctggaatcttgactccacaattggttagctcatgaccttaggcaacttacttaacctttctgtgcctcagtttcaccactcaataaaaaagtggtgagaatgacaactctctgccagggttgtcctgaggagtaaatgagtacatatttgtaaagagtttagatttgtaaagggtttagaattgtgctttgcaaaaaggaagcacaatatatgaatgctagttcttattaccccgagagagacacatttatgggaacctatacagtttctcactgggtctggatagccactctctcccatatttattttacctcattaatctcaattactgaccatgaatgtctgctccttaagtttgtttactagtggggttttctttagcctttgaaacaaatttttgaacaaatttgtaaacattttattactgaaatttggtagtatttattttgctacaacttagcctttaaagctacattatttaaatatttgaaaagtgaggtagaaccgtttcttcttgtatatttccttacataatcgactttggaatttttaaaatgatagctataatttggaatctcatttgatatttgattgatttaaaggggtgtacacacacccctttaatgagtaaatcaatatgagagtgtggatatatagatgtaaatatatatgagtaaatgtatatatatatgagtgtgtatatatatgtgtttatacatatatcggcatagatatatgagtgaagacaatttctgaaataaagatgaatacaaagtattatttctatgactcagatatttttcaataccgttttaatatattatgtttagtctttttgtctatgtatttctgtttctgtttgtgtgtctggtggtatgggtatgtaattgaaatttacatagtatttatatagtttcatatttttgtttaatttctatttcatgctatatcctaagcatatttatatcattaaaactgcttcaaaacaggattttaattcttgcatattatttcataatgtggatgtcatcatttaatttattcaacaatttttataacattgtacagttaagtgcctgcatagttattcaccatgataaataatattgtaataggcatgcttttgctttaataatattccaatttctgattatttctctaagccaggtatctaaaattttacatgaatttcttttactaataatgatattatatggttagttttttttatataggtgaatttaatttcaaagtcatgtcatctgttggaactgttacatgcttttttctttaatcatataccacaatctgaattagaactagaaataaaaataaaaccaacagtaaatgtaaagatgagaatgatcgtcaaactcagtcaacccattttacattttaaaaataaaactattcttagctacggtcattttaaaaatctaattttcagtgtgatttcacttttataacttatttttaaaactactaacaataatatctaaaatatataatgaggcttattaatttctctttgggtggctcacgttaagtggcaagatttttttttaccaagaagcaattattaagtctaattttccaaaataagaattatttttacaaagaagtaattaccgagaataattttccagattaaaatatcataataatgtgacatgctttatatttttaaaaaataaccctgaagtattttaagcaggatagatgattttcatttttctgctcggagtgattttttaatccatcagcattttctaacgtttcattttaagcctgataacatgcatttcaagaaagtcagccgaagctggtaatgcaaacttgaccgtaaaagatgatttgttatagatagataagagatatgcatatgaataactcatcagagaatgaaagtttacttacctgatctggtgctttaatacgtgttctcactaatcaatttcaattgttagaatgaaacctaagaaatcaaatgtttgttgaaccaattatttgatcagtgtaagcataacctgaaaattatatttataatgtgaacactatagcaatgattaaaagtatttatggatatgtgacaaaattctatcaaatattagggcaaaaaggattattttaactttaggctgctggtcaataatgttgaaagtatttttaccaagtaggagtccatagatctgaaagtaatcaattcagattactaaaaatgaagaagtaaaattttaaattaagactagaaataccacctataggtcctttccatattgctattgaaatcttgagaagtactgggacaggctggtgaaaatacaacagacagtaaaggaagcgcctaattctgcagttaattttgataaaatttcagaataattgaacttttctctttggatatcatagaaaaggtccatttgattgaatgaaaacccaattgtcataacatcagtgaggaatcctgataactcctaagttcctctgttcccacctgatctttggtattgtgcatcttgcttcacttcgagttaactgatttaaatttaatttttctctcctcttccattgccaggctgggacctttggcctacaatcagcaaggggctgtgttccctgcaactgcaattcttttgggtctaagtcattcgactgtgaagagagtggacaatgttggtgccaacctggagtcacagggaagaaatgtgaccgctgtgcccacggctatttcaacttccaagaaggaggctgcacaggtctgtaaatatgacttaagtcctacatattcactctgatagttttagggtctgacttctgtaacagtttgttcttttaaaggaagcacagattgatacaacgtatttaacataatgagtaatgtctacttatttttacgttacttaaaaaatgaaatacatgtcagtttgaaacactgccttaataactgtgtgcaagtactcagtaaaaatcagcagatgctcgtttggttgtgtccctccctgtctgtgactttgattcagccagtcactcaaacactgctacggcttgaaagttaaatgttcgatttttctggtaccagtcttatcttagtttaagctcaaaccccacgccaatgcatttcaactttccctttttcctattgcaaaattggtatccggatcaagaaaagtcaaggtgttttttttttcctggtaccccaaaaacatcttttcatctacttttggctgccttgaaaactatgatgttctaagagagaaataggttggctctagatatttagttcatcaaaaaatgcaggcagaggtttctaaccatgattccctcaagcagtattcttatacatccagccacagccttcacccaaatcatgagctaagaaaatatcacttagcattctgcagatgaaagtaaagagtgaacattagccttgatttatatgctgctaatttcgaactgacccttattccaacaatcactagtttgaatattacctttgtttactaatgtcatggattcaacctggataatgctcacatactctcagcaccatggtaagattttaaaacattgttattcactgttgtggcaaatttaagtaggaagcagtaggaataatatttaaaactatttaaagaaccaatatctttcagacattctccagcactttagatatgtggattttaccataaattaagccatgataagttattctaattgataagttattctaattgataagttattctaaatgataagtttataattgtagatcctctaagaatctgtatatctctaagccaatatctgtataacttaaaaattataaagctgtattttaaaatatactctgttctttaaatccaaagctcactgacatttttacttaatatgaattaatgaggtagtattatacatttaaatacatatagtaacaaattataaatgagaccaagaatattattttaaattatagaaagatgacagcatttaataaatgcagacctactagcattctggcccaaagaaacaccatagaaaaaaaaaagcacaaaacaggaagaatagtaatatgactgaggacatgacttgcacaaaatagcctggatttgtctaaatggctccttcagtaactagttctgggaccttgactgagtaattttgtttcattttccatctgcaaaattcatctattaaattaagataataatagtatctaccacacatggtttttgttacaattagttgagttagcggctataaaatatttagagtaatgcctagcatgtaagtgctatggaagcatttatcattattattattatctttattagttttattaattgtgttatacattgtgctttggcacaggaaaactagctaattactcaggttttctttctatttagtgttatgattccgctgaagaactacttaagataatttctatttgcaagtaatgatttgcactgtcccatgacattttttagcatataaatttaaacataatggtaactatttttcttcttaatgaaggacacatctaaaataaatcatttggcttaaaattagcaacaacagtaataaccaaaacagcaatgactaacatttatttagtgtttactcggtgtaaagtatttttctaaacaccttccacagctggtgtgtaatgctgtgagcaatgaatattgtcatttcataaaaagtgaatttagtcaaatattctaaatatattcagtgaaaatgatttagtcatcatataaccaattaaaagtttactcataacattagtcttccatttgaattcaagtatttgggtttcttccctcacttacatttctttgacatgaaacgctgcactagaaatattcttagtagctgggtcaactgccgctatgtggcatgcattccttgtcttggatggctttgaagatattctcaaacattatttttgcaatctttgaaaaagtacaaaaggtagataactttgtaccctttgaatattgcatgatagcaacaaaaatgaaaaatctatagaaaaaagtcaggtggtaaataaaaatcgaaagtatctttatatataaacagtgtccataattcaaccattttaaagtatttgcaaaattggattattctgttgtgtgcgtttctaactatatacatgatgtaccgaatttaagaagcttattaagcttattggtttttactgcagatcgggctcatcaaggaaaaactaatccgtacagcataaacaaattagaaatgaacttaaaataaatatacaaacaaaatagtaaactttgtagtacccgaatataaggtgttacagttaacatggaatctgataacaccaattctttcctttcttaaacttcataggaaagctaaaaatactttaacttttgaaattaataaatgaaatacatcttatatttattgaacagctcctttctgaaatacattgtactataatataaaagatgaatgaagtaagtttttatttccaaatatccttaagtgtagaactgaaaagaaaataagacaaaccaacacaatataaaactcaacactttgtgtcaaatttttactatttttccccttctttgttttccctcttataccggtgaagcttgtgaatgttctcatctgggtaataattgtgacccaaagactgggcgatgcatttgccctcccaataccattggagagaaatgttctaaatgtgcacccaatacctggggccacagcattaccactggttgtaaggtgagtgaaccacttttttgctctgataattttttggagagatttttgttttgtagagctctgtaattgggcatttcaaaattcaatattacatcacaaaataatgtagaagtattactataatgtgattacagatattaatcaatatcttacagtttacttgtaggaaagatgatgaagtaaatatacatttatgcagctgaacacttgaaatctacaagaggggtaaaaagaacaaaaattctgtaataataccagaaaagagctataacctcatacctaggcacaaggacatacatgtgcaaagtatgaggatatgaggaactaattaattttccaaaaatctatagaaattgcccctgaattatgactaggttttaggtttcaggaagtagttgagatcattctgaagagtcattttaacaacatttagcttggaaaataatcattttttcccattggtagaccatagaaattgacatggccagagtcatgttcagagagatctatctagcatcagcagggatggtaacaatttataaggctgttgaagaaatattaataagagatgccaaaagcctggacccagtcaatgagcgtcagtgaagatatatagggcgcgagttacattttagaactcaggctgatacagcctggtgaattcattgatttggggaataagaaagagaagacttaggatgactcctaggttttgctttgcaatggagtagatgataataagtaccatgtgcagctataggaattataggaggaggagcaagttcaggaaggaaagataatcactttgcatttttatcagctttttgtgaggtattaataaaataaaattcacccatttatagtaatgaattttaaccaatgattacagtggtgtaatcatcccttgtgccccattgcagtgaagtccccatcaccccccatgtgcctactgttttgccttctagcattataattttccaatttctacaacttctgaaaaatagaatcgtagtctgtttttttgagggggggtttgtttgtttctttgtttggcttccttcacttggtgttacgtttttgtaattcatccatattgttgcatgtatcagcagtttgttctaaaaattgcttaataatattccatttgtgtaatgtacagtgacttgcttacctgtttaccatttaatgggtgtttgggtcatttctagtttggggttacaattttgctgtgaacattagcatacaagtcaaaagcatatttatggacaaatgttttctcttttttttcttaagaacactccacatctttgccaactcttggacttttaacccttttttaattttaagaattctgatgcatgtgtatttctcttgtttgcatttatttaatgcccagtaatgttgggaatcctttcatttatttatttgtcatttatacatcttttttgaagtgtttacaaagcttatgcccatttctattttgagttgtttgtttccttagtaatgcattgcaaggattatttatatattctggatacatgttctttaacgtatgttaaagcttgcttttcatatagattgctttttacctagtttcatcatctaatctttataaacactagcttattatctttttcttctatagtccatactttttatgttctacccaagaaagacaaggtccaaagatttctctcccatgttttcttcaagaagttttagagttttagctcttaaatgtaggtttggattccattttgaatattaatttttctatatatcaggtaatggtcagagctcactttttatggatacccaatttttcaaacattatttgttgaaaagactatcctttttcccattgaattactttgactcctttgtcaaaatctatcaactatatatatgtttatgcatttctggactcttttctgcttcaccgatctattcttatgttaatactagttaatatgttaattattgtagctttccagcaagtcataaaatcaggtattgtaaattcctcaacctcattcatcgtttccaataccttttgagtactttagctcctttacatttccacataacttttaaatttagcatgtcaattctttaccaaaaagcctgctaggatttggctgaaattatattgaattgatagatcaatttgggaagaattgacagcttaaaagtattagatatcccagtgtatgaacatggcataactctgcatttttttaggttgttataattttttctcagaaatgtttgtagtttttgatgtgcaagctttgcatatatattgttaaatgtatccgtttcatattttttatcaaaagcaaatgctgtgttccatttcagttttaaattgcttgttactagaatagaaaaatacaattatttttataccttatccttctatactgtaatcttgctaaacttattagttctagtttctttttggtccatttagtgagattttcttgtagataatcatgtcatctgcaaagagagatttacttcctttctaatctgtgtaacttctgtggcattttcttgtcctattgtagtaaactattgactagaagtggtggaagcaaatatccttgccttgttccttagtttaagtggaaagcattgtcttttataattgaaaatgatgttggctatattttacctgtaggtgctttttattgttttgaggatgccccctcgtgtttttagtttgctaagagcttttatcaagaatatgtgttcaattttgttaaatgacttttctgcatctattgagatgaccatatgatatttctttttaagctgttaatatgacagattatactgattgattttcaacatatcaatccagtcttacaatcctcagattaatcctgcttggccatggggattatccttttaaaattatgttgaatcctgtttgctagcattttcttaatgattttggatctacgtttataagaaatattggtatgaacttatttttcttgtagcgttgtcgtcgggatgaggtactgcaagcttcatgaaatggattcagaagtattccctcctcataatttataaaagcgttttcacaatcaatgaggtagaaaacagaaatactttagaggaacccaaaagctcactatttgaaaagatcagtaaagttggtaatattctagaaaggttaatcaagaaaaaagagagaagaaacaagcaatcaaaatcacaaataaaagggggacatcactatagatcctatagacattaagataataatatggtagtaataggaacaagttttgcctaataaatgtgataacttgcatgaaaagaacattccttcttttgcttactttgagtttaattttctcttgtgttccaagtttttttgttttttgttttttgtttttgagacggagtcttgctctgacccccaggctcgagtgcagtggcagatcttggctcactgccagctccgcctcccgggttcacgccattctcctgcctcagcctcctgagtagctgggactacaggtgcccgccactacgcccggctaattttttgtatttttagtagagacggggtttcaccgcgttagccaggatggtctcgatctcctgacctcgtgatccgccagcctcagcctcccaaaatgctaggattacaggcgtgagccaccgtgcccggccaattgtgttccaagtttcttaaggtgaaaccttagatcattgatttgtaatcctttttctctaatatgggcatttgatacatttttttccagaaactactttgtttgcactccacatattttgatatgctgtgttttaattttcacttggtttaatataatctttaatttattttggggataatgtttagtttctaaatatttggggaattttcaaggtatcgttactgttactagtatctagtttaattctaaattgttctgagaacataatctgcattatttcagaccttttgaaaattattgagatttgttttatggcccggaatagtgttcagtttgtttattataacatgtgcacttgaaaataatgtgtattctggagttgttggatgaaaacttctatataggtcaattatccttaacggtttttagatctacatgttctctcagttactgagagtgttggactataactttgtccgtttcttctttcacttctctcaggttttattcacatgtatttttgagcagtgatactaggtgcatgaacatttaggattgctatgtctttttgaaaagttggtgccttttgacattgtgaaatgtctctctttattcctagtaacattccttgttcagaagtgtactttttctgatatttatatagctattgcaactttctttttaatggtgtttgtgtggtatatatttttcacaccatcatctatttcatctccctttttagtattttaatgtgtgccttttttttttttattctgagacagggtcttactccattgcccaggctagagtgcagtggtgtgatctcagctcactgcaccctccaccttctgggctcaagaaatcctctcacctcagcctccagagtagctgggactacaggcgcatgccaccatgcttggctaatttttaagttttttgtagaaatgagatctcactatattgcccatgcttgtctcaaagtcctgtgctcaagtgatcctgcaaaattctgggattacaggtgtataccaccatgcctagcttaatgtgtgtgtgtgtgagagagagacagagagagagagtgtgtgtgtgtgtaaataacatatattcagatctttatttttcaacgaatcttaataatttggccttttaatttgaggagttaaatcatttccacttaatgtaaatattggtatgattggattaagcctgcactttgctatttgcttttgcttgccttatctgctcttgccttttttttttccttattgtcctgccttcttttgcattaatttgtataacatcttctcttgacttttggattattaaatatacctattcattttatttctttggttttgtctaggaatatacatctttaactttccagaatgtacattaaaataatattataccactttacatttagcgtaagaaccttacaacaggaaacctccagtcccctttcctatcctttgtactatattgtcatatatttttacttctatatattatacatctgacaatataagcttacgattttgatttcaatagtcaattatctttttaaacaagaaaatttctcctataactctttttccttgtgtatatcaattttaatgctttaaattcctttgtgtacattaaaattttcatttcatatcatttttcttcttccattaactacttcctaatctttatcattttattcctgttgtttcaggtctgctgacaataattttttccttttttttttttttttttttgttccagaaaggtgttttttttttttccgaagatgtttttgcagagtatgtaatcctaaatactggtttgcagcaatttaattatgctttttgttttctttttgtgtgtttaataattattttttcatgggattagttagatctgttggccctgtaggattatagttttcatcaaatttggaaatgaaagttgtcagccattatatctttaaatatttttttgttcttcattcttattgtctctttctggaaatcattttttgtatgttgggccaattgatattttcccccatctcactgaggttcttatttttttaattatttttgtatctgtattttttatttctgatagtttctattgttaagtgtccaaagtcactgattttttaatgcagcctaacctgtttttaatccaattgagtctattttttattttaaacattgtatttttttatcttttaaatttccttttggacattgtatatcttttatttctctactatactcacattttttcatttattcttgaaaatataatgtttataaacattagcatttttaaaatggtcatctgcaaattccatcttttttattgcaggactattcctactgactgacttttctcctgtttctgagtcatattttcttgattctttacatgcctgataatttttatttggatgccagacattatatacttttcattgttgtgtattggattttattgtatttctttaaagaatgttgaactttatgctggcaaacagtttaggtagtcacgggtcacttggattcttttgaagcttgcttttgagttttgttagggaaggtgcagcagaacagtctgaaagcccttctactaagctgtgaaacttctgagaatactacctagttggttactatgtctctttactctggctgttgaaaatatggcttattccaagctttctctgggctgtaagaatttttgcagcctagggttttccaatgccattttccttcatcccatgcatgcacctatcagcattcagtcaatgactcaagagaacgcttctgcacatctctggaattacctttctatctaacttctttctttttgaacacgtattctatttgccatcataagtttcagcagcctcggcttcctcaaactccactctttgtctctcaactcagctataatgcgggctttgggtttaccctctctgtgttgcagcctagaaattgcctctgtacactgcttcatgtttttttccttctctcagaaatcacagtcctgtgcttcctataattcaatatctaaaaacaattgtttcttggtttgtatttttattttagttggttgtgtactttaacagcttaacaaagaagaataaatactgtaaaaactaagaagaggctgttcaaaagaagaatattcttcagtgcctaatgcaacacaaaggtcaagtaggattagtgctgaagttgttcattaaattgaagagcaataataagggcatttttttatgttagtgggagtcgttccaattgattccactgggttgtgaaatattggaacgtgatgaccaagtgtggtcctgtttgaccctatagcagtaccctatagagatgtaaactttttttcctgctgagttagcacagatgaaataatagactctaaccaccttcacatgtatgataaaacatttgaacctggtctagaatatgctgacctagaggaaaacaagcatattgatgattcttcaaggaagttcagatgtctgacttcaattagacatgtgattagaaaaaataaaaactggacaggacattcatttttctattgtcaatagcattattaagtttaaaatgcaagagagctacatttttagaaagaaatcaaaaactcctcagaatttcaaagtgttcttatgaatatgaacaatgctataagtgtctatgactgacttttgcattttcagcttcaaatccaagcatccaccatatcacttggactcaggagtaagccctagggaaacttacaagagttccgttttatccacagaatgctatgatatagccaaactctaattaaactcttgaaattgaagttgatacctcatgttcaagatataaatcaggataaaatacattccaagtttctatgaaaacgtagttatatgtttagtactatcatttttactgatcattagataattactctgttgactaaagttgactgaattttttgattactttaaaatcaccatcaaaagtctagacttctgaatcgagaaatacttcaccattatgaagaattacaaaaaaaaacaaaactcatagagcctgtatcagacaattcttgcattgctataaagaaatacctgagactgattataagaaaactggtttaatgggctcacagttctggagggtgtacaggaagcatagcggcatctgtttctggtgaaggcctcaggaagcttccagtcatgatggaaggccaagcaaggacagacttccacatggcaggatcaggagaaaagcagggatgccatgcatttaaacaaccagatcttgccggtaggaactcatggtcacaaggacagcaccaagccctgagggatcagcccccatgatccaaacacctcccaccaggctccacctccaacactggggattatattttaacacgagaattagtggggacatatccaactgtatcagagacctctcaagtaatttatttatgagcatgtgttttactgtttttaaaactgggatgactttaatttaaatgaacagtgatttgagatttatagcttccctttctttgtgtcatggataatttctctgtgctaaggtgtgagcatacacatcatttgggctgttattgaagtagaatacgaagcctgccttctttcactagcaggggaatagtgagtaaattctctattgctaaacaaatattacctctatttatgatttaaatttgatgatggccatagtgctatctaaacacatggttaatggtctggtttattctccactataacttcctgaataaacttcctgatttggaaaggtcccaatgtctatttgtactgtcaacaattttgtaaaaattcatgctttggttttatacaattatttggataacttcatattttagttaaagataaagatgcctcacaggataatttaaatttattatttgattatagttttgataacatgattttctattaatacccgattatggcctattttgtttaagtgagttaatacatactcaaagcagttggcaaagaaaaactatgtaagtgaatatgtaagacatcctaattttgaaatttgattctacatctgatgttctttaagttacttggcggtgaggttagtgggttattctatgccttggaagctttgtccatatttataatatacaaataatcacattttagatctttgggtttaaaatatcttctagaagccgcccttattgcagcctttctactgattagcaataattagatagaaaaatacttacctataaagacaagaaataaagctaatcctgataatcatttttttttttttttgagacggagtctcgctctgtcacccaggctggagtgcagtggcgcgatctcggctcactgcaagctccgcctcccgggttcacgccattctcctgcctcagcctcccgagtagctgggactacaggcgcccgctaccacgcccggctaattttttgtatttttagtagagacggggtttcaccgtgttagccaggatggtctcgatctcctgacctcgtgatccgcccgcctcggcctcccaaagtgctgggattacaggcgtgagccaccgcgcccggccgataatcattttaataacagaatctgggaagatttttaaccaaatatttgggcatgaaagacaatagaggaggaactggtgatcttggaaatgataatctcataagcaaactactgttagcaggaacagaaacataatactcctggtaatggtggatataagaattaagctgaggagggaaagtgtgagatacacagtgagatgcagccagacttggatctaggagtttggccaggtgctatgcatatgactttaccactgggctgtagatctgagaaggataatagaacagcaccaaaaagagttaagtcacaaagtgcatacaccatatggtggcaaactcagacagagagaggtgataccctttgtaatgccaagtcatgctctgcttgggagacagaaactacactggttttttaaacagtgaaatggaattgttaactggtaaaaggtggttggttactaaaaaaggataaaagaaagctataaggtgtcccgagtacaggtacagaagagcagctactccctctaggctgagggaggaaagacagtgaaggagttaagggctaagagagggcatgctccttctccccacttgcagcaaagctgaggttcagaaatctttcaagagggcgttgctgtcataggaatgtacagcctatggatggtcaaacaaaaccaaaaacaaacacgtcggagtttgtaggcaaatgcatgtctgtagaagctgcccaccgttcttggaggataggagcacgctgggctactgagaagccgacttcaaggtcagagcgtgtgtgcagaccaaagctagtcagaagggtgcctatggagagacaatgtgccctcccaactaaaggcacacctgggattctttctgggccactgggctcccgtgctaaataatacaaaaataatgatgaagattctttttttttttttagacagagccttgctctgtcgcctaggctggagtgcagtggcgcgatctcggctcactgcaagctgcacctcctgggttcacgccattctcctgcctcagcctcaggagtagctgggactacaggcgtccgccaccacgcccggctaattttttgtgtttttaatagagacagggtttcaccatgttagccaggacggtctcaatctcctgaccttgtgatccgccctcctcggcctcccaaagtgctgggattacaggcatgagccaccgcgcccggcctaatgaagaaccagaactcagcttggaagtgtggtgggccgccattatggacttattgggtccttccaaggcctctattgactaagcctatcattctgccaccggatacggagaaatgtctacggggtctacctactgtatcacaaagcagggtgaatttggagctcagaaacagtagatgtataattggcacagctggtccctgaaatgacttattccaagatcctaaatgacattttagaaattcacttggcatttttattaaattgcaagaagatatgagctctgtaaatcaagagcagaaacctttaaaaggataatgtaagacaaaaagacaaatggataagcagaaattaaagatgagagaaataaaattattcaaaagaagttaagattgcaatagggtaatgaaaataagcattggtggtatgtgtatacaataaaacttttcctgtaaaacaggagctgtgaaagtaggataccaatttgagaggtaaatacagcaagaaatgtaaaacaaaggaaaatgattgcagaagacattaggatattatagatttggcagagagaacagagtgatgtactttaagaattatagatgatcctgaaaaagaaaattgattaattagaacagatgtaaaaatcaaaaacaaatctgaagaagaaacagtactgaatcaaaacacaattatgttcccaaactgaaagaactatgttccagtaagttgatggaaaaaaaaaaaacaaacccaagcttcagaaaattctagcaaaaatatgaattatgtaaataaagagaaaatcgtgtatacatcttgggcgaagaaaaacgttactaacagagacctcaaatcagaattgtatgcaagaataaatgccaaaaaacaatatactagatgttacttctcttcaagctctccttggattccccaagtctagtctgatgccctttgtatgttcacatagcattttggacttctcctattatataatgcttattctatcatgttatgctaacatatttacttgtctccctctactagaccgtaaggtatgtctccaaataaatgtttaaatgctacaattatgagataataaggtaaaataactttgtctaaaatttaatctttgagacaaagcagttggaaaaaacccatacccagcccctctctacctcagaaagagagaagacacattttctttctaattcacatagcattatggtttctggacgatcatatatttccataaatgcaggaagcaattttaatgtttatgttcactgatgtttcccaagtgactaaactagaatagtacaaagcctataacagatacatgattaatatgtgtttaatggaagcatagaaacattagaattaaaattttaagatatttcccataaagttgtgttaatggttgctgtttttatctcctctataggcttgtaactgcagcacagtgggatccttggatttccaatgcaatgtaaatacaggccaatgcaactgtcatccaaaattctctggtgcaaaatgtacagagtgcagtcgaggtcactggaactaccctcgctgcaatctctgtgactgcttcctccctgggacagatgccacaacctgtgattcagagactaaaaaatgctcctgtagtgatcaaactgggcagtgcacttgtaaggtatgtgctgctgacatgcagctagggaaaacctccctcaattctgtttccattgctcagttttaacttcattcagtgtttgttatacctgcttcattaagctaaacaaacagatggacaaaatctcattgccagacatggagttttcattgatatgcatttgttggcataccgataaacactgcttttctagagcttattttcaacccaaacccacctttttttctagttggtggagatgatctattttcaatggtatagtgattttttaaaaaatatattagatttgcttcgataaggacaatctgggaggggtggcagggaagacagttcttttaagcatcatcagagaaaatcacagctaaataataaggcttataaaaaccatttctccaaaaattaatctgcaatcgctgtatactagaaaatatatttactgctgtggaagtttagtaaaatttcaacacatataaacgctgtcattacaaacagtgactatgtgcaaatttcagccctcattaatatggttaaatgatgtagaaaaagagccaattaaaaaggtaaaaaggatttttcccctcagatagttctgaaaaatcaattccaggataaatgcagtttaaactgtgtcagaggtatcttttcaagataaaatctatgcaaaaagggacagaggaaacaggaagataaaatctgggtagtggttgttaaaatggccttgagaattgaggaaaatggcagtttctaccatcaagggcttcggccaataccgagtacaatgctgcattcttatatctcgcaattatgatcatatatttaatacatgttatgtgtgtatatatattacaataattatataaattgatattttaacctgctgcctatttcttacagcttacaatagcaccactgtttaagactcaatgtttttatgttgcttttgaaattttcatgagtctttcatattgctcagagcagaactgtagaaaatgtaccacttacatttaagaaacaatgtacaggccgggcgtggtggctcacgcctgtaatcccaccactttgggaggccgaggcgggcggatcacgaggtcaggagatcgagacaatcctggctaacacggtgaaaccccgtctctactaaaaatacaaaaattagctgggcgcggtggcgggcgcctgtagtcccatctactcggaaggctgaggccggagaatggtgtgaacctgggaggcggagcttgcagtgagcagagatagcgccactgcactctggcctgggcgaaagagcgagactccgtctcaaaaaaaaaaaaaaaaaaaaagtacaatacctttagtcttatatctatttaaaaataaagcatttttaaaagatccatgaactcctaacaatgaggttaactacatgtgccatttgagatgtgagtctaatactcagtgttcttctgttttgttttaaattttttaaaaagagtatgctcccgttatgcattctcagggtgatttctcccctaactttgccgttataaactctgagggtctcttgtctttcctcaggtgaatgtggaaggcatccactgtgacagatgccggcctggcaaattcggactcgatgccaagaatccacttggctgcagcagctgctattgcttcggcactactacccagtgctctgaagcaaaaggactgatccggacgtgggtgagtagggaactgctgagccatgtaatggtataatgttagttcctgctggtgtcttttagtcaggcactgaggggtagtagaaaatggcaaaacatttaagtaaccttttcctctgtgaacatttaggaacagcaaaggggtcacgtgccattagagagttggagtaaatgcctttcttatttgttcttaaaagtagttcacttattgataaggaaatagatgccaagtgaaaaagaggaaccttgtccgggaagcattatgttttgagatgggaagagtgagggcaccagagcatgaatgttgatatgagctaacacaccaatgagaaccaggacttgtcacacattcattccaaccaaccttaggcaatcatgatttttggagtgaaaacatgttcatttttcattttcctttaactctttctacatttagattcaatttgtgttagtgtgaaaggctccagtgtccacagatattgtggctttcactatgtgaattagtcaaaaagatttacgtcctgccatgcttgcccactgcgtgtgagttctgttgcttgtgagaacatcatcagaatgggtataggaactgcagatagacatgcagttcgtaacttagttttaaagaaatgtccaaagcgtaaattcagccttctgctgtattttgaccccttgcaggtgactctgaaggctgagcagaccattctacccctggtagatgaggctctgcagcacacgaccaccaagggcattgtttttcaacatccagagattgttgcccacatggacctgatgagagaagatctccatttggaacctttttattggaaacttccagaacaatttgaaggaaagaaggtaagcacaagaactttaatgtcaagtgagaacaagataaaatctttttagaatcacaccatttggagatttatccaattcctcattcttctttttattttgtcagttgatggcctatgggggcaaactcaagtatgcaatctatttcgaggctcgggaagaaacaggtttctctacatataatcctcaagtgatcattcgaggtgggacacctactcatgctagaattatcgtcaggcatatggctgctcctctgattggccaattgacaaggcatgaaattgaaatgacagaggtaaagttagtcattgtttggtgcaaagataccaatcaatggttttgcattcagttttgtcatagtgatttctcttcttgttaacagaaagaatggaaatattatggggatgatcctcgagtccatagaactgtgacccgagaagacttcttggatatactatatgatattcattacattcttatcaaagctacttatggaaatttcatgcgacaaagcaggtaaactctaatagaaaatattcaagctcttattttagagtctgtaaggaaggttattgacctacagatatcagataagaaagattggaaagtgattggttttgcagtataatgatagaagataaaccatggaggcttccctgtgacctggaagaagctactaccattcatcagaaaagaaaaatagcatgagaaacacgttaaagggaaaaaaaaatatggaattcactgcagacatagtgagtttaagatgccagtcataaattcaagagatcatatactgtagatcaggtaaaattaactgttgtggtataaatggattataaaagtgctgagaaagtgacctcttcacccatcaggggaaccaggcagggccaagttggtccagtctcctccaactgtgagcattctaatctgttcaccccagtgtgccatacaatgttgtcattttccctatgcatcatgttgagaaatgattctgaatcactttgaaaaaaatcacacagaacagcaagaatgaatgcaatgttgtcgaacctacatgatgggaatacttcaagggagtattccgtgttttcttatgaccaaaattggccaactgaaatgaggcttgttgggtctgacacttaggaccacactggtaacattcatgataccggtctcagtgtcctggggcagaattaatctcaagcttttaaagaaagaatgtgacacatgagcccaatattatgagtgtaaactattattttccatgaatataattgtaaaaagaaggaataacatattgtcaaaagtaaaaagatgattgtttaatttgaaagagtatgtttacagaacatgggaatggattagtaatgaggaaaatattgaaatataaaataaagagagaataactaatagaggaaccaggagacttccacatcatggaccctcatggtcatattctttgagtagacggttcaccttatccaatgggataaaatgagaaatcatacagatttaggtaagtttcataccatggaggcagaaagttgaactgagttcatataggagacctcaatttctctttcatgtcagtctctgttacattctatgagaatatagaatcgatatatgtttgtaaatagtcttatataataaattattagacctgcctaggaaagcaaaacagaaaaattatgaagtctctcaatggccaactaatgaatataaaaatactatttttcaaatgtttatactggaataagcacacaagacagcagaaaaccttttatttcatgcagaagatccataatgcttttctgattgatgtagagacttttagtaaaagagtaaattaaggaccaaaattcacttttatatatgtattccttgggtttccttttgatatttctcactataacaggagattatttttatatgaaataataaaaaaaatatacttaaaaaacgctgttatctatactgttaattattttagaatatcacatgtaaattaggtggcagaagccatagcagatttgcatgtcttagaaaatagcaggtaatttcgtgagtttgcaaatagattattttgcaaatggttctgtactgcagtaaaagagtttggtagtaaacagaacatcttgttagtggaactgatagaaacaatattgtcattcatctttaattatactttctttgcttctctcacaccaatttcaccttcctacactgtgacactttgtcttttttttttttcccgccctatgtctttttcttttgtcacactgttttacatacctcaccaaatgagatcttttggtttaagtgaccgtttttttgaaactttagaatacatttttcctaatctcagtaaaaactggggtcatagtctcacaatgctaagaacaaataaagctgtcatcagcatttgattttgtaaggcagtggaattgtggcaaaggtttttaaaaggtttgaatagtccccctaaagtaattaaaataaccttgtatctttatttattcaattataaatttaaatctcaaaagcagagagtttaagagtttatattctgtttgaggtttgaactttgtacattgtatcagtgctggcattatcttttttctttgcttttgtttccttttataaagtttaatttaaggaaatagcaacttttgcatttcagtagttatttaaatggaagctggagtttggccaaatccctgatgcaatcaaagccattgctctctaatcccctgaaaaaaaaaatggtgtattgcagaaatatttgttgttgctgccattcaagcttcacttgatttgtaaacacttgcgggtctgttatgtgcattcatgtgcaagagaaaggagaatgaagccagtagctcctcgggctataaaattccatggagatgccaatgcaaagttaccttcttactcccacagagagcccagagaacataagggagaagtttttcttgcagaaggggagtggtttgcttacagctcaccaccactgtgtgtacttacagggagcagagagtgaaacctgaattttaattgaatgtgtgtttcatcaagaccaatcttcagagtgcagattacaatgctagcaaagaacatgcattcataattcagtttcaataaaacctacctatgcttgttataaagtttatgactcaaactccttaaactcctggaggtaacttttatttgaagcaaaactattcattgtcacattttaaagtttatttcccaaacatgtttgtgttaccagttagtccatcataaaatagtcccagtttatggactacatttattttttaatgaaaagggtattaatatgttattttcaattatgattttcttttcaattataatgactatttcaccatcagaaaaggtgagttaagttacttgaaggaattatttaataaagttaagaaaatattattttgaaacattatcctcagaaagaaatcaatattattagattatgcgtgatcattattttctaggtggttttctaaagttcctgaaaggtcattcagagcattgggaagaagaaatttgggatagtagtaaattcaaagcaatttcaccagtgcctgtacgaaataattgaatggggaatgaccttgggttgtctgtttgcaagaatataaatgtctaattaattggccgtgtctacctgaagccactcacattttaaaaagtggggggaatatctttataataacttttcaacaggatatcagacatccaatatactaaacttcttatgatttatgtgaatattttgctaatatgtactcttaacatttgaggaagcaaaaatgcaatattaggatttggtacatgagccccagaaatttaaacagcttcaaaacaatgttaattatcttgatttaatcatcccacaacttatctatgtatcaaaatatcacattgtttaaataaatatagttgacccttgaacaacatggtggttaggagcatcaaccccacctcatgcagtcagaaatccacatataacttttgataccttcaaaacttaactactaatagcctcctgttgaacagaagccatactgataacatagtagattaacatatatttgtgtgggtattatatattgtattcttataataaagtgagctagagaaaagaaaatgttattaagaaagtaataagggctgggctcagtggctcatgcctgtaatcccagcacttcgggaggccaaagcaggcagatcacttgaggtcaacagttcaagaccagcctggccaacatgatgaaacccagtttctactaaaaatacaataattagctgggcgtggtgttgcacacctgtaatcccagctactcaggaggctgaggcaggagaatcacttgaacctggtaggcggaggttgtagtgagccaagattatgccactacactccagcctgggtgacagagtgagactctgtctcaaataaataaataaataaataaataaaaagaaaaaaaaaaagaaaagaataggaagagcaaatatattaagtggaagtggatcattgtaaaggtcttcatcctcgttgtcttcattttgagcagactaaagaggaggaggaagaagaggagggattggtcctgctatctctgggtagcagacgtggaagaaaatccccgtacaagtgaacccatgcagttcaagcccatattgttcaagggtcaacttatgtacaattattatttgtcaattaaaaacaaaaagacaatagaacatacttgaggttgacaaaaacgtgagaaggatattgctgtaggattgattgtttactaggtgatcttaactgactgtcatagtaatctaagtacattctcgctgtttctaggatttctgaaatctcaatggaggtagctgaacaaggacgtggaacaacaatgactcctccagctgacttgattgaaaaatgtgattgtcccctgggctattctggcctgtcctgtgaggtaagctacctcctactaacctgcttaatctcaagtcacttcaggagctaaatggaaatactcccagaagtacctttactgcatacatattcttaatctattttatttaatcttccactcacagtgtgagacacagtggcaagaggataatgttattgatatttagtacaaatcatacctgaagggaaatagttgatcaaaaatttaaagatttgtgaaaatatttaacaatcaggaattaagaatgttttaataagcctatttattatagctgatctattttcttggaccacttctgaagagttagagacatttaaactgcaatgattaggagataggattatactgggttttgaaaatatttttatatagaacacgacaaaacttgtacactaaatagcaggctgttccctttaacataagcttctcagggaaacatatctttgttccaacagtgctgctatgagtcattacagttataaaactatcttttttttttacattttaaaagtaattttaaaactgcttttcaataaacttgctgagatattctcttgtctgccttcaagattgtcaaatttcttaggatctaatttctataattgtgaaatattaataggaacagtacgacttaagggaggtggaatgaatagatgagaaactggcctgggtttgaatctcgacttcaccatacagtaagcctgagaccctgcactgggtgctacacctctttaggctttagcaggtaaacaccaagtccctgagtaactaccactacactttcacctctcccgcagaccccacagtctgaagcctggcatgcatggggcctccaggactgctccagccctacagctgggattctttctcattagtcaggctggctggtgctcacagcataccagttagatattattaaatctccctcacctacagcctgagtcttatgaagactaaatgagctgttaatgttaaggattcatcacagcacctggtgtgtagatgatgtaagttttgatggttaatattattattaatgtaatcactagttatatacccatgtattgattcagttataaataattttatacatcttattttgtaaataggatttgagaagttgtattaagtatggtacatgagacagatgattccactaggtcaaaactgaagtgcaacttaaaaataatgagtatacatttcttgagagggacatggcatcatgaaaagaaaaaggaatttggtttcagtgaatcctacctagctgcactacttggacaggttacttgctctgtttttgctaaatcttgggtttttacctatacatcctaaggattgatttaaatggaaacgtatgtgtgaaaatccctttacaaactgacatgccattcagcttagttaccatcacatggattccatatagttcaaggaaaaagtttataaaataactgcaactgttttgtgacacatgcttaaaatgattttctactctttcctgtgacttctctgaagggcaatatttatttacatgtgtccattttgagctaataaataatcaagtaatccatctccttattaaattgtatttcctacatctatttatacacacactagtaaacttatactggtaagcactgcttatacagtaagcactgctctttccaatatacatatgtacacatagtgtatgggtgaaaactgagactgtgtggcacatatgaaatgagtgacctttccagtgagcattgaagattttaaaatggaggacagaaagaatgtgagatttttctagacaagagatggaatttcctttatcccaggtagcgtttggttttacttttaactgtgtgcacttgatcaatgctcttaattgctgtagaccttcgttattatatagctatccaatctataaaatgacagattgagttgaagttctaaaattctctgattctgcaatattattttgctatagaaaatattctgtaagtagtcaaggttgacctttagatatcttgaagagaaggttattacagctatatttttctgcatttatttgaaataatactgttcacttgtgaacaaaaatgttagtagaatagcaaattattttcatgcaaccaaccttccattctggatttaaaatgttaaaaacctttcttcatatgattgatagactttttgaatagtacattcaaatacatgctttcccattaatttgagtcattttccatcattatatgaaaatgtaaatgagcacaaataaaacaaatgataaatgaaaatcaagaaaaactaagaatatgtacaaattgtcatctgcattagtggcttcaccgtcccatgactttcacttaagcatctatttacagacagtaattgcagtaatatcttagtagagagattacagagataaagacctatctctcataataatgtacctgaagtgttttccacaacccatggcctctaatccattatacctcttatttataattcatcttgattcctaagtgtaattacccaggcataaaatcttatcatcaaagcaagagctaagggcagttttgaaataatacatcccattccagtaacatatgctttgggtcatgaatacacaaagcagttcctctacaatatttttacaaaatgtatagtattctagagacatctgcatctacaggctattttatttcatgtttttatccacaatatggttgcaagtaaacaaaattaagtatcagttactgctaaaatatagccagttgtaaagactcttagcctttgcttgttacctgcactgttatgacagtgcaggcctggtcattaaaaatgttagttttagaaatgcctaattattataatttactatttgcagaaggggccagattaccttcaggagtcaaacaaaggacaccatttcctcaccagatttcttggtgttggagccattgagtttgttatactttatttaacctgtctttgagtgacattaaatataggttattgcccaaactgacctaaactgagctttatgcagttgaaaggttatatgcaggtaccattcttacttatgactttctttcttaaatatggaaaatattcagccttgcgtgtgcagctctctgcagtaatacggaaatcagaaatttgtcaatgatctctaggtcatgttttgatagtttcagcttctatcctgtcttcccatattttaaaagggctttaggcttgcagttgaatggccggtgtctattggatcgccactcagaagctgtcccttgtggctattaaaactgatttttttaaatctccaaataatttatacctatcgtcaacacataaagcccaaaaggcaaaatgtgaaaatagtcttagctacttacatatgcacacatctatcctttatcacttctgttgcacaccagagacccaaagtctctgttttcatgtacagacaagtgttgaggaacatggcatgggtaagttatgttataattttgtttacaaatataacctaaaacaatcatggtatctttatttttagtttatttccagcaaacatagaaaaaactatttgagatagagaaacctattgatttatgtatgacaattattaaacatgctttatctcaagtaatcctcagatccaccctatgaaaagcagaacctaccattgattgagtgcttactatctcctgtacacttcctaatacagttacaccaacatcatcgactataatttatgatccccattttacgggtgagagaattgaggcccatgatcacacacctacacagcaattcaaacctcaatgaatctgtttccaaaacctaggtaaacttgtactcaactattatattatgcagtcatgtgctgcttaacgacagggatacgttctgagaaatgtgtcgttaggtgatctcctcattgtgcaaacatcatagagtgtacatacacaaacctaaatggtgtagcctactacacacctaggctacatgggatagcctgttgctcctaggctacagacctgcacagcatgttattggtactgaatacagtaggcaattgtaacataatggtaagtatttgcatatctaaacatatttaaacatagcaaaggtacattaaaaatatagttttataatcttatgggaccactgtcgtacacatggtcctatcattgaccaaaatgtcattatgcagcagcacatgactgtacaatattcctacattccaggtgaggaaaccaaggcacacagtattcagaaccttactacatacaaagtggtgaaacaggaattaaactcgggtctgcctgattgcaaaatccatgcaaagatacaagatagagtgtttttatgagctccagcacaagcatctatttttattactaaactctgaagaaagaaaggagcgcagtgtgcagccctgagcctaggataggataggtctctacagtctgcttcattctctcctctctaccctcccacatttttgtgtaaatttaatctaattttttgatgaaacaatatattatgaaaataaattaaagatagacgagagcagaagaaaattgagccatgaataatttcaacagtggggaagagaactttggaaaagtttaaattagagtagaaatgggtaagaggagctcaggaaagtatttatttgcttttctttaattccccattgtgttccagaaaggattttagatgggactcaaaaagtaacttttttgcttccaattccaacataatcattctcacaaacttttgtctcagttcaccaagaggaaaaacattcaatattgacaaacaccctaaaaattatttaaattgaaagaatagtgcaaaataatcaaggaaaagagagaatttctgtttttttttttaaaaaaaacagcacgttttaagtttctaatctttgcgttgtcaaatactctctctctctcttttgctacctcatagaaatttaatccatcaggatacgaaataaatcaaaactaatctaaaatgttaaaactgaaagacactttagaagtcatctgagttaacctactcatttgtgggatgaggaaactgggtctcaaagtaacttgcccatatctctcagacaaaactaacataaaatcaaggcttccctattcattccttttatagtaccaaggagtggtatgcactttttatgtatttatttatttttttgagatggagtctcgctttgtcactcaggctggagtgcagtggccagatctcagcttactgcaacctccacttcccaggttcaagcgatgctcgtgcctcagcctccagagtagttgggactacagacacgcatcaccacgcctggctaatttttgtatttttagtcaagacatggtttcaccatgttggccaggctggtctggaactcctgacctcaagtaatccagccacctcagcctcccaaaatgctgggattacaggcgtgagccaccatgtctcgccttttccatgtgcccttttaaatgcacacatacacaacagagaataaggagcttgccagtgacgctgcgctctaattgtctgttagacttttctaagagttttaaaacaaactcgggcctcaactctcccccagaggaattgactccacctcctctagggctggaccggaccacagactcccactatgggcgcttgtctattgtgtcaggctgcctgtcggggaaaaccacagtaataggaaaaatgtgttgtgcgttagagtagacttcaccttagggctcgccttcacatttggacctacaacgctaaactgtacaattcctcgatgaggagtattacttcttgtgtttctttttcttctaagatttattttaaacttttgtttgagcttcaaggaaacttcctctcaatttgtgtgattttttacacaaatttttacagacagtaattacagtaataacttagtagagagattacagagataaagtcctatctctcatagtaacacacatgcatgcacctagcaagtatgtcaataacacaacaattttatatatatataattttatatacatatttatatattatatatattttatatattatatatataatttatatatataatatataatttatatattatatatatataattaatatatatattcaaggatgaaatccatgcacagaaaatccagttttattcagtggtcagcttgctaaagaattggaataacccacactatgaaccacttttaaatagatcttggtttatttcttcagttatgcttaaactaattcttcaaccatcatttccaggacttattcaataataatggcaaaaatgaaccttgctttttaaataatatgtataaactttattaaattatatgattatgtccaccataagacaaataagactcaaaatagtttgaatactattctcagttttatcagcttgctcaaagttgggacattattaaatctcattagaatttattttaggctgtgataaaagcagagagtctcttgattaagtgcttaattgaagtacttttgcattatccaaatcaaaataaacaaggagggtgctagctattaagctagatctttttaaggagcttctttgtatatttgtctctggactgtctaggccagaaccaaagggatgtggaggtactagaaagttcttaatctgatattttttctggcttagtcagcaatcacttttctttcatcaatgggcataagatttttaagtgaaaaaaaaaaattctacttaaccaaggtggtaaaatagtccccttgtaattctccatgggatttgaaaaactgactcctaccttttattcataaatcaagcaatgtctgcagctatgcatgaggagaggactgagcctgaaacacaagacggttttcatcttcgtgccagagctgtggactaccttccagaaagccagagatgtttgttgatacattttcataataaacccaaatgaagatggaagtcttgattttgcatatgtcagcttcactagaagttttctgtttgctttcagatttttattgcaaaaagaaaaaaattatatcagggaaagataaattttattggtggtctaatagtcgcaagacatgtacagcttttattattttggatttcttacttttatagtctttaaattatatcagtataaataatgcatccataacactttttatttagttttttgctgtgtttcattggacatttgctagttatccatcaagcacagtaaaagcagattttaggtgttaaagacattggaattatctttattccatatgacaatgttatttaaaaacaaacatctttttcaagaaaaatactctttggagctttttcaggctgaattgtatctacaaataaaagctttccttggttaaaatctgattacacatggatgccgcccgaacaccttggagaccaggaagaaatacacattaagtatcaaaatcggcacttgcgtttgtaagtgatgttgcccctgccgcaggtgggggaaggccagtctgtctttgcagccactgaagagctcaagcgttgctaatgcagtatttctaactttgctgtcctaattggcttccttttctttcaggcatgcttgccgggattttatcgactgcgttctcaaccaggtggccgcacccctggaccaaccctgggcacctgtgttccatgtcaatgtaatggacacagcagcctgtgtgaccctgaaacatcgatatgccaggtagtcctctgagccttccttgaacaaggtccatgtgctcattcctctttacacatgctcagcatctgcatgcagaggccagctaaactgtaagggaatgcaactgtgtgtgtgaaataaaatatgtaagggaaaaagatattcacagattctgcattttaaaaagtaaggaaaaaataactgggagaaccactgagcatgtcaagaaatagaattttagcagcatcttagaagagcaccagaagacatacctatttaaaaattatgtgtgcctttttttctgattattttcttataaataaactttctataaaatttggaaattacagaaaagaattaagaagaaaaaattcacccaaaatgcaacataacattttaatgttttaagtatttcccaccaatttttacatgtgtttatgaataagatttatataacaccatggatgcagttttatgtcttgtcctttacatttttacctatcatgaggttgtattatgttgttagatattatttaaaatctttacgatctttgtttggatgtcccataatttacccatttcccttagaattgaggtagctcttatttttttatgtttctgctggcaccctgcactctctaccaccatctgcattagaacaatcagaacaatcatgtgttccaccctttttatcgtagtcactgtaagaaattcaggttgcccctgtcaccacttgtccctcaagctgtaatctgcccacagctcatctttgttaagcccatctcccacctctgctcaccttctgaaaccattctactgagccttgtggaactcatggtcaaaacaggcaaaataccccgcagaatcctcctcttccctcagtgttctcttcatcatgctctgactgaaacccaactctcactttgcatgctgctaccccggcagccctcttaaggagtagccatcacctttttgttttttttttcccctgagatgctgactcactctgtcgtgcaggctggagggcagtggcgatcctggctcactgcaacctccgactcccgggttcaagtgattctcatgcctcagcctcctgagtagctgggactacaggctcacgccaccacacctggatattttttttatttttagtagagacggggtttcaccatgttgtctaggctggtctcgaactcctaacctcaggtaatccacccaccttggcctcccaaagtgctgggattacaggcatgagccaccatgcccagctgcagtcgccatcactttctttcactcccttcattcccctgagtctgaaggtgggggcaggttttcctgctcctcgctgccagtttcatattatccatcctcctctacatcagggtccacaacccctgggccacaggaggatattggtccgtggccttttagaaaccagaccacacagcaggaggcaagcagcaggcaaaggagcaagcgcagcttcattagcatttacagctgctcctcattcctggtattactgtactgcctgagctccacctcctgtcagatcagagacagcattagattctcataggagcacaaaccctattgtgaactgcacatgtgagggatctaggttgtgcgctcctgagaatctaatgcctgatgatcaatgatctgtcactgtctcccatcaccccaagatgggactatctagttgcaggaaaacaagcttagggcttccactgattctatgttatggtgagttgtataattatttcattatatattacaatgtaataataatagatagtaataataataatagataataaagtgcacagtaaatataacatgcttgcatcatcacaaaaccatcccccaatcctagtccatggaaaaattgccttccatgaaaccagtccctggtgccaaaaacattggagacgctgctctacagcacccagctttgactctcatgcttccctctatgtgccccctctccatctgcttgtcgaagtcacctactaacctttaaataccccacatcattccttgctgattttccctgtctaattgtcattttccctagcactactcctgtcatcattcttagtgattttaatgtccatgaacttaactcttccatactcttcactttcagtttcttgtgcctctctggtctccatttgaagcgtttttttgttgttgtttggtttttgtttttttttttttttttcccactgtgtcgtttctctctagttcacttcttctaaatacttccacttcaatgtgtgtaatctcacaattgatgcacacacttttttcttgttccttatctcatgctttcactgtagtaaccagcttaatagtcatgatctttcattggtattactgctttgcaacgctcatttccctggctactcctttacttattttttactcaagtgaactccaacactgtgagaatcctaccatctcctccatacctgcaccttctttttttttttgagacggagtcttgctctgtcacccaggctggagtgcagtgacgcgatctcagctcactgcaagctccgcctctcaggttcaagccattctcctgcctcagcctcctgagtagctggaactacaggtgcccaccaccatgcccggcttctttttttgtatttttaatagagacggggtttcactgtgttagccaggatggactcgatctcctgacctcatgatccatgattcgcctccttcggcctcccaaagtgctgggactacaggcgtaagccactgcgcccggccacctgcaccttctaagctgaacgtggctgtagaaaaagacaattgtgccatctaatctcaccttaaattcatgatccctctcttcaaatggaccctttgtgctgctctgcaatcatgccacttttctctcatcctttttcttttccacattcctaggtgattatttcatacctccccctccatcctcaagcctaaacctctcctctcaccccctcccatccttaccctcagttgatggtgttgcctcttatttcattgagaatttagaagctgtcagaagagaggtaacaagctcccactactgcatgcacccacttttctgcatctgtgcccaattattatgactcttttctattactttggatgaattattcttgtttccagaaaagatcacatcttccccctatgttctcaattctacccctctcccgcttgatgacatcactctggctaatctctcctccttcttatattgtcactttttttttccatcttaaaagcaaaaacaaactctcctgactcatttcctttctaagtaaccacttcattcttctccttccatacaatggagagctgtctatcccgtctataatttctcttcatccattctcctttgaattactaaaaacaggctatcacctcctcttctatactggattcaatggctaatctacagccaccagtgttcaccttactatatctaacagccatgtttgccactgtgaatcaccccattcttcttgaaaccctttgctcaatttgctttccagcccatggcattctggagatgttcaaattccatagtggctccttctcagctttcttcattactctgaaatctacatagtggtattcctgggactcaatccttggagcaatttgtttctctaactacattcattcagatggtgatcttacccaggcatgtggctttctgtactgagatattttgatattgacatcccacagtatttactattaagtttatgatttaattttatatccactcattactatggtgtggggaggtaatttttctgcagatatgtattaccactgtaaagaaacatttactgattaatatttccttttccccttgatacattattgtatctgaacatacacaaatttatttcatccatattaagatatgtttcagtataatccattttgttttacttaccttttagctcttattacaatgttctgcttaccttcattttatgttaacatatctgtaaagcaaggtcctttatttctcttctcttctaattaactagatgctcttacatattcttccagctgacacttttatgcactattttaatctcttccacaaattttaattacaatcaaaattactggaattttgattgtaattaaattagcctatttgtaaagaattgctatatttacactagtcactcttctctcttcagatattttatgtcttacagtaaactgttttaaggttgtctatatcaagcacgcatttctcatataaaaattctttctatgtatcttacattttcattttaatggtagtaaacattacctgttttgtttcaacatagtaaatgtactaactggtcattattggtaaaccttaactattagaataggtgtttttacatgtatttgatatccaataacttttattttagttctagaagtttatcagttgattcagttattgttaagtttaccatttttttttttttttttttttttttttgagagggagtcttgctctgtcacccaggctagagggcagtggtgctatcatggctcactgcaacctccacctcccaggttcaagcgattttcctgcctcagcctcctgagtagctgggattacaggcacctgccaccataactggctaatttttgcattttagtagagatggggtttcaccattttagccaggctgatttcaaactcctgacctcaagtgatctgcctgcctcggcctcccaaagttcagggattacaggcatgaaccaccaaacctggcctataatactattatttgcaaatattataattgtgctttcacttgtcaaaagctatatctgttataataataatttcatgtttttaaattgtctcccaaaataataagctttctattttattactgattttaatatgattgccttaagtctttcaccattaagtatgatgctgatggttagtataagaaaaacatttcttgtcatgttacgaaaactgctttctattcctagcttcttaaagatatcctctttcaatcaggataagatatttaaattactcatatgcttaattgtggagagtggagtgggaatgtagatgcatttaagaggtgatcatatataggtttttcaccttaaacagaaccataaatgatattattgactaaataaataacttaatattagccatccatgaattccagaaataattactatcttgctttagtatgctattttttcatcaactgcttgcctgacaaattcaataggcaatttgagaggaaggggttaatctatacacattcttaagcaagaattaaatgtatatgtcttatgcaatcttcactggcatttttagcacagttatatttgctttatatgattaatttagaagcatttataaataatgcagtttaatttcaattttgttaggattaaaattaccgtctttatactgtcctcttttgaccaattgactattatgactatttttgttctctaagaattctaaaagcatgtctattttctgaggaatccctagatgaagtaaaaaataaatacttccattaaacaaacacagctggtataaaccgttatgctccaaatttttatattttctttcatggaactcacaacttttgaatttaggcaactctgttcatctttgaaatggcctcatgaggcaaataagaaatagctgttattactcccacacagtaagtgaggaaactgaagcatactgatttctcttttatgtgcaatatggctctcagtttcatatcatatccattatacagtgcaatgccctctaccttggtatagtggcaagcatgaactctgcagtcagagtgccttgattcaaatcctggcttcaccccttactggtagtgtgagcctactcaatttatttaacctgaatgaggtcttagtttcttcatttatataatgaaaacaataatagtggctactcacagagtttttgtaaggatttgatgaaatactcaataaaaggcttagaacattacttagtgcatggtacgcttcataaaagcaattatgataatgatgatcataaagatgataattaccatacacattatctaccatttatagtcgaagaaccaatcagttgataattaatcaaaaaataagtaaaaaaaattcatgtctagcgctatgctagattttcttactgtctcagtccatttcggatgttgtaacaaaatatcataaactgggtagcttataaataacagaaacttatttcccacagttctgaaggctgggaagtccaagatcaagtctccagcaaagtcagtgtctggggaaggcttctttcctggtcatagctgaccccttctttctttgtcttcacgtgttggaaggcactagatagctctctggggtctcttttgtaaaggccctaatcccactcatgaggctccagcctcatgatgtaatcacctcccaaaggccccatctcctattactatcacactgggagacaggatttcaacatacaaatttttggagaacacagttgttcaggccatagcaagccttaacccccaacatgatgatatttggagatgggcactcacttatcttgtttttctttatcttcacacctttccctgaaaatataaagtgcataggaaagaaaactgtagaaagctttatagactaaatattttaaagaaacccagatcaccttgtaactatgctcttcatcatacctaatgatacttgcaagataattgttgcttcatcctaggcattaataaatcctgtacataggcatgttattatgaatagctcagtgacattgctccttaagaaaaaaaatttttttgaagactaaaacctatgtaatactgagtccaaggggatagcgggaggtaagtgaactaacagtaactagtacacacacataggtagtaagtaggtagatagatagatagatagatagatagatagatagatagatacagaaggaagatattttcatttaatcattgctacaccctgtagtcagattatttctcctattttttttttcacatgggaatattgaagacttagctagctcaaacaactttttaaagataaaataatttgtggaaatattattttcactctatcataattcttattttaaaaagaaaataataaaaataaatctctataactgatcattgctgttgcctgaaacatttaaccaattacctctatcttcagtaaatagacagatttgtaactagaattcactattttttgttttgtaaaccttatttaatctacctaacaaccttgccagaatagagattgttagcattatactaagttctggaaattaatgctaagaaaatgtaagcaacctataaagccttgaacaaaaagtattagaagcaggtttcaaatccaccacaaactgcgttctccagacggcaagagagtgtaaacactctctgctgattaaatgagtttgattttacaagctcaagtgaattatatcttagagtcgggacagaatctgcaaaagtgactaggggtcatgtatggaaaacacttgagaaattgtgagaacataaaatttgtcgcaggatagtaagcaataaaacatctttccaggttttataaaggaaaataaaatgtaggaaactgattgtcatctccagtgaaacttaagtattgcttacttaacaaatatctgtcaactgtggaaaaaataaacagtgctcattaggaatcagaataggttcactttgtcagaggcaatggctcatgcctgtaatcctagcacttttggaggccaagagcggaggatccaggagttcgagaccagcatggtcaacaaaggccctgtgtctacaaaaaattaaaaattaaaaaaaagaataggttcattcaaaataacacatatcaaactaagtgctaggtttactgtatatataatatctgaaaacctagttttctaaatcccagtaaaatatcaagtttatcagacaatgtgatacatcatatctcaaattcagcaaaaaataataactgctattatgtgtccaaaactgtgtatgtaccaggaccaaaacaggtcactgtacagagattttctcatttattgttacaataaacttatgagatagacaagattatttcttcttttattgttgatgaactgatgctagagaaattaaataacttgcttaagtcataaaacagcagaggccatatccatgtttcaaatgctggtttgtttaaatagatgtttgatgagctatttcatagtatccttgtgcacaagattgaaaatatgagccagatgttagccagctgataggttgatgggcatatacgttgctaaaaaaatgtgacccagagtacactctagtgatatctccaatgatgaggcgtaagctttgtatttgaccttgttgtgttcaaaatatctgtaaatgctttggatgatatctatcaaatattcagataatataaagctgaaagtattatctaatgtgttggatggtgggaaaatatcctgacagatgatactatgaattacagttaacaagatgagattaatagaaaagatttgaactcaggtaagctcacttgtttgttcattcctgtggcatctgttaattatgtttccaacatgcaggtctatggcctatggtagatagtaagaatatgaagactgcatgggtcttgccctctaggagcttattctctagtttaggggaaagaacagaggaaatgacacatattagcaattcatgtgaagtaagagtccttacttgattgcagattcactaggtgccaacacagggcattgctatttgtataagatccaaatcaagggaggaagtacatttaatatatttgcaagtcacagctagagacttataatctactatattttgaaagaaaccctgagtaagattgctaaatgtttagcttgaaacaaagatttaggaagtaatagtattcttagatatttgaggaccttccctaggaaaagggaattagacttaattttcatagcttcagaaggcagaacttggatcactcactgaaaattagaatgcatcaaatttttattcaccgtaaggaaaaacttcacagcttatgcaagacgaaaaaagctgtcttataagaattcatgcatttaatgatatctcaaggaaagtatagaaggcattcctgtatggcaagaaggttagattaagtaatttctcaccttaggcctgagatactataatattaatgttatagtcatttgattttgtagaaggaatatataccaacagttttccagtgtgcaaaaaaaaacttaacaaatctaatatattctgatgtattattgaagagatactagcacataccactcttgagaatataattaaacttctcattaggcatccaaaatataggaatttcccctaatggctaatttttatataagaaaaaatactatgtacactatttcaaagcagacagaaaagtcatatgaaaagggtatgtcaaaaaagtttcaaaaagaggctcctgatttatgtgttgtgtgtttgtggacctaaccaggacatttgattcaattaaccaagtttagtatgtcagcaaccctctgaaagattgagaagattgactgtccagagaatattacaatatttgctttctctgttgaagaaattatgtagacttacaggtataagagaaacaaaatcatatttttgaatctcttatttttagtaatgattattggctttaaggattttaattcagttactaatgttatatttaggttacataaaataattcattatgcaattattttactgcaaaagcaaaaggctgaaaattattgttgaagatcccatgtatttttggcacattcatctctataaaataagttcttaaaacactccccagttaacacttattcatcagcatgacaccttgctgaatgacttgaaattataattcatagataattattttatcttggagccattatctctcataatgctactgttaaatatggaatggctcttttattgcttaaaaatggtggttcctttggatggttgaataaaagaggattatggcacttaaatcaatggcaaaatatgacaaatcattttgccctgctaaccacttttctgcaatgacacttgaaatttgggctttttcatctgaaaaagcctgaccagtttcatctatacttcctggaacatgcattcattcattcagtcattcaaaatagtcatcgaatgcctcccatgtttgatgaactaaaaggagcatttaagccagttttaggtcatcggggaatgtttctcagagaaagtgacatttaaaatgagagctgaaatgaataagtgctagcctgatatacactgtagagctaaggatttgcaaatgaaaagtcccagcagtgataaagagtatccgcataatttgagaatttcagatggccccatgtggctacggcattatatgcaaagaaagcagtggctacagctacatatggaggggtaagcacagtggtggtgaaggcgggggtgggggtggcaggtaatgaagctcttccttgccatgctaatgatttgttattcatcctgactgcatttgggagctagtgtaggctttcaagcaagagaaggtcatggtttgatatgttcataggatgatcactctgcagtgtggagaaatcaccagataagaaaatatggagacaggatctttagctaaaaggctattctaataatccaaataaaatatgacagtggccagatgaaaatagtagcaacaagaaagtcaagaaacagagagtaatagactcatggaactgatgatctaatggatacctcggataagagaggcctctaggttgctgaccttggcaattgagtgaatgacagtgacctcagatgaaacgagaaatacaggagtattacaaggtttagcaagagatgaacttcattgttgtcatttcaaatttaagacgcttctgtgttatacaatatttattcaagaagcaattagaagcagaagtctggaacccattagagatatccaggctgaatacataaaatacagagttttgggcacaccattaactgaagtcatagtaatggatgaaatcaccaaggtaaatgtggaggagaaaaaagagatgaggaccaaagttagaattaagggcgtcaattatattgaacagaaagggaaggaagagtcgataaaggagaattcgagtagccgcagaagtaggagaaacatcaactggcttactcttaaagaagccatgggggctgggcacggcagctcccgcctgtaatcccaacactttgggaggccagggcaggcagatcacggggtcaagagatggagacgatcctggccagcatggtgaaaccccgtctttactgaaaatacgaaaattaactgggcatggttacgcatgcctgtaatctcagctactcaggaggctgaggcaggagaatcgcttgaacctgggaggcagaggttgcagtgagctgagatggtgccactgcactccagcctgactacagagcgagactgtctcaaaaaaaaaaaaaagaaagaaagaaaaagaaagaaagaaaccatgggaagagagtatccagaaatatctatcaatggctacagaaaacctacatatgaggcctgatgattgtaagttttgctttagcaacaaagatcttatgggtcatcctggtattatgtttaatggtgaaaccagaagcctgtttaaagggagaatgggagatgaagaagtagagaccaggaatgtaaacaatgtctttttaaaagcttatcgaaaataggatagaaattgtcaagcaatttgagacctcacagattttttttttaagacaggaaaggcttgaccaatttcaaatattaatgagaatgagcctgcaaaggagggaataaagatggtggagaaaatggggaggcaggaggaaaggaaaccaatttaggagtggagtagcttcagacaaaggacggaaacaaatgtcaaagggatggaaaataatgtggcaatatactgaattgtttgccaggaaaccaagggagcatccaaattagagctttcttatctcttaaagtagggtaaggtgtagaagtagaagatttgagattggctgggcacgttgggaggctgaggtgggtggatcacctgaggtcaggagttcaagaccagcctggccaacatggtgaaaccccatctctactaaaaatacaaaaaattagcctggcgtggtggtatgtgcctgtagtaccagctactcgggaaggtgaggcaggagaatccctttattcaggaggcagaggttgcagtgagccaagatggtgccactgcactccagcctgggcgacagagctctgtctcaaaaaaaaaaaaaaaaaaaaaagagaaaaagaaaagaaaagaaaagaaaagacttgtaccttgtcatattggaaaaccagattcatttcacattgttataaaatctgtaaatgtcacaatataatttcaaatataacaccaaaaatgtaaaaaataaatgatctaaaattcactgtggcaatgtcatagtttcactgcaagaaatagcataaactctcaaaaagagttaatagaagttttaaacaaacattaattccatggcaatatctgtggtggaaatgacgtcagctattgtttgttgtgaattgccacacattccctaccaacaattgtctggccattagaagacacatgaaacataaatacattcttcttgattgactaaatgaagcagagcccagtctatgggatatcatccaagttcaagctggcggcttcgtggctccagctgagattatcaggaagtcaattcactaacatgtccatctagtttgtaactgacttttttgtttctcaacttttctttcgatattgtttataagatgtaagtcactattttgaccactccaaatcctgtcttataaaatccagctaaaattcaattccaaattcccttcttcctttttctcaactctcaaatgcaaggatcgcattcccacaagataacattcaatgttgcattcttgctgccatgtttattttttgtcaggtggtttttttaaattattattttcccaaagtctaagtaaatttctagaaggtaggatgttctttcattgcctgtttcagtgcattccatgtagctcttcctaactccttattgcataattgattattgtgttaaatataattctgcttcatgaaaattttaatttgaagctatttgcacactattctgaagctattctcatttctttgtggaaaggtgttaaagggtatcaccccaatgtctcttattatgcaagcataagaaagaagatatcgatctgagattgctagttttagattgactcctctgtatttatgaagaaccacctacatctatgctttccaccttgaggtggtttcagaaagcccactagtgggcatgtgccaaggccacagtatttgtagcacctttttctaacatctcatagagctaaaacctgggatatgaagaaacataaatgcctagaagaaataataaattttagagactcgaagtctattccccaatttagagtaggagaaaaatttacatagagattgattcagggaaaagagaatagcaactcttattgtcagtgtagctacgatagcacagtattagtttctcaaatcaaagagttcctttaaaaatatttatatcaaagactgagttctctgtcagtgataaagtgtgtgtgtgagtgtgtgtgtgtaagaaagtatatgtgttcatagacacacattcatagctagggactgtatgataaattacattctaactatcactaaattaaaaacaaacttcttctcccttttcctttacagaattgtcaacatcacactgctggtgacttctgtgaacgatgtgctcttggatactatggaattgtcaagggattgccaaatgactgtcagcaatgtgcctgccctctgatttcttccagtaacaagtaagattgagaaatataaccatatttcccaatcagaaacgccatctgtctagcacatgggctgtctatgatttggctattttttccatgtagacaaaaatctcaatttaagatagagatatttttaataatatagaaacatgacaaaagtgagtatataatgctctatggttcatttttcctttgaaactctgtcccaagtaaataatacttattaattaaaattgaagtaccaatattaatgtaagacatatttataaaacaaatgatatatatatacaaatatgcatggtttcataaatataccagtctaatgcttgcatatagctctgcccataatatcatctatgaaggattgttcgggtgcatattatataatttttgtggctgtttccatttattttatgtgtttaattcaagattgggaaataattatcaagaaaacattgaaaaattgtacaattaaagcaggtgacttattgttatgctccaaaaaatgtcatctcccggaatcacagcctcctttttcttaagatggtctgagcttggtaccatggaaacacagccctaagaagaaacaaaagctggaatatcttatttcagtgctgtctgaacattctgcactggtttatacattgatgaaaaccctaggtgttttcatttacctttttgcccacactacctgcactttctgttaagtgatttatagacttcagtaaggcagggtagttttactctaagaatttgcttttgaaaataatgtatggcagtttgttcagaattagaattctggacactttatcttgagtgttaaacagccacagagcaatttggacaatgtgatctttgcacctgtgcctactcactttcttcttaatcttcggctttgtgtgcattctgaaaacatttcctgtaaatcatctccttttcctctgaaagctcctcttttttgttggctggaatcacaagccttttacagggtgtcaaatgtcaatttttaggtaagctggatattgaagaggataatatacatggtcttattgttcatccagggaccaagtagtatgtgtatgaaaaataacattatttttgtctctctttccctaatttctccttgatgccccgatttatttaattgttttaaaaagtaagccatttggattagaaaaatttaataattaattgataattccctggtgagtacactataataaaagctacaggagatatacaagagaagcatgccattttttggaggagctcactgtaaaacctgtgtgttaaggggtatcaacttaaatgtaaagaaaattcaaaggcacaaaacaccacacttaatactggaagcttcaagaacatatgaaaagaaatagtagcatgtataatgggtcttaaacaattaatttcaggattttcactggtgggaatagtaggaaattatatgggcaaatgcttacaaaatacaaggcatgtgcaaaacctaataagtaacagaatttggaacatggcgttcagacacaatttcatgatcacagatgaaaatgaatgggagaataaagaccatattgtagaaatccttaaataccagtctaagaaatagttatttaattttctatgtaataaggaaacactacaagtttttattttgaaaaaaaggttaatatgattatggccacattttaggaaaactattatcatagaattgagtataatgaattgaaacaggcaaatgagaaaagcatagagaccaattaaaaggctagtatactagcatgggcaaaagataattagaaccagaagtaggtaatagtaataagaatggagacaaaggaatgaatgtgagaaaatggtttaatacagctttacagattcggaaactaattagatgtgaggggtgagggtccgggcagaagttgaagacaggtttttaggcaggttacccccaaaaatggtggtgctattaactgaaatggagaaaccaggagagagccgttagagaagaaagataatttatgtttcaaataggttcagattgatagaacatatctgtctgaatggaaatatgcaaatagctgcaggaaatggaaatctgaaaattgcaggagcagatgaaggaagagatatgttaataagtgaattaaagttggataagatttcccaggctaatgttatccaaggcgagtatatagaaagaatgaaagacaggactttatgttgggaaaggagaaaaagaagagccaaggcaggagcagtcagaagagagggaacccaggcggcactgccattgacaccaagggagagaagagcagtgaacagcatcagttgctgctctcacaagggagacccaatgaatatggtggcaattgactattgtaattgagcaaataaatgggcttgccgcctgaagcacatagaagccaataacgttggcactggcttcggagaaaagaaaggctttactgcaaaattgttcagcaaggagacaagagtcaggttcaaatctgtctccctaatttgggatatggggaaggttgcaaggggtcagaaggcaaggcaaaggatttagaaatgctggcttggcagagtctgattggagggcttcaaatttgatcacttacagtaaggtatattgaggcagattttagccctggatcttctgggccaatggacccctcatttctgaaggagttccaatgtccaggttttgattttgtccctgtcttgttggttcaaggggaggaatagttggttcctggtgttgttagaggtcaaaatttttctattgaacatgcctgggctacatgacttgcagcttttggctctgttatacctaaaaggtaacttgacattttgttatcaacagggtaggcccggttttggttggtcctgtagttacactctcagagtcattgatgaattttgaccatcaataatgaaagcagaatttgaatttacagttttaagaaatttcaagaataaaatgatagaatactaccctgattggttagcaggatcaataacagggtgtgttttcatttttgtttcattgttgttttatatgatttgtataatttgagtaaatttttatgcaaaagaccctgaaagaatcaaaatatcaaattaaaatggcaagttcagtggctttcaaactttattgattgcatccactgtaagatacacttttttatatcataagccagaaacacacaaaaacttgtgtgtgtagatatctaaatatatgtattatacaccatgccatttatttaattttgttattttacatttttagaaaaaaaattttagccaaaacctactcaatggatttcatgagtcacttatatcaccatctaaagcttgggacgtattaggctaattaacaaagtgaagacctataaattgtgagaagagaagaattaaaatgtgaagcaaagaaaccagccagggcaaagaaaagaggcacttctccccaagacataaaaacagattctgaggaatagatggaggaggctgagatatctcaatttatgacttcaatctgtgcagtcagtgagaaatatggaggcatgatgagtgattactgactcatttccacggcattagttcaagtcctcattatctcttaccaaaacaaatatggtagaaatttaactcttatgacggagtggcagtgctcacacacccttagaagtttccagtgccttcccaaggaaagatcagactctttgagcattagaaaccctctgtaatctgactacctttccaggctccaagccctcaactccattctatataatgccaagtttggcatttcttgcacttatctagacatcattagcagtctgctcttgctattccctcagacaatccctgtgaaatctaatttatttttaaaggcatttttcaaaccctacctctgccacaaaacctatccatagcacagaatgtattttgtacattttatatacaacgaacacattttactatacagaattatttcaatcattctttcaggagatgaacatttactaagcatatacttcatcccaacactatgaataaaagataaaagatatgtgtcctgtcctgtatgtgtacatatctgtgtctcacacagaattgtaaattctttgaaggtaaacataatgtcttatttctttctttattcaagaaaaagttaatgagggcccaactcaatgctaggcatggctcttcgtactgggaatatataagtgaacaaaacggcctgtgtttcctagccttctggagcttgtattttttataagagagtaagataaagaaatagatatataatgtaatatcaggtaatgacaagtactaccaggagaaataaaggagactcaaggaacttagagtgatgaaggtatgattttagatgaggtggtccatgatcttcacaaacagatgagacttgtgcagaaatgtgaatggtgtgagccatgtgaatacctgcaggaagaacagtcccctcagagaaaaaagtcactgcactggccctgagacagacccatgcttggcagataacaggaggccagggtggttggaacagagtgaatgagaagagggggctaggagatgaagtcagcaaagctctaatgaatatctaactctcctgagggctaaaaatcttccagtggcaagaggtggcttggtacaggataatccagtggtgttattgatggaagcaccagcagcatttgcagataggagataagtggagtgtgagagaggagacacggttgacaccatggtttttggcagagcaaatggaaacatggagtggctgttgactgggatggggaaaattagggaaaggtctggtgtatttttggagggggagaaacttacttttagatctgcgaaggtaggcacaatatttaaatcccttaggactaagtgagatcattcagaggagagaggagaagggaacagaaatcagaaaactgaattgtgaagcacgttaagagatcaaggacatgccatagatccaacaaaggaaactgaaaaggaacaaccaatgaactgggataaaaaccagaaggaaatggtttccaggaagcccatttatctctgcagtgtccataggagatgacacagagagcaagctctgtaaattttaaaaattctgttgaggggagtttggaattagcagccatagggaaatgtaaaagatggtcaccatgagaaaagcacaaggatttctgagtagccctgcagacaaaatgataattgagagaagattagggagttgtgaacagaaagaataaactcaagcttcaagtgagatggaatccctactccctccagaagaccttttatgtgatataaggaaacagtgcaatccaccataatatcataatttgaaaaaaattgtatcaactattcaagaattactacattcctatacagtaaacactttattatttttttattgacatttcattattttactataacgaaatgtaatttaatcatactggctctttagagtttctcttgaaatgtctaaaatctgtttcttagagcccatatatgtataagagtgtgtgtgtgtgttcgcgtatgcgtgcatgtgcgtgagtgtgcatgcacagatgcagtcagtatcaggctttaaatgaatgagctaaaaatttggcagagtgtgtcagttataagtttattttttgtgaaggcaaaaataaatttgttggataatgcgtttgtgagtagtagatcaatttgttcacatattttgcaaaagttagagcttattactcattcatgtactattgatgtaacgcattagaagacagttaacattaggtcctaatggcacctgaccaaaaggagctgtgggcctggcctatacaccttattgcctgttttcagcatcaactgatttagtgaagcagcaaaaagaaaaatggtgtgtgcagcattatctttctgccacagatacatgtttttaatttccaagtttccaatgcatcattcagttttatctaacgggaatgcagctgagagaagtttgtaacaacccaaaactacatgctaatatagtttagttttcaagtcttgtggagtctttttttttttaatggaataagatcatcagaaatccaggagcaagacagactggctgtggtctaccagcattgtagtaaaaacattggggaagttttataagacctaattattagaaaataccataaaatagtcattttcatagaaaaagctttccctttcctcacactgaatcacattactttgtgttcaaggtaaaatgtagtttgaaatctggatgtaaattagaaaagatattattttattccaagtgaaacatgtattcacacttcacgtcttgaagcaccagtggccatttgggctgagttttcaagaaaaaaaatttatatagattttatgccctttttttaacctaagagatattaagtaatagctattccactatcagacaatgtgcataaattctagtcagatttttcttttgattagtgaacaataggacaattttgctggatgtttagtatattcatggctgtcacatcattattaaattccagaatattaacatgctttgtgtgatgcatttttaatccatcataaaccaaacaatatatatttgtttactgttattaatggtttttcattgtgacgtcctagccttaaataagaacttcagcaataattataaagatggcatttattactacctaaaagtatgtcccaataaccttgatcatggataggaatactattttataaaataaatggattaaactttttttgcaatccttttctttctgattcagtttcagcccctcttgtgtcgcagaaggacttgacgactaccgctgcacggcttgtccacggggatatgaaggccagtactgtgaaaggtaccaacagccatgaaacgtacagagtaatgatatgtagggactatatggtaaagggtcacaataggaaaacattcattatttgaagaacttcaatatttgcatatcctttagaagtttaaattacaatgctttcaaaaccacttgtgtatcttagaatttgtccaaagaaagttgtttatttccaccgtatgtttagactttatcaaagattccaaactatttacaattatctaacttatgctttagtatatatatatatataattttatatgtaaatataacatttcataagaataaatcaattttcaaaagcttagcagtagttactactaataagaaactggctacacttttcttattttaatgcactggaaaatattgtctggaagtaactgaattcacgtcattgttctgaacactatgactacaccagcaagtgtatacataactcaaaatataaatagtatcaagaatttttaattagtacccagacaataaagtatttgttattcagttttccttttcaataggcaaacaatattatttaaatgttttctcttaccatattgcttatgaaatctcataatgcatgtatacagctgttaaattgaattctcagtgtaatccaaatggtaaattaaggagtacagttccaaactgattgtctagaaaagttgcaattaatatcttccagatatatattttctgtaagatcagtatcctggatattcaaacttgtcaccaccacttttggtatattttagatattatctttaatgtaacagagagttactaatgttaactactaacattatacacacatgatagttttagcataattgatagcagtataaaagttttagaaagatccatagacttcgctcaattccaacagttcagctacattccattttcctcatctataatctcaggaatcattgataggccacctactttacactaatattgtgacaataagtgtgtaaaggacactgttggtgccctgcctaggcacctacactgaagccttctctccaacagaagaggcagaaaggcctgaatgtttacccgcccttcctgcagtggcccatgactaaccagcgtgagagtacaaaagtccagctctttggcccctaagtggaacaagttttgagatcttattttatgctccagagcactccatggaatcaggctaagactgggacatcacctgaaatcatacccttgattagagcttttcttttccatgtcctgcttcacccactcctttgctagattctcctaggaacacttaaatggtaagcttctttgtaaatataaactaatactaattatcagcatccacttaagagtcttgttttatataaccagcaacagctgtattaatcatggcaataagtaactaaataattagggttaagctttataaatcccaatgcaatttttatacatttgtaaaatatatttctaaataaatccgtatgtggtaactctaaacacagtatccaatatttgcatatatataaaacagtggattcacaatttccataccaacagaaattagcagcaattaaataactcatagcaacaccaaatctaaaaatatttccatttgttctgaagatatatacatcttttggatatagatataggtgatacaagtacatacttgttaatacccaccagtgagctttggtattcatggttagactaatatttatttcctgtacctttaaacaccagtaggatggtgactaaaagcatcgctggacaccaaaaagattatctacagtaattcatgaaaaaaaaattatgatatagctacatttatacactgtagttaccattttctacaaaagcatgtgtatagaataggctagaagggtacactaaaataacaattattgtgttaaagcagaatgattacagaaaatttatttgttaatatccagtagtatttaatcgataaaagctgtcagtttgtgtagcatagagatgagcagggccatacagtatcaaatgtgagtgacttaaagtgtttttccagtcctcaaacattgttatagctttgcattcatcatctctaacatataaatgatcaggttatatttctctgaaaaattgctttattcagctatattaaaccaaagttcttggttaaatttttattgtaaccttccaaataaatttgttccagtgctgagagcttcttaaatcatttaaatcatctttcgacctgctcagactgatcaggttaggtctaaaactgcttaaatttcttgagtatccctgtaatatagaaacctctcctcatactttattttcaatactcttgtaataaactctttgaacatttaatcaatctgaatctgcttagaatacaattattttacctataaatgttaagaagccatttaagtggacttacttaaatgctactttcagtatttgtactctttcattgaaaaaaataatcaaaaacatgaatgtataaaagcctaatgtcacaaatcgttttcttcatgttttgccttttctaaccagcacagggtgaattaactttcacagtcagccatgcagatttcacagtctcaggcagctaaagatggtctatgattatcttgccagtatttatagcttttggctccaatcccctactgtctctcaacttcctcacatacttgcctgttgaacaaaaattctaactgtttgttatatttacactgaccatatataaaacttgttgtccaatctgggacactatattaaaaacaggcagtgtttttagcaattaagccaaaacaacaggtaataggaaattgtcctgggcaaaccagaatgtatggccctgctagcattgtgtaaagttaccaaacttccagtgtcataacacggagtgaaatacacttaggtgaatggatgcatagatacgtggaagagtcaattaatggactgcatttagggttcatccagttggattctctttctacttttccaaatcagtgttatatattttgtttgcatatcattaacccacttccacagatacacatgaaaaatccatcttgaggaagatatggcaaaaagaaaagatgaataaaagtaaacagaaaatctgagtagcctattgccacttaacttgcctcttttgcctcattggtaaaattaatgggttgtattatttggttattttgagatctgaaattcatgagtatagggaagcccagaagtcaatatagaattgcactcatctctaattatacaagaggacttaacaaaaaagtttatgatctagagcagtcacagacaaactatgacccacaggccaaatttggcccatttctgattctgtatggcactcaattaagaactgttgttacaggtcagcatttacaatcaatttgatgacaggaggcactaagttataacccaaatgaaggataatttcaaacctcaggaagaatccaattcttctcattagtagcctgatattacaaagtaatttaacattattattattattattattaatgttttcaattccatcaacaacagcagaatgctttagaattttatttctttttcacggcataatcttgatttttcctatgtcctgcaaagcctactgtttactatctgaccctttacaggaaaagttaactaatgtatggactcttgctatcagttttgttgcatcaaaacaaaagaccacacacaacaatgtggagacatgacttgctattaacctcttttgctttgtcactgtttcaattcaggtgtgcccctggctatactggcagtccaggcaaccctggaggctcctgccaagaatgtgagtgtgatccctatggctcactgcctgtgccctgtgaccctgtcacaggattctgcacgtgccgacctggagccacgggaaggaagtgtgacggctgcaagcactggcatgcacgcgagggctgggagtgtgtttgtacgtatactaactttgctgttagttttggaggccttgattccagttctgtctcatttccaatgagaaagagtgactctccccgcccgcctttttttttttttttgcaatagttatactcttcattctttctgacactatctatccaccttctgctgttcacctgctgattgcgtgtccatcctgctgagccaagaacagctgagaaaatcctcagtgtgctttagtcagttcattgaaagacctacaatgaagctcctggaggcattttatttgatttgtccatctcagggtttacagttttgcctcaagttggcattgcctttgtgacagattaaagatgtgagtgtattaaaaaatttagaatcctcctgaatttgtaatcgactggacagatactttaagccttgaatgacaactgatgtttcttttcccagcttttatgaaaatccatgggcatactgcttcataattttctcttgaactacaaaacccgtaagcagtaacaatgaagtcaagtatttttactcacgtacagtaagtggagagcagtttgctctcttgctgtctctcttttttcttactgattctggattcgctagtgccatattgaaagtacattgaaatcagtagctaaatataattcttggatcttgcatacattcaaatccaaaataggttatttataaatttaaggaaggagtgctcttctatagtattcttttcctcaaggaaatttattttagcaccttttatttcaacatttacctattgtaatagtatttgtgcatgtcaacatttcttgttttagcatattgtttgagtctaaatcttaatagtatcttaaatagaagaatttttgtttatgttctagttttataagagttaacctcagaagctaaagctggattaaaaaatacaccaaaaagttaagactgggtgttatttgggaaaatagattttaaaatcattttttctttgtattttaaccatctttaatgaaaatgtattacactgaaaataaatgtgaaggtaggtgagaggggagagattaaatgtactgtcaaatacatttatattgtcatatttagttgatagtatatacacactaattcttcccaagtataatgatatattttaatgataattaaagaagtagactatcaaagtattttataatattgctttcaagtcaaataaattattaacatgcacataattaactagataatatatagatattcttaatgtaaacagtccttgaattattaatcatcacttttattaactatccagaagcaaacttgaaataaaaagatcatattaatgttaagcacaaaaattaaacaatagtacattaaaatctggggtagataatataatgggattatttggggaacatttcttttaaagagaattggcattctgcccatcaacaacaatggctttttcatttattgttgatgatcaatacttttttaacattttgaatacatttatcattagaaatcgtaattcatcttttccctatcacatatgtgggtttctaatctccacttgtcccatgtgatattaagaaaagggccaatcctccagttacaaagctacaccagttttataattcttatttgctttattcttgccccacaaggaaatgtatttacaggggttatacatggtatttagttcagttgctggactggaagtgtttatattctttttaaaagaatagcagtttttattccagaaaaaaatattaaattataggattgtttttgatatctagactcttttgctaaagcacagttaattatcttataattatgctgtatagattttccatatactgctcttaagcattagtgatttccacttacttctaggaatgttttctcttcacctttcactaaactaactctaagaattgttacacagagtatctttagacttttcatcttttctcttcttctaaaatttctcccgttatggaaaaatatgccatgattctatgatcttggcctttcccaggattcggtttctacttctactcctagttttgaaatcagataaaataagacacaagtgaggatgtaattctgacttattctcaattttccttttaatatatttctgtatccttaagctaaattagtgcaagagaccaaaaaatggattcacctggggtgtttgatctgcaggacctgttttagcacatgtaatcatggtggaattgcataaggcctgggggtgagagtaagggaggtagcttggctctagcaagagaatttagatgtagtaagagaaatgtctgcagtgcttgttgttagtatagtactgactacaggaaataaactttctcctattgcttagaataagtaaacactcagtttagtagcatgtattgtacaagagttaattttgcttcctttagttacttccctgggaaatataatttagactgatccacatcatggatttgtgtatttcaaaaacagaaaagaaaagaaagagagacagaaatgcatgataaatgacctaagcctgatcattgtgtgatctcaggtaatttgcatattggtgaaaggaatctatacactcactgtaaatttagtttaggctcttatttctcaaagtatataaaattctgctgaagagatcaggcaaaacaaagccaatgcaggaactgtgaaaggacttcccttggacaccttggtccctaaaagatacttatagcttccagggacagttgccagtgacccctggattttactggatccaaaatggaattttttgcagcacacaggccttttatatgtggattttcactactatcatgaagaatgtatacaaataatctgtgtccacgttaggaacctatttagacatcacagtctctcatagttagtgacctaaattcagccccaccatgcagagtcagttcctgagcataactaagcaatttattcaccttcaaattccaggcattctctaaagtcccttttaccacacagggttcatcataatagtaattttatttaaaggctcaccttgactgagaacttaccatttgccaggcactatattaagcattttacacgtggttctttcattcttgtaacattcccattccttatcatccccactgtgtgataagagaactgaatttaggtaggttaagtcattttctcagtgacttttcagtagatccgtgatttgagcatgggtcagtcttacaaatcttattttcttaacctctatgctggctactgataaacagagaaagcaaacgtggtttagccagtatattcaacattaatgaattcagccctttattcatttactgcttccatgtttagagcccattctacctcgattaaaaataaatataaaacgagctaaaattacaaaatgagaaattttaagtgtatgtaatctcagtaatgacatttattttctgctaatcattgagactcctctaagatttaaaacattatggcatttatggtagattccttttcatcagagattgtcaagtagagactgtcttctatgcagaagaaaagatactagctgggtgcccagattaacttcacagcctctttttttctaaaaggaattatttgggacagctttacaatgttatgtaagttggtgagttctgaagagatattttattaatttcccaaattaagatttcttcttgataagttaatacaaatccatcctcctctttcaactgtcattcatagttcacatgtcattttataaaatgagaacaactaacctgccttcaagaaacttaaaaatgaacaaagaagccattatttgcttaacagtaaagtttagtattttgaaacacaaaacttggatttgttcatatcctattttctgtaaactcatatcattaacacagaataacccatgtgatgtttaaaatagattatgagtggcatagtaaaatgtattactctcctagagaacagaaattaaaattagtatctgttggcaagatattacttcataaaaattgcctgaaatagcattttataaatatcaaattggtgttgcctatttttaatcactgcatagtggggtttttgggatatatcagcttttattatttatagtcacaatttacttaaattctaacatatatttatttaaaataaaacatacactttgcttgccaatttgcaaaagtgatcatgaactatgttttctacttgcaacctgagataagcctagctaaatgtggtaattttccttaactctgtaaaattggcaacttccaaccacttggtgaaaccggaagtctgaagttttatcctatcttgatctacagagatataatcaacattgtcgtttttaatagccagttgccaccaaagatctgatcacaataatgcagagacctttatatattatcactagaacactgttgtacatttataatcaaaaatgattaataatggcagtgattgccccctatatatgggagcagaaacaaaatagaatgtggttatcactgtaatgaaaacaggacttactattctgaaaaatgatgataaacatcagttgatctccagatgctgattactgatctaacactttgcttgttgtaccccctaaatgtcatcctctctctgctcgtactcactgctcaagtaagttcttatttgaaaggacagtaagtatgtcatagttttctgtagtctaagctgtgtcatgttgttcacatccaggtgttaggcaatctataaaacatcttctgttcaccttgtttgcaccttctactcatttgttttgttagtaaaagatatttgagtttcttgttgtcaaccttagcattggtccaggctaacaatgtgtggaatggcaactatcaccgtgattctagatgattttcctagttgttagagatcagtctcagtggtttgtatattattgaggaagctgttctgctagctgattaaggagttgcacagttgaattatcgtatagagacagctgatcactgttgcctttgttttcagcaagttttatttgaagagtaaactaaactctactttgattgcaatttctactctggcaaggctcaggaggttttattgaccttgaaagacaaactaaaatcacataatcttaaagttggaagaaataagtaaactagcctagccttctctttttctgtgacatccacaaaacagacagcatcctaatgcaaggaagcatggtgttatgaagtggctacagaaggtttgaaacctagcttgcaatttgtgtgacattatttaatttcctaaacctcattttcatcctctgtaaaatggatgtaaaatgctacatacatgtatgtgaagtatctaagcataataggtgctcaataaattctaggcattgttatcatcattgttattatgtgaccatttttttccccaaagacctgatgttttgtgcaacgcatcagtttctgatgaaatattttctttagtttaggctgactttcagtttcctgttactatctctaattctaggttcttcaagtcactgaaaaccacttttatggccaccttacatttctcctgtctttaagcccttcacatgcattatttatagattcataaacactctggttgtgactatttttctcatctgtaaaatgaggatatgaatggtacttacctcatagaattgctttaaatattaagtgagataatgatggcaaagtataatacattgccagtcatgtagtgactgttgtgtagataaaaactattatcccattattatttatagtactttcaaagtttccattagtgttttgaagagttacaccatctttgaaccacattgaacttgttttcccatgtattatatatagaattttatttaatatatataaaacacatatatcaatatttaatatataaaaatatataaaatatatacatataaaacacatatcataaaacatatatataaaacataaatatcgttacttggtatgtcgacaaattcatcagtctcagctgaggtctacagctttcctctctattcaaagaaatgacaggttaaaaggtcttcttaatgactctggaatcaaatttttatttgagaagatatttattttaaaatagaatgactaaatacatcttaataagccctaaatatatgctaatgtaaaagtttctttttgaaggggaaaaagggaagtgagaaatagaaaattcagatccagggaaccgtcaatggcattcatctaggagagttaatttaacatacacacattaacacataattttatcttttgttaaaaatgtgtatttactcattttattcctatttgattagagcagagaatttatgtatcgctacctaaaattggttaatagctttcgccctttcaaaaatactcagtgtcctcattttagcttcagcttctttggtttggatgcagtgtgtgattttttttgtgacagtaagccagtagttattatgcatggggaatcctggtagaaatgcagtattttgtgctaattgctaacagaaagatctgtaatactggctgcatgatttgccccttacatgtgcccagccataacaatctgaatttagtactgtgtttgttaatattagacacaaatttatcctgacacttttataggcaaagcctcggaaacatttagtcatgtaaaatataatcatggtcttgaaatatttgcttttgctcctgtgcattttaggcaggatttcactttgtaaccttattagtattgctgaatttggagaatggtttggaaaggttctttgaggtcctgattgtaagataggtgttcatttacactgagccattactgcactttatcaaagaacagttgtttacagaatgtgaatattccatgtctctacacactcttcagattttccctatgatagtaaattacatttggttttaatttgcattccatttccaatgtttgttgccagacactttggactttttgagggcaaataaaagtagcttctggtgtaagtgaaatattttgtgtcagaataaaatagcaaaccattatgtaaagggcactttccccatgtgtttaccttataacttcatgagctagacttgtacagaagctttgaaaaaatccccatggctgtcatattcataagtctctctgacccattcagacagatgttagtatattgcttggagcgtactataaaacttacctttcacttatggaaatgtgcttgtactttgttccccaaaaagcaaatacagataccataagacatgggataataataaacctttggacacagaaacataaaatggaatgtatgagcccttgaaagagcaattaaatacattttcatttcaacagctgaagatgaggaaccaaaacagatgggcaggggatagaataaatgagagaaaaatcagtattcatcatgcctcttggcattctagtacaccgtagcatattacagtacatcagctctagttctgcattctggtccctgatttattcttgtatgaagtaaaaactgagaaaacgataggtactttccttggaaatttctggaaccatctagtaaggagtatctagccatcctgttatcaacaaactgattcaattccttcttggaaataggtaggttatatattattaaataaattaaagaataatttaatgtttgctatcaaaggcacacactgccctaaaaagcatggtgaaacatcctattatcattaccaagtatctttaaagatcttggaggtgaaaaaagagcaaattgcttgcttgcatcctaggaacatctgcccaaaatacatcttcactagaggtcaaatggaacttttaaaacaatgatgaacttgggctcagtgagagaagaaccttcctattcttcataattcctaataaaattataattgttactactgctgtttttaacctatgaattgcagcttgaaagtctctgatctgaatcacatgtgcaaaacttgaaaaagtgtgtcagttatcgattgtatcagttatacattccaaagtttagtagcttaaaacaacaagtgcatacactctcatgattctgtaggttggcaatttgggctgagctcagttggacagatcttccactgtcacgcctaggggctcccagatggcctcaagcccaaattggggcctcaactgccctttcctctctcacgttgcctcccttcctcaaggaggctaacctgggattgttctgaaggcagcaggggtccaagagtgtgaaagcagaaagtgcaaatttcaatatgttgctctgccacattctgttggtcagagtatgttgcaaagctaacccagattcaaggggaagggaagtagacttcacatcttaatgtgaggtgtggcaaagaagtattaacagtaacctttttttttttttttttttgagatggagtctcactctgtttcccaggctgaagtgcagtggcatgatctaggctcactgcagcctctacctcctgggttcaagtgatactcctccctcagcctcccgagtagcgggactagaggcacatgccaccacacctggctaatttttgtatttttagtagagatggggtttcaccatgttggccaggctggtctcaaacttctcacctcaagtgatctgcccatctcaagcctcccatactgcttggattacaggcctgagccaccacacccagccagtagtaaccatttttaattgtccccagaaatgatcatcgctttgatctgtcagtcatggtgttctttcctcctaaagttttgtgctgattttcttcccgtccatctctccctttcctgagtcaaaactgaaatccttcaggcaggtatctgaatagtcattcttgttgatcggacagtctctgcctctgcaatcacaagatagttctctttctgtctctaaaccattgtttttaatgtattctcctgttcctcacacatctgtgaggttttctatcttgttctcacattcagaagttttcttccggccaaccccaacctcttccctcttcccctcttcccctctctcttctctcctaacattctacctccctgatcttctcactatttcatgtacttgggcacatgccatgctcaaacattaacccttgccattctctttgtccaaagtgttttgatacccttctctcacaaaaatattagcccacaaatatttactgaatattaactgtgtacaagaccctttcctaggcaccataaccaaggtgtttaaggtcccttctttaacgaggaagaaagaatatataaataaattaagtaataatgtagcccaaacaggcataagtgttaagaaagcaaaggaaatgcagtagtgactggcgcagggtatagggctgggggtggtggggagtttcaggtaacagtaattttagaatcatcagggacttgctctctgaaaaagtgacacttgagcacttgacctgaacacctaggaaccaggtgggagaagaccaagggagaagaattctaggtagagaagacagcaagcaaaaggacctcttccaaatccttgctcccttgaagattgagcatccctataatttatcacctggtccagtggttttatcctttggctacatggtttttcaattactggaatatttttaaaatacagtggttcacgcctatgatcccagcacttggggaagctgaggtgggaggatcacttgaggccaggagtctgacatcagccagggcaacacagcaagaccccatctctatgttaaaaaactagctggatgtggtggcatgtgcctgtagtctcaaccactcgggaggctgaggcaggaggatcactttagcccaggagtttgaggccgcagtgagtcatgatcacaccactgtactccagcatgggtggcagagcaagaccctgtctcagaaaaaaataaaaatagaaatactgatggttagaccttaccacagacccatcaaaaatcatattctgtggtggtgaggagggaaagagcccaggcatctgtattttataaatgttcatgtgattccaatgggcagccaaaggtgagaaccactgatccacaccaatgttgtcacattctaatgtgcagagataatgtgggacgcagattctgatttcctagatctggggtagagcccgattatacatttctaataagcttccaggtggtgccaaaactgttggtctgattgctactcaaagtgtggtgcacagaccaacagtagcaatatcacctgggagcttgttagaaaagcacattctcagtcagagactaagagaaaccaggtgatcaaatcacctcctgattcagaaatactagggggtgtggaccagccctctaggatttccgaaagtcctactggtggttctgaggcccactaaagcttgagaaccagactgtggatcttggtgtttagacacagtcaatttggcacttaactgagttctatgttgtgttttctctaattgtttaatgtggacaagtctgttgaagtttgcattgaacggggctatgaagccaaaataatcttttacttggtttccatgcagtgcaaatttggtttcattctggctaggagaagagtaagagatatagccctagttccagacttctgctctggcctccaaagcctctttgttcattcagcttgtgaagcatcaggagcttgcaaagcccctgcaggtgacgctctacagttgtcacctgcaagaagctgcaggtgtcacctgcaagaagctgatttattaaaagccctgccagggcagtttaatccctgtgaagtgatattgtaactcacctctagctgctgtcctatcaaaaaatcactctccgtcctccttctctttgtttacaagcaccagttaatggttttctctccattaagcagctcaggggactgctgtttagagacctaattgaattcttgccaagtttgggcatgatccagagctgctccaattctcggtattttccatgctatgtattttcccctattctaacatgtatatagcattgatacctctatctgcagaatgtaagaaattgtaactgtatacatgagagtatattataaatgcagtagttcctgctccttggcgtgcagatacacctcattactctgcaatgcaaaactaaaaatatacatgttttttaaatctgctaaaagattcaatatatgttaattttggaaattatacgactatttatgagatctattccataatgaagagtcaacaatccatttgtctctctaccaattctaccacctatcctggcccctaccaccaaatttgaatagcacctctttgatggccaaaaatattatggtgagtgtattagtccattttcgtattgctataaagaaatgcctgaagctcggcaatttgtaaagaaaagaggtataattggctcatggttccatcaggctgtacaggaagcatggctggggtggcctcagggaactttcactcatggcagaaggcaaagctggagcaggcatcttcacacaggcagagcaggaggaagtgggggctggaggtggcacacacttttaaataaccaggtcttatgagaactctgtcatgagaacatcactagggcggtggtgctaagccattaaaaccactccagtgattcaatacctcccacgaggccccatatccagtattggggatgacatttcaatatgagatttggatggggacacagatccaaaccatatctggtagaatattagcattcttggctacttaaagaatatagtttttctagcctttagcaattatttatctataagactgaaagaggttaatcatcaaagtagggatttgtgagactgcatctaatcatgggtggtaatagactgaagggataaagaggaacagttggcaaataaataagtcaataaatattatcataagaaaacactatagaaagaaaagttatttttattttgactttttattttattttttggggggtggagtctcagtctgtcgcccaggctggagtgcagtggtgcaatcttggctcactgcaacctccgcctcccagtttcaagtgattctcctgcctcagccttctgggtagctgagactacaggggcccgccaccacgcctggctaatttttgtatttttagtagagacagggtttcaccatgttggtcaggctggtcttgaactcctgacctcaggtgatccacccacctcggcctctcaaagtgttgggattacaggcatgagccaccacacccggccttctttagactttttttttttttaattattctactcaatagataccaagctaaaaatttatatactttttgaatgtgtaatacataaagcatgtggaggtcaaattactatgactttctccagtgcaatctaatggagcaccacacatttagactctggagcatgttttattccctgtggacaggttcctttcgattgctcatgtagggatttagggggtacttttaatgttatattctatgccttaaaggaaatcttcaatacttgtgcaatacactttttctccccaaatctatttgctcctcctctttggtccctcagtttatattatcgcctctatttcaggttctgggcgacatgcatatctgttcttttgttgttgttcttatctttcctcaaccatcatccatttgatagcattaatattctgagatgagtagtttcatcttccatggaattattcttggaccataaaatatttcatagctgaattctttgaacatctgcctgggatgtttagcagaagtaactactctttgtcacttctctttcacagtttgtggagatgagtgcactggccttcttctcggtgacttggctcgcctggagcagatggtcatgagcatcaacctcactggtccgctgcctgcgccatataaaatgctgtatggtcttgaaaatatgactcaggagctaaaggtaggttggtgcagtcacaagcaagggccagggacaaggtgacagaagcttcacaagcggtattggctgtaattggtaaatgttcttcccacagccccaaatcaagggacacaactgttagggaaattcagagactttcttaaccagtgtttttcaaactcaagaactataatatacagatttctattaagggaaaagagtctcatgtaccccccagtgtctggcctaaatcagttttattatgtcacttaaatatgtgcaaacataaaatcaggtataaactctttatacttatagctctataaaattaaaacaaattaatccttacaaaaccaataaaattcaaattaaaaacattaatataaagtaacatgattttggctgaatggaaattgctgcttgcaacaagaataggatattgactattttcacacagttcttccaccagagatgatgtggtaactcatttctcctaccttaccacatttgaaccagagagccccctacaaagggtcctgaaatgaatgtgagcatcacttgacaagtttatgtgactaacgtgctcagtctgccataggctcaaacacacaggcaaatgtaggcactgagatcaggtggccatattcatctctcaggtgcctagcctgggatccagaaatgcttacattaatatttaaggttatcatcaaaatgaaaacacatgattagaatcttgtactaaagagctagaactagtagacctttaaaagttcttcaacaagcaccagtttgataaacactgttctaaattgtggttaaagcttttggtagttaacgaggtaggagaaaacattaaagaaattggggttgtttcacctgatggaaaaagatgaaaggtgtcaacttactatcagtcaattatcagatatttattaagaaattatagaatacctcagcattgcacttggttccctggggatttcatgactcttttaatatcttcactacccttaggaaatgtagattctatgtgctttaaaaataatcattaaacaataatcaagcaattagcaagaatacataatgaccatgtgttttacaaacattcaaagtacattagcgcacagagactggagaaatcagtaagattcagggtaaccagagaatgtaccattactgagagtataatttctgttggaatttgaagtgtagacacaattttagtagagaagtatttgttgctttagaggaaggcatctaagatttattcactacacattggtagatattcttttaggaaatatattctttaattctgaccataacctttaaggtaagtattattatccctattttccagaagaagaaaccaataatgatgataacaagaataactaacatttattgaaaagctaggcaattgactgaagtcttaaatggattaccatacatagcttttacagaaactccaagaaataggaaagaagttgtcatggtctgaatatttacatctccccaaatttatatgttgaaagtctgtcacagtccattggagctgctgtgacaaataccataaactgattagcttataaacaatagaaatatatctctcacagttctgaggctgggaagcccaagatcaaggtaccagcaatgttcaatgtctagtgaaggcctgttcctcacagagggtgacttcttgctatgaccccacatttaattcatttaatatctggatactgaggaaaaggatagctagctctctggggtctctttaataagggcactaatcccaatcatgaaggctacattctcatgactcaatcacttcccaaaggctccacctcctaatatcatcacattgggaactaggatgtcaacacatggatattagaaggacacaaacattctgccttctgccgtgtgaggacacagggagaaggcagctgtgcttaacagagccatgtgagcagaggcagtggtgtgaattagatctgtctggcagatattaaaagtcagacctgctagtgaaagataaggctggagacttcagtgaggcagggtgatatgatggacaaccttgaaagccaggcagaggaacctgagtttaccttgtggtcctggtattcagggaagtgaagagttttaatgaaaagaatgccgatcagttattttccttgtatatggagagaatacagaaaaataaattaaactagaaaagcaaacattttagttgaacatgaaacattttaaaactaatacttaagcaatggatgatgaagtaaagaggatcctatagaagaggctccaatttgtgaacatcttctaagccaagggattcagtgacccatccacttctggctggatattgatccagatgacctggattatccttaaattctagtctttcttgattttttattttgttcttcttccatcattcacttgacatttgtatactgaggatcaccttctggtattataaaaacttaagttatttcacctctttgctcaatttctttaactatgtcagtgctccccaagcttcagccaaagaccatcaaggacacacatgtgatggaacaaagtgggatttattaacttgttgcaacaaggggcactgaacaccatgggggaattgtgggctgtctcaataagaaggtgttaggaataacttctagtatttgaggctgtgctagataacttaaggttagcactcaactgggtgctattcagaagtgggagtaattctgtgagtattttgtgaatcctatctagagggaaggaagaacagagggaggataaagctatgattaataaggaggcagtgttcattcatattagccaggaaatgggaggttggggtagttttgtggtctacacaaaacccgctatggttttgtctgcgcttagacattacagggtagtctctttttttctgtttcattcatcactggttcagagtgaccttgtctaatttagtgtcctatgagattatttatgttccataggaaaaaaatatggccctgctgttaggccagttcctagcaacaccgaggacaggccagttagttagcgcctagccaggtctctatgttaaggcctgccgttctcttttttacctgtgatctgtgtctctgttaattggaatgggagccttaaatgggccaggcaaggagtttatcttaactctaccccttactgactgtgtgatctcgtgcacatttttaactgtcttcaagacagtttgctctttcatgaaatggaataatgcttaccccccatagagctgttgtgaaaattaaatgaaaaaacaaaacataaaaagcctggcacatagtaatttctcaataagtcactgcaatttttattatttgcctgaatatttggcatgacactcaatgtgtaagtgcccagttgaaatagtttccttatcttttctttgaaggtgagaaggctaagttccttttatatacaaaaatgtgttctgtcgaacactatcactgcaaggccatttactaaaaatgtttatgggatggaatctttttcagcacttgctgtcacctcagcgggccccagagaggcttattcagctggcagagggcaatctgaatacactcgtgaccgaaatgaacgagctgctgaccagggtaaggtggcaaaattatgaatcttctgaaagcagatagattatgtcaatgaaggaaaattacttcaaagttctgaaatgcaaatcaccttcttcctaattcccaatttggtatataaaatagatgtattctgacttgctaattctgcttcaaatcaaatcatagaaatcagtagcacgcagaaaaattggggatacctggaaattgtcaatggctaaaaagtccagaatgacagtgtattttgagaactttattcagtagcctccgtggtaaagtttgtatctgttctgatttccaaaagcactatctttgattgtgtaaagagaaagaaaaacaaatgaaaatgcttgtggtctctttcatctcatcgtgggatttttgcattagtatagaaatacagtgtaaatcagtctttccacacaaaagaggaaatcttctctattgtgagactccaaagtgcttaagacactttttaaagtcagaatgtaaagtccatgttgcatttatcaggctttttaaagaattggaaattttaaattttcaaaactgcgatggtattaaaaactttttgcagttagagaatgaagaaaacaacataaagcccgccatcttgtggccagaaatatgcatgaagctagaaacggggctgcaaagtacggatttaatttgattatctaagagctttaaatgataaagagtattggagctagaaggttcctggggattatcgagtccactttgtattttaaagaagagctgcctcgggccatgacagtgaaacgaattaacaatggccatacaatttgctaaactcagggacttaagctggacccagtctcaagattcccactggcccagtactttttctacatagcctgctgtcggtttaggaaaatatccacaggaaaatcaaataggcttctgagcacataatgctaaacaacggccctgatgttacaatagcatactaaacactttttcagaatctcatagcaacaatatagaatgtacagatacaacacggagtttcttgccaaatgtatgtagacattagattaaattgagtgcatttatctcatattaatttaatatgaaataattcatatttgttataaataagaattttctaacaggtcatggtagaataaatcaatttaacaagcacacataaatgttcataacatacaaagcctaagttacgtgttggcagatgaaaaatatgaatgaggctcaatctgtcttcaaagaactttgagatgtgtgtgtgtgtgtgtgtgtgtgtgtgtgtgtacatcagcatttaagtgtatggaggaccatattagacaactgcatgcaggtatataataaaacatgaaataaaataaagtcggaagaaattctggagaaatatttaataatagaataatttcatctgcttaggggtaattagaaaaaatttcatgtaataaatggcatttcattcattcattcacttaactaatactttttgggagtctctcatgttctaggaattatgacactggggatagaagtgtgagcaaaactgcgcagtccttgccctcattggcttagtatagtctaatgatctgacgttagagacacaaaaagtatttctttttttttttttttttgagacagagtcttgctctgtcgccgaggctggagtgcagtggtgcgatcttggctcactgcaacctccgcctcccgggttcaagtgattttcctgcctcagcctcccaagtagctgggattacaggtgtgtgccaccacacctggctaattttttttgtatttttagtagagacgggtttcaccatgttcgtcaggctggtcttgaactcctgaccttgtgattcgcctgccttggcctcccaaaatgctgggattacaggcatgagccaccgcacctggccacaagaagtatttcattaagagtgtcagatctttattatgtctcaacctatactctttaccctttccagcagattgtctcatgctatgttttttaaacagactttattttttagaacagcttaaagttcaaagaaaaattgagtgtaaagttcagagtgttctcatatctactccctgcccccacaaccttccccaccagaatggtacatttattatagtcgataaacctaagttgacacctcctcatcacccaaagtccatagtttacattagggttccctcttggtattgtacattctatgggtttggaaaaatgcattatgacatgtgtccaccgttgttgtaaaatatagaaaagttttactgcccgaaaactcctctatgcttcacctattcatacctccctcttccttgacccctggcaaccactcatatttttactacatccatagttttgccttttttggaatatatagctggaatcatacagtgtggtactttttcatattagcttctttcccttggtaatatacacttaaggtttctccatattttttcatgactttatagctcatttctttgtagtgttgaataatatttcattgtttagacatatcactgtttacttattcattcccctactgaaggacatcttggttgcttccaaattttggcagcatgaatcaagttgctgtaaacatctttgtgcagacttttgtgtggacttaagttttcaacctatttgggtgaatataaaggagcatgattgctggatggtatggtaagagtatatttagttttgaaagaaattaccaaaatgtattccaaatggtcttttctattttgcattcccaccggcaataaatgagagtttctgttgctccacatcctcaatagcatttggtgtttttagtgtttggattttgtcattctaataagtgtgtatggtatctcattcttgttttagtttgcaattccttaatgacatatgatgtcgagcatcttttcatatgcttatttgccatctgtatatcttctttggtaaggtgtctatttaggtctttttccattttttcattgggttgttttcttgtcgaattcagagttttttgtatattttgggtaatagtcctttatcagatatgtcttttgccattatttgcttcccctctgtggcttgtcttgttctcttgagaagtgtctttcacagagcagaagtttttaattgtaacgaagcccagcttatcaattaggtttctccttgttgagcctttggtgttgtatctaaagactcattgccatatccacggtcatctagattttctcctatgctatcttctaggagcgttacagttttgcattttacacttaggtctataatccatttttagttaattccaatactattttaaaataaactttttactttacagtagttttagatttcaaaaaacttgcaaagagagtaccaagagccttcacatactccattcccagtctccccattgttaacatcttacattagcatggtacatgtgtcatatacatgttatatacatgtgtcatatacatattagctcatatacatgagctaataatattgaaatattaccattaacccaagactgtattcatattttttcagtgtttactgaatgtttttttactgtttcaggatcccatgcaggatactacattacatttagccattgtgtcttcttagggttcctctagactgtgacgacactgtcaaaaatactgtaacagtgtttctgatgactttgagagtttggacaggttcatgtgtttggtaagctgtccctcaattggggtttgcctcatatctttctcatgattagaatggaattatgagtttttgtgggaaaaacttcagaggtaaagtaccattttcatcacatcaagaacccatgtgaccaatatgacttattactgtggatattgaccctgatcacctgactaacatagtgtttgccagatttttccactgtaaagttactcttttatgcccttttcatactctaatactatttttatctgcccattcttcagattcagtaacataaaaggcgcagaaataggactactgaaagcaaagatcactttgatgggttgagaagggggaggaaatgtaaatactcattaattacttttttcctaccatatttataattacaaatatatcttccatgcagaccataaatactcaagtcaacatgaccaattctctctttccctgtggtcaagctgcatgacaatcaaaaggtgaattaatacagatggaattataattagagagttagatggtttcattatccaaaatcaggctaagcacgctaatgcctctatctcagagtcatgaatgatcctgcagttgtgaccagggtatgagaaatgcagtggccacaacttccaattacccatgactacattagaggagacagtgctctagactaggactgcacattggaattaccaggagccctatctcacacccataggttgtgatgcagttggtctggggtagagtcagaccactgggatattcaagaactccccagattatactgataaagaattactgtgatcctgtagttacctaatagctaagactctcttccctctggaaaatgccttaattggtactgccaatcttttttttttttttttaaacagagtttcacccttgttgtccaggctggagtacaatggtgtgaactcagctcactgcaacctccacctcctaggttcaagcaattctcctgcttcagcctcccaagtagctgggattgcaggcacctgctaccatgcccagctaatttttttttttttttttttaagtagagacagggtttcatcatgttggccaggctggtctcgaacccctgacctcgggtgatccacccgcctcagcctcccaaagtgctgggattacaggcgtgagccaccatgcccagcactactgccaatctttgttatgctcctttttctctgcttggttggctcaccagtcacttgatacagtctttagatttaagagcacatgtcaaggttgatcctgcatgactgctgtaggagctaccctctcttctttaagggcttttatattttatactcattgtttttaaatggagaaatctaattccctaatatccctgggtaaagaagacattattccacccaagaactcatatttaaaatgtattttgatatattttaattcatgtataaatataaagtaaaaaaattacataatcatatatctctttcaatgcattttgatttgttgccattttattttactcactggaagaacccaagttcctcacatatgagaatcatgtttaacatattcaaactgccctacagtatgtgtgaaatattaagatgctttttgatgatgactctacttacctctatagctattgtccttagctcctttcttttttcagagccaaaattttttaaagacttggagacaagtctgtatttatttctcactccactgctgcctggattttcactcccagcccactactgaaactgtttttataagataaccaatgacaatctggtaactaaatccactggatacttattaattttacttgaaatctctgcagctttgatctttccttccttcttaacatactgtcctctctctgtttttctcttaattctccaacctttcattctaaggctcttcctctcatcatcccttcaaagtcggtgttccttggggactaggcctcagtccatgttttccctcactgtataacactttctttggtcttcaattgccatgtacaagctgttaattcataaatctatattttcaaggctgacttcattctcatgctttggtcctatgtgccttactatggattggacatctcaaactaaactcatcatttcctcttaaagcccattatttctcctgtgtagaacatctcagtgttttatccgccagtatatgcccagtctcccaaagagaaattagcaggttgcccttcactctactccctctttcatccttcatcaaattcagtttccttctatggtgactctttgtaagccttatccaactctaacctgttgttatttatatggcagagtgaacattctaaattgcagatcctatcatgtcattctcttccttaaattgtactatggctttccacttttttcaggatgacatacagtgctctcccaccatgatctaatctctgcttctctctcatctctccccactactcatggtctggtcatctggacccctacggattgagggtataagccagaaacctacaaattttctttggtgcctctttcttcctcatgatgctcctgcttatccaattcattaccacacactgggcttccacttgtgtgtatggcattcatctctactaccccactctcatccaatctcatattgtgtagtttgggattaccacatttgttttttagctggtctctctgcttttactcttgttctcctccaaatctgttctccgtaacgtagccagaatgaatgtttgctattccaaatgtgaatacgtcatcgcagtgcttacaaactcttcccctgacttcccttaggctcgtaggataaagaccaaaattctccccttggccacatctcccatcacttgtgcccctggccatctgcactccagccatactgtcccccagccactttgtcccaccacaaagcattgccacacatttctttattttgccttaaaggtaatctacctctccctacattttgttaatttctgttaactccaatttacctttcaaatctcagctcgtgaaagccctctgtgccatcgcaggggttccaagattcctcctgtgcttatcttataccactatttttcctctagtttgtagttataaatttatctacatgatcatttgacaaataactatatagtccaccagactatagactccaaatgggcaagaaacctttttgtttcttaccacagtatcaccaatattgtacacataataggtgttaagtcaatatttgtttaattaattgtgaatgattttaaaagcatttgaacaacaagatggaaatgtagacaaacccaaaataaacatttattttgcactctttaaaatgtgttaaaatcaggcatatatttataattatattgttgaatattttgttttcattgataaacacctcttaactatttatattctgtaaggggagaatgctatgtagtagattgaactgtataaaatattaaaattttgtttcacttatattgtattttattgcctattgaatatcaaatttaatgaaaatgaaacatttccaaaaggatgaaactagtttttaaacgatttaagtgccaatattataagtttacaagattttatttatagtttttaaaagatttcaactgctaacagtgttttttatttctccttttatatttttaaaagatatatatataatataaaacaagtcatatctttttggtttggaacttttaaaattggcacgtgaaatatttaggaagaaattccacatggaactggctcattgtcattccacggggtcagctggttgctccttctttccttgtgtgttgttggtccttatggcttgcctgatgagtgcttcactaccacttagacatatggagctggtaatattggaagatgacccttgagagtatcatataaatgatttgatctgaaatctaattttagcaggaaaccatatgagtccacaaatgcaaaggtagacagtatctaagcaatgttatctattcagtagttaggtttgctccattagattctagttttaacataaagaaggcagaaaatgaaacacactggtcatatccaaccaagaaaattatgtgcagattttaagaggcacagtagaactgcttgagctaaagcaggaaagtaacagctacattgttcagaagtaaattaacgtgtgcctaatggtaatgcatgctgcctagacataaatactctaaaaaacaaaacaagaaaaaatagaaaaagaaatgggaaaaaaaaaacctagttgagtgaatgtcaacataaaagaaaaggtaatcaaaggcaagagagatacaagatactgtgtaaggcatcatttacaaaggaacactgtaaagattgcagaatagaggtaagagaatgttaaaataagaaaatccaagatagagaatgaaaggaagattgtacaacatattaggataaatgagaagttatttgtcaaatactcaaaggacaagataatagtgaataagaagaaggatgactaagagatggagatggtaatttaataaaacacagaaagagccaaactgaatcagacagatagttcctatcatgtagtatttagcattcattcataacattatcaatagcctgtcctgggtgagattgatttttgtgaattttgctttggcagtgataccactatctatcaccactacccataggtgatagtgcatttgtcataggcttctttatgaagtctctcgtgggtatttttgaccagggtgaatcttcaacttaattactgtgtaatgagacatgatttttaaaaatatatctagatgatgttctgatatgattttgaaatgtgttaattgactgaaagtcaaaacttatatacttaaagtatacattaactggagcagtgtcctccactcacctagaatactccagtttttcatgtattttactactctttctggatgttagccaaacacaaaatagtgttgggtacaaacaaaatataagtctgtgagacaaaaaaaaagtgtatttcatctccaattccctgtacatgtaagttcagataagttacttaacctcctcataccttccttttcacctgtgtaaaaagagggatgatgccttctatatatctctaaattcaggaagagtaagtgagacacacgagagtgctgtaagcctttgcaaacatgtatataaatttggcataactattcacaatagcaaagacatggaatcaacctaagtgcccatcaataatagactggctaaagaaaatgtggtacatacacaccatggaatactatgcagccataaaaaagaatgagttcatgtcctttgcagggacatggatggagctggaggacattacccttagcaaactaacacaggaacagaaaatcaaatactgtatgtcccacttataaatgggagttaaatgatgagaacacatagacatgtagaagggaacaatgttcactggggcctaccagagggcggaggatgggaaggatgagaggatggagaggattaggaagaataacttatgggcactgggcttaatacctgggtgatgaaataatctgtgcaacaaaccccattatgcatgggttttttttttttaacctgtgtaacaaatctgcacatcctgcacatgtatccctgaacttaaaagttaaaaaaatataaaaaatacaagtaattctgaggtacagatgagcctgactgtgtaactcatcctttagcatgctaacccgcattaagttgatgcttttggtgccgggaacctcacgtctcctcctcttctggaatagcctagagaggaagctcttcttctgtgtttagagggaaggtatctccttcagtaagcactgtgctggccctgaagagtcttcctaccctcttcctgccccctactgccactcccaccccaccagcgtggaacttcgtgtgtattcaaaggtccagtttgaattactgtgaggccagtggctagaaagcagtgtagttgggactggagattcacatgcctggctcttctcccaagcttcaactgtagctcttgagcagcagcttcctctgagcttctaaaaaatgcccagaaaattgcccagccaaccacatttcctggcaagcatagcaccaggcatatggtcagtttgagtgctattagataggctttagaacttccaagggatcattggtttgattgtcattgtatccaccaatcacccaacatctatgacccacgacaatttgccagacactatgcttggcactctgaggaataaaaagagtaagacagatccctagccttttctaatctatctatctaatggagatatggcaaagcacctaacaaagtcactacccattagagttgtgaatagtggtaataataattatttttgaaaatctaagaaaagagagcatgtgctagaataggtaaggagggcttcactgagaagatggagttggaattgaatctcgaaagctggatttgttttggataagtagagaagagttaagaagcaaaagtatgaacaaaatctttttttgagaatgttccaaaaggaagtaggcaagaagaatggtaataaggttggcaagattggttaggaaaattgttttttagtcctgtatataacaactttagagaatatttactataagttaggcatcatactaggagctggatatatgataaacaaaacagaccaagttctcacccccttagagcttaccttacagttggagaggttgtcaataaataggtgagccaattactaagtaattctcaaatccatggtgctatgaaggaaacgtcctgctgcaggaagtgtggaaacctaggtagcaccctgggaatggccacgctaaggagaagcacttaaactgaaagctgatgggtaacaaggacccagtctttacaggtgttgaggagaagctcattctaggtaaagacaatgggatacaagaaggtgctaagaagggatgagttttgcatatttaatatactaaaactatgccagggaggttgattgcatagggtcttagtgctaattgttttaacttctttcttatcatggagtttgtaggattcttgacaatttagtattgaagtaatcatataatcaatactaagaataaaatgcatgtgaatgatgactcttacacattactacgtaaatgaaataacctgtacaacagatcataagccagaggaagttaagacaatgaatatgatcttgatcatccagaatttaaaagagacagtgtatgatatacatttactttttaaaatttagacactttgagttataaataagaattggtccacttggtgtgaaattatgatcttttggtaatacagaaaatatattgatgaagaaaaagaatatattttaagtttaaattataatgtacattttctgtaccataagagacactagtggtattgatacattaatccgtaaggtaagatattggaagatgaccaaaatatagatcaagttccttattatggtgttcagtaatatgtgaaagtaagagtggtaccataaagttcagtcaagtctagactagaaaaatatccaaagcagtttagactacgaacatctttttttttcttttcttttctttttttttgagacagaggctcgctctgtcgccaggctggagtgcagtggcgtgatctcggctcactgccaagctgttgaccttagttagtgattcagaagtaacatttaaataattgggtatgagtatgtgtgtgtgtatgtgaatgtgtttatgtatatgtgtctgtgtgtaaaaagttatttgacccatcagacctttgagtgcaaacacgtgcaggaagccaagtttaaggaaattaatggaacataattacaacactcaccagaaaagcaaggatttgagtaacctagggactggatgcacagtttatcccaaaaaaatttttaaatccaaaagtgaaaataattccattattaatgttttagaagaataaatccagagcattataatactttggttaatactctccaaattattgtgtatatgtactgcaaattatacagaaaaaaattttaattttccaatggattcttatcctttcatcctttcatttgtgatgttaacacttgcaggatgagaagttagatgataatagttggactttatattccttcatttgtgcaaaaccttgaaaactttcataaattaaacctcttgctgcccttggaaaatcacaaaatgcagtacaattcctctagcgtcttttaccatgttctgtgctggccagacatttagttctatttaaaatccacttacgtatattttaaatattaattctctggccatgcctagtatgcaagcactctggtacaagattctagagtgttaatatgctgccaacttggaccttattcaaaactatattgagacagtttgtgattctctaattcattatctgtagttagactatccatatctttttagtaaaagagaagaaggcttatatattagcatatgcaacacatagaaaaatgaagtataaacctttcagggtactctaaaccttgtaatttttaaagaaacaatgttatacacacaccatttttgtttgactaaatatggtatattttaaccgtgaacacgttgaatgcattccagtgtgtcaaatgatattttaaatgtaaatagaggtgaatgtgcctgagaatactctttgggaggtggggctgttttggggttctgttttactttgctgacactgctgcatgattctgtgattaacaagcatatttctggtgctatcatatggaaaagttagcatttattctcccttaacattttattggcatctttgatgtgttataaaacaggcatttactactgagtagctaagcatttctccctctttgtttctttaattaacgtattgatctaaaacaaatctataggatcaagcttattgaggcagacagcctgtttgtctctcaagagatcattgctgcactccacacactttttcagtaaataaaatatggacaaaactgcaacatgtggaggctgaagattccattaaggacttttggcatctgtaccttaaagatatttcaaaaataattgtgctttattgcttcttctctgccatagcatataacaagcgttttttaaaagaccaaatacagctctctgatttccatttaatggaagaagtaataaagtttaattgtatacgtgagcatggggcatcatttgcaatacatctgatcaataattcatcgattgccgttggctcaaagtaatatttgaaagaaaatgcagccagtgggagcttatctagctgtagcttcatcatctctattaattatgtgtttcccgaatttggatcattaggctaccaaagtgacagcagatggcgagcagaccggacaggatgctgagaggaccaacacaagagcaaagtccctgggagaattcattaaggagcttgcccgggatgcagaaggtattagaaagaatcacattttaatcatcatttctcccaacagaaaaacacagaaagggatgacacaggactggaatttctcttgttataagtgacatctgtaaaatcaaaggtagagtttcaaaaagtagtgtggttaagatattcaagggtattatctgctgagaacctgtgacctgcagtgttaaattagcgacaatagtgaattagcgacaatgagggcagaatagcagtaaattcttgtaacatggctattataattacataagaataggcaacttttgttttgttattgtttttatttgaaagtatttaaagtatttttcattttcaagcaagctaatgtcatcattccacttgatacattaaagcagcactttagtttctccaaatggcttttcaaatactggggactggtttttaatgaacatctgttgcttgggatttggatgtgctactttatgagaagctctggtgcatttagctcacaattctctaggagttagttcttgccatctactaacatgaatgagaaagtggaagccattttttggcaaaagcccaaattaagaaacttaaagaatacagataatgccccatccgcactcgccccccaaaaaaacctagtccttaaatatctgttaaaatataataaacgtgcatgcatgtttagaaattgggaaaaatgctttttgttgttttttgcttgaagcagtaaaacatttttcttgctctgcaatattatgcattttagatactttgcttcataatgtagccaaataaataaggatgtgagatcaacttcaaggcagattctgactgataattcttaggcatcactggccaagaagagacaaactcccaaatgttcaccactgcaagaagcaacagggttttaatttgagagctaatttgaggcaaaggtgtgaggttctgaaacagaaattatttctgccagaaaaatctcagttaattcattgtggtttatcctctgctagatgaagctgttgtactttccctagtattattttccattaatgctacttgaagtgtccccctccaacccaaaacaacaacaacaacaaatcccactgcaggtagagcaccttcactctgagcggatccccaaaggccctagtcaatgctccaggaactttccttttctttccattgacatttcaaacacccaacacctagcagcccatcctggggactcattttcaatttgtttcaatcaaacactggtatgagaataaatgctagcatatgttttagtagatcctattatcaacactgcttactttgttctctgcaatgaaccttccatctcccaccaaagagagatgcatattcatggttacctctttggtcaatatgaatatttgcttcttctgggtgcctagggcctctaggtactatttgtacaatttgtggaccaacaggggtagactggagatggagatttatcccaggcttgctcaccaccccaaatcccacgtctatacaccagagaaaggattacccatcaccaaaggtgtctctcgttccctaaattatgcatagatcaggtggtctgattgtgtctgtccagatagggcacccttttctaatttatgtgaagtgccatgtgggatagctatactttagggaaataagaacaccactcacttttgcctgcaggcactatttggtagaattaatccaactgttaaaattgaatgaaaggtcaaatttaaattgtaccagagcaacactaaatgttcattgagatgtaatacaaagcttggcagtttaatggagaaaaaaagagaaagtgggggaaggaagggaggggagggaaggaagagaggggagggaggaaaaaggaaggaagggagggagggaggagagggaaggaagggaggggagggaggggagggagggaggaaggaacagagggaggaaaggggaagggagagaggaaagaaggaagggaaaggagggaggaaggaagaaaggaaatggaaagaaggaaggaaagaggaagggggggaaagaaggaagggaaaggagggagggaggaagaaaagaagaaaagggaaggaaggaaggaaggaaggaaggggaaataagaaagggagggacggaaggaaggactcaccaaaggctttaaagtaggttatactgtatatccacacctctttttctctctctctaaactataataatgagggataaccatcagtacttttacatttttgtttgtcagttgtaataaattgctgtgggaaaagtaaatgcttcagactgacatttatctatttcagctttatgtttggatagatgtactattcatcctatctttcattatgagtcatgacctcgttatagataatcaccttctattcatctaaggcattcttatctcactataattttataatatctaccgtgctatgactcctgattagttcataaataaactgttttattccacgcattattagaattaatgagtggacataggtaaacccattagtgtttatttcctgacatacaataggacttaatcaatgatagacacctttccttcctgtttctcagatcagagtattactttctattcttaataaatttacccatcagaggattttgttttcagtcttagtatgaaaacagttttgcttctcctgaggaatttttacttacctttatagatactgtatgcctcttaagaatcctatttgtattccctgctacgcgtagtctactaagatgcttagtagtggacttaggatgcactgcattgaacgttatggcatggttttctgtctactaattctttccctaatttatacaacttttttttttacctgtagtgctatttccttttattttaattttatctgatattaggatttttaaaaaattacctaaatcctcctttgaattaagttggaaataaataagtaaattccaaagatacatcttttacaatcattttcaatactgtgggaaagaaaatatattgaagtgatagtgcatacttttgaataagagatgaaaaacacattcatctttaagaatgctcagagaagttccagatcctatttatacataggatctggaactatatatatgtatataaacataaaactgtatgtttatatatgtctataaagagtgaaacagacttctattaaaatgatgcttcctttccttttttggtgggggagatttctaagaaaatcatattgcctagcaagtgatagatgcctatgagagaaatggaaaatgacagcattttaaaatttaactttcagtagaaaaataatggaaataaaaattaaactagacagttcaccatacaaaaataatgttaaatgagggtaagtaaagcgcagtgaaataatctggaaaataactataaaactttaaaacactaataataaataaatgttatccaaattaaactggcaagttttaatgggccatgtgtaatttatctgtgtcccgatgaggccatatttttctccaaaacccatatctaaaatttgtttttcataatgaagataaagtagcacacataccaaaaacccatttgaaagatgctctcatttaatccaaaaagatactgaaggcccatgtccattttggggagcttgtattttttttacataacatgggttgcaacaaaaagctggccatggaatagcagtttattccataagcagccaatatatttgctaaaatgtttgttcttttggtcctaaccacattgaaatcttctgggactatttcaataacagtaattgcaacaattgataatatccaactggaaaaaaaaaaacaacctcatgactgagctgcacagtgatgtcctatagaaactttatggggtatgtgttatatgttttgatgtttttcttttttttattctcatgtttttattttcctttttactttaagttctgggatgcatgcacagaatgttcaggtttgttgcataggtatacctgtgccatggtggtttgctgcacctatcaacccatcaaaagaagacatttatgcagccaacaaacatatgaaaaaagctcatcaccactgatcattagagaaatgcaagtcaaaaccacaatgagataacatatgacaccagtcagattggtaattattaaaaagtcaggaaacaatagatgctggcaaggctgtggagaagtagaaacacttttacactgttggtgggaatgtaaattagtttaaccattgtggaagacagtgtggcgattcctcaaggatccagaaccagaaataccatttgacccagcaaccccataactgggtatatacccaaaggaatataaatcattctactctaaagacacatatacagtatgtttattgcaacactatttatgcaaagagatggaaccaacccaaatgcccatcaatgatagattaggtaaagaaaatgtggtacatatacaccatggaatactatgcagccataaaaaagaatgatatcatgtcctttgcagggatatggatgaagctgaaagcttcagcatcctcagcaaactaatccaggaatggaaaaccaaacaccacatgttctcgctcataagtgggagttgaacagtgagaacacatggacaaggaggggaacaacacacactggagtctattgggggttgtggggagaggaaaaggaaagcattaggacaaatagttaatgcatgaggggctttaaaacctagatgatgggctgggcgtggtggctcactcctgtaatcccagtactttgagaggccaaggcaggcagatcacctgaggtcaggcgttcaagaccagcctggccaacatggcaaaaccccatctctactaaaaatacaaaaatcagctgggcacggtggcatgcgctataattccagctactcgggaggctgagacagtagaatcgcttgaacccaggaggtgcggtcgcagtgagcagaaattgtgccactgcactccagcctgggcaacagagcaagactccatctcaaaaaaaaaaaaacaaaaacaaacaaacaaaaaactggttgacgggttgataggtgcagcaaaccaccatggcatatgtattcctatgtaacaaagcttgctttcttaatacatgatcattttgctaaagtcatttttgtgcaccttaatgattgcttcttgtttacaaatggttttaatttaaagaaattatgtatgccatccaaaagatacagccatatttgccttttccctttctctatctgttgtcattctttttccaccagattcttctctgcagaagtttagctttgagaccagagcacaagagaaatagtgagactctgtctctcatttttcccttcctctatactgcctaggcccagaatctaaattagatcaaatttcaaaagatatttcttatgaaagctgatttatacacgcacacacacacacgcgcgcacacacacatattcatttaacaaagaaaaaacatacagctttagcaggttgggaagtggcatttattaatatcatcttcattttaaaaagtgagtacaaattatatcagtagttacttacatgctacaattggttaaagtcagctatacagatagcatgcactcagactaaaggatgagatagtaccataggtagagccaaatctgctactgctttcttgaaatctaagaagcagaaagcttcttacatttaatcattggtactctggaaggcttcccacctagtttgctggaccagggagctttcaaactaatcagcctatggttactgtgattctgtaacaaaattgagacacagcctaggtgatgtatcttactgacaatagtggtgaaatattgggaggattctttggcatatgtcaaggtataactgttaggcagtgggtcaagaaagagccaccctcactaacttctaggaatacagcacctgacaataacttctaccacagggctaggaatggccatatttgttctttaagacatgtgattcaaatatttctgctaattaaaccatggctgtcttagcccatttgggctgctataatgaaaatatcatagattttgtgccttataactgaaatgcatttctcatttgtgaaggctgagaggtccaagatcaaggtgctggctggtttggtgcctggtaaggagctgcttcctggttcagagatggctgtctccttgttatagtttcatgtggtagaaagggcaagggggttatctggcatcccttttataagagcactaatttcattcttgcccttatgacctaatctcctctcaaaggctctgtattaatctcttctcacgctgctataaagaactacctgagactgggtaacttatgaagaaaagacgtataaattgaccacagttctgcaggcttaacaagaagcatgactaggaggcctcaggaaatttacgatcatggcagaaggcaaagggaaagcaaggaccttcttcacatagtggcaggaaagagagagaatgaaaggggaagtgccacataccttcgaacaacctgatcttgtgagaatttattcactatcacaagaacagcaaggggggaggtttgctcccatgattcagtcaccacccaccaggcccctccctcaacatgtgggtattacaacttgagatgagatttgaggtggtcggtggggggacacagagaaaaaccatatcaggctctgcctccaaataccatcacattgggaattaggtttcaacatatgaatttgaggagaacataaacattcaatctacagcattggctatcagggttaaagtactgactacaggaacttttaaaccaaagacatatataacgaaaaaagaattataaagatgcattgtggaaagggtatattagacattgaaactcaattctttctactatcccagtgtttctcaagctctagggtacatcagaagctctgagaaggcttgttaaagcccagattgctggtcctcacccccagaatttctgagtctgtaggtttgtggcagggcctgagaatctgcatttctaatgggctccaaggtggtgatgctgctgctgcttataggggaccacattttagaaccactgtactgacccaccttctcacatacccctctgcctgctctgcttgtcctgactatgtacacctgtttcaggagctctgcccagtgcaaaactctctccaagaatagaaattaattttcaggaatctctatgtcataaggagatcttcggatacacccttgaatggtagaaaatgcctcttggccaaccgagacccctcattctaggagttttcaaaggtaatattatagaaataagtattcagctgacaaaagagtttgagaaaacatctctcttaaattcaccaaaaaaatgtcctatagaacacactccaggaaactttagtctaaaactaataatataactgtgtaaatgtttcaattcaccattttaaacttttatttgacgtagaattcttttctcaaatgaaatcctgcccagaacatcagcctataaagcagactcttggcagaatagacatcatttgtagaaaacctgaagcacctggagaatcctacgattccaaggagtacagtttgaaaccccatttaatgcataataaacacagacccttgtgaaggatgctattgctggaaagtgtccttgaagcctaatttataacccttctcctagaagggttataagtctagaccagtgcttctttcttcactcctttaaaaaatgaacacaggagaactatgtggaaatacaagggcaggttcattttcagagatctcatcactgagtgtatttccacactcagtatttttaaactgactgatagccactgctatgactatcttatcagcaatgcagagcttgcgtttccagcctccaagtgttatgctacaggtcactgttttttttaaactcttacctgagtatgcttcgacctacttctttattttaattctttctttcttttgaggttagaaacaccatgctttaattgctgtaacccccaaaagaaatataatattgagaaacatattacatttccctgtttgttactgattgttgtcttaactgcctctgtggttcccagcaggaacactcacggcaaaatactcttcatttggagatggtggtgcccagcagatgctgaataccatgttttcatgtggcatgtttgtttactaatttacaaaatttgttttaccccctgcagctgtaaatgaaaaagctataaaactaaatgaaactctaggaactcgagacgaggcctttgagagaaatttggaagggcttcagaaagagattgaccagatgattaaagaactgaggaggaaaaatctagagacacaaaaggaaattgctgaagatgagttggtgtgagtagatgagttattattttttcttttgacaaactgagatttccagataatttacagttttctaaatttttatcacacgtataagtaaaagatgctttgtttttccaacctggagatatttgctatgttatctatcatctatctatctatctatctatctatttatctatctaccatctattatttattcatttacttatttaattgtactttaccattgttccaaaatgaatcaaaagcatgttcttgcctacatataatcaagtaaatgatcttttctggtgctgctccttctgtaattaggctaatgagtttgttttgttaatcatctgcattagggacttttggactatcagttgatttttgttttaataaaaatacctttggataaacaaagttatgactttaccattcatatattggccaacctatacattttatcatcttaagaaatgctgaaaagaaaagtcatcaaataataaacacctaatactttcaaataagagttgcgaatatgagggttgggaaaagtgatagtgattttacccatgctaaagaacttttatgataacgcactcaataaaatagatacatctctacattcatagtcagctaacttcaaagtggtagtattactaatacttaaataatttatactaaaccagcaatatcagcacaccagagaacttgttaaaaatacagattgtcagaccccctcccagacctcctgaatcagaaactttggggatgggacccagcaaaccatgtattaacaagcccttcaggggattatgaggcatgttagtttgagaattactgtctttcaagtatttagagtttcttaatgactcgaaaattatcactttagaaaaactaggtaagttaaatccaaaaacttccagatcaatcagttggaagaaaaagaaacatagattaaaattatgctagtctactagcatgacaatgacctagaattctgttcacagtttctgagcaaacataacaatattcatcattacattcaaagtaatagagaaaaggtctcagtacaatgaaacaagtggattgtttgattttggtatgtgaagtgaatcttaaaactcatttcatcaatcagattcctagaatgacatgattcaaaatgttattttacttacaaatttaaaaggtttcttaaaaatctgtttcgcttttattttaattaattataaatggtctcaggtaccagttttcaacttgatttagcacacagtgaatctattttacatgttttcttattttctcattcttttcatgttagcatctctttgtaacatggtttaataccaataaaccctaaggcagtgacatgagctcattgtctattattgggctgggggtggttacagagctgcagaagcccttctgaaaaaagtgaagaagctgtttggagagtcccggggggaaaatgaagaaatggagaaggatctccgggaaaaactggctgactacaaaaacaaagttgatgatgcttgggaccttttgagagaagccacagataaaatcagagaagctaatcgcctatttgcagtaaatcagaaaaacatgactgcattggaggtgagtcttaggggcacttttatcttaatctcagaaggttggggactgcgggggcagtgttgaacatggctggactattcaagttgatgcacatttacaaaagtcaagagtgacaactctgaaagggggcttctaagaaacagaacaagaaatgacttttttttgtttttgttttgtttttaatgaccagttaccatcgcccaaagaatcaaataaaattttgataaattaaactgttgaagatatttaagaacactgtgatacagtggaagaagttctttacagggagtcaggcgaccttggtctcaatgacaactgtgccactatctagacatacaaattgggcaagtcaattaatctgtaagcatcagttccccaaatctacaataagtgcattatactatagcatacatatagggtatcttcaaatattcatatcatattattttgcagctttcccaaactaattcacaaatcttgttcagagatcttgctgccaaaaatcatagaagttccctacactttcaaattcaatctgagcacatgacaaatagctcaatgaattgagaccagagcttggaaaaattttggttcctctttttctatgcgctgtgttctatgcaaatgatcttttagaaggaactaacatgaatagatcaggtctgcgttattttctcctccttttccacacagataacagttacttctcaactcaagaaattatgggcagcctctatctttttaagagttctgatggaactagaactaaaacagattcctccattattttttcttcttttttttccaatttctttcttaatcttaacatagtaaattatcacttttcctaagagtaaactcagcacatataacagcagcaccctgtatgtgatattaatatttaaacaacaacaactttctccccagagacaaatttacctttgctgttttcaaagtatctgactccaacaggtcagaaaacagcagcagacctatacatcttctaacacataatttcaccgtcaacagtaactcagcaccctctggcatatagtatgtatgtagaaatgtttgttgaatgacagtaacaattgaatacaatcaaccaggattttttaaatctattcatttctattttcctttagattaagtagtaagaggaagaattacatttttttaatatattttatttccgtgtccctcttctgggacttagccttgtcattctggtagaatattgaagaggcttactttttttcttcactgatgcacctaaccaatttggagtctactgacatgctagcagtattccagaaatactgctgtgaggcaggatgctgggccactgtcctgtcacaggctccagcatgattcaccctgctcggtgacacaccagccgtgtgacttacccgaaggtgcacctgtctattttatggcaaccgtttgataaatgaaaattacctgtgtggaaagcatagtaagtatttgagaaatatttcaagaagagttatatggcacagtcaatagtacctttagctattcgtttcttttagtgatgtttaaaaccagaagtcatcattcttgggcacccctacaaatacctggagcttatgtatagtcggtattgaaattctgagtggtcctgtttggattttccttgtatgtgccacgtttaactaaagacttgtttaaaagttactggataaaatagataaactaactgaatcaatatgaataaggcatagattatttatggttgcttaaaccaaataaataatttggttgctgccaaaatggctgaaaatcacatggggtgtttgttaagccaacaggtttcatgggctcccacctagagagtctgtgtaggctgctctggggtttggccccatgtgtacattctaacactctccctgggctaatctgatgcctatacaggttcgaggaaaactgacacattgcatctatttgattgaataataagctgcattttaaataaataactcccttataactgtgtccacaatgaaggtaacacaattaatacccaactcaaaaactttttatttattttaaggtggcatgtaattttctttttaaaaattttatcaagcctctaattcattcaggaaacgtgctagacaccaaaattgattgtgtcagtgatgagcccccttagagcagcagcctcagcgtaacctagcaacttgtcaaaaagacaaattcttggaccccatccctaaatgaccaactcagaaactctgagaatggggcccagaaatccgtgttttaaaaattcctccagtgattaagatgcagcttcaaggttgagaaccacgggtataaacactaaaacaccatctctgattacttcaagtaacttgtatttagtgggaggtacacataagcaaaccactccatacgctaccataattatcacaggcgtaagcaaaggagggagtctaagtcacccctgagtttaggaagagctttgtagaggccctgacacttgtgctagatcctaaaggataagcactgggtcacagaagaataaagagaagaacatttcagaaactgggaaaaacatatacaaaggcatggaggaaagaaaatgacattttgggggaaagttcagtggtttgataggcttggaaagaagactgcatgtgaacgactgaagggatagaaagaaagagaagataggcagagtgcagaccttcagttataagagaatcgcattgtgagactaagctaaggaattggtttttatcctgagagccataggaagcaattgaaatattgcagtcatgggttaaaataaaatgttgcagaatttgagtggctcacttaaactgaataaatggttttttatcggaaaatagtgtgatattaggctagaaaagtaggctgggataatatttatctacatatctgtcaggtacctaccatatcaaggtactgttggtaaccagggtatttgaggttgaatagaaatgattcctggcctcaaagaatttacaacctcctgaaaaattcagacatgtcaacctttcactctacataatactatgataatattgactgggagattcagcaaaagtttcacaaaaataacagcatcatagcagaagtggagaggaattggaagaaagacagagcaacaggaaccccagccagagctttggaagtgtaaggtgatcttaggaagtgtccagtacagcagaaaaactttcaaaagctacgtaaaaatctgtagcagagaaggctctggaatttggagccagatcatagaaggctttggatgcagccaactagatggtgatggagttggaaaggcatttccagcagtggagagagggctaagggaactggggacgtcatgggaagaaaagagaagacaaatatttcagtgaagcaaaataatatgtattgagcagtctatccccaaatctaccattatatccttgccaaagaaggcagtgcggatcaagtaaagagtaagttgctacataaagaatacacaggccagcctgagcaacatggtgacaccctatctctatagaaaaatacaaaaattagtcgggcatggtggtgcatgcctgtggtcccagctacttggaggctgaggtgggaggattgcttgagcccagaagtttgagcctgcagtgagctgtgatcatgccacagcactccagcctggatgacagtgagacaatgagacagtgagacagtgtctcaaaaaaaaaaaaaaagaaaaagaaaataaaagaaaacaataatagacaggaagatagcttttgcaggttcctgaagaatctaccacaccaacacaccaaaaaaaaagaaagaaagaaaaagaaagtgtccaatttgcaaagctctggaataaataaagatctaattaattacaagttaaaagtagaaatataatcaaccttcatatccaaacaataattgagcaattatacttatgccatactttttgtagaataattctccctatacataggccttctttctgtttcttaaatactctaagtttcctatcttaggtattttatatgctacatcattttctatctgtgcctctctttgtttttattgtactcatctaatctttctttaagaatatattatacattaatttactcattcattttatctctcctccacacaagccatgaggaacatgtgttcttcctcacatcccccaatcctagaacagtatctagcaaaggcaaaacagattgttttccgtgaataaataaagtgccatagaacaaacccagatactctatacttttgtcaatatttgtgagctccaaatttccatcttttctcggttcaaagctagaacccatcagtatctaatctgaaaacaagacacctctaaaatttatttaacctcatcccagcactctgggaggctgaggcaggaggatcatgaggtcaggagatcgagaccatcctggctaacatggtgaaaccccatctctactgaaaatgaaaattaaaaaaaaatacaaaaataaaaaaaattagccaggcgtggtggcaggcacctgcagtccctactcgggaggctgaggcaggagaatggtgtgaacctgggaggcagagcttgcagtgagccaagattgctccactgcactccagcctgggcgacagagtgagactccgtctcagaaaaaaaaaaaaaaaaaaaaaaaaattatttaacctcttgatcatcatttctgattgagtatgctaagaagcacattttgatctttgcttttacaaaagattctaactcactactttattgaaatcaaaatatatatagctcttcaattaacacacgtgtggaaatatcttccctgtttccagtggcacagcattttaaattaccttgatccattaattcaaacaagccatgttgtaaaagattcttgtgtttctgtacatgctatactttaagtcagctcatacaaaagctaagggctaaaattggcagttgtgtaaaagaatgttagacccttggaagataagatatgacttgtaatcagggagattgtaatcagggacattgggactcttcccacatttgttgtctgtgaagagtgaatgacatatcaaaacttcccctgaattagtgatgggagtagctgaatgagccaagtgtcagcagcacaagtcccaggaatggacttcattttcttttttctttcttttcttttcttttttttttttttttttttgagacagagtttcgctcttgtcacccaggctggattgcaatggtgcaatcttggctcactttaacctccacctctcaggtcaagtgattctcctgcctcagcctcccaagtagctgagattacaggcatgcaccaccacacccagctaattttgtatttttagtagagacgaggtttcaccatgttggccaggctggtctcggactcctgacctcaggtgatccacctgccttggcctcccaaagtgctgggataacaggcatgagccaccgtgcctgacccatttttatttatttattaaaaaatatttattgaggaaactcatctacatactagagatagtgatatataaaactgtctttatggaatttgtgttacagtgcaggagacagtcactaagtcaataaataagcataagctacgaccataaagtctggatgcacgggctgataaacataagttgtttactgatatgtaataaatggtatgttgcatgatattgcataatagattcaatgtgttgtccttcattaacaatgtgtagttcaacaggctgtgcctttctgctagtccctgtacatgtatctgtgatgcattggtatttctgatttttattacctaatctttgtttttagcaactcccggcaaaagtaatcaagacgaatcaatctatataaaaaagaaaataatattgtctatgtttctaccactctgtagaatataattcagataaatgggttctaagaagaacaaaataaggtaattataatagttaaaattacagtgttactgggtgccaggcagtgttctaagctaattcttctccaattttacaatgtctatcaatcatgtggggttcttgttaaagtgcagattctgagtcagtagttcccaggaatggattgagattatgcatttctaatgagcttccaggtgacgctgatgctgctggtgaatgggctgcacattgagtagggagggactaaacattttgtatgaaggtaaattacttccttaaggtttcatagcttgggagtgagcagagctgtgatcccaaaccagaagggctgtcacttggatgtagcttttaatcactgtgccctagtacatagagaatgattgagacaaggataggtgctattttagataggtaatcagaggagtggctattaccagaatggagggaggacacaagccaaagagtaggaagagcacatagtgggaatatctgcaagtgcaaaggcttagaggcaggaactagttgtatgtacctggcaacatactgaattggtcggtgaagggaaggaaagaagggtatgaaattagcactagctcagtgcaaattttaaaactgtgatttctataatagaagagatagtattttcgtagtcaaggacccaggatctatcattaagtagacaggggtttaaatcttaatcacactgtactatgtgaccttaaaggaatcatttaatatcttagttcatctgagctgctatagcaagagaccaaaaactgagtggcttatatgcaatcaaaacttatttcttatggttctggaggctgggaaatccatgatcaaagtattggcagatttggtgtctgatgagggaccactttctggttcatagacaccgttttcactgtgtcctcacatggtaaaaggatgaacaagctccttcaggtcttttttataagggcagtaatcccgtttatgaagtctctgcttcatgacctggtcacctccaaaggccccacttcctaatcctatcaccttgaggattaggatttcaacatatgaattttcaggggacacagacattcaggccactgccctttacttattcaatttcccacttatgtaaaaagtgatcaacatgggatccaaagattggaataacaaaatgcttacaaactgtctggcacatattgagatctaaatgaattagcattattgtctatagaaaaaaactataagtggtcaaagcttaaaattataattgatgcagttaaatctgtaggtagaatggtgatttcaggaataggaatgaatcagaagtataaagaataaaataagtaaaaaatagaccccaaatggagaaatagcaatatttgtctctcactgattttactcttctaggccaggattgagtttcatgtacttttgagacaagctatatgttccaaagaaaaattataatctattctctcatgaaacagtccattaggttgattcttccatgtgatggtttctctatttcttaaaaagtattttccctaagtttccttaaaaatctcacttcaaatttcacagaactcccattgaatacatctgcttatgtttatgctcacaaagtactcatttgtatatagattctagaattcaatatgtagtaccaatataactattcagcacttatattttagttagaaatggatgctccatctttctttaaaagtagttttaattccttaactagtatcgcataacttttcttcgcttggatgactttctcacaatgagaagaagaaataacctgtacaagcctctacatagaagaactcttcaaggactggctaagtagtttatatttttctcatctagccacatttcaacatgatgtaccttttttgctaagcttttattcaaacagctcaggaaagtcaggaatacaaggggtaggattttatgaaaatgcaattttgatgtcttgttcataatggtctacagaaaaagaaggaggctgttgaaagcggcaaacgacaaattgagaacactttaaaagagggcaatgacatactcgatgaagccaaccgtcttgcagatgaaatcaactccatcatagacgtgagtattgggtaaaactcaaaagagagatgataatgaataaatgggagccgatgagaaagctcagtaatagaagcaaatactagtacttgttttcttgtggagataaaattatttttgcattattctactgtgaccatgcctatctattggtgacaactggaatatcactttgttctcccaatggacatgagtgtttgtgtaagtgtactcacacattcacacatatctgtttttgtccacagcgatgaaggacatttcttgttcctagagcagcacttacaatctgcttcaatatttatataacattagttaaaagacaaatgtaaatttacaaacaggcttttaacatgtaatgtctaatgcattacatagagtgatatgtggtcatagaaatgcaaatggcctaagagatcctaatgacatgtatacctatgaagtggcattgtttaaatagataggcttttcttggtctaagttggtttcttaaatttcctagtctattccattaaataatgactttaattctctattctttttgctatgttagtaagtttgaagtttcattttaaaactaaacatgtgggccaggcacggtggctcatgcctgtaatcccagcactttgggaggccgaggtgggcagactgcctgagctcgggagttcaaaaccagcctgggcaacatggcgaaaccccgtctctattaaatattcaaaaaattagctgggtgtggtggtgggcacctgtaatcccagctactcaggaggctgaggcaggagaattgcttgaaccagggaggcagaggttgcagtgagctgagatcgcaccactgcattccagcctgggtgacagagcaagactctgtctcaaaaaaaaaaaaaaaaaaactaaactaaacgtgtagttatgtctcatagagaaattagtaaaagagaggaggcttgaattcacttgcttaaaatgccctcttctctacatatcagtatgttgaagacatccaaactaaattgccacctatgtctgaggagcttaatgataaaatagatgacctctcccaagaaataaaggacaggaagcttgctgagaaggtgtcccaggctgagagccacgcagctcagttgaatgactcatctgctgtccttgatgggtatgtcatttgtttttggaaatgtttgtgtattttgatgcttgtccaaaggttttgactagcataaatagtagagaatcattttcaaatcctgatttctgttaattatgaacacactagctatatggcctttctgtggataggcttaattaggagggtctgggcaaagctttgctacagcagcatcaaaagtctgatttacaagtagactcaaatatggcttagtaggaagtgaacatagccctaggctacacttagaaaaaattattttctgttctttattaaaaagcacagtggttgccttattagcattttaaataacatatatgaaaatacattctgtttcaaatttcagtttcatgtttctaatggaatcaaaacaatttattgttaaaaggatggcttttgaaaatttggccccatacgtagtctttaagtcttttttatttttcctcttttaagctccagggagacattacattttctcctgtaaaatagcagcttattctagctgggattattacaaaggtcataggagggagagtaaagagggaagtatacatttgacttacaaacagccttctgtgtataactgatatgcttttcctacaattttgggattgtcgtaatttaatagcggtgctattagccccaagaataatttgcccagataaatctacatcacatgcaaagctttgttctcatacttaatacttactgttataaagaaaaaatgctaatgtttgaagaccttggacaatatatgaactatcattttattttatgtcaaacttttgccactttataatgaagggtgggtggcagatgaaacacaaagctaggtatcatcagatccaggctctaagtccttacttggggacatattggtcatttggcctgaaacaggccatttaaccttctgaaattcacttggtctcttctgggaagtgcacctaccccagaaagattttgtgaaattaattccagtaatgtagtacaagtgctctgaatctcacagcatgcttcacaaataaggtgaagaattgtctcatatcacacacctgctagagcacctggttgcagagacttttggaggatgctatgggtatttaagatatgttggtagtatttcatagctgaattattagaaatataagtttaggttatagaaaactataggacaatataataagtagatacttcactattatttggaattgtcatagatatattggccatgatcatttggaagccagatttcatataattaggacgttcttcatttgagtaccattgagtgccctgacattccttttttgaatcatcccaccagaatccttgatgaggctaaaaacatctccttcaatgccactgcagccttcaaagcttacagcaatattaaggactatattgatgaagctgagaaagttgccaaagaagccaaagatcttgcacatgaagctacaaaactggtaagaaacaaatggcacatgtgctgggaatggaagtcaacctttttgaatttttcaaatgtaagtcagtctggaaaatcccagtaaattggtatatttgttttgggttatttttgaagacctcttttaaaatttgcctaaaataaattctcggtatgctataattatagcagaactcttttctcagtcacccactaccactgttagggtcttaaaattatctcagaaaccaagcaagtttgtgctaccaactcacaaaataaaacaggcaaagacaacactctggatagggaattttatcaccattatctcaaatggcattagtaaaaaagaaaaaaaagtaaccattgtatataatcacacacaaattggttacatatgaagtttggctataaaattcactttttaataaaaacatactggatcatatgcttctaaacaatttataccatgtttatgaattaatgaatttttatgaatttttgaattaaaaagctcttaacctttggctacaatcattgttcgtaatacatttggaacaagtattttagagtttgggcattccaagttctatcacattatttgaatgccttcaatggtgacaaatctttatgctttagatgtaaagcaacattttgtacatgagttgtgtgatagtaagttggtagtactatttcaggttaaaaaaatctcataggaatcatcctgaataaaatgttcagaaccatcatttatttattttgtttcacatagaacctaccaaacacatgagaattttttgggggagaaatctgattggacatttgactgtgagtgaaatacacataagcagtggtgttaaagaaactgatcaatattttctttgcttcagtgttgggcaaaaatactttctaggatttaggggatattagagatatcccctaaatgaaccagtcttagcaggttcattttgtgatcataatgaaacatcatattctatgagcaatttgtactgtttttggtttctcttgagtgagccctactaatgccatatgttctgttgacttcttattcaaaatagtggcatgatcattgcagaagcatttctatgttcagttatcctttcagaatgaatctacttttcaaatctaaactaaattttaatccatcttctgttagataattttctattttaaagaccctaatttcaagttcaccattttcatttcacctgttttattgtatgattattttcagcacctaaaatggtgcctggcaaatagtaggcacttataaatgaatgagtgtattttttcattataattgacaccttttatgcctgttcataatcttttataccaataaaaatttgctgtagtaattgcttcatccttataaatttcttgtaacattttatgataaggaggtgtttaattttaccctaatttaatacctttaggaaaaatcattttttgccaacatgaagtgtgcacttacttcttaccacccatgcttatacatggtaggctaaccaacctcaaacagagagtgatggtgagttgtaatgcattacaccatgtctgctgttatcattattccttctctctttccacaatcatttaaaaataattaaatgtctgaaaaattacaaaataagtgctatagagaatcagtgatttattaaatgactattggataagaaaaagaagacaatctgtcccagaaattttgttggaatgtttttcatgaacagaatgaataaaattttagtttaatagatcagtataatatagttctactttgctggaaaagaaatatatttgaaaagcattacgttgagtaattatctagataggactaacatcccataaatataagatctgatataaaagctatagctcaacagagaagaatgagattaaatgtattattaagtatagaagagttcaaagcttaacaatacagaagagtcctctactcctttgagtctagccctataaagaaggaagaatgttttcaataacttaaaaggaaaaacaaagaaacaatttatacatttgcaggagaaaaggaaaaggtcaagtagtagagcaaccaacgaccactatgaagaaagtggaggtcagacaatttgagaagaaaaaaagcattgaaaataccataagaaaagaaacaaagaaatgatagaaataacctccaagcataattaagacaatgtttaaaatcaactttgattttttaaaaatttacttgtcttcctatatataaacacacatagacaatcaagaatcacactgaaaggaaaatatgagtgagaaggaagtggatcctttataagcaggagaaagctaatacgatttgtttgtactgcagtattattttgtaaagagtaatagctacttgtcttgcataactaatttctttaaatatcagaatgaaatgttattttaagaatttagacatcatgaaataacaaatgctatttttctattggtgtcgggtgaggaaagtactataaagcatttgttttcctacatataatcaccaagaaaatatctcatttagtacttctctagagggtgcaaggaaaacagaaaggagatatgtcactcataaaatggaataaaaatggaatatggacatcagtaattttttctcatcttagttgctttgatcctataagagactctaaaataacagagaattagatgtttttaaaacatttccaggtcatagtaaactcaaagcctacattatctatcagatcagatttttaaaattgatgaatgtattaatgttctctagaaggacagaactaataggatagatgtatacaagaaggggggtttactaaggaatattgacccacgccatcacaagatgaagtcccacaataggccatctgcaagctgaggagcagggaagccagcccgagtcccaaaacctcaaaagtagggaagctgacagtgcagccttcagtctgtggttaaaggcctgacagcccctggcaaacccctggtgtaagtccaggaatccaaaagctgaagaacttggagtgtgatgttcaagggcaggaagtatccagcatgggtgaaagatgaaggctggaagagtcagaagatctactctttccactttcttctgcctgcttttattctagccacactggcagcttattagatggtgcccacccacattgagggtgggtctgcctcttccagtccagtgactcaaattttaatctcctttggcaacaccctcacagagacacccaggaacaatactttgcatcgttcaatccaatcaagctgatactcaatattagtcatcacaagtccaccccttgtcaacttgaacccatacacatctcctgaaatcatacataatctccaaataaagacaataataacatcataattatacctaacataatacagctatcccttgtacaatcagaagcacactaatccttaacctaaatgctattacataaagttaacaacacttaaatgctgatatgaagtcaataaattttatgtcacatgataaaggaaaaagaaagcaaatgaagatattttcctagtacaagtgtatacatgcacaaacatattcttaacagaataaggaggaaatatatgacaattacagtcttcatttctgcaactggccacgtggttgtagctggtattgatgactaccttcttctactaaccattatgtattccctttgccttctgcaagcacctcagcgggtcatggctttttacctggtggggtgacccaaacctttattctggaaggacctgtgccatttgtagtcctgtctggattgggttggattgggttgttgtagtttcccattgaccttaaacacagaggatggtaatattaagagatgccctatgggatctcctgtattccatgcatgctcttccttgccttcattgtggaatagtagactgatttcaccttgatattctgggtcaattacccagccaacactgaaacccccttcttagcctgttgacttggaggtaggagggccccaattggccaggtggtaatcttaacttccagtttaatggaatcattgttgtatcccttggtgacagcattcttccctctggaactaagatgtctaggccagcagaacataatgttgtgggaacaggaagcaaaattttgctagtgggtcactagtggtgatggtgagtggtgccacttccgcttccaccccttgattctgggacacgtgaacactggctatgggagaaacagtaccatattttggacactgattcaaggcatacacagccttctggagaactttgccccagtccggcaaagtattgtcacctagttggcattgtaattatgacttcaaaagggcattccacaattctatcaatccacctgcttcaggatgatgggaaacatgataagaccagtgaattccatgagcatgagcccagtgctgcacttctttagctgtaaagtgagtgccttgttcagaggcaatgctgtgtggaataccatgacagcgaataaggcattctgggagttcacggatggtactcttggcagaaacattgggcgtaggatgggcaaatccatatccagaataagtgcctattccattgaggacaaacctctgcctttgcatgatggaagaggtctgatataatcaacctgccaccaagaagctggctgatcaccctgaggaaggatgccagacggagggctcagtgttggtttctgctgctggcaaattgggcactcagcggtggctatagtcaggtcagtccatgttgctgagcctatgcataacctccattcctgccaccatggccactttgttcatgagcccattgagcgatgacagggtggctggggaaagaggctgagtggtgtacacagaatgagtcatcctatccacttgattattaaaatcctcctcagctgaggtcacccgttggtgagcactcacataggatacaaatatcttcacagtttttgaccactcagagaggtccatccacatacctcttccccagattactttgccaccaattttttaatcatgcttcttccaagtccctgaccatccagccaaaccattggctacagcacattaattagtatataattacacatctggccatttcttcttccaagcaagtgcacaaccaggtgccctgctcaaaattctgccccctgggaagacttccctttgctactgtccttcagggatgtcctagaaaggggctgtagtgctgcagctgtccacttttgggtgctacctgcatatcttgcagaatcatctgtgaaccaggccctagtcttctctgcctctgtcaactgatcatggggaactccctgtgaggccatcagtgcaggcttggggagagaaggcagggtggcaggagtggaggccatgggcgtttgagccacttcctcatgcaactgacttgtgcctttaggactggctcgagcctgatcatgtatataccacttacagttgatgatggaaggctgctgtgtatgcccaactttatggctagatgggtcagaaagcatccagttcatgaaaggcagtttaggttgcatggtgacttgatgacctacagtcaaacattcagtttctaccaaagcccagtaacaggccaagagttgtctctcaaatggagagtagtgatctgcagaagatggcagggccttgctccaaaatcctagaggcttccacctctaggagtcacctatgggagcctgccaaaggcttcaaacaggatccctgtctgccattgacacctcaaggactattggatctgctaggtcatacggcccaatcggcagagcagtttgcacagcagtctggacttgttgcagagcccacttaaaattggcagcctttcaggtcactcaataaatgggcccattttaacacacccaggaacaatgctttgcatccttcaatacaatcaagttggcactcagtattaaccatcacagtgaatgaatagattttctatgacgttgactccttggaatgaccaccagaggcaataagcacactctcagtgacacgaggatatgaggccctcctctgcccatttacactggaaatgtcttagatgtcttagtgcttttcaatcaggtatatccaaacaacaaacaaacaaataaaataagactaatgcagaatgaattccatagttcagattcttcaagataatggaaaattatcacataatctccacctgttttgaaacattatcttctttccttcctttcctccctttctccctttctctaagtcagtggaatagtctagtttaactttgatgtagaaaatttaggcagtcctcaacctctctaggtatgctgaattaaaaaaaaaaaagaatgacatttttaattcccatggcaaatggagttctcctctttcttctgttcctcttcttcaccttgcaatgactgtcattttgtaaaactttctctctgtctctgtctctcttactcacacatacactcacaatgttccttaatatcttctaatcctgaatttcctttctcaatttgtttagttagatcttcactagaaataagtattagaaattgggaaaagtttatactggttgtattagggttctccaaataaacagaactattaggagatggatagatagatagatacattgattgatagatgacagatagatgaatggatggataggtggataataggctggtagatgatagatggatgatagacagattagatagatagatagatagatagatagatagatagatagataatagattagatgatagacagaaagaataagagatttattatgaagaattggcttacgtgattatggaggctgcaaagtcccagtatctgtgagctgcagatccatgatatagttcactttgagtccaaaggccagagaatcacgggagctgatggtacaaaccacagttcaagaactagagagaaaatgagatgagatgtcccagctcaatctgtaaggcagaaaagaagggaaggaattcctcctttctttgctttttgttctattcagccctcaagagattgggtgatgcacagcaatattgaggagggcaatctcttttactgtcatccagaaacaccctcacagacacacccggaaataatgtttaatttaggtgcccatggccagtcaagttgacacatacaatttacaatgacactggccttcaactccagtgcacaatgtggtcttcctctttattctccaaattcaagttctcttacttgctacagttgtccatatttcttgggaaccatcattctaaaaaatgttgaccaggcctttcttaggcatttctaggaaaaataatataaaatacagaataaagtgaggggagttcagatataatgcatttctcatagaaaaaatgatagtgggatggttagtaaagaactgtgctgtgtaagcaagatgtaagctttaaacaaagtgaagaaaaggggagaagcctagaaaaaataacattatacagaaagagaatattcttaaatatgtcaacttctcttatagcaaatttcccagtgttcattcctaatacaaggagagtaaaaactccatagaaacctcaaaaagagctttttcttgcaatggggttaggtgtctaaggaataaacaggacttttgaaactttactcttatgtgacagatcagtgaggaggaaacacgctgataagaagcactgaactactacaaatacgcttcatttgctataaatacacttcattcactgaactataataaaattcacttcaaaaggaatgtgaacaaaatgaaagaacttggatataaaggggcaaaagtgaacaaaaagatagaaaatgtgtacaaatctaagtaagcattatggaaagcataatgataataattattaaatatgtggaattaaaaacaaagtggaactaaaacacaagagactaataaaatggaaaatggggcaggtagtcagttatttaataaaagtttttaatattcttgaattctggggaggaaagcaaaaagctaattaactttagttttcactaagaatatgtattaaacattgaaaaaaaatctggaaaaataaaattgacaatattcgagttctccagagaaacagaacaaattggaagtgtatatatacacagatatattatatattttaaagaattgactcatgagattgtggggtctggctgcagggaataggtgaatattgccgtcttgaatccaaaggcagtttggaggcagaatttcttcttcttcaggggacctcagtaattcttcttaaggcctctgactgttggatgaggttccccaacatcatggagggtgacctgctttactcaaagtctactgactgaaacgttaatcacatctaaaaaatacattcacagcaacatctagactgctgttttaccaaaaaccaagtaccatagcctagccaagtggatataaattaacgatcacaaacagctaaacattccaaacaagcagacagagagagaaaaaaataaagaaatgtgaaggggaggagaattttcaatcaattctggaaaagacaaaaaaagagaaaaagagaaacaaatcataaatataaaatataatggaattaaatccatatacaacaatcagggtaattatcaccagctgcctcaagaaataacccctgaaatctcacatgatggacataattcaagtttatgtctcacatcacaacacaatgtgagttataccaccttttgcatcttgtagtgacaccatacagtgtagcctccaaggcagggaagagaaaaaatgaagagacatgtaggcccctaccatactggctcatgaagcctggaccacgtctggtctgagtcattgaccagaagtagccgtgtgccccaagctaactgtaagggaggtctggaaaagtaggaggcacataggatatttgatgagcactaactatctctgcttcaggttgtcttcataataaatgcaaacattaaaattgacaggttactatgattttcatattggattaaaatgtctaaaacaaagggattcgtctatgtatgacttacacaaatactgcaaatcttaggggaacagaaagactgaaaatgagagataagatacactatgcaaactctaaccagaagaaagctggtatgctaccattaatagcaatcaaaaagactttaatttttttaaaagaattattaaggacaaagaaagtgatcatgatagaataaaaggaacaaggaaaactaaaaaattatgagcctgcaaggtcataataacaaagcctatggataaataaagataaatatatcagaatgagaacattttcatatatataatagggaatgattttaccatatctctcttaaaaagtgatagatcaagcaaagagacacagattttaaaagtaccttacacaagataacttaatggccttatagaactctatgtcaactagataattaattctacatgccccattcgatgaagtaactcatgaaacaaacaaaggaccacaacctagatcataaagcaagtatcagcaaatcctaatgatccaatagcatctagactacatcctcttatcataatgcaatacaattagaaattggtacaaaacaattgacaaaaagttttaaaataaaaaacatacttcaaagtaatccatggcttgagaaaaaaacacagtttaaatttacgaagtatttaataacagaatggaaataaaatttcacctcaaaatttgtgtgtgcaaataaagtggtaccaacaggaaaatgtacagtttggaatgcagatattaggcaagggtaagaactgatactaattatctaaggtttctgctcaagatgtttaaaaaagtacacagaaagaaataaaaataaaagcagaaattaatgacctaaggaaaggcattagacagggttgacaaaacagcaagttgattcttagaataaactagcaaataaacagaagacaagaacaattaagcaaagagagacaacacaaatgaataggatcaagaatgaaaaggggatcataactgtagatacattatagattgaaaaataaaaatggatatattggaggatatgcgcaattttattcaaacacatttgaatacttaggtgaagtaaacagtaagtttagagcaaaatttactcaaaaagaaatagtacacctgagaactataaccgttaaataaattgcatcagtagttaatacaacaaaataacaatatgtacaaaaatgtaaaggacccattatgcaatttgttcccaagaatggaaaaagaagaaaaatttcctcagcttattttatgaggctgatacaatcttgatggcaagccctacagaggacagtactacaaagaaaaactataggccagttatttaaatagagaagctacaaatgaaatattataaaacccagttcaaatgtacatattttaaagatctgtaaatatacagtaaaacattaacatttgccagatacagatgatgggaatagaggtgtctgtattaatttctaatcgtatctatcttatttcctacttaaatagtttaattaaaatgaacctcagaggagatagaaaatctgtcctgcaataaaatctgttctaaaataataaagaaaataggtctaaaatgggtctggaaatgaaacaacaaccctcatcctttacaccagcaagaagttctaaatttctttctttttctaaattcatgatgcatacatgttttaatttcttttaaatgatcagaggctgataattgcaagcaacaatcccctaacctaacttttctctcaactaagctcacagctccaggatcaacaattccaaatctttcaaatattcttcttttactacatctcttagtaatattattgtgccatcacgtatttcattaagtggggcattatctatttaattactgctatgatgaaggagatgtagttcacttacagaatatcacatcacattttcccacccttcagtttcccaatataggtacattactgtgcttagattcttcatttttaacctaatatactgagagcattatttcctgtataaatgatagactctgcactctttaagatgaagctatttatgtcctcattcttccctttagcttccttttttcctcgtcctctcagcttctacctctttaactttgatattgtgatggtcaataacatttacattttatctataaccataattgtgccatggcagaatacagaagtcccttctctgaagacattttattccttaaaggactccctttgattttttttcagtgggccatttgatgcttgattgccagttgctctgtgcagaagagaaggggtattttattccataaaataacttgcagtgaattattcctttttattttcacaactgactctcattctctaccttacctgttctttctgaggcctggccttctccaaattttttctatctccttgctggcatataccctatagtgcaagttgtgggtacaataactgcaaaagattgaggagcaggaactatctaaataaccatggtggctgggtgcagtgactcatgccggtaatcccagcactttgggaggctgaggtgggaagattgcttgagcccaggagtttgagaccagcctggacaacatggcgaaaccccatctctactaaaaatacaaaaattagccaggcatggtgacacatgcctgtaatccaggctactcaggaggctgaggtgggaggatcccctgagcctgggaagtcaaggctgcagtgagccaagatcatgccactgcactccagcctgcgtgacagagcaagaccttatctcacaaaaaagaaaataaaaggcccatggtggtgtggctaggaaagagtgccaaccctgtccaaagggaagctttctttgctgaaattatacactttctttctttttttttttttttttttttgagacggagtctcgctctgtcgcccaggctggagtgcagtggcgggatctcggctcactgcaagctccgcctcccgggttcacgccattctcctgcctcagcctcccaagtagctgggactacaggcgcccgccactacgcccggctaatttttttgtatttttagtagagacggggtttcaccgttttagccgggatggtctcgatctcctgacctcgtgatccgcccgcccaaagtgctgggattacaggcgtgagccaccgcgcccggccgaaattatacactttctttgatcaacttctttttactccgtcatagttttattccccaccaatctcccccggacagtcactccattttacttagtctcttggtactattctcagaattcaaattttaaattaattaatctgtatttctgaagagctgtttgttttcttactgtatattttgctttctccatgggaaagatatgcttgggagcctcatgcagtcttggtgggagttatgtaaccactgggccagatatgtcagggcacacagcatggtgagccattccctggccagttccatcgcccagagccagaccctttgggccctacacagactgcacagccccagcatgtgggggcttgtataagggaagttctgatgtcacaggatccttggggtgtttcttcaccagctggaaacctctgtggccagtggcacctttgcctgagttttgctgaggtccactgggcacattccgcccactcagcctggcaggctacacttggctcacactaccactactgggctggatcccacacctgccaagggtgattcagggcagagtggcgaggggtgtgtgagtgagcgtgggctccagccactgtgcacagctaagcgtgccagctgcagtgggctgggcagctccaggtcctggctctatgtgaggctgtggctgaaccagacatactacaattggcttccaccactggtaccagggaatgcggtggcacccaggagcttggagatgccaggaaccacagagtctgaaagagggtctcacagccctggctcagggagtccataggtctcagctccccaaaaggccacagcccttctctcctgctcattgctgtcaacatggtgagctggggaagggggtgtgtttcaaccctgtttgtgttgtagctctctcatttccaccatttgcgggggggtcccaagttcttgtcccacatcctggaagaatgaggtttgcagacaactggagggttagcaaggtgaagaggtgctttattgagtgacagtgcaactctcaggaggcctgaaatgggtagctccgttccacaggcaggtaattccagcatctgtgcagcaccctcaacagaggtgagacacacagtgggtagctcctatccacaggtagatcatcctgttgtctgcccacgtctggctgagtccggggttttttatgggcctcagaggggaggaagtgtatgctgattggtccatgggtggccatgagctggcccaaaaaaagcaccataagttctcactccagtttgtggaaccgacagtccagcccccttccttcaggcagtccctggcttgaaggtggagcttcactgagggcccacccctttccacccaggaacctgtatgcctcctgccaccaccaacctgccatccacggcgcccactggcacccaggctgttcatgcctagggtcaccttcaggcccatgcagagccaccctcaactcccccttggcctccctaatgtgctccttggcacccaaaatccagaaggggccaagatagtagggggctagagtgtcagtgctgccccgagcatatgcacacctggctgggttgcaacagcctcagctttgctctgaaatcagcctgggtgccgggaacagtgagagaccaggaagaaggagcgggcacttctgagcctgtaggggaagagaggtggctgagggcacagggatgcctgggtccacagctggctgggtggctgcagctgcacccagtagggcagggttcccccaccttcaactcggaaggggacatggctcccacttgttcctggctcccaccagctctgtggagcacaaagccagacaggctgacactgccattactgagaccctcttgctctcagaagagttttcatcgcctgctccctctgttttcactgcttggtgactgtggtgttttgttttgttcctatttccttttctcagaaaagaaagtctttagaattaaaatttaagctgacaatagatcccctctccccagggagcagaaatatggatatccctaaaggtcttgagtgtttcggtctttcactattttatactcaatattccatgatttttatctagatatgcctggtggacaacaggtgatcgccaaatataggttgtccctcccatctccaaattctgatgctagaaatcaggaatggctatgatagtccagattttcagaattgataagatatttatattaccctaagagatacggaagttgaacagaataaaaaaattcaaaataaaagtaaataaaattactttctttccctgtttagtttgagatcatgtgtaaatatcagtgaacgtgatgtcatataggatttttttttattgatcagaattaggttcaagttgtgttctggaaacttctaattaaattgagggaagatgctagcaggccagaatttgggaattagatgatctggctccaaattcaatacatattgtctatgtaattagctgtgtcacctaatgtaccaataatgccttttcaagaaacactgtgcagtctgttctgattcctccattggcttaattcctataataaatatagtttccaaagtttataacttaattttcagaatttatttattttaattgacagataaaagtggtatatatttatcatgtacaacatgatgctttgaaataagtatacattgtggaatggctaaatcgaggtatttaaaaatatgcactacctcacatactggtcatttttctgtgttgagaacacttaaaatctactctcttagcaaagccatgctggctttagtgatttttttttttgtacatgatactctcatttgggtcaataatttttttaaaagtctattggaagcagagaaataaattttttgacccagccttagatgtatttaaaagttcagggcataaaatgatagatgtctcagggtttgtgtcatcagtcggaaacacagaactcttttgaacaatgccacaatgcaatctaagtttgatctaattttcttcaagacaataatgctcttggtgccatcctacctgctctttatgatttctacccgtaggtagaataatcaagaggtgagattgatgttgtttttgattctggacattaactagagggaaaattcgaagccctctaagaatggtatctaacttaatagacacctctccattacctttactcaaaactaagactctttgtggtatgggcccaccccacctctagtagccagctgctagtccagtgtctgtctcactgaagcagtctagtggtacacataggtactgagcaattatgtctgtcatgctgtaattgaggaaaaccatccttacttcattttatatttttgaatgctcccttgattgtccttcttggtgttcccataaagctaaaaattcacactcacgaattttaaattatcatgagcaatttgggggatttcctattttatcactgagtctcctttgagtgctcagctgctttcaatcttgacagatactcatctgacccatctaccacccttagggtatgctatgcgatgccagggacctacagccttttaagagatttttgaccaaagccgtctctttggggtgtttcttgactcattttttactcattatttaattttaataacctatagtacttaaaaatgtacagtactatataaagcaccttaaaaattgatgcatggtgattttcttattttaaaattgtgtatgattttttaaattattataaaagcagcttatgtctattatagaaaataggaaatacagaaaagcaagaagaagaaaatataaaatgtgcatacgagtaattacttttgtaatatcattgtatatctactcatatcttttcctatgcaaatagtttttctacaaatgggtgatatttatataactgtttcataacttactatgggaatgaacatcacatacgtattttaaaaaatattctcaaaaatatatttttaaaatgtatattgaactagattctgagaatttacatcattattatagtaagaacattatccttgattttgattcatagtctaacataccaaactctaaatttcttctgttactcactttacataaacacattgcagccagtcaccaacccttacatatatccctgcacagtttgagcagttttctttattgaaaatatttttaatttaaaatcattttaagttttatattatcttggcacattaacccctgtggaaatgtgtaagacttctcttctaaaataaattatttcataaagagagagagtaatagaataagtcataaaccatgctgatgaatttttagttactactgtctttaaaaagtaaacaaaaaaacagaaaataaatattttacatcttttacagccaactctttcaatgagttcaaaaatttcatctctaataaaaaagtaatttggggaacatttaggaaaaaagcaaaatatataaagcaatgtaaacaataacttttaaacttgcttgtttagaaaatcactggggtacaggttagtcagcctgataaactctaacttgccttcacacctccctcctccagcagagcctcctctgacagccaaacatctaggcatttctgtgttccattatggtaatgattgtctttttttataagtgactatatttgtttgtctttcctcttccctccactccagttccattagggaaggcatagtctttccattttgaatatttggtgcttgagataaataaaaagttttgttgggtaaataaatcaattcacttatctattaatcaatggcagtatgctttagcaagagtaattatgaatatctaataagtagtaggaagaggaaaactaacatgtattaaaatgcaattacatgccaagtcatctgttgaatcctaacagactttataatttcattttttcctgctataatgacgttttaaattatctcacattttcttaaacaattattaactaataaaaacatacagcaacttacataaaaatagactctgttttgcatgatatagttgaaatttttatataacttgtatatccatatgtatgaatatatatatatgtacacagactcagaaagagaataccaagaatttattgtttaaaaaaaaaaacctctaaaaagcaagaaacaaaatatcttgcaactcaaagaatctcatttatatttcacatatgctgtagacacagctcaggaactcagatgtgatgcttatgaatatgtataaagtataattagcttagaaaatgctgcttcatcacctgtcctgatattgttgatgtgcttcaataacttaccaagcaatgctggaaaaggttctctccaaattccagtgagttgaaacggtgcttttcacccataacatgttagtgttttccattcccttatcatgtgaaaagcctgtcctttaaacccagattgctggcagactgcttgtaactgacagttgtatgccataagctctttactttaatattttagagagcttcttgaaacattgaggcatgtcttttcctccaaatctcttgatttttaacctctcaattccacggtgcttgcatgaggtgactattctcttttctctggcctatactattacaataaccaattgatggctccttttttcccacacagctgcccaattcatcttcttggactacagctctgatcacactctcctactcagaaactttcaaggcctccaaattgctcattgcccagtttccttactcgcacattcaaaccttccagaaattgactctgacctgtctaatagccttacttctccacattgcccttgacgaaccctacaaacttagggagctgaaatactcgctctcacatccacacatcaaaagtccctgcctgcctccctgcctttccttatactatttctactatatcttctacattcctgtatatactacctgtctcctttcatctgagcaaggaatggttgactaaggatccaggaagaaatcactgacttcctaaaaagcagggaaaaaaaaattgcctggaagcaaagagcaggtgatattcagaaatgcaagaagatagaaaattagcaacacggaggtctgtatcagtacatagccttcagtcagggctgtcatgtttctggatgaaggtgcaagagccagtggaaaatcaatacattgataatcatccagccagactaatcagaaaaaaatcagaaaagtcaccaactaccaatatcaggaatacaagaggtgaaatcactacaacttctgcagatagtaaaggatgttaagaggatattatgaacaattttatggcaataattcaacaatttggataaaaagggcaaattctttgaaaatcacaaactaccaaaactcacagataaataatctgaatagttctatattcattagagaatttaatttgtagttcaaaaccttcacacacacaaattcagttccagatgactttacttgtgaattccaccaaatatttaatgaagaaataataaactctttcagaaaattgaagaggagaaaatacatccaacctcattctacgaggccagtattactctgataccaatggcagacaaagatagtttttaaaaaagaaaattatattatataacaatatccctccatgaacatagatgtaaaagttcatggcaaagttataacaaatcaaatctaatgatttactcaaaggattatacatgatcactaaatgatattaatgccaggatgtaagattggtttaatatttgaaattagtcagtgtaatttaccatatagcaaactaaaaagcaaactatataatcacctcaattgatacagcaaaggcatttgacaaaatgcgtctatttttttttaaaaactgcctactaagagtaggggaacttcactacctgatcactataaaaacctattttttaaaaaaacctaacagctaaaatcatacttagcacaagactaagattaggaagaaggcaaggatatctgcttccattacttccatttaacattgtactagagagactaaccagtacaaggggcaagaaaaaggaaataaatggcatccagattgaaaaataagtacaaatgtttttattcacagatactatagaagtctaagcataaaatcctggtggttcatgcctgtaaccctagtgctttaggaggctgaggcaggtggattgcttgaggccaagagtttgagactagctgggcaacatagcaagacctcatctctacaaccaaaaaaaaagtttaaaaagcataaaataaaatgctatctattaaaaaaaagttactagaactaataagtgagcttaccaatgttataaggtacaacatctatatgtgaaaatcagtcatttcaaagactggcaaggatacgttggaagttgaaattaaaaggttacagtttacaatagcattaaaaatgtaaaagaccccctacactgaatactctggagataaataaaagaaaatctaaataaatcaagagatataccatgttcatagatcagaagattcaatattcctataatcctagtttatacatattgacctacacattcaatgcaatcccagtaaaaatcctagcaaggttttttcctaaaaatttacagatatgttttacaattcatatggaattggaaaggagaaaaatgttggaaaggttatactacctgacttcaatacttactaccaagctatggtaatcagagaatgtggtgttggtatcaatattgacaaatagattattagaatagattaaagagtccagatatagatccagacatgtatggtcaaatgatttatgacaaaaatacaaaagcaatacaaggtatatttaacaaattctactagaggaattgaatatccatgaacaacaacaaaaaaaatgaacttcagtctgtatcttgcaccatattccaaaattaactcaaaagagatgctagacctaactgtaaaacataaaaatataaaacatctaaaaatatataagaaaaatctttgtgatcttgggtaaagcaaagattcttagatacaccaccaaaagcatatcctcaaaaggaaaacaaaattaacaacttaaatttcatcaaaattgagaacttcttcccttcaaaaaaaaaaaagcacttttaagaaaatgaaaagataactacaaactagtagaatatatttccaaattacatatctgataaaggacccatatccagattattcatatgtatcattcaaaactcaaaaataagagcaaataacccaagaaaatttgaacaaaagatttaaacaggtcaccaaagaaggtggaaaataagcatgtgaaaagatgctcaatgttattagtcataaggaaaacacaaagcaaaaccaaaatgatgaccagttagaatgtctaaaattttaaaagacaggttataccaagtatcaacaaagatgtaggcacatgcagctctcatacactggtgatgggaatataaatagttcagatactttagaaaacaggttgataatttcttaaaaacgtaaacataaattaccatatgatccagccattctgcttctgtgtatttactccaagataaatgatggcatatgttcacccaaaaatttgtacacagatgtgtacatatccctatgatgaaataattaccaataaaaaggatcaaatatggatacacacacaacatagataaatgttgaaactatgttgagtgaaagaagccagacaaaaagagagtacatgcagaatgtttccatttgtataaaattctatgaaatgcaaacctacagtgatggaaagcagatcagtatttgtctggggacagagggaagagaaggaaggatagaagaaagagattcaaaagaaatgatggatatattctctaccatggttgtggtaatggtctcatgggtgtacatattcaaaacttatccaattgtaaattggtttgcatggtttatttatgccagttttaactcaataaaagtattaaacagtattagtcatctctggtcatagtccctccacaatttccacaacttagattttagcctctttcactgttgtttgggccatcttcctcttttctctcttaccaattccatttattttcttttttaaattctttttacttttttttaatttttgaaacttgtattttaggttcaaaggtacatgtgcaggttttttatataggtaaactcttgtcatggaggtttgttgtatagatttcatcacgcaggaactaagtctactacccaatagttatttttctctgtttctctccctcctcccactagctaccctcaagtaggcctcggtgtatgttgttctcccctttgtgtccatatgttctcatcatttagctcccacttataaatgagaacatgctgtatttgattttctgttcctgcattagtttgctaagaataatggcctccaactccatccatgttcctgcaaaggacatgattgcattcgttttatgactgcatagtattccatggtgtatatgtaccacattttatttatccagtctgccgctgatgctattccttattttcttatgctcagcaaatcaaccttttctctccactttaatcctgtgcctcactttgcacacctgaagttagctttaaaattatgacttttaaatgcttgtcagattacattcttacaaaaaggtattcacactccaaggcactggggaaagctgttttctttttttgtctagtttcatctagtactataaatggcctatattatcttgacaattcaggattgtattatcatccttggttattttaccacaataaggttggcatctactgagacctactttacctctatacattttatccctttccaaattgactcagactcctgagcttcaaaaattcctctctccactttttagagttttctcttctctttgctcattgtcggacagattgtcagctgtcacttctgctgttttcatgtgtttgtttagagaatcttcacacattctttcattgtaatttcctgtctctaaattgttttgattcagaaaacctataaccaagggagtaaaaatgacgtgtaaatttggaacaaatatagaatctgagtgggtaacctgaggcttacttcgtgagttaaagtacattgcatctgtgtcattaattttgacactcttttttttttttccaagatgaatgacacttatgtgatgttactgtatctaattcccaagagaactgtagcaatgagaattcctgtttttcccagcagaaaacatcatcagttttctggagaataatttgccaaggttgtcttttgcaagaactatgttcagtgttcttttttatttatgtagatgtttccaatatatctttttgtagatatgatagcattgtacaatcaatctgttctatgagcaatcaattatttacctgaaagctgttagaataatacattaaaataaatttgaccacagccataccaagttctgtaatcttttctagtttaatgttcaaataatgtgactgataaaaataatgtaactaaggcagtccagatgcctttaacgagtgttatgtctgtgataatctgagttcagatttatatcttcaacagtaagtatttagcactctccaacccttcttgcacttgcaatacttttccaatttaaaatttacacataagatcctgtttgatttatctcttggtatatatgaattatgtaatgattgctgaggagcaaacactattaaaatgggtaactagacattcaagttaaacattccttttcccatatcattctattaactttgtgtcaccttttttaatctgagtctaaacaaatatatctttgcttggagataattgtggctcagagattgtcatttagaagattgtgttttgccataccgctttaagatgcattttttaaaagaagcagtgttctttctcatttcagcacttgggagatacaggaaatgctcccctctcagtccacaactagagtgaaatttgcttaaggataaagtcaggggatgtgtttagttcttaatttgcttgacttctgtagcacgtcataatgctgctcagttatgtccttacaacaccgccagttatcatgcatcgagtcacttctgcatctcttaatttccatagtgttatgctctcctaatttctccttttcctctgtggaatgccagtcaccttgccagctccactttctctgcctactccctaaacattgaagttcctaagaactctgttctagatcttcttctcataccgtaataaacagtctcctaactttaactaccgaatatgtgctaataatttacaattctatatctgcagcccagagctctttcctaaaggcaaactctgtgtaccaactgccttctggatccctccactccattattctatggttttagatgtatgacatttgtttttctgtccacaggcaacaggtcctcggggtttattaaaggaagatgccaaaggctgtcttcagaaaagcttcaggattcttaacgaagccaagaagttagcaaatgatgtaaaaggtcagtgtggccatagtttttattatattccagttaatcgggttgttactgataagatattctatcacactattggagaatgtaatttctttagcatgatttttgtgatgattctataatctatttaatgcaagtaaactttctcactagttttacaaaatgttgtctacctatctcacttcaagtagggtaatatctcataatttgtaagtcttatttctatagcatcacttcacctatatctaatgtatagtaacttttagtgtaataagtttttaagagtatcaaacccaggccagccatagtggctcacacctgtgattctagtgcttagggaggccgaggcaggaggatcccttggtgccaagaatttgagaccagccggggaaacatagcaagatcctgtctctacaaaacattttttaaaaatttagtcaggtgtagcagcgtgagcacataggcatagctacttggaaggctgagccaggaggatcgctttagcccaggggcgtgaagttaccgtgagttgtgatcacactactgtacaccagcctgggtaacagagtaagatcctgtctctaaaaagaaaaacaaaattaaatacatttttctttttctgagatgaagtctcgctctgtcaaccaggctggagtgcagtggtgcgatcttggctcactgcagcctctgtctcccaggttcaagtgattgtcctgcctcatatctgggattacaggtgcatgccaccacacctggctaatctttgcattttgagtagagacagggtttcaccatgttgaccaggctggtcttgaactcctgacctcaagtgatcctcccgcctcggcctcccaaagtgctgagattacagatgtgagccaccgtgcccggccctaaatacatttttcttgtattttatttctgattcaggaatcaaaatgcacaaaatatctactgccatattatgggttttatgttaagaatatatcattaaacatggctgctctctatatgagccattacaattattattttatgcacttatctcttgtctcccatttgaattgccacctgtttctctcttcagtttcattccctaccattttctgtctcatatctgtctccctacccttacctaagtattcataattcctcccaaacatgctactattccaagccttcatgttttcagtattatttcttccccttggaatgccccatccttcacctctcttctttgcctaactgctttcttccagaccttcaggatttagttcaaatgccatcatttccaggaaacctaacacctcatctgatttacatgccccctctctggtatagttttctcataggcttgtcaaaccaccacaatcatggactaattaatattccatcttcttttacaatttttaaaacttttttattgatgcataacagatgtataaatttttggcattccatcttcttgaggaaagacatggggttttgctaactgtgtatttctagtatgcataatagtgactagctcaaatgaggaaatacttattttttacaataaatggtgttggcttatcttacttatcttagaaagagaagaggttttaaaatcatttatatttggcatgttttggtctcagtagaagctgatatgaaattacaagttctatctcgattataagtaaaattttaatagtacaattcttcaggctgtgtattacaggtgaaataaaactccctacacacataattctgctcagcaggtacctcttattacaatctgaagaatgactgtaagaagccaaaacctgtgttcctattggacaaatggactcaatcccgtgactttgcggtcactccttcctatctcatacccttgcccagggctgggaatagggaggaagggagcgaggtgattcatgcaagtgcaagaaccaatcctgtctttaagattttaataataccagggccgtgccctcgcctctatttccccacaaacactggtattataaaaatgaagaaagaattttattttcagccattttttttccaagagaaaaagaaatctaaagacaagcattgtaggaagggttaggagacagaaatgttcattagtttaaatttattttttttgtagttcaggtagtacattatttaaagtaatgaaaacccacaaactactcaagtaataattcctctagaaaaccaagccaaggctatgacggagatgggaatgttttcttgctacattatgacatttctctgatttgtggccaattacggaggttataaaatggctgttaatcagggaaatgccatatattactaccaggaactgctgaaataggccctacagagcaaaactcttgacagcagctattaaaatagagatttagtcatttctctctctatggtgcctggagttagaaggaataaaaatggtgaggccagtataccctccatatttctaatttgttgcttggttcaattcagtacagttcagttagtttgtgagcttcagtcatgaatgacttagtactgctccctgccatttttatgctgtccttgccttgagggaatctgaacttgccgggagcaatttgttttgctttttaatttttgaatatacatctgttaaaagtaaatttgcccttgtgtgagtttgagatttgaagcctgtctacattgcactgatcgaatgtttgtggagataaaaagtattttgttgatggatatgaggcttggtacaaattgatgactgaaagagtgaaaagatgaattagtaccaccaggtgaatgaacactgctttgcagatagacaagaaattttttaaggccgggcgcagtggctcatgccctgtaattccagcattttgggaggccgaggcaggcagagaagtgggagaataacttgagcccaggaggcagaggttgcagtgagccaagatcgctccattgcactctagcctgggtgacagagtgagagcctgtctcaaataataattaattaattaataataaaaatttaaaataatttttttcagtaaaatgccaacttcattttctcatggaatgtgtacgaggcaaggaagaagtagaccttggtttattaaaagtttgagaatattaagattttaaaattatacatcttaccttatattgactaacttttcagttttatttccttcttaatttatccccaatttttgtctttgcccaagataaatgaaattatttaattacttagaaaaataataggtaacatgttggccaggtgcggtggctcgcacctgtaatcctaacacttcgggagaccgaggtgggcagatcacctgaggtaaggagtttgagaccagcatggccagcgtggtgaaaccctgtctctactaaaaacgcaaaaattagctgggcatggtggtgggtgcctgtaatcccagctactcaggaggctgaggtaggagaattgctggaacccaggatacggaggttacagtgagctgagattgcgccactgcacttcagcctgggcaacagagtgagactctatctaaaaaaaaaaaaaaaaaactaggtaacatacctataaaatagataacacaggaaataaaaagacctattccctggagatctatgacagctcattttaaaggaggcggtttgtctcatagcactgtagcctgtggtatataattacagttaacccttgaccaatgcaggggttggagagcatggacccctgcacagttgaaaatccatgtataacattagactcttcataaacttcataactaaacttcataacataaactttataaactaaaaaaagaatctattcccaagcccaaataatgaatcagtgcattgcttgacatatggtgctgtcccacacagagaacagtatgaaacattattccaatcattaagttttatcaaaccagttgaagccttccttctatacagtggtcctccaaacactcagtcattccgttcagacaagtgggtcttgaagattctgagatcatggatgtaatacacttgcaaacgctaacctgttgagattctgtgttattattttatattttaaaaataagagaataaactggaatactgcagtgctgctaaaccaaagtatgatataggagtgcaattgtgactaagggatccttttattattaaagatatactccttttgaatttgcatattaccctttgcctgaatcagcctttccatagcaggcatgcaaaagacaagcaaaatctgctctattgaccacaattttagactaaaaggatgaaattaagcctgggtcccctggcctactgtggtctggagaacaaagcagtcttttccaggtgaaattgctgatccctcatacaaagttttgattcctcctttagagtgtgaatggtggaaataaaaaaataaaaccagggtggacttccattagagaaaaaacaataagtggcaaaatagtggcaaatatagaggggcaggttctattggaaagattatccctaagagcgagacgtagcttgtcatatccaaccccaccatgtgagtagaggacaagaaacaaacattcagaacactcctgtatatcatctcagcaagagacaaaggcctgtgcaataaaaatggggcttagagctaaaaacttatctgggctttgttgtgtgttcagaatcagagtctgagattctatggcgttttttgcaagtaagttaatttagaccagaaataaacagaaatgccttcaagagacttacagataacataaagggatggtggggcctgtgttaaaccaaagactatttgtcttatttaaaggtattcaaactcaattttcttgctgggcaaaagaaaacaagcctgcaagcccacagtcaccatgtcctagaggagccaaatgcaggtgttgatgtctggtggttttagtttttcattccactggctgcagaggggactcccttttatcccaatatcctgaatctttgcagaacctgctaccagacaagtacaccttccctcctttcctgaagctcctactatgaccccctagtgggaggaagagcatatgcaagcatggtgcttattgcgaacaagatctaatttcttactttcagatcagaagagggtttctccataacctgactccctgtgaaacagtcatctctgaggttcccatatgtggtcactctagtatgtatgtctgtctgtgcagaataagtaatcagatatacagcacatcccaaacttgtgacagctactagggaaagggaagcacaggagtaacaatcatgaaagaaggctagaaatataaaggttcaggaaatgataccgttccgaatcattgtcaccaaattcaatgattgcctgcataatgcagaaaattggagggattttttctaagaagtacaaagattgggtgtagcaaccttatcaaatcaatttgctggagacctaggagagaaatacagttgtagatttcaacttctattcttcctcactcgggtgctcttctttcctacccaggtctcaagatcctgcactgggtatttaggttgacttaggggacagggtctttagaaatctcaagaagccaaaatctgaacacagtcacttatgcctgtaatcccaggtcctttcaaaagtaatcacatttccatgaatttcacccttgtgaatggggcattctttcagggcatttatttgtgccctattcatattaataaaaaataaaaattccatttgagaaactcaactggatggaatttgaatagtcaaattaaacatttccattaaaatttataaaaatcgtcccgatatttagttgaaaagtgaggaatatatacataggtatacatatgtttaggaaatataaaaacgaaataaacttaggttctggaccaagtaatttaaataaaaaaggaataaagtcataaatagcattattataataaaaactggtaaaacacaccaggacaattttcaaaccaatgtcagtgtgttaccttttacttactgcctatggtaaatccagcactttctcatacatctcccagtttatttctcatatcagtcacatgaaggaagatgttttctttatttgccatatgtaaaaagggacagaaatgacatttgaacccacatcttccaactctgtgtcctatagtgatttcattgtaccagactagatttcagagaaatactgtgtagcagttttattttgagatcgtacatagttagttctaatataactaagccctaatttatatttagcatcatgtcagaaacatgataaacaagagtaactgctcattattaatgcaagtgacttgcaactctgccctgcgatttttattctggatatatctatcttgtgccatttcaatgggcatgtgacaaaggaaaattacactgtcattgtgttcccagtcgacccttgctactctgctgcttccattccctcattgtgagtcctgcttttgccaaactaattctagcacatttttcttctactctatgaggaggagatgagaaagggagagccagacttaaagacgtatgtgtgtgtagcctttgagttttggtggatgtgatctttagagagaaagtagaatgactaggcttctgttattgggtttgagagctgaaggaataaggagagggaatctagaaaataaaactatggattataaattaaatcttcttcttattctccagaaatcacaagtaaaaaaattcagttggattttcttttaactatcgataattctatgtcttcacccttgttacaattcaaactgaatcacaagagttctttcttacttttagttatggatacactatgcctcctctgtcttttatttaaaatcagcccaggagtgcttatttttctaggttttcctcgctattattttgtaagttccattttgaaatctgcaattcttctctgaatagcttctactcatctaattctatcaccaaagctacaaaatgtttagatgtagttcaagaaattccagaaactactttagaaaaaggtgatcagcgtaagaaagggcaaattaataaggatcagagtcaagcagctgaaacattaaaaaaaaatcagaacagggttggaatatacacattgtaacttgctagtacaaaaaaaaaatgcagagaatcaaaattagcgctttggaacttgagaggcagcagtaaaaatattcttcaggtcagtcttctgaataattggcccagttgttcagccagcattttgctatcagaatgcagaaagtggtataaacccagggatacccttcaaattaatgatctttctcaccatacatgaatatcttgcttgccagaacatttgaatgctccattattttaaaaactaaatccaatcaagaagctaagaaatgaaatttctacagttccattttcttaagtgttgaagactttcaagctaatatcaaaagagcagccctttattctcaaagaatttgtatagatatcacagtcataatcagactggctttatttcagagagtatgcttttggtagcctatccaaagattttattttagtataaacagtaaaaataacagaagtattataagaaagatgaattgtgattgacagaggagaaaatccaattacttggaaagtatattttgtgggcttagaattgaaaataataatatattagtgactgaactagacatattgatgttttagagccgtgctttgctggaatattttatgctttgtttttcagtgatgtcaggtctttggcttggaatttaacaacagacactttaaacaatgttatgtgcttatattagtataatctgtagtataacagaagtttaaggtgtctgcctataaaaccctttatatgaagtggagtgaatcattaattaatatgtcccgtactcttcttcacatccagacaccgatagttcagaatcctccatctatccacctttccctttgctattcttcacagatgcaggccaacaaagatgaggatagttctccagctgcccatggcctgcacagttcctctaatgagccacatgcacaacctctgagaggggtgtgcacacagtcaaatcaagactgctgtagctctattctttggggcgtattctctcccacctgccttctctgggtaccaggaaagtgatgaaaatcagtcttggtgttgacaaataacatgaagatagcaaataacattcttccccagttaggtggtttaagttttttaaaacattgaaaaacagaaatatatgcacacagaaagcaatttagccagcacaaccgggtataaaatgagaagttttagtacattgtccctcacggcactattaactgcctcattcattcccagtttctacccactattaattactgtaaaggtttttggcatgttcttctctacccagctcccaccagcccctaccatgccaaatgcttgtatatgtgtcagcatatatatggtgcatcttgcttattttcatggaaaggtcttaaggtttatttcacatccatatccgctcatctacttctttttatagattgcacctgtaccattgtatgaacatgctgtgtggatataaacagcactttaatcttattagggtatttttattcccccctccttttttttattacaaatgaagagctaatgagtatccccaaagataaatcttttacaggtatattgaagggtaaatttctatcagtagaattgccaaaccaaatacatgtctatttaaaattctaataaacttattaacttgctcttcaaacaatggaatcaatctgcacgtccactagcactcttgtgaacacttggcattatcatacatttaattttccccaatctcaaaaataagaaatgacatcttactgttgcttagttttacagttctttatgataatcttgagtgctttttacgaatttcataaatgattatgtatgtttattttattgtgaactacgtattcttatattttcctcattatccttaaaaatatggaacactttgcatatttgcctgccagttttgcacatagacaatgctattctactctgaataattacaacttggttatatatgttgcttaggtgaggcttctctgatttctgtaactgtgaccaatttctttaagacaacaaaggagaaaatgagaggaagacaaaggaaaggaggaggacaggaagaaaaggttgagggtgatggtgggaggagcattgctacccaaaatgctctactaatccctagttttgactatcaatccttggtagaatgcagtagttagcattgtttatggaatgggactatgtggatttgaataccaccactgccatttattaaccatgcaagcttaggaaatttactcaacttctctaagtctcaatttcctcatttgtaaattggagataatagtagtatatacatcatcatatacatcatacatcaatgttattgtaaggattaagtaaaacaacccactgaaactgaagaacactaaatgcgtgtaacatacacattcaatgcttgtcaggcattactcttactaaatacttgtccatcctatccaggagggactagaacaacttctctttcttggtcctttctcagtggtcctcctcacttggggactctgtcttgtatttacatgttgcatttctgtggagctaatttaaacaattagtacgcatgtcccaaaacaatttttatggcataagaaactattaaaaatttacctaaaaaatgagctgttgtatccagtcaagagaggtaaataatattgtgggaagtataggatttttcatattttgttttttcaatttgaattttcactaataaatgatgtaagaaaaagaagacagatgaactccatttcagtcttaagatatatttgcagtttaatgcatacctgagtaagatttctaaacttatatcaacagattggatctttattttctttccccttaatgatttcaaattttactctttatattgttgtactcgaatttaaactgcttagttactattacaatataaattaatctaaagtttagagaatattaaaaactagtggaaagcagctagaaaacttatatatgtaatattaaattatctctagcaaatggcatttttgaatattaaagataacattgctaaagtatcaagagaaaaaaactatataaaatttattggacccaatttgtaaaaatattgttttctttatgagaaaaatgactattatcagatatgtgctaaatgttgtttttccatttctttaatgtgtatttttgtccaaataaatattaacaaatattattatactgaagttggaggattctgctaaacaatcatatctgagattttgaaaatctaatccaatgattcattttggtaataaaagtttttaaataagtggaatcaatgggagtgataacaagagggcataattacaaatggaataaaagactaattctttggaggtttcttctctataggaagatatcaaattaagtcagataaagatcagataccaagaagaaaatgtcattgttcaacatgtagaagcatccaataattcaatgataataaaaacacatatttttaaaatatgattggaaatatatttatgtatagatgccaataaattaaatacattttcttgcttttaattaattttatattaaaataacctgaaattgcacatccaagtataagctcagggatgataaaacttatttaatccttttttttgttttttattcgcagaaaatgaagaccatctaaatggcttaaaaaccaggatagaaaatgctgatgctagaaatggggatctcttgagaactttgaatgacactttgggaaagttatcagctattccaaatggtaagcattcaggacactaccaactgtgtcagttgacctgaagttttgaagactgttgttaacttttaccatttttttctaagattattctggtactattatctggaaattagatactgtttttcttactcatgaattcttctttgtgagaatgagaaactaaaccatactttgcattatggtattttttatcttttattgcctttagccagtatccttaggaatgtgttacagaaaggaagatatagacatcttattattataaaactcatccttcagtattggcaggggattggttccaggacccccccccacagatatcaaaattcttgaatactcaagtcccttttataaaatggcatagtatttgcatataacctatgcatagcctcccatatactttaatccctagatcatttataatacctaatataatgtaaatgctatgtaaattcttacagtgtattgtttatgaaataatgacaagaaaaaagtttgtccatgttcagtacagacacaaccattttttcccctaaatatccaaatatccaactctccaaggttggttgaatttacagatacagagcccactgacacagagggacaactgtattgtcttctgtgtttcagcccaagaaatcgtgtattagtgaaatagaataaatcacatagacactaatctctaaaatactgatgtaccaccacaaagacacagtttattaaagtacctgcagtaataggtgatagcccactgcattctctcttgataaaattcaatttctttaactattccaactttcaaaaacattagtggtcaaaccatgtctgtaatatctttctacctattagaactgctggaaatttttgcatggtattagttcctgaaagcacacgttattttaaagatactacttttactatttttatattgttaaagcatgatataataacaacaaagattataaacacttattgagtacttaatatacttatgttaagtgtatgtaatcctcataccaattggagcaaaaacatttgcttcatttgcttgcatcaattggtcatatatatatatatatatatatatctatctcaattggttatatagataacataagtatagataacataggtaacattcagaatagtcacttcactactttaagagctaattaggtattcatacagatacagaacctactgacacagaaggacaacttgtcttctgtgtataacataagttagcactaacacttaacatcagttaagatactgttattatccccactttacaggtgagaaacagacagaggatactgaaggccattgttaaaagtggcacagaggaaacttaaaccccacagtttgatttcagagcctatgatcttaaccactaacctatacacactagtagtcatctataggtacaatatacaaattaggatcaggagacaaatgcacatatttatacaacacagttaatattaaaatctcggtggtttttacttttttaacgtttaaaaacctgagtaacttttcagattttcatgtccctttttcagtagtaagtatatagaaaatttccaatgctgaaaacaagtataaatgcatggcctaacatacctgaaaatgtttctctatcctaaaatgaaaatacgttagtttccctccaacccccaccccaacccctgccctgctttggaaatgcagattaaatcttaagcctcgttttcatgaagctcatgtggataaatttatctcgtgaataagttcagcagcaaatcacaatatgatcttatacaatgaacatttagaatagtcacgtcactactttaagagctaatcaggtattcatagcaaaagtccctgagaaaatttaatttacctaaaaaaatttgcttcatttgctacacctgaatgagacaaagttcagccttttccctttgtaaatgtgtccgaggtcagccagccacagcctcgctttgtcaagcatggattaagccactaactccacaccctttgttttgtttttcataccctcatctgctgacagatacagctgctaaactgcaagctgttaaggacaaagccagacaagccaacgacacagctaaagatgtactggcacagattacagagctccaccagaacctcgatggcctgaagaagaattacaataaactagcagacagcgtcgccaaaacgaatgctgtggttaaagatccttccaagaacagtaagatctcctttttcattgtgatgatgtcatttatttcctctcactgtaaaagtatcccagacctgtaaatgctcgagttggaaagaccctcatggtggtgtagtctgccttccttctttcatagattggcctcagaaattgagtgtcatgcagttccaaagctggaatccaagtcttctagctctgccccggtgcttttttcctctgaaatttttccagttgagaagagattaggaattctcaaggtgtgcctaacattcagcagagagatgcaaaacactttttaatccgtgtgtgtaattaaaaacacagttgtacttgggtaattatatcctcagaactggcgaagtgtcatggaacatagaggttaaggggcacgttcatgaacagacttgttagaacaggatatgaaaatgatatcaacttgaaatgcattaaaatttgaaaatcttgatattttattatttagattccagttacatcacatttctgggaaataaaaataaagcatttatctagtttctaaagactattcacatctcttatatattatataaaattatattgacttaaggatttactgagaaaacctgagagaaaatatcataacttatattattagttaaatatagtcaaaatattaagattttaaaatgcatttttccttttccgtcaaatgatacaaggctatattgggccaggtacagtggttaacacctgtaatctttgcactttgggagcctgaggcgagaggatcacttgagcctaggaattcgagaccagcctgggcaccatagcaagaccccatctttacaaaaaatttaaaaaatagccaggcatggtagtgacattgcacctgtgttcccagccacttgggagtctgaggctggaggatcccttgaacccagaagggtgaggctgcagtgagctgtgatcacgccactgcactccagcctgggtggcagattgagatgctgtctcaaaaaaaaaaaagggggttatcttggtatccttgttacatggtttcaccaaaggagatgcttgggtaatctgtgcttttcactttcaagagactagccctctttatatgccaacatttttgggggggtatcaaaatatttggagtataaaaacaaaagcactgtaattggtattatatgccataaaattcaaatgctgtttgagtggggaatggagcctgatttcagcatcctagcctcaaatcaaatcctatggatgctatgatataatagacattattaatacgactccttcatgagcaaggaagagtacaaacacatataacataaacttcagagccagggtgaaaaaggggagataaaaacattttttaaaattttttaatgtaagcccagaaatggcttctcttgtagctcaaagtttacataataacttcttatgatttatgccaaatcacaatattcccactaaaaatgaatgaaaacaaaattttaatcaaatattactatctctgctgcttacttcataatttaagatatatttttaacttttattttaagttcaggcgtataagtgcaggtttgttacataggtaaacctgtgtcatgggggtttgttttatgaattatttatttcatcacgcatgtattaagcctagtacccattagttatttttcctgaccctctccctcctcctgctctccaccctccaaaagaattccattctattttagattgattctcaactggtagtggccttttgtcatatctctgttttaatcctatcctctattatgagaaatagttaattatctataaatattaattaaattgggtctgttttctatcttactaaaacatagaaataatttttaaaatacaaatagtggccactaaattatatattttgtgtacttttatttgataacaattgcttcagttaaaatggggtgcatttataattagtacctgttatgaaaaataccatttttagtcactactttataatatttatagaaaatacttcctcatgaatttataatttttttttgttttgcttccatgtgaaattgcctgcagaaatcagtacgtatatgtttacttatataccttttagtaacgctcatgcttcattgcctattgcaaaaagtttcagctttgcatgtactatattttggttttgctttaaacattgcgtagctattctttccactgttacagtattaatggtagatgcgtaaaaggaatcttcctttataaaaaggtcatatgtggataaaggtgatataaaatgtttttaatagtgttataaaaagtttggtcaggcgaagtggctcatactctaaccccagaaatttgggaggtcaaggtgggaggatcacttgaggccagaagtttgagatcagcctgggaaacatagcaagactctatctctacaaaaaggaaaaatgagtgaaatatctgtatgatagccacataaaagtggaaaactgaatttctctatagaattaactagattatgctgtttctgataacacaaattcaccccaacacacgaatgacttaattgcaagaggattaaaatagataaggtctacactgttgttgtttttacccactgaagctcactttttcctctccttgtaattattctcaacttctgtagaattatatttggagaaacacataataaaactaggtcttaacaaatgaacaactactgggatatcaaaatgttctctcttaaacatcccacagtttaaattgaaagtcaagaaaaactaaaaaaatagctacaaaaaataataacaagaataacaaaatttaatatatcactatttgaaaaatatgaccaagagtgtcctcagcggaaaatgagagcaactacattactaaaccatcattgaaataacaattctaaacaatcaactttgctgactttagaaaaagcagagttaacttaaagaatgaaaaagatggaaaaattaatgaatttgaagacagaaaatattagacctgataaatcaaaaaggtgactccttaggaatatagattaaaaattaagtgattgtcaagtttcatcaagaaaaataaaggacaaataggcaaagctctaaaagaggtatcactagacaagggaggaaatttaacacataagagatcacttggaaaaacttcaactgctccggagaatagaggaaaaagaggggagaagaggaacttccaagttccattttgaaacatttggcaaaaacttctgagaacttgtgaataaaagggtctgtaatttgcctaagtctaagtagtctttaactacttttgctctttctcattaatctaaatctaaatcattttgcctcagttttagaataatttgtagaatgtcagaataacaatggagaattaaaggaagggaaaaatgaacaaacggtttattaaaagcatacaaaataaagggatcactgtgtttatgctatctgtatgatgatataacaaacatttctatccagataacatgcatttcaggaagaaaatactgcactcagttcttgatatagcaaatctattagttaaatttaataatagacctatgttctttttaaatgccgctaacagcataagtcatacttatgagttcaaaatacctactttaaaacctaattttaaaaaaatgataatttacttccctttgagcacatgtgattcgttcctgagggttagttctcagtggttgtatgtcagccgcaaagcagatcattcagagtctaacacagcatgtagccttgaaccttaagcagtttaactttttcatcagagtcacagtgacagaaagttgaacaatacacacttaatcagataataaatgacatagtgtggatgagactgccagcatcccagcaatagaataagtggtttaccacgtggcataggccctcccttgaaaagcacatactgaaagtctatggatcagtgatgaccttcaactattttagggttgaaactttgaaattgccaatatgtaaccctttattttttttaacctacaaaaacagctgtttaatataggtcaacctaatatgtaacacagggtaatcaactattcttcaaaatgaaattgaactgcaccatgaaagatttaattaaatgtaggcctttagtctaagggtttttcaacatcaaaatgttcttcaaaagacattttgatagcttctctctttaagatgtgcaaaaaaagacggtgagaaaaagaaagaaaaccaattttgtgtaaaaaccctgatttaaatacagttctggcttggacagactaggtgacattttaaagatgctttcatttccttgcttctgtgactaaagttctattctgtaaaggttaactttttggctgaagttagaaattaagcattgaattaagttcttcatattctctaccttcaatgctaatttttaccttaatcaaaaagaaaaagtggtggccctctgtcctaacatctactcccctggcctgcttgagtctcaactaaaatattgacatttgccatcacacattttgctttagctgttatggccatgctttgtcacattaataagatgaaattgtttggttaagcatactgctattctaattctgtgtgtgcacgtgtgtgcatgcatatacatgcacactaattttgttctatgcagttgccgatgcagatgccactgtcaaaaatttagaacaggaagctgaccggctaatagataaactcaaacccatcaaggaacttgaggataacctaaagaaaaacatctctgagataaaggaattgataaaccaagctcggaaacaagccaattctgtaagttctttttatcgtcagtatcagtaactgattgtaattgttggattattcatagagggaatgtctttccccaggattccccgttgaatgatcttgggtccttttcctttaactcgaagcgatttggggtaggaggggttggagtgggggagaggttagttttgttttgtttgtaaatttcaaaagacatttcatgagaatgataatcaccacttattgttttaaaactgggaattctggtatattctattactatttgcatagaataatacaaatagcaagaaagaaaaccttattattgtatactaaaaagccatggatgagagtaccttcctcttgctaaaaacaaaccaaaaaaaaaggccaactaatggggttatggcaggaatgaaggaacaatatacagaataagagcaaagagaaacaaacattttacatatatattcttttgtctggtataaacaacaataaaaatggctttggttatactttttacatttattttttgttttggagtagataggaaatagctgatttgtctcaaaattttgctctttacttacccaattagaagtttactaggatagaaacagagctttctagaaggtagcatgctaatgagccagggcagagttgctaagtggcaacgtgaaactttagtcaaaggaaggaagtaagggaaggggaggagaggggaggggaggggaggggaggcgaggggaggggaggggaggggaggggaggggaggggaggggtggtagaaagaaagaaggaagggcagttttcttgtttgaacaagaaaggcttgaactcaaacctttttagatacctcagttttccatgtcaaaaattctgttttttgaacaactttggaactaggatgatcagaaaagccctttcttagttcatcagtttatatttttagtagtatttaagaatacgatgctccagtaacagcatattctttttcctccttattcacatctaacacttctaaacaactccaagacagtaagttcaaggtgaacattgaaaaggaattcacgactgactgaaaaaaaacctagaaaacaacaaaaagattagtgaagatgatgttacataagatcagagtagtaaatcagtgaaaagatctgagaaaacatatattcagctagaatatgaaagccaggcagtatcgttgacatgtgatcattatgtatgtaaagcacaagattaaaagaaaccagatgttacttcaaggtttgaagttttatgtaagatttagccaacatggaaaaagcctctactatgttcagtgttactttccgtaaggtacacaaagacgaataaaggagttctttcactcacaaagtttataaaatagtagggaaaataaaatatgtacacgtaccttgtcacacaatgcagaatgttatgccacattatagaagccgtgagaagtgacataaaagttctagaaagaacaatcacctctagtagggcctgaagatttcctgaagggaaggatttgagccaggcattgaggtgggatagtgctggggagttgggggtggagtcaggtaacagggagagtattctgagaagagggaatgacttaaaccaaggcagtgggagaaggaagttttagggtccatttaggaaaaagaagtccagtttgcccagagtaattgataaaggaaacacataaccagaaagatcaacagaggccaggtctcgtcaggccttcaataatcagttaagcaatttcatttaacaacactggtacttgggataagcctcactggttaggataagctgaaagctttgagcatggaacacagtataatcagagctgtgctttttaaatataaatccagaagcagtgtatggggtagatgaaagaaagaagaatgaaggacccaactatagctgtggcaagagaaaagaagaacgtgatgtaccactcctatattttgcaatgttaacttggaagaagcaataagagtaaatattattttgtgaatctcacatttagccacattttctgacttagtcatcaagtggagaaatctagacatttttattatttcttcattgtaaagatttctgagtgcttttcccctcctcacaaaacggtgaaattcagacatgtaagcatataaaacctgtcttaaagtacaaaataaaagaaaagtataggctgggcatggtggctcaagcctgtcatcccaacactttgggaggctgaggcaggcagattgcatgaactcaggagtttgagaccagcctgggccatgtcacaaaaccacatctctacaaaaaattgaaaaattacctgggcatggtacatgcctatagtcccagctacttggggagatgaggtgggaggatcacttgctctggaggatgaggctgcagtgagccatgtttgcaccatggcactccagcctgggtggcaaatagaaaccctgtccccccccaaaaaaaaagagaagaaaaaaagaaaggtacaaaagtaacgttaagaaaaagtaatcattgtccatgcatttcaaagaaattcccaatcagttttggaaatggaattacaacacaatgccttattttttgtaagacgttagaaatatgcaagtagccaatttttttccaaatgagttttgtactaaatgaatattacattttctgatttgtaaatatggatatctggatatgaccttaacacatacttgacatgaccaaaacattaaagacatttattttaaagtagctttctctgggtttgttgattctgaaattgagtggctgatactcctttaaatgaatgacctacttactggatgaaaaatgcagtgaaaatccaatagatataataatgggatactcaataatgtttgagttcatcatgattaactggtaaataatgttgcagtattgaaatgccttaaagatacttaatgcttagtgatttttctttagatgtcttactaaggatctgcattagaaataacaataattgatagagccaaacattctaaaaggatgtttgaatttcagaaatttctttcctcttacaagagtgacatatcctaaagatttcttctagagatacagtattttgatttacctgatttcttctagagatatagtattttgatttacctgatttcttctagagatacagtattttgatttacctgttttaagttgtttaaaagaaatacctataactgaaaatcaaaacagaaagtattcaaaaggaaaagactactgattatgtactggctgtcaacagtttgggctaagtgaatgtttcagtttctgagagtatattcaaaaccagaaaacagaaagcaggtaatccaagagtattttctatatgaatgtgtgagagctgggcaatagattactgtctagtccacttcatgctgctgtgacagagtattacagactgggtaatttataaagaaaataaatttattctcacagttctggagactgggaagtccaagatcaagatgctggcaggttagggacctgtttttatgcttccaagatggcactttgaatgctcaggagaggaggaacattgtgccctcacatggcagaagagcaagagagagagagctctcacccctgtaagcctttttaatagtggcatcaattcattcatgaggacagagccctcatgaccgaaacacttcccaaaaggcccccctcccaacactgttgcactgaggattaaatttcaagcaaatgaattttgttggacacattcaagccatagcagttactctgtaggattaattgccggcatattgggtataacaacatcattttgcttcaagaatcatatttgttagatatgtattctatacaatagattggttgtaacctctagtgacattagatactcagttttaaaatggcttctctcttagacttggagttctcagagcagttagattttagtgctgctgctctgtctgctacacttttttttttttttttttttttgagatggaatctcactctgtggccaggctggagtgcagtggagcaatctcagctcactgcagcctccgcctcccaggttcaagcaattctcctgcctcagcctcctgagtagctgggactacaggcacatgtcaccacgcccagctaattgtttttgtatttttagttgatacagggcttcaccatgttggccaggattgtctcaatctcttgacctcgtgatccgcctgccttggcctcccaaagttctgggattacaggcgtgagccactgcacccggctctgtctgttacactttggcaacccccttttcaacacactaatcatggaatcccgtttttttttttttaccaggcttacctaagcaatgactgaaattcattctgtgaccaaatgatcacatattacatttatattgagtcatctcttctctaaataataactgagggatattattcaattgtgttgtttgttttgttttgttttgttttgttttgttttgttttgttttgttttgacatggagtctcactttgtcacccaggctggagtacagtggcacgatctcagctcactgcaacctctgcctcttgggttcaagcaattctcctgactcagcctcctgagtagctgggactacaggcacatgccaccaccatggccggctaatttttgtatttttagtagagacagggtttcaccatgttggccaggatggtctggatctcctgacctcatgatccgcccatctcagcctcccaaagtgctgggattacagatgtgagccatcacacccagcctcaactgtgttttttaaacaaaactgatttattaggaattaaactagccataatacagccatagggccaagctataaagcatttattaaataaaaatgaagtaaactacatacagtcgctttgactactaattcagccccattcagaattggatatgattgtctgccagggataacgcactatgctattcagttctactcatgaattccagtcagatcttgatttcttgttcactttgatcctcttatgatgtcaatggtacgtatagcctgcctcagatattaaattttctcaatgccaaggtcttctctgataatgattttggttcactttcagcagcttgctaaaaaatcactatatctgacaccctttcctgaacattaaaaatatctgaagaccatatttttcccacctgccctctactgtgctgtctttctcttgcttctctctttttatctctaatcccttggatgacccttggtatagctgccattgtatcacagaacaccctttgccaagtcccattgctcatctgctttgccatattaacatccaagtaaaaattgtacatttcctacctccattgttttgcaattcattttcactcacctactctcaacactgtatgtagaagggaaattccatgatttgtgaagcaggaactaacttcccaactgaaaaccaccctatccagaagactgtctccctaggacacagaacaaacactctgaggaccatagttggccctgagtcctgcacccagcagttggcaggctggccccacctttttggggaaggcaagaataagaaagtggtttaagcagtaggcttcctggaatgtccagccccaggccaccacactcaggcctccagcagtcaccctcctctgggtggtggaggaaacagcccctgtttctctccagaacacagtgtcctcttcatggagatacaatttgattagcagatcaggtgaggcaacaacaataaacaaataaatgacttatgcggtctgtgggagacgtaacagatcttctgtatccccagaaggtctcaaatctatatgaatttacctattgcaaaaatccctctttagccttctcttttgaatccaaccaatttggcacccaacctttgcagtatacttgcatgacccttggagaagggccacagttctgcccatactcaaacacaaatgaggctcttggagacacctcctggtgtcatgatcatatggaggctgttttggtttctaggctatcttgttgggagtctgcacagccctttcatggaggtaatgatgatgctagttggttttcttccaaatgtgcaaattacatgagtagcacaaaatgctagaagaaatgaaaaaatggaaattcactgctagtgaaggccaagagggcatttgaacaaatggcaaagagagattttacatcttcccctctctctgcctccttctggagcgctatcaatgaacaaagttacagattctctctgagtccaagcaactattttgctatcctgaaagtaaccctttgatggtgattttccatctgaccctacagaaattaaatcaaataatcaactagtgttatttatgattgaaggaaggctctctaaatataagtaaaaattggtatgaacagtattactctattcatataggcattccttttttagcaatttatagtaatttttaaggtattattcaaaagaaaagggagctgttaaatacattaatagtgatagccattggaaattatttccatttcatttcctgacaacttcatgaaaaggtacaatttattctgaaatgtatgttctgagtagaatgattaatattcttcttattgttagaacatctagaacaaaatctatttgtcctctttcaactgtaagagtataggagggttggtaatttcctcttgaaaactaaaagaaaaatagtttcttagtttaagtgataccaaaaccgctgaaatttcaattgtaaaatttcattaaacaaccttaatgaaggtcattctcattagctccatgtaaaatcacctgcctaaaacgttcccatattgataatggagaaatgtatgacgttagaagtttgttagttgcatgcttcaaaaaatagtatgctaacaagacatggaactgtgaacagctcatagtcaaaattctagtggaaaactgctcttctgtgccctcattaatgagtataatggtgtctgcatatgggtgtttaatgatagtatttgatgatagaaaataacttcaaagaagaaacgatgatggctttgtggttgtatggaagctacttcaaactttctgagagatttactcttggttctttgtatcttgttttttttaaagatcaaagtatctgtgtcttcaggaggtgactgcattcgaacatacaaaccagaaatcaagaaaggaagttacaataatattgttgtcaacgtaaagacagctgttgctgataacctcctcttttatcttggaagtgccaaatttgtaagtctaatattcaacttttcattaggctgctgtatgtgtatagctagaggttaatctgaaaatgtatagaatccccaaatgtatatggtccccaaatggtctaacgtaggctttcagatttgaaaacctcaacgtcttaccttacaaaattctgaagagtcaaattaagttagaaggcaaatgaaaggaagaaaactacagtgtttagtcacatttactttcatttgtcagtataccatcatttctgttaaattatactttcagatccagtgatttaagaatgctaatgagaataaagctattttatttacttcttatttatttatcttatttactgttcaaactaaattacaataaactcttccgttaatgaaatgaaaatagcaaagtgtgtactattttttttaccaatggaaactcttctaacttgtgttgaatttatgacctgaactgaaataacacagattatatctacaaaagcccacccataaagttctaatttcttccatttgaactatttgactttgcatgcatggggattttccaaaatgaatatgacttcttaacaaatcattcatggcataagtcaatatttgccatttgggtaaggaattctgggtcaatttgggaaataaaatcatagctgccccctcaaaaatgtcagtgtccttggtgaaaataataatggattctgaatttaaatatttgtttttatctttaccacaagtatcagagtgagaaaggctttggtctcaaaattagacttaatttgaattggtaaaattaacaaacatgcctgagcattatggactttttttttttttgctttaaggatataaaaataaaatattattttaataatgtataataataaataatattatttgacaagtattatcatgaagctcctaatcatttcacatgtctgcaaatggcgcttattgaaaaacactctgctggtctcctctttaaaggtgctttatatctgatatctcttgtttttgtatttctctgaactagattgactttctggctatagaaatgcgtaaaggcaaagtcagcttcctctgggatgttggatctggagttggacgtgtagagtacccagatttgactattgatgactcatattggtaccgtatcgtagcatcaaggtaaccaacttaataaagattaagataattaaatgatagaattttgaagtagtttcccagtttataagaaaactcctatttccatttcaataaggtaactgtgtatgcatgtaaacacatgtgtatgaattttatacatgtctgggagtgggtatgtttgtcatacttcttaggaactgacaaaccttccaggtattgaccagaggaacaactccatttctgaccccttcatcttgtgtctggtaggaatttgggggtgtcgctgtttcaggcttcctattttgcctgaagaaagtactgccacttattcttatgcaatacaagccaaagcataagagcaccattattgcttgtctttgttgtacacagctcctcctttagtctacatagccaccatagaaaaatgcagtttcaaaacactgaaattcttatgtaacataccaggtccaccctacttaaaatgggaagtaactgagaactgattcagttattctatctttggagctttaatgcaattatcaacatctagtaccatatagattacttatagaactatccctgtcttcagcacttccctcccattttctcttcttgttttcccaattctcaactccctgttaaacccaaagcagctaacagttgaaaggtatggttaagggcctagggctagacatgaagctgatcagagacagagaagacttaaagaactggttaattgttgactctgggtgatacatagagtttcatgctgtttgtagatacttaattttttccataataaaaagtttaaaagaaagagccatgtgcaatggcatgtgctgtagtcccagctacttgggaggctgaggcaggaggatcacttcagcccaggaattcaaggctgtggtccatgatgatcatgcctgtgaataaccactgcagtccagcctgggcaacatagcaagacttcatctcttaaaaaaaaaagttataaaaaaaaatgagaagcaatatttttagttctttttaaggaagtttttcagcaaaagtgtgtgtgcatgtgtgagagagagtgacagagtgcttgcgtgtttggtggtgttgagggaattaagtacttaaccgggtttaaggacatttatactcataaagtgcagttcttctttcagaaaagatacattctgttaaagaaggtgaaccttatttgataaattcattcttttgttaccatgtatttcacttaacattgcatcctcaaagaaaaaagattaccaaagtgagacagcagtcagggaaatatgacatcgaagttttgttatgactgcttgtctcaaaagagagaccagattttcatatttaacagctcatggaaatcaatcacttaaaaaagaaaatgaaataaaatgataatagctttcaaaattctgttaattgaatttaaaaatgaacttctatgcaatttgtacactgaaatctgaagggtggatattgtactgtatacattagtatgctgtgccaaacaataaaagatataccattctaggaagactacttcaacaaactgggatccaagatattataaagaattttaggagaaatcatgcagcttatgatatgaaagggtggctcatttggggtccactagctgaattaaattagacaaaatgctgaataaagtaatataaacttgcataaattgtatgtgttggtaaatagtaaattattatgtaagccataggaaaaaggctttccacttaaccaatagcaattccatcagttaactgctgctgtgtcatttcatgtcaatgaacacacacagaatcaggacctggtgctcactggttctggttgaaactgatgtaagtgttgagccaagatcagactctgagtattgattcgagatctaatgaatttggaatgttagaaactaaacagccagttttctcttaaattcttaaaaacaagtctccgcattttatatcttttaaatctggaattaccagaaatgtgatgcatatttcattttctgtatgttcctccccttcacttcaacacgtacccttgaagaactgggagaaatggaactatttctgtgagagccctggatggacccaaagccagcattgtgcccagcacacaccattcgacgtctcctccagggtacacgattctagatgtggatgcaaatgcaatgctgtttgttggtggcctgactgggaaattaaaggtaatgtgttcatcctcctcctgtttatttcatctttgttgacatctcctgacataattacttcaggagaaggtatgataaagctctgtaaaacttgatcacgttttacttaacttgcatttatgaaaacatgaatttactttgagtaagaattttcttctttgacgattcaacctggaaacacaatatttttaagcctatgtgtatttatttaaacagctgttgttttgtctttatctgtggcatcagttttttgtatattcttgttttagttgcctcaagagcaaagtgttttttaagtatacctcatcttctgaatcgatttatgatttatagatatgaagtgctataaagttcatactcacatctaattaaaagatttatgaatactttgggaaatatcacaggagctataagctttcaaaacatgatctggtttttaaagttctcaagttgctcttattcttataggatgatgcacttaatattcataattgcttcatgacagtccttgcgcatttcaaattgcagaatgcctgccttttaaagaagcttgtgttgattaaatggaattaggtgttgggaaaccactatgggtgagatgcaggagcacaaccaaatataatggataatcctgggcttgtcagaatcatcctgagttgagattagtcagaaaatgtgaaaagccagggtgaccccaaatttatgaggactcaaccttcatatagaatgaggttattttatttactttgagtacgagatgtgactctaaagtatgagaatttattccaaaaccacacgctgaagttatcctcgtttcttagaacttcatataaatgtatatggtacatagtaatatatagtcatattatcaactttctctccttcacagatagataaatatagggatagcacacagtagtacaaaagccatgaattttgaaatcaaatccaggttggatttcctcctcttccacttgctaaaatataaccttagacaagtcacttaaccccttgggctttggttatctcaactagaaaagaatgataaaaatatctaccttgcttgcatattgtaggatacaataatacattttttaatattcttataactcttcctatatgctaagtaatgttctcagtaatttacatgaattaacttgtttaatttttacaacaaccccaaaaagtatgtcttagtccattagggctgctataagaaaaataccatgaaactgggtagtttataaataaacaaacatttatttctcacaattcttgaagctaagaagtctgagatcaaggtactggcagatttggtgtttagtgagagccagtttttcatagaaggaggcttcttgctgttctcacatagtagaaagagtgaacaagctcctttggacctattttataagggcactaatttcattcatgaaggccctgcccctcaccatctaaaactcacctctcaaatgccctgcctgctaataccatcactttggcgggtaggattttaacataagaattttgagagggacacagacattcacactatagcaaggcagatactaatattctcattctgtagttaaggaatctgaagaagagagatgttaaatgtcttgaccatggtcacacagtaattagcagagctgggatttgaacataggttaataggcacagtggtcttcactctcaacatcttgcttcactgccacaatgaatagtgagacacacactaccatagagtgtgtgtataaaatatatggcaaatagctgagatgtggtagtcacaccttaaattgtaccttaataattattatgcaaatgtaattggcacaaaaacagtattctatcagtctcagaaaaagaaagaaaacatgaacaaatgaaatctatagcaaaccttaggaaatcattttggccaagaatttcaagactactgccacaccagaatatgaaccaaaagctgaaaacaactaaatgaacttgctcatgagaattcaaatgagcaggaaaatctctcaaatatagcttttcaggatgcaagaagaagcaaaaagcaagcagaattcacaagtaggataatcaatctctagaaaattaagaggttcagagtgatgacagagcattgcaaggacgactccaatgtgcaagtcaggggctccgatcaacaatctttctatgcggctgtgcaatacatggtcacagcagtgggaaatgtacatgttgatgggtttaacctaaaaccatagcagtaggctataccatagagcctaggtgtgtagtaggctataccatctagatttgtgcaagtactgtacagtctatgcttttaactattcagtaactgattttactatttaaaattttaactattcagtaactgttttcttatgtgtgttctaaaaaccaaatgagtcaatgcatgtttttcccagataatctgagtaaatatgggttcactttggcacagagtttttaaagttgtaggcaccagaatataatacagtcatgtgtcactcaatgacaagaatacattctgagaaagttggaattaggcaatttcctcaatgtgcaaacatcataaagtgtacagtacttgcacaaatctagatggtacagcctactacacacctaggctttatggtatagcctactgctccaaggctagagcctgtacagcatgttcctccactgaatgctgtaggcagttgtaactcaatggtaagtatttgtgtacctaaacataaacaaggtacagtaaaaatacagtattataattttatggaagcaccatcatatatgtgatctgtcatttaccaaaacatttgtaatgtgtcaatgccaaaacagttgtttcaatttacaacaaacttctctaggagggaccaggtcattctctttcttcatgattgtgtatcaagcctaagacttttcctgtgaaaatgacaccaggattgaatttgatcagattatttgtcgattctctatttgactccaggccctgtgctgtgtatacaagcaaacgacaccaatgtggtctcatttcctacaaagttgcttactttttctttattcccttgaactcgaaatcttcttggctgtgaacagaaatttaaaaatttacagcagcactaccatagagtgatttatacaagtgcttttaaaaaatctcttctatgtcatcagcatgtcccctttcttctgatctcaggggaaaaagctttgtgtatgcatggcccaaatttgcccaaagaaaattatgtaggagcactagcatttattgaacaccttctgtatatcaggcactgagattggtgtcataaataaattatctaactttattctcacaaaaattccacattacagacaaaagaatagaattgtggagaaggtcagcagctcacctaaagttagaagctaggaagtgtttatttactgatgatgaaaactggtatagcaaaaagtaatcagcattcgtggattaaatagttgagcttttcccctgttgttgactcatcctgtagtagctctaaggatacggacagactatgatgaaaagatgaatatgtacatatgccaaaatatcagaaagaatggataatgataactttagtttctgctgataataactctcatggataaaccaagattatttgtgaaattccaaattctagcaaataacggtatttctttctgcagaaggctgatgctgtacgtgtgattacattcactggctgcatgggagaaacatactttgacaacaaacctataggtttgtggaatttccgagaaaaagaaggtgactgcaaaggatgcactgtcaggttagttgagatgagaactctcccagggtctgtcctgtgcataataaaagcttcgattttattgcataatattctattatcatgtggatgatgtggagcaggtttgaaaggattatactcagaggtggaattaccacaaaactaatgaatcttcaagtccctgcctgcatttgcacaggcatttttcaaggccctgggaggtatactagcagtacatttgcatagtcatatgtttttataaaatttgcaaaggtaagagattttggctacaatcagttaagtttccactccaatgttctttcatgtcgaggggtttttttgtgtctgtgagtacctcattgttataatttttttttcctaaagagagctttccccaaactgattaagtttcaggtcttgctgagcatgaattcactatatttatgtttataacaaaattagaaccccagcctaggttttatctcttacaggatttttttttaattgacacataggatcctacaagtgcttcaactggaaacctatgggatttaatgattctgcttcaagagagaaggagaacaaggggccgagatagtccaggaggaaagttcctaatacatgacctcaattataagatagagggtagaatgaataggaatttgaaaatatttaacatcctatcatactaagcatgtgtagagaataaacacttttatataaaaatgaatacaggatataaaatatttagctataagtagaggatttctcagcataaaaatcttagagcccacttatcacccaagcctaaagcaattttgttaaattaaaactataaaacatactttaaatacctgcaaagttaacatgtcataacagcaactcaaaaaccattaagtgctaaggagtttgtgttattttccatttaaaggatatacatacgtttctaggacccaaatcctagcaaagtacacttcacatttctttctctacatctctagagtttcatagaagaaagtagccccaaaatgttatccctctaaaagtcttaacttccaactctttgtttctttttgacatcatggacttgtcaacatgaaattgaggatagtttgaaagcgtgacccattcattgtttaaaatggttttgtcaataatcttaaacaaaatttaacatggaaggttgtctgtaaaattctttcaatacatgaaagacagtgaagcccacattaatattctgctactcacaaaccaacaccaacttttccctaagcgtttctttggtaaacttctaagtaggattttcaaaagcctattatcaacaacaaaacatctaaggcatttaaatatccattcagcagtgcatgtcatgtgaaactgtaacatcactaattatcaattctgcaaagattttgcacttcaacacataaagtattatgctaatttatgattataagagtattcctatgtatacgtagggtgttttgtaggttgcagagattcacgtttacaacttctcctgatgctagaatgaatacagcctagtcctagccatgaaaagacatcaccaggaagggaggaaaaaacaaatactaaaatagttcaaatatcaggcataataaaagtccctttaaaaaggcacatttggagtatactacaattacccacatcagattaagggcatcatgatctgcttcacagaggaggtgacatttgaaatggtcttgacctgaggtaagagtccaaaaagaggagatagcagaagaaatgtgaagaacattctaattcctgaaaccagtaagagcaaagggaggaagagtgggaagccggagtgtttttagaaaagaacaagtgtgaattcactcatacaagattggcaaatgggagaatgattcgggtaagatgcagtggccacataggttcatacacacttcttcccagcataatcatgtttttttttctaccctataacggtagctgaatccaaagtaaaccaacatagctgaagacaccaacctcaaagtactgtgccacaacacagcctgtacacagtgtgcattcacccatatgcctgccttcagcttgatttagccaagcactctatctcggaaatgttcgtggcccacgtcttttccgtcattgtgcatttttgccccatcgctaacacttggcagtgtcagccctttcttataccccttgtcatcaaactatattcacattttccttttaaggtgaagtgatatgtatactgaaataatcctatattttttaatgttttagtgtatctttttgagctgtgctaatactttgatcaggattgttattgttttgtgagttctctaattacacacttgtgtaagtttttagcaggtcagccccaaccctattttcccataagccctgttatttgtaagaataatttttatagaactcctggtgtttgtttgtttgtttgtttgtttatttgttgctttcaggaaaacacttatcacatttgaacataaagagcaatcattcctactaaagagcaggagtgatttcatggagaagatgtaaaagtgaggctaaaagaggtagactaagaaaatgtcataaagaccttagaatgtcagttttagaaatttgcatttattcaatagtcagtagaagagataaaattgttgttatgctttagaaagagtaatctgtcaaagatatttttaaaagtgtatcttatttttctcatgcttctaaaattcacattaagattaaagtaaggggaaaaatctgctgcaagtaaaatttagttagctgagcattgaaatggtgatattttaatagacttagccccaatattcacctagaacgtagctgctccaaaatagcataattaatctatactaactttaccagacatcaaggttcaaaagagaaacaaaaggcaaattaagaagcctagcatttattaattatgaaagaataggggcttttttagtaaatgcattcagaatgaataggataactctattctattctatgtcgaaatattatagagtgtacctggaaggactcatattatttctcatcccatagtcaccaattcaaagccagacttaccttgtttctcctagtgttttctaatgaattaaatgaactggggggatctacagctctgtgtttagccactcccagtccacaactctttcccgcaggtatctccacaatcgcagtaacatcagacagataggtaggtagatagacagatacataaaaatagcctcatgtttggaaaaaatattttaaatgtattcacaagacttatcttagatattcattaattatgcatccaatattgattaaacatatattctctgtgaggcaatttgctatactaaaatctttgtcatcctacaaacatcaactggattctaggatccaagtactgtattgtatgtactagatgttttgagtttgtgcctgacataggacctagcccataatctcttagatggtctcatgaaatttacattctagtgaaggagacagaagaaaccataaaaataaatacaggcctccttaatcgtctgaatctaatttgttccagaaaaatttgttggaaggcaaatattcagagtaggatcctatatataagaaatgtaataatgtattctcagcccatccagaaaccccgcccctttgcccaaataccactaagacacccttaagcatcaatataactatctactaccaagtgcttttacaaaacataaagcacttaaaaaaactaatgacttagttattgcacacctcatgaaaggtgagaggtggtttttacttattctagcacggtggcagtagagatggagataagtggaaggaatgaagatgtatttagggtatttcctgccctacaacagcctatagtctcattgctattcagtgatgcattgaataatgacagactgaatagatatgatctgattcatgtgaaatgtctctcttctcagtcctcaggtggaagatagtgaggggactattcaatttgatggagaaggttatgcattggtcagccgtcccattcgctggtaccccaacatctccactgtcatgttcaagttcagaacattttcttcgagtgctcttctgatgtatcttgccacacgagacctggtaaagatcatatgcatagcagagtttccgtgactaaaatgcgtttgcttcttttatcagttattggtaaaatcatcagttattggtaaaattatcagttattttctaaaaagcctgggatgattgtctggcagccaagaatgggtgatacagatagtgcttatatattttcaataataactttaatcacagatacaatttaattactatttattttcaatacaactccccacataatcctttaagcaatacatccggtaataatttttcccagcatggagccatacagcagcaaaatgcttccttaatcttctttcagagacctgagttgaaaaggtgattataagtattctttggcctcatttttttctggtcagtatttcttactgaattctttctgggaacataccttttggttcacttaatatgttttcaaatgaactcacattttacgactgtaataaaaggatatgtcttagaaattttgttgtgaccatgtgcatcataatatcacagccacaaaaattcagaaaatagtaacaccaattctattttcaaaatggatttctgcaacagagtgacatattcagcaatttagccacaagaccctaacataaaccacacaagaaaagtgaacactcatatacttctctgtgtatctaaccactggggtatgtttactctattaatagagagatttcatgagtgtggagctcactgatgggcacataaaagtcagttacgatctgggctcaggaatggcttccgttgtcagcaatcaaaaccataatgatgggaaatggaaatcattcactctgtcaagaattcaaaaacaaggtgagtttttacagtaataatgcaatataggccttaatcatgaaatccaaagtgcacatgtacctgatcaagaggaaggctccgtctataattttagctactcacgagttcagtgaaaaatttatacagtcatttttttggcttagattataggtgatttgggttagacatgactgattgaagagccaaatgcttctctatcattttcttttgaaactgagagcttaatttgaaagcataaaactgtcttacaacttgcaaaattatatcctgtaatatgtttgaaaaatgttgggtgcttttcttttctccctattttgtcaagatgtttcctttaaagtggcccacagtggaatctataggagtggtagggcatagttatcagttctttgctcatttaaattgccaaacatttgtatgcctgcaagtaaataattgatcaatagtaacatgacatgtttatgattcggggacattttaaaacactttcacaaacattgttttatctgatcacataagcaggtattttgttccagtgttagagaaagtaaaatatacactcaaacttttatgtggtcacagacatatatataaaagatctcacaaccaagacagaaatccaagtctattaattctgagtgtagtgctattgctttttaagtatataattgctctaattctgtgtagtatggcattaccaatatctgcaaatgagactttgttacttctgctaatataaatagactcaattaatgttgccaatgccagtgtgacatttcatgaaaatttacgtttaaatttaaatttgtaccgtctttcatttctgcatttaatacatatctgccaggcaccttctaagtaccatgtaagaactaaatgaagttctaagttcttgccttcaaggaacttgcatcgaactggggagatagacaagtatcaatggttagaggatagagagctaattgctgtgatagagatgtatgtagccagcgagcaatctcagaagagagacacttgagtcaaacagagaggtcagtttccactggagtgaccctgaggcacaagctggatgaggagttagctggatgaaaagcatgtatggacatttcagagtagtgaaagttgtgtgaaagcctggagtcatcagagagaataacacatccttttccagctgcatttccaacaggaaactctagagaaacctctcatatgggacaaaaactggctttgcaattctttattttggagtgctgctgcatacattgttcctgtgtaagagaggcacaatgcacatttgcatgtcagaagctctgtgtagttagttgttcagtaagaagaatgtttagctgtttaacccagcatttcccaaatttctttaatcagagaaatccttccattcctgtaatactagcattctgctgaacacactttggggaatgctttagtaactacaagtgaatccatagcctacacgaatgaatgttggcaggaaattatcagtaggggccaagagataacagaaccagtgcataaggggacatatgagctaagtgagtgagtttcagctttatcctgaaagccatagggataccgagaactctaagagttttaagaaagggtgtgatatcataagacttgtgctttagtaaagtttctttagcagcagtttggagatatgtaacaatttaggatgctacggagtctggtgagcctagtgtctccccaccaacttctcttctatagtagtagaataacagatttgaagaaagaaggagaagatggatatgcattataaaagaaaaaaagacaacctaaatgtccatcaacagatgactgagaaaagaaaatgtggtatatatacaccacagaatactatgcagccataaaaaaagaaggaaatcatgtcttttgcagcaacaggaatggacctggaggtcattatcctaagtgacataacccagaaacagaaaatccaataccatatgttctcacttacaaggcgagaagctaaacaatggatacacgaagacgtgaagatggaaacaatagacactggggactccaaaaggggggagggaggagaaggggtgaagatttaaaaatcgcctgttgggtacagtgttcactgtgtgggtgatgggtccactagaagcccaaacttcactcttatgcaatatatccatgaaacaaaccttcatatgcaccacctggatctaaaattgtgaaataataaaaataaaaataaagacattcggaacactaagctgaattggctaatgctataaactctaaagatagtaatatgcttggtagatgtacggtataacaaacagggataaaatgattcaacaacttaggagaacaatttttataaatggtcatcttggaaacgctaatttccataatcagtctgctatctcaacttttattctatccattaaaacaaataaacaaaagatctgtgctctgaatcaatattagtcaaaggtcaagttacagaatcatataaatgtgaaagtagttaaaaatatgttttaggtttactgtaactacagcattccatcaattcagaaagttcttcccccaataggtctaatttttccagattttactagagctactaactgttactgttactactctgtggtccagaaatcagaaagaattttcctttatcccagcctactcagtatcttctgtgacatttctggtttctagttcaatccctttgacacagttggctgataccttctcatttataagtcttctccttggctttcaaattgactctagactcacattgctttttgcctttctgaatactcctgtcaaatgcaccaagcagtcattctcacttttattttgggtattaatgacatgaatcattctccttacttctctattgtatctctatggtatcaccgttaaaaagaaattaagccctatgaggtttagttgttcagaattttgattcttaaattagactgggaacttctaccttctgcccatggttgttacccattctctattatctctggtgtctcaccacaaatttctcaagttaaacaggtgaaattttttattataataaaactatagctgttctgtttttccacatgtcttctcatatatccaatatattttctctaatacttttaaagtattttattactatagcaggtcagttaatatgtattaatttttccttataaaaagaaaagcatcgaagctgcaatggaaaaagcaaatgttataaacaaataattcacaaaagaaaaatgcaaacttcttacataaagttgaaaaatgcaatctcaatagatgacaagcatatggtcattgacttgcagtagcaatatccaaagatcacacttaaagcagtaaaatctaaatttaaaaggaaaagaagaaaggcttggcaaaataaccttactacctgctttgataagattagctcttacaggacacatttattaaataccaactatgcatcagatgctgtgctgcatcagtgaagatgcatacggttcctacccttgagtaacttacctgctgcacaagtagcaaattactgtatctgtttaggatacagtaaacaccaagggagacatatggagggagagaaataaggcactaactgagccctaagtccttttttagttgagggggtaggaggggtggaagcagttgcaggcgatccaggccaaaaagcatcatatgaaaagataaacatgtataaaaacatgaattatttgggcagctgttgtaatcagtttgaattattggagtttaaatttcaaaagagtgatagaagataacgctgggcatgttggcaagggccagatcacaggaagctgtttaaactgtgttgaggagtttgcatttcatcttgatgaacttgattttaagtagagatgtgacagggtaatttcaatttaagtatattactcgaggtgtcagtgtggaagacatattgtcagaagaccaaactgaagacaaagcgaacaattggattcaataatagtctaggcaggaggtaaattatgcttgaagtaagagatgcagtgggaattgacatcaaagaaatgcagaataaatccaccatgtgataccattacacagctattagaatgactaaaattaaaaagactgaccatactcagtactggcagaaggtggagacactggaactcatacactgctgctgaggatataaagtggcataacattggaagaggttggccatttcttaaaagactaaatatacatctaccatacaaaccaatcatttcactcctaattattcacccaggacacaagaaagcatattttttatagaaagacttgtaccaaaatgctcacattacttttatctgtgttactcaaaaactgaaaacaaatcacatatccatcgacaggtaaatagatatacataaattgtggtatactcatacaatggaatactagcaataaaatactcagcaataaaaaataaagtattaatatagatacaaaatggatgaatatccaaataggcagacaaaaaaggcaaatttaggcagacacaaaaaaatacatttgtataaaattacatagaaaatgtaaactaatctatagtcacagaaagcagacggatgctacttgtgaatggtatatgtacgaaaaggcaaaaaggagggattacaaatgagcataaagaaacttctggggtgatggatgtgttcattgagtgtggtggtggttctgcaggtgtatacaattacatgttacaaacatggtttaaattatagcatgttaattattcctcagtaaaactgttttaaaaataggacagatattagaggtatttaggagaagaaattagtgaagctgttgattgattagatgtggtgaggagaaagtcaggatgactctctagtttagtagattgggtgggggggtcataagaccaacaaaaaaaagtaagttaagtaatacagatttgggagttagatgataattattttgatttggaatgtttagcttaaagtacgcaaggaaaatatagatgatggtgtctcacctgttgaatgtggacttttaggcaaaaatcaggtccaagcatacatacatttaagtcatcaatacattgtaagtagatataaacttgagtttgcccagatggctaaaacctgagatgtgggcaaaggaagggatattataaaacatcaacattttagaagtgttcaaaaatagaccccagggtaggagattgagaatgaaaggtaaaagaagccagagagcttgacattatggaagccagaagaaatttcctatagggaaggaaatgctaacagcattaaatattgcacaaacatgaattcagataaagtttaaaagaactccactgagtttgggtataggcaggtccctgaggactttagcaagaccagagatgacagagtagtgggagaggaattgaaataaggctccagcaatgtggatgattgctccttttcagtgaccagattatttgttttatatgaattattctcaactagttggcaagagcactgtctcttgaaattcaagtacagtccttcaggagtgttccccatctttcttgagtcagttacagaaccacagtccctgacagaagtgtgccctatcccctaaatgcatcaagtaggatgcaaagttgagaacactcaattagattttcagtggatcaagaaagagaacaaaagaataatagccaaagtaaaaacacttagcttataacaactcagcattgattataaaatatttcttaagtccctactctgtgtctattatttaataaaatccttatttccctacctacttataaatcacatctgaactcatcaactgtgaaattttgtgtcaatagcctacttttctattttgtaaagaaaagaaatagggtaagaaataaaagcaagcattagcatttactagcatttcctggtagaacccacttcatcgctatcactcatgaaggatagagtaaagcactccctttaagtcagtaaaaatatgccatcctgtctctctgccagttaccttttgggccagtgaatttcaattcaattgtgttgctgctctttaatcatgttttcttagaatgatttctaaaaatgcatatattcattcatggataaggaggaaaaccacctccagtcactggcttgcctgtgatagagaggcagaatctcattttcagacaccattaaaatacccaccaagtctgtagaaagagactattttcatcttccagtcaacagccccatatgaaaatacctttgccgatctagataaaaaggaatgtatatgaaaaagtcttgaaaacagttttataaatctattttcttttagcccccagtccagtcaaggagatatatgtgtatgaaactaattatgtatataaaaataataaaataggtgtgtgaaagtaattcaattttaaaatcttaacttgctagctatatttaataggacaattattcttttaggtatttttcttgtttgtttttacaaaagtctggtttgaggtgtccattggtatgtgtattttagtccttttttaataaggcaattgtgtttgattttattgaagacacatctttttgaaatgatagggctataaacttcaagggaattttggaatttgatgtttctctctgttttccaaagaacactgattctgaaagatgatgagttgagtgaaaataatagtatttcgtggtcaaataaatttgggaaatactttttgctctatgtccttctctaggaacattgcattgcatattagcatgctgaaagatctgggcagctataaaattaagaagatacatgtttaactttgtataacccagtatttgtcatatttatttgagccaggaacatccaagaaactagcatcctaaagaataaacatttagaaattcccttataacccactggttcaaatgcccattttcaaacccttgcttattcagatcctacatcagacaaaggtttagaggccaaatctatcatcttacgggactgatgtcaatacgcatcaaggatgcatatgaagtagttaaaggctagatctaaggacatgtggtagaaaagcatgtaattcagaaaaagcctagcttgacccctaagaagggggcggtagtgagagggatcaatgagataaggagttcctgtctgctttctaaacaatgcagtttgaacagagaagtgcctcatctttccttttttccatctatttctgaattcttatcttcatcacattaaaaataccttgagagacccaaaagaaaagcaagaaggcatgaggactgtacctctgtcacaacacttagcatcctggtctaaaatgtaatttacagtgtacctggatctcaccacttccttgtacaacatccccttccacttccatgtacaatcatattttacaacagtgacactttgcagatgagtctaaatcccagtagttcctgtggatagtaaaacttacagaaagagccatagattaggcatatttctaattaattatctgattcctaattagatatctttgttatttagcatttttaaccttgctttattttctaactacttatctagattatagaaaactacatcaaatggatctttgatgttcagttatagttatctcttttatcttcattggtttgccttcactggtgttcaagctattattttcatgctctttgggggatagtttaataatgtattttattgatgttatttctgtaattattaaattgctaaatatagtgcaagtgcttgagaaagtcaatgttaattctcgaattaaaccaaatttgtcttgaagtattaatgatgatatagatgtggttgatattgctcaaataaaatgttaaactttctttctcctttacagccaatatatcaattgtagatatagatactaatcaggaggagaatatagcaacttcgtcttctggaaacaactttggtcttgacttgaaagcagatgacaaaatatattttggtggcctgccaacgctgagaaacttgaggtaatttagtttatatgtaaagctaaggattaagttttaattaaatgaccactatgctcactagagttctgaagtttaattacaataagaatgtcatataacccttggttgcagaaaggcctaatcaaaaacatcatgttgcatgttagaacaacaccaggatttagaaaccaaaggactaatttgacatctttgttgaagagatggattggagtcgctgtttcctttatatgcacctgctgaaaagaattatgaaagtaattaaaggtagaagccagagttgaatgtggatcttgtaattgctgttctccttctacattcactggagataatggcactctgacattgcttagtgttccgaaaattagtcagtgttccaggatgctatgagtataacctattttattgctaagcattagcatcataatggcgtgttggagctttcccatatgcctaatacaagaactatattagttgttctcatgcccatgccaacatttttttttaatttcacatatgctttttagctagcagtatggggagacacatttgcttcctaatttagttagttcaaaaaataaagtaactaaaaaatgtcagaaaatactcacgtgctgtgtagttaatttactgctcattataaaacataacatagtctataaggatggtacttggtgctcaataaatgttaattacactctaattagaatgggattaattgatttggttaaaccgtaagagtttattacagactaccatgtttttaattttttgttttgtttaattagtttggtattttttaaagggtataaaagttctgtccaggtgtttctactccaaaaagacagattatgtttggaaaaatcccagaatagctgaaaagtgtgatggtcagttattttcacatttctaaacgagcagtgaaagttcagtctcattctatgacagctagtgtgcaggctgaaatttcttctccccaaatctaaactcatagatgaagcaactgtctaattatctgatgagcttcatggtgcaaataaattggctctgcattcattgtaatgtatttgtgttagaaaaataaatttaaagtgtcaagtcagaaaaacattacaaatcaaatttaaatagtaccacagttattacctagaaattcatttgccagtcattcaccaaaagtttgttgagtatctactatgtgacaggctccataccaaatactaggaatccagtggttgttcaaatctaagatttgctttacaagatcattaaccatatattattgagtgaattaaatacagccaaacctaaggttattcaaatctagcttcatttattctagtgatgattttaattatcataaaataatttttaggaattatctataaaggtgtgcctgttaaattctataaaatctgttaaaatctgaatctgttaaatgaatctttatcactaaaatgtttttactttcatgatacagcattgcataattacagtatactatttccatggtgtggcacattatttcaaaacagccattagaggtatatttgtgattgataaaggaaccaaacattcatagttacctgttattttgcctgcagacaggttctcagtatgacaaagtgcaaaagatgtggtaaacataaattatttttacatgcattgttaagctcaagctgtttgagaggcaatatttataagccattcatgaacactacagaatagtgacattgtacattttcccatttattagattgataagaacaagtactttaaattcatatttcaaagtaaaaattttccaagctgatattgtgagctacggtcatattttgattctaatttcactgccgtcaagggtataagtctatttttagttctattggggcttttgcatttctttcctttgtagatccctgtgaaatgattttttaaagatttatgattaaagtttattgttttactaaatgaaaatgtaattataagtaaattgtttttatttttgttttttttttcctctttcccgttatctagtatgaaagcaaggtaaaatttaaatttatgcatgccttcttcgagtgcatgggttgggtaaatgtggcttcttagataaagcagccgtgcagaagcagagcaacaccagtacagctttgttcatagtatgtttcacgagcaagccgtgcattctgtgagagttctcctgctgccccttgctggccgacattctgctgcttacccaccatcagttgggctgcaatttgagttgtctcaccagcagtgatgagatttgctctgctcacttgttcaaccatctgcacacagtgcccctggtgaccagcagcacacactcaaaaggcagctggtcaatttctggtacacagtctagttctgggaaacacggtaaagtggtctcttgagttgaaccccgggccctggcctccctagtgccatgctgtctgctgaagaatcaaactgtgctctcacatgcttaccactgccttcttgctttttgcaggcctgcagatatgcaaacatttacacagcctttgcacctcttgtcaaagctgtttatctattgacatgtttatttaaaactagctatggtgccagatgaaggaatctctggaaatactatatttaaaataagtatttgcgttaatagtaaagaagtgtgagatagttctcctagcttctcaggagcattttaattcttactagcattagcataaaagctgtgagcaatgggcctccataaatggctgaacaaacctcagagatgtgcagggctggtatcctctggctagagctaaaagcctggtgttttggcatttcagagcccagctgtgccagatttctggaaagaagataataaagccgaactgatccaagaaatttttaaaaccgaggctagatttttaataagagaaatagaatatacagaaatgaaagtagggaaaaataaaccatgcgttttatcatgatacagttgtaagaccactagttgtgctacatttgctgagatggctaaaaagcgaaggctggctttcatggaaatatatgttaataaaattctgggatggcactgtgtaggtttgtaattttgcctttgagtggtgaccctcaagaaacagggacccgtggttaccattgagtccagtcaccttatgtgactatttatcccctgtaattgtcctaatattgaggttgctaaatcatattttggaatggttctttgtgtttccatgaaacaataaactatataacttgtaggagtgatttactttagtaacaagacctctgaaaaaaatggtgataagtcagtctttccataaaggaaaatatggaagcaagtgaacactgttaatgaaattcaccttctctgtgcattatgcaagaaaaatataagcagaattctcaccctacagttgggcatgttctttataacaaccagctgactgactgaacgaaaagaaaaccttgggaacaaggaaaaattatcaatgaaaataaagaagttccagaaaggagtgcgggggtggaaacagacagacacctgacatgaaataaatcacctgatatacactgccaaggtctaatttgtttttccacctgtttttcctcatgccatgtgtttttcattaagataaaaaaaggaacttggcatcatgggacaatgaggagagaattaatcatcaccctatcaactacaatatattgatgccgactggacagtttttaccgatgctgattaccaccacataaagaattatctttttcacttctatataccttcactattcaaaatagtagccacaagtcacagtagctatttaattgtaaattaaatcaaattaaataacaataaatattcagtttctcattgagacaagctacatttcaagtcctaatagccacatgtggctagtaactactgatttggacagtgcagaaaacagacaatatccatcatcacaggaagttctgtggaatagcactgttataattaaagaagtatcatcatcactgacattctgatagcctttgtttgttgagcacttactgtgtgcagtgctattccttaatttattaaacctttgcaatttgattatgtaggtactatgattattattatcatgcccatttcacatataagaacactgagtcttggagaacttagatcacttgcaacatctggactcaagggcaaggacttcatttcctaatctgctggcacacttgccccattttatgaagtagtatgcaaaagtaaacattcaagtgtagtttgagtataaaagtcatttttcaattttattgaaaaaataaaatgtatgggtttttgcatttggttgctttattttgttattgttctaatgtagaatacagactttggggtcaatctgtaaactaaattaatctgttaaaaaaaaacatttttttattttgagacagggatctcactctgtagcccaggctggagtgcagtggcacaaccataattcactgcagccttggcctcctgggctcaaaagatcctctctcctcagcatctccaagtaactgggactccaggcacacaccaacatgcccagctactttttttggaggggagggcaaagacagggtctcactctgttgcctcaggctggtcttgtcttgaactcgtggcctcaagcgatcctccctcttcggcctcccaaaatgcagggattacaggaatgagccactacactcggccagtaaacctaatttttaaacatctgttttttagactatataatccaaaagaatgtttcttggactttgttttacttaaaagccttaaagagatatgtaatattatcttattttttagctatctcccaagaaaaagcctcaaataaaaaaaaatctttttcaaaataaataaacgttttcagatttttttttctaacttttgagcaaggtttttaaaaactttttggtatatagtttgtttatgctgcctatgcaattatcttctctttggtgaaaaaaataaaacttatttcattacacatataaagcatcaataagaagtcagttaattcctgtacctcatgtttaaatgctgtgggtgagattattgctaaaggggagaaggactacaaaaagactccttctgcaggataacatgaacatccatttagaccaaccagtagacaatggaaaccagagtttgctgggtacacgtgtgcacagtttgatagacatgtgcctgcatgtgtctgctccacaaggcttccttcccatagtcagagactacactaccatcaccctaatgatattgcttttgcttttcatttgactattcaataggccagaagtaaatctgaagaaatattccggctgcctcaaagatattgaaatttcaagaactccgtacaatatactcagtagtcccgattatgttggtgttaccaaaggatgttccctggaggttggtctgtttttgatagttctctaaacacatttatatcagatttcacttacttagtgtggctgctcctacaaggatcagtcttttgttaatatattttacttttctactgatcctactcttaaacgataaagcaagattaaagcattctctaaattaccatgataaaaaatggtattatgaagtcctagaattgtgatccaattttccaaatgtatagctctttatagcacatatcattaatactaatctcttttctgtttttctctttttttccaacactacttttcccttttccttatttttgtcatccattttaaatttattttacttttatgtgttgtatatagctttattagcaaccttacattttttctggaaccattgaagtttacacaagtagcaagtagtaatttacaccgtagccattagtgcatagtctgttgtctacaaacttgaagtctagcccccttgtctttgaaataacatagactgggacctgtggcaatcaactctgcaaagacttgtgtttgacatgcctgcaaagtcctttgttagctgatatcctcagtaactcttctttgatgctaaagcatcctagcattcccctattttcgtttaactattttgcactgtttcttcagttgacactgacccatatgtgagaaagaccccggccatagctctactctcttaaaatatccataagcaagagtcaatagtcaacagcaaatattagcaagaattttatagaaactcaatagtgatcagcttgtttttaaaatgaaaacgttaaatatgtcattctcatacatttttaattatcctatcataatacaattattcattttgtctgctgcttctaatcaaaattatcttaaaccactccaatagaattagggaaatgaagggaaaatgtgggtaaagaaaaaagtaaatccaccacttgaatgatgaggtttaaagactggaacagaactttcaggatcttcattgttcatagctacaggctccaatttggaattggccatagacacccactctgagaagtttgggaataagaaaagagaaaacacattaagaactaaaactgtaaggacccatactggcttcttaaaggaagttttactgagaattttaatcttcaaagcctaactctcattcacattcaaaagatatatacatgaggatggaaactgtccggaaaatgaatagcctctgcacgtggaaattatgattccctaaaggcactttgcagtaaccaggaattattttgcaactaaaatatgaggcagaaatttgatgtggataaatattgaaaagtctgcacagtagttttatctgaactatctaaaactccatgatttgaaaattggaatagaaaacagattatacattttaccagctcttgtgtcatttaactggtcttgaaacactgtgggaggaaaatagcctacattaaaggattctttgcttttactcctacaaaatctaggactttaaaaatgaatattttaagcactttaaattcctaactacatgggcttgcttaaataaatactagcaaattcataaagtagaaagtcctcctgccattaaaagtgactatctacatttactgagagagtgatatcttccacatatgtaagaaaaaaaagtcattaggaatgaacatgtctatcaagattcattttaaatacagggaggaggagagaggaagatggcaaggttgtgaaagagtgaatgaatgaatgaatgaatgaattatagaaagctatatgcttctgcacagctttgagattgagatggggagctgattttctcccttttgcaccttatttacatttctacttgaaatgtaactgttttaattttatactgagcaaggacaatggtattactttaatattgagaaaaaactagactatgcgatgtttgttttatttatttttaaggtttggtcttatcactggggaaaaatgcagacacagataatggtcatacccatctgtaaaacataaacaattaagtgatagagtttattcaagagatattcgttacagtgttttcaaaggaaacttagggacaatctccctagacatgtacctgcttgtgtgtcagtttgacttaaatctttggtttaaacaacaacaacaaaaaaaggtacctaacagtgataatcttctatatttaaaatcaaaagctctagaataaaagtagaggctataattctgattttaacaaaaactgctcagaagatttgaagttatcatataactagaaataatatttcttcaactgctcttaaactttccatgttttcctgctttctaaacctatgatgtatttcataatcacattaattgcatcgaggagggtgagtgagatggagaacttatttaaattttcatttctaatggtttctactcttcttttcctttactcacagaatgtttacacagttagctttcctaagcctggttttgtggagctctcccctgtgccaattgatgtaggaacagaaatcaacctgtcattcagcaccaagaatgagtccggcatcattcttttgggaagtggagggacaccagcaccacctaggagaaaacgaaggcagactggacaggtaccctcacacctagctgataatgcattttccctaatgcttatataaagcagttaacttacttttgtatttttagtttcgtatcatttatttctgctctcatcttggctagcaaggactgaacattccatatttccatgctggcctcctatttcactcacatcatctccccaggacaattgtcttctctaggatgttcctgttgatcaattgtaggtgcaaagtcaccctcatatttgcacctatatttcctatgggtttaacatatgcatatgtaaagaggacagcttaaaatatattcacattatcttaatttctactgtctccaagtccgactccttaccaaatctgtagacagtcagcttcggtcccttaaatttaaatgtaaattcctctaagatcattttcccagttgcacaagctgaagtaatagtcttttgggcctgactcatcccatcctctctggacacaaagaagggcagaaaatggatctgggagaaagcaagtagaacacaaccaacacagacagggacaattttatcccaatagcattcaaggatgttaaagcctaaagaatgtcaaccagccgggtgtagtggcccatgtctgtaatcccagcactttggcaggtcaaagcaggaggatcgtttgagcccaggagtttgaaactaggctaggcagcatgataagaccctttctctacaaaaaatgtttaaaaattaaatgggcatggtcgtgcacaactgtgattccagctattcaggactgctattcagctgttcacgccaccacactctagcctggatgacagagtgagactctgtctcaaaactttttttaaaaaagagtatcaattttgcaaggacataaactttagtatctatatcccctgtccatttgattctgttaaaagcaatccctcaactgcccagatttaagcatcatacctcttattgccttggtattctttaatatcttcaatcacattttttaaaacgtaattttccatttaatctagtttttctcaatgaaagggttcataggaattattttgtctgccatgaccaaaagaacacaatgctttacaaatatatccttaagtatgcacatacccttgtaaaccagatcatgttatttgtgattacgtgttttaaaaatcaattttagtatgtaacatttagtgatcaatcatattatgtaacaaatcttatttatttttctaaaaaatacaaagcccacacaaaatattcacaaagagaacccaaagatgtataaccacgagtaacttggattatttcaggaatgcagaagtggtttaatgttagaaaatcaaaatatcagccaggcacagtggctcacgcctgtaatcccagcactttgggaggccaaggtgggtagatcacaaggtcaggatttcgagaccagcctggccaacatagtgaaatcctgtctaatttgtatactaaaaatacaaaaaattagccaggcatggtagcaggtgcctataatcccagttacttgggaggctgaggcaggagaattgcttgaacctgggaggccgaggttgcagtgagccgagattgtgccattgcactccagcctgcgcgacaatgtgagactccgactcgaaaaaaaaaaaaaaagaaaaagaaaaaaaagaaaatctaaaaataatataatcttgtcaatagatagtaaaaacatttggtaaaatttaacagtcattcatgatttttaaaaaatacttaagtaaactaagaggaaggaacttccttagccatctataaaaaaaaaactataacaagtattcctgatttaaaaaaaagacattataaacatttgctataaaatcaagcccaagaaacagatgactattttgactgcactgatcttagctagcatagtaagaaaagaacaagtaaatatagcacaagaacaagaataagaacaaatatataatttaagaatcattataacaaaatagacataaagcccatatggagaaaattataaaatttcattgaatgataccaaagtatttctcaatgattatagtcaataaattggtatagtcaacatgttaatgaagatattaaagactcaatattaaaaatatgtcatttctccccaaaatgatatgtagattcaattataataaaaatatcaccttatttttctgtgaatcatgacagcttattctaaaatttatatcaaagatgaaattcctagaatagaagaatagcgtagttggggctgttccaccagatatcagcacattagaaggtaaagttttgtattgtggagctatcatgttaattcatgtataactgtgcaaataggaaagaattgagaaccctgaaaatacacaagcatagatggaaacagcatttgacaataagtggcattgcatttcatttaaaaaagacaacagtgaactgttcagtgaatgatttcagggcaattggttattcatatggaaaagatgaaactaaatttctttttcatatcaaaccaaaaaataaattcacaataaattaaagtcttaaatatggaaggacaaaaatctttaaaattcttagaagaaaatataccaggattaaattttgaccttcgggaaaagaacacttgattgaacaaaacaagattatgagtggaactgcattaaaattaaactctttggtcatcaaacaacacaaaacacaagcctcagtctggaaatgtacagtatatataatctacagggaatacagtccttgtccccaaaaggggaaaagctcactgcagtttataatgggatatcgaaaccatactggttgttatagtattagaaagaacagtattggaaagatgtgaatcaaagagtgcccttgatcactgctggtagaaaaagtaaatttctaaagtcactttggaaaacaatttggcactatctcctgaagttgaacatgtgcatactctctacaagccagcaattccactcctgggtacagacccagatttttgcacatgggcataataagacatgtacaagaatgtttatagaagtattctttataatagcagagaaactagaaacaacccaagtgttcatcagctggagaacagagaggcaaactgtggcacttttgcataatgggatatcaaggaataagaaaaaggaataaattataactaaatataacaacataataaatagaaaataaataaaaatgaaaaatgtgctatatggtaccatttttgtagatttctcatacaagtagcactaaacaacatattgtttacagacacatgtgaatttcaaaaatattttttaaaagtaaggtaatgataaacataaaatccacatttgtggttacctctgagatggagaagcaaggagatggtattagaaagaaactcataagagatgcaatggtattgtttctgaaatttggtggtagatttacaggtattcatgttattatacagtgttaacgcagcttcatcgtttacatgtatatcactcatattgtgaagaatatatcaaatagtcgtaataaaaatatttttgaagagtagagggagaaaagtgttattttatttcatttcttactacacataataagcactaaataaatataaaatacaaatgccctcgtcaatttttttgtttatcttgaaaaataaacttttttctcatattgcaaatgataagctagttataataagaataccagatcaaatattctgaaatagatttccactaaaggatacttgattccttcatcattgccagatatttaaacactacctactggctccaaatttctcctcttcaagataaaagaaatgaatgtgaatcaccagctttcaggatagtgcttaaaataaaacagattcctattaaaacaattacaataagaaaacactatgtagtatagtataaagtaagttaaaatgacattttaatgttttaacattttaataactcatatctactttataaaatatcatagtatatgctatctgaaggaggaaccaatgttaaatagtataagtctgttagacataattagatttagattcagtgctggttaaattgacaagttttatatttcaaagctaacggttttgatacccatagagttatttgtgattcctttctgctaaatgggtttgatatggcaaaccatccatgagctaaggaatttttaattgagtagtttgtgttttccctttgacagatggtgagcacttatccagatcctcaaaatgttctgtggtggacacgtaactacatacatgatttagtaaattattggaacatgatgatgtttgatggaatctgtctctaccaccatagatgactcatggagaactgagccatcactgtgtggcaggtgcccccatactccacaagaaagggagagcacgtggcatcagctctagggacaaggactgcattcaggctccctggggttcatgatgggatatcaaaaccacactggttgctatagtaacagtagcaagaagaaagcaggcatgcttgtggatgaaaaattatcttccttctttctaaatgtgggaggcaggttacatgtttgtgatagcgatctattctaccagctcagagaacaaattgaagtctaaatactcagaatgccacaaggttgggagtcaggcctgattctcagaagctagctgtccacttgtgaatataagggagagggattttgttgacaccctttgtctcctgatgggttttataagttagaggaccaacgcaagcacagctgttactttcagcatcacaaatctgctttgcagagaactgctatattaatatatccactttccagatcatctcacaagcaaaaatggtaaatgattagaaagatatttccagctgttttcaaaaccgtttgagaaaataaagtcttaatttctcaggtaagatctcagagcagacgaacctgtggttctgccagggaatctctaaagctaagccataaatgagacttctgtttaatcttcaataaccacttgctgttgcaggcctattatgcaatactcctcaacaggggccgtctggaagtgcatctctccacaggggcacgaacaatgaggaaaattgtgatcagaccagagccgaatctgtttcatgatggaagagaacattccgttcatgtagagcgaactagagggtaacaatagcactaaaatatttattattgtaactcaggtgaacttcctttgctagcatcggtatctatcagtatctgcctgaacctctgtgtgtgtggacctactatgcattgcaaaaggataccgtagcttaattccctcttctttacttttcatacttcgggaacctcatttgcctcagcccttaggagttctacccttaacatttttattcgtgcagttatctccacctttggaaaaaccaaatgcattttctgaagctataaataagaaaaatccctccctctgcccctcttaaatattacctcctcaaataaggtatgcacacagcaaaactcacaaatcagctccactggagccagcaggctttggcggtttctatctcattcaggttccaaagcagttatggcagctgcttagctgtcacagatacagagtgtggcagcagctgcaggacctattgagcctattaagtgcatatcttgtccctgtcccccttcccaaggtttgcagggtccctgcagagtggctttctgagggaacagaatcaagggaggggaggaaaatgactgctgccctgagcctggccacctttttacaaatctaccagagtgcttgccccagccctgggccagggaattggctttactcatgcacaaactgatgactttctttagaatgctgcaatactttatacttactttattaggaaagtcatctgtatttttcatcaaaatattgtatgacaactcagagagataattagtttagaaggacaattagagaaaaaagaaacagaagcccagagacttcaggggttcagacctccaagccagcaatccatttatcagactgaagacatagaaaagaactggaaatccaatttgatgaggcctcaaaacacagaggatacttttaaatgcaacgagtatgaatatgtagcagtagttcagccaagccaatactatcctgcagtgaaagacctacatttactaattatcctcttggggaaaacatttagataagcaataaagatttcttaccttctaagtaaacaacaaagctttcctcagtttttattattattattattaggtagaggattaggctgtaggatgaattgatacaaagcgttcatgcagaatggctactgagacgtttagaaaccatgatcgagacaaatgagggatcatttatttggacaaactgagaacttttactaatctaacagccagatattgtagtcatggtctctgaggagaaatgcaaactgaatgctctcatttgaatcttagaatgctttagaatcctggtttcacatgtcttctagattagatgttaggccctttgacaaactttaatccttttcattgcggaaaggactttttaaaagatttaaactttagccgggcgtggtggctcacacctgtaatcccagcactttgggaggccaaggcaggtggatcatgaggtcaggagttcgagaccagcctggccaatatggtgaaaccccgtctctactaaaaatgcaaaaacattagccagacatggtggtaggcgcctgtaatcacagctactctggaggctgaggcaggagaaatgcttaaaccagggggacagaggtttcagtgagccgagatcgcaccactgcactccagcctgggcaacagagcaagactccaactcggaaaaaacaaaacaaaacaaaaacatttaaactttaaggaatttcaataagtaactgcagatttgagaaattagtttaccgaaatcactcaaaatgtgttattttgttgagaaagaattctggaattcccaaatgcattacactattgtaccactatgccactatgtccttttaacaggtgcttcttcaagaagggcattttattatgccaacttcacagctgttgaccatcaatccaacctttatttgattaagctcagtatatagtacatcactggaaaccagtcatttagttaattggccatataaacgaacagttttgccattcattgttaattacaggataatatatgacatattagtgtgtagtcactgaactctgtgccaaaacagtaatacatttgctaccataatggctcattcggcactctaaggttaaaatgcaatctactctataagcaagtgccacattaaactgattgaccagagatcgcaagtgaccatgagaacttcacccagaaaaaatttttaatgctttatatgcctattctatggcatgatttgtgtcacatactagacaaagatgatttgttttcattgttctgaatgtatgtgagatctgtaataacatcctttcatcacagatgagaaaatattaactaacctgcccaaaatcatgtactacaaataacaggaccaggtattaaatgagatgatatatttgacttaaatacctccatctatgcacagccaatagattattcttacatttttgtgtgaccataaaggtttatattactaaatgttgattatgatgtatgattattaatttggagatatttgcattatcccaacacttttcagattttcagactatgcatgtcagtcatcatttcttttcctaaaatcctggacaaaatgatagctttaataccgcctcacaaaataattggattttcaccaaactgggggccaagcttctcaagaagctccttctcccttgtcctctgcctctctttactcctcctccctcattctctctcccttccaccccttcatctggaaaaatctccctttagtcactttggtatctaatttcttggcactccagtgacctctgcctcctatatctgctttgtcctctgatccttctcctggcatccgccttggtggccagcagttcttactggacaaaaacatcaaaccctaagagcctgaagtagttacttaagcaaataggacaagcaactgaactgagtttttcttctgggaaagctttcttcacacaggtacagaaataggctaaaggtcaggaagtagggtgagatattttaggagtcatttggggtttccagaatgagataaagattttaacactgaaccctaaatattttctttcttaacatccaaagtatgttcaaacagaaaaaagattagattctatttattatgtaaattacaaacattaggacacatttctcttaatatcttcttccacgtatgcaatccaactgatatggttttaaaaaaaatcttaaacccacattccaaacaaataagaaatagggtataagtaatcaagtaattatgaaactctaagaatcagccactgaaactgtaaaaaaaaaaaataaagctgacctattacaatactaaagtaatacaaagtttaatgtacctttttgcacatagcaggcctcagtaaaaagctgttaaataaatactttttaaaaatggaaaacacaccagaatcataatggacatattggcaatgtccttctcaataaaaactaaagaaatgatctagatttgatgttcctaaaaggtaaaataggagcaggatttagctgtagttttctagcaatgccctttttaagtaatacagcctcagggcaatcccttaattaatattttccgctgtttgaagtaggtatttttatctccatcttataaatgaatgaaatggacctgagcatgattaaataacttgcccaaggtcacacagctagtaagcttccacactagtacttaattccagtatgttcctcctgaaagcccacactcattctccatcaccaccctgtgaattggtttaaaaaaaataagggtcactatgatggtccttgtggcagaaccacactacagagagaggctacaccagaaagaggaaggcctctagctttttaaaattctaatcaagaacagagatttactctccttggacaatctttaacagaggcttatatccttcattaaaaccttagaagccctgtgatatcatgttgctaagaagaggctgctttcagctaaaggggaaaaagagtgtaggggaggggcttctcagtgagtcacacatacccggaagtgagtggttttctgaaattctcgtctcaggaaaccaccgacactcttagcaaggaagctgaacctcctgggttttgccaacacatttttccatagtttggtaaagaaagaaacctcaaaagtatgtcatttccccctattttctctttgaaactaaattttaccggtcccttcttcacccccttaacagtgacgtttttgagccacagcgaaatccattttttgtccctttctcttacttttgaattatcttacttgtaaagtgccaattcagagcatctttaccctggcttattgttttttccagttctacatgtggttttacttctttataaagtcaagtaagagggtactttaggactgaggtttccatccaagtactccggttttctctccagatatgaagtaagttttcagtaatccattcatgatccccaggctagtgactaatgcttatgactaatagcaccatgatgactgttaagaccgaaactcaaaacttgcttccggaacaaaagagaaaatgcctttggtcattttcatcagaactctttgtctccttctgattcttggcccagggatccaaggattgttgtaaataagtagcatgaggttctcaattagcagtgtgtgagttctctctcataagcaaattaggaaaattaatgaaacagccactaaggaaaatcattgcaaggaacaattagcagggtgtccttgcctgcctcttctattcaaaagccatcagctacattctttataaaaggtgctttaagtgtttgctgttgattcctgcaatctaagctctcaggagcatggtttgttccctagcaagaagataatagccagcacaacccaaggaagaccccatgctttgctaaacctgccaacccttatacggttagacattactgcacactgcagaagcctcagttctcacaggctcatgtgttgggctgcacagcgctgttgtcagctctacaagaggctaatgttgcagtgcgccatgacctggtttcagtaaactttcaggaagagtgaacgagggagtcatggaacgagatcctgagaacagcgtttgcttagtgtagaattcctaagcatccaattttggctcccttaaaagctatggttgagaggggtgaagggtggcaggaaagaatttgatttccaactgtattgaatcagatgtgacttatacttgtttatttttaatattttatcagcatctttacagttcaagtggatgaaaacagaagatacatgcaaaacctgacagttgaacagcctatcgaagttaaaaagcttttcgttgggggtgctccacctgaatttcaaccttccccactcagaaatattcctccttttgaaggctgcatatggaatcttgttattaactctgtgtaagtggatctcctcattactactactaattttttatttttatttcttgctattaggggtcccaatgcatctacattgtctacagctatgcaggggaggagggaaacaatgaggatcttcaacttagactgagaaaagcacactaatggacttaaaaaggcatgcggggattgggcttaattgtaaggaagcaaaaaaacgaaaataaaaaaatcttatttattacattctattagccccatggactttgcaaggcctgtgtccttcaaaaatgctgacattggtcgctgtgcccatcagaaactccgtgaagatgaagatggagcagctccagctgaaatagttatccagcctgagccagttcccaccccagcctttcctacgcccaccccagttctgacacatgtaagtgtttatattatccccattgctttctaatttttacccagtattctgagtcatttcagaaggaagattattcaggatatctagtacactctgatattagaattgaaagaaatataacctatctaaacctattcttacatcttcattgaatgacttacctatatttccatcttcaattttgtttacaaaacagtacattttcagttgaaatgttggaaaacacagaaatatccagaatcatgaataaaagacacttataataccatgacagaggcaaccatgttggtttccaggcccttttatctgcatagtagatgtcctaccttgtatacaatttggtgtcctgtttttagaaactagtaatacaccactaaaactgtttctaggccaggcgcggtggctcacgcctgtaatcctagcactttgggaggccaaggcaggcagattgcctgagctcaggagttcgagaccagcctgggcaaccacggtgaaaccccgtctcttctaaaatacaaaaaaatagcctggcatggcggtgtgcacctgtagtcccagctactcagtaggctgaggcaggagaatcgcttgaacccaggaggcggaggttgcagtgagccgagatcacgccactgtactccagcctgggcaacagagcgagactccatctccaaaaaataaaaataaataaataaataaaaactgtatctaaacatcatataaatgtgtatgtctaatatgattttatgttaagtatatatacacacagagacacacaactattttatagtattggaggtcatatagccttgattagagcatgggctcaagtcagactgctggtattcaaatcccagcactgtaaccgaccatctgtgtgaatttgggaaagctacctgtccaatctatttctcagtttcccatccaagtactaaccgggcccaaccctgcttagcttttgagatcagaaaagatcggatgctttcagggtgatttggccatagactatttctgtttcctcatctgtcaaatgaggatattaacagcacagacatcaaagactttgtatcagagttttaaaagataatgtttgttcaatgactcacatatactgaacgtttaataaatggcataagtactatgtagtaatgataataatgagtactttcaccagcccagggctaaacaattttcattcaatattatatgtaattctcataacggctctgtaaaatatagtctttctacttttagtcgagttaataagaattagctatcttaagcaaccaacccactcacaccactagtaaaaggcagagtaagaattttattctagcgagtcagactccaaagtctgactccttatctctggaacactctgcctttccaatttattctacttttaatagaccatggtaggctattgagagtgtttccagtttttcactattagaaactatactctgatgagctcctctatgcatcaagctttttcattatttccagttattcttaaaatagataagtagttaggaaattataaggccaaaagatgaatatgtctaaggttttcaatacacatacctgaattgtttcttccacaggctatgccaatttacattcttatcaccaatacaacaaagatggtcacagtcactacactctttacagctcatgtgttgtggttatattccataccagtaatgggtgggcaatgttgtcttgagtgcagatcttgaaaactcttgaatatctcattctcttccttagtgtccacgatggaattggttgagcaatgtgctccttgcactagaaatagttattcaatgagaggccagataaccatcattcaagaaaactggttatttactccaagcatcctttcatcctttgtaaaatagagatatttcatctatcttgcctacaacatagagttatgaaaaatcaaatgggataatgtatgcggaagttatctgaaaactggaaaaagcatacccacatagacactctgaggaatccctgcatttagtgaataactactatgtgtccagtactctgccaggcatttcatatctgttatttcattttattcccaccctattgttttatttacatttatttatattgccagaagtattatatttcacaaaggaaaatacctaagatcacacagctagcaagtggaaagctgtcagtcatggggggttagttccaggagttgatttcatcctaaagcattcctgagatctgccacatggatttcagaatgtttcctcagctctttcataattcagccacaggttagatctttgcttagcaaaggtaaggttaatgatcctcctcttcaccctcatatacctgaaaatcatgtgtttctcagactcataaacatgttttcagttgaagaattagaaaacatcatgagttgaataaacttttttgaccttggatcctaatgtccacttataaaaatgtttctaggagaaaacagcctaatttctaaatgactaacttaaaattataaactaaaattggcaagagccctaaagatcatctggtccaatcaccatcttaatgcatgggttccttttacatgatacttacagcctttgcttgaacatttcattgacaagattttccagtgttatgacaaggcaggctcgagttgttagaaagccatcggttacattaagttaaaactgagtccctaaaacttctatgtaatgattgtatttctataggcaaacacattacatttatgtgtcctctgtctaacatcccttcaataatttgaaaatagctaagtcttctccttccctaggctaaccatttccctagcttaggtattctttgtattatctcatttctaattactatcccctccatgatcagtattcttaaatttgaaatattcccttcataatatggcacctactgctcaaaaggaagtcaccagctcaggggacagtgtgacccctccctcccttaattgttaccatatttctattaatgcacctaagaatgttttaatgtttttaatagatatatcatgctactaattccaaatcgggtaccatattcaatcaagcagaacctcatggaccttcttctctaccactagaacatcctccaggcaggtctctcagcctgtgctggtttggatttttagggataaccctgccagcctccatggatcaccttacttttctaagtacttacacaaactgcattttatagggcctctcaagcacatttttctgtggtatttagagatcacactttttccttttttctcaaaataaagatacttgcccatctgggaatggagatttttactcatttaaggttcttttttttttttataaccttctgttctaatttcgatttccatttcctctcagcagtgtatgttttaacttttccgaaaacagagcattccacttagtagatgagacagaagcaaaaagttgagtagcatgccaaattggttggtttagaaagaatcacagaacattagagctagaagacaccctaaagattccaactcttaacttgcacatgaggaaagaaagccctcaaacttacagcatggcccagggggttacacacatgagcgatagttggcactaaaacccagatatctaaattccaactgctatttcaccttctttttgtttgtttgtttgtttgtctgttttttgagatggagtttcactcttgctacccaggctggagtgtaatgtcacaatctcgtctcactgcaacctccacctcctgggttcaagcaattctcctgcttcagcctcccgagtagctgggattacgggcatgcaccaccactcttggctaattttgtatttttagtagagacgggatttctccatgttggtcaggctggtctcgaactgccaacttcaggtggtctgcccacctcagcctcccaaagtgctgggattacaggcatgagacactgcgcccggcctatttccccttcttttgcacattataattagttatgactgtgtggtcagaattagattttttagaactttccatctctattaattgtattatattttagaaatcagatcatgaagccacacatatcttctgttttaatttgtttcctttcttatgttctttttgtgtgtgtagggggaaaagggtgtcttctttttaaaggttactaaaagttaaaagttttacagtttattttgtaacaaatatttattaagcacctactaagtgcaaagatgaatacgatattatcattgctagtcagagaaaaagagggagagttgctttttctgccatagccctcccacttttattccatgaattctggcaggttacttgtcccttctaaatgtaaaataattaatggacaaataaggataataatatcttccttctaggattactattatgagggaataagttatacattttatgcaaagcacctagcaccatgcttggctcaaagtaacattccatctctctatttattcttttgttagtttaactttaacttctgtgtttctttaacttaattattctagttagtttaacttttcacatttttagggtgggtggcaggtgctggaaaaaaagggatgtggtgagtattcaatttttaagcaattccaaacccttttattggtttgatatgtaatgatgatatatacattgtaatgatgtggttattaaataagtcctctataattttcacttctcaccattttccatttttgtatcagaatttagattctttattttttttttcttgctctgtcacccaggctggtgtgcagtggcgcaatcatggcttactgcagccttaacctcccaggctcaggcgatcctcatgcctcagcctcctgagtagctgggactgcaggtgcattccaccatgcccggctaatttttgtatttttaatagagatgggatttcaccatgttggccaggctggtctcgaactcttgggaagtgatccacctgcctcagcctgccaaagtgttgagattacaggcataagccaccacgcctggcccagaatttagctttttaagagttgttatttaagaactaagacttaaaagttaactcctgaagtgagaactgcctatttatgagctccatatttgtgctagcacagttgacagaaaagatctattctcagtgcccttctttttcttctttacacccatcacacccaatcctgccagcaacttacagcatgaggacaacattcactatactacagggcaatgtaagggtgtcttgagaaagccctgccttgtgaaatggattatgtcaatcttatgattaattcatgttgaacacgctagattaaagagcatttcatgcatattatctcatttgatattatggtagcttgtcttctctttatacttctctcttattctttagcccatcgagagctagagaaaacatttctacatgttctatttgtggatatttttcatggaggatggcaggaggtagaggtagataagaggctgaacttcaagtattacagaaatttgttgacatgtggaaacgtgacaagttctctgcaagtatgtgcactgtttagaccaagtctttttaacaaggatagcctgtgtggatttgtagataatgagctggctgcattcttttacttgaattttattgaagagttcagccgtaaacctcacagtttaaaatgtgaaaactaagaaaaacaatacaagtagccatggagaattcctgtactgatgagctctctttgggatttggggaaaagaagtgagcacagaaggaaagaatagaggaaaggaaagcgatttccctagcagctttagtgctacacctttaagacctaagtacagtcaaggccaaaggataaactgattggatactgatatgtatttaaagagaaaacatacattttccacttatcaaggaatccttgtttagacattaatgtataaatattactgtaaatgcccaagacccaccaaaagagcttaagtgcagtgttaacaataattcagtttctcaataaacatcttgagtagggcttttatattttagaagaagattaaagtcagtgctataaaaagtatcttccacttattcatccataaagaaaatcatgacaaataagcaccagatgtgattttagcccacatttattagagaaattaattattgactcatgaaagaagaaaattatgcaatttctatgatgattcattgtttggtgctttcaagaacaaagatgccagttttgataaatgtaatataaatctctgctcaggacccaggaaattcaagagatgcttatcaacgaatcatacgcactcctgaatctaagaactcatttccaaatgtcagccaccaatctgcagttagttagaaaagaccattgctttattctgacctgaagttaaatgagtgacagtgtgggggtgaaaacgttttggccccgttaccaatttggtgcactatctacttccctaaacaaggctttgggagcatggcttcctccataattattcccaaccacatcactgctctaatcaacaggtgcaccaccacgcgagactccccacccaagtcctgtctgcctacaacttgtaacctgccaagcaaaggcaaatgaaaaacaagcgtatctgtcctcctttcatatcccattttccccattatctatttctagtactttaaaaagtccccacaaggtggcagaattgtaacacgttgagattgatgagcctctactgagactgtgaatttttttttttattattattgttgttttaacacatttgagagattagtgcgtccaaaacaacacaggtaaagcatcacatccatagagatgaggacgccttcaagtatacactagcttagaaaaggatgattcatcttgcaatgaccattctttaaaagttccttaaaattacctcattagatcttttctcttacccttttttcttagcttagatttcagtggcaagcagagttgaaaacatcatccttagtgacaagatcattttatttctgagcaaagcacagggcagtttctattccatctcacttgttccccctttaaaatgctagaaggaaaaaagaagcttgagcagctggatgagcagctccacccactgtgggacatgaggcagaaggaagagaagaggaagcaacaccgggcaaagcaataaactggtgctgccctgaacacatcatgttttttttctttttgagacaggttcttgctctactgtccaggttggagtgcagtgatgcaatcatagctcactctaaccttgaactcctaggctcaagtgattctcctgccttggcctcccgagtagctggggctttcagcatgcaacaacatgcccagctaattttttatttttttaatttttttgttgttgttgttcttttggagagacagaggggggcaggggtcctcactttgttgcccaggctggtctcaaactactagcctcaagcgatcttcctgcctcggctttccaaatgctgggattaaaaacatgagccaccacgcccatcccttacacccatcagacttggtttcagtttacccaaggaaaagtgatgcaaggaagacaccctttaaccaagcaagggggaggtcgagatttgtacaaaacactaccaaattagagggtggggaatttttgtcccatttaaatcctaaggtacatatttttaaaaaccctcttacaccagcacttctcagtccttttccaactgccagtttaataaaggaaggtgatagaagttttattaaaacagtatccatcctgttgcaaatcaatgattgatagtaaacatcaccttggatgtccttaaaaacaaaggactatacaccataatggctttaaactttgaggttacatgttagagtgatcagtttggtacaactcttttccataacattggctcatctgagaataccgttttattaagcactgcttctgcctgcttcttgagggctgcccgttgcagaaacggaggatctaatccaggaggtgttcttcttcctaaatttcaagtggatgtaacctgtaatgattcttaaaagaactttgacaaagtccctgtccttttctggtcaaaggtttttttctaaaatggcttgaccagtgccttgtccatctagaaaatctcatagtatacaacgaaacaacaacaaaataaaaacaaaccaaaaaactgctgcttagctcaggaccagttttggatacacctgtccagtctaccagcaatccaaaagttccccataacatacagctgctaccgggagtgtacaactgccaccttgaaaattttttaaattttaatagagaagttatattgacatttacatatagtaattagacgagtgactgtaaccgcaataatatggacataacccactggtggttctcttttaagctacatgtaattgtttcctaattcctcagcatccatccacctttcttaatccctcaattttcagagctgagggtgtaaagatgtttcagtgaaattctgcccccagtggactcacagcagataggattatcttagtgatttctgaggaagactgcaagctgcgtgtgtttatcgagacggtcctctgtccgggaaatatcgtgagaggctgataaaagatcccaattctattaatagaagtattcatgactgagatcttaagctacagaggcctttccattcgggctctttttgcaggcagcgtaataagaaaggtgccacatgctgcctctaaaagaggccattcagctgtgcgaatgaatagcattttcctgtcctacccacggggttttgcatagctgtgtgaatttcggccacagtctgctctttataactgaccatctcctgggaagcaagaagggaaatacttccatgaagaccaattttacggcatttcaaaacactttaagccttttacctgctgtggcagagtgcttcgtttgactaagatcaagagaaaagagaacaaggcttttcctcatcaagtaaaaatttcctgtgtgctgatgagtcatctctgaggtacactctttgggaagaacactgtgcatcaaaagcctgccttgggctgcttgagaacctctgctgagtcagcactcactggggcagcggcccagccagagctattaagtgcagatcttaaaaacagatgtgttggtgagagtgtgcaggttattttctcatgtactgcatgttctaagagatgtcataagcagcctgtatatcgacctatcttgtgaaaatagagaacagggaaaggaattgtggctttggtaatttaaggagccttgattatttatggagctgtgtgttatggtagccaaatgtgatctactcagccaggactgctgtatgctttgcaaggcccagtgcaaaatggaaaatgcagggcccctcactgaaaaattattaagaatttcaagatggtgacagcagagcattaaaccatgtgactgcacagccccgcacctagctctccccctcagcaccctaggaagctgatctttgaacagtggcagttgaaatggtgtatggtgggttacatttttaaaatgtgctgggttgcctagcaactggcaagggcctgaatgggctgacgtgcaggtttagatacaccatcttgaaagtctacattcatggaaaccttctagtggactgataattttcaagaaaaagtaatatagtgggagatggaaatggggagggcaagaaaaaacacattttgctactcttataacccaagtggctagcttgtcattttccctgttcgatcttctaagaatagagctcttcatatgtgaaggaaaaatgaaagggaaattccagttttctcagaaatatacataaatttttagaggataatgaaactatgagttaatcaataaatatgtctgagcacattcctttagccattccagggtgtgatatgagaaaactgattcacacgcactgagcactcaataataagtacttactatgcagtagactacagagatgaataatgtagtttttattcttaaagaattacgctaatatgtaagaaacaattagacagcatcattacctttttaaagaacagtccataatctcctgtttttctctcctgggtattttacagggtccttgtgctgcagaatcagaaccagctcttttgatagggagcaagcagttcgggctttcaagaaacagtcacattgcaattgcatttgatgacaccaaagttaaaaaccggtatgtatcatcctgagacactgggaaagaaccgataaatgaagaactgagtatttgtgtttaatcaagttgaatctactacacttattaattaatgaagttagcttttcttttattcactgagtacaatagagaatagaattttatttgtctgagcctgaggagcccaatttaggaaatcagtagcctgataaagtcctcatctctgagaaggttttactctcctttatgaaaatgcagccacgatctgataccgctctattttagcatgagaatgctgttatttttctgtttgactttgcatgcttttgtttcacagtctcacaattgagttggaagtaagaaccgaagctgaatccggcttgcttttttacatggctcgcatcaatcatgctgattttgcaacagttcagctgagaaatggattgccctacttcagctatgacttggggagtggggacacccacaccatgatccccaccaaaatcaatgatggccagtggcacaaggtaatagtcccctggatattggcagtaccctaagggaattactgagtggcagccatcagcattctcctggtgccagtatattttgccagggcagacactgactctggcagaagctaaaaataaaataagtgccatatacaactaccacaatcttggaaaatgtgctcagacctgtgtaggtttgcatttgaccactggcatgcctcatcatggttccatcactgctatatggctgtggttttcaaacatctacccataaactgaggccaggtggctgaagacatttccactgctctaagtgagaaacgtagaacagagtgtgttcaccatcaagctcgatgtattcaattttaaggaataatatttattctgagattatattatagcatttttatggtggctaaaaggcctttctattatgaaatagtatttgccaaaagcaaaagttggcaacactaaaatgggtcccaagactccccacctaaccacacagtggtctgtgaaaaccaggaatccaggaatctctggttgatcgtgtttaaagggctctaaggtatcatttctactgacagttatttggaacaactttaaaaacgttggccttacacccagaaactggtactattatgggcacagaaggctcatttgccagcttactgtcctctttggcatgactgcaaatagataatatactgcctgattaaaacaaaatctcaacatttgtctctgcacctgcgatagcctattaaagcaaagcttccctaggtagaccaataaaatttttaattttcagagtacgatattattagatgttagatttggttaatgttaacatactttgacttgtcatattctagaaagccaaagaaccttaaaaaacgcgaagccaaccaatttgttatcatggaaataagaaaaggaatcttcatttttgctgggagcttatgactagcaaatacagatccaaatgaaggagctctcattaagagttcttccatctctagctaatagaataataaatatgacatttgagaaaaagacatattgttgaaccacaatgaggctgggattaagaaagggaacttaaatactataattagtcaaattaataacggattttatttttgatggtttttaaaaattacttcccaaaccagaatagatatgtgtaaaatgaagtgtgaaattactctaatcctgacccagactcatttttaaaccatcatggtactttagcatttcacaggctttcatgctcctttacctaaattcagactcaaggtttttatactccagccagtctttacaccccttatttcattctgtctcagaagataattcactccaccgccctaaatttcagcctcagtcacttctctatcttactcccccactttgtactcatcaggttctgcagaaagtagtgcagcttatttgtgccactctttctttaattctgcacaagaagggcctgttaggcaaagggatgtagcgtatctgaaattgtgttgggagcccaggctctttgctcaatcaaactaatgcacttttaaaactgtgcatgaattttgctacccacttaatttatgaaagtgctattagtctgcagggttccttacaacattcctccctctccacacatatccacatttggcaatctaccgaggagacttcgacctaaaactgacccaggaaaatttggtattcttttggtgatagtagtcatggaaaagacagaatttgagatattctgtaaaatgggtttaactttcccatatataatgggcttagcgcatactaagcactgtgtacattgtttcaatttttcttggtaacatcgttagagtccttatgtcttatactctgcatatgtgaaatttgttcaggattggcattaatgactcctttcttttttgtagattaagataatgagaagtaagcaagaaggaattctttatgtagatggggcttccaacagaaccatcagtcccaaaaaagccgacatcctggatgtcgtgggaatgctgtatgttggtgggttacccatcaactacactacccgaagaattggtccagtaaatatctgatttcttctttattacttaaatatatggctgattcatttattgatatattttgacttattaggtcacatgggcccatgaaaactgataggtgaataggaagtcatcttttctgataagggacagaagggtttgttgtttatttgtttgtttgtttgttttgagacagagtctcgctctgtcgcccaggctggagtgcagtggtgcgatcttggctcactgcaagctctccctcccgggttcacgccattctcctgcctcagcctccctagtagctgggactacaggtgcctaccaccacgcctggctaattttttgtacttttaatagagacggggtgtacttttaatagagacggggggtttcactgtgttagccaggatggtctcaatctcctgacctcatgatccgcctgcctcggcctcccaaagtgctgggattacaggcctgagccacctcgcccagctgacagaaggttttttagatagattagattatgagagacaatgccacggaacactgagtggggaacctggagccaaactgtcttggtttgaatacctatttaactattgactagctgtgtgttttggagcaagttaatcttttttaacaaagatttctcttttgcaaaacagggtaatgataatactaaacaaaaaggattgcataaagattaaatgaggtaatttatttaaagtgattgggttgggcatggtggctcacacctgtaatcccagcactttgggaggccaaggcaggcagatcacttgagaccaggagttcaagatgagcctggccatcatagcaaaaccctgtctctacaaaaatacaaaaagttagccaggtgtggtggtgtgtgtctgtagtcccagctactttggaggctgaggcaagagaatcacttgaacccgagggtcagaggttgcagtgagctgtaatagcaccactgcattccagcctgggcaacagagcgagaccctgtctcaaaaaaataaataaataaataaataaaaataaaaataaagtgattggaagagtagcaggcatataaaaagcactgaaagatgaaaatgatggtatgtattcatggtgtttcaggcatagagatttagcaaatattgagaggtgcagtagttacagtacagttatccaattttggattcagaatttaaagccctcacagttttgtaaatcaatattcacaaaataattttttattagaccgtgtatcctagtttgctttggaaagtgttactctgagagaagcacgggggattgattggtgcttttagagaacacactagatacaaatgtgatacatttctatactcaaattagaacacatgataatgtagatttgttcattcatcaaagacaatcacccattatagttgtaattctcagtatttggcttctcttgtggatgatcagtattacttttctttcataggtattggatatgctttttaggtctatcaaaaactaaagtctctgaagtgacactggtacaagcaattcacttgaatttctaaaaacagataaaatataatggaccagagtgtgattgagttacttctaaattccttgaacccccaatgtttcatgcaaactttcaagttttatgcatatttgcattttcttaggggagggtctgctgctttcattagatattcaaaaggaagaagcactgaaccaaacctaattaccttttcaaatagaaattgaacataggctatgacaaaatgggtatatagtaaggttaataaactattaatagaaacataaaatcaggaacgtaagagaccaattaaaacttatgataccaacatggggcccatagctctgtcaaaccaatggagacatagtgtgcagtatttagactatgagaacagtcatattccaggatagacacatccaagttgagaagcacaacacaggattttctgcatccatgccaggaggcctggtggtaacagagaacccaggcagctttgggggatatcccatcctaagacaactggataactacacacatagagcaccctgcaaatgactgtattctacataaaggcaaagttctgctaaaacctgacatttgtttcttctgatctgaatgtttaggtgacctatagcattgatggctgcgtcaggaatctccacatggcagaggcccctgccgatctggaacaacccacctccagcttccatgttgggacatgttttgcaaatgctcagaggggaacatattttgacggaaccggttttgccaaagcaggtaaggctctttcatttccttcctgttgattattaactagatacaaatactaacttcttgctagtaccaaataataaaagttcctagagtcctaaactagtatcctttatttaagccaaaaagaaacttatggaagtaatttcaaaaatgcctcttaaaaattcatgtatctgatcctgataagaattaatagaagaaataaagtaaaaggtctatttagagaatttattccatctccttcactggaggttaagaacagcaaaataaataattttgcaagaacactcatatgtttatactatgttgtttttctaccttccagtttctggagatgagatatgatttttttcttcaattccctgcaaggctgtatttcataatctcctccccatcaacacacacccatacacacaatgcacacccatgtctgtttcttgttgatagtgacaatgactggcatctttcctggctttctccactccgtttctaatgaacatttccagtatggttttatatcactggtcatgaaggtacagttaggaaaaagaaataggaaataacctctacataataattttttaatcctttaatttttaatttttgtgggtacacagtgggtgtatatatttatgggtgacctgagatattttgatgtaggcatgcaatgcataataatcatatcagggtaaatggggtatccatcacctcaaacatgtatcctttatgtttcaaacaatctgattatactcttttagttatttttaaatgtacaattatttttttttttttactgtagttacccttgtgctagcaaatactaaatcttattcaaactatttttgtatcattaaccatccctactcctccctgccactaaccttcccaacctctggtaactatccttctactttctatctatctccatgagttgaattgctttaatttttagctcccacagataagtgagaacatgtgatgtttgcctttgtgtgcctggcttatttcacttaacataatgacctcaagaaccacccatgttgttgcagatgataggatctcattcttttttatggcttattcatatccagtatgtatatgtaccacactttctttatccgttcatctgctgatggacacttaggtggcttccaaatctattgtaactagtgctgcaataaacgtgggagtgcagatatctcttcaatattcttttgggtatatatctaagagtggaattgatggatcatatggtagctctatttttggtgttttgaggaacctccaaactgttctgcatagcagttgcactagtttacgttcccaccaacagtgtacaagggttctcttttctccacatcctcgtcagcatttgttattgcctgtcttttggataaaagccattttaacttgggtgagatgatagctcattgtagttttgatttgcatttctctgatgatcagtgatgttgagccccttttgatatacctgtttttcatctgaatatcttcttttgagaaatgtctatccaaatcttgtacccatttttaaataggattattagatttttttcctatagaattgtttgaattccttttatattctggttattaatcccttctcagatgggtagtttgcaaatattttatcccattctgtgggttgtcacttcactttgttgattgtttactttgctgtgcagaagctttttaacttgatgtgatcccatttgtctatttttactttggttgcctgtgcttgtgggtattactcaggaagtctttgcccatttcaatgtcctggagaatttccccaatgttttattgtaatagtttcatagttggatctcttagattcaagtctctaatccactttgatttgatttttgtatatggcgagagatagggatctagtttcattcttccgcatatgaatatccagttttccctgcaccatttattgaagagactgtcctttccctaatgtatgttcttagaacctttatggaaaatgagttcactgtagatgtatggatttatttctggcttctctatcctgttccactggtctatgtgcctatttttatgccagtactatgccgtttggcttactatagttctgtggtataatttgaagtccggtaatgtaattcttccaattttgttccttttgcataggatagctgtggctattctgggtttcatatgaattttaggaattttttctatttctgtgaagaatctcattggtattttaatagggattatattaaatctgcagattgctctgggtagtatggacattttaacaatattgattcttccaatccattaacatggaatatcttatttttgtgccctcttgaatttcttgcatcattgttttatagtttttattgtactttcctctaagatctggaacacgacaaggatgcccactctcaccactgttattcaacatagtattggaagtcctagctagagcagtcagacaagagaaaaaagtaaacggcatccaaggaagaagtcaaattatccttgtttgcaaatgatatgattttgtatttggaaaagcctaaagaccccaccaaaaaaccattagaactgataaattcagtaaagctgcaggatacaaagtcaacatacaaaaatcagtaacatttctatatgccaacagcaaacaatcagaaaaagaaatcaagaaagtaattccatttacagtagctacaaataaaataaaatactaaggaattaaccaaataagtgaaaggtctctacaatgaaaactgcataataatttttaaaatctgcaattaatgtactttaagatagaatattcagtcccgtggtatcatagaaatacgtgtatgttcattagaaataaactaataagcacataatatgtggagattatgatgggaaacagaaataagtaacatagttctttctatcaagaatatattatcaactggtaagaaattgaaagaaggcaagtaaaaatgattaaagacaaaaaaagcacagttctgtagatacttagaaaaaaagattaattttgtttgggggatatcaggaaacgtttcatggaggaatcagcatttgagcaaggcttcaggtgattttaacactcccatacaaagtagtgggtgatagaagagtaggaccctccaccaaaatataggtaggaaaccccacctacagggaagcagaaaacagaaaaacacaggatatgttaaatattgaaacgttacaggttatgctgaaccccgaattccatgtgctatgaaagtctaaaagcttcccccaagatttctgcaaattcacagatggctggcattctcttagtcaaattttatgacaagtttcagcttcagcttttgcacttaatggattgacttgccatcctgcctgggctcttataattctggatcaaacaaaaccagaaaattactcacttcctctgtttctaatgtcccttgccatcccctgaacacacagtgtaatacaatttacataagacttgggtggtcagaagagatcacttcactggaaaacatacaattcatcttaacctttgacatctttgttcttaaaagttttccagcgacccaatcactggggcttttttttggcctcttcattccttctgtcctcagccgaacttcctcatgtcattcctctcttctccttacttctccctttctgttttattttgcagagcaattcagcttcttctaccctttactttattttttcgtttatttccagaaggggtgtcactatgttgcccaggcgcaactggctagcttttattcataaaatctgctataaacccacctttgccaatccaaacccatcaaggttctcagtagaacaaaagtctttcatgtaacagctaccatccttcattgcagacagccgtggctacacatagcatttatttcttgcctaataaatagaagacttggagaaaattcccctgagtatttctctgatactcagttcagttggtgtggtctagacagatcttaacatatcactttgttcctaagtgatgtatctatcttaaatacttgctcaaagattaaaaaaaaaatcaaagagtcaaatatggaaaatcatagaggaaagaattaactggatgaacaagataagtctatttatgtcccagaagcttcccatcaacattgtacttacagtttctctctttattaataaaatgtgtggcaacttttgaaacctttcagatgattgtggcaccatttagtgtgccccactaaaactttactgaaaaataactgaaatgtttttctttacccaacagagagacttctaagataataatacctgacagtgagattctttaagtcaatctcagtgtgtatccatttattcaaataatacatagtaaaccctcatgttgtgccagatactttggtaagcacagggataaaatggtgaaaaatatagacaatgcccctgatctcatagcacatacattctaaaagggaaggtagcccagaaaataagcaataactaactatggagtgtgttacatgatgcagtggtggaagataggccaggcaggatctgaaacttatagccctcattagaattagctagcatttgaattgaaatataataaaaagtcatgcattgtacacgtttgaattaacaatccccatcctctaatccaaaatattttaaaatcttcattttacagttggtggattcaaagtgggattggaccttcttgtagaatttgaattccgcacaactacaacgactggagttcttctggggatcagtagtcaaaaaatggatggaatgggtattgaaatgattgatgaaaaggtgagtgtcagcaatgcaaacatttctgatttcttcatgatattgttgatgtgtagatatcatccatgtgtgggaaactcgaatattttgaagcccggctgtattctttgttgggagaaagctaaattgtatgttttcatccttctggattacttcaatttgtgtatgttttcagcatgttgtaggccagtataaattttaaatgcattaattgtacagcaagccaatcgtgttgactaataatgaaccaaatagtttgagatctcgagttcttactgtgttgctataaacacactcttattctcctcttaaggaacacacagtctatgagactatggactccagtgggagaaaaggcagagaggtggatcatctaaaattagtctgcctcttttaacaggctaggcatctcttagaagccaaggtagccaactgacgcatcagtttctcaatttgtttaaaaaagcatccagctaccatttcaaaaaacagcaaatttataaaagtagtgtgtcagtttgataataattgataatcaaattctaaacacctctttcagccctgcattaagacaactttgcactataggcagcaggtaaacagagaagggaaaacaagaaatttcacaagttttctatttggttattaaataggaatcgtacttcaactcagttcacgtttccacccttagtgttgcctcccaagaagaaaaatcacacagtgacctaaaatagttttttcttgctttcttcctctttctgctcaattttcaaactgtcctccaacaaaggtaatataggaaaaaagatccaccagcttagaggtaaaaaggagtgaacaaataagtaacactcaatagttttaccaaattttcaaacatacttttactacatctttttcaagtaacatgctcttaagggcagttaccatcgatatgtcactatcatgtgcgtttctcaccaagctccttttacatgcaaaagcctgttatgcaaactccacccaatatagtaaacatttcattaataattacatcaatagagtttacaaacttttcacctatttacttgcatttttaatctttcttcttaagacttcatttcttttcttttaccttgtcgaatgtcttgccaaactgactaatgtttttagtgtttcaatatgtttcgtttcttcaccagcttcaaaagaattctgtcatctcaaatttcaggggcttttccacattactaaaaacagatttttctcatttagaccagaacttctagtctaagttcttcattgttaggaatttaactggccttctggctcaggtctttggcacctgtgacatgaaacgggctccaaaatgtaatttatgtaactctcaatcttgtatataaaatgaaatccatgaaggaaaaaaatataattaaaacatcaaaagtttaaaatttaaaaaatcctttactttgaatttgtaaaccaaattaatgagtcactttaaacaatatcttttaagaaaattttataaggttcagtcagaactctcacattctaaaaagacgtgaggtagaatttttccctgtgtacactaggtccttttcttgtcacctggcctcaaatttttctgaaagcagaattattaccagctttacgtatcttgcctattaactcccaacaatgccccaaagcaaagagcataatttgtggctcctggtgattagatttatactttaatttgtcaagttttaaaatttttttcaatatgcccagttacatccatttcaaatgattctggctgatgtctttcctagagacctgatcatttgtatgtgtgaaccatcatgatacttctttaatgaaaccatctgtgactgttctatttcctactttccagttgatgtttcatgtggacaatggtgcgggcagattcactgctgtctatgatgctggggttccagggcatttgtgtgatggacaatggcataaagtcactgccaacaagatcaaacaccgcattgagctcacagtcgatgggaaccaggtggaagcccaaagcccaaacccagcatctacatcagctgacacaaatgaccctgtgtttgttggaggcttcccaggtgagtgttggctaccccagcaacaatttctttgctctcttatgttactggttttgaaaacatttatatttacgtgtgtctaagaatgtgtgcttatgtgtacttgcttcctagctttagaatctgcttagaatctgcaccttacctaaaatttccagtgtgtaaaatgaacatattacttatataaaccacatgggactgaacttttcatgagagcccccaaagtttccttcgtggagagattgaagctggaggaaatgaatttggcttataaaagatatgaggcatttaacagcaattggagccaaacttggtgttctttctgatttttttaaaattaatataccagaggaatcaatcataaaatgttatggaacttatttcctcaagttctggaaatcattgggttaaacatagctaatttcccccttatgttattatagagtttatatttatattacaaagaaacgcaagcaataaatcctcattcagaatccttctctagcacattaaatatagcatgtgaactgtagagatttacctaaagtgcccataaacaagagtggccaacttgatgagaagtaagccaagtgcctcttaataagtactgtaataacatagcctcctggaatggtctttcatcattttgtcaagaggaacttttatccctgtttatataaagctcctttgctaaatgaaacaagcaaaatgtatattcagcaattgttgacagagcaatgttgatagaaatgcaatgggggcccaacgacagctcctctttccaaagtggcttctgtgttttaaaaagatcttttgcttcaatcaggataaattccaagatattatgaaggaggtaatgtacttctccattcagtctatgataatgggatcctaattaacacctagtaggcctactgaaacaagcacctctataataagaggaagattctacatgaatatccaacctacttaacctttagggatttatttttacaatgtaagaaagtgataaagtcaccttcaaaaagttctaagtaagtcagtacttaaaagtatttgatcaattgctttgtttcatgaagtaacattttacaattttaagtcacaactataaatttgttcatcccaaaccaagttatttcatgtcttaagatgtataattctagatgttttcatatgttataactattaaaaagttgaggctggacatggtggctcatgcctgtaatcccaacactttggaattacactttgggcatagatggggagatctcttgagcccaggagttggagagcagcctgggcaacacggcgaagggaggatcgcttgagcccaggaggttgaggctgcagtaagccttgattgcgccattgcactccagcctgggcaacagagcaagaacctgtctcaaaaaattttaagttgatctttctttctctacaattctattagtaaggctaaaaacaaaaccactaactttgcataaaacagcattccaatttaatctcaagctaacagttgactttgaaacatgctcttaatatttggtgcaggacatttcaaagctgagccctcttgcattgcctttttcagatgacctcaagcagtttggcctaacaaccagtattccgttccgaggttgcatcagatccctgaagctcaccaaaggcacaggcaagccactggaggttaattttgccaaggccctggaactgaggggcgttcaacctgtatcatgcccagccaactaataaaaataagtgtaaccccaggaagagtctgtcaaaacaagtatatcaagtaaaacaaacaaatatattttacctatatatgttaattaaactaatttgtgcatgtacatagaattctttctgtattcagatggtgctaattcagactccagactgaattttaattcaagttctttctcaagtctataaataatattaaactgattatttcattctaaataattgcctgttttgtgtgattttaaggataaaaggtaactggccataaattgttgagtttgcaacatgccctccagtcatctcaaggaaagagttcagatgtaatttatggaggcaattttttttaacttattcctatcaatacttcttctttcttttatcatcctttaccatgtatgacagctttggccttctgtccaagccactgacagcaagtgaatttggcatgtgtgattgggaggaaatcagttcccttactctatttatgaaagaattattagcaaatcattgtcctgacccaagttcattattagagagtttaactagccgtatgagtgaatagctttttatgctgaaggtagagggtatagaccagattcaggccagaaagcttaattacttgattttcttatttgataatgatttatgggctttggggagatgccaaaaccaagcttatgaatgacaaccaagcacacatttgatactacagtactaagaaagatttggggctctctaagcctacagtgaatatcacaatttacacctaggtggagaggaataatgctgaaatgcatttgtacttatcaggaaacaataaaccagaaacttaaaaggcatacttcattgagtcttttggagctgtaatttgacctaacaaattcattttctataaacgttctgtgttttgttctcctttaacccatgatttcagtcatcttcaaagagctctgtgagaagactggccttgattttattcaccagcttaaaaaggaaacgtttcatttgccatctttagtagacaatggttgcagtctaataattcagaacatgtaaaagaacaggaaactcctttctcctatggaaattttagcaacaaagaataatcctctctgacaatgttgttatccactaggggaaggaaggtgctgtttccaattgaggtgatggctgacatactcactatttcaccaccgtcctgttgcttaatacaatttgtacacacaactttattctacagaagcaattctcaagcttagctcagtgtttttaaaaaactgcctatgctttagaaaagtgcctagggagtttttaaaaatctagtacctggtccagtgattctgattttgtctaggacatagccagagcataatgattttttttttttttgagacagggtctcatgttgtcacccaggcaggagtgcaatggcaccatcttggctcactgcagcctcaacctccccagttcaagtgatcctcctgcctcactccccaagtagctgggactacaggtgggcaccaccacacccagctaatttttatatttttagtagagatgggtttcaccatgttgcccaggctggtctcgaactcctgagctcaagaaatctgcctgcctcagcctcccaaagtgctaggattactggcatgaaccactgtgcccagtcaagcatgaggattcttaaaaacattcccaggcaattctaatgtgttgtcaaggatgaacctaagaaaaataagcaatagggaaaggattccctatttaataaatggtgctgggaaaactggcaagccataagtagaaagctgaaactggatcccttccttacaccttatacaaaaattaattcaagatggattaaagacttaaacgttagacctaaaaccatacaaaccctagaagaaaacctaggcattaccattcaggacataggcatgggcaaggacttcatgtctaaaacaccaaaagcaatggcaacaaaagccaaaattgacaaatgggatctaattaaactaaagagcttctgcacagcaaaagaaactaccagcagagcgaacaggcaacctacagaatgggagaaaattttcgcaacctactcatctgacaaagggctaatatccagaatctacaatgaactcaaacaaatttacaagaaaaaaacaaccccatcaaaaagtgggcaaaggatatgaacagacacttctcagaaggagacatttatgcagccaaaagacacatgaaaaaatgctcatcatcactggccatcagagaaatgcaaatcaaaaccacaatgagataccatctcacaccagttagaatggcaatcattaaaaagtcaggaaacaacaggtgctggagaggatgtggagaaataggaacacttttacactgttggtgggactgtaaactagttcaaccattgtggaagtcagtgtggccattcctcagggatctagaactagaaataccatttgacccagccatcccattactgggtatatacccaaaggactataaatcatgctgctataaagacacatgcacatgtatgtttattgcggcactattcacaatagcaaagacttggaaccaacccaaatgtccaacaatgatagactggattaagcaaatgtggcacatatacaccatggaatagtatgcataaaaaatgaagagttcatgtcctttgtagggacatggatgaaactggaaatcatcattctcagtaaactatcacaaggacaaaaaaccaaacaacgcatgttctcactcatagatgggaattgaacaatgagaacacatggacacaggaaggggaacatcacactctggggactgttttggggtggggggaggggggagggatagcattaggagatagatatacctaatgttaaatgatgagttaatgggtgcagcacaccagcatggcacatgtatacatatgtaactaaccggcacattgtgcacatgtacccttaaacttaaagtataataataataaaaaaaagaaaaaaaaaggatgagaagcactattctaaaaagaaacattatcctccatgccaacaaagagttttatagtcatttgagaattctactattagctttgtcttggcaatttccacacccattaaaaataataatattataggccaggtgcagtagttcacacctgtaatcccagcactttggtcgctcaggcaggaggatcagtggaacccaggagtttgagaccagcctgggcaacatagggagaccctgtctctaccaaaaatttaaaaattagccaggcatagtggcatgcacctatagtcctagctactccaggaggttgatgcaggaagattgcttgagcctgggaggtcaaagctccagtgagctgatgattataccactgcactccagcctgggcaacagagcaagaccctgtctcaaatgaaagaaatatctttttatatcaaatattgaatctagtgaatttaatatataaaacattgaatctagtgaatatcttttaaccaaactttaagaaataaaactttttgaaaaccaatgtgttttaaaagtggaaacatacatctgcactaaacgctgacatgactttttgggcttaatctggacactgagtgggataaacaggaataaagatgttgggttccttagattaaaagctaaagcctttctttcttgagtcctgcacagaaagatatgtaacaaaacggaaagcaaaggcagttaaattggcactcctatcagaataaagtcctgcctcagtcaatttgtaggtagatgccttagaatgatagaatgatagaactggaagtgaattgagatcagcgaatacagtgattctcaagtctagctagatgtttaaagtgctttgggtgcttaaaaaatctacatttgggctgggcacagcagctcacgcctgtaatcccaacactctgggaggccaaggcaggaggatcacttaagcccaggagtttgagaccagcctgagccacacagtgagaccttagctctaaaaaaaaaaaaaaaaaaaaaaaaaaaaaaaaaaaaaaaaaaaaattagcctggtgtgttggtggtgcatgcctgtgtggtcccgactatttgggaagctgaggtgggaggttcacttgagcagggtaggttaaggctgcagtgagccagtgatcgtgacactatgctacagcctgggcaacaaagcaatatcctgtctcaaaaaagaaaaaaaaaattgacatctgggtgtcaccccagcccaattaaactataatctctgggtagggcccaggcattggcattttttaaaaatccccacttgattcaaatgtgaaaccaagactgaaaacccctgggctcctgtcacctccacattttatggggaggaactagaaggaactcaaggatattttgataactgtgctcaaagtcccaccttagtaaagtttcccaatgtagtccagacagttgcatctggatccaagcagaattcactgaattaggtttggacaaaacttgtcccatgcaaaattcatactccagagtgacccatgaatttggataaccaaaaattgtccacattttaaggtcagaaataaggacattttggttgggcacggtggctcacgcctgtaatcccagcactttgggaggctgaagcaggtggaccacctgaggtcaggagttcaagaccagcctggccaacatggtgaaaccccatctctactaacaatacaaaaattaaccaggtgtggtggcaggcacctgtaatctcagctactcgggaggctgaggcaggagaatcgcttgaacccaagaggcggaggttgcagtgagccaagatcgtgccactgcactccagcctgggcgacagagtgacaatctgtctcaaaaataaataaataaataataaataaggacgttttatgaaagggaaaagtttcttctctagtattttttaattaatttctgacctcaaaaatcaaattagttcttatcccaaaacaagataaaatatttcctctacccaaccttgtcccctcaatgatttcctcacctcctgccacccacagcaattatgaagaaagcagaagacttttcacttattttccaaacacccactcctaccaggttgtcagccttcttctttaaaaaggtgctttgcactttagaagaaaaacatttgtgaggggacttttattgaagttaccatg

SEQ ID NO: 5305 - DNA, 20 bp, Artificial Sequence
  Description of Artificial Sequence: Synthetic oligonucleotide
  Target: LAMA2; (-) strand; PAM type: NAAAAC; PAM sequence: AAAAAC
actcatccattcatctaatg

SEQ ID NO: 5306 - DNA, 20 bp, Artificial Sequence
  Description of Artificial Sequence: Synthetic oligonucleotide
  Target: LAMA2; (-) strand; PAM type: NAAAAC; PAM sequence: GAAAAC
gtgatatatttgtcacaact

SEQ ID NO: 5307 - DNA, 20 bp, Artificial Sequence
  Description of Artificial Sequence: Synthetic oligonucleotide
  Target: LAMA2; (-) strand; PAM type: NAAAAC; PAM sequence: CAAAAC
aatcctataatgttgtttta

SEQ ID NO: 5308 - DNA, 20 bp, Artificial Sequence
  Description of Artificial Sequence: Synthetic oligonucleotide
  Target: LAMA2; (-) strand; PAM type: NAAAAC; PAM sequence: CAAAAC
ggtatgtaattagcgctata

SEQ ID NO: 5309 - DNA, 20 bp, Artificial Sequence
  Description of Artificial Sequence: Synthetic oligonucleotide
  Target: LAMA2; (-) strand; PAM type: NAAAAC; PAM sequence: TAAAAC
attattataataaacaataa

SEQ ID NO: 5310 - DNA, 20 bp, Artificial Sequence
  Description of Artificial Sequence: Synthetic oligonucleotide
  Target: LAMA2; (-) strand; PAM type: NAAAAC; PAM sequence: CAAAAC
taaacaaacaaacaaaacaa

SEQ ID NO: 5311 - DNA, 20 bp, Artificial Sequence
  Description of Artificial Sequence: Synthetic oligonucleotide
  Target: LAMA2; (-) strand; PAM type: NAAAAC; PAM sequence: CAAAAC
gtagtgagtaaacaaacaaa

SEQ ID NO: 5312 - DNA, 20 bp, Artificial Sequence
  Description of Artificial Sequence: Synthetic oligonucleotide
  Target: LAMA2; (-) strand; PAM type: NAAAAC; PAM sequence: TAAAAC
tcagtggttctcataaggtt

SEQ ID NO: 5313 - DNA, 20 bp, Artificial Sequence
  Description of Artificial Sequence: Synthetic oligonucleotide
  Target: LAMA2; (-) strand; PAM type: NAAAAC; PAM sequence: TAAAAC
gcagtaaaggaagtgcaaaa

SEQ ID NO: 5314 - DNA, 20 bp, Artificial Sequence
  Description of Artificial Sequence: Synthetic oligonucleotide
  Target: LAMA2; (-) strand; PAM type: NAAAAC; PAM sequence: CAAAAC
acctcttgagaaaggcctgg

SEQ ID NO: 5315 - DNA, 20 bp, Artificial Sequence
  Description of Artificial Sequence: Synthetic oligonucleotide
  Target: LAMA2; (-) strand; PAM type: NAAAAC; PAM sequence: GAAAAC
ctgtaaaatccctacacatg

SEQ ID NO: 5316 - DNA, 20 bp, Artificial Sequence
  Description of Artificial Sequence: Synthetic oligonucleotide
  Target: LAMA2; (-) strand; PAM type: NAAAAC; PAM sequence: TAAAAC
aagttgaaaacaaagttctg

SEQ ID NO: 5317 - DNA, 20 bp, Artificial Sequence
  Description of Artificial Sequence: Synthetic oligonucleotide
  Target: LAMA2; (-) strand; PAM type: NAAAAC; PAM sequence: GAAAAC
gaaatcctgttttaaaagtt

SEQ ID NO: 5318 - DNA, 20 bp, Artificial Sequence
  Description of Artificial Sequence: Synthetic oligonucleotide
  Target: LAMA2; (-) strand; PAM type: NAAAAC; PAM sequence: AAAAAC
cgccattgccatgaaagaaa

SEQ ID NO: 5319 - DNA, 20 bp, Artificial Sequence
  Description of Artificial Sequence: Synthetic oligonucleotide
  Target: LAMA2; (-) strand; PAM type: NAAAAC; PAM sequence: TAAAAC
aggttaaacattttcatatt

SEQ ID NO: 5320 - DNA, 20 bp, Artificial Sequence
  Description of Artificial Sequence: Synthetic oligonucleotide
  Target: LAMA2; (-) strand; PAM type: NAAAAC; PAM sequence: TAAAAC
ttaagcagattcagcctcat

SEQ ID NO: 5321 - DNA, 20 bp, Artificial Sequence
  Description of Artificial Sequence: Synthetic oligonucleotide
  Target: LAMA2; (-) strand; PAM type: NAAAAC; PAM sequence: CAAAAC
gaagaaggataagtatactt

SEQ ID NO: 5322 - DNA, 20 bp, Artificial Sequence
  Description of Artificial Sequence: Synthetic oligonucleotide
  Target: LAMA2; (-) strand; PAM type: NAAAAC; PAM sequence: GAAAAC
caatggaacaacactaaaaa

SEQ ID NO: 5323 - DNA, 20 bp, Artificial Sequence
  Description of Artificial Sequence: Synthetic oligonucleotide
  Target: LAMA2; (-) strand; PAM type: NAAAAC; PAM sequence: GAAAAC
gaaaagttgatcatagccag

SEQ ID NO: 5324 - DNA, 20 bp, Artificial Sequence
  Description of Artificial Sequence: Synthetic oligonucleotide
  Target: LAMA2; (-) strand; PAM type: NAAAAC; PAM sequence: GAAAAC
aggtcagtgctagtataatc

SEQ ID NO: 5325 - DNA, 20 bp, Artificial Sequence
  Description of Artificial Sequence: Synthetic oligonucleotide
  Target: LAMA2; (-) strand; PAM type: NAAAAC; PAM sequence: AAAAAC
aagatttcaaagaaaaagta

SEQ ID NO: 5326 - DNA, 20 bp, Artificial Sequence
  Description of Artificial Sequence: Synthetic oligonucleotide
  Target: LAMA2; (-) strand; PAM type: NAAAAC; PAM sequence: GAAAAC
tattattcacaagaatatca

SEQ ID NO: 5327 - DNA, 20 bp, Artificial Sequence
  Description of Artificial Sequence: Synthetic oligonucleotide
  Target: LAMA2; (-) strand; PAM type: NAAAAC; PAM sequence: GAAAAC
accaagatagttgagtataa

SEQ ID NO: 5328 - DNA, 20 bp, Artificial Sequence
  Description of Artificial Sequence: Synthetic oligonucleotide
  Target: LAMA2; (-) strand; PAM type: NAAAAC; PAM sequence: AAAAAC
ttaaatcccagaagggattt

SEQ ID NO: 5329 - DNA, 20 bp, Artificial Sequence
  Description of Artificial Sequence: Synthetic oligonucleotide
  Target: LAMA2; (-) strand; PAM type: NAAAAC; PAM sequence: TAAAAC
attcatttatttaactctgt

SEQ ID NO: 5330 - DNA, 20 bp, Artificial Sequence
  Description of Artificial Sequence: Synthetic oligonucleotide
  Target: LAMA2; (-) strand; PAM type: NAAAAC; PAM sequence: AAAAAC
ttagtgcgtatttgagacaa

SEQ ID NO: 5331 - DNA, 20 bp, Artificial Sequence
  Description of Artificial Sequence: Synthetic oligonucleotide
  Target: LAMA2; (-) strand; PAM type: NAAAAC; PAM sequence: TAAAAC
atagaataagtttctgaatg

SEQ ID NO: 5332 - DNA, 20 bp, Artificial Sequence
  Description of Artificial Sequence: Synthetic oligonucleotide
  Target: LAMA2; (-) strand; PAM type: NAAAAC; PAM sequence: TAAAAC
taaagcttacaagtgattct

SEQ ID NO: 5333 - DNA, 20 bp, Artificial Sequence
  Description of Artificial Sequence: Synthetic oligonucleotide
  Target: LAMA2; (-) strand; PAM type: NAAAAC; PAM sequence: CAAAAC
aaaattgcattactatagtc

SEQ ID NO: 5334 - DNA, 20 bp, Artificial Sequence
  Description of Artificial Sequence: Synthetic oligonucleotide
  Target: LAMA2; (-) strand; PAM type: NAAAAC; PAM sequence: AAAAAC
cactcaagattacttaggag

SEQ ID NO: 5335 - DNA, 20 bp, Artificial Sequence
  Description of Artificial Sequence: Synthetic oligonucleotide
  Target: LAMA2; (-) strand; PAM type: NAAAAC; PAM sequence: GAAAAC
aagacaacaaaaatcaaaca

SEQ ID NO: 5336 - DNA, 20 bp, Artificial Sequence
  Description of Artificial Sequence: Synthetic oligonucleotide
  Target: LAMA2; (-) strand; PAM type: NAAAAC; PAM sequence: AAAAAC
tcaacaatgagattcctaga

SEQ ID NO: 5337 - DNA, 20 bp, Artificial Sequence
  Description of Artificial Sequence: Synthetic oligonucleotide
  Target: LAMA2; (-) strand; PAM type: NAAAAC; PAM sequence: GAAAAC
ctacccaagcagatgtcaat

SEQ ID NO: 5338 - DNA, 20 bp, Artificial Sequence
  Description of Artificial Sequence: Synthetic oligonucleotide
  Target: LAMA2; (-) strand; PAM type: NAAAAC; PAM sequence: CAAAAC
aacaaagaaagggggtggag

SEQ ID NO: 5339 - DNA, 20 bp, Artificial Sequence
  Description of Artificial Sequence: Synthetic oligonucleotide
  Target: LAMA2; (-) strand; PAM type: NAAAAC; PAM sequence: AAAAAC
gttaggagccactggggaaa

SEQ ID NO: 5340 - DNA, 20 bp, Artificial Sequence
  Description of Artificial Sequence: Synthetic oligonucleotide
  Target: LAMA2; (-) strand; PAM type: NAAAAC; PAM sequence: GAAAAC
gctatgtgtcatgggtcctt

SEQ ID NO: 5341 - DNA, 20 bp, Artificial Sequence
  Description of Artificial Sequence: Synthetic oligonucleotide
  Target: LAMA2; (-) strand; PAM type: NAAAAC; PAM sequence: GAAAAC
cacactgcagccaatctttt

SEQ ID NO: 5342 - DNA, 20 bp, Artificial Sequence
  Description of Artificial Sequence: Synthetic oligonucleotide
  Target: LAMA2; (-) strand; PAM type: NAAAAC; PAM sequence: AAAAAC
accacacactcccagaagaa

SEQ ID NO: 5343 - DNA, 20 bp, Artificial Sequence
  Description of Artificial Sequence: Synthetic oligonucleotide
  Target: LAMA2; (-) strand; PAM type: NAAAAC; PAM sequence: AAAAAC
tcctagactagacctgaggt

SEQ ID NO: 5344 - DNA, 20 bp, Artificial Sequence
  Description of Artificial Sequence: Synthetic oligonucleotide
  Target: LAMA2; (-) strand; PAM type: NAAAAC; PAM sequence: CAAAAC
tttaaatgctttagaaatca

SEQ ID NO: 5345 - DNA, 20 bp, Artificial Sequence
  Description of Artificial Sequence: Synthetic oligonucleotide
  Target: LAMA2; (-) strand; PAM type: NAAAAC; PAM sequence: CAAAAC
gttttaggttctcaacatta

SEQ ID NO: 5346 - DNA, 20 bp, Artificial Sequence
  Description of Artificial Sequence: Synthetic oligonucleotide
  Target: LAMA2; (-) strand; PAM type: NAAAAC; PAM sequence: TAAAAC
aagctatttttgcagaattt

SEQ ID NO: 5347 - DNA, 20 bp, Artificial Sequence
  Description of Artificial Sequence: Synthetic oligonucleotide
  Target: LAMA2; (-) strand; PAM type: NAAAAC; PAM sequence: AAAAAC
ttttctaaaaaatgtttcta

SEQ ID NO: 5348 - DNA, 20 bp, Artificial Sequence
  Description of Artificial Sequence: Synthetic oligonucleotide
  Target: LAMA2; (-) strand; PAM type: NAAAAC; PAM sequence: GAAAAC
atttctcaccgagcagatct

SEQ ID NO: 5349 - DNA, 20 bp, Artificial Sequence
  Description of Artificial Sequence: Synthetic oligonucleotide
  Target: LAMA2; (-) strand; PAM type: NAAAAC; PAM sequence: GAAAAC
aagctccagttgtccatgct

SEQ ID NO: 5350 - DNA, 20 bp, Artificial Sequence
  Description of Artificial Sequence: Synthetic oligonucleotide
  Target: LAMA2; (-) strand; PAM type: NAAAAC; PAM sequence: TAAAAC
atgaccacctctaatcacac

SEQ ID NO: 5351 - DNA, 20 bp, Artificial Sequence
  Description of Artificial Sequence: Synthetic oligonucleotide
  Target: LAMA2; (-) strand; PAM type: NAAAAC; PAM sequence: AAAAAC
atatccttagaggggaaaaa

SEQ ID NO: 5352 - DNA, 20 bp, Artificial Sequence
  Description of Artificial Sequence: Synthetic oligonucleotide
  Target: LAMA2; (-) strand; PAM type: NAAAAC; PAM sequence: GAAAAC
aaaaagaaacaaagaaaaat

SEQ ID NO: 5353 - DNA, 20 bp, Artificial Sequence
  Description of Artificial Sequence: Synthetic oligonucleotide
  Target: LAMA2; (-) strand; PAM type: NAAAAC; PAM sequence: TAAAAC
gaggccttgtgagtggtttt

SEQ ID NO: 5354 - DNA, 20 bp, Artificial Sequence
  Description of Artificial Sequence: Synthetic oligonucleotide
  Target: LAMA2; (-) strand; PAM type: NAAAAC; PAM sequence: CAAAAC
cagtaaggatacagtagtaa

SEQ ID NO: 5355 - DNA, 20 bp, Artificial Sequence
  Description of Artificial Sequence: Synthetic oligonucleotide
  Target: LAMA2; (-) strand; PAM type: NAAAAC; PAM sequence: AAAAAC
tctctaaaaacaacaacaac

SEQ ID NO: 5356 - DNA, 20 bp, Artificial Sequence
  Description of Artificial Sequence: Synthetic oligonucleotide
  Target: LAMA2; (-) strand; PAM type: NAAAAC; PAM sequence: AAAAAC
cagagggagaccctgtctct

SEQ ID NO: 5357 - DNA, 20 bp, Artificial Sequence
  Description of Artificial Sequence: Synthetic oligonucleotide
  Target: LAMA2; (-) strand; PAM type: NAAAAC; PAM sequence: GAAAAC
caattttcttttacaatcaa

SEQ ID NO: 5358 - DNA, 20 bp, Artificial Sequence
  Description of Artificial Sequence: Synthetic oligonucleotide
  Target: LAMA2; (-) strand; PAM type: NAAAAC; PAM sequence: TAAAAC
taaatcaatggcaatttctt

SEQ ID NO: 5359 - DNA, 20 bp, Artificial Sequence
  Description of Artificial Sequence: Synthetic oligonucleotide
  Target: LAMA2; (-) strand; PAM type: NAAAAC; PAM sequence: CAAAAC
atcaggcaatggcatttaaa

SEQ ID NO: 5360 - DNA, 20 bp, Artificial Sequence
  Description of Artificial Sequence: Synthetic oligonucleotide
  Target: LAMA2; (-) strand; PAM type: NAAAAC; PAM sequence: TAAAAC
gatcccagcagcaggcctct

SEQ ID NO: 5361 - DNA, 20 bp, Artificial Sequence
  Description of Artificial Sequence: Synthetic oligonucleotide
  Target: LAMA2; (-) strand; PAM type: NAAAAC; PAM sequence: CAAAAC
tctaagggctcctttgagcc

SEQ ID NO: 5362 - DNA, 20 bp, Artificial Sequence
  Description of Artificial Sequence: Synthetic oligonucleotide
  Target: LAMA2; (-) strand; PAM type: NAAAAC; PAM sequence: TAAAAC
aatggcggttctagaatgga

SEQ ID NO: 5363 - DNA, 20 bp, Artificial Sequence
  Description of Artificial Sequence: Synthetic oligonucleotide
  Target: LAMA2; (-) strand; PAM type: NAAAAC; PAM sequence: TAAAAC
gtagaattaaaaatgcttat

SEQ ID NO: 5364 - DNA, 20 bp, Artificial Sequence
  Description of Artificial Sequence: Synthetic oligonucleotide
  Target: LAMA2; (-) strand; PAM type: NAAAAC; PAM sequence: GAAAAC
aaattggcacataagcaaaa

SEQ ID NO: 5365 - DNA, 20 bp, Artificial Sequence
  Description of Artificial Sequence: Synthetic oligonucleotide
  Target: LAMA2; (-) strand; PAM type: NAAAAC; PAM sequence: AAAAAC
ataaaaaataaaaaaacgaa

SEQ ID NO: 5366 - DNA, 20 bp, Artificial Sequence
  Description of Artificial Sequence: Synthetic oligonucleotide
  Target: LAMA2; (-) strand; PAM type: NAAAAC; PAM sequence: AAAAAC
aaaataaaaataaaaaataa

SEQ ID NO: 5367 - DNA, 20 bp, Artificial Sequence
  Description of Artificial Sequence: Synthetic oligonucleotide
  Target: LAMA2; (-) strand; PAM type: NAAAAC; PAM sequence: TAAAAC
cacaatgtgcacatgtaccc

SEQ ID NO: 5368 - DNA, 20 bp, Artificial Sequence
  Description of Artificial Sequence: Synthetic oligonucleotide
  Target: LAMA2; (-) strand; PAM type: NAAAAC; PAM sequence: AAAAAC
agcaaactatcacaagaata

SEQ ID NO: 5369 - DNA, 20 bp, Artificial Sequence
  Description of Artificial Sequence: Synthetic oligonucleotide
  Target: LAMA2; (-) strand; PAM type: NAAAAC; PAM sequence: CAAAAC
gccatcagagaaatgcaaat

SEQ ID NO: 5370 - DNA, 20 bp, Artificial Sequence
  Description of Artificial Sequence: Synthetic oligonucleotide
  Target: LAMA2; (-) strand; PAM type: NAAAAC; PAM sequence: AAAAAC
agaagacatttatgcagcca

SEQ ID NO: 5371 - DNA, 20 bp, Artificial Sequence
  Description of Artificial Sequence: Synthetic oligonucleotide
  Target: LAMA2; (-) strand; PAM type: NAAAAC; PAM sequence: AAAAAC
ctcaaacaaatttacaagaa

SEQ ID NO: 5372 - DNA, 20 bp, Artificial Sequence
  Description of Artificial Sequence: Synthetic oligonucleotide
  Target: LAMA2; (-) strand; PAM type: NAAAAC; PAM sequence: TAAAAC
atgggtaaggacttcatgtc

SEQ ID NO: 5373 - DNA, 20 bp, Artificial Sequence
  Description of Artificial Sequence: Synthetic oligonucleotide
  Target: LAMA2; (-) strand; PAM type: NAAAAC; PAM sequence: GAAAAC
aaaccataaaaaccctagaa

SEQ ID NO: 5374 - DNA, 20 bp, Artificial Sequence
  Description of Artificial Sequence: Synthetic oligonucleotide
  Target: LAMA2; (-) strand; PAM type: NAAAAC; PAM sequence: AAAAAC
aacgttagacctaaaaccat

SEQ ID NO: 5375 - DNA, 20 bp, Artificial Sequence
  Description of Artificial Sequence: Synthetic oligonucleotide
  Target: LAMA2; (-) strand; PAM type: NAAAAC; PAM sequence: TAAAAC
aaagacttaaacgttagacc

SEQ ID NO: 5376 - DNA, 20 bp, Artificial Sequence
  Description of Artificial Sequence: Synthetic oligonucleotide
  Target: LAMA2; (-) strand; PAM type: NAAAAC; PAM sequence: AAAAAC
tgatctttgacaaacctgag

SEQ ID NO: 5377 - DNA, 20 bp, Artificial Sequence
  Description of Artificial Sequence: Synthetic oligonucleotide
  Target: LAMA2; (-) strand; PAM type: NAAAAC; PAM sequence: CAAAAC
aaacagcatggtactggtac

SEQ ID NO: 5378 - DNA, 20 bp, Artificial Sequence
  Description of Artificial Sequence: Synthetic oligonucleotide
  Target: LAMA2; (-) strand; PAM type: NAAAAC; PAM sequence: CAAAAC
tactacaagtctacagtaac

SEQ ID NO: 5379 - DNA, 20 bp, Artificial Sequence
  Description of Artificial Sequence: Synthetic oligonucleotide
  Target: LAMA2; (-) strand; PAM type: NAAAAC; PAM sequence: AAAAAC
cctttcttcacagaattgga

SEQ ID NO: 5380 - DNA, 20 bp, Artificial Sequence
  Description of Artificial Sequence: Synthetic oligonucleotide
  Target: LAMA2; (-) strand; PAM type: NAAAAC; PAM sequence: GAAAAC
acgacatgattgtatatcta

SEQ ID NO: 5381 - DNA, 20 bp, Artificial Sequence
  Description of Artificial Sequence: Synthetic oligonucleotide
  Target: LAMA2; (-) strand; PAM type: NAAAAC; PAM sequence: GAAAAC
aaactggaagcattcccttt

SEQ ID NO: 5382 - DNA, 20 bp, Artificial Sequence
  Description of Artificial Sequence: Synthetic oligonucleotide
  Target: LAMA2; (-) strand; PAM type: NAAAAC; PAM sequence: AAAAAC
gaatatcatactgaattggc

SEQ ID NO: 5383 - DNA, 20 bp, Artificial Sequence
  Description of Artificial Sequence: Synthetic oligonucleotide
  Target: LAMA2; (-) strand; PAM type: NAAAAC; PAM sequence: AAAAAC
attcaaccacacttcatgct

SEQ ID NO: 5384 - DNA, 20 bp, Artificial Sequence
  Description of Artificial Sequence: Synthetic oligonucleotide
  Target: LAMA2; (-) strand; PAM type: NAAAAC; PAM sequence: AAAAAC
atataaacagggccaaagac

SEQ ID NO: 5385 - DNA, 20 bp, Artificial Sequence
  Description of Artificial Sequence: Synthetic oligonucleotide
  Target: LAMA2; (-) strand; PAM type: NAAAAC; PAM sequence: CAAAAC
aatcctcaataaaatactgg

SEQ ID NO: 5386 - DNA, 20 bp, Artificial Sequence
  Description of Artificial Sequence: Synthetic oligonucleotide
  Target: LAMA2; (-) strand; PAM type: NAAAAC; PAM sequence: AAAAAC
ctgaaggaaatagagacaca

SEQ ID NO: 5387 - DNA, 20 bp, Artificial Sequence
  Description of Artificial Sequence: Synthetic oligonucleotide
  Target: LAMA2; (-) strand; PAM type: NAAAAC; PAM sequence: CAAAAC
tcaggattaagaatctcact

SEQ ID NO: 5388 - DNA, 20 bp, Artificial Sequence
  Description of Artificial Sequence: Synthetic oligonucleotide
  Target: LAMA2; (-) strand; PAM type: NAAAAC; PAM sequence: TAAAAC
gttgcaatcctagtctctga

SEQ ID NO: 5389 - DNA, 20 bp, Artificial Sequence
  Description of Artificial Sequence: Synthetic oligonucleotide
  Target: LAMA2; (-) strand; PAM type: NAAAAC; PAM sequence: GAAAAC
gaagatctaccaagcaaatg

SEQ ID NO: 5390 - DNA, 20 bp, Artificial Sequence
  Description of Artificial Sequence: Synthetic oligonucleotide
  Target: LAMA2; (-) strand; PAM type: NAAAAC; PAM sequence: GAAAAC
gggagaatgaaaccaagttg

SEQ ID NO: 5391 - DNA, 20 bp, Artificial Sequence
  Description of Artificial Sequence: Synthetic oligonucleotide
  Target: LAMA2; (-) strand; PAM type: NAAAAC; PAM sequence: GAAAAC
ttaaaggagctgatggagct

SEQ ID NO: 5392 - DNA, 20 bp, Artificial Sequence
  Description of Artificial Sequence: Synthetic oligonucleotide
  Target: LAMA2; (-) strand; PAM type: NAAAAC; PAM sequence: GAAAAC
aaaccaaaggcaaagaagtt

SEQ ID NO: 5393 - DNA, 20 bp, Artificial Sequence
  Description of Artificial Sequence: Synthetic oligonucleotide
  Target: LAMA2; (-) strand; PAM type: NAAAAC; PAM sequence: AAAAAC
atggggaaaaaacagaacag

SEQ ID NO: 5394 - DNA, 20 bp, Artificial Sequence
  Description of Artificial Sequence: Synthetic oligonucleotide
  Target: LAMA2; (-) strand; PAM type: NAAAAC; PAM sequence: AAAAAC
taaaaccacaaagatgggga

SEQ ID NO: 5395 - DNA, 20 bp, Artificial Sequence
  Description of Artificial Sequence: Synthetic oligonucleotide
  Target: LAMA2; (-) strand; PAM type: NAAAAC; PAM sequence: TAAAAC
catcaaagaccaaaagtaga

SEQ ID NO: 5396 - DNA, 20 bp, Artificial Sequence
  Description of Artificial Sequence: Synthetic oligonucleotide
  Target: LAMA2; (-) strand; PAM type: NAAAAC; PAM sequence: GAAAAC
agggtcctgtctgttagaag

SEQ ID NO: 5397 - DNA, 20 bp, Artificial Sequence
  Description of Artificial Sequence: Synthetic oligonucleotide
  Target: LAMA2; (-) strand; PAM type: NAAAAC; PAM sequence: AAAAAC
gcgcctttccgacgggctta

SEQ ID NO: 5398 - DNA, 20 bp, Artificial Sequence
  Description of Artificial Sequence: Synthetic oligonucleotide
  Target: LAMA2; (-) strand; PAM type: NAAAAC; PAM sequence: AAAAAC
catacatttcttatgtgtaa

SEQ ID NO: 5399 - DNA, 20 bp, Artificial Sequence
  Description of Artificial Sequence: Synthetic oligonucleotide
  Target: LAMA2; (-) strand; PAM type: NAAAAC; PAM sequence: AAAAAC
gctgtggaagaagacagcaa

SEQ ID NO: 5400 - DNA, 20 bp, Artificial Sequence
  Description of Artificial Sequence: Synthetic oligonucleotide
  Target: LAMA2; (-) strand; PAM type: NAAAAC; PAM sequence: AAAAAC
agcaaaatattgatggatgc

SEQ ID NO: 5401 - DNA, 20 bp, Artificial Sequence
  Description of Artificial Sequence: Synthetic oligonucleotide
  Target: LAMA2; (-) strand; PAM type: NAAAAC; PAM sequence: AAAAAC
caactttattcatgataatt

SEQ ID NO: 5402 - DNA, 20 bp, Artificial Sequence
  Description of Artificial Sequence: Synthetic oligonucleotide
  Target: LAMA2; (-) strand; PAM type: NAAAAC; PAM sequence: GAAAAC
cccagataaacatgacaaat

SEQ ID NO: 5403 - DNA, 20 bp, Artificial Sequence
  Description of Artificial Sequence: Synthetic oligonucleotide
  Target: LAMA2; (-) strand; PAM type: NAAAAC; PAM sequence: GAAAAC
taagatcatgccttcattta

SEQ ID NO: 5404 - DNA, 20 bp, Artificial Sequence
  Description of Artificial Sequence: Synthetic oligonucleotide
  Target: LAMA2; (-) strand; PAM type: NAAAAC; PAM sequence: TAAAAC
tttgccagaaatgtaaaaaa

SEQ ID NO: 5405 - DNA, 20 bp, Artificial Sequence
  Description of Artificial Sequence: Synthetic oligonucleotide
  Target: LAMA2; (-) strand; PAM type: NAAAAC; PAM sequence: AAAAAC
tttctacttccccagaatgt

SEQ ID NO: 5406 - DNA, 20 bp, Artificial Sequence
  Description of Artificial Sequence: Synthetic oligonucleotide
  Target: LAMA2; (-) strand; PAM type: NAAAAC; PAM sequence: CAAAAC
catcgaaattctcttctgtt

SEQ ID NO: 5407 - DNA, 20 bp, Artificial Sequence
  Description of Artificial Sequence: Synthetic oligonucleotide
  Target: LAMA2; (-) strand; PAM type: NAAAAC; PAM sequence: TAAAAC
aaatgcccatagtcagtaag

SEQ ID NO: 5408 - DNA, 20 bp, Artificial Sequence
  Description of Artificial Sequence: Synthetic oligonucleotide
  Target: LAMA2; (-) strand; PAM type: NAAAAC; PAM sequence: TAAAAC
gtttttgggagttgtgacag

SEQ ID NO: 5409 - DNA, 20 bp, Artificial Sequence
  Description of Artificial Sequence: Synthetic oligonucleotide
  Target: LAMA2; (-) strand; PAM type: NAAAAC; PAM sequence: CAAAAC
aatgtctgagtgaacattta

SEQ ID NO: 5410 - DNA, 20 bp, Artificial Sequence
  Description of Artificial Sequence: Synthetic oligonucleotide
  Target: LAMA2; (-) strand; PAM type: NAAAAC; PAM sequence: GAAAAC
ttaaatatttgaatttcaat

SEQ ID NO: 5411 - DNA, 20 bp, Artificial Sequence
  Description of Artificial Sequence: Synthetic oligonucleotide
  Target: LAMA2; (-) strand; PAM type: NAAAAC; PAM sequence: TAAAAC
acgccagttgtttcagttgc

SEQ ID NO: 5412 - DNA, 20 bp, Artificial Sequence
  Description of Artificial Sequence: Synthetic oligonucleotide
  Target: LAMA2; (-) strand; PAM type: NAAAAC; PAM sequence: TAAAAC
cttatccaattcattccagt

SEQ ID NO: 5413 - DNA, 20 bp, Artificial Sequence
  Description of Artificial Sequence: Synthetic oligonucleotide
  Target: LAMA2; (-) strand; PAM type: NAAAAC; PAM sequence: AAAAAC
caaggtagatatggtggaat

SEQ ID NO: 5414 - DNA, 20 bp, Artificial Sequence
  Description of Artificial Sequence: Synthetic oligonucleotide
  Target: LAMA2; (-) strand; PAM type: NAAAAC; PAM sequence: TAAAAC
tgaggttaataggtcatata

SEQ ID NO: 5415 - DNA, 20 bp, Artificial Sequence
  Description of Artificial Sequence: Synthetic oligonucleotide
  Target: LAMA2; (-) strand; PAM type: NAAAAC; PAM sequence: AAAAAC
aatctttcactcacacacag

SEQ ID NO: 5416 - DNA, 20 bp, Artificial Sequence
  Description of Artificial Sequence: Synthetic oligonucleotide
  Target: LAMA2; (-) strand; PAM type: NAAAAC; PAM sequence: GAAAAC
tctcaaagagagaaatagaa

SEQ ID NO: 5417 - DNA, 20 bp, Artificial Sequence
  Description of Artificial Sequence: Synthetic oligonucleotide
  Target: LAMA2; (-) strand; PAM type: NAAAAC; PAM sequence: TAAAAC
gtaagttatacattaaagtt

SEQ ID NO: 5418 - DNA, 20 bp, Artificial Sequence
  Description of Artificial Sequence: Synthetic oligonucleotide
  Target: LAMA2; (-) strand; PAM type: NAAAAC; PAM sequence: AAAAAC
aataataataaaaaaaaaaa

SEQ ID NO: 5419 - DNA, 20 bp, Artificial Sequence
  Description of Artificial Sequence: Synthetic oligonucleotide
  Target: LAMA2; (-) strand; PAM type: NAAAAC; PAM sequence: TAAAAC
cacattgtgcacatgtaccc

SEQ ID NO: 5420 - DNA, 20 bp, Artificial Sequence
  Description of Artificial Sequence: Synthetic oligonucleotide
  Target: LAMA2; (-) strand; PAM type: NAAAAC; PAM sequence: AAAAAC
agtaaactatcacaaggaca

SEQ ID NO: 5421 - DNA, 20 bp, Artificial Sequence
  Description of Artificial Sequence: Synthetic oligonucleotide
  Target: LAMA2; (-) strand; PAM type: NAAAAC; PAM sequence: CAAAAC
gccatcagagaaatgcaaat

SEQ ID NO: 5422 - DNA, 20 bp, Artificial Sequence
  Description of Artificial Sequence: Synthetic oligonucleotide
  Target: LAMA2; (-) strand; PAM type: NAAAAC; PAM sequence: AAAAAC
ctcaaacaaatttacaagaa

SEQ ID NO: 5423 - DNA, 20 bp, Artificial Sequence
  Description of Artificial Sequence: Synthetic oligonucleotide
  Target: LAMA2; (-) strand; PAM type: NAAAAC; PAM sequence: TAAAAC
atgggcaaagacttcatgtc

SEQ ID NO: 5424 - DNA, 20 bp, Artificial Sequence
  Description of Artificial Sequence: Synthetic oligonucleotide
  Target: LAMA2; (-) strand; PAM type: NAAAAC; PAM sequence: GAAAAC
aaaccataaaaacactagaa

SEQ ID NO: 5425 - DNA, 20 bp, Artificial Sequence
  Description of Artificial Sequence: Synthetic oligonucleotide
  Target: LAMA2; (-) strand; PAM type: NAAAAC; PAM sequence: AAAAAC
aacgttagacctaaaaccat

SEQ ID NO: 5426 - DNA, 20 bp, Artificial Sequence
  Description of Artificial Sequence: Synthetic oligonucleotide
  Target: LAMA2; (-) strand; PAM type: NAAAAC; PAM sequence: TAAAAC
aaagaattaaacgttagacc

SEQ ID NO: 5427 - DNA, 20 bp, Artificial Sequence
  Description of Artificial Sequence: Synthetic oligonucleotide
  Target: LAMA2; (-) strand; PAM type: NAAAAC; PAM sequence: GAAAAC
tatttaataaatggtgctgg

SEQ ID NO: 5428 - DNA, 20 bp, Artificial Sequence
  Description of Artificial Sequence: Synthetic oligonucleotide
  Target: LAMA2; (-) strand; PAM type: NAAAAC; PAM sequence: AAAAAC
tgatctttgacaaacctgag

SEQ ID NO: 5429 - DNA, 20 bp, Artificial Sequence
  Description of Artificial Sequence: Synthetic oligonucleotide
  Target: LAMA2; (-) strand; PAM type: NAAAAC; PAM sequence: CAAAAC
aaacagcatggtactggtac

SEQ ID NO: 5430 - DNA, 20 bp, Artificial Sequence
  Description of Artificial Sequence: Synthetic oligonucleotide
  Target: LAMA2; (-) strand; PAM type: NAAAAC; PAM sequence: CAAAAC
tactacaaggctacagtaac

SEQ ID NO: 5431 - DNA, 20 bp, Artificial Sequence
  Description of Artificial Sequence: Synthetic oligonucleotide
  Target: LAMA2; (-) strand; PAM type: NAAAAC; PAM sequence: AAAAAC
actttcttcacagagttgga

SEQ ID NO: 5432 - DNA, 20 bp, Artificial Sequence
  Description of Artificial Sequence: Synthetic oligonucleotide
  Target: LAMA2; (-) strand; PAM type: NAAAAC; PAM sequence: TAAAAC
tgaccacaaactaggtggct

SEQ ID NO: 5433 - DNA, 20 bp, Artificial Sequence
  Description of Artificial Sequence: Synthetic oligonucleotide
  Target: LAMA2; (-) strand; PAM type: NAAAAC; PAM sequence: CAAAAC
ctgataatttaattgatact

SEQ ID NO: 5434 - DNA, 20 bp, Artificial Sequence
  Description of Artificial Sequence: Synthetic oligonucleotide
  Target: LAMA2; (-) strand; PAM type: NAAAAC; PAM sequence: CAAAAC
ccagaatgcttttcatcttg

SEQ ID NO: 5435 - DNA, 20 bp, Artificial Sequence
  Description of Artificial Sequence: Synthetic oligonucleotide
  Target: LAMA2; (-) strand; PAM type: NAAAAC; PAM sequence: GAAAAC
aagaacagactcaaaactca

SEQ ID NO: 5436 - DNA, 20 bp, Artificial Sequence
  Description of Artificial Sequence: Synthetic oligonucleotide
  Target: LAMA2; (-) strand; PAM type: NAAAAC; PAM sequence: CAAAAC
aaagaagtcaagaacagact

SEQ ID NO: 5437 - DNA, 20 bp, Artificial Sequence
  Description of Artificial Sequence: Synthetic oligonucleotide
  Target: LAMA2; (-) strand; PAM type: NAAAAC; PAM sequence: TAAAAC
acgttatatctgatgaatac

SEQ ID NO: 5438 - DNA, 20 bp, Artificial Sequence
  Description of Artificial Sequence: Synthetic oligonucleotide
  Target: LAMA2; (-) strand; PAM type: NAAAAC; PAM sequence: CAAAAC
cttgctcgatggtttatacc

SEQ ID NO: 5439 - DNA, 20 bp, Artificial Sequence
  Description of Artificial Sequence: Synthetic oligonucleotide
  Target: LAMA2; (-) strand; PAM type: NAAAAC; PAM sequence: CAAAAC
ttgaagtccatttaataggt

SEQ ID NO: 5440 - DNA, 20 bp, Artificial Sequence
  Description of Artificial Sequence: Synthetic oligonucleotide
  Target: LAMA2; (-) strand; PAM type: NAAAAC; PAM sequence: AAAAAC
aataataattaattgtgaca

SEQ ID NO: 5441 - DNA, 20 bp, Artificial Sequence
  Description of Artificial Sequence: Synthetic oligonucleotide
  Target: LAMA2; (-) strand; PAM type: NAAAAC; PAM sequence: GAAAAC
gagtttttggatctgtacgg

SEQ ID NO: 5442 - DNA, 20 bp, Artificial Sequence
  Description of Artificial Sequence: Synthetic oligonucleotide
  Target: LAMA2; (-) strand; PAM type: NAAAAC; PAM sequence: TAAAAC
gcgaattatgcactggcttg

SEQ ID NO: 5443 - DNA, 20 bp, Artificial Sequence
  Description of Artificial Sequence: Synthetic oligonucleotide
  Target: LAMA2; (-) strand; PAM type: NAAAAC; PAM sequence: AAAAAC
tcgttgtgatttctgaagaa

SEQ ID NO: 5444 - DNA, 20 bp, Artificial Sequence
  Description of Artificial Sequence: Synthetic oligonucleotide
  Target: LAMA2; (-) strand; PAM type: NAAAAC; PAM sequence: CAAAAC
aattgtttaaaaactgaagt

SEQ ID NO: 5445 - DNA, 20 bp, Artificial Sequence
  Description of Artificial Sequence: Synthetic oligonucleotide
  Target: LAMA2; (-) strand; PAM type: NAAAAC; PAM sequence: AAAAAC
tttatttgtttaaattgttt

SEQ ID NO: 5446 - DNA, 20 bp, Artificial Sequence
  Description of Artificial Sequence: Synthetic oligonucleotide
  Target: LAMA2; (-) strand; PAM type: NAAAAC; PAM sequence: TAAAAC
taatgaacaatcattacatt

SEQ ID NO: 5447 - DNA, 20 bp, Artificial Sequence
  Description of Artificial Sequence: Synthetic oligonucleotide
  Target: LAMA2; (-) strand; PAM type: NAAAAC; PAM sequence: AAAAAC
gtgagataagccacacatag

SEQ ID NO: 5448 - DNA, 20 bp, Artificial Sequence
  Description of Artificial Sequence: Synthetic oligonucleotide
  Target: LAMA2; (-) strand; PAM type: NAAAAC; PAM sequence: GAAAAC
aaataggcatagccactatg

SEQ ID NO: 5449 - DNA, 20 bp, Artificial Sequence
  Description of Artificial Sequence: Synthetic oligonucleotide
  Target: LAMA2; (-) strand; PAM type: NAAAAC; PAM sequence: CAAAAC
atcatcagggaaatacaaat

SEQ ID NO: 5450 - DNA, 20 bp, Artificial Sequence
  Description of Artificial Sequence: Synthetic oligonucleotide
  Target: LAMA2; (-) strand; PAM type: NAAAAC; PAM sequence: GAAAAC
ttcatacaactcaatagcaa

SEQ ID NO: 5451 - DNA, 20 bp, Artificial Sequence
  Description of Artificial Sequence: Synthetic oligonucleotide
  Target: LAMA2; (-) strand; PAM type: NAAAAC; PAM sequence: AAAAAC
aagtgtaactgcagcaaact

SEQ ID NO: 5452 - DNA, 20 bp, Artificial Sequence
  Description of Artificial Sequence: Synthetic oligonucleotide
  Target: LAMA2; (-) strand; PAM type: NAAAAC; PAM sequence: AAAAAC
gaagcacaggcaatgaaagc

SEQ ID NO: 5453 - DNA, 20 bp, Artificial Sequence
  Description of Artificial Sequence: Synthetic oligonucleotide
  Target: LAMA2; (-) strand; PAM type: NAAAAC; PAM sequence: TAAAAC
ctaatctttgactaggccat

SEQ ID NO: 5454 - DNA, 20 bp, Artificial Sequence
  Description of Artificial Sequence: Synthetic oligonucleotide
  Target: LAMA2; (-) strand; PAM type: NAAAAC; PAM sequence: AAAAAC
aaacagtgtgatagtgctat

SEQ ID NO: 5455 - DNA, 20 bp, Artificial Sequence
  Description of Artificial Sequence: Synthetic oligonucleotide
  Target: LAMA2; (-) strand; PAM type: NAAAAC; PAM sequence: CAAAAC
atatacaaagccatggtaat

SEQ ID NO: 5456 - DNA, 20 bp, Artificial Sequence
  Description of Artificial Sequence: Synthetic oligonucleotide
  Target: LAMA2; (-) strand; PAM type: NAAAAC; PAM sequence: AAAAAC
aaaaagaaagaaaatgtaga

SEQ ID NO: 5457 - DNA, 20 bp, Artificial Sequence
  Description of Artificial Sequence: Synthetic oligonucleotide
  Target: LAMA2; (-) strand; PAM type: NAAAAC; PAM sequence: CAAAAC
gaccagcctgtccaacatag

SEQ ID NO: 5458 - DNA, 20 bp, Artificial Sequence
  Description of Artificial Sequence: Synthetic oligonucleotide
  Target: LAMA2; (-) strand; PAM type: NAAAAC; PAM sequence: GAAAAC
aggtgaaagatctgtacact

SEQ ID NO: 5459 - DNA, 20 bp, Artificial Sequence
  Description of Artificial Sequence: Synthetic oligonucleotide
  Target: LAMA2; (-) strand; PAM type: NAAAAC; PAM sequence: GAAAAC
agcaaaatatcacaaggaca

SEQ ID NO: 5460 - DNA, 20 bp, Artificial Sequence
  Description of Artificial Sequence: Synthetic oligonucleotide
  Target: LAMA2; (-) strand; PAM type: NAAAAC; PAM sequence: TAAAAC
gaagggggaagagcccctta

SEQ ID NO: 5461 - DNA, 20 bp, Artificial Sequence
  Description of Artificial Sequence: Synthetic oligonucleotide
  Target: LAMA2; (-) strand; PAM type: NAAAAC; PAM sequence: AAAAAC
tattaagtggaaaatttcag

SEQ ID NO: 5462 - DNA, 20 bp, Artificial Sequence
  Description of Artificial Sequence: Synthetic oligonucleotide
  Target: LAMA2; (-) strand; PAM type: NAAAAC; PAM sequence: AAAAAC
cctcaaggaaataggaaaaa

SEQ ID NO: 5463 - DNA, 20 bp, Artificial Sequence
  Description of Artificial Sequence: Synthetic oligonucleotide
  Target: LAMA2; (-) strand; PAM type: NAAAAC; PAM sequence: CAAAAC
aaaataacaatacaacacac

SEQ ID NO: 5464 - DNA, 20 bp, Artificial Sequence
  Description of Artificial Sequence: Synthetic oligonucleotide
  Target: LAMA2; (-) strand; PAM type: NAAAAC; PAM sequence: TAAAAC
ctagcactctaaggacctca

SEQ ID NO: 5465 - DNA, 20 bp, Artificial Sequence
  Description of Artificial Sequence: Synthetic oligonucleotide
  Target: LAMA2; (-) strand; PAM type: NAAAAC; PAM sequence: AAAAAC
cgtctaaaacatcggacaat

SEQ ID NO: 5466 - DNA, 20 bp, Artificial Sequence
  Description of Artificial Sequence: Synthetic oligonucleotide
  Target: LAMA2; (-) strand; PAM type: NAAAAC; PAM sequence: TAAAAC
actcctataactacgccgtc

SEQ ID NO: 5467 - DNA, 20 bp, Artificial Sequence
  Description of Artificial Sequence: Synthetic oligonucleotide
  Target: LAMA2; (-) strand; PAM type: NAAAAC; PAM sequence: CAAAAC
caaaaccaagcaaaaattaa

SEQ ID NO: 5468 - DNA, 20 bp, Artificial Sequence
  Description of Artificial Sequence: Synthetic oligonucleotide
  Target: LAMA2; (-) strand; PAM type: NAAAAC; PAM sequence: CAAAAC
tacaaactgatgtctacaat

SEQ ID NO: 5469 - DNA, 20 bp, Artificial Sequence
  Description of Artificial Sequence: Synthetic oligonucleotide
  Target: LAMA2; (-) strand; PAM type: NAAAAC; PAM sequence: CAAAAC
atgaaaaggagtttgccaag

SEQ ID NO: 5470 - DNA, 20 bp, Artificial Sequence
  Description of Artificial Sequence: Synthetic oligonucleotide
  Target: LAMA2; (-) strand; PAM type: NAAAAC; PAM sequence: AAAAAC
tatgaacaaaacataacttg

SEQ ID NO: 5471 - DNA, 20 bp, Artificial Sequence
  Description of Artificial Sequence: Synthetic oligonucleotide
  Target: LAMA2; (-) strand; PAM type: NAAAAC; PAM sequence: CAAAAC
aaaaaaaaatccattatgaa

SEQ ID NO: 5472 - DNA, 20 bp, Artificial Sequence
  Description of Artificial Sequence: Synthetic oligonucleotide
  Target: LAMA2; (-) strand; PAM type: NAAAAC; PAM sequence: GAAAAC
gaaggaacagaacacattca

SEQ ID NO: 5473 - DNA, 20 bp, Artificial Sequence
  Description of Artificial Sequence: Synthetic oligonucleotide
  Target: LAMA2; (-) strand; PAM type: NAAAAC; PAM sequence: GAAAAC
attataattgcaattatact

SEQ ID NO: 5474 - DNA, 20 bp, Artificial Sequence
  Description of Artificial Sequence: Synthetic oligonucleotide
  Target: LAMA2; (-) strand; PAM type: NAAAAC; PAM sequence: AAAAAC
aaagagggaaagatggtaag

SEQ ID NO: 5475 - DNA, 20 bp, Artificial Sequence
  Description of Artificial Sequence: Synthetic oligonucleotide
  Target: LAMA2; (-) strand; PAM type: NAAAAC; PAM sequence: TAAAAC
taaactaatattctgcttat

SEQ ID NO: 5476 - DNA, 20 bp, Artificial Sequence
  Description of Artificial Sequence: Synthetic oligonucleotide
  Target: LAMA2; (-) strand; PAM type: NAAAAC; PAM sequence: AAAAAC
ctaactgcacggtgcatttg

SEQ ID NO: 5477 - DNA, 20 bp, Artificial Sequence
  Description of Artificial Sequence: Synthetic oligonucleotide
  Target: LAMA2; (-) strand; PAM type: NAAAAC; PAM sequence: AAAAAC
ataatagacaggatgatgga

SEQ ID NO: 5478 - DNA, 20 bp, Artificial Sequence
  Description of Artificial Sequence: Synthetic oligonucleotide
  Target: LAMA2; (-) strand; PAM type: NAAAAC; PAM sequence: AAAAAC
attttaaaagctcttgagta

SEQ ID NO: 5479 - DNA, 20 bp, Artificial Sequence
  Description of Artificial Sequence: Synthetic oligonucleotide
  Target: LAMA2; (-) strand; PAM type: NAAAAC; PAM sequence: GAAAAC
tacagaagcatcaactagaa

SEQ ID NO: 5480 - DNA, 20 bp, Artificial Sequence
  Description of Artificial Sequence: Synthetic oligonucleotide
  Target: LAMA2; (-) strand; PAM type: NAAAAC; PAM sequence: TAAAAC
agtttttgatcacacagaaa

SEQ ID NO: 5481 - DNA, 20 bp, Artificial Sequence
  Description of Artificial Sequence: Synthetic oligonucleotide
  Target: LAMA2; (-) strand; PAM type: NAAAAC; PAM sequence: CAAAAC
gatcagcttgggcaacacag

SEQ ID NO: 5482 - DNA, 20 bp, Artificial Sequence
  Description of Artificial Sequence: Synthetic oligonucleotide
  Target: LAMA2; (-) strand; PAM type: NAAAAC; PAM sequence: AAAAAC
ctgataagttagcaaacgga

SEQ ID NO: 5483 - DNA, 20 bp, Artificial Sequence
  Description of Artificial Sequence: Synthetic oligonucleotide
  Target: LAMA2; (-) strand; PAM type: NAAAAC; PAM sequence: GAAAAC
tgatattttctcagatattt

SEQ ID NO: 5484 - DNA, 20 bp, Artificial Sequence
  Description of Artificial Sequence: Synthetic oligonucleotide
  Target: LAMA2; (-) strand; PAM type: NAAAAC; PAM sequence: TAAAAC
attgaaataactgctcttgg

SEQ ID NO: 5485 - DNA, 20 bp, Artificial Sequence
  Description of Artificial Sequence: Synthetic oligonucleotide
  Target: LAMA2; (-) strand; PAM type: NAAAAC; PAM sequence: TAAAAC
tttcatctacatgccattat

SEQ ID NO: 5486 - DNA, 20 bp, Artificial Sequence
  Description of Artificial Sequence: Synthetic oligonucleotide
  Target: LAMA2; (-) strand; PAM type: NAAAAC; PAM sequence: GAAAAC
ttccttttgagtagcttgaa

SEQ ID NO: 5487 - DNA, 20 bp, Artificial Sequence
  Description of Artificial Sequence: Synthetic oligonucleotide
  Target: LAMA2; (-) strand; PAM type: NAAAAC; PAM sequence: TAAAAC
ttatcacaaacgtagtgact

SEQ ID NO: 5488 - DNA, 20 bp, Artificial Sequence
  Description of Artificial Sequence: Synthetic oligonucleotide
  Target: LAMA2; (-) strand; PAM type: NAAAAC; PAM sequence: GAAAAC
tagcagagaatcatcaataa

SEQ ID NO: 5489 - DNA, 20 bp, Artificial Sequence
  Description of Artificial Sequence: Synthetic oligonucleotide
  Target: LAMA2; (-) strand; PAM type: NAAAAC; PAM sequence: GAAAAC
tgagcttagtcttaaaaacg

SEQ ID NO: 5490 - DNA, 20 bp, Artificial Sequence
  Description of Artificial Sequence: Synthetic oligonucleotide
  Target: LAMA2; (-) strand; PAM type: NAAAAC; PAM sequence: AAAAAC
tgacccttgagcttagtctt

SEQ ID NO: 5491 - DNA, 20 bp, Artificial Sequence
  Description of Artificial Sequence: Synthetic oligonucleotide
  Target: LAMA2; (-) strand; PAM type: NAAAAC; PAM sequence: TAAAAC
acacacaatctcatctgaga

SEQ ID NO: 5492 - DNA, 20 bp, Artificial Sequence
  Description of Artificial Sequence: Synthetic oligonucleotide
  Target: LAMA2; (-) strand; PAM type: NAAAAC; PAM sequence: AAAAAC
tgagtcatttctgcttccct

SEQ ID NO: 5493 - DNA, 20 bp, Artificial Sequence
  Description of Artificial Sequence: Synthetic oligonucleotide
  Target: LAMA2; (-) strand; PAM type: NAAAAC; PAM sequence: AAAAAC
tcaggttagggaacaaactg

SEQ ID NO: 5494 - DNA, 20 bp, Artificial Sequence
  Description of Artificial Sequence: Synthetic oligonucleotide
  Target: LAMA2; (-) strand; PAM type: NAAAAC; PAM sequence: AAAAAC
ttacaaaagacttgtgaaat

SEQ ID NO: 5495 - DNA, 20 bp, Artificial Sequence
  Description of Artificial Sequence: Synthetic oligonucleotide
  Target: LAMA2; (-) strand; PAM type: NAAAAC; PAM sequence: TAAAAC
taaatatgtctacaaagttt

SEQ ID NO: 5496 - DNA, 20 bp, Artificial Sequence
  Description of Artificial Sequence: Synthetic oligonucleotide
  Target: LAMA2; (-) strand; PAM type: NAAAAC; PAM sequence: TAAAAC
tcaaatcgtctagttaaaat

SEQ ID NO: 5497 - DNA, 20 bp, Artificial Sequence
  Description of Artificial Sequence: Synthetic oligonucleotide
  Target: LAMA2; (-) strand; PAM type: NAAAAC; PAM sequence: GAAAAC
tattcccaatttacagacaa

SEQ ID NO: 5498 - DNA, 20 bp, Artificial Sequence
  Description of Artificial Sequence: Synthetic oligonucleotide
  Target: LAMA2; (-) strand; PAM type: NAAAAC; PAM sequence: GAAAAC
ggtcaaacggctagtggagg

SEQ ID NO: 5499 - DNA, 20 bp, Artificial Sequence
  Description of Artificial Sequence: Synthetic oligonucleotide
  Target: LAMA2; (-) strand; PAM type: NAAAAC; PAM sequence: GAAAAC
cattttaggcaccttacaga

SEQ ID NO: 5500 - DNA, 20 bp, Artificial Sequence
  Description of Artificial Sequence: Synthetic oligonucleotide
  Target: LAMA2; (-) strand; PAM type: NAAAAC; PAM sequence: AAAAAC
tcctgacataatatagtata

SEQ ID NO: 5501 - DNA, 20 bp, Artificial Sequence
  Description of Artificial Sequence: Synthetic oligonucleotide
  Target: LAMA2; (-) strand; PAM type: NAAAAC; PAM sequence: AAAAAC
ccaacatgccacacccacat

SEQ ID NO: 5502 - DNA, 20 bp, Artificial Sequence
  Description of Artificial Sequence: Synthetic oligonucleotide
  Target: LAMA2; (-) strand; PAM type: NAAAAC; PAM sequence: GAAAAC
tcaacgagggaatctataac

SEQ ID NO: 5503 - DNA, 20 bp, Artificial Sequence
  Description of Artificial Sequence: Synthetic oligonucleotide
  Target: LAMA2; (-) strand; PAM type: NAAAAC; PAM sequence: AAAAAC
atagattgacttattttaat

SEQ ID NO: 5504 - DNA, 20 bp, Artificial Sequence
  Description of Artificial Sequence: Synthetic oligonucleotide
  Target: LAMA2; (-) strand; PAM type: NAAAAC; PAM sequence: TAAAAC
ttaatagctcaatgcaatgc

SEQ ID NO: 5505 - DNA, 20 bp, Artificial Sequence
  Description of Artificial Sequence: Synthetic oligonucleotide
  Target: LAMA2; (-) strand; PAM type: NAAAAC; PAM sequence: GAAAAC
gagtaaaattgatggcccaa

SEQ ID NO: 5506 - DNA, 20 bp, Artificial Sequence
  Description of Artificial Sequence: Synthetic oligonucleotide
  Target: LAMA2; (-) strand; PAM type: NAAAAC; PAM sequence: TAAAAC
aagcagtagatgataatgat

SEQ ID NO: 5507 - DNA, 20 bp, Artificial Sequence
  Description of Artificial Sequence: Synthetic oligonucleotide
  Target: LAMA2; (-) strand; PAM type: NAAAAC; PAM sequence: CAAAAC
tatcatcttctggatggacc

SEQ ID NO: 5508 - DNA, 20 bp, Artificial Sequence
  Description of Artificial Sequence: Synthetic oligonucleotide
  Target: LAMA2; (-) strand; PAM type: NAAAAC; PAM sequence: AAAAAC
taatttaaaagaatttttgg

SEQ ID NO: 5509 - DNA, 20 bp, Artificial Sequence
  Description of Artificial Sequence: Synthetic oligonucleotide
  Target: LAMA2; (-) strand; PAM type: NAAAAC; PAM sequence: AAAAAC
ccatcatagaaaagggtgtt

SEQ ID NO: 5510 - DNA, 20 bp, Artificial Sequence
  Description of Artificial Sequence: Synthetic oligonucleotide
  Target: LAMA2; (-) strand; PAM type: NAAAAC; PAM sequence: AAAAAC
agtgagaaattcatttcagg

SEQ ID NO: 5511 - DNA, 20 bp, Artificial Sequence
  Description of Artificial Sequence: Synthetic oligonucleotide
  Target: LAMA2; (-) strand; PAM type: NAAAAC; PAM sequence: TAAAAC
tagaccaaatgttgaaaaat

SEQ ID NO: 5512 - DNA, 20 bp, Artificial Sequence
  Description of Artificial Sequence: Synthetic oligonucleotide
  Target: LAMA2; (-) strand; PAM type: NAAAAC; PAM sequence: TAAAAC
aaacatataaatgatggttt

SEQ ID NO: 5513 - DNA, 20 bp, Artificial Sequence
  Description of Artificial Sequence: Synthetic oligonucleotide
  Target: LAMA2; (-) strand; PAM type: NAAAAC; PAM sequence: AAAAAC
agaataaatataaatatcag

SEQ ID NO: 5514 - DNA, 20 bp, Artificial Sequence
  Description of Artificial Sequence: Synthetic oligonucleotide
  Target: LAMA2; (-) strand; PAM type: NAAAAC; PAM sequence: TAAAAC
ggcaagaggcaggtgatgat

SEQ ID NO: 5515 - DNA, 20 bp, Artificial Sequence
  Description of Artificial Sequence: Synthetic oligonucleotide
  Target: LAMA2; (-) strand; PAM type: NAAAAC; PAM sequence: CAAAAC
gtaaactaagactaattttt

SEQ ID NO: 5516 - DNA, 20 bp, Artificial Sequence
  Description of Artificial Sequence: Synthetic oligonucleotide
  Target: LAMA2; (-) strand; PAM type: NAAAAC; PAM sequence: AAAAAC
cttcagacacataatttatt

SEQ ID NO: 5517 - DNA, 20 bp, Artificial Sequence
  Description of Artificial Sequence: Synthetic oligonucleotide
  Target: LAMA2; (-) strand; PAM type: NAAAAC; PAM sequence: TAAAAC
aacttcaatgtgaaaaatca

SEQ ID NO: 5518 - DNA, 20 bp, Artificial Sequence
  Description of Artificial Sequence: Synthetic oligonucleotide
  Target: LAMA2; (-) strand; PAM type: NAAAAC; PAM sequence: CAAAAC
agcaaaacatatggcatgca

SEQ ID NO: 5519 - DNA, 20 bp, Artificial Sequence
  Description of Artificial Sequence: Synthetic oligonucleotide
  Target: LAMA2; (-) strand; PAM type: NAAAAC; PAM sequence: CAAAAC
caatattctcggagaactag

SEQ ID NO: 5520 - DNA, 20 bp, Artificial Sequence
  Description of Artificial Sequence: Synthetic oligonucleotide
  Target: LAMA2; (-) strand; PAM type: NAAAAC; PAM sequence: AAAAAC
acaaaggcaaaaataatatt

SEQ ID NO: 5521 - DNA, 20 bp, Artificial Sequence
  Description of Artificial Sequence: Synthetic oligonucleotide
  Target: LAMA2; (-) strand; PAM type: NAAAAC; PAM sequence: CAAAAC
gtatctcccatgaaagaaaa

SEQ ID NO: 5522 - DNA, 20 bp, Artificial Sequence
  Description of Artificial Sequence: Synthetic oligonucleotide
  Target: LAMA2; (-) strand; PAM type: NAAAAC; PAM sequence: GAAAAC
attttgtatctcccatgaaa

SEQ ID NO: 5523 - DNA, 20 bp, Artificial Sequence
  Description of Artificial Sequence: Synthetic oligonucleotide
  Target: LAMA2; (-) strand; PAM type: NAAAAC; PAM sequence: GAAAAC
catattcaaagatcaaaaga

SEQ ID NO: 5524 - DNA, 20 bp, Artificial Sequence
  Description of Artificial Sequence: Synthetic oligonucleotide
  Target: LAMA2; (-) strand; PAM type: NAAAAC; PAM sequence: AAAAAC
taaaatgctgccttcataag

SEQ ID NO: 5525 - DNA, 20 bp, Artificial Sequence
  Description of Artificial Sequence: Synthetic oligonucleotide
  Target: LAMA2; (-) strand; PAM type: NAAAAC; PAM sequence: CAAAAC
gacatttgaaagtagggatt

SEQ ID NO: 5526 - DNA, 20 bp, Artificial Sequence
  Description of Artificial Sequence: Synthetic oligonucleotide
  Target: LAMA2; (-) strand; PAM type: NAAAAC; PAM sequence: AAAAAC
agtttataaaatctgttaat

SEQ ID NO: 5527 - DNA, 20 bp, Artificial Sequence
  Description of Artificial Sequence: Synthetic oligonucleotide
  Target: LAMA2; (-) strand; PAM type: NAAAAC; PAM sequence: TAAAAC
agcctaagtagaaagaagaa

SEQ ID NO: 5528 - DNA, 20 bp, Artificial Sequence
  Description of Artificial Sequence: Synthetic oligonucleotide
  Target: LAMA2; (-) strand; PAM type: NAAAAC; PAM sequence: TAAAAC
tgtaaacattgtaaaataaa

SEQ ID NO: 5529 - DNA, 20 bp, Artificial Sequence
  Description of Artificial Sequence: Synthetic oligonucleotide
  Target: LAMA2; (-) strand; PAM type: NAAAAC; PAM sequence: GAAAAC
gcctttacactcaaaaaaag

SEQ ID NO: 5530 - DNA, 20 bp, Artificial Sequence
  Description of Artificial Sequence: Synthetic oligonucleotide
  Target: LAMA2; (-) strand; PAM type: NAAAAC; PAM sequence: AAAAAC
gttcaaaaaaaaaaaaaaaa

SEQ ID NO: 5531 - DNA, 20 bp, Artificial Sequence
  Description of Artificial Sequence: Synthetic oligonucleotide
  Target: LAMA2; (-) strand; PAM type: NAAAAC; PAM sequence: CAAAAC
ttaaatattaaaaatgtatt

SEQ ID NO: 5532 - DNA, 20 bp, Artificial Sequence
  Description of Artificial Sequence: Synthetic oligonucleotide
  Target: LAMA2; (-) strand; PAM type: NAAAAC; PAM sequence: AAAAAC
tttatacaaacatgaaacac

SEQ ID NO: 5533 - DNA, 20 bp, Artificial Sequence
  Description of Artificial Sequence: Synthetic oligonucleotide
  Target: LAMA2; (-) strand; PAM type: NAAAAC; PAM sequence: AAAAAC
taattaactaattgcagatt

SEQ ID NO: 5534 - DNA, 20 bp, Artificial Sequence
  Description of Artificial Sequence: Synthetic oligonucleotide
  Target: LAMA2; (-) strand; PAM type: NAAAAC; PAM sequence: AAAAAC
cttcctatcccctctaaaat

SEQ ID NO: 5535 - DNA, 20 bp, Artificial Sequence
  Description of Artificial Sequence: Synthetic oligonucleotide
  Target: LAMA2; (-) strand; PAM type: NAAAAC; PAM sequence: CAAAAC
ttagtggtaatctaagattt

SEQ ID NO: 5536 - DNA, 20 bp, Artificial Sequence
  Description of Artificial Sequence: Synthetic oligonucleotide
  Target: LAMA2; (-) strand; PAM type: NAAAAC; PAM sequence: CAAAAC
ttcaggaattattgattaaa

SEQ ID NO: 5537 - DNA, 20 bp, Artificial Sequence
  Description of Artificial Sequence: Synthetic oligonucleotide
  Target: LAMA2; (-) strand; PAM type: NAAAAC; PAM sequence: TAAAAC
ggtaattctatcacaaatca

SEQ ID NO: 5538 - DNA, 20 bp, Artificial Sequence
  Description of Artificial Sequence: Synthetic oligonucleotide
  Target: LAMA2; (-) strand; PAM type: NAAAAC; PAM sequence: TAAAAC
tcttcccctatggctaccag

SEQ ID NO: 5539 - DNA, 20 bp, Artificial Sequence
  Description of Artificial Sequence: Synthetic oligonucleotide
  Target: LAMA2; (-) strand; PAM type: NAAAAC; PAM sequence: AAAAAC
ctttcactatgtaagaaaat

SEQ ID NO: 5540 - DNA, 20 bp, Artificial Sequence
  Description of Artificial Sequence: Synthetic oligonucleotide
  Target: LAMA2; (-) strand; PAM type: NAAAAC; PAM sequence: CAAAAC
gtgtggttaagtaactcata

SEQ ID NO: 5541 - DNA, 20 bp, Artificial Sequence
  Description of Artificial Sequence: Synthetic oligonucleotide
  Target: LAMA2; (-) strand; PAM type: NAAAAC; PAM sequence: AAAAAC
aaatgccttcagtacattga

SEQ ID NO: 5542 - DNA, 20 bp, Artificial Sequence
  Description of Artificial Sequence: Synthetic oligonucleotide
  Target: LAMA2; (-) strand; PAM type: NAAAAC; PAM sequence: TAAAAC
tttccttattatatactcct

SEQ ID NO: 5543 - DNA, 20 bp, Artificial Sequence
  Description of Artificial Sequence: Synthetic oligonucleotide
  Target: LAMA2; (-) strand; PAM type: NAAAAC; PAM sequence: TAAAAC
taattgaatacattttaata

SEQ ID NO: 5544 - DNA, 20 bp, Artificial Sequence
  Description of Artificial Sequence: Synthetic oligonucleotide
  Target: LAMA2; (-) strand; PAM type: NAAAAC; PAM sequence: GAAAAC
taactttgggggacacatct

SEQ ID NO: 5545 - DNA, 20 bp, Artificial Sequence
  Description of Artificial Sequence: Synthetic oligonucleotide
  Target: LAMA2; (-) strand; PAM type: NAAAAC; PAM sequence: CAAAAC
ctatcaggaactggaaaaaa

SEQ ID NO: 5546 - DNA, 20 bp, Artificial Sequence
  Description of Artificial Sequence: Synthetic oligonucleotide
  Target: LAMA2; (-) strand; PAM type: NAAAAC; PAM sequence: AAAAAC
gctatctatcaggaactgga

SEQ ID NO: 5547 - DNA, 20 bp, Artificial Sequence
  Description of Artificial Sequence: Synthetic oligonucleotide
  Target: LAMA2; (-) strand; PAM type: NAAAAC; PAM sequence: CAAAAC
cattagtgacataccacttt

SEQ ID NO: 5548 - DNA, 20 bp, Artificial Sequence
  Description of Artificial Sequence: Synthetic oligonucleotide
  Target: LAMA2; (-) strand; PAM type: NAAAAC; PAM sequence: AAAAAC
agtgagacctcatctctatg

SEQ ID NO: 5549 - DNA, 20 bp, Artificial Sequence
  Description of Artificial Sequence: Synthetic oligonucleotide
  Target: LAMA2; (-) strand; PAM type: NAAAAC; PAM sequence: TAAAAC
attatttatcaaaacagtgg

SEQ ID NO: 5550 - DNA, 20 bp, Artificial Sequence
  Description of Artificial Sequence: Synthetic oligonucleotide
  Target: LAMA2; (-) strand; PAM type: NAAAAC; PAM sequence: CAAAAC
tccactgtaagattatttat

SEQ ID NO: 5551 - DNA, 20 bp, Artificial Sequence
  Description of Artificial Sequence: Synthetic oligonucleotide
  Target: LAMA2; (-) strand; PAM type: NAAAAC; PAM sequence: GAAAAC
gttcctgtggagccttctct

SEQ ID NO: 5552 - DNA, 20 bp, Artificial Sequence
  Description of Artificial Sequence: Synthetic oligonucleotide
  Target: LAMA2; (-) strand; PAM type: NAAAAC; PAM sequence: CAAAAC
taacttctatagcttgagca

SEQ ID NO: 5553 - DNA, 20 bp, Artificial Sequence
  Description of Artificial Sequence: Synthetic oligonucleotide
  Target: LAMA2; (-) strand; PAM type: NAAAAC; PAM sequence: GAAAAC
ttctttctctagtaagaaaa

SEQ ID NO: 5554 - DNA, 20 bp, Artificial Sequence
  Description of Artificial Sequence: Synthetic oligonucleotide
  Target: LAMA2; (-) strand; PAM type: NAAAAC; PAM sequence: AAAAAC
gaaaccatttctaaaattgg

SEQ ID NO: 5555 - DNA, 20 bp, Artificial Sequence
  Description of Artificial Sequence: Synthetic oligonucleotide
  Target: LAMA2; (-) strand; PAM type: NAAAAC; PAM sequence: AAAAAC
actggtaaaaaaaggtaaat

SEQ ID NO: 5556 - DNA, 20 bp, Artificial Sequence
  Description of Artificial Sequence: Synthetic oligonucleotide
  Target: LAMA2; (-) strand; PAM type: NAAAAC; PAM sequence: AAAAAC
ataataaaacaaaactggaa

SEQ ID NO: 5557 - DNA, 20 bp, Artificial Sequence
  Description of Artificial Sequence: Synthetic oligonucleotide
  Target: LAMA2; (-) strand; PAM type: NAAAAC; PAM sequence: CAAAAC
aaaataaaataataataaaa

SEQ ID NO: 5558 - DNA, 20 bp, Artificial Sequence
  Description of Artificial Sequence: Synthetic oligonucleotide
  Target: LAMA2; (-) strand; PAM type: NAAAAC; PAM sequence: TAAAAC
aaaataaaataaaataataa

SEQ ID NO: 5559 - DNA, 20 bp, Artificial Sequence
  Description of Artificial Sequence: Synthetic oligonucleotide
  Target: LAMA2; (-) strand; PAM type: NAAAAC; PAM sequence: TAAAAC
cacattgtgcacatgtaccc

SEQ ID NO: 5560 - DNA, 20 bp, Artificial Sequence
  Description of Artificial Sequence: Synthetic oligonucleotide
  Target: LAMA2; (-) strand; PAM type: NAAAAC; PAM sequence: AAAAAC
agtaaactatcacaaggaca

SEQ ID NO: 5561 - DNA, 20 bp, Artificial Sequence
  Description of Artificial Sequence: Synthetic oligonucleotide
  Target: LAMA2; (-) strand; PAM type: NAAAAC; PAM sequence: CAAAAC
gccatcagagaaatgcaaac

SEQ ID NO: 5562 - DNA, 20 bp, Artificial Sequence
  Description of Artificial Sequence: Synthetic oligonucleotide
  Target: LAMA2; (-) strand; PAM type: NAAAAC; PAM sequence: AAAAAC
agaagacatttatgcagcca

SEQ ID NO: 5563 - DNA, 20 bp, Artificial Sequence
  Description of Artificial Sequence: Synthetic oligonucleotide
  Target: LAMA2; (-) strand; PAM type: NAAAAC; PAM sequence: AAAAAC
ttcactctttcattctctgg

SEQ ID NO: 5564 - DNA, 20 bp, Artificial Sequence
  Description of Artificial Sequence: Synthetic oligonucleotide
  Target: LAMA2; (-) strand; PAM type: NAAAAC; PAM sequence: AAAAAC
atcttcagtttagcgaagga

SEQ ID NO: 5565 - DNA, 20 bp, Artificial Sequence
  Description of Artificial Sequence: Synthetic oligonucleotide
  Target: LAMA2; (-) strand; PAM type: NAAAAC; PAM sequence: GAAAAC
attataccagcatcattgca

SEQ ID NO: 5566 - DNA, 20 bp, Artificial Sequence
  Description of Artificial Sequence: Synthetic oligonucleotide
  Target: LAMA2; (-) strand; PAM type: NAAAAC; PAM sequence: GAAAAC
tttaaactataaagtcagat

SEQ ID NO: 5567 - DNA, 20 bp, Artificial Sequence
  Description of Artificial Sequence: Synthetic oligonucleotide
  Target: LAMA2; (-) strand; PAM type: NAAAAC; PAM sequence: GAAAAC
agtagctgacactccctcag

SEQ ID NO: 5568 - DNA, 20 bp, Artificial Sequence
  Description of Artificial Sequence: Synthetic oligonucleotide
  Target: LAMA2; (-) strand; PAM type: NAAAAC; PAM sequence: GAAAAC
aatttatgttgttttgtaaa

SEQ ID NO: 5569 - DNA, 20 bp, Artificial Sequence
  Description of Artificial Sequence: Synthetic oligonucleotide
  Target: LAMA2; (-) strand; PAM type: NAAAAC; PAM sequence: AAAAAC
tgttcaaattttttcataat

SEQ ID NO: 5570 - DNA, 20 bp, Artificial Sequence
  Description of Artificial Sequence: Synthetic oligonucleotide
  Target: LAMA2; (-) strand; PAM type: NAAAAC; PAM sequence: AAAAAC
taaaccaactcattttttct

SEQ ID NO: 5571 - DNA, 20 bp, Artificial Sequence
  Description of Artificial Sequence: Synthetic oligonucleotide
  Target: LAMA2; (-) strand; PAM type: NAAAAC; PAM sequence: GAAAAC
aaagcatgagaatcattaag

SEQ ID NO: 5572 - DNA, 20 bp, Artificial Sequence
  Description of Artificial Sequence: Synthetic oligonucleotide
  Target: LAMA2; (-) strand; PAM type: NAAAAC; PAM sequence: CAAAAC
aaaccaggacaggaaatatg

SEQ ID NO: 5573 - DNA, 20 bp, Artificial Sequence
  Description of Artificial Sequence: Synthetic oligonucleotide
  Target: LAMA2; (-) strand; PAM type: NAAAAC; PAM sequence: TAAAAC
ctccaagaaatgactgtttc

SEQ ID NO: 5574 - DNA, 20 bp, Artificial Sequence
  Description of Artificial Sequence: Synthetic oligonucleotide
  Target: LAMA2; (-) strand; PAM type: NAAAAC; PAM sequence: CAAAAC
gcaaataagttattaggaat

SEQ ID NO: 5575 - DNA, 20 bp, Artificial Sequence
  Description of Artificial Sequence: Synthetic oligonucleotide
  Target: LAMA2; (-) strand; PAM type: NAAAAC; PAM sequence: TAAAAC
taaaagtttttacatcatta

SEQ ID NO: 5576 - DNA, 20 bp, Artificial Sequence
  Description of Artificial Sequence: Synthetic oligonucleotide
  Target: LAMA2; (-) strand; PAM type: NAAAAC; PAM sequence: GAAAAC
ggttacacattagtgaggaa

SEQ ID NO: 5577 - DNA, 20 bp, Artificial Sequence
  Description of Artificial Sequence: Synthetic oligonucleotide
  Target: LAMA2; (-) strand; PAM type: NAAAAC; PAM sequence: CAAAAC
aaaagcaaaagacacgtgca

SEQ ID NO: 5578 - DNA, 20 bp, Artificial Sequence
  Description of Artificial Sequence: Synthetic oligonucleotide
  Target: LAMA2; (-) strand; PAM type: NAAAAC; PAM sequence: AAAAAC
aaaaaaaaaaacaaaaaaaa

SEQ ID NO: 5579 - DNA, 20 bp, Artificial Sequence
  Description of Artificial Sequence: Synthetic oligonucleotide
  Target: LAMA2; (-) strand; PAM type: NAAAAC; PAM sequence: AAAAAC
ctctgcctcaaaaaaaaaaa

SEQ ID NO: 5580 - DNA, 20 bp, Artificial Sequence
  Description of Artificial Sequence: Synthetic oligonucleotide
  Target: LAMA2; (-) strand; PAM type: NAAAAC; PAM sequence: AAAAAC
ctgtctcaaagaaacaaaca

SEQ ID NO: 5581 - DNA, 20 bp, Artificial Sequence
  Description of Artificial Sequence: Synthetic oligonucleotide
  Target: LAMA2; (-) strand; PAM type: NAAAAC; PAM sequence: AAAAAC
tttcaattgctttgcctttt

SEQ ID NO: 5582 - DNA, 20 bp, Artificial Sequence
  Description of Artificial Sequence: Synthetic oligonucleotide
  Target: LAMA2; (-) strand; PAM type: NAAAAC; PAM sequence: TAAAAC
aataacccaaacacccttag

SEQ ID NO: 5583 - DNA, 20 bp, Artificial Sequence
  Description of Artificial Sequence: Synthetic oligonucleotide
  Target: LAMA2; (-) strand; PAM type: NAAAAC; PAM sequence: TAAAAC
tttctctccatcatgatttt

SEQ ID NO: 5584 - DNA, 20 bp, Artificial Sequence
  Description of Artificial Sequence: Synthetic oligonucleotide
  Target: LAMA2; (-) strand; PAM type: NAAAAC; PAM sequence: TAAAAC
tgatttcacttaaaagaagc

SEQ ID NO: 5585 - DNA, 20 bp, Artificial Sequence
  Description of Artificial Sequence: Synthetic oligonucleotide
  Target: LAMA2; (-) strand; PAM type: NAAAAC; PAM sequence: CAAAAC
tctattcagcaaattatcta

SEQ ID NO: 5586 - DNA, 20 bp, Artificial Sequence
  Description of Artificial Sequence: Synthetic oligonucleotide
  Target: LAMA2; (-) strand; PAM type: NAAAAC; PAM sequence: AAAAAC
atcatgcgaggctacagaaa

SEQ ID NO: 5587 - DNA, 20 bp, Artificial Sequence
  Description of Artificial Sequence: Synthetic oligonucleotide
  Target: LAMA2; (-) strand; PAM type: NAAAAC; PAM sequence: AAAAAC
tagcataggccgaggaccta

SEQ ID NO: 5588 - DNA, 20 bp, Artificial Sequence
  Description of Artificial Sequence: Synthetic oligonucleotide
  Target: LAMA2; (-) strand; PAM type: NAAAAC; PAM sequence: CAAAAC
agtccacttcttcccagaca

SEQ ID NO: 5589 - DNA, 20 bp, Artificial Sequence
  Description of Artificial Sequence: Synthetic oligonucleotide
  Target: LAMA2; (-) strand; PAM type: NAAAAC; PAM sequence: AAAAAC
tgagagaaaggggcctattt

SEQ ID NO: 5590 - DNA, 20 bp, Artificial Sequence
  Description of Artificial Sequence: Synthetic oligonucleotide
  Target: LAMA2; (-) strand; PAM type: NAAAAC; PAM sequence: AAAAAC
tcttcacttgcagctcaatt

SEQ ID NO: 5591 - DNA, 20 bp, Artificial Sequence
  Description of Artificial Sequence: Synthetic oligonucleotide
  Target: LAMA2; (-) strand; PAM type: NAAAAC; PAM sequence: TAAAAC
taatttagtgtaaagaattc

SEQ ID NO: 5592 - DNA, 20 bp, Artificial Sequence
  Description of Artificial Sequence: Synthetic oligonucleotide
  Target: LAMA2; (-) strand; PAM type: NAAAAC; PAM sequence: CAAAAC
tacagaatttcgtacactaa

SEQ ID NO: 5593 - DNA, 20 bp, Artificial Sequence
  Description of Artificial Sequence: Synthetic oligonucleotide
  Target: LAMA2; (-) strand; PAM type: NAAAAC; PAM sequence: TAAAAC
tagaaagttttcataaaaat

SEQ ID NO: 5594 - DNA, 20 bp, Artificial Sequence
  Description of Artificial Sequence: Synthetic oligonucleotide
  Target: LAMA2; (-) strand; PAM type: NAAAAC; PAM sequence: AAAAAC
tcacaaatttccaaaaacat

SEQ ID NO: 5595 - DNA, 20 bp, Artificial Sequence
  Description of Artificial Sequence: Synthetic oligonucleotide
  Target: LAMA2; (-) strand; PAM type: NAAAAC; PAM sequence: AAAAAC
tcttgagatcacaaatttcc

SEQ ID NO: 5596 - DNA, 20 bp, Artificial Sequence
  Description of Artificial Sequence: Synthetic oligonucleotide
  Target: LAMA2; (-) strand; PAM type: NAAAAC; PAM sequence: CAAAAC
acaaatgtctttaacttcag

SEQ ID NO: 5597 - DNA, 20 bp, Artificial Sequence
  Description of Artificial Sequence: Synthetic oligonucleotide
  Target: LAMA2; (-) strand; PAM type: NAAAAC; PAM sequence: CAAAAC
aaaattgaaatgtcaaagca

SEQ ID NO: 5598 - DNA, 20 bp, Artificial Sequence
  Description of Artificial Sequence: Synthetic oligonucleotide
  Target: LAMA2; (-) strand; PAM type: NAAAAC; PAM sequence: AAAAAC
tgtaaagtttatgttttttt

SEQ ID NO: 5599 - DNA, 20 bp, Artificial Sequence
  Description of Artificial Sequence: Synthetic oligonucleotide
  Target: LAMA2; (-) strand; PAM type: NAAAAC; PAM sequence: TAAAAC
accactgcagttatcaagtt

SEQ ID NO: 5600 - DNA, 20 bp, Artificial Sequence
  Description of Artificial Sequence: Synthetic oligonucleotide
  Target: LAMA2; (-) strand; PAM type: NAAAAC; PAM sequence: CAAAAC
aactcttaaaattggattca

SEQ ID NO: 5601 - DNA, 20 bp, Artificial Sequence
  Description of Artificial Sequence: Synthetic oligonucleotide
  Target: LAMA2; (-) strand; PAM type: NAAAAC; PAM sequence: CAAAAC
gacattctctgcttttctca

SEQ ID NO: 5602 - DNA, 20 bp, Artificial Sequence
  Description of Artificial Sequence: Synthetic oligonucleotide
  Target: LAMA2; (-) strand; PAM type: NAAAAC; PAM sequence: GAAAAC
tgatcctagtgtgatatact

SEQ ID NO: 5603 - DNA, 20 bp, Artificial Sequence
  Description of Artificial Sequence: Synthetic oligonucleotide
  Target: LAMA2; (-) strand; PAM type: NAAAAC; PAM sequence: GAAAAC
tttttaattttctctgccca

SEQ ID NO: 5604 - DNA, 20 bp, Artificial Sequence
  Description of Artificial Sequence: Synthetic oligonucleotide
  Target: LAMA2; (-) strand; PAM type: NAAAAC; PAM sequence: AAAAAC
tgatatttaaattcagtttt

SEQ ID NO: 5605 - DNA, 20 bp, Artificial Sequence
  Description of Artificial Sequence: Synthetic oligonucleotide
  Target: LAMA2; (-) strand; PAM type: NAAAAC; PAM sequence: GAAAAC
tgataaaataaaataaaatg

SEQ ID NO: 5606 - DNA, 20 bp, Artificial Sequence
  Description of Artificial Sequence: Synthetic oligonucleotide
  Target: LAMA2; (-) strand; PAM type: NAAAAC; PAM sequence: CAAAAC
agtgagactttgtctcaaaa

SEQ ID NO: 5607 - DNA, 20 bp, Artificial Sequence
  Description of Artificial Sequence: Synthetic oligonucleotide
  Target: LAMA2; (-) strand; PAM type: NAAAAC; PAM sequence: CAAAAC
tacagagtgagactttgtct

SEQ ID NO: 5608 - DNA, 20 bp, Artificial Sequence
  Description of Artificial Sequence: Synthetic oligonucleotide
  Target: LAMA2; (-) strand; PAM type: NAAAAC; PAM sequence: AAAAAC
ggcttgactatatacctgtc

SEQ ID NO: 5609 - DNA, 20 bp, Artificial Sequence
  Description of Artificial Sequence: Synthetic oligonucleotide
  Target: LAMA2; (-) strand; PAM type: NAAAAC; PAM sequence: TAAAAC
ctgaaaatccacatccctca

SEQ ID NO: 5610 - DNA, 20 bp, Artificial Sequence
  Description of Artificial Sequence: Synthetic oligonucleotide
  Target: LAMA2; (-) strand; PAM type: NAAAAC; PAM sequence: AAAAAC
caattttgttgatcctttca

SEQ ID NO: 5611 - DNA, 20 bp, Artificial Sequence
  Description of Artificial Sequence: Synthetic oligonucleotide
  Target: LAMA2; (-) strand; PAM type: NAAAAC; PAM sequence: AAAAAC
catttagcagtccacagaac

SEQ ID NO: 5612 - DNA, 20 bp, Artificial Sequence
  Description of Artificial Sequence: Synthetic oligonucleotide
  Target: LAMA2; (-) strand; PAM type: NAAAAC; PAM sequence: GAAAAC
tctttccagaatgaatgtct

SEQ ID NO: 5613 - DNA, 20 bp, Artificial Sequence
  Description of Artificial Sequence: Synthetic oligonucleotide
  Target: LAMA2; (-) strand; PAM type: NAAAAC; PAM sequence: TAAAAC
ataggactttttatttaaaa

SEQ ID NO: 5614 - DNA, 20 bp, Artificial Sequence
  Description of Artificial Sequence: Synthetic oligonucleotide
  Target: LAMA2; (-) strand; PAM type: NAAAAC; PAM sequence: AAAAAC
ctaacctcatgggcttacat

SEQ ID NO: 5615 - DNA, 20 bp, Artificial Sequence
  Description of Artificial Sequence: Synthetic oligonucleotide
  Target: LAMA2; (-) strand; PAM type: NAAAAC; PAM sequence: AAAAAC
aaaaagagatatgcatattt

SEQ ID NO: 5616 - DNA, 20 bp, Artificial Sequence
  Description of Artificial Sequence: Synthetic oligonucleotide
  Target: LAMA2; (-) strand; PAM type: NAAAAC; PAM sequence: GAAAAC
acaagaaggaaaacaagaga

SEQ ID NO: 5617 - DNA, 20 bp, Artificial Sequence
  Description of Artificial Sequence: Synthetic oligonucleotide
  Target: LAMA2; (-) strand; PAM type: NAAAAC; PAM sequence: GAAAAC
agatcattccaaacaagaag

SEQ ID NO: 5618 - DNA, 20 bp, Artificial Sequence
  Description of Artificial Sequence: Synthetic oligonucleotide
  Target: LAMA2; (-) strand; PAM type: NAAAAC; PAM sequence: AAAAAC
aacttacatatacttttgtt

SEQ ID NO: 5619 - DNA, 20 bp, Artificial Sequence
  Description of Artificial Sequence: Synthetic oligonucleotide
  Target: LAMA2; (-) strand; PAM type: NAAAAC; PAM sequence: TAAAAC
aagcatgttaaaatttccat

SEQ ID NO: 5620 - DNA, 20 bp, Artificial Sequence
  Description of Artificial Sequence: Synthetic oligonucleotide
  Target: LAMA2; (-) strand; PAM type: NAAAAC; PAM sequence: TAAAAC
gattatcactcatttcttgc

SEQ ID NO: 5621 - DNA, 20 bp, Artificial Sequence
  Description of Artificial Sequence: Synthetic oligonucleotide
  Target: LAMA2; (-) strand; PAM type: NAAAAC; PAM sequence: TAAAAC
ttaaatagatataatctaag

SEQ ID NO: 5622 - DNA, 20 bp, Artificial Sequence
  Description of Artificial Sequence: Synthetic oligonucleotide
  Target: LAMA2; (-) strand; PAM type: NAAAAC; PAM sequence: TAAAAC
aggatgtatttcattaggtt

SEQ ID NO: 5623 - DNA, 20 bp, Artificial Sequence
  Description of Artificial Sequence: Synthetic oligonucleotide
  Target: LAMA2; (-) strand; PAM type: NAAAAC; PAM sequence: AAAAAC
attcatgtagacccgggatc

SEQ ID NO: 5624 - DNA, 20 bp, Artificial Sequence
  Description of Artificial Sequence: Synthetic oligonucleotide
  Target: LAMA2; (-) strand; PAM type: NAAAAC; PAM sequence: TAAAAC
cttttttgaaaaaacagtca

SEQ ID NO: 5625 - DNA, 20 bp, Artificial Sequence
  Description of Artificial Sequence: Synthetic oligonucleotide
  Target: LAMA2; (-) strand; PAM type: NAAAAC; PAM sequence: AAAAAC
aaattttgaagcttttttga

SEQ ID NO: 5626 - DNA, 20 bp, Artificial Sequence
  Description of Artificial Sequence: Synthetic oligonucleotide
  Target: LAMA2; (-) strand; PAM type: NAAAAC; PAM sequence: CAAAAC
caccttctctacagaacctc

SEQ ID NO: 5627 - DNA, 20 bp, Artificial Sequence
  Description of Artificial Sequence: Synthetic oligonucleotide
  Target: LAMA2; (-) strand; PAM type: NAAAAC; PAM sequence: AAAAAC
ctaatgatacaaatgcttga

SEQ ID NO: 5628 - DNA, 20 bp, Artificial Sequence
  Description of Artificial Sequence: Synthetic oligonucleotide
  Target: LAMA2; (-) strand; PAM type: NAAAAC; PAM sequence: CAAAAC
gaattaccagacacatttaa

SEQ ID NO: 5629 - DNA, 20 bp, Artificial Sequence
  Description of Artificial Sequence: Synthetic oligonucleotide
  Target: LAMA2; (-) strand; PAM type: NAAAAC; PAM sequence: AAAAAC
gttaccagataaaacttatc

SEQ ID NO: 5630 - DNA, 20 bp, Artificial Sequence
  Description of Artificial Sequence: Synthetic oligonucleotide
  Target: LAMA2; (-) strand; PAM type: NAAAAC; PAM sequence: TAAAAC
aatgtttgtctgttaccaga

SEQ ID NO: 5631 - DNA, 20 bp, Artificial Sequence
  Description of Artificial Sequence: Synthetic oligonucleotide
  Target: LAMA2; (-) strand; PAM type: NAAAAC; PAM sequence: AAAAAC
caagaaaaaggaattatgcc

SEQ ID NO: 5632 - DNA, 20 bp, Artificial Sequence
  Description of Artificial Sequence: Synthetic oligonucleotide
  Target: LAMA2; (-) strand; PAM type: NAAAAC; PAM sequence: TAAAAC
tagcttgaatgagacttagg

SEQ ID NO: 5633 - DNA, 20 bp, Artificial Sequence
  Description of Artificial Sequence: Synthetic oligonucleotide
  Target: LAMA2; (-) strand; PAM type: NAAAAC; PAM sequence: AAAAAC
taaattagtttaataagcta

SEQ ID NO: 5634 - DNA, 20 bp, Artificial Sequence
  Description of Artificial Sequence: Synthetic oligonucleotide
  Target: LAMA2; (-) strand; PAM type: NAAAAC; PAM sequence: AAAAAC
aaaatccgtatctcacaggc

SEQ ID NO: 5635 - DNA, 20 bp, Artificial Sequence
  Description of Artificial Sequence: Synthetic oligonucleotide
  Target: LAMA2; (-) strand; PAM type: NAAAAC; PAM sequence: TAAAAC
agctgaaagactgcttcaaa

SEQ ID NO: 5636 - DNA, 20 bp, Artificial Sequence
  Description of Artificial Sequence: Synthetic oligonucleotide
  Target: LAMA2; (-) strand; PAM type: NAAAAC; PAM sequence: TAAAAC
tactattgattccagctgcc

SEQ ID NO: 5637 - DNA, 20 bp, Artificial Sequence
  Description of Artificial Sequence: Synthetic oligonucleotide
  Target: LAMA2; (-) strand; PAM type: NAAAAC; PAM sequence: AAAAAC
atctggagaataggatgatg

SEQ ID NO: 5638 - DNA, 20 bp, Artificial Sequence
  Description of Artificial Sequence: Synthetic oligonucleotide
  Target: LAMA2; (-) strand; PAM type: NAAAAC; PAM sequence: GAAAAC
gttattctgagttaatatgg

SEQ ID NO: 5639 - DNA, 20 bp, Artificial Sequence
  Description of Artificial Sequence: Synthetic oligonucleotide
  Target: LAMA2; (-) strand; PAM type: NAAAAC; PAM sequence: CAAAAC
tactaagtaaaatattattt

SEQ ID NO: 5640 - DNA, 20 bp, Artificial Sequence
  Description of Artificial Sequence: Synthetic oligonucleotide
  Target: LAMA2; (-) strand; PAM type: NAAAAC; PAM sequence: CAAAAC
attttaaatgcacgcatttg

SEQ ID NO: 5641 - DNA, 20 bp, Artificial Sequence
  Description of Artificial Sequence: Synthetic oligonucleotide
  Target: LAMA2; (-) strand; PAM type: NAAAAC; PAM sequence: TAAAAC
tttctgcagcactcagtagt

SEQ ID NO: 5642 - DNA, 20 bp, Artificial Sequence
  Description of Artificial Sequence: Synthetic oligonucleotide
  Target: LAMA2; (-) strand; PAM type: NAAAAC; PAM sequence: AAAAAC
tattttaataacctacatat

SEQ ID NO: 5643 - DNA, 20 bp, Artificial Sequence
  Description of Artificial Sequence: Synthetic oligonucleotide
  Target: LAMA2; (-) strand; PAM type: NAAAAC; PAM sequence: AAAAAC
ctcaacttattgtaataaat

SEQ ID NO: 5644 - DNA, 20 bp, Artificial Sequence
  Description of Artificial Sequence: Synthetic oligonucleotide
  Target: LAMA2; (-) strand; PAM type: NAAAAC; PAM sequence: CAAAAC
atccaacagacattgagtta

SEQ ID NO: 5645 - DNA, 20 bp, Artificial Sequence
  Description of Artificial Sequence: Synthetic oligonucleotide
  Target: LAMA2; (-) strand; PAM type: NAAAAC; PAM sequence: AAAAAC
atcagtaacatttattacat

SEQ ID NO: 5646 - DNA, 20 bp, Artificial Sequence
  Description of Artificial Sequence: Synthetic oligonucleotide
  Target: LAMA2; (-) strand; PAM type: NAAAAC; PAM sequence: GAAAAC
ctgtcgtatctgacagagat

SEQ ID NO: 5647 - DNA, 20 bp, Artificial Sequence
  Description of Artificial Sequence: Synthetic oligonucleotide
  Target: LAMA2; (-) strand; PAM type: NAAAAC; PAM sequence: TAAAAC
atatatatatgtaagatcaa

SEQ ID NO: 5648 - DNA, 20 bp, Artificial Sequence
  Description of Artificial Sequence: Synthetic oligonucleotide
  Target: LAMA2; (-) strand; PAM type: NAAAAC; PAM sequence: AAAAAC
atgcatcccatgaaattatg

SEQ ID NO: 5649 - DNA, 20 bp, Artificial Sequence
  Description of Artificial Sequence: Synthetic oligonucleotide
  Target: LAMA2; (-) strand; PAM type: NAAAAC; PAM sequence: AAAAAC
catcaatatgaagacaggaa

SEQ ID NO: 5650 - DNA, 20 bp, Artificial Sequence
  Description of Artificial Sequence: Synthetic oligonucleotide
  Target: LAMA2; (-) strand; PAM type: NAAAAC; PAM sequence: AAAAAC
aatgaaataatggcgttaga

SEQ ID NO: 5651 - DNA, 20 bp, Artificial Sequence
  Description of Artificial Sequence: Synthetic oligonucleotide
  Target: LAMA2; (-) strand; PAM type: NAAAAC; PAM sequence: TAAAAC
ataaaattaacctcttaaga

SEQ ID NO: 5652 - DNA, 20 bp, Artificial Sequence
  Description of Artificial Sequence: Synthetic oligonucleotide
  Target: LAMA2; (-) strand; PAM type: NAAAAC; PAM sequence: AAAAAC
acaaggtagatccaatgtag

SEQ ID NO: 5653 - DNA, 20 bp, Artificial Sequence
  Description of Artificial Sequence: Synthetic oligonucleotide
  Target: LAMA2; (-) strand; PAM type: NAAAAC; PAM sequence: CAAAAC
taataatgcagataaattac

SEQ ID NO: 5654 - DNA, 20 bp, Artificial Sequence
  Description of Artificial Sequence: Synthetic oligonucleotide
  Target: LAMA2; (-) strand; PAM type: NAAAAC; PAM sequence: AAAAAC
ggaggacaaatgcttattta

SEQ ID NO: 5655 - DNA, 20 bp, Artificial Sequence
  Description of Artificial Sequence: Synthetic oligonucleotide
  Target: LAMA2; (-) strand; PAM type: NAAAAC; PAM sequence: CAAAAC
ttacatttaatgctgcctgg

SEQ ID NO: 5656 - DNA, 20 bp, Artificial Sequence
  Description of Artificial Sequence: Synthetic oligonucleotide
  Target: LAMA2; (-) strand; PAM type: NAAAAC; PAM sequence: TAAAAC
aataaatctgttaagtgaaa

SEQ ID NO: 5657 - DNA, 20 bp, Artificial Sequence
  Description of Artificial Sequence: Synthetic oligonucleotide
  Target: LAMA2; (-) strand; PAM type: NAAAAC; PAM sequence: TAAAAC
aattagtcttcatctctttg

SEQ ID NO: 5658 - DNA, 20 bp, Artificial Sequence
  Description of Artificial Sequence: Synthetic oligonucleotide
  Target: LAMA2; (-) strand; PAM type: NAAAAC; PAM sequence: TAAAAC
cttttggtccatggcctact

SEQ ID NO: 5659 - DNA, 20 bp, Artificial Sequence
  Description of Artificial Sequence: Synthetic oligonucleotide
  Target: LAMA2; (-) strand; PAM type: NAAAAC; PAM sequence: CAAAAC
caacaatacaacaacaatgg

SEQ ID NO: 5660 - DNA, 20 bp, Artificial Sequence
  Description of Artificial Sequence: Synthetic oligonucleotide
  Target: LAMA2; (-) strand; PAM type: NAAAAC; PAM sequence: AAAAAC
caaaatagaatctcagcctt

SEQ ID NO: 5661 - DNA, 20 bp, Artificial Sequence
  Description of Artificial Sequence: Synthetic oligonucleotide
  Target: LAMA2; (-) strand; PAM type: NAAAAC; PAM sequence: TAAAAC
attgtaacattccttttaag

SEQ ID NO: 5662 - DNA, 20 bp, Artificial Sequence
  Description of Artificial Sequence: Synthetic oligonucleotide
  Target: LAMA2; (-) strand; PAM type: NAAAAC; PAM sequence: AAAAAC
agcaaaaatgtagaataagc

SEQ ID NO: 5663 - DNA, 20 bp, Artificial Sequence
  Description of Artificial Sequence: Synthetic oligonucleotide
  Target: LAMA2; (-) strand; PAM type: NAAAAC; PAM sequence: AAAAAC
caagtgaaatgctgcaagga

SEQ ID NO: 5664 - DNA, 20 bp, Artificial Sequence
  Description of Artificial Sequence: Synthetic oligonucleotide
  Target: LAMA2; (-) strand; PAM type: NAAAAC; PAM sequence: CAAAAC
cctcgtctctaaaaccaaac

SEQ ID NO: 5665 - DNA, 20 bp, Artificial Sequence
  Description of Artificial Sequence: Synthetic oligonucleotide
  Target: LAMA2; (-) strand; PAM type: NAAAAC; PAM sequence: TAAAAC
ctattcacctgcctcgtctc

SEQ ID NO: 5666 - DNA, 20 bp, Artificial Sequence
  Description of Artificial Sequence: Synthetic oligonucleotide
  Target: LAMA2; (-) strand; PAM type: NAAAAC; PAM sequence: AAAAAC
aagcatacttctgcctaatc

SEQ ID NO: 5667 - DNA, 20 bp, Artificial Sequence
  Description of Artificial Sequence: Synthetic oligonucleotide
  Target: LAMA2; (-) strand; PAM type: NAAAAC; PAM sequence: CAAAAC
gactcctcaacaaatttact

SEQ ID NO: 5668 - DNA, 20 bp, Artificial Sequence
  Description of Artificial Sequence: Synthetic oligonucleotide
  Target: LAMA2; (-) strand; PAM type: NAAAAC; PAM sequence: TAAAAC
atttgattttttacatttta

SEQ ID NO: 5669 - DNA, 20 bp, Artificial Sequence
  Description of Artificial Sequence: Synthetic oligonucleotide
  Target: LAMA2; (-) strand; PAM type: NAAAAC; PAM sequence: CAAAAC
tatcacttttcttttaaatg

SEQ ID NO: 5670 - DNA, 20 bp, Artificial Sequence
  Description of Artificial Sequence: Synthetic oligonucleotide
  Target: LAMA2; (-) strand; PAM type: NAAAAC; PAM sequence: CAAAAC
tgcctctagatatgttaaag

SEQ ID NO: 5671 - DNA, 20 bp, Artificial Sequence
  Description of Artificial Sequence: Synthetic oligonucleotide
  Target: LAMA2; (-) strand; PAM type: NAAAAC; PAM sequence: TAAAAC
aggtaaatcagcatccaaac

SEQ ID NO: 5672 - DNA, 20 bp, Artificial Sequence
  Description of Artificial Sequence: Synthetic oligonucleotide
  Target: LAMA2; (-) strand; PAM type: NAAAAC; PAM sequence: CAAAAC
aaatattttttatatcttgt

SEQ ID NO: 5673 - DNA, 20 bp, Artificial Sequence
  Description of Artificial Sequence: Synthetic oligonucleotide
  Target: LAMA2; (-) strand; PAM type: NAAAAC; PAM sequence: TAAAAC
attagaaaacacctagagaa

SEQ ID NO: 5674 - DNA, 20 bp, Artificial Sequence
  Description of Artificial Sequence: Synthetic oligonucleotide
  Target: LAMA2; (-) strand; PAM type: NAAAAC; PAM sequence: GAAAAC
tatttcactttcccacatta

SEQ ID NO: 5675 - DNA, 20 bp, Artificial Sequence
  Description of Artificial Sequence: Synthetic oligonucleotide
  Target: LAMA2; (-) strand; PAM type: NAAAAC; PAM sequence: GAAAAC
tgccaagggacatctggctt

SEQ ID NO: 5676 - DNA, 20 bp, Artificial Sequence
  Description of Artificial Sequence: Synthetic oligonucleotide
  Target: LAMA2; (-) strand; PAM type: NAAAAC; PAM sequence: CAAAAC
aggtctgagcagatggctgt

SEQ ID NO: 5677 - DNA, 20 bp, Artificial Sequence
  Description of Artificial Sequence: Synthetic oligonucleotide
  Target: LAMA2; (-) strand; PAM type: NAAAAC; PAM sequence: TAAAAC
ctgagagccttccacatgat

SEQ ID NO: 5678 - DNA, 20 bp, Artificial Sequence
  Description of Artificial Sequence: Synthetic oligonucleotide
  Target: LAMA2; (-) strand; PAM type: NAAAAC; PAM sequence: AAAAAC
tatgtgtacctccacatatt

SEQ ID NO: 5679 - DNA, 20 bp, Artificial Sequence
  Description of Artificial Sequence: Synthetic oligonucleotide
  Target: LAMA2; (-) strand; PAM type: NAAAAC; PAM sequence: AAAAAC
gcctacatatctcacccaca

SEQ ID NO: 5680 - DNA, 20 bp, Artificial Sequence
  Description of Artificial Sequence: Synthetic oligonucleotide
  Target: LAMA2; (-) strand; PAM type: NAAAAC; PAM sequence: AAAAAC
ggcccatatctttaacatta

SEQ ID NO: 5681 - DNA, 20 bp, Artificial Sequence
  Description of Artificial Sequence: Synthetic oligonucleotide
  Target: LAMA2; (-) strand; PAM type: NAAAAC; PAM sequence: AAAAAC
tctatccttctgatagagaa

SEQ ID NO: 5682 - DNA, 20 bp, Artificial Sequence
  Description of Artificial Sequence: Synthetic oligonucleotide
  Target: LAMA2; (-) strand; PAM type: NAAAAC; PAM sequence: AAAAAC
tgatatacaatatgagttag

SEQ ID NO: 5683 - DNA, 20 bp, Artificial Sequence
  Description of Artificial Sequence: Synthetic oligonucleotide
  Target: LAMA2; (-) strand; PAM type: NAAAAC; PAM sequence: GAAAAC
ctctttccctgaactaaatt

SEQ ID NO: 5684 - DNA, 20 bp, Artificial Sequence
  Description of Artificial Sequence: Synthetic oligonucleotide
  Target: LAMA2; (-) strand; PAM type: NAAAAC; PAM sequence: CAAAAC
tatatagattcattcactca

SEQ ID NO: 5685 - DNA, 20 bp, Artificial Sequence
  Description of Artificial Sequence: Synthetic oligonucleotide
  Target: LAMA2; (-) strand; PAM type: NAAAAC; PAM sequence: AAAAAC
catacctaggagatcaactt

SEQ ID NO: 5686 - DNA, 20 bp, Artificial Sequence
  Description of Artificial Sequence: Synthetic oligonucleotide
  Target: LAMA2; (-) strand; PAM type: NAAAAC; PAM sequence: GAAAAC
atcatctaagatcatatcta

SEQ ID NO: 5687 - DNA, 20 bp, Artificial Sequence
  Description of Artificial Sequence: Synthetic oligonucleotide
  Target: LAMA2; (-) strand; PAM type: NAAAAC; PAM sequence: AAAAAC
tttcaaaattagaaatttct

SEQ ID NO: 5688 - DNA, 20 bp, Artificial Sequence
  Description of Artificial Sequence: Synthetic oligonucleotide
  Target: LAMA2; (-) strand; PAM type: NAAAAC; PAM sequence: CAAAAC
cttctaaaataaacaaactc

SEQ ID NO: 5689 - DNA, 20 bp, Artificial Sequence
  Description of Artificial Sequence: Synthetic oligonucleotide
  Target: LAMA2; (-) strand; PAM type: NAAAAC; PAM sequence: AAAAAC
acatgagttctaacacgaaa

SEQ ID NO: 5690 - DNA, 20 bp, Artificial Sequence
  Description of Artificial Sequence: Synthetic oligonucleotide
  Target: LAMA2; (-) strand; PAM type: NAAAAC; PAM sequence: CAAAAC
agatttgacagtgtttatag

SEQ ID NO: 5691 - DNA, 20 bp, Artificial Sequence
  Description of Artificial Sequence: Synthetic oligonucleotide
  Target: LAMA2; (-) strand; PAM type: NAAAAC; PAM sequence: CAAAAC
tttccatcttggaaaataaa

SEQ ID NO: 5692 - DNA, 20 bp, Artificial Sequence
  Description of Artificial Sequence: Synthetic oligonucleotide
  Target: LAMA2; (-) strand; PAM type: NAAAAC; PAM sequence: TAAAAC
ataatgttagcatcaaagac

SEQ ID NO: 5693 - DNA, 20 bp, Artificial Sequence
  Description of Artificial Sequence: Synthetic oligonucleotide
  Target: LAMA2; (-) strand; PAM type: NAAAAC; PAM sequence: CAAAAC
aaaataaaaagactaaaaca

SEQ ID NO: 5694 - DNA, 20 bp, Artificial Sequence
  Description of Artificial Sequence: Synthetic oligonucleotide
  Target: LAMA2; (-) strand; PAM type: NAAAAC; PAM sequence: TAAAAC
ttgtcagaaaataaaaagac

SEQ ID NO: 5695 - DNA, 20 bp, Artificial Sequence
  Description of Artificial Sequence: Synthetic oligonucleotide
  Target: LAMA2; (-) strand; PAM type: NAAAAC; PAM sequence: GAAAAC
cccacccagtgtctcataga

SEQ ID NO: 5696 - DNA, 20 bp, Artificial Sequence
  Description of Artificial Sequence: Synthetic oligonucleotide
  Target: LAMA2; (-) strand; PAM type: NAAAAC; PAM sequence: AAAAAC
tctagtgataaaacacacat

SEQ ID NO: 5697 - DNA, 20 bp, Artificial Sequence
  Description of Artificial Sequence: Synthetic oligonucleotide
  Target: LAMA2; (-) strand; PAM type: NAAAAC; PAM sequence: TAAAAC
caatttcttatctctagtga

SEQ ID NO: 5698 - DNA, 20 bp, Artificial Sequence
  Description of Artificial Sequence: Synthetic oligonucleotide
  Target: LAMA2; (-) strand; PAM type: NAAAAC; PAM sequence: TAAAAC
aataattcaaaaaataaaaa

SEQ ID NO: 5699 - DNA, 20 bp, Artificial Sequence
  Description of Artificial Sequence: Synthetic oligonucleotide
  Target: LAMA2; (-) strand; PAM type: NAAAAC; PAM sequence: GAAAAC
aaaaaggtacttgtgatata

SEQ ID NO: 5700 - DNA, 20 bp, Artificial Sequence
  Description of Artificial Sequence: Synthetic oligonucleotide
  Target: LAMA2; (-) strand; PAM type: NAAAAC; PAM sequence: CAAAAC
taaagcaaggagaggaagtg

SEQ ID NO: 5701 - DNA, 20 bp, Artificial Sequence
  Description of Artificial Sequence: Synthetic oligonucleotide
  Target: LAMA2; (-) strand; PAM type: NAAAAC; PAM sequence: AAAAAC
gaatcattatgagaaaaaaa

SEQ ID NO: 5702 - DNA, 20 bp, Artificial Sequence
  Description of Artificial Sequence: Synthetic oligonucleotide
  Target: LAMA2; (-) strand; PAM type: NAAAAC; PAM sequence: CAAAAC
caacaaaaaacaaaagttag

SEQ ID NO: 5703 - DNA, 20 bp, Artificial Sequence
  Description of Artificial Sequence: Synthetic oligonucleotide
  Target: LAMA2; (-) strand; PAM type: NAAAAC; PAM sequence: AAAAAC
tccaaaaaaccaaagcaaca

SEQ ID NO: 5704 - DNA, 20 bp, Artificial Sequence
  Description of Artificial Sequence: Synthetic oligonucleotide
  Target: LAMA2; (-) strand; PAM type: NAAAAC; PAM sequence: AAAAAC
tgaagtgcaaaaaaactcca

SEQ ID NO: 5705 - DNA, 20 bp, Artificial Sequence
  Description of Artificial Sequence: Synthetic oligonucleotide
  Target: LAMA2; (-) strand; PAM type: NAAAAC; PAM sequence: AAAAAC
aaagacttcttgaagtgcaa

SEQ ID NO: 5706 - DNA, 20 bp, Artificial Sequence
  Description of Artificial Sequence: Synthetic oligonucleotide
  Target: LAMA2; (-) strand; PAM type: NAAAAC; PAM sequence: AAAAAC
agaaaaaggaaaaaagaaaa

SEQ ID NO: 5707 - DNA, 20 bp, Artificial Sequence
  Description of Artificial Sequence: Synthetic oligonucleotide
  Target: LAMA2; (-) strand; PAM type: NAAAAC; PAM sequence: TAAAAC
atcatcagggagatgcaaat

SEQ ID NO: 5708 - DNA, 20 bp, Artificial Sequence
  Description of Artificial Sequence: Synthetic oligonucleotide
  Target: LAMA2; (-) strand; PAM type: NAAAAC; PAM sequence: AAAAAC
gaaacttaaatcaacaagaa

SEQ ID NO: 5709 - DNA, 20 bp, Artificial Sequence
  Description of Artificial Sequence: Synthetic oligonucleotide
  Target: LAMA2; (-) strand; PAM type: NAAAAC; PAM sequence: GAAAAC
aagacctgaaaccataaaaa

SEQ ID NO: 5710 - DNA, 20 bp, Artificial Sequence
  Description of Artificial Sequence: Synthetic oligonucleotide
  Target: LAMA2; (-) strand; PAM type: NAAAAC; PAM sequence: TAAAAC
gactatgaggctatagtaac

SEQ ID NO: 5711 - DNA, 20 bp, Artificial Sequence
  Description of Artificial Sequence: Synthetic oligonucleotide
  Target: LAMA2; (-) strand; PAM type: NAAAAC; PAM sequence: AAAAAC
tcatttttcacagaattaga

SEQ ID NO: 5712 - DNA, 20 bp, Artificial Sequence
  Description of Artificial Sequence: Synthetic oligonucleotide
  Target: LAMA2; (-) strand; PAM type: NAAAAC; PAM sequence: CAAAAC
attaaaatgactatgctacc

SEQ ID NO: 5713 - DNA, 20 bp, Artificial Sequence
  Description of Artificial Sequence: Synthetic oligonucleotide
  Target: LAMA2; (-) strand; PAM type: NAAAAC; PAM sequence: AAAAAC
taaatgacatggacaaatgg

SEQ ID NO: 5714 - DNA, 20 bp, Artificial Sequence
  Description of Artificial Sequence: Synthetic oligonucleotide
  Target: LAMA2; (-) strand; PAM type: NAAAAC; PAM sequence: CAAAAC
ggaattgattatgatttctt

SEQ ID NO: 5715 - DNA, 20 bp, Artificial Sequence
  Description of Artificial Sequence: Synthetic oligonucleotide
  Target: LAMA2; (-) strand; PAM type: NAAAAC; PAM sequence: CAAAAC
tccagttgttcagaagcaaa

SEQ ID NO: 5716 - DNA, 20 bp, Artificial Sequence
  Description of Artificial Sequence: Synthetic oligonucleotide
  Target: LAMA2; (-) strand; PAM type: NAAAAC; PAM sequence: TAAAAC
tgtgtcagagcatattggta

SEQ ID NO: 5717 - DNA, 20 bp, Artificial Sequence
  Description of Artificial Sequence: Synthetic oligonucleotide
  Target: LAMA2; (-) strand; PAM type: NAAAAC; PAM sequence: CAAAAC
tgactattctgtacaggtat

SEQ ID NO: 5718 - DNA, 20 bp, Artificial Sequence
  Description of Artificial Sequence: Synthetic oligonucleotide
  Target: LAMA2; (-) strand; PAM type: NAAAAC; PAM sequence: GAAAAC
ttttggtacactagctaagt

SEQ ID NO: 5719 - DNA, 20 bp, Artificial Sequence
  Description of Artificial Sequence: Synthetic oligonucleotide
  Target: LAMA2; (-) strand; PAM type: NAAAAC; PAM sequence: TAAAAC
gttgttgaaattatcttccc

SEQ ID NO: 5720 - DNA, 20 bp, Artificial Sequence
  Description of Artificial Sequence: Synthetic oligonucleotide
  Target: LAMA2; (-) strand; PAM type: NAAAAC; PAM sequence: CAAAAC
aatggaaaaattgtcttcca

SEQ ID NO: 5721 - DNA, 20 bp, Artificial Sequence
  Description of Artificial Sequence: Synthetic oligonucleotide
  Target: LAMA2; (-) strand; PAM type: NAAAAC; PAM sequence: GAAAAC
ggatgttggatacagcaaag

SEQ ID NO: 5722 - DNA, 20 bp, Artificial Sequence
  Description of Artificial Sequence: Synthetic oligonucleotide
  Target: LAMA2; (-) strand; PAM type: NAAAAC; PAM sequence: TAAAAC
tacctaatcttttaggaaaa

SEQ ID NO: 5723 - DNA, 20 bp, Artificial Sequence
  Description of Artificial Sequence: Synthetic oligonucleotide
  Target: LAMA2; (-) strand; PAM type: NAAAAC; PAM sequence: AAAAAC
atgaatgggggaaatgatac

SEQ ID NO: 5724 - DNA, 20 bp, Artificial Sequence
  Description of Artificial Sequence: Synthetic oligonucleotide
  Target: LAMA2; (-) strand; PAM type: NAAAAC; PAM sequence: GAAAAC
aaattagcacaaccctttta

SEQ ID NO: 5725 - DNA, 20 bp, Artificial Sequence
  Description of Artificial Sequence: Synthetic oligonucleotide
  Target: LAMA2; (-) strand; PAM type: NAAAAC; PAM sequence: CAAAAC
tgctcttcagaggaacataa

SEQ ID NO: 5726 - DNA, 20 bp, Artificial Sequence
  Description of Artificial Sequence: Synthetic oligonucleotide
  Target: LAMA2; (-) strand; PAM type: NAAAAC; PAM sequence: AAAAAC
aagtagcccagctagggctg

SEQ ID NO: 5727 - DNA, 20 bp, Artificial Sequence
  Description of Artificial Sequence: Synthetic oligonucleotide
  Target: LAMA2; (-) strand; PAM type: NAAAAC; PAM sequence: CAAAAC
tggcttgaagaactagtgaa

SEQ ID NO: 5728 - DNA, 20 bp, Artificial Sequence
  Description of Artificial Sequence: Synthetic oligonucleotide
  Target: LAMA2; (-) strand; PAM type: NAAAAC; PAM sequence: TAAAAC
tggatgagctccagaatggc

SEQ ID NO: 5729 - DNA, 20 bp, Artificial Sequence
  Description of Artificial Sequence: Synthetic oligonucleotide
  Target: LAMA2; (-) strand; PAM type: NAAAAC; PAM sequence: AAAAAC
gtatatcatgtgaaaatttg

SEQ ID NO: 5730 - DNA, 20 bp, Artificial Sequence
  Description of Artificial Sequence: Synthetic oligonucleotide
  Target: LAMA2; (-) strand; PAM type: NAAAAC; PAM sequence: TAAAAC
ttcatagagttttctaacca

SEQ ID NO: 5731 - DNA, 20 bp, Artificial Sequence
  Description of Artificial Sequence: Synthetic oligonucleotide
  Target: LAMA2; (-) strand; PAM type: NAAAAC; PAM sequence: TAAAAC
aagcttatttaaatctttaa

SEQ ID NO: 5732 - DNA, 20 bp, Artificial Sequence
  Description of Artificial Sequence: Synthetic oligonucleotide
  Target: LAMA2; (-) strand; PAM type: NAAAAC; PAM sequence: TAAAAC
caggcaggtgctaacatttc

SEQ ID NO: 5733 - DNA, 20 bp, Artificial Sequence
  Description of Artificial Sequence: Synthetic oligonucleotide
  Target: LAMA2; (-) strand; PAM type: NAAAAC; PAM sequence: AAAAAC
ttagggaaaatgaagaaaga

SEQ ID NO: 5734 - DNA, 20 bp, Artificial Sequence
  Description of Artificial Sequence: Synthetic oligonucleotide
  Target: LAMA2; (-) strand; PAM type: NAAAAC; PAM sequence: GAAAAC
tccatgatataagccttagt

SEQ ID NO: 5735 - DNA, 20 bp, Artificial Sequence
  Description of Artificial Sequence: Synthetic oligonucleotide
  Target: LAMA2; (-) strand; PAM type: NAAAAC; PAM sequence: CAAAAC
tcctacaatgatttgctaca

SEQ ID NO: 5736 - DNA, 20 bp, Artificial Sequence
  Description of Artificial Sequence: Synthetic oligonucleotide
  Target: LAMA2; (-) strand; PAM type: NAAAAC; PAM sequence: TAAAAC
ccttcagtgtaaataattat

SEQ ID NO: 5737 - DNA, 20 bp, Artificial Sequence
  Description of Artificial Sequence: Synthetic oligonucleotide
  Target: LAMA2; (-) strand; PAM type: NAAAAC; PAM sequence: TAAAAC
cctgtctctaggacacattc

SEQ ID NO: 5738 - DNA, 20 bp, Artificial Sequence
  Description of Artificial Sequence: Synthetic oligonucleotide
  Target: LAMA2; (-) strand; PAM type: NAAAAC; PAM sequence: AAAAAC
acagagtgagattctgcctc

SEQ ID NO: 5739 - DNA, 20 bp, Artificial Sequence
  Description of Artificial Sequence: Synthetic oligonucleotide
  Target: LAMA2; (-) strand; PAM type: NAAAAC; PAM sequence: TAAAAC
gaccagcctggccaacatgg

SEQ ID NO: 5740 - DNA, 20 bp, Artificial Sequence
  Description of Artificial Sequence: Synthetic oligonucleotide
  Target: LAMA2; (-) strand; PAM type: NAAAAC; PAM sequence: CAAAAC
caaaataaaacaaaacaaaa

SEQ ID NO: 5741 - DNA, 20 bp, Artificial Sequence
  Description of Artificial Sequence: Synthetic oligonucleotide
  Target: LAMA2; (-) strand; PAM type: NAAAAC; PAM sequence: CAAAAC
cgtctcaaaataaaacaaaa

SEQ ID NO: 5742 - DNA, 20 bp, Artificial Sequence
  Description of Artificial Sequence: Synthetic oligonucleotide
  Target: LAMA2; (-) strand; PAM type: NAAAAC; PAM sequence: CAAAAC
aactccgtctcaaaataaaa

SEQ ID NO: 5743 - DNA, 20 bp, Artificial Sequence
  Description of Artificial Sequence: Synthetic oligonucleotide
  Target: LAMA2; (-) strand; PAM type: NAAAAC; PAM sequence: TAAAAC
agcaaaactccgtctcaaaa

SEQ ID NO: 5744 - DNA, 20 bp, Artificial Sequence
  Description of Artificial Sequence: Synthetic oligonucleotide
  Target: LAMA2; (-) strand; PAM type: NAAAAC; PAM sequence: CAAAAC
tccagcctgggcaacaagag

SEQ ID NO: 5745 - DNA, 20 bp, Artificial Sequence
  Description of Artificial Sequence: Synthetic oligonucleotide
  Target: LAMA2; (-) strand; PAM type: NAAAAC; PAM sequence: TAAAAC
tcaattatcttcgaagcatt

SEQ ID NO: 5746 - DNA, 20 bp, Artificial Sequence
  Description of Artificial Sequence: Synthetic oligonucleotide
  Target: LAMA2; (-) strand; PAM type: NAAAAC; PAM sequence: GAAAAC
ctcaaatgtctcttatcttt

SEQ ID NO: 5747 - DNA, 20 bp, Artificial Sequence
  Description of Artificial Sequence: Synthetic oligonucleotide
  Target: LAMA2; (-) strand; PAM type: NAAAAC; PAM sequence: GAAAAC
ttcatttttggtttcaatgt

SEQ ID NO: 5748 - DNA, 20 bp, Artificial Sequence
  Description of Artificial Sequence: Synthetic oligonucleotide
  Target: LAMA2; (-) strand; PAM type: NAAAAC; PAM sequence: GAAAAC
tccagactgtgactggttta

SEQ ID NO: 5749 - DNA, 20 bp, Artificial Sequence
  Description of Artificial Sequence: Synthetic oligonucleotide
  Target: LAMA2; (-) strand; PAM type: NAAAAC; PAM sequence: GAAAAC
tccaagggctaactgcatct

SEQ ID NO: 5750 - DNA, 20 bp, Artificial Sequence
  Description of Artificial Sequence: Synthetic oligonucleotide
  Target: LAMA2; (-) strand; PAM type: NAAAAC; PAM sequence: AAAAAC
gtgcgtttaatatgtgatag

SEQ ID NO: 5751 - DNA, 20 bp, Artificial Sequence
  Description of Artificial Sequence: Synthetic oligonucleotide
  Target: LAMA2; (-) strand; PAM type: NAAAAC; PAM sequence: GAAAAC
gaagaaaaataaatatcaca

SEQ ID NO: 5752 - DNA, 20 bp, Artificial Sequence
  Description of Artificial Sequence: Synthetic oligonucleotide
  Target: LAMA2; (-) strand; PAM type: NAAAAC; PAM sequence: CAAAAC
gaaattggcatatggggaat

SEQ ID NO: 5753 - DNA, 20 bp, Artificial Sequence
  Description of Artificial Sequence: Synthetic oligonucleotide
  Target: LAMA2; (-) strand; PAM type: NAAAAC; PAM sequence: GAAAAC
acactgtcataacatttact

SEQ ID NO: 5754 - DNA, 20 bp, Artificial Sequence
  Description of Artificial Sequence: Synthetic oligonucleotide
  Target: LAMA2; (-) strand; PAM type: NAAAAC; PAM sequence: CAAAAC
aaaaaacaataaaaataaag

SEQ ID NO: 5755 - DNA, 20 bp, Artificial Sequence
  Description of Artificial Sequence: Synthetic oligonucleotide
  Target: LAMA2; (-) strand; PAM type: NAAAAC; PAM sequence: AAAAAC
gtacttggtaaaacatttga

SEQ ID NO: 5756 - DNA, 20 bp, Artificial Sequence
  Description of Artificial Sequence: Synthetic oligonucleotide
  Target: LAMA2; (-) strand; PAM type: NAAAAC; PAM sequence: TAAAAC
tagagacaagttgtacttgg

SEQ ID NO: 5757 - DNA, 20 bp, Artificial Sequence
  Description of Artificial Sequence: Synthetic oligonucleotide
  Target: LAMA2; (-) strand; PAM type: NAAAAC; PAM sequence: TAAAAC
taaaaaccatcattagtttt

SEQ ID NO: 5758 - DNA, 20 bp, Artificial Sequence
  Description of Artificial Sequence: Synthetic oligonucleotide
  Target: LAMA2; (-) strand; PAM type: NAAAAC; PAM sequence: AAAAAC
tcatgaaacaaagggcattt

SEQ ID NO: 5759 - DNA, 20 bp, Artificial Sequence
  Description of Artificial Sequence: Synthetic oligonucleotide
  Target: LAMA2; (-) strand; PAM type: NAAAAC; PAM sequence: TAAAAC
tgtcagtcttgagaatttca

SEQ ID NO: 5760 - DNA, 20 bp, Artificial Sequence
  Description of Artificial Sequence: Synthetic oligonucleotide
  Target: LAMA2; (-) strand; PAM type: NAAAAC; PAM sequence: AAAAAC
acatgaaactctatcctacc

SEQ ID NO: 5761 - DNA, 20 bp, Artificial Sequence
  Description of Artificial Sequence: Synthetic oligonucleotide
  Target: LAMA2; (-) strand; PAM type: NAAAAC; PAM sequence: TAAAAC
ttaaagtaaaaaaaaatggt

SEQ ID NO: 5762 - DNA, 20 bp, Artificial Sequence
  Description of Artificial Sequence: Synthetic oligonucleotide
  Target: LAMA2; (-) strand; PAM type: NAAAAC; PAM sequence: GAAAAC
ccctttgttcatcttatcaa

SEQ ID NO: 5763 - DNA, 20 bp, Artificial Sequence
  Description of Artificial Sequence: Synthetic oligonucleotide
  Target: LAMA2; (-) strand; PAM type: NAAAAC; PAM sequence: TAAAAC
catcattaagtccagctagc

SEQ ID NO: 5764 - DNA, 20 bp, Artificial Sequence
  Description of Artificial Sequence: Synthetic oligonucleotide
  Target: LAMA2; (-) strand; PAM type: NAAAAC; PAM sequence: CAAAAC
tttaacttgaaagcaactgt

SEQ ID NO: 5765 - DNA, 20 bp, Artificial Sequence
  Description of Artificial Sequence: Synthetic oligonucleotide
  Target: LAMA2; (-) strand; PAM type: NAAAAC; PAM sequence: AAAAAC
cccacacagtgataacttat

SEQ ID NO: 5766 - DNA, 20 bp, Artificial Sequence
  Description of Artificial Sequence: Synthetic oligonucleotide
  Target: LAMA2; (-) strand; PAM type: NAAAAC; PAM sequence: AAAAAC
caagttagaaatgatttagt

SEQ ID NO: 5767 - DNA, 20 bp, Artificial Sequence
  Description of Artificial Sequence: Synthetic oligonucleotide
  Target: LAMA2; (-) strand; PAM type: NAAAAC; PAM sequence: AAAAAC
ctttgacttgctgaattgat

SEQ ID NO: 5768 - DNA, 20 bp, Artificial Sequence
  Description of Artificial Sequence: Synthetic oligonucleotide
  Target: LAMA2; (-) strand; PAM type: NAAAAC; PAM sequence: GAAAAC
taaactaaatgggaggaaga

SEQ ID NO: 5769 - DNA, 20 bp, Artificial Sequence
  Description of Artificial Sequence: Synthetic oligonucleotide
  Target: LAMA2; (-) strand; PAM type: NAAAAC; PAM sequence: CAAAAC
tccatcacgaaacttgatta

SEQ ID NO: 5770 - DNA, 20 bp, Artificial Sequence
  Description of Artificial Sequence: Synthetic oligonucleotide
  Target: LAMA2; (-) strand; PAM type: NAAAAC; PAM sequence: AAAAAC
aaatgtaaaaaaaaaaaaaa

SEQ ID NO: 5771 - DNA, 20 bp, Artificial Sequence
  Description of Artificial Sequence: Synthetic oligonucleotide
  Target: LAMA2; (-) strand; PAM type: NAAAAC; PAM sequence: TAAAAC
cctaaaacataaattccagt

SEQ ID NO: 5772 - DNA, 20 bp, Artificial Sequence
  Description of Artificial Sequence: Synthetic oligonucleotide
  Target: LAMA2; (-) strand; PAM type: NAAAAC; PAM sequence: TAAAAC
atagtagtttatcctcctcc

SEQ ID NO: 5773 - DNA, 20 bp, Artificial Sequence
  Description of Artificial Sequence: Synthetic oligonucleotide
  Target: LAMA2; (-) strand; PAM type: NAAAAC; PAM sequence: TAAAAC
taatatgtttaaatgattgt

SEQ ID NO: 5774 - DNA, 20 bp, Artificial Sequence
  Description of Artificial Sequence: Synthetic oligonucleotide
  Target: LAMA2; (-) strand; PAM type: NAAAAC; PAM sequence: CAAAAC
tcaatttagcttatattttc

SEQ ID NO: 5775 - DNA, 20 bp, Artificial Sequence
  Description of Artificial Sequence: Synthetic oligonucleotide
  Target: LAMA2; (-) strand; PAM type: NAAAAC; PAM sequence: TAAAAC
tgtttggtagaattcagcag

SEQ ID NO: 5776 - DNA, 20 bp, Artificial Sequence
  Description of Artificial Sequence: Synthetic oligonucleotide
  Target: LAMA2; (-) strand; PAM type: NAAAAC; PAM sequence: AAAAAC
tcttattcctgatcttagag

SEQ ID NO: 5777 - DNA, 20 bp, Artificial Sequence
  Description of Artificial Sequence: Synthetic oligonucleotide
  Target: LAMA2; (-) strand; PAM type: NAAAAC; PAM sequence: GAAAAC
accacgacaacagcatgggg

SEQ ID NO: 5778 - DNA, 20 bp, Artificial Sequence
  Description of Artificial Sequence: Synthetic oligonucleotide
  Target: LAMA2; (-) strand; PAM type: NAAAAC; PAM sequence: TAAAAC
gcaaaagcggaaacccctga

SEQ ID NO: 5779 - DNA, 20 bp, Artificial Sequence
  Description of Artificial Sequence: Synthetic oligonucleotide
  Target: LAMA2; (-) strand; PAM type: NAAAAC; PAM sequence: AAAAAC
aaaaaaaaaaaaaaaaaaaa

SEQ ID NO: 5780 - DNA, 20 bp, Artificial Sequence
  Description of Artificial Sequence: Synthetic oligonucleotide
  Target: LAMA2; (-) strand; PAM type: NAAAAC; PAM sequence: TAAAAC
gagatcgagaccatcccggc

SEQ ID NO: 5781 - DNA, 20 bp, Artificial Sequence
  Description of Artificial Sequence: Synthetic oligonucleotide
  Target: LAMA2; (-) strand; PAM type: NAAAAC; PAM sequence: CAAAAC
taataatattagttattcca

SEQ ID NO: 5782 - DNA, 20 bp, Artificial Sequence
  Description of Artificial Sequence: Synthetic oligonucleotide
  Target: LAMA2; (-) strand; PAM type: NAAAAC; PAM sequence: AAAAAC
gatttatttttatttctgtg

SEQ ID NO: 5783 - DNA, 20 bp, Artificial Sequence
  Description of Artificial Sequence: Synthetic oligonucleotide
  Target: LAMA2; (-) strand; PAM type: NAAAAC; PAM sequence: TAAAAC
cttaaaaatctatatacaat

SEQ ID NO: 5784 - DNA, 20 bp, Artificial Sequence
  Description of Artificial Sequence: Synthetic oligonucleotide
  Target: LAMA2; (-) strand; PAM type: NAAAAC; PAM sequence: GAAAAC
ttttcccactgaatgtgatg

SEQ ID NO: 5785 - DNA, 20 bp, Artificial Sequence
  Description of Artificial Sequence: Synthetic oligonucleotide
  Target: LAMA2; (-) strand; PAM type: NAAAAC; PAM sequence: AAAAAC
tgagaaggtaacacttgaat

SEQ ID NO: 5786 - DNA, 20 bp, Artificial Sequence
  Description of Artificial Sequence: Synthetic oligonucleotide
  Target: LAMA2; (-) strand; PAM type: NAAAAC; PAM sequence: TAAAAC
ttataatagcccaaatagac

SEQ ID NO: 5787 - DNA, 20 bp, Artificial Sequence
  Description of Artificial Sequence: Synthetic oligonucleotide
  Target: LAMA2; (-) strand; PAM type: NAAAAC; PAM sequence: AAAAAC
aaaaaatacaatgtcaagca

SEQ ID NO: 5788 - DNA, 20 bp, Artificial Sequence
  Description of Artificial Sequence: Synthetic oligonucleotide
  Target: LAMA2; (-) strand; PAM type: NAAAAC; PAM sequence: GAAAAC
ggaagtcatcaggcagctgt

SEQ ID NO: 5789 - DNA, 20 bp, Artificial Sequence
  Description of Artificial Sequence: Synthetic oligonucleotide
  Target: LAMA2; (-) strand; PAM type: NAAAAC; PAM sequence: AAAAAC
tattttgtaattccttattt

SEQ ID NO: 5790 - DNA, 20 bp, Artificial Sequence
  Description of Artificial Sequence: Synthetic oligonucleotide
  Target: LAMA2; (-) strand; PAM type: NAAAAC; PAM sequence: CAAAAC
aacatatcttatctatgaat

SEQ ID NO: 5791 - DNA, 20 bp, Artificial Sequence
  Description of Artificial Sequence: Synthetic oligonucleotide
  Target: LAMA2; (-) strand; PAM type: NAAAAC; PAM sequence: AAAAAC
ttgaaattattaaaataatt

SEQ ID NO: 5792 - DNA, 20 bp, Artificial Sequence
  Description of Artificial Sequence: Synthetic oligonucleotide
  Target: LAMA2; (-) strand; PAM type: NAAAAC; PAM sequence: CAAAAC
tgccaaactagacaaaacgt

SEQ ID NO: 5793 - DNA, 20 bp, Artificial Sequence
  Description of Artificial Sequence: Synthetic oligonucleotide
  Target: LAMA2; (-) strand; PAM type: NAAAAC; PAM sequence: CAAAAC
accaacactgccaaactaga

SEQ ID NO: 5794 - DNA, 20 bp, Artificial Sequence
  Description of Artificial Sequence: Synthetic oligonucleotide
  Target: LAMA2; (-) strand; PAM type: NAAAAC; PAM sequence: GAAAAC
gactaaaacccatgcacaga

SEQ ID NO: 5795 - DNA, 20 bp, Artificial Sequence
  Description of Artificial Sequence: Synthetic oligonucleotide
  Target: LAMA2; (-) strand; PAM type: NAAAAC; PAM sequence: TAAAAC
atagatatggaatctgtgac

SEQ ID NO: 5796 - DNA, 20 bp, Artificial Sequence
  Description of Artificial Sequence: Synthetic oligonucleotide
  Target: LAMA2; (-) strand; PAM type: NAAAAC; PAM sequence: GAAAAC
aaactgaaaatataagaaat

SEQ ID NO: 5797 - DNA, 20 bp, Artificial Sequence
  Description of Artificial Sequence: Synthetic oligonucleotide
  Target: LAMA2; (-) strand; PAM type: NAAAAC; PAM sequence: AAAAAC
acctattaaagctgtaaagg

SEQ ID NO: 5798 - DNA, 20 bp, Artificial Sequence
  Description of Artificial Sequence: Synthetic oligonucleotide
  Target: LAMA2; (-) strand; PAM type: NAAAAC; PAM sequence: CAAAAC
tagagaaaatcaatcaagcc

SEQ ID NO: 5799 - DNA, 20 bp, Artificial Sequence
  Description of Artificial Sequence: Synthetic oligonucleotide
  Target: LAMA2; (-) strand; PAM type: NAAAAC; PAM sequence: AAAAAC
ataaaaaataacgagaagta

SEQ ID NO: 5800 - DNA, 20 bp, Artificial Sequence
  Description of Artificial Sequence: Synthetic oligonucleotide
  Target: LAMA2; (-) strand; PAM type: NAAAAC; PAM sequence: CAAAAC
gaaaggaataacaacaaaaa

SEQ ID NO: 5801 - DNA, 20 bp, Artificial Sequence
  Description of Artificial Sequence: Synthetic oligonucleotide
  Target: LAMA2; (-) strand; PAM type: NAAAAC; PAM sequence: AAAAAC
gtgaggaaaggaataacaac

SEQ ID NO: 5802 - DNA, 20 bp, Artificial Sequence
  Description of Artificial Sequence: Synthetic oligonucleotide
  Target: LAMA2; (-) strand; PAM type: NAAAAC; PAM sequence: AAAAAC
gtcactgccatatgttggat

SEQ ID NO: 5803 - DNA, 20 bp, Artificial Sequence
  Description of Artificial Sequence: Synthetic oligonucleotide
  Target: LAMA2; (-) strand; PAM type: NAAAAC; PAM sequence: GAAAAC
taagtacactcaacatatga

SEQ ID NO: 5804 - DNA, 20 bp, Artificial Sequence
  Description of Artificial Sequence: Synthetic oligonucleotide
  Target: LAMA2; (-) strand; PAM type: NAAAAC; PAM sequence: GAAAAC
agcaaaagataagacaaaca

SEQ ID NO: 5805 - DNA, 20 bp, Artificial Sequence
  Description of Artificial Sequence: Synthetic oligonucleotide
  Target: LAMA2; (-) strand; PAM type: NAAAAC; PAM sequence: AAAAAC
aatggaataattaaataggg

SEQ ID NO: 5806 - DNA, 20 bp, Artificial Sequence
  Description of Artificial Sequence: Synthetic oligonucleotide
  Target: LAMA2; (-) strand; PAM type: NAAAAC; PAM sequence: GAAAAC
aaaggtgtttaaaattagat

SEQ ID NO: 5807 - DNA, 20 bp, Artificial Sequence
  Description of Artificial Sequence: Synthetic oligonucleotide
  Target: LAMA2; (-) strand; PAM type: NAAAAC; PAM sequence: AAAAAC
tcaaaagtaaagaaaagtga

SEQ ID NO: 5808 - DNA, 20 bp, Artificial Sequence
  Description of Artificial Sequence: Synthetic oligonucleotide
  Target: LAMA2; (-) strand; PAM type: NAAAAC; PAM sequence: CAAAAC
agtgctggaaaaaaacaaaa

SEQ ID NO: 5809 - DNA, 20 bp, Artificial Sequence
  Description of Artificial Sequence: Synthetic oligonucleotide
  Target: LAMA2; (-) strand; PAM type: NAAAAC; PAM sequence: CAAAAC
tttagagtgctggaaaaaaa

SEQ ID NO: 5810 - DNA, 20 bp, Artificial Sequence
  Description of Artificial Sequence: Synthetic oligonucleotide
  Target: LAMA2; (-) strand; PAM type: NAAAAC; PAM sequence: AAAAAC
atatatttagagtgctggaa

SEQ ID NO: 5811 - DNA, 20 bp, Artificial Sequence
  Description of Artificial Sequence: Synthetic oligonucleotide
  Target: LAMA2; (-) strand; PAM type: NAAAAC; PAM sequence: AAAAAC
acttcatgatagaaataatg

SEQ ID NO: 5812 - DNA, 20 bp, Artificial Sequence
  Description of Artificial Sequence: Synthetic oligonucleotide
  Target: LAMA2; (-) strand; PAM type: NAAAAC; PAM sequence: TAAAAC
aaagtatcaaatggatattc

SEQ ID NO: 5813 - DNA, 20 bp, Artificial Sequence
  Description of Artificial Sequence: Synthetic oligonucleotide
  Target: LAMA2; (-) strand; PAM type: NAAAAC; PAM sequence: TAAAAC
aaaaacgaccaagcttgtca

SEQ ID NO: 5814 - DNA, 20 bp, Artificial Sequence
  Description of Artificial Sequence: Synthetic oligonucleotide
  Target: LAMA2; (-) strand; PAM type: NAAAAC; PAM sequence: AAAAAC
gacacatacattatttaatc

SEQ ID NO: 5815 - DNA, 20 bp, Artificial Sequence
  Description of Artificial Sequence: Synthetic oligonucleotide
  Target: LAMA2; (-) strand; PAM type: NAAAAC; PAM sequence: CAAAAC
cagaatctctaactaagcta

SEQ ID NO: 5816 - DNA, 20 bp, Artificial Sequence
  Description of Artificial Sequence: Synthetic oligonucleotide
  Target: LAMA2; (-) strand; PAM type: NAAAAC; PAM sequence: AAAAAC
aaatgaactcatgagaagtg

SEQ ID NO: 5817 - DNA, 20 bp, Artificial Sequence
  Description of Artificial Sequence: Synthetic oligonucleotide
  Target: LAMA2; (-) strand; PAM type: NAAAAC; PAM sequence: AAAAAC
taaaagctggataaaatact

SEQ ID NO: 5818 - DNA, 20 bp, Artificial Sequence
  Description of Artificial Sequence: Synthetic oligonucleotide
  Target: LAMA2; (-) strand; PAM type: NAAAAC; PAM sequence: TAAAAC
aatatgctgatttttgtttt

SEQ ID NO: 5819 - DNA, 20 bp, Artificial Sequence
  Description of Artificial Sequence: Synthetic oligonucleotide
  Target: LAMA2; (-) strand; PAM type: NAAAAC; PAM sequence: AAAAAC
caggcttagaacactgctta

SEQ ID NO: 5820 - DNA, 20 bp, Artificial Sequence
  Description of Artificial Sequence: Synthetic oligonucleotide
  Target: LAMA2; (-) strand; PAM type: NAAAAC; PAM sequence: GAAAAC
ctattctaaattgtttactt

SEQ ID NO: 5821 - DNA, 20 bp, Artificial Sequence
  Description of Artificial Sequence: Synthetic oligonucleotide
  Target: LAMA2; (-) strand; PAM type: NAAAAC; PAM sequence: TAAAAC
atgcttcaaagataacacgt

SEQ ID NO: 5822 - DNA, 20 bp, Artificial Sequence
  Description of Artificial Sequence: Synthetic oligonucleotide
  Target: LAMA2; (-) strand; PAM type: NAAAAC; PAM sequence: GAAAAC
atccacattaaaatatttgt

SEQ ID NO: 5823 - DNA, 20 bp, Artificial Sequence
  Description of Artificial Sequence: Synthetic oligonucleotide
  Target: LAMA2; (-) strand; PAM type: NAAAAC; PAM sequence: TAAAAC
taatacatattcgaacaaaa

SEQ ID NO: 5824 - DNA, 20 bp, Artificial Sequence
  Description of Artificial Sequence: Synthetic oligonucleotide
  Target: LAMA2; (-) strand; PAM type: NAAAAC; PAM sequence: AAAAAC
ggtgaaaccttgtctctact

SEQ ID NO: 5825 - DNA, 20 bp, Artificial Sequence
  Description of Artificial Sequence: Synthetic oligonucleotide
  Target: LAMA2; (-) strand; PAM type: NAAAAC; PAM sequence: GAAAAC
aaaatggtgcagccactatg

SEQ ID NO: 5826 - DNA, 20 bp, Artificial Sequence
  Description of Artificial Sequence: Synthetic oligonucleotide
  Target: LAMA2; (-) strand; PAM type: NAAAAC; PAM sequence: AAAAAC
ctatttaaaaagaaaaaaaa

SEQ ID NO: 5827 - DNA, 20 bp, Artificial Sequence
  Description of Artificial Sequence: Synthetic oligonucleotide
  Target: LAMA2; (-) strand; PAM type: NAAAAC; PAM sequence: AAAAAC
atatgttacatttaaattat

SEQ ID NO: 5828 - DNA, 20 bp, Artificial Sequence
  Description of Artificial Sequence: Synthetic oligonucleotide
  Target: LAMA2; (-) strand; PAM type: NAAAAC; PAM sequence: CAAAAC
attttgtccagtgtctagga

SEQ ID NO: 5829 - DNA, 20 bp, Artificial Sequence
  Description of Artificial Sequence: Synthetic oligonucleotide
  Target: LAMA2; (-) strand; PAM type: NAAAAC; PAM sequence: CAAAAC
aataatacaaaaactttctt

SEQ ID NO: 5830 - DNA, 20 bp, Artificial Sequence
  Description of Artificial Sequence: Synthetic oligonucleotide
  Target: LAMA2; (-) strand; PAM type: NAAAAC; PAM sequence: AAAAAC
tgaatagcatttaataatac

SEQ ID NO: 5831 - DNA, 20 bp, Artificial Sequence
  Description of Artificial Sequence: Synthetic oligonucleotide
  Target: LAMA2; (-) strand; PAM type: NAAAAC; PAM sequence: AAAAAC
ttgattgttatacatgattt

SEQ ID NO: 5832 - DNA, 20 bp, Artificial Sequence
  Description of Artificial Sequence: Synthetic oligonucleotide
  Target: LAMA2; (-) strand; PAM type: NAAAAC; PAM sequence: TAAAAC
ttatatctttattggatgtt

SEQ ID NO: 5833 - DNA, 20 bp, Artificial Sequence
  Description of Artificial Sequence: Synthetic oligonucleotide
  Target: LAMA2; (-) strand; PAM type: NAAAAC; PAM sequence: CAAAAC
atatactttatgtgcattct

SEQ ID NO: 5834 - DNA, 20 bp, Artificial Sequence
  Description of Artificial Sequence: Synthetic oligonucleotide
  Target: LAMA2; (-) strand; PAM type: NAAAAC; PAM sequence: GAAAAC
aaagataagatttttctcag

SEQ ID NO: 5835 - DNA, 20 bp, Artificial Sequence
  Description of Artificial Sequence: Synthetic oligonucleotide
  Target: LAMA2; (-) strand; PAM type: NAAAAC; PAM sequence: AAAAAC
caataggaaagtagcaatgg

SEQ ID NO: 5836 - DNA, 20 bp, Artificial Sequence
  Description of Artificial Sequence: Synthetic oligonucleotide
  Target: LAMA2; (-) strand; PAM type: NAAAAC; PAM sequence: GAAAAC
aatctcaagatacatatgag

SEQ ID NO: 5837 - DNA, 20 bp, Artificial Sequence
  Description of Artificial Sequence: Synthetic oligonucleotide
  Target: LAMA2; (-) strand; PAM type: NAAAAC; PAM sequence: TAAAAC
aaatatagctatgcttgtta

SEQ ID NO: 5838 - DNA, 20 bp, Artificial Sequence
  Description of Artificial Sequence: Synthetic oligonucleotide
  Target: LAMA2; (-) strand; PAM type: NAAAAC; PAM sequence: GAAAAC
aaaaaatcagaatctatatt

SEQ ID NO: 5839 - DNA, 20 bp, Artificial Sequence
  Description of Artificial Sequence: Synthetic oligonucleotide
  Target: LAMA2; (-) strand; PAM type: NAAAAC; PAM sequence: TAAAAC
taatatccagttacaaaatg

SEQ ID NO: 5840 - DNA, 20 bp, Artificial Sequence
  Description of Artificial Sequence: Synthetic oligonucleotide
  Target: LAMA2; (-) strand; PAM type: NAAAAC; PAM sequence: CAAAAC
tcataaagttgtgaggatta

SEQ ID NO: 5841 - DNA, 20 bp, Artificial Sequence
  Description of Artificial Sequence: Synthetic oligonucleotide
  Target: LAMA2; (-) strand; PAM type: NAAAAC; PAM sequence: TAAAAC
catttgtgatacccaaggga

SEQ ID NO: 5842 - DNA, 20 bp, Artificial Sequence
  Description of Artificial Sequence: Synthetic oligonucleotide
  Target: LAMA2; (-) strand; PAM type: NAAAAC; PAM sequence: GAAAAC
aaatctagaagcaaatctta

SEQ ID NO: 5843 - DNA, 20 bp, Artificial Sequence
  Description of Artificial Sequence: Synthetic oligonucleotide
  Target: LAMA2; (-) strand; PAM type: NAAAAC; PAM sequence: TAAAAC
attcttaaatccctgtccaa

SEQ ID NO: 5844 - DNA, 20 bp, Artificial Sequence
  Description of Artificial Sequence: Synthetic oligonucleotide
  Target: LAMA2; (-) strand; PAM type: NAAAAC; PAM sequence: AAAAAC
cagagtaaaagtcctttttt

SEQ ID NO: 5845 - DNA, 20 bp, Artificial Sequence
  Description of Artificial Sequence: Synthetic oligonucleotide
  Target: LAMA2; (-) strand; PAM type: NAAAAC; PAM sequence: AAAAAC
tgtcattttggatgtgattt

SEQ ID NO: 5846 - DNA, 20 bp, Artificial Sequence
  Description of Artificial Sequence: Synthetic oligonucleotide
  Target: LAMA2; (-) strand; PAM type: NAAAAC; PAM sequence: CAAAAC
taaatcacacattctttctt

SEQ ID NO: 5847 - DNA, 20 bp, Artificial Sequence
  Description of Artificial Sequence: Synthetic oligonucleotide
  Target: LAMA2; (-) strand; PAM type: NAAAAC; PAM sequence: CAAAAC
gtttgcctttattttaccac

SEQ ID NO: 5848 - DNA, 20 bp, Artificial Sequence
  Description of Artificial Sequence: Synthetic oligonucleotide
  Target: LAMA2; (-) strand; PAM type: NAAAAC; PAM sequence: GAAAAC
aatatgttgtgttaacaaaa

SEQ ID NO: 5849 - DNA, 20 bp, Artificial Sequence
  Description of Artificial Sequence: Synthetic oligonucleotide
  Target: LAMA2; (-) strand; PAM type: NAAAAC; PAM sequence: GAAAAC
ccgcagggtcctctgcctag

SEQ ID NO: 5850 - DNA, 20 bp, Artificial Sequence
  Description of Artificial Sequence: Synthetic oligonucleotide
  Target: LAMA2; (-) strand; PAM type: NAAAAC; PAM sequence: GAAAAC
ttaacaacgtcagctgcagg

SEQ ID NO: 5851 - DNA, 20 bp, Artificial Sequence
  Description of Artificial Sequence: Synthetic oligonucleotide
  Target: LAMA2; (-) strand; PAM type: NAAAAC; PAM sequence: GAAAAC
caattttagtccagtcttaa

SEQ ID NO: 5852 - DNA, 20 bp, Artificial Sequence
  Description of Artificial Sequence: Synthetic oligonucleotide
  Target: LAMA2; (-) strand; PAM type: NAAAAC; PAM sequence: GAAAAC
gagtaggatgtggatgggtt

SEQ ID NO: 5853 - DNA, 20 bp, Artificial Sequence
  Description of Artificial Sequence: Synthetic oligonucleotide
  Target: LAMA2; (-) strand; PAM type: NAAAAC; PAM sequence: AAAAAC
tcctgattcaactgttttta

SEQ ID NO: 5854 - DNA, 20 bp, Artificial Sequence
  Description of Artificial Sequence: Synthetic oligonucleotide
  Target: LAMA2; (-) strand; PAM type: NAAAAC; PAM sequence: GAAAAC
taacaagcaataataagcaa

SEQ ID NO: 5855 - DNA, 20 bp, Artificial Sequence
  Description of Artificial Sequence: Synthetic oligonucleotide
  Target: LAMA2; (-) strand; PAM type: NAAAAC; PAM sequence: TAAAAC
aggaatactctgccctcagt

SEQ ID NO: 5856 - DNA, 20 bp, Artificial Sequence
  Description of Artificial Sequence: Synthetic oligonucleotide
  Target: LAMA2; (-) strand; PAM type: NAAAAC; PAM sequence: AAAAAC
ttaaatgatgttttaaactt

SEQ ID NO: 5857 - DNA, 20 bp, Artificial Sequence
  Description of Artificial Sequence: Synthetic oligonucleotide
  Target: LAMA2; (-) strand; PAM type: NAAAAC; PAM sequence: GAAAAC
ctcaccgaggtaggtctgat

SEQ ID NO: 5858 - DNA, 20 bp, Artificial Sequence
  Description of Artificial Sequence: Synthetic oligonucleotide
  Target: LAMA2; (-) strand; PAM type: NAAAAC; PAM sequence: GAAAAC
tacccatgttagttaagtct

SEQ ID NO: 5859 - DNA, 20 bp, Artificial Sequence
  Description of Artificial Sequence: Synthetic oligonucleotide
  Target: LAMA2; (-) strand; PAM type: NAAAAC; PAM sequence: AAAAAC
aaaaaatcccaaataacttt

SEQ ID NO: 5860 - DNA, 20 bp, Artificial Sequence
  Description of Artificial Sequence: Synthetic oligonucleotide
  Target: LAMA2; (-) strand; PAM type: NAAAAC; PAM sequence: CAAAAC
agactgaatgagtcccattt

SEQ ID NO: 5861 - DNA, 20 bp, Artificial Sequence
  Description of Artificial Sequence: Synthetic oligonucleotide
  Target: LAMA2; (-) strand; PAM type: NAAAAC; PAM sequence: TAAAAC
tagagatttttttaaagata

SEQ ID NO: 5862 - DNA, 20 bp, Artificial Sequence
  Description of Artificial Sequence: Synthetic oligonucleotide
  Target: LAMA2; (-) strand; PAM type: NAAAAC; PAM sequence: AAAAAC
tgtttccttccagaaaaaat

SEQ ID NO: 5863 - DNA, 20 bp, Artificial Sequence
  Description of Artificial Sequence: Synthetic oligonucleotide
  Target: LAMA2; (-) strand; PAM type: NAAAAC; PAM sequence: TAAAAC
ttcttagagttatttctaaa

SEQ ID NO: 5864 - DNA, 20 bp, Artificial Sequence
  Description of Artificial Sequence: Synthetic oligonucleotide
  Target: LAMA2; (-) strand; PAM type: NAAAAC; PAM sequence: AAAAAC
tcaatgtgaaaataaaatat

SEQ ID NO: 5865 - DNA, 20 bp, Artificial Sequence
  Description of Artificial Sequence: Synthetic oligonucleotide
  Target: LAMA2; (-) strand; PAM type: NAAAAC; PAM sequence: TAAAAC
aatgaaaagtgctataataa

SEQ ID NO: 5866 - DNA, 20 bp, Artificial Sequence
  Description of Artificial Sequence: Synthetic oligonucleotide
  Target: LAMA2; (-) strand; PAM type: NAAAAC; PAM sequence: AAAAAC
ggcagttagtatggtacagc

SEQ ID NO: 5867 - DNA, 20 bp, Artificial Sequence
  Description of Artificial Sequence: Synthetic oligonucleotide
  Target: LAMA2; (-) strand; PAM type: NAAAAC; PAM sequence: GAAAAC
gaatagtgcttgatagttta

SEQ ID NO: 5868 - DNA, 20 bp, Artificial Sequence
  Description of Artificial Sequence: Synthetic oligonucleotide
  Target: LAMA2; (-) strand; PAM type: NAAAAC; PAM sequence: TAAAAC
ccattataattattaccacc

SEQ ID NO: 5869 - DNA, 20 bp, Artificial Sequence
  Description of Artificial Sequence: Synthetic oligonucleotide
  Target: LAMA2; (-) strand; PAM type: NAAAAC; PAM sequence: AAAAAC
gccctatgtggtgacagcag

SEQ ID NO: 5870 - DNA, 20 bp, Artificial Sequence
  Description of Artificial Sequence: Synthetic oligonucleotide
  Target: LAMA2; (-) strand; PAM type: NAAAAC; PAM sequence: AAAAAC
aaaaaaaaaaaaaacaaaaa

SEQ ID NO: 5871 - DNA, 20 bp, Artificial Sequence
  Description of Artificial Sequence: Synthetic oligonucleotide
  Target: LAMA2; (-) strand; PAM type: NAAAAC; PAM sequence: AAAAAC
agccagaaaacaaaaaaaaa

SEQ ID NO: 5872 - DNA, 20 bp, Artificial Sequence
  Description of Artificial Sequence: Synthetic oligonucleotide
  Target: LAMA2; (-) strand; PAM type: NAAAAC; PAM sequence: GAAAAC
aagaacacacaactaagcca

SEQ ID NO: 5873 - DNA, 20 bp, Artificial Sequence
  Description of Artificial Sequence: Synthetic oligonucleotide
  Target: LAMA2; (-) strand; PAM type: NAAAAC; PAM sequence: CAAAAC
tattatttccttaatggcaa

SEQ ID NO: 5874 - DNA, 20 bp, Artificial Sequence
  Description of Artificial Sequence: Synthetic oligonucleotide
  Target: LAMA2; (-) strand; PAM type: NAAAAC; PAM sequence: CAAAAC
agggtctgacagatttatgc

SEQ ID NO: 5875 - DNA, 20 bp, Artificial Sequence
  Description of Artificial Sequence: Synthetic oligonucleotide
  Target: LAMA2; (-) strand; PAM type: NAAAAC; PAM sequence: CAAAAC
ccatttggaatgtttttccc

SEQ ID NO: 5876 - DNA, 20 bp, Artificial Sequence
  Description of Artificial Sequence: Synthetic oligonucleotide
  Target: LAMA2; (-) strand; PAM type: NAAAAC; PAM sequence: CAAAAC
aaaataataaaaattcaact

SEQ ID NO: 5877 - DNA, 20 bp, Artificial Sequence
  Description of Artificial Sequence: Synthetic oligonucleotide
  Target: LAMA2; (-) strand; PAM type: NAAAAC; PAM sequence: GAAAAC
agtaagtgttgtttaggagt

SEQ ID NO: 5878 - DNA, 20 bp, Artificial Sequence
  Description of Artificial Sequence: Synthetic oligonucleotide
  Target: LAMA2; (-) strand; PAM type: NAAAAC; PAM sequence: CAAAAC
taatgttagagaaaagtatc

SEQ ID NO: 5879 - DNA, 20 bp, Artificial Sequence
  Description of Artificial Sequence: Synthetic oligonucleotide
  Target: LAMA2; (-) strand; PAM type: NAAAAC; PAM sequence: TAAAAC
tatgtgaaagtacataattt

SEQ ID NO: 5880 - DNA, 20 bp, Artificial Sequence
  Description of Artificial Sequence: Synthetic oligonucleotide
  Target: LAMA2; (-) strand; PAM type: NAAAAC; PAM sequence: GAAAAC
tacataagcaatggaaatca

SEQ ID NO: 5881 - DNA, 20 bp, Artificial Sequence
  Description of Artificial Sequence: Synthetic oligonucleotide
  Target: LAMA2; (-) strand; PAM type: NAAAAC; PAM sequence: TAAAAC
gaagatctgaagcatcatag

SEQ ID NO: 5882 - DNA, 20 bp, Artificial Sequence
  Description of Artificial Sequence: Synthetic oligonucleotide
  Target: LAMA2; (-) strand; PAM type: NAAAAC; PAM sequence: GAAAAC
atacagaaagacaaaaggat

SEQ ID NO: 5883 - DNA, 20 bp, Artificial Sequence
  Description of Artificial Sequence: Synthetic oligonucleotide
  Target: LAMA2; (-) strand; PAM type: NAAAAC; PAM sequence: GAAAAC
ggtgaaaccctgtctgtact

SEQ ID NO: 5884 - DNA, 20 bp, Artificial Sequence
  Description of Artificial Sequence: Synthetic oligonucleotide
  Target: LAMA2; (-) strand; PAM type: NAAAAC; PAM sequence: AAAAAC
atatattagaattatcagac

SEQ ID NO: 5885 - DNA, 20 bp, Artificial Sequence
  Description of Artificial Sequence: Synthetic oligonucleotide
  Target: LAMA2; (-) strand; PAM type: NAAAAC; PAM sequence: AAAAAC
gacaaactggataaatatac

SEQ ID NO: 5886 - DNA, 20 bp, Artificial Sequence
  Description of Artificial Sequence: Synthetic oligonucleotide
  Target: LAMA2; (-) strand; PAM type: NAAAAC; PAM sequence: TAAAAC
atatttcttaaaatatctct

SEQ ID NO: 5887 - DNA, 20 bp, Artificial Sequence
  Description of Artificial Sequence: Synthetic oligonucleotide
  Target: LAMA2; (-) strand; PAM type: NAAAAC; PAM sequence: AAAAAC
gaagcccagtttaaccatga

SEQ ID NO: 5888 - DNA, 20 bp, Artificial Sequence
  Description of Artificial Sequence: Synthetic oligonucleotide
  Target: LAMA2; (-) strand; PAM type: NAAAAC; PAM sequence: AAAAAC
actatgtaaccataaaaatt

SEQ ID NO: 5889 - DNA, 20 bp, Artificial Sequence
  Description of Artificial Sequence: Synthetic oligonucleotide
  Target: LAMA2; (-) strand; PAM type: NAAAAC; PAM sequence: TAAAAC
tcctattaatgttctaagcc

SEQ ID NO: 5890 - DNA, 20 bp, Artificial Sequence
  Description of Artificial Sequence: Synthetic oligonucleotide
  Target: LAMA2; (-) strand; PAM type: NAAAAC; PAM sequence: GAAAAC
ggatttggcattagtcacaa

SEQ ID NO: 5891 - DNA, 20 bp, Artificial Sequence
  Description of Artificial Sequence: Synthetic oligonucleotide
  Target: LAMA2; (-) strand; PAM type: NAAAAC; PAM sequence: TAAAAC
gagtaacaaacaaagccaaa

SEQ ID NO: 5892 - DNA, 20 bp, Artificial Sequence
  Description of Artificial Sequence: Synthetic oligonucleotide
  Target: LAMA2; (-) strand; PAM type: NAAAAC; PAM sequence: TAAAAC
agaaaattgcccttctaaaa

SEQ ID NO: 5893 - DNA, 20 bp, Artificial Sequence
  Description of Artificial Sequence: Synthetic oligonucleotide
  Target: LAMA2; (-) strand; PAM type: NAAAAC; PAM sequence: CAAAAC
tgccaagagactcagtccac

SEQ ID NO: 5894 - DNA, 20 bp, Artificial Sequence
  Description of Artificial Sequence: Synthetic oligonucleotide
  Target: LAMA2; (-) strand; PAM type: NAAAAC; PAM sequence: GAAAAC
tatttacctaaatttctatt

SEQ ID NO: 5895 - DNA, 20 bp, Artificial Sequence
  Description of Artificial Sequence: Synthetic oligonucleotide
  Target: LAMA2; (-) strand; PAM type: NAAAAC; PAM sequence: TAAAAC
aacctaaaacatgaaaatac

SEQ ID NO: 5896 - DNA, 20 bp, Artificial Sequence
  Description of Artificial Sequence: Synthetic oligonucleotide
  Target: LAMA2; (-) strand; PAM type: NAAAAC; PAM sequence: TAAAAC
ggtaaagaatttttttaacc

SEQ ID NO: 5897 - DNA, 20 bp, Artificial Sequence
  Description of Artificial Sequence: Synthetic oligonucleotide
  Target: LAMA2; (-) strand; PAM type: NAAAAC; PAM sequence: AAAAAC
tcaattaaagtgaaggttaa

SEQ ID NO: 5898 - DNA, 20 bp, Artificial Sequence
  Description of Artificial Sequence: Synthetic oligonucleotide
  Target: LAMA2; (-) strand; PAM type: NAAAAC; PAM sequence: AAAAAC
cagaataaagcttgaagcag

SEQ ID NO: 5899 - DNA, 20 bp, Artificial Sequence
  Description of Artificial Sequence: Synthetic oligonucleotide
  Target: LAMA2; (-) strand; PAM type: NAAAAC; PAM sequence: AAAAAC
acaaaaataaaaaatattta

SEQ ID NO: 5900 - DNA, 20 bp, Artificial Sequence
  Description of Artificial Sequence: Synthetic oligonucleotide
  Target: LAMA2; (-) strand; PAM type: NAAAAC; PAM sequence: TAAAAC
gaagcaatgactaaagacac

SEQ ID NO: 5901 - DNA, 20 bp, Artificial Sequence
  Description of Artificial Sequence: Synthetic oligonucleotide
  Target: LAMA2; (-) strand; PAM type: NAAAAC; PAM sequence: CAAAAC
ggaacttggatagcaaaaaa

SEQ ID NO: 5902 - DNA, 20 bp, Artificial Sequence
  Description of Artificial Sequence: Synthetic oligonucleotide
  Target: LAMA2; (-) strand; PAM type: NAAAAC; PAM sequence: AAAAAC
tcttaggaacttggatagca

SEQ ID NO: 5903 - DNA, 20 bp, Artificial Sequence
  Description of Artificial Sequence: Synthetic oligonucleotide
  Target: LAMA2; (-) strand; PAM type: NAAAAC; PAM sequence: TAAAAC
tttgaggaatcttctgtgag

SEQ ID NO: 5904 - DNA, 20 bp, Artificial Sequence
  Description of Artificial Sequence: Synthetic oligonucleotide
  Target: LAMA2; (-) strand; PAM type: NAAAAC; PAM sequence: TAAAAC
tcctgtaatgtgatccttat

SEQ ID NO: 5905 - DNA, 20 bp, Artificial Sequence
  Description of Artificial Sequence: Synthetic oligonucleotide
  Target: LAMA2; (-) strand; PAM type: NAAAAC; PAM sequence: TAAAAC
taatatttaaaaacattttc

SEQ ID NO: 5906 - DNA, 20 bp, Artificial Sequence
  Description of Artificial Sequence: Synthetic oligonucleotide
  Target: LAMA2; (-) strand; PAM type: NAAAAC; PAM sequence: AAAAAC
atggatgcaaattaatattt

SEQ ID NO: 5907 - DNA, 20 bp, Artificial Sequence
  Description of Artificial Sequence: Synthetic oligonucleotide
  Target: LAMA2; (-) strand; PAM type: NAAAAC; PAM sequence: AAAAAC
ggaccattaaagtcgtagtc

SEQ ID NO: 5908 - DNA, 20 bp, Artificial Sequence
  Description of Artificial Sequence: Synthetic oligonucleotide
  Target: LAMA2; (-) strand; PAM type: NAAAAC; PAM sequence: AAAAAC
atatatcttttaagtcattt

SEQ ID NO: 5909 - DNA, 20 bp, Artificial Sequence
  Description of Artificial Sequence: Synthetic oligonucleotide
  Target: LAMA2; (-) strand; PAM type: NAAAAC; PAM sequence: AAAAAC
tagcttgagccaaataaaag

SEQ ID NO: 5910 - DNA, 20 bp, Artificial Sequence
  Description of Artificial Sequence: Synthetic oligonucleotide
  Target: LAMA2; (-) strand; PAM type: NAAAAC; PAM sequence: CAAAAC
aatctgaagtttttttggat

SEQ ID NO: 5911 - DNA, 20 bp, Artificial Sequence
  Description of Artificial Sequence: Synthetic oligonucleotide
  Target: LAMA2; (-) strand; PAM type: NAAAAC; PAM sequence: GAAAAC
agtttataattttcagttca

SEQ ID NO: 5912 - DNA, 20 bp, Artificial Sequence
  Description of Artificial Sequence: Synthetic oligonucleotide
  Target: LAMA2; (-) strand; PAM type: NAAAAC; PAM sequence: TAAAAC
tctacttaggtaacgtaaaa

SEQ ID NO: 5913 - DNA, 20 bp, Artificial Sequence
  Description of Artificial Sequence: Synthetic oligonucleotide
  Target: LAMA2; (-) strand; PAM type: NAAAAC; PAM sequence: AAAAAC
cccccttccctacaaaattt

SEQ ID NO: 5914 - DNA, 20 bp, Artificial Sequence
  Description of Artificial Sequence: Synthetic oligonucleotide
  Target: LAMA2; (-) strand; PAM type: NAAAAC; PAM sequence: CAAAAC
acgctttatattctgtgagc

SEQ ID NO: 5915 - DNA, 20 bp, Artificial Sequence
  Description of Artificial Sequence: Synthetic oligonucleotide
  Target: LAMA2; (-) strand; PAM type: NAAAAC; PAM sequence: TAAAAC
tgtaagtggatgtcaggttt

SEQ ID NO: 5916 - DNA, 20 bp, Artificial Sequence
  Description of Artificial Sequence: Synthetic oligonucleotide
  Target: LAMA2; (-) strand; PAM type: NAAAAC; PAM sequence: TAAAAC
tgcattgtataagctaaagc

SEQ ID NO: 5917 - DNA, 20 bp, Artificial Sequence
  Description of Artificial Sequence: Synthetic oligonucleotide
  Target: LAMA2; (-) strand; PAM type: NAAAAC; PAM sequence: TAAAAC
acattgttggaaaacaatta

SEQ ID NO: 5918 - DNA, 20 bp, Artificial Sequence
  Description of Artificial Sequence: Synthetic oligonucleotide
  Target: LAMA2; (-) strand; PAM type: NAAAAC; PAM sequence: GAAAAC
ccattatgtaaacattgttg

SEQ ID NO: 5919 - DNA, 20 bp, Artificial Sequence
  Description of Artificial Sequence: Synthetic oligonucleotide
  Target: LAMA2; (-) strand; PAM type: NAAAAC; PAM sequence: AAAAAC
ttgtcaatggaaagatttac

SEQ ID NO: 5920 - DNA, 20 bp, Artificial Sequence
  Description of Artificial Sequence: Synthetic oligonucleotide
  Target: LAMA2; (-) strand; PAM type: NAAAAC; PAM sequence: CAAAAC
caaactgtaagtgctggaga

SEQ ID NO: 5921 - DNA, 20 bp, Artificial Sequence
  Description of Artificial Sequence: Synthetic oligonucleotide
  Target: LAMA2; (-) strand; PAM type: NAAAAC; PAM sequence: TAAAAC
gatgctatttctttattatt

SEQ ID NO: 5922 - DNA, 20 bp, Artificial Sequence
  Description of Artificial Sequence: Synthetic oligonucleotide
  Target: LAMA2; (-) strand; PAM type: NAAAAC; PAM sequence: CAAAAC
tcttatcactggatttaaaa

SEQ ID NO: 5923 - DNA, 20 bp, Artificial Sequence
  Description of Artificial Sequence: Synthetic oligonucleotide
  Target: LAMA2; (-) strand; PAM type: NAAAAC; PAM sequence: TAAAAC
ttcattcttatcactggatt

SEQ ID NO: 5924 - DNA, 20 bp, Artificial Sequence
  Description of Artificial Sequence: Synthetic oligonucleotide
  Target: LAMA2; (-) strand; PAM type: NAAAAC; PAM sequence: GAAAAC
ttttaaaaaaagcaaataca

SEQ ID NO: 5925 - DNA, 20 bp, Artificial Sequence
  Description of Artificial Sequence: Synthetic oligonucleotide
  Target: LAMA2; (-) strand; PAM type: NAAAAC; PAM sequence: GAAAAC
tgggaaaagctggtaggaga

SEQ ID NO: 5926 - DNA, 20 bp, Artificial Sequence
  Description of Artificial Sequence: Synthetic oligonucleotide
  Target: LAMA2; (-) strand; PAM type: NAAAAC; PAM sequence: AAAAAC
tcaaaaatcttgtactctgg

SEQ ID NO: 5927 - DNA, 20 bp, Artificial Sequence
  Description of Artificial Sequence: Synthetic oligonucleotide
  Target: LAMA2; (-) strand; PAM type: NAAAAC; PAM sequence: AAAAAC
tcaactccaagaaaaattct

SEQ ID NO: 5928 - DNA, 20 bp, Artificial Sequence
  Description of Artificial Sequence: Synthetic oligonucleotide
  Target: LAMA2; (-) strand; PAM type: NAAAAC; PAM sequence: AAAAAC
taatacaactaagtgaatgg

SEQ ID NO: 5929 - DNA, 20 bp, Artificial Sequence
  Description of Artificial Sequence: Synthetic oligonucleotide
  Target: LAMA2; (-) strand; PAM type: NAAAAC; PAM sequence: AAAAAC
actgttaattcatctccttt

SEQ ID NO: 5930 - DNA, 20 bp, Artificial Sequence
  Description of Artificial Sequence: Synthetic oligonucleotide
  Target: LAMA2; (-) strand; PAM type: NAAAAC; PAM sequence: AAAAAC
tatggataagaaaaatagta

SEQ ID NO: 5931 - DNA, 20 bp, Artificial Sequence
  Description of Artificial Sequence: Synthetic oligonucleotide
  Target: LAMA2; (-) strand; PAM type: NAAAAC; PAM sequence: AAAAAC
tctaaccataagccatctga

SEQ ID NO: 5932 - DNA, 20 bp, Artificial Sequence
  Description of Artificial Sequence: Synthetic oligonucleotide
  Target: LAMA2; (-) strand; PAM type: NAAAAC; PAM sequence: AAAAAC
cattctttagggaagcaatt

SEQ ID NO: 5933 - DNA, 20 bp, Artificial Sequence
  Description of Artificial Sequence: Synthetic oligonucleotide
  Target: LAMA2; (-) strand; PAM type: NAAAAC; PAM sequence: CAAAAC
ggcatttttaaatattacaa

SEQ ID NO: 5934 - DNA, 20 bp, Artificial Sequence
  Description of Artificial Sequence: Synthetic oligonucleotide
  Target: LAMA2; (-) strand; PAM type: NAAAAC; PAM sequence: CAAAAC
tgtctttggaccgctgatcc

SEQ ID NO: 5935 - DNA, 20 bp, Artificial Sequence
  Description of Artificial Sequence: Synthetic oligonucleotide
  Target: LAMA2; (-) strand; PAM type: NAAAAC; PAM sequence: TAAAAC
gaggataattccacttgtgt

SEQ ID NO: 5936 - DNA, 20 bp, Artificial Sequence
  Description of Artificial Sequence: Synthetic oligonucleotide
  Target: LAMA2; (-) strand; PAM type: NAAAAC; PAM sequence: AAAAAC
aaacacaacctcataagtgc

SEQ ID NO: 5937 - DNA, 20 bp, Artificial Sequence
  Description of Artificial Sequence: Synthetic oligonucleotide
  Target: LAMA2; (-) strand; PAM type: NAAAAC; PAM sequence: AAAAAC
gtggaatactatgttaaaat

SEQ ID NO: 5938 - DNA, 20 bp, Artificial Sequence
  Description of Artificial Sequence: Synthetic oligonucleotide
  Target: LAMA2; (-) strand; PAM type: NAAAAC; PAM sequence: TAAAAC
agtgataattttttgataat

SEQ ID NO: 5939 - DNA, 20 bp, Artificial Sequence
  Description of Artificial Sequence: Synthetic oligonucleotide
  Target: LAMA2; (-) strand; PAM type: NAAAAC; PAM sequence: TAAAAC
caacaatttctggttgtaaa

SEQ ID NO: 5940 - DNA, 20 bp, Artificial Sequence
  Description of Artificial Sequence: Synthetic oligonucleotide
  Target: LAMA2; (-) strand; PAM type: NAAAAC; PAM sequence: TAAAAC
tttacttagtctgatcctga

SEQ ID NO: 5941 - DNA, 20 bp, Artificial Sequence
  Description of Artificial Sequence: Synthetic oligonucleotide
  Target: LAMA2; (-) strand; PAM type: NAAAAC; PAM sequence: CAAAAC
gatttttaaatctgaaaccc

SEQ ID NO: 5942 - DNA, 20 bp, Artificial Sequence
  Description of Artificial Sequence: Synthetic oligonucleotide
  Target: LAMA2; (-) strand; PAM type: NAAAAC; PAM sequence: TAAAAC
gtaatctttagtaaatattg

SEQ ID NO: 5943 - DNA, 20 bp, Artificial Sequence
  Description of Artificial Sequence: Synthetic oligonucleotide
  Target: LAMA2; (-) strand; PAM type: NAAAAC; PAM sequence: CAAAAC
agtctagtagacaaacatcc

SEQ ID NO: 5944 - DNA, 20 bp, Artificial Sequence
  Description of Artificial Sequence: Synthetic oligonucleotide
  Target: LAMA2; (-) strand; PAM type: NAAAAC; PAM sequence: GAAAAC
ggagtagcagacacaccatt

SEQ ID NO: 5945 - DNA, 20 bp, Artificial Sequence
  Description of Artificial Sequence: Synthetic oligonucleotide
  Target: LAMA2; (-) strand; PAM type: NAAAAC; PAM sequence: GAAAAC
tataaatataattaatttct

SEQ ID NO: 5946 - DNA, 20 bp, Artificial Sequence
  Description of Artificial Sequence: Synthetic oligonucleotide
  Target: LAMA2; (-) strand; PAM type: NAAAAC; PAM sequence: TAAAAC
tataagttttaagaaatgtc

SEQ ID NO: 5947 - DNA, 20 bp, Artificial Sequence
  Description of Artificial Sequence: Synthetic oligonucleotide
  Target: LAMA2; (-) strand; PAM type: NAAAAC; PAM sequence: AAAAAC
acaaccagtaaatcagttta

SEQ ID NO: 5948 - DNA, 20 bp, Artificial Sequence
  Description of Artificial Sequence: Synthetic oligonucleotide
  Target: LAMA2; (-) strand; PAM type: NAAAAC; PAM sequence: AAAAAC
ttctcatataagattttctc

SEQ ID NO: 5949 - DNA, 20 bp, Artificial Sequence
  Description of Artificial Sequence: Synthetic oligonucleotide
  Target: LAMA2; (-) strand; PAM type: NAAAAC; PAM sequence: AAAAAC
caaggaataaacgttcatgt

SEQ ID NO: 5950 - DNA, 20 bp, Artificial Sequence
  Description of Artificial Sequence: Synthetic oligonucleotide
  Target: LAMA2; (-) strand; PAM type: NAAAAC; PAM sequence: TAAAAC
cttaattcatcttgtataaa

SEQ ID NO: 5951 - DNA, 20 bp, Artificial Sequence
  Description of Artificial Sequence: Synthetic oligonucleotide
  Target: LAMA2; (-) strand; PAM type: NAAAAC; PAM sequence: AAAAAC
tatttctatactgctttaaa

SEQ ID NO: 5952 - DNA, 20 bp, Artificial Sequence
  Description of Artificial Sequence: Synthetic oligonucleotide
  Target: LAMA2; (-) strand; PAM type: NAAAAC; PAM sequence: GAAAAC
agatacgattattatttcaa

SEQ ID NO: 5953 - DNA, 20 bp, Artificial Sequence
  Description of Artificial Sequence: Synthetic oligonucleotide
  Target: LAMA2; (-) strand; PAM type: NAAAAC; PAM sequence: CAAAAC
atggtctgtgcacctggttt

SEQ ID NO: 5954 - DNA, 20 bp, Artificial Sequence
  Description of Artificial Sequence: Synthetic oligonucleotide
  Target: LAMA2; (-) strand; PAM type: NAAAAC; PAM sequence: CAAAAC
atccttccctttgctcatgc

SEQ ID NO: 5955 - DNA, 20 bp, Artificial Sequence
  Description of Artificial Sequence: Synthetic oligonucleotide
  Target: LAMA2; (-) strand; PAM type: NAAAAC; PAM sequence: CAAAAC
gaactcctattcttctctgt

SEQ ID NO: 5956 - DNA, 20 bp, Artificial Sequence
  Description of Artificial Sequence: Synthetic oligonucleotide
  Target: LAMA2; (-) strand; PAM type: NAAAAC; PAM sequence: CAAAAC
ttatgggaaatctctgtgtc

SEQ ID NO: 5957 - DNA, 20 bp, Artificial Sequence
  Description of Artificial Sequence: Synthetic oligonucleotide
  Target: LAMA2; (-) strand; PAM type: NAAAAC; PAM sequence: GAAAAC
tcttaatgatattaattact

SEQ ID NO: 5958 - DNA, 20 bp, Artificial Sequence
  Description of Artificial Sequence: Synthetic oligonucleotide
  Target: LAMA2; (-) strand; PAM type: NAAAAC; PAM sequence: AAAAAC
tgtcaaacagatgttcattg

SEQ ID NO: 5959 - DNA, 20 bp, Artificial Sequence
  Description of Artificial Sequence: Synthetic oligonucleotide
  Target: LAMA2; (-) strand; PAM type: NAAAAC; PAM sequence: TAAAAC
agaaacattttatttttatg

SEQ ID NO: 5960 - DNA, 20 bp, Artificial Sequence
  Description of Artificial Sequence: Synthetic oligonucleotide
  Target: LAMA2; (-) strand; PAM type: NAAAAC; PAM sequence: TAAAAC
tctcccttgcatgtgaaatg

SEQ ID NO: 5961 - DNA, 20 bp, Artificial Sequence
  Description of Artificial Sequence: Synthetic oligonucleotide
  Target: LAMA2; (-) strand; PAM type: NAAAAC; PAM sequence: GAAAAC
tcaacagatgaatggataaa

SEQ ID NO: 5962 - DNA, 20 bp, Artificial Sequence
  Description of Artificial Sequence: Synthetic oligonucleotide
  Target: LAMA2; (-) strand; PAM type: NAAAAC; PAM sequence: CAAAAC
gaaaactacatggagttttc

SEQ ID NO: 5963 - DNA, 20 bp, Artificial Sequence
  Description of Artificial Sequence: Synthetic oligonucleotide
  Target: LAMA2; (-) strand; PAM type: NAAAAC; PAM sequence: GAAAAC
aaattagtacagccattatg

SEQ ID NO: 5964 - DNA, 20 bp, Artificial Sequence
  Description of Artificial Sequence: Synthetic oligonucleotide
  Target: LAMA2; (-) strand; PAM type: NAAAAC; PAM sequence: AAAAAC
aatgttggcgagaatatgga

SEQ ID NO: 5965 - DNA, 20 bp, Artificial Sequence
  Description of Artificial Sequence: Synthetic oligonucleotide
  Target: LAMA2; (-) strand; PAM type: NAAAAC; PAM sequence: AAAAAC
aaagtataggccacaaaagt

SEQ ID NO: 5966 - DNA, 20 bp, Artificial Sequence
  Description of Artificial Sequence: Synthetic oligonucleotide
  Target: LAMA2; (-) strand; PAM type: NAAAAC; PAM sequence: GAAAAC
gcaactccaaattgctagaa

SEQ ID NO: 5967 - DNA, 20 bp, Artificial Sequence
  Description of Artificial Sequence: Synthetic oligonucleotide
  Target: LAMA2; (-) strand; PAM type: NAAAAC; PAM sequence: CAAAAC
cccttatttcacatcatata

SEQ ID NO: 5968 - DNA, 20 bp, Artificial Sequence
  Description of Artificial Sequence: Synthetic oligonucleotide
  Target: LAMA2; (-) strand; PAM type: NAAAAC; PAM sequence: CAAAAC
tcaaaatcatcatgagcaaa

SEQ ID NO: 5969 - DNA, 20 bp, Artificial Sequence
  Description of Artificial Sequence: Synthetic oligonucleotide
  Target: LAMA2; (-) strand; PAM type: NAAAAC; PAM sequence: AAAAAC
tgtcatttttcagatataga

SEQ ID NO: 5970 - DNA, 20 bp, Artificial Sequence
  Description of Artificial Sequence: Synthetic oligonucleotide
  Target: LAMA2; (-) strand; PAM type: NAAAAC; PAM sequence: AAAAAC
ggcatgaggaagactagttc

SEQ ID NO: 5971 - DNA, 20 bp, Artificial Sequence
  Description of Artificial Sequence: Synthetic oligonucleotide
  Target: LAMA2; (-) strand; PAM type: NAAAAC; PAM sequence: CAAAAC
ccctcccattatcttatttc

SEQ ID NO: 5972 - DNA, 20 bp, Artificial Sequence
  Description of Artificial Sequence: Synthetic oligonucleotide
  Target: LAMA2; (-) strand; PAM type: NAAAAC; PAM sequence: CAAAAC
ctcacaatgagagatggcaa

SEQ ID NO: 5973 - DNA, 20 bp, Artificial Sequence
  Description of Artificial Sequence: Synthetic oligonucleotide
  Target: LAMA2; (-) strand; PAM type: NAAAAC; PAM sequence: TAAAAC
tgaatgaaaggtaaaaagaa

SEQ ID NO: 5974 - DNA, 20 bp, Artificial Sequence
  Description of Artificial Sequence: Synthetic oligonucleotide
  Target: LAMA2; (-) strand; PAM type: NAAAAC; PAM sequence: TAAAAC
gcagggagttggggacaagc

SEQ ID NO: 5975 - DNA, 20 bp, Artificial Sequence
  Description of Artificial Sequence: Synthetic oligonucleotide
  Target: LAMA2; (-) strand; PAM type: NAAAAC; PAM sequence: AAAAAC
tttgtgagaagcgggaaatg

SEQ ID NO: 5976 - DNA, 20 bp, Artificial Sequence
  Description of Artificial Sequence: Synthetic oligonucleotide
  Target: LAMA2; (-) strand; PAM type: NAAAAC; PAM sequence: TAAAAC
gatttaatgttcagaaagct

SEQ ID NO: 5977 - DNA, 20 bp, Artificial Sequence
  Description of Artificial Sequence: Synthetic oligonucleotide
  Target: LAMA2; (-) strand; PAM type: NAAAAC; PAM sequence: CAAAAC
cctgtgtcattagattggaa

SEQ ID NO: 5978 - DNA, 20 bp, Artificial Sequence
  Description of Artificial Sequence: Synthetic oligonucleotide
  Target: LAMA2; (-) strand; PAM type: NAAAAC; PAM sequence: GAAAAC
cagataacagcagctcaaag

SEQ ID NO: 5979 - DNA, 20 bp, Artificial Sequence
  Description of Artificial Sequence: Synthetic oligonucleotide
  Target: LAMA2; (-) strand; PAM type: NAAAAC; PAM sequence: GAAAAC
tgctagagaaagttccgata

SEQ ID NO: 5980 - DNA, 20 bp, Artificial Sequence
  Description of Artificial Sequence: Synthetic oligonucleotide
  Target: LAMA2; (-) strand; PAM type: NAAAAC; PAM sequence: TAAAAC
ttctacaaagaagaaagtgc

SEQ ID NO: 5981 - DNA, 20 bp, Artificial Sequence
  Description of Artificial Sequence: Synthetic oligonucleotide
  Target: LAMA2; (-) strand; PAM type: NAAAAC; PAM sequence: CAAAAC
catggaaaaactgtcttcca

SEQ ID NO: 5982 - DNA, 20 bp, Artificial Sequence
  Description of Artificial Sequence: Synthetic oligonucleotide
  Target: LAMA2; (-) strand; PAM type: NAAAAC; PAM sequence: AAAAAC
cccccctgtcaattccatgg

SEQ ID NO: 5983 - DNA, 20 bp, Artificial Sequence
  Description of Artificial Sequence: Synthetic oligonucleotide
  Target: LAMA2; (-) strand; PAM type: NAAAAC; PAM sequence: TAAAAC
taatgcttgatgatatgagg

SEQ ID NO: 5984 - DNA, 20 bp, Artificial Sequence
  Description of Artificial Sequence: Synthetic oligonucleotide
  Target: LAMA2; (-) strand; PAM type: NAAAAC; PAM sequence: AAAAAC
atacacaagatcttgtacac

SEQ ID NO: 5985 - DNA, 20 bp, Artificial Sequence
  Description of Artificial Sequence: Synthetic oligonucleotide
  Target: LAMA2; (-) strand; PAM type: NAAAAC; PAM sequence: AAAAAC
ttcagagcaagtcattagag

SEQ ID NO: 5986 - DNA, 20 bp, Artificial Sequence
  Description of Artificial Sequence: Synthetic oligonucleotide
  Target: LAMA2; (-) strand; PAM type: NAAAAC; PAM sequence: AAAAAC
taagtgcctgaaattttcaa

SEQ ID NO: 5987 - DNA, 20 bp, Artificial Sequence
  Description of Artificial Sequence: Synthetic oligonucleotide
  Target: LAMA2; (-) strand; PAM type: NAAAAC; PAM sequence: AAAAAC
attatttggggagaaataac

SEQ ID NO: 5988 - DNA, 20 bp, Artificial Sequence
  Description of Artificial Sequence: Synthetic oligonucleotide
  Target: LAMA2; (-) strand; PAM type: NAAAAC; PAM sequence: TAAAAC
aagtgtgccaatgaaacagg

SEQ ID NO: 5989 - DNA, 20 bp, Artificial Sequence
  Description of Artificial Sequence: Synthetic oligonucleotide
  Target: LAMA2; (-) strand; PAM type: NAAAAC; PAM sequence: TAAAAC
atgtgtggtatgctctctcc

SEQ ID NO: 5990 - DNA, 20 bp, Artificial Sequence
  Description of Artificial Sequence: Synthetic oligonucleotide
  Target: LAMA2; (-) strand; PAM type: NAAAAC; PAM sequence: TAAAAC
cccaagctgtttctgggata

SEQ ID NO: 5991 - DNA, 20 bp, Artificial Sequence
  Description of Artificial Sequence: Synthetic oligonucleotide
  Target: LAMA2; (-) strand; PAM type: NAAAAC; PAM sequence: TAAAAC
aaatatatggatgaagccat

SEQ ID NO: 5992 - DNA, 20 bp, Artificial Sequence
  Description of Artificial Sequence: Synthetic oligonucleotide
  Target: LAMA2; (-) strand; PAM type: NAAAAC; PAM sequence: AAAAAC
taataggataaatgttaatt

SEQ ID NO: 5993 - DNA, 20 bp, Artificial Sequence
  Description of Artificial Sequence: Synthetic oligonucleotide
  Target: LAMA2; (-) strand; PAM type: NAAAAC; PAM sequence: GAAAAC
tggagaacaaaaattacaag

SEQ ID NO: 5994 - DNA, 20 bp, Artificial Sequence
  Description of Artificial Sequence: Synthetic oligonucleotide
  Target: LAMA2; (-) strand; PAM type: NAAAAC; PAM sequence: GAAAAC
cttaaaataattctgtactt

SEQ ID NO: 5995 - DNA, 20 bp, Artificial Sequence
  Description of Artificial Sequence: Synthetic oligonucleotide
  Target: LAMA2; (-) strand; PAM type: NAAAAC; PAM sequence: GAAAAC
tggggtatggtgggaaacca

SEQ ID NO: 5996 - DNA, 20 bp, Artificial Sequence
  Description of Artificial Sequence: Synthetic oligonucleotide
  Target: LAMA2; (-) strand; PAM type: NAAAAC; PAM sequence: GAAAAC
aaccactcctacaaatcact

SEQ ID NO: 5997 - DNA, 20 bp, Artificial Sequence
  Description of Artificial Sequence: Synthetic oligonucleotide
  Target: LAMA2; (-) strand; PAM type: NAAAAC; PAM sequence: TAAAAC
tgtgattcattaatcaagca

SEQ ID NO: 5998 - DNA, 20 bp, Artificial Sequence
  Description of Artificial Sequence: Synthetic oligonucleotide
  Target: LAMA2; (-) strand; PAM type: NAAAAC; PAM sequence: TAAAAC
ctcctatagcactgcatttt

SEQ ID NO: 5999 - DNA, 20 bp, Artificial Sequence
  Description of Artificial Sequence: Synthetic oligonucleotide
  Target: LAMA2; (-) strand; PAM type: NAAAAC; PAM sequence: TAAAAC
attttatttgtaaaggaaaa

SEQ ID NO: 6000 - DNA, 20 bp, Artificial Sequence
  Description of Artificial Sequence: Synthetic oligonucleotide
  Target: LAMA2; (-) strand; PAM type: NAAAAC; PAM sequence: GAAAAC
gaagttaagtaacgaggaaa

SEQ ID NO: 6001 - DNA, 20 bp, Artificial Sequence
  Description of Artificial Sequence: Synthetic oligonucleotide
  Target: LAMA2; (-) strand; PAM type: NAAAAC; PAM sequence: TAAAAC
gtttggaaaatacagggcac

SEQ ID NO: 6002 - DNA, 20 bp, Artificial Sequence
  Description of Artificial Sequence: Synthetic oligonucleotide
  Target: LAMA2; (-) strand; PAM type: NAAAAC; PAM sequence: AAAAAC
attgaacttgagtactttca

SEQ ID NO: 6003 - DNA, 20 bp, Artificial Sequence
  Description of Artificial Sequence: Synthetic oligonucleotide
  Target: LAMA2; (-) strand; PAM type: NAAAAC; PAM sequence: TAAAAC
gtagtatttgtaaatgcttt

SEQ ID NO: 6004 - DNA, 20 bp, Artificial Sequence
  Description of Artificial Sequence: Synthetic oligonucleotide
  Target: LAMA2; (-) strand; PAM type: NAAAAC; PAM sequence: AAAAAC
caattatacacacacacaaa

SEQ ID NO: 6005 - DNA, 20 bp, Artificial Sequence
  Description of Artificial Sequence: Synthetic oligonucleotide
  Target: LAMA2; (-) strand; PAM type: NAAAAC; PAM sequence: CAAAAC
tgaggacaagtgaggactca

SEQ ID NO: 6006 - DNA, 20 bp, Artificial Sequence
  Description of Artificial Sequence: Synthetic oligonucleotide
  Target: LAMA2; (-) strand; PAM type: NAAAAC; PAM sequence: AAAAAC
aacaaaaggggacattcagt

SEQ ID NO: 6007 - DNA, 20 bp, Artificial Sequence
  Description of Artificial Sequence: Synthetic oligonucleotide
  Target: LAMA2; (-) strand; PAM type: NAAAAC; PAM sequence: AAAAAC
gaaaaaaaaaaaaaaaaagg

SEQ ID NO: 6008 - DNA, 20 bp, Artificial Sequence
  Description of Artificial Sequence: Synthetic oligonucleotide
  Target: LAMA2; (-) strand; PAM type: NAAAAC; PAM sequence: GAAAAC
acattataatccaatcatca

SEQ ID NO: 6009 - DNA, 20 bp, Artificial Sequence
  Description of Artificial Sequence: Synthetic oligonucleotide
  Target: LAMA2; (-) strand; PAM type: NAAAAC; PAM sequence: GAAAAC
aagtaaaattttaaaaaatg

SEQ ID NO: 6010 - DNA, 20 bp, Artificial Sequence
  Description of Artificial Sequence: Synthetic oligonucleotide
  Target: LAMA2; (-) strand; PAM type: NAAAAC; PAM sequence: TAAAAC
ctggactgtgtactaaaatg

SEQ ID NO: 6011 - DNA, 20 bp, Artificial Sequence
  Description of Artificial Sequence: Synthetic oligonucleotide
  Target: LAMA2; (-) strand; PAM type: NAAAAC; PAM sequence: GAAAAC
aaggtactatgaagaaaaga

SEQ ID NO: 6012 - DNA, 20 bp, Artificial Sequence
  Description of Artificial Sequence: Synthetic oligonucleotide
  Target: LAMA2; (-) strand; PAM type: NAAAAC; PAM sequence: TAAAAC
gaactatgagctactatatg

SEQ ID NO: 6013 - DNA, 20 bp, Artificial Sequence
  Description of Artificial Sequence: Synthetic oligonucleotide
  Target: LAMA2; (-) strand; PAM type: NAAAAC; PAM sequence: GAAAAC
tgctgccagtataagcagag

SEQ ID NO: 6014 - DNA, 20 bp, Artificial Sequence
  Description of Artificial Sequence: Synthetic oligonucleotide
  Target: LAMA2; (-) strand; PAM type: NAAAAC; PAM sequence: CAAAAC
agtgtatttcaaaaaacagt

SEQ ID NO: 6015 - DNA, 20 bp, Artificial Sequence
  Description of Artificial Sequence: Synthetic oligonucleotide
  Target: LAMA2; (-) strand; PAM type: NAAAAC; PAM sequence: AAAAAC
tgttgtaatagtgtatttca

SEQ ID NO: 6016 - DNA, 20 bp, Artificial Sequence
  Description of Artificial Sequence: Synthetic oligonucleotide
  Target: LAMA2; (-) strand; PAM type: NAAAAC; PAM sequence: GAAAAC
tagtatctttacagcagtgt

SEQ ID NO: 6017 - DNA, 20 bp, Artificial Sequence
  Description of Artificial Sequence: Synthetic oligonucleotide
  Target: LAMA2; (-) strand; PAM type: NAAAAC; PAM sequence: TAAAAC
ttttcctctagtagatatga

SEQ ID NO: 6018 - DNA, 20 bp, Artificial Sequence
  Description of Artificial Sequence: Synthetic oligonucleotide
  Target: LAMA2; (-) strand; PAM type: NAAAAC; PAM sequence: AAAAAC
cagttgagtgactttgaggc

SEQ ID NO: 6019 - DNA, 20 bp, Artificial Sequence
  Description of Artificial Sequence: Synthetic oligonucleotide
  Target: LAMA2; (-) strand; PAM type: NAAAAC; PAM sequence: TAAAAC
cttttaatactaataacaac

SEQ ID NO: 6020 - DNA, 20 bp, Artificial Sequence
  Description of Artificial Sequence: Synthetic oligonucleotide
  Target: LAMA2; (-) strand; PAM type: NAAAAC; PAM sequence: TAAAAC
ttaatagaatttgaaatgat

SEQ ID NO: 6021 - DNA, 20 bp, Artificial Sequence
  Description of Artificial Sequence: Synthetic oligonucleotide
  Target: LAMA2; (-) strand; PAM type: NAAAAC; PAM sequence: TAAAAC
aaaattattatttttttgta

SEQ ID NO: 6022 - DNA, 20 bp, Artificial Sequence
  Description of Artificial Sequence: Synthetic oligonucleotide
  Target: LAMA2; (-) strand; PAM type: NAAAAC; PAM sequence: TAAAAC
ttgactggaaggagccatga

SEQ ID NO: 6023 - DNA, 20 bp, Artificial Sequence
  Description of Artificial Sequence: Synthetic oligonucleotide
  Target: LAMA2; (-) strand; PAM type: NAAAAC; PAM sequence: TAAAAC
attatttgtaggagctaagc

SEQ ID NO: 6024 - DNA, 20 bp, Artificial Sequence
  Description of Artificial Sequence: Synthetic oligonucleotide
  Target: LAMA2; (-) strand; PAM type: NAAAAC; PAM sequence: GAAAAC
ttgttattatttttgtcacg

SEQ ID NO: 6025 - DNA, 20 bp, Artificial Sequence
  Description of Artificial Sequence: Synthetic oligonucleotide
  Target: LAMA2; (-) strand; PAM type: NAAAAC; PAM sequence: TAAAAC
tcgtttgtattccacctttg

SEQ ID NO: 6026 - DNA, 20 bp, Artificial Sequence
  Description of Artificial Sequence: Synthetic oligonucleotide
  Target: LAMA2; (-) strand; PAM type: NAAAAC; PAM sequence: TAAAAC
ggtactgaattgcctgttca

SEQ ID NO: 6027 - DNA, 20 bp, Artificial Sequence
  Description of Artificial Sequence: Synthetic oligonucleotide
  Target: LAMA2; (-) strand; PAM type: NAAAAC; PAM sequence: AAAAAC
tgctggacgaaagcctgaac

SEQ ID NO: 6028 - DNA, 20 bp, Artificial Sequence
  Description of Artificial Sequence: Synthetic oligonucleotide
  Target: LAMA2; (-) strand; PAM type: NAAAAC; PAM sequence: AAAAAC
ctcatcgagacctaaagagc

SEQ ID NO: 6029 - DNA, 20 bp, Artificial Sequence
  Description of Artificial Sequence: Synthetic oligonucleotide
  Target: LAMA2; (-) strand; PAM type: NAAAAC; PAM sequence: GAAAAC
aaactgtgctaatgcgccat

SEQ ID NO: 6030 - DNA, 20 bp, Artificial Sequence
  Description of Artificial Sequence: Synthetic oligonucleotide
  Target: LAMA2; (-) strand; PAM type: NAAAAC; PAM sequence: TAAAAC
cgtttctaaagcatgtagtt

SEQ ID NO: 6031 - DNA, 20 bp, Artificial Sequence
  Description of Artificial Sequence: Synthetic oligonucleotide
  Target: LAMA2; (-) strand; PAM type: NAAAAC; PAM sequence: AAAAAC
atgcaaaaccattttgttat

SEQ ID NO: 6032 - DNA, 20 bp, Artificial Sequence
  Description of Artificial Sequence: Synthetic oligonucleotide
  Target: LAMA2; (-) strand; PAM type: NAAAAC; PAM sequence: CAAAAC
gaaaagcatatgacaaaatg

SEQ ID NO: 6033 - DNA, 20 bp, Artificial Sequence
  Description of Artificial Sequence: Synthetic oligonucleotide
  Target: LAMA2; (-) strand; PAM type: NAAAAC; PAM sequence: AAAAAC
accccaataaaaaacctgac

SEQ ID NO: 6034 - DNA, 20 bp, Artificial Sequence
  Description of Artificial Sequence: Synthetic oligonucleotide
  Target: LAMA2; (-) strand; PAM type: NAAAAC; PAM sequence: AAAAAC
gatgccagtataccccaata

SEQ ID NO: 6035 - DNA, 20 bp, Artificial Sequence
  Description of Artificial Sequence: Synthetic oligonucleotide
  Target: LAMA2; (-) strand; PAM type: NAAAAC; PAM sequence: GAAAAC
tttaatctgaagttacttta

SEQ ID NO: 6036 - DNA, 20 bp, Artificial Sequence
  Description of Artificial Sequence: Synthetic oligonucleotide
  Target: LAMA2; (-) strand; PAM type: NAAAAC; PAM sequence: GAAAAC
tagccaatacaatgcacgaa

SEQ ID NO: 6037 - DNA, 20 bp, Artificial Sequence
  Description of Artificial Sequence: Synthetic oligonucleotide
  Target: LAMA2; (-) strand; PAM type: NAAAAC; PAM sequence: CAAAAC
cctccctaaagatattaata

SEQ ID NO: 6038 - DNA, 20 bp, Artificial Sequence
  Description of Artificial Sequence: Synthetic oligonucleotide
  Target: LAMA2; (-) strand; PAM type: NAAAAC; PAM sequence: TAAAAC
gaagataataaggcaatttt

SEQ ID NO: 6039 - DNA, 20 bp, Artificial Sequence
  Description of Artificial Sequence: Synthetic oligonucleotide
  Target: LAMA2; (-) strand; PAM type: NAAAAC; PAM sequence: AAAAAC
ataaatagaacagaatcaat

SEQ ID NO: 6040 - DNA, 20 bp, Artificial Sequence
  Description of Artificial Sequence: Synthetic oligonucleotide
  Target: LAMA2; (-) strand; PAM type: NAAAAC; PAM sequence: CAAAAC
aagaaaatgaaatttaaaac

SEQ ID NO: 6041 - DNA, 20 bp, Artificial Sequence
  Description of Artificial Sequence: Synthetic oligonucleotide
  Target: LAMA2; (-) strand; PAM type: NAAAAC; PAM sequence: TAAAAC
tagaaaaagaaaatgaaatt

SEQ ID NO: 6042 - DNA, 20 bp, Artificial Sequence
  Description of Artificial Sequence: Synthetic oligonucleotide
  Target: LAMA2; (-) strand; PAM type: NAAAAC; PAM sequence: GAAAAC
accatacagagtaagcatat

SEQ ID NO: 6043 - DNA, 20 bp, Artificial Sequence
  Description of Artificial Sequence: Synthetic oligonucleotide
  Target: LAMA2; (-) strand; PAM type: NAAAAC; PAM sequence: AAAAAC
gaaagttaaacaaaatcaga

SEQ ID NO: 6044 - DNA, 20 bp, Artificial Sequence
  Description of Artificial Sequence: Synthetic oligonucleotide
  Target: LAMA2; (-) strand; PAM type: NAAAAC; PAM sequence: CAAAAC
cacaaatgggaaacaaatag

SEQ ID NO: 6045 - DNA, 20 bp, Artificial Sequence
  Description of Artificial Sequence: Synthetic oligonucleotide
  Target: LAMA2; (-) strand; PAM type: NAAAAC; PAM sequence: GAAAAC
agtgaattaatgcaagaata

SEQ ID NO: 6046 - DNA, 20 bp, Artificial Sequence
  Description of Artificial Sequence: Synthetic oligonucleotide
  Target: LAMA2; (-) strand; PAM type: NAAAAC; PAM sequence: TAAAAC
gggagatttctcaaaaaact

SEQ ID NO: 6047 - DNA, 20 bp, Artificial Sequence
  Description of Artificial Sequence: Synthetic oligonucleotide
  Target: LAMA2; (-) strand; PAM type: NAAAAC; PAM sequence: AAAAAC
agccgttgggagatttctca

SEQ ID NO: 6048 - DNA, 20 bp, Artificial Sequence
  Description of Artificial Sequence: Synthetic oligonucleotide
  Target: LAMA2; (-) strand; PAM type: NAAAAC; PAM sequence: GAAAAC
acaaattatgtgcaatatat

SEQ ID NO: 6049 - DNA, 20 bp, Artificial Sequence
  Description of Artificial Sequence: Synthetic oligonucleotide
  Target: LAMA2; (-) strand; PAM type: NAAAAC; PAM sequence: GAAAAC
ttaaagtgctaaacaaagaa

SEQ ID NO: 6050 - DNA, 20 bp, Artificial Sequence
  Description of Artificial Sequence: Synthetic oligonucleotide
  Target: LAMA2; (-) strand; PAM type: NAAAAC; PAM sequence: AAAAAC
taacaaacctttacaaatgt

SEQ ID NO: 6051 - DNA, 20 bp, Artificial Sequence
  Description of Artificial Sequence: Synthetic oligonucleotide
  Target: LAMA2; (-) strand; PAM type: NAAAAC; PAM sequence: GAAAAC
tttatttaactctgaggttg

SEQ ID NO: 6052 - DNA, 20 bp, Artificial Sequence
  Description of Artificial Sequence: Synthetic oligonucleotide
  Target: LAMA2; (-) strand; PAM type: NAAAAC; PAM sequence: AAAAAC
agaaggaaaaacactggtca

SEQ ID NO: 6053 - DNA, 20 bp, Artificial Sequence
  Description of Artificial Sequence: Synthetic oligonucleotide
  Target: LAMA2; (-) strand; PAM type: NAAAAC; PAM sequence: AAAAAC
ggagtcctagaaagagaagg

SEQ ID NO: 6054 - DNA, 20 bp, Artificial Sequence
  Description of Artificial Sequence: Synthetic oligonucleotide
  Target: LAMA2; (-) strand; PAM type: NAAAAC; PAM sequence: AAAAAC
catcacaggtatcagataga

SEQ ID NO: 6055 - DNA, 20 bp, Artificial Sequence
  Description of Artificial Sequence: Synthetic oligonucleotide
  Target: LAMA2; (-) strand; PAM type: NAAAAC; PAM sequence: GAAAAC
cagttcgaaaatattaaatg

SEQ ID NO: 6056 - DNA, 20 bp, Artificial Sequence
  Description of Artificial Sequence: Synthetic oligonucleotide
  Target: LAMA2; (-) strand; PAM type: NAAAAC; PAM sequence: GAAAAC
tctaggcttaatttacaaat

SEQ ID NO: 6057 - DNA, 20 bp, Artificial Sequence
  Description of Artificial Sequence: Synthetic oligonucleotide
  Target: LAMA2; (-) strand; PAM type: NAAAAC; PAM sequence: AAAAAC
gatgtaataggaaaaaaaaa

SEQ ID NO: 6058 - DNA, 20 bp, Artificial Sequence
  Description of Artificial Sequence: Synthetic oligonucleotide
  Target: LAMA2; (-) strand; PAM type: NAAAAC; PAM sequence: CAAAAC
acaaagctagtttacttaaa

SEQ ID NO: 6059 - DNA, 20 bp, Artificial Sequence
  Description of Artificial Sequence: Synthetic oligonucleotide
  Target: LAMA2; (-) strand; PAM type: NAAAAC; PAM sequence: GAAAAC
acagagcagcaaattattga

SEQ ID NO: 6060 - DNA, 20 bp, Artificial Sequence
  Description of Artificial Sequence: Synthetic oligonucleotide
  Target: LAMA2; (-) strand; PAM type: NAAAAC; PAM sequence: AAAAAC
gtaattattgagatgagttt

SEQ ID NO: 6061 - DNA, 20 bp, Artificial Sequence
  Description of Artificial Sequence: Synthetic oligonucleotide
  Target: LAMA2; (-) strand; PAM type: NAAAAC; PAM sequence: GAAAAC
aattcaactcttcttgctat

SEQ ID NO: 6062 - DNA, 20 bp, Artificial Sequence
  Description of Artificial Sequence: Synthetic oligonucleotide
  Target: LAMA2; (-) strand; PAM type: NAAAAC; PAM sequence: AAAAAC
acgctaaagtcattagggaa

SEQ ID NO: 6063 - DNA, 20 bp, Artificial Sequence
  Description of Artificial Sequence: Synthetic oligonucleotide
  Target: LAMA2; (-) strand; PAM type: NAAAAC; PAM sequence: CAAAAC
gtaattcatcattcgactat

SEQ ID NO: 6064 - DNA, 20 bp, Artificial Sequence
  Description of Artificial Sequence: Synthetic oligonucleotide
  Target: LAMA2; (-) strand; PAM type: NAAAAC; PAM sequence: TAAAAC
aaacacaaagagaaaaggct

SEQ ID NO: 6065 - DNA, 20 bp, Artificial Sequence
  Description of Artificial Sequence: Synthetic oligonucleotide
  Target: LAMA2; (-) strand; PAM type: NAAAAC; PAM sequence: GAAAAC
aagagttaaatgatattaat

SEQ ID NO: 6066 - DNA, 20 bp, Artificial Sequence
  Description of Artificial Sequence: Synthetic oligonucleotide
  Target: LAMA2; (-) strand; PAM type: NAAAAC; PAM sequence: AAAAAC
aaagtataattaaaaaaaat

SEQ ID NO: 6067 - DNA, 20 bp, Artificial Sequence
  Description of Artificial Sequence: Synthetic oligonucleotide
  Target: LAMA2; (-) strand; PAM type: NAAAAC; PAM sequence: TAAAAC
cacattgtgcacatgtaccc

SEQ ID NO: 6068 - DNA, 20 bp, Artificial Sequence
  Description of Artificial Sequence: Synthetic oligonucleotide
  Target: LAMA2; (-) strand; PAM type: NAAAAC; PAM sequence: AAAAAC
agtaaacgattgcaagaaca

SEQ ID NO: 6069 - DNA, 20 bp, Artificial Sequence
  Description of Artificial Sequence: Synthetic oligonucleotide
  Target: LAMA2; (-) strand; PAM type: NAAAAC; PAM sequence: GAAAAC
tagggacatggatgaaattg

SEQ ID NO: 6070 - DNA, 20 bp, Artificial Sequence
  Description of Artificial Sequence: Synthetic oligonucleotide
  Target: LAMA2; (-) strand; PAM type: NAAAAC; PAM sequence: CAAAAC
gccatcagagaaatgcaaat

SEQ ID NO: 6071 - DNA, 20 bp, Artificial Sequence
  Description of Artificial Sequence: Synthetic oligonucleotide
  Target: LAMA2; (-) strand; PAM type: NAAAAC; PAM sequence: AAAAAC
agaagacatttatgcagcca

SEQ ID NO: 6072 - DNA, 20 bp, Artificial Sequence
  Description of Artificial Sequence: Synthetic oligonucleotide
  Target: LAMA2; (-) strand; PAM type: NAAAAC; PAM sequence: AAAAAC
ctcaaacaaatttacaagaa

SEQ ID NO: 6073 - DNA, 20 bp, Artificial Sequence
  Description of Artificial Sequence: Synthetic oligonucleotide
  Target: LAMA2; (-) strand; PAM type: NAAAAC; PAM sequence: TAAAAC
atgggcaaggacttcatgtc

SEQ ID NO: 6074 - DNA, 20 bp, Artificial Sequence
  Description of Artificial Sequence: Synthetic oligonucleotide
  Target: LAMA2; (-) strand; PAM type: NAAAAC; PAM sequence: GAAAAC
aaaccataaaaaccctagaa

SEQ ID NO: 6075 - DNA, 20 bp, Artificial Sequence
  Description of Artificial Sequence: Synthetic oligonucleotide
  Target: LAMA2; (-) strand; PAM type: NAAAAC; PAM sequence: AAAAAC
aacgttagacctaaaaccat

SEQ ID NO: 6076 - DNA, 20 bp, Artificial Sequence
  Description of Artificial Sequence: Synthetic oligonucleotide
  Target: LAMA2; (-) strand; PAM type: NAAAAC; PAM sequence: TAAAAC
aaagacttaaacgttagacc

SEQ ID NO: 6077 - DNA, 20 bp, Artificial Sequence
  Description of Artificial Sequence: Synthetic oligonucleotide
  Target: LAMA2; (-) strand; PAM type: NAAAAC; PAM sequence: AAAAAC
tgatctttgacaaacctgag

SEQ ID NO: 6078 - DNA, 20 bp, Artificial Sequence
  Description of Artificial Sequence: Synthetic oligonucleotide
  Target: LAMA2; (-) strand; PAM type: NAAAAC; PAM sequence: CAAAAC
aaacagcatggtactggtac

SEQ ID NO: 6079 - DNA, 20 bp, Artificial Sequence
  Description of Artificial Sequence: Synthetic oligonucleotide
  Target: LAMA2; (-) strand; PAM type: NAAAAC; PAM sequence: CAAAAC
tactacaagtctacagtaac

SEQ ID NO: 6080 - DNA, 20 bp, Artificial Sequence
  Description of Artificial Sequence: Synthetic oligonucleotide
  Target: LAMA2; (-) strand; PAM type: NAAAAC; PAM sequence: AAAAAC
cctttcttcacagaattgga

SEQ ID NO: 6081 - DNA, 20 bp, Artificial Sequence
  Description of Artificial Sequence: Synthetic oligonucleotide
  Target: LAMA2; (-) strand; PAM type: NAAAAC; PAM sequence: GAAAAC
acgacatgattgtatatcta

SEQ ID NO: 6082 - DNA, 20 bp, Artificial Sequence
  Description of Artificial Sequence: Synthetic oligonucleotide
  Target: LAMA2; (-) strand; PAM type: NAAAAC; PAM sequence: GAAAAC
aaactggaagcattcccttt

SEQ ID NO: 6083 - DNA, 20 bp, Artificial Sequence
  Description of Artificial Sequence: Synthetic oligonucleotide
  Target: LAMA2; (-) strand; PAM type: NAAAAC; PAM sequence: AAAAAC
cagtatcatacagaatgggc

SEQ ID NO: 6084 - DNA, 20 bp, Artificial Sequence
  Description of Artificial Sequence: Synthetic oligonucleotide
  Target: LAMA2; (-) strand; PAM type: NAAAAC; PAM sequence: AAAAAC
attcaacaacccttcatgct

SEQ ID NO: 6085 - DNA, 20 bp, Artificial Sequence
  Description of Artificial Sequence: Synthetic oligonucleotide
  Target: LAMA2; (-) strand; PAM type: NAAAAC; PAM sequence: AAAAAC
atataaacagagccaaagac

SEQ ID NO: 6086 - DNA, 20 bp, Artificial Sequence
  Description of Artificial Sequence: Synthetic oligonucleotide
  Target: LAMA2; (-) strand; PAM type: NAAAAC; PAM sequence: CAAAAC
aatcctcagtaaaatactgg

SEQ ID NO: 6087 - DNA, 20 bp, Artificial Sequence
  Description of Artificial Sequence: Synthetic oligonucleotide
  Target: LAMA2; (-) strand; PAM type: NAAAAC; PAM sequence: AAAAAC
ctgaaggaaatagagacaca

SEQ ID NO: 6088 - DNA, 20 bp, Artificial Sequence
  Description of Artificial Sequence: Synthetic oligonucleotide
  Target: LAMA2; (-) strand; PAM type: NAAAAC; PAM sequence: CAAAAC
tcaggattaagaatctcact

SEQ ID NO: 6089 - DNA, 20 bp, Artificial Sequence
  Description of Artificial Sequence: Synthetic oligonucleotide
  Target: LAMA2; (-) strand; PAM type: NAAAAC; PAM sequence: TAAAAC
gttgcaatcctagtctctga

SEQ ID NO: 6090 - DNA, 20 bp, Artificial Sequence
  Description of Artificial Sequence: Synthetic oligonucleotide
  Target: LAMA2; (-) strand; PAM type: NAAAAC; PAM sequence: GAAAAC
gaagatctaccaagcaaatg

SEQ ID NO: 6091 - DNA, 20 bp, Artificial Sequence
  Description of Artificial Sequence: Synthetic oligonucleotide
  Target: LAMA2; (-) strand; PAM type: NAAAAC; PAM sequence: GAAAAC
gggagaatggaaccaagttg

SEQ ID NO: 6092 - DNA, 20 bp, Artificial Sequence
  Description of Artificial Sequence: Synthetic oligonucleotide
  Target: LAMA2; (-) strand; PAM type: NAAAAC; PAM sequence: GAAAAC
ttaaaggagctgatggagct

SEQ ID NO: 6093 - DNA, 20 bp, Artificial Sequence
  Description of Artificial Sequence: Synthetic oligonucleotide
  Target: LAMA2; (-) strand; PAM type: NAAAAC; PAM sequence: GAAAAC
aaaccaaaggcaaagaagtt

SEQ ID NO: 6094 - DNA, 20 bp, Artificial Sequence
  Description of Artificial Sequence: Synthetic oligonucleotide
  Target: LAMA2; (-) strand; PAM type: NAAAAC; PAM sequence: AAAAAC
atggggaaaaaacagaacag

SEQ ID NO: 6095 - DNA, 20 bp, Artificial Sequence
  Description of Artificial Sequence: Synthetic oligonucleotide
  Target: LAMA2; (-) strand; PAM type: NAAAAC; PAM sequence: AAAAAC
taaaaccacaaagatgggga

SEQ ID NO: 6096 - DNA, 20 bp, Artificial Sequence
  Description of Artificial Sequence: Synthetic oligonucleotide
  Target: LAMA2; (-) strand; PAM type: NAAAAC; PAM sequence: TAAAAC
catcaaagaccaaaagtaga

SEQ ID NO: 6097 - DNA, 20 bp, Artificial Sequence
  Description of Artificial Sequence: Synthetic oligonucleotide
  Target: LAMA2; (-) strand; PAM type: NAAAAC; PAM sequence: AAAAAC
acagaaaggacatccacacg

SEQ ID NO: 6098 - DNA, 20 bp, Artificial Sequence
  Description of Artificial Sequence: Synthetic oligonucleotide
  Target: LAMA2; (-) strand; PAM type: NAAAAC; PAM sequence: GAAAAC
aggttcctgtctgttagaag

SEQ ID NO: 6099 - DNA, 20 bp, Artificial Sequence
  Description of Artificial Sequence: Synthetic oligonucleotide
  Target: LAMA2; (-) strand; PAM type: NAAAAC; PAM sequence: AAAAAC
gcgcttttccgacgggctta

SEQ ID NO: 6100 - DNA, 20 bp, Artificial Sequence
  Description of Artificial Sequence: Synthetic oligonucleotide
  Target: LAMA2; (-) strand; PAM type: NAAAAC; PAM sequence: AAAAAC
atactaaaggtaactcacta

SEQ ID NO: 6101 - DNA, 20 bp, Artificial Sequence
  Description of Artificial Sequence: Synthetic oligonucleotide
  Target: LAMA2; (-) strand; PAM type: NAAAAC; PAM sequence: GAAAAC
ttctactaaaagaaaatgaa

SEQ ID NO: 6102 - DNA, 20 bp, Artificial Sequence
  Description of Artificial Sequence: Synthetic oligonucleotide
  Target: LAMA2; (-) strand; PAM type: NAAAAC; PAM sequence: GAAAAC
tcttacaaatctacaaggga

SEQ ID NO: 6103 - DNA, 20 bp, Artificial Sequence
  Description of Artificial Sequence: Synthetic oligonucleotide
  Target: LAMA2; (-) strand; PAM type: NAAAAC; PAM sequence: GAAAAC
gtgagacacaaagcaaatct

SEQ ID NO: 6104 - DNA, 20 bp, Artificial Sequence
  Description of Artificial Sequence: Synthetic oligonucleotide
  Target: LAMA2; (-) strand; PAM type: NAAAAC; PAM sequence: GAAAAC
aatgaaatcatacaaatgaa

SEQ ID NO: 6105 - DNA, 20 bp, Artificial Sequence
  Description of Artificial Sequence: Synthetic oligonucleotide
  Target: LAMA2; (-) strand; PAM type: NAAAAC; PAM sequence: GAAAAC
atgagtaaaaaagagtattg

SEQ ID NO: 6106 - DNA, 20 bp, Artificial Sequence
  Description of Artificial Sequence: Synthetic oligonucleotide
  Target: LAMA2; (-) strand; PAM type: NAAAAC; PAM sequence: CAAAAC
catatgcacgcatacatcca

SEQ ID NO: 6107 - DNA, 20 bp, Artificial Sequence
  Description of Artificial Sequence: Synthetic oligonucleotide
  Target: LAMA2; (-) strand; PAM type: NAAAAC; PAM sequence: TAAAAC
agaaagcttacgtcattctt

SEQ ID NO: 6108 - DNA, 20 bp, Artificial Sequence
  Description of Artificial Sequence: Synthetic oligonucleotide
  Target: LAMA2; (-) strand; PAM type: NAAAAC; PAM sequence: AAAAAC
tattgtagactagatgtcca

SEQ ID NO: 6109 - DNA, 20 bp, Artificial Sequence
  Description of Artificial Sequence: Synthetic oligonucleotide
  Target: LAMA2; (-) strand; PAM type: NAAAAC; PAM sequence: CAAAAC
aacttatgaatccagatgag

SEQ ID NO: 6110 - DNA, 20 bp, Artificial Sequence
  Description of Artificial Sequence: Synthetic oligonucleotide
  Target: LAMA2; (-) strand; PAM type: NAAAAC; PAM sequence: CAAAAC
gggttaattcagttagtact

SEQ ID NO: 6111 - DNA, 20 bp, Artificial Sequence
  Description of Artificial Sequence: Synthetic oligonucleotide
  Target: LAMA2; (-) strand; PAM type: NAAAAC; PAM sequence: CAAAAC
tcattatacttagcattaca

SEQ ID NO: 6112 - DNA, 20 bp, Artificial Sequence
  Description of Artificial Sequence: Synthetic oligonucleotide
  Target: LAMA2; (-) strand; PAM type: NAAAAC; PAM sequence: CAAAAC
aaatgataaccccaaataaa

SEQ ID NO: 6113 - DNA, 20 bp, Artificial Sequence
  Description of Artificial Sequence: Synthetic oligonucleotide
  Target: LAMA2; (-) strand; PAM type: NAAAAC; PAM sequence: CAAAAC
taatttttacagactgtttt

SEQ ID NO: 6114 - DNA, 20 bp, Artificial Sequence
  Description of Artificial Sequence: Synthetic oligonucleotide
  Target: LAMA2; (-) strand; PAM type: NAAAAC; PAM sequence: AAAAAC
ttaatttttgttgagtatgg

SEQ ID NO: 6115 - DNA, 20 bp, Artificial Sequence
  Description of Artificial Sequence: Synthetic oligonucleotide
  Target: LAMA2; (-) strand; PAM type: NAAAAC; PAM sequence: AAAAAC
tatttacagatgaagtaaga

SEQ ID NO: 6116 - DNA, 20 bp, Artificial Sequence
  Description of Artificial Sequence: Synthetic oligonucleotide
  Target: LAMA2; (-) strand; PAM type: NAAAAC; PAM sequence: AAAAAC
caacaaaatatattggaaat

SEQ ID NO: 6117 - DNA, 20 bp, Artificial Sequence
  Description of Artificial Sequence: Synthetic oligonucleotide
  Target: LAMA2; (-) strand; PAM type: NAAAAC; PAM sequence: AAAAAC
tacattgataaaaatataat

SEQ ID NO: 6118 - DNA, 20 bp, Artificial Sequence
  Description of Artificial Sequence: Synthetic oligonucleotide
  Target: LAMA2; (-) strand; PAM type: NAAAAC; PAM sequence: AAAAAC
gcagtcttactgttcttatt

SEQ ID NO: 6119 - DNA, 20 bp, Artificial Sequence
  Description of Artificial Sequence: Synthetic oligonucleotide
  Target: LAMA2; (-) strand; PAM type: NAAAAC; PAM sequence: CAAAAC
ttttttaacatacagaaata

SEQ ID NO: 6120 - DNA, 20 bp, Artificial Sequence
  Description of Artificial Sequence: Synthetic oligonucleotide
  Target: LAMA2; (-) strand; PAM type: NAAAAC; PAM sequence: CAAAAC
agaataagcagtaacaaatg

SEQ ID NO: 6121 - DNA, 20 bp, Artificial Sequence
  Description of Artificial Sequence: Synthetic oligonucleotide
  Target: LAMA2; (-) strand; PAM type: NAAAAC; PAM sequence: GAAAAC
tctaccaaactatggctata

SEQ ID NO: 6122 - DNA, 20 bp, Artificial Sequence
  Description of Artificial Sequence: Synthetic oligonucleotide
  Target: LAMA2; (-) strand; PAM type: NAAAAC; PAM sequence: TAAAAC
atatatcaataaagaaaagt

SEQ ID NO: 6123 - DNA, 20 bp, Artificial Sequence
  Description of Artificial Sequence: Synthetic oligonucleotide
  Target: LAMA2; (-) strand; PAM type: NAAAAC; PAM sequence: TAAAAC
gagccacatatcaacatttc

SEQ ID NO: 6124 - DNA, 20 bp, Artificial Sequence
  Description of Artificial Sequence: Synthetic oligonucleotide
  Target: LAMA2; (-) strand; PAM type: NAAAAC; PAM sequence: CAAAAC
ccgatcacagctcacacctc

SEQ ID NO: 6125 - DNA, 20 bp, Artificial Sequence
  Description of Artificial Sequence: Synthetic oligonucleotide
  Target: LAMA2; (-) strand; PAM type: NAAAAC; PAM sequence: CAAAAC
taccttgcagatacaggggc

SEQ ID NO: 6126 - DNA, 20 bp, Artificial Sequence
  Description of Artificial Sequence: Synthetic oligonucleotide
  Target: LAMA2; (-) strand; PAM type: NAAAAC; PAM sequence: TAAAAC
gattatttaaaaattcagaa

SEQ ID NO: 6127 - DNA, 20 bp, Artificial Sequence
  Description of Artificial Sequence: Synthetic oligonucleotide
  Target: LAMA2; (-) strand; PAM type: NAAAAC; PAM sequence: TAAAAC
ccaattcataaacacttcat

SEQ ID NO: 6128 - DNA, 20 bp, Artificial Sequence
  Description of Artificial Sequence: Synthetic oligonucleotide
  Target: LAMA2; (-) strand; PAM type: NAAAAC; PAM sequence: AAAAAC
tatattcttccccttctgct

SEQ ID NO: 6129 - DNA, 20 bp, Artificial Sequence
  Description of Artificial Sequence: Synthetic oligonucleotide
  Target: LAMA2; (-) strand; PAM type: NAAAAC; PAM sequence: AAAAAC
ctgataaaaaaaaactattt

SEQ ID NO: 6130 - DNA, 20 bp, Artificial Sequence
  Description of Artificial Sequence: Synthetic oligonucleotide
  Target: LAMA2; (-) strand; PAM type: NAAAAC; PAM sequence: AAAAAC
gatatttctttctgataaaa

SEQ ID NO: 6131 - DNA, 20 bp, Artificial Sequence
  Description of Artificial Sequence: Synthetic oligonucleotide
  Target: LAMA2; (-) strand; PAM type: NAAAAC; PAM sequence: AAAAAC
catttaaaatttataaaaca

SEQ ID NO: 6132 - DNA, 20 bp, Artificial Sequence
  Description of Artificial Sequence: Synthetic oligonucleotide
  Target: LAMA2; (-) strand; PAM type: NAAAAC; PAM sequence: TAAAAC
gagcagtcatttaaaattta

SEQ ID NO: 6133 - DNA, 20 bp, Artificial Sequence
  Description of Artificial Sequence: Synthetic oligonucleotide
  Target: LAMA2; (-) strand; PAM type: NAAAAC; PAM sequence: TAAAAC
tcaagtcctagtgagggcat

SEQ ID NO: 6134 - DNA, 20 bp, Artificial Sequence
  Description of Artificial Sequence: Synthetic oligonucleotide
  Target: LAMA2; (-) strand; PAM type: NAAAAC; PAM sequence: CAAAAC
aaaatgcaataaaaacaaag

SEQ ID NO: 6135 - DNA, 20 bp, Artificial Sequence
  Description of Artificial Sequence: Synthetic oligonucleotide
  Target: LAMA2; (-) strand; PAM type: NAAAAC; PAM sequence: AAAAAC
gacttaatggaaaatgcaat

SEQ ID NO: 6136 - DNA, 20 bp, Artificial Sequence
  Description of Artificial Sequence: Synthetic oligonucleotide
  Target: LAMA2; (-) strand; PAM type: NAAAAC; PAM sequence: AAAAAC
aagaaatttaagcaaagctg

SEQ ID NO: 6137 - DNA, 20 bp, Artificial Sequence
  Description of Artificial Sequence: Synthetic oligonucleotide
  Target: LAMA2; (-) strand; PAM type: NAAAAC; PAM sequence: TAAAAC
caccagaggtaagatagaca

SEQ ID NO: 6138 - DNA, 20 bp, Artificial Sequence
  Description of Artificial Sequence: Synthetic oligonucleotide
  Target: LAMA2; (-) strand; PAM type: NAAAAC; PAM sequence: TAAAAC
taacaccatttcatagatta

SEQ ID NO: 6139 - DNA, 20 bp, Artificial Sequence
  Description of Artificial Sequence: Synthetic oligonucleotide
  Target: LAMA2; (-) strand; PAM type: NAAAAC; PAM sequence: CAAAAC
tgaaaaagaagagggaaatc

SEQ ID NO: 6140 - DNA, 20 bp, Artificial Sequence
  Description of Artificial Sequence: Synthetic oligonucleotide
  Target: LAMA2; (-) strand; PAM type: NAAAAC; PAM sequence: TAAAAC
aaccagagctggacagtagt

SEQ ID NO: 6141 - DNA, 20 bp, Artificial Sequence
  Description of Artificial Sequence: Synthetic oligonucleotide
  Target: LAMA2; (-) strand; PAM type: NAAAAC; PAM sequence: TAAAAC
atttgttgaggacttactcc

SEQ ID NO: 6142 - DNA, 20 bp, Artificial Sequence
  Description of Artificial Sequence: Synthetic oligonucleotide
  Target: LAMA2; (-) strand; PAM type: NAAAAC; PAM sequence: AAAAAC
tttagttctcttttcccttt

SEQ ID NO: 6143 - DNA, 20 bp, Artificial Sequence
  Description of Artificial Sequence: Synthetic oligonucleotide
  Target: LAMA2; (-) strand; PAM type: NAAAAC; PAM sequence: TAAAAC
attctcacatattatgatat

SEQ ID NO: 6144 - DNA, 20 bp, Artificial Sequence
  Description of Artificial Sequence: Synthetic oligonucleotide
  Target: LAMA2; (-) strand; PAM type: NAAAAC; PAM sequence: TAAAAC
cttatatcaccatattttct

SEQ ID NO: 6145 - DNA, 20 bp, Artificial Sequence
  Description of Artificial Sequence: Synthetic oligonucleotide
  Target: LAMA2; (-) strand; PAM type: NAAAAC; PAM sequence: TAAAAC
aattttcacactacagccta

SEQ ID NO: 6146 - DNA, 20 bp, Artificial Sequence
  Description of Artificial Sequence: Synthetic oligonucleotide
  Target: LAMA2; (-) strand; PAM type: NAAAAC; PAM sequence: AAAAAC
atctatacttcaatggttgc

SEQ ID NO: 6147 - DNA, 20 bp, Artificial Sequence
  Description of Artificial Sequence: Synthetic oligonucleotide
  Target: LAMA2; (-) strand; PAM type: NAAAAC; PAM sequence: TAAAAC
aaataaataaatacacacag

SEQ ID NO: 6148 - DNA, 20 bp, Artificial Sequence
  Description of Artificial Sequence: Synthetic oligonucleotide
  Target: LAMA2; (-) strand; PAM type: NAAAAC; PAM sequence: AAAAAC
cgaagaaaaaaataagacag

SEQ ID NO: 6149 - DNA, 20 bp, Artificial Sequence
  Description of Artificial Sequence: Synthetic oligonucleotide
  Target: LAMA2; (-) strand; PAM type: NAAAAC; PAM sequence: CAAAAC
tttgaaatgatagatatcag

SEQ ID NO: 6150 - DNA, 20 bp, Artificial Sequence
  Description of Artificial Sequence: Synthetic oligonucleotide
  Target: LAMA2; (-) strand; PAM type: NAAAAC; PAM sequence: AAAAAC
acgcatagtacgagctgaat

SEQ ID NO: 6151 - DNA, 20 bp, Artificial Sequence
  Description of Artificial Sequence: Synthetic oligonucleotide
  Target: LAMA2; (-) strand; PAM type: NAAAAC; PAM sequence: AAAAAC
tgaaagctgaccatataatg

SEQ ID NO: 6152 - DNA, 20 bp, Artificial Sequence
  Description of Artificial Sequence: Synthetic oligonucleotide
  Target: LAMA2; (-) strand; PAM type: NAAAAC; PAM sequence: TAAAAC
tatctaaatagtagtcttta

SEQ ID NO: 6153 - DNA, 20 bp, Artificial Sequence
  Description of Artificial Sequence: Synthetic oligonucleotide
  Target: LAMA2; (-) strand; PAM type: NAAAAC; PAM sequence: CAAAAC
agcatcctacctagtcagga

SEQ ID NO: 6154 - DNA, 20 bp, Artificial Sequence
  Description of Artificial Sequence: Synthetic oligonucleotide
  Target: LAMA2; (-) strand; PAM type: NAAAAC; PAM sequence: AAAAAC
agtttattgttgcttttgga

SEQ ID NO: 6155 - DNA, 20 bp, Artificial Sequence
  Description of Artificial Sequence: Synthetic oligonucleotide
  Target: LAMA2; (-) strand; PAM type: NAAAAC; PAM sequence: AAAAAC
caaaccacaaacatttagaa

SEQ ID NO: 6156 - DNA, 20 bp, Artificial Sequence
  Description of Artificial Sequence: Synthetic oligonucleotide
  Target: LAMA2; (-) strand; PAM type: NAAAAC; PAM sequence: AAAAAC
ttttggaaattaaaaacaaa

SEQ ID NO: 6157 - DNA, 20 bp, Artificial Sequence
  Description of Artificial Sequence: Synthetic oligonucleotide
  Target: LAMA2; (-) strand; PAM type: NAAAAC; PAM sequence: AAAAAC
cgtgtccacttttggaaatt

SEQ ID NO: 6158 - DNA, 20 bp, Artificial Sequence
  Description of Artificial Sequence: Synthetic oligonucleotide
  Target: LAMA2; (-) strand; PAM type: NAAAAC; PAM sequence: GAAAAC
ctcatatcttgtatcttaga

SEQ ID NO: 6159 - DNA, 20 bp, Artificial Sequence
  Description of Artificial Sequence: Synthetic oligonucleotide
  Target: LAMA2; (-) strand; PAM type: NAAAAC; PAM sequence: TAAAAC
tctttaaaagaattaccaac

SEQ ID NO: 6160 - DNA, 20 bp, Artificial Sequence
  Description of Artificial Sequence: Synthetic oligonucleotide
  Target: LAMA2; (-) strand; PAM type: NAAAAC; PAM sequence: GAAAAC
tcccaccacagacaactcca

SEQ ID NO: 6161 - DNA, 20 bp, Artificial Sequence
  Description of Artificial Sequence: Synthetic oligonucleotide
  Target: LAMA2; (-) strand; PAM type: NAAAAC; PAM sequence: AAAAAC
atgaaatagaaaccgatgag

SEQ ID NO: 6162 - DNA, 20 bp, Artificial Sequence
  Description of Artificial Sequence: Synthetic oligonucleotide
  Target: LAMA2; (-) strand; PAM type: NAAAAC; PAM sequence: TAAAAC
ttttacatatgtgtgggctt

SEQ ID NO: 6163 - DNA, 20 bp, Artificial Sequence
  Description of Artificial Sequence: Synthetic oligonucleotide
  Target: LAMA2; (-) strand; PAM type: NAAAAC; PAM sequence: GAAAAC
aatactcacatgtcatgcaa

SEQ ID NO: 6164 - DNA, 20 bp, Artificial Sequence
  Description of Artificial Sequence: Synthetic oligonucleotide
  Target: LAMA2; (-) strand; PAM type: NAAAAC; PAM sequence: CAAAAC
ttacttatacttcattattc

SEQ ID NO: 6165 - DNA, 20 bp, Artificial Sequence
  Description of Artificial Sequence: Synthetic oligonucleotide
  Target: LAMA2; (-) strand; PAM type: NAAAAC; PAM sequence: AAAAAC
atttcaaaaatagaaagtat

SEQ ID NO: 6166 - DNA, 20 bp, Artificial Sequence
  Description of Artificial Sequence: Synthetic oligonucleotide
  Target: LAMA2; (-) strand; PAM type: NAAAAC; PAM sequence: TAAAAC
agttgcttaaacaaatgccc

SEQ ID NO: 6167 - DNA, 20 bp, Artificial Sequence
  Description of Artificial Sequence: Synthetic oligonucleotide
  Target: LAMA2; (-) strand; PAM type: NAAAAC; PAM sequence: CAAAAC
ggaaagtcaagcaagaacaa

SEQ ID NO: 6168 - DNA, 20 bp, Artificial Sequence
  Description of Artificial Sequence: Synthetic oligonucleotide
  Target: LAMA2; (-) strand; PAM type: NAAAAC; PAM sequence: AAAAAC
gcatttctgagcaacctaaa

SEQ ID NO: 6169 - DNA, 20 bp, Artificial Sequence
  Description of Artificial Sequence: Synthetic oligonucleotide
  Target: LAMA2; (-) strand; PAM type: NAAAAC; PAM sequence: AAAAAC
gctttataaatttaattagg

SEQ ID NO: 6170 - DNA, 20 bp, Artificial Sequence
  Description of Artificial Sequence: Synthetic oligonucleotide
  Target: LAMA2; (-) strand; PAM type: NAAAAC; PAM sequence: TAAAAC
gacgaattataaacaaaatg

SEQ ID NO: 6171 - DNA, 20 bp, Artificial Sequence
  Description of Artificial Sequence: Synthetic oligonucleotide
  Target: LAMA2; (-) strand; PAM type: NAAAAC; PAM sequence: AAAAAC
cagagctttgaaaccattta

SEQ ID NO: 6172 - DNA, 20 bp, Artificial Sequence
  Description of Artificial Sequence: Synthetic oligonucleotide
  Target: LAMA2; (-) strand; PAM type: NAAAAC; PAM sequence: AAAAAC
ctatctgtggaagagtgtct

SEQ ID NO: 6173 - DNA, 20 bp, Artificial Sequence
  Description of Artificial Sequence: Synthetic oligonucleotide
  Target: LAMA2; (-) strand; PAM type: NAAAAC; PAM sequence: GAAAAC
tggtgttaggccctacagct

SEQ ID NO: 6174 - DNA, 20 bp, Artificial Sequence
  Description of Artificial Sequence: Synthetic oligonucleotide
  Target: LAMA2; (-) strand; PAM type: NAAAAC; PAM sequence: TAAAAC
tacaacccagtctttctttt

SEQ ID NO: 6175 - DNA, 20 bp, Artificial Sequence
  Description of Artificial Sequence: Synthetic oligonucleotide
  Target: LAMA2; (-) strand; PAM type: NAAAAC; PAM sequence: GAAAAC
gaagttactgaaaagctaca

SEQ ID NO: 6176 - DNA, 20 bp, Artificial Sequence
  Description of Artificial Sequence: Synthetic oligonucleotide
  Target: LAMA2; (-) strand; PAM type: NAAAAC; PAM sequence: CAAAAC
tctgtgaaacgcataaagac

SEQ ID NO: 6177 - DNA, 20 bp, Artificial Sequence
  Description of Artificial Sequence: Synthetic oligonucleotide
  Target: LAMA2; (-) strand; PAM type: NAAAAC; PAM sequence: TAAAAC
ggcaccttcaaaataaagtc

SEQ ID NO: 6178 - DNA, 20 bp, Artificial Sequence
  Description of Artificial Sequence: Synthetic oligonucleotide
  Target: LAMA2; (-) strand; PAM type: NAAAAC; PAM sequence: CAAAAC
gtttgatggcacgagtgtac

SEQ ID NO: 6179 - DNA, 20 bp, Artificial Sequence
  Description of Artificial Sequence: Synthetic oligonucleotide
  Target: LAMA2; (-) strand; PAM type: NAAAAC; PAM sequence: TAAAAC
tgtaaatatattcatctgag

SEQ ID NO: 6180 - DNA, 20 bp, Artificial Sequence
  Description of Artificial Sequence: Synthetic oligonucleotide
  Target: LAMA2; (-) strand; PAM type: NAAAAC; PAM sequence: TAAAAC
tactcacaagaatgagaaat

SEQ ID NO: 6181 - DNA, 20 bp, Artificial Sequence
  Description of Artificial Sequence: Synthetic oligonucleotide
  Target: LAMA2; (-) strand; PAM type: NAAAAC; PAM sequence: TAAAAC
tattacaagcatctttacta

SEQ ID NO: 6182 - DNA, 20 bp, Artificial Sequence
  Description of Artificial Sequence: Synthetic oligonucleotide
  Target: LAMA2; (-) strand; PAM type: NAAAAC; PAM sequence: AAAAAC
taggatgaaattaatttttt

SEQ ID NO: 6183 - DNA, 20 bp, Artificial Sequence
  Description of Artificial Sequence: Synthetic oligonucleotide
  Target: LAMA2; (-) strand; PAM type: NAAAAC; PAM sequence: CAAAAC
tcttacactattgatctcta

SEQ ID NO: 6184 - DNA, 20 bp, Artificial Sequence
  Description of Artificial Sequence: Synthetic oligonucleotide
  Target: LAMA2; (-) strand; PAM type: NAAAAC; PAM sequence: CAAAAC
tttgaaaaattaaaaggaaa

SEQ ID NO: 6185 - DNA, 20 bp, Artificial Sequence
  Description of Artificial Sequence: Synthetic oligonucleotide
  Target: LAMA2; (-) strand; PAM type: NAAAAC; PAM sequence: TAAAAC
ccttttgctcctaattcttc

SEQ ID NO: 6186 - DNA, 20 bp, Artificial Sequence
  Description of Artificial Sequence: Synthetic oligonucleotide
  Target: LAMA2; (-) strand; PAM type: NAAAAC; PAM sequence: CAAAAC
gttcactctggtgacaaatc

SEQ ID NO: 6187 - DNA, 20 bp, Artificial Sequence
  Description of Artificial Sequence: Synthetic oligonucleotide
  Target: LAMA2; (-) strand; PAM type: NAAAAC; PAM sequence: GAAAAC
atgctgtgagcaatctccaa

SEQ ID NO: 6188 - DNA, 20 bp, Artificial Sequence
  Description of Artificial Sequence: Synthetic oligonucleotide
  Target: LAMA2; (-) strand; PAM type: NAAAAC; PAM sequence: GAAAAC
cttcaaacccagtcccagat

SEQ ID NO: 6189 - DNA, 20 bp, Artificial Sequence
  Description of Artificial Sequence: Synthetic oligonucleotide
  Target: LAMA2; (-) strand; PAM type: NAAAAC; PAM sequence: AAAAAC
ttttttcctgcagtatgagt

SEQ ID NO: 6190 - DNA, 20 bp, Artificial Sequence
  Description of Artificial Sequence: Synthetic oligonucleotide
  Target: LAMA2; (-) strand; PAM type: NAAAAC; PAM sequence: TAAAAC
aaagcatttttgcttttata

SEQ ID NO: 6191 - DNA, 20 bp, Artificial Sequence
  Description of Artificial Sequence: Synthetic oligonucleotide
  Target: LAMA2; (-) strand; PAM type: NAAAAC; PAM sequence: AAAAAC
aatcacttggggagctgatt

SEQ ID NO: 6192 - DNA, 20 bp, Artificial Sequence
  Description of Artificial Sequence: Synthetic oligonucleotide
  Target: LAMA2; (-) strand; PAM type: NAAAAC; PAM sequence: AAAAAC
tctaattaggattttgtttg

SEQ ID NO: 6193 - DNA, 20 bp, Artificial Sequence
  Description of Artificial Sequence: Synthetic oligonucleotide
  Target: LAMA2; (-) strand; PAM type: NAAAAC; PAM sequence: CAAAAC
tttgtttctatgtaaatatc

SEQ ID NO: 6194 - DNA, 20 bp, Artificial Sequence
  Description of Artificial Sequence: Synthetic oligonucleotide
  Target: LAMA2; (-) strand; PAM type: NAAAAC; PAM sequence: CAAAAC
agggtgaaaaccatctcaca

SEQ ID NO: 6195 - DNA, 20 bp, Artificial Sequence
  Description of Artificial Sequence: Synthetic oligonucleotide
  Target: LAMA2; (-) strand; PAM type: NAAAAC; PAM sequence: GAAAAC
gaaccacaagaacacagggt

SEQ ID NO: 6196 - DNA, 20 bp, Artificial Sequence
  Description of Artificial Sequence: Synthetic oligonucleotide
  Target: LAMA2; (-) strand; PAM type: NAAAAC; PAM sequence: AAAAAC
catataaaactgattttaaa

SEQ ID NO: 6197 - DNA, 20 bp, Artificial Sequence
  Description of Artificial Sequence: Synthetic oligonucleotide
  Target: LAMA2; (-) strand; PAM type: NAAAAC; PAM sequence: TAAAAC
ttccatggactctcaacata

SEQ ID NO: 6198 - DNA, 20 bp, Artificial Sequence
  Description of Artificial Sequence: Synthetic oligonucleotide
  Target: LAMA2; (-) strand; PAM type: NAAAAC; PAM sequence: GAAAAC
tgaacccgaaatcgatgttt

SEQ ID NO: 6199 - DNA, 20 bp, Artificial Sequence
  Description of Artificial Sequence: Synthetic oligonucleotide
  Target: LAMA2; (-) strand; PAM type: NAAAAC; PAM sequence: CAAAAC
gatagtttggcagtttatta

SEQ ID NO: 6200 - DNA, 20 bp, Artificial Sequence
  Description of Artificial Sequence: Synthetic oligonucleotide
  Target: LAMA2; (-) strand; PAM type: NAAAAC; PAM sequence: TAAAAC
ctattagaatagctgatgtc

SEQ ID NO: 6201 - DNA, 20 bp, Artificial Sequence
  Description of Artificial Sequence: Synthetic oligonucleotide
  Target: LAMA2; (-) strand; PAM type: NAAAAC; PAM sequence: TAAAAC
atcattagagaatttcaaat

SEQ ID NO: 6202 - DNA, 20 bp, Artificial Sequence
  Description of Artificial Sequence: Synthetic oligonucleotide
  Target: LAMA2; (-) strand; PAM type: NAAAAC; PAM sequence: GAAAAC
cagatggaaaataagcacat

SEQ ID NO: 6203 - DNA, 20 bp, Artificial Sequence
  Description of Artificial Sequence: Synthetic oligonucleotide
  Target: LAMA2; (-) strand; PAM type: NAAAAC; PAM sequence: CAAAAC
aagatatacctgatatggtc

SEQ ID NO: 6204 - DNA, 20 bp, Artificial Sequence
  Description of Artificial Sequence: Synthetic oligonucleotide
  Target: LAMA2; (-) strand; PAM type: NAAAAC; PAM sequence: CAAAAC
aaaatggatcatataaaatg

SEQ ID NO: 6205 - DNA, 20 bp, Artificial Sequence
  Description of Artificial Sequence: Synthetic oligonucleotide
  Target: LAMA2; (-) strand; PAM type: NAAAAC; PAM sequence: AAAAAC
ttttcaacaaatggcactag

SEQ ID NO: 6206 - DNA, 20 bp, Artificial Sequence
  Description of Artificial Sequence: Synthetic oligonucleotide
  Target: LAMA2; (-) strand; PAM type: NAAAAC; PAM sequence: TAAAAC
cccaacttcaagacttagta

SEQ ID NO: 6207 - DNA, 20 bp, Artificial Sequence
  Description of Artificial Sequence: Synthetic oligonucleotide
  Target: LAMA2; (-) strand; PAM type: NAAAAC; PAM sequence: TAAAAC
aatctatatgaggaaaacta

SEQ ID NO: 6208 - DNA, 20 bp, Artificial Sequence
  Description of Artificial Sequence: Synthetic oligonucleotide
  Target: LAMA2; (-) strand; PAM type: NAAAAC; PAM sequence: GAAAAC
atgtacaaaatctatatgag

SEQ ID NO: 6209 - DNA, 20 bp, Artificial Sequence
  Description of Artificial Sequence: Synthetic oligonucleotide
  Target: LAMA2; (-) strand; PAM type: NAAAAC; PAM sequence: CAAAAC
atttatactagcatgctcca

SEQ ID NO: 6210 - DNA, 20 bp, Artificial Sequence
  Description of Artificial Sequence: Synthetic oligonucleotide
  Target: LAMA2; (-) strand; PAM type: NAAAAC; PAM sequence: AAAAAC
gaaaattggaatgtgaagtt

SEQ ID NO: 6211 - DNA, 20 bp, Artificial Sequence
  Description of Artificial Sequence: Synthetic oligonucleotide
  Target: LAMA2; (-) strand; PAM type: NAAAAC; PAM sequence: AAAAAC
tatttctaatgatacttttt

SEQ ID NO: 6212 - DNA, 20 bp, Artificial Sequence
  Description of Artificial Sequence: Synthetic oligonucleotide
  Target: LAMA2; (-) strand; PAM type: NAAAAC; PAM sequence: TAAAAC
ttgtggctatccatcatttg

SEQ ID NO: 6213 - DNA, 20 bp, Artificial Sequence
  Description of Artificial Sequence: Synthetic oligonucleotide
  Target: LAMA2; (-) strand; PAM type: NAAAAC; PAM sequence: AAAAAC
ttctactctcaaactgacat

SEQ ID NO: 6214 - DNA, 20 bp, Artificial Sequence
  Description of Artificial Sequence: Synthetic oligonucleotide
  Target: LAMA2; (-) strand; PAM type: NAAAAC; PAM sequence: CAAAAC
tagtaaaaatctacttattg

SEQ ID NO: 6215 - DNA, 20 bp, Artificial Sequence
  Description of Artificial Sequence: Synthetic oligonucleotide
  Target: LAMA2; (-) strand; PAM type: NAAAAC; PAM sequence: TAAAAC
ttgctccaagatctaatttt

SEQ ID NO: 6216 - DNA, 20 bp, Artificial Sequence
  Description of Artificial Sequence: Synthetic oligonucleotide
  Target: LAMA2; (-) strand; PAM type: NAAAAC; PAM sequence: CAAAAC
aaaaatagatattttgtatt

SEQ ID NO: 6217 - DNA, 20 bp, Artificial Sequence
  Description of Artificial Sequence: Synthetic oligonucleotide
  Target: LAMA2; (-) strand; PAM type: NAAAAC; PAM sequence: GAAAAC
atagacatagactgattata

SEQ ID NO: 6218 - DNA, 20 bp, Artificial Sequence
  Description of Artificial Sequence: Synthetic oligonucleotide
  Target: LAMA2; (-) strand; PAM type: NAAAAC; PAM sequence: CAAAAC
acccatttgtatttgatctt

SEQ ID NO: 6219 - DNA, 20 bp, Artificial Sequence
  Description of Artificial Sequence: Synthetic oligonucleotide
  Target: LAMA2; (-) strand; PAM type: NAAAAC; PAM sequence: GAAAAC
aaatttaagcatctgcaaat

SEQ ID NO: 6220 - DNA, 20 bp, Artificial Sequence
  Description of Artificial Sequence: Synthetic oligonucleotide
  Target: LAMA2; (-) strand; PAM type: NAAAAC; PAM sequence: CAAAAC
gtaaatgcaaattttttcct

SEQ ID NO: 6221 - DNA, 20 bp, Artificial Sequence
  Description of Artificial Sequence: Synthetic oligonucleotide
  Target: LAMA2; (-) strand; PAM type: NAAAAC; PAM sequence: AAAAAC
caaaatggtttctgtataat

SEQ ID NO: 6222 - DNA, 20 bp, Artificial Sequence
  Description of Artificial Sequence: Synthetic oligonucleotide
  Target: LAMA2; (-) strand; PAM type: NAAAAC; PAM sequence: GAAAAC
ataggtgggaactgaacaat

SEQ ID NO: 6223 - DNA, 20 bp, Artificial Sequence
  Description of Artificial Sequence: Synthetic oligonucleotide
  Target: LAMA2; (-) strand; PAM type: NAAAAC; PAM sequence: CAAAAC
gccatcagagaaatgcaaat

SEQ ID NO: 6224 - DNA, 20 bp, Artificial Sequence
  Description of Artificial Sequence: Synthetic oligonucleotide
  Target: LAMA2; (-) strand; PAM type: NAAAAC; PAM sequence: AAAAAC
ctcaaacaaacttacaagaa

SEQ ID NO: 6225 - DNA, 20 bp, Artificial Sequence
  Description of Artificial Sequence: Synthetic oligonucleotide
  Target: LAMA2; (-) strand; PAM type: NAAAAC; PAM sequence: TAAAAC
atgggtaaggactttttgtc

SEQ ID NO: 6226 - DNA, 20 bp, Artificial Sequence
  Description of Artificial Sequence: Synthetic oligonucleotide
  Target: LAMA2; (-) strand; PAM type: NAAAAC; PAM sequence: GAAAAC
aaaccataaaaaccctagaa

SEQ ID NO: 6227 - DNA, 20 bp, Artificial Sequence
  Description of Artificial Sequence: Synthetic oligonucleotide
  Target: LAMA2; (-) strand; PAM type: NAAAAC; PAM sequence: AAAAAC
aatgttagacataaaaccat

SEQ ID NO: 6228 - DNA, 20 bp, Artificial Sequence
  Description of Artificial Sequence: Synthetic oligonucleotide
  Target: LAMA2; (-) strand; PAM type: NAAAAC; PAM sequence: TAAAAC
aaagacttaaatgttagaca

SEQ ID NO: 6229 - DNA, 20 bp, Artificial Sequence
  Description of Artificial Sequence: Synthetic oligonucleotide
  Target: LAMA2; (-) strand; PAM type: NAAAAC; PAM sequence: GAAAAC
tatttaataaatggtgctgg

SEQ ID NO: 6230 - DNA, 20 bp, Artificial Sequence
  Description of Artificial Sequence: Synthetic oligonucleotide
  Target: LAMA2; (-) strand; PAM type: NAAAAC; PAM sequence: AAAAAC
tgatctttgacaaacctgac

SEQ ID NO: 6231 - DNA, 20 bp, Artificial Sequence
  Description of Artificial Sequence: Synthetic oligonucleotide
  Target: LAMA2; (-) strand; PAM type: NAAAAC; PAM sequence: CAAAAC
tactacaaggctacagtaac

SEQ ID NO: 6232 - DNA, 20 bp, Artificial Sequence
  Description of Artificial Sequence: Synthetic oligonucleotide
  Target: LAMA2; (-) strand; PAM type: NAAAAC; PAM sequence: AAAAAC
tttcttcacagaattggaaa

SEQ ID NO: 6233 - DNA, 20 bp, Artificial Sequence
  Description of Artificial Sequence: Synthetic oligonucleotide
  Target: LAMA2; (-) strand; PAM type: NAAAAC; PAM sequence: GAAAAC
atgacataattgtatattta

SEQ ID NO: 6234 - DNA, 20 bp, Artificial Sequence
  Description of Artificial Sequence: Synthetic oligonucleotide
  Target: LAMA2; (-) strand; PAM type: NAAAAC; PAM sequence: GAAAAC
aaactggaagcattcccttt

SEQ ID NO: 6235 - DNA, 20 bp, Artificial Sequence
  Description of Artificial Sequence: Synthetic oligonucleotide
  Target: LAMA2; (-) strand; PAM type: NAAAAC; PAM sequence: AAAAAC
caatatcatactgaatgggc

SEQ ID NO: 6236 - DNA, 20 bp, Artificial Sequence
  Description of Artificial Sequence: Synthetic oligonucleotide
  Target: LAMA2; (-) strand; PAM type: NAAAAC; PAM sequence: AAAAAC
attcaacagcccttcatgcc

SEQ ID NO: 6237 - DNA, 20 bp, Artificial Sequence
  Description of Artificial Sequence: Synthetic oligonucleotide
  Target: LAMA2; (-) strand; PAM type: NAAAAC; PAM sequence: AAAAAC
acgtaatccagcatataaac

SEQ ID NO: 6238 - DNA, 20 bp, Artificial Sequence
  Description of Artificial Sequence: Synthetic oligonucleotide
  Target: LAMA2; (-) strand; PAM type: NAAAAC; PAM sequence: AAAAAC
ctgaaggagatagagtcaca

SEQ ID NO: 6239 - DNA, 20 bp, Artificial Sequence
  Description of Artificial Sequence: Synthetic oligonucleotide
  Target: LAMA2; (-) strand; PAM type: NAAAAC; PAM sequence: GAAAAC
tcaggattaagaaactcact

SEQ ID NO: 6240 - DNA, 20 bp, Artificial Sequence
  Description of Artificial Sequence: Synthetic oligonucleotide
  Target: LAMA2; (-) strand; PAM type: NAAAAC; PAM sequence: TAAAAC
gttgcaaacctagtctctga

SEQ ID NO: 6241 - DNA, 20 bp, Artificial Sequence
  Description of Artificial Sequence: Synthetic oligonucleotide
  Target: LAMA2; (-) strand; PAM type: NAAAAC; PAM sequence: GAAAAC
gaagatctaccaaggaaata

SEQ ID NO: 6242 - DNA, 20 bp, Artificial Sequence
  Description of Artificial Sequence: Synthetic oligonucleotide
  Target: LAMA2; (-) strand; PAM type: NAAAAC; PAM sequence: AAAAAC
caaccagtaccagccactgc

SEQ ID NO: 6243 - DNA, 20 bp, Artificial Sequence
  Description of Artificial Sequence: Synthetic oligonucleotide
  Target: LAMA2; (-) strand; PAM type: NAAAAC; PAM sequence: GAAAAC
gggagaatggaaccaagttg

SEQ ID NO: 6244 - DNA, 20 bp, Artificial Sequence
  Description of Artificial Sequence: Synthetic oligonucleotide
  Target: LAMA2; (-) strand; PAM type: NAAAAC; PAM sequence: GAAAAC
ttaaatgacctgatggagct

SEQ ID NO: 6245 - DNA, 20 bp, Artificial Sequence
  Description of Artificial Sequence: Synthetic oligonucleotide
  Target: LAMA2; (-) strand; PAM type: NAAAAC; PAM sequence: AAAAAC
gaacccatcacaaagaagct

SEQ ID NO: 6246 - DNA, 20 bp, Artificial Sequence
  Description of Artificial Sequence: Synthetic oligonucleotide
  Target: LAMA2; (-) strand; PAM type: NAAAAC; PAM sequence: GAAAAC
aaaaacagagcagagaagct

SEQ ID NO: 6247 - DNA, 20 bp, Artificial Sequence
  Description of Artificial Sequence: Synthetic oligonucleotide
  Target: LAMA2; (-) strand; PAM type: NAAAAC; PAM sequence: AAAAAC
taaaaccacaaagatgggga

SEQ ID NO: 6248 - DNA, 20 bp, Artificial Sequence
  Description of Artificial Sequence: Synthetic oligonucleotide
  Target: LAMA2; (-) strand; PAM type: NAAAAC; PAM sequence: TAAAAC
catcaaagaccaaaggtaga

SEQ ID NO: 6249 - DNA, 20 bp, Artificial Sequence
  Description of Artificial Sequence: Synthetic oligonucleotide
  Target: LAMA2; (-) strand; PAM type: NAAAAC; PAM sequence: CAAAAC
aatagaaaggacacccacac

SEQ ID NO: 6250 - DNA, 20 bp, Artificial Sequence
  Description of Artificial Sequence: Synthetic oligonucleotide
  Target: LAMA2; (-) strand; PAM type: NAAAAC; PAM sequence: GAAAAC
agggtcctgactgtaagaag

SEQ ID NO: 6251 - DNA, 20 bp, Artificial Sequence
  Description of Artificial Sequence: Synthetic oligonucleotide
  Target: LAMA2; (-) strand; PAM type: NAAAAC; PAM sequence: TAAAAC
aaataatttaattattgata

SEQ ID NO: 6252 - DNA, 20 bp, Artificial Sequence
  Description of Artificial Sequence: Synthetic oligonucleotide
  Target: LAMA2; (-) strand; PAM type: NAAAAC; PAM sequence: TAAAAC
cagtgtctatcctggatgtc

SEQ ID NO: 6253 - DNA, 20 bp, Artificial Sequence
  Description of Artificial Sequence: Synthetic oligonucleotide
  Target: LAMA2; (-) strand; PAM type: NAAAAC; PAM sequence: TAAAAC
aacaatcatactaaccctat

SEQ ID NO: 6254 - DNA, 20 bp, Artificial Sequence
  Description of Artificial Sequence: Synthetic oligonucleotide
  Target: LAMA2; (-) strand; PAM type: NAAAAC; PAM sequence: CAAAAC
atcaaatcagataatgcagg

SEQ ID NO: 6255 - DNA, 20 bp, Artificial Sequence
  Description of Artificial Sequence: Synthetic oligonucleotide
  Target: LAMA2; (-) strand; PAM type: NAAAAC; PAM sequence: TAAAAC
acaaccagaatgtaatattg

SEQ ID NO: 6256 - DNA, 20 bp, Artificial Sequence
  Description of Artificial Sequence: Synthetic oligonucleotide
  Target: LAMA2; (-) strand; PAM type: NAAAAC; PAM sequence: AAAAAC
aaagtgtgtgtatgcctaga

SEQ ID NO: 6257 - DNA, 20 bp, Artificial Sequence
  Description of Artificial Sequence: Synthetic oligonucleotide
  Target: LAMA2; (-) strand; PAM type: NAAAAC; PAM sequence: AAAAAC
cctccaaataataaataata

SEQ ID NO: 6258 - DNA, 20 bp, Artificial Sequence
  Description of Artificial Sequence: Synthetic oligonucleotide
  Target: LAMA2; (-) strand; PAM type: NAAAAC; PAM sequence: TAAAAC
aaactccaaaataaatttag

SEQ ID NO: 6259 - DNA, 20 bp, Artificial Sequence
  Description of Artificial Sequence: Synthetic oligonucleotide
  Target: LAMA2; (-) strand; PAM type: NAAAAC; PAM sequence: TAAAAC
taattttgaaataataaaat

SEQ ID NO: 6260 - DNA, 20 bp, Artificial Sequence
  Description of Artificial Sequence: Synthetic oligonucleotide
  Target: LAMA2; (-) strand; PAM type: NAAAAC; PAM sequence: AAAAAC
ctgattctgtgatataagta

SEQ ID NO: 6261 - DNA, 20 bp, Artificial Sequence
  Description of Artificial Sequence: Synthetic oligonucleotide
  Target: LAMA2; (-) strand; PAM type: NAAAAC; PAM sequence: AAAAAC
ttactagatttcattcactc

SEQ ID NO: 6262 - DNA, 20 bp, Artificial Sequence
  Description of Artificial Sequence: Synthetic oligonucleotide
  Target: LAMA2; (-) strand; PAM type: NAAAAC; PAM sequence: TAAAAC
ttgtcctatcaatcacaaca

SEQ ID NO: 6263 - DNA, 20 bp, Artificial Sequence
  Description of Artificial Sequence: Synthetic oligonucleotide
  Target: LAMA2; (-) strand; PAM type: NAAAAC; PAM sequence: GAAAAC
tgttctttactattttctaa

SEQ ID NO: 6264 - DNA, 20 bp, Artificial Sequence
  Description of Artificial Sequence: Synthetic oligonucleotide
  Target: LAMA2; (-) strand; PAM type: NAAAAC; PAM sequence: GAAAAC
agaagaagaaagaagaaaaa

SEQ ID NO: 6265 - DNA, 20 bp, Artificial Sequence
  Description of Artificial Sequence: Synthetic oligonucleotide
  Target: LAMA2; (-) strand; PAM type: NAAAAC; PAM sequence: GAAAAC
ttgtttcttaagaacaaaat

SEQ ID NO: 6266 - DNA, 20 bp, Artificial Sequence
  Description of Artificial Sequence: Synthetic oligonucleotide
  Target: LAMA2; (-) strand; PAM type: NAAAAC; PAM sequence: GAAAAC
tatagaagggtgacattgaa

SEQ ID NO: 6267 - DNA, 20 bp, Artificial Sequence
  Description of Artificial Sequence: Synthetic oligonucleotide
  Target: LAMA2; (-) strand; PAM type: NAAAAC; PAM sequence: TAAAAC
tgttttataaggggtgctct

SEQ ID NO: 6268 - DNA, 20 bp, Artificial Sequence
  Description of Artificial Sequence: Synthetic oligonucleotide
  Target: LAMA2; (-) strand; PAM type: NAAAAC; PAM sequence: TAAAAC
atgagtatatattaatctat

SEQ ID NO: 6269 - DNA, 20 bp, Artificial Sequence
  Description of Artificial Sequence: Synthetic oligonucleotide
  Target: LAMA2; (-) strand; PAM type: NAAAAC; PAM sequence: CAAAAC
atgttcattcattacattct

SEQ ID NO: 6270 - DNA, 20 bp, Artificial Sequence
  Description of Artificial Sequence: Synthetic oligonucleotide
  Target: LAMA2; (-) strand; PAM type: NAAAAC; PAM sequence: AAAAAC
aacaacaacaacaacaacag

SEQ ID NO: 6271 - DNA, 20 bp, Artificial Sequence
  Description of Artificial Sequence: Synthetic oligonucleotide
  Target: LAMA2; (-) strand; PAM type: NAAAAC; PAM sequence: AAAAAC
gatttttaaaatttgaaaac

SEQ ID NO: 6272 - DNA, 20 bp, Artificial Sequence
  Description of Artificial Sequence: Synthetic oligonucleotide
  Target: LAMA2; (-) strand; PAM type: NAAAAC; PAM sequence: GAAAAC
gatctggatttttaaaattt

SEQ ID NO: 6273 - DNA, 20 bp, Artificial Sequence
  Description of Artificial Sequence: Synthetic oligonucleotide
  Target: LAMA2; (-) strand; PAM type: NAAAAC; PAM sequence: TAAAAC
ctgttattgttgctattatg

SEQ ID NO: 6274 - DNA, 20 bp, Artificial Sequence
  Description of Artificial Sequence: Synthetic oligonucleotide
  Target: LAMA2; (-) strand; PAM type: NAAAAC; PAM sequence: CAAAAC
caagtctccatcagggaaat

SEQ ID NO: 6275 - DNA, 20 bp, Artificial Sequence
  Description of Artificial Sequence: Synthetic oligonucleotide
  Target: LAMA2; (-) strand; PAM type: NAAAAC; PAM sequence: CAAAAC
tagaactggactacctgggg

SEQ ID NO: 6276 - DNA, 20 bp, Artificial Sequence
  Description of Artificial Sequence: Synthetic oligonucleotide
  Target: LAMA2; (-) strand; PAM type: NAAAAC; PAM sequence: GAAAAC
ctattagttctgtccctcca

SEQ ID NO: 6277 - DNA, 20 bp, Artificial Sequence
  Description of Artificial Sequence: Synthetic oligonucleotide
  Target: LAMA2; (-) strand; PAM type: NAAAAC; PAM sequence: AAAAAC
ttacacatagagaaggcata

SEQ ID NO: 6278 - DNA, 20 bp, Artificial Sequence
  Description of Artificial Sequence: Synthetic oligonucleotide
  Target: LAMA2; (-) strand; PAM type: NAAAAC; PAM sequence: AAAAAC
tactgtaaacatttcacact

SEQ ID NO: 6279 - DNA, 20 bp, Artificial Sequence
  Description of Artificial Sequence: Synthetic oligonucleotide
  Target: LAMA2; (-) strand; PAM type: NAAAAC; PAM sequence: TAAAAC
atgaaatgagaaaataaaca

SEQ ID NO: 6280 - DNA, 20 bp, Artificial Sequence
  Description of Artificial Sequence: Synthetic oligonucleotide
  Target: LAMA2; (-) strand; PAM type: NAAAAC; PAM sequence: GAAAAC
gaggaacaatagaaagtata

SEQ ID NO: 6281 - DNA, 20 bp, Artificial Sequence
  Description of Artificial Sequence: Synthetic oligonucleotide
  Target: LAMA2; (-) strand; PAM type: NAAAAC; PAM sequence: GAAAAC
tttttcaaggtctctgccaa

SEQ ID NO: 6282 - DNA, 20 bp, Artificial Sequence
  Description of Artificial Sequence: Synthetic oligonucleotide
  Target: LAMA2; (-) strand; PAM type: NAAAAC; PAM sequence: AAAAAC
gtgctgttaggcccagaccc

SEQ ID NO: 6283 - DNA, 20 bp, Artificial Sequence
  Description of Artificial Sequence: Synthetic oligonucleotide
  Target: LAMA2; (-) strand; PAM type: NAAAAC; PAM sequence: CAAAAC
atctcctatgaatagatttg

SEQ ID NO: 6284 - DNA, 20 bp, Artificial Sequence
  Description of Artificial Sequence: Synthetic oligonucleotide
  Target: LAMA2; (-) strand; PAM type: NAAAAC; PAM sequence: TAAAAC
gtggtaggcagacaaaattt

SEQ ID NO: 6285 - DNA, 20 bp, Artificial Sequence
  Description of Artificial Sequence: Synthetic oligonucleotide
  Target: LAMA2; (-) strand; PAM type: NAAAAC; PAM sequence: GAAAAC
gaatgcttttggctgcaatt

SEQ ID NO: 6286 - DNA, 20 bp, Artificial Sequence
  Description of Artificial Sequence: Synthetic oligonucleotide
  Target: LAMA2; (-) strand; PAM type: NAAAAC; PAM sequence: GAAAAC
tataaataaaaaacctcgag

SEQ ID NO: 6287 - DNA, 20 bp, Artificial Sequence
  Description of Artificial Sequence: Synthetic oligonucleotide
  Target: LAMA2; (-) strand; PAM type: NAAAAC; PAM sequence: AAAAAC
cagtccaggggatataaata

SEQ ID NO: 6288 - DNA, 20 bp, Artificial Sequence
  Description of Artificial Sequence: Synthetic oligonucleotide
  Target: LAMA2; (-) strand; PAM type: NAAAAC; PAM sequence: GAAAAC
acaagaggattgtagaatta

SEQ ID NO: 6289 - DNA, 20 bp, Artificial Sequence
  Description of Artificial Sequence: Synthetic oligonucleotide
  Target: LAMA2; (-) strand; PAM type: NAAAAC; PAM sequence: TAAAAC
ttatttcactaaatggagtg

SEQ ID NO: 6290 - DNA, 20 bp, Artificial Sequence
  Description of Artificial Sequence: Synthetic oligonucleotide
  Target: LAMA2; (-) strand; PAM type: NAAAAC; PAM sequence: TAAAAC
gaaggctaaaaggtaattca

SEQ ID NO: 6291 - DNA, 20 bp, Artificial Sequence
  Description of Artificial Sequence: Synthetic oligonucleotide
  Target: LAMA2; (-) strand; PAM type: NAAAAC; PAM sequence: AAAAAC
ttaattctaccttcaggggg

SEQ ID NO: 6292 - DNA, 20 bp, Artificial Sequence
  Description of Artificial Sequence: Synthetic oligonucleotide
  Target: LAMA2; (-) strand; PAM type: NAAAAC; PAM sequence: AAAAAC
actagtaagaagactaaaga

SEQ ID NO: 6293 - DNA, 20 bp, Artificial Sequence
  Description of Artificial Sequence: Synthetic oligonucleotide
  Target: LAMA2; (-) strand; PAM type: NAAAAC; PAM sequence: TAAAAC
ttaaacaattgctaggttgt

SEQ ID NO: 6294 - DNA, 20 bp, Artificial Sequence
  Description of Artificial Sequence: Synthetic oligonucleotide
  Target: LAMA2; (-) strand; PAM type: NAAAAC; PAM sequence: TAAAAC
aataataatagcgataatag

SEQ ID NO: 6295 - DNA, 20 bp, Artificial Sequence
  Description of Artificial Sequence: Synthetic oligonucleotide
  Target: LAMA2; (-) strand; PAM type: NAAAAC; PAM sequence: TAAAAC
catgcaggtcagcgataata

SEQ ID NO: 6296 - DNA, 20 bp, Artificial Sequence
  Description of Artificial Sequence: Synthetic oligonucleotide
  Target: LAMA2; (-) strand; PAM type: NAAAAC; PAM sequence: TAAAAC
acagaggaggggttttggga

SEQ ID NO: 6297 - DNA, 20 bp, Artificial Sequence
  Description of Artificial Sequence: Synthetic oligonucleotide
  Target: LAMA2; (-) strand; PAM type: NAAAAC; PAM sequence: GAAAAC
ctataaggaacttaaattca

SEQ ID NO: 6298 - DNA, 20 bp, Artificial Sequence
  Description of Artificial Sequence: Synthetic oligonucleotide
  Target: LAMA2; (-) strand; PAM type: NAAAAC; PAM sequence: TAAAAC
actgtaaatagagatattca

SEQ ID NO: 6299 - DNA, 20 bp, Artificial Sequence
  Description of Artificial Sequence: Synthetic oligonucleotide
  Target: LAMA2; (-) strand; PAM type: NAAAAC; PAM sequence: CAAAAC
attttatattaaaattcaaa

SEQ ID NO: 6300 - DNA, 20 bp, Artificial Sequence
  Description of Artificial Sequence: Synthetic oligonucleotide
  Target: LAMA2; (-) strand; PAM type: NAAAAC; PAM sequence: AAAAAC
agaaatgttattggtcaaag

SEQ ID NO: 6301 - DNA, 20 bp, Artificial Sequence
  Description of Artificial Sequence: Synthetic oligonucleotide
  Target: LAMA2; (-) strand; PAM type: NAAAAC; PAM sequence: AAAAAC
tggaagcaagagaaaacagg

SEQ ID NO: 6302 - DNA, 20 bp, Artificial Sequence
  Description of Artificial Sequence: Synthetic oligonucleotide
  Target: LAMA2; (-) strand; PAM type: NAAAAC; PAM sequence: GAAAAC
aaatctatctggaagcaaga

SEQ ID NO: 6303 - DNA, 20 bp, Artificial Sequence
  Description of Artificial Sequence: Synthetic oligonucleotide
  Target: LAMA2; (-) strand; PAM type: NAAAAC; PAM sequence: TAAAAC
tctcctgtacctttcttacc

SEQ ID NO: 6304 - DNA, 20 bp, Artificial Sequence
  Description of Artificial Sequence: Synthetic oligonucleotide
  Target: LAMA2; (-) strand; PAM type: NAAAAC; PAM sequence: AAAAAC
aaggaacttactacatggga

SEQ ID NO: 6305 - DNA, 20 bp, Artificial Sequence
  Description of Artificial Sequence: Synthetic oligonucleotide
  Target: LAMA2; (-) strand; PAM type: NAAAAC; PAM sequence: TAAAAC
gaacaatagggaaagaaact

SEQ ID NO: 6306 - DNA, 20 bp, Artificial Sequence
  Description of Artificial Sequence: Synthetic oligonucleotide
  Target: LAMA2; (-) strand; PAM type: NAAAAC; PAM sequence: TAAAAC
aaaaaagaaataaaaaagag

SEQ ID NO: 6307 - DNA, 20 bp, Artificial Sequence
  Description of Artificial Sequence: Synthetic oligonucleotide
  Target: LAMA2; (-) strand; PAM type: NAAAAC; PAM sequence: GAAAAC
tttaagagaaaaatctttca

SEQ ID NO: 6308 - DNA, 20 bp, Artificial Sequence
  Description of Artificial Sequence: Synthetic oligonucleotide
  Target: LAMA2; (-) strand; PAM type: NAAAAC; PAM sequence: TAAAAC
acaaatttattctgcatatt

SEQ ID NO: 6309 - DNA, 20 bp, Artificial Sequence
  Description of Artificial Sequence: Synthetic oligonucleotide
  Target: LAMA2; (-) strand; PAM type: NAAAAC; PAM sequence: AAAAAC
aaagaatcatcaataataat

SEQ ID NO: 6310 - DNA, 20 bp, Artificial Sequence
  Description of Artificial Sequence: Synthetic oligonucleotide
  Target: LAMA2; (-) strand; PAM type: NAAAAC; PAM sequence: AAAAAC
ctactggaaggaaatatttt

SEQ ID NO: 6311 - DNA, 20 bp, Artificial Sequence
  Description of Artificial Sequence: Synthetic oligonucleotide
  Target: LAMA2; (-) strand; PAM type: NAAAAC; PAM sequence: AAAAAC
gggggcggggagaacaagaa

SEQ ID NO: 6312 - DNA, 20 bp, Artificial Sequence
  Description of Artificial Sequence: Synthetic oligonucleotide
  Target: LAMA2; (-) strand; PAM type: NAAAAC; PAM sequence: AAAAAC
gtcattgttttaaaaataaa

SEQ ID NO: 6313 - DNA, 20 bp, Artificial Sequence
  Description of Artificial Sequence: Synthetic oligonucleotide
  Target: LAMA2; (-) strand; PAM type: NAAAAC; PAM sequence: GAAAAC
tgttatttattattagagta

SEQ ID NO: 6314 - DNA, 20 bp, Artificial Sequence
  Description of Artificial Sequence: Synthetic oligonucleotide
  Target: LAMA2; (-) strand; PAM type: NAAAAC; PAM sequence: AAAAAC
gaggtggtggtgtcagcaat

SEQ ID NO: 6315 - DNA, 20 bp, Artificial Sequence
  Description of Artificial Sequence: Synthetic oligonucleotide
  Target: LAMA2; (-) strand; PAM type: NAAAAC; PAM sequence: AAAAAC
acctctatttgctaaatgtg

SEQ ID NO: 6316 - DNA, 20 bp, Artificial Sequence
  Description of Artificial Sequence: Synthetic oligonucleotide
  Target: LAMA2; (-) strand; PAM type: NAAAAC; PAM sequence: GAAAAC
aactattaaatagctgagtt

SEQ ID NO: 6317 - DNA, 20 bp, Artificial Sequence
  Description of Artificial Sequence: Synthetic oligonucleotide
  Target: LAMA2; (-) strand; PAM type: NAAAAC; PAM sequence: GAAAAC
aaaatctcaatggcttaaca

SEQ ID NO: 6318 - DNA, 20 bp, Artificial Sequence
  Description of Artificial Sequence: Synthetic oligonucleotide
  Target: LAMA2; (-) strand; PAM type: NAAAAC; PAM sequence: CAAAAC
ttcaaacccaagcatgactc

SEQ ID NO: 6319 - DNA, 20 bp, Artificial Sequence
  Description of Artificial Sequence: Synthetic oligonucleotide
  Target: LAMA2; (-) strand; PAM type: NAAAAC; PAM sequence: TAAAAC
cagcacaaaacatgacactt

SEQ ID NO: 6320 - DNA, 20 bp, Artificial Sequence
  Description of Artificial Sequence: Synthetic oligonucleotide
  Target: LAMA2; (-) strand; PAM type: NAAAAC; PAM sequence: CAAAAC
ttacactaaaacaaccagca

SEQ ID NO: 6321 - DNA, 20 bp, Artificial Sequence
  Description of Artificial Sequence: Synthetic oligonucleotide
  Target: LAMA2; (-) strand; PAM type: NAAAAC; PAM sequence: TAAAAC
taagatatgctatattacac

SEQ ID NO: 6322 - DNA, 20 bp, Artificial Sequence
  Description of Artificial Sequence: Synthetic oligonucleotide
  Target: LAMA2; (-) strand; PAM type: NAAAAC; PAM sequence: AAAAAC
aacagttttaaaaaagatac

SEQ ID NO: 6323 - DNA, 20 bp, Artificial Sequence
  Description of Artificial Sequence: Synthetic oligonucleotide
  Target: LAMA2; (-) strand; PAM type: NAAAAC; PAM sequence: CAAAAC
tctcatataaaattgacatg

SEQ ID NO: 6324 - DNA, 20 bp, Artificial Sequence
  Description of Artificial Sequence: Synthetic oligonucleotide
  Target: LAMA2; (-) strand; PAM type: NAAAAC; PAM sequence: GAAAAC
aataaatgaatagatgaatg

SEQ ID NO: 6325 - DNA, 20 bp, Artificial Sequence
  Description of Artificial Sequence: Synthetic oligonucleotide
  Target: LAMA2; (-) strand; PAM type: NAAAAC; PAM sequence: GAAAAC
gacattttatcagcccaaaa

SEQ ID NO: 6326 - DNA, 20 bp, Artificial Sequence
  Description of Artificial Sequence: Synthetic oligonucleotide
  Target: LAMA2; (-) strand; PAM type: NAAAAC; PAM sequence: CAAAAC
aaaccaaataaaaattacta

SEQ ID NO: 6327 - DNA, 20 bp, Artificial Sequence
  Description of Artificial Sequence: Synthetic oligonucleotide
  Target: LAMA2; (-) strand; PAM type: NAAAAC; PAM sequence: GAAAAC
ttaaagggtcttttaaaaaa

SEQ ID NO: 6328 - DNA, 20 bp, Artificial Sequence
  Description of Artificial Sequence: Synthetic oligonucleotide
  Target: LAMA2; (-) strand; PAM type: NAAAAC; PAM sequence: AAAAAC
tgtgtaattattgatagaaa

SEQ ID NO: 6329 - DNA, 20 bp, Artificial Sequence
  Description of Artificial Sequence: Synthetic oligonucleotide
  Target: LAMA2; (-) strand; PAM type: NAAAAC; PAM sequence: TAAAAC
ttttttgaccaggtttcaag

SEQ ID NO: 6330 - DNA, 20 bp, Artificial Sequence
  Description of Artificial Sequence: Synthetic oligonucleotide
  Target: LAMA2; (-) strand; PAM type: NAAAAC; PAM sequence: TAAAAC
aagtatgtggaaacaagcct

SEQ ID NO: 6331 - DNA, 20 bp, Artificial Sequence
  Description of Artificial Sequence: Synthetic oligonucleotide
  Target: LAMA2; (-) strand; PAM type: NAAAAC; PAM sequence: CAAAAC
tcaaacaacaaaaaacaccc

SEQ ID NO: 6332 - DNA, 20 bp, Artificial Sequence
  Description of Artificial Sequence: Synthetic oligonucleotide
  Target: LAMA2; (-) strand; PAM type: NAAAAC; PAM sequence: AAAAAC
agaccctgtctcaaacaaca

SEQ ID NO: 6333 - DNA, 20 bp, Artificial Sequence
  Description of Artificial Sequence: Synthetic oligonucleotide
  Target: LAMA2; (-) strand; PAM type: NAAAAC; PAM sequence: TAAAAC
tattgagatcttgtctctat

SEQ ID NO: 6334 - DNA, 20 bp, Artificial Sequence
  Description of Artificial Sequence: Synthetic oligonucleotide
  Target: LAMA2; (-) strand; PAM type: NAAAAC; PAM sequence: AAAAAC
catagtttatgacgccttcc

SEQ ID NO: 6335 - DNA, 20 bp, Artificial Sequence
  Description of Artificial Sequence: Synthetic oligonucleotide
  Target: LAMA2; (-) strand; PAM type: NAAAAC; PAM sequence: TAAAAC
ttgtgtcaccacctctcaat

SEQ ID NO: 6336 - DNA, 20 bp, Artificial Sequence
  Description of Artificial Sequence: Synthetic oligonucleotide
  Target: LAMA2; (-) strand; PAM type: NAAAAC; PAM sequence: CAAAAC
aataaacaaaacacaaatga

SEQ ID NO: 6337 - DNA, 20 bp, Artificial Sequence
  Description of Artificial Sequence: Synthetic oligonucleotide
  Target: LAMA2; (-) strand; PAM type: NAAAAC; PAM sequence: CAAAAC
gtgtctccatcaaaaataaa

SEQ ID NO: 6338 - DNA, 20 bp, Artificial Sequence
  Description of Artificial Sequence: Synthetic oligonucleotide
  Target: LAMA2; (-) strand; PAM type: NAAAAC; PAM sequence: GAAAAC
cttcttttccagttgaaaaa

SEQ ID NO: 6339 - DNA, 20 bp, Artificial Sequence
  Description of Artificial Sequence: Synthetic oligonucleotide
  Target: LAMA2; (-) strand; PAM type: NAAAAC; PAM sequence: TAAAAC
tataaaaactgaattctgat

SEQ ID NO: 6340 - DNA, 20 bp, Artificial Sequence
  Description of Artificial Sequence: Synthetic oligonucleotide
  Target: LAMA2; (-) strand; PAM type: NAAAAC; PAM sequence: AAAAAC
tgtgaaacactttattatat

SEQ ID NO: 6341 - DNA, 20 bp, Artificial Sequence
  Description of Artificial Sequence: Synthetic oligonucleotide
  Target: LAMA2; (-) strand; PAM type: NAAAAC; PAM sequence: TAAAAC
ctttagtcagtcttggagat

SEQ ID NO: 6342 - DNA, 20 bp, Artificial Sequence
  Description of Artificial Sequence: Synthetic oligonucleotide
  Target: LAMA2; (-) strand; PAM type: NAAAAC; PAM sequence: GAAAAC
gttttcattttcaacatgaa

SEQ ID NO: 6343 - DNA, 20 bp, Artificial Sequence
  Description of Artificial Sequence: Synthetic oligonucleotide
  Target: LAMA2; (-) strand; PAM type: NAAAAC; PAM sequence: TAAAAC
tcatgccatgtcagacaata

SEQ ID NO: 6344 - DNA, 20 bp, Artificial Sequence
  Description of Artificial Sequence: Synthetic oligonucleotide
  Target: LAMA2; (-) strand; PAM type: NAAAAC; PAM sequence: TAAAAC
ttttgtcttcttagggtaag

SEQ ID NO: 6345 - DNA, 20 bp, Artificial Sequence
  Description of Artificial Sequence: Synthetic oligonucleotide
  Target: LAMA2; (-) strand; PAM type: NAAAAC; PAM sequence: TAAAAC
catgctacttaatgctgggt

SEQ ID NO: 6346 - DNA, 20 bp, Artificial Sequence
  Description of Artificial Sequence: Synthetic oligonucleotide
  Target: LAMA2; (-) strand; PAM type: NAAAAC; PAM sequence: AAAAAC
ataaatttatttttcatgct

SEQ ID NO: 6347 - DNA, 20 bp, Artificial Sequence
  Description of Artificial Sequence: Synthetic oligonucleotide
  Target: LAMA2; (-) strand; PAM type: NAAAAC; PAM sequence: GAAAAC
tatttttgtagtggaaacca

SEQ ID NO: 6348 - DNA, 20 bp, Artificial Sequence
  Description of Artificial Sequence: Synthetic oligonucleotide
  Target: LAMA2; (-) strand; PAM type: NAAAAC; PAM sequence: TAAAAC
tcatcaaataaaaatcatct

SEQ ID NO: 6349 - DNA, 20 bp, Artificial Sequence
  Description of Artificial Sequence: Synthetic oligonucleotide
  Target: LAMA2; (-) strand; PAM type: NAAAAC; PAM sequence: CAAAAC
gtatattgggatttaatgtg

SEQ ID NO: 6350 - DNA, 20 bp, Artificial Sequence
  Description of Artificial Sequence: Synthetic oligonucleotide
  Target: LAMA2; (-) strand; PAM type: NAAAAC; PAM sequence: CAAAAC
tttctcaaatttatttttaa

SEQ ID NO: 6351 - DNA, 20 bp, Artificial Sequence
  Description of Artificial Sequence: Synthetic oligonucleotide
  Target: LAMA2; (-) strand; PAM type: NAAAAC; PAM sequence: GAAAAC
tgtagtaactggtgatattt

SEQ ID NO: 6352 - DNA, 20 bp, Artificial Sequence
  Description of Artificial Sequence: Synthetic oligonucleotide
  Target: LAMA2; (-) strand; PAM type: NAAAAC; PAM sequence: CAAAAC
actcttagaaattaaatcac

SEQ ID NO: 6353 - DNA, 20 bp, Artificial Sequence
  Description of Artificial Sequence: Synthetic oligonucleotide
  Target: LAMA2; (-) strand; PAM type: NAAAAC; PAM sequence: CAAAAC
aaagtatcccaatttaaaaa

SEQ ID NO: 6354 - DNA, 20 bp, Artificial Sequence
  Description of Artificial Sequence: Synthetic oligonucleotide
  Target: LAMA2; (-) strand; PAM type: NAAAAC; PAM sequence: AAAAAC
aaaaaaaagtatcccaattt

SEQ ID NO: 6355 - DNA, 20 bp, Artificial Sequence
  Description of Artificial Sequence: Synthetic oligonucleotide
  Target: LAMA2; (-) strand; PAM type: NAAAAC; PAM sequence: TAAAAC
tttggaaagcacatggattt

SEQ ID NO: 6356 - DNA, 20 bp, Artificial Sequence
  Description of Artificial Sequence: Synthetic oligonucleotide
  Target: LAMA2; (-) strand; PAM type: NAAAAC; PAM sequence: CAAAAC
aaaccaatgtcttattttct

SEQ ID NO: 6357 - DNA, 20 bp, Artificial Sequence
  Description of Artificial Sequence: Synthetic oligonucleotide
  Target: LAMA2; (-) strand; PAM type: NAAAAC; PAM sequence: TAAAAC
tgcaggggaggagtttggga

SEQ ID NO: 6358 - DNA, 20 bp, Artificial Sequence
  Description of Artificial Sequence: Synthetic oligonucleotide
  Target: LAMA2; (-) strand; PAM type: NAAAAC; PAM sequence: GAAAAC
attaattgcttactctaagt

SEQ ID NO: 6359 - DNA, 20 bp, Artificial Sequence
  Description of Artificial Sequence: Synthetic oligonucleotide
  Target: LAMA2; (-) strand; PAM type: NAAAAC; PAM sequence: CAAAAC
aagacattataaccctctca

SEQ ID NO: 6360 - DNA, 20 bp, Artificial Sequence
  Description of Artificial Sequence: Synthetic oligonucleotide
  Target: LAMA2; (-) strand; PAM type: NAAAAC; PAM sequence: TAAAAC
aaatagataaatcaccaagg

SEQ ID NO: 6361 - DNA, 20 bp, Artificial Sequence
  Description of Artificial Sequence: Synthetic oligonucleotide
  Target: LAMA2; (-) strand; PAM type: NAAAAC; PAM sequence: AAAAAC
aatttgagtttcattctttc

SEQ ID NO: 6362 - DNA, 20 bp, Artificial Sequence
  Description of Artificial Sequence: Synthetic oligonucleotide
  Target: LAMA2; (-) strand; PAM type: NAAAAC; PAM sequence: TAAAAC
caatgtgtaggaaagagcac

SEQ ID NO: 6363 - DNA, 20 bp, Artificial Sequence
  Description of Artificial Sequence: Synthetic oligonucleotide
  Target: LAMA2; (-) strand; PAM type: NAAAAC; PAM sequence: TAAAAC
cataatctcccatgtgcaca

SEQ ID NO: 6364 - DNA, 20 bp, Artificial Sequence
  Description of Artificial Sequence: Synthetic oligonucleotide
  Target: LAMA2; (-) strand; PAM type: NAAAAC; PAM sequence: AAAAAC
tacgacttattaatttttta

SEQ ID NO: 6365 - DNA, 20 bp, Artificial Sequence
  Description of Artificial Sequence: Synthetic oligonucleotide
  Target: LAMA2; (-) strand; PAM type: NAAAAC; PAM sequence: TAAAAC
tttaatcatgggtataaaat

SEQ ID NO: 6366 - DNA, 20 bp, Artificial Sequence
  Description of Artificial Sequence: Synthetic oligonucleotide
  Target: LAMA2; (-) strand; PAM type: NAAAAC; PAM sequence: TAAAAC
tcttgggattgtatgtgata

SEQ ID NO: 6367 - DNA, 20 bp, Artificial Sequence
  Description of Artificial Sequence: Synthetic oligonucleotide
  Target: LAMA2; (-) strand; PAM type: NAAAAC; PAM sequence: CAAAAC
gagcagccagaagccaaaag

SEQ ID NO: 6368 - DNA, 20 bp, Artificial Sequence
  Description of Artificial Sequence: Synthetic oligonucleotide
  Target: LAMA2; (-) strand; PAM type: NAAAAC; PAM sequence: AAAAAC
agaaataaacatgcacaata

SEQ ID NO: 6369 - DNA, 20 bp, Artificial Sequence
  Description of Artificial Sequence: Synthetic oligonucleotide
  Target: LAMA2; (-) strand; PAM type: NAAAAC; PAM sequence: TAAAAC
ctcgacataacgcatccaaa

SEQ ID NO: 6370 - DNA, 20 bp, Artificial Sequence
  Description of Artificial Sequence: Synthetic oligonucleotide
  Target: LAMA2; (-) strand; PAM type: NAAAAC; PAM sequence: TAAAAC
aaatacactcacatgtcagt

SEQ ID NO: 6371 - DNA, 20 bp, Artificial Sequence
  Description of Artificial Sequence: Synthetic oligonucleotide
  Target: LAMA2; (-) strand; PAM type: NAAAAC; PAM sequence: GAAAAC
tgggactacactgattgaaa

SEQ ID NO: 6372 - DNA, 20 bp, Artificial Sequence
  Description of Artificial Sequence: Synthetic oligonucleotide
  Target: LAMA2; (-) strand; PAM type: NAAAAC; PAM sequence: GAAAAC
gctatgttgatgttgttgcg

SEQ ID NO: 6373 - DNA, 20 bp, Artificial Sequence
  Description of Artificial Sequence: Synthetic oligonucleotide
  Target: LAMA2; (-) strand; PAM type: NAAAAC; PAM sequence: TAAAAC
taatacttaacctttaagat

SEQ ID NO: 6374 - DNA, 20 bp, Artificial Sequence
  Description of Artificial Sequence: Synthetic oligonucleotide
  Target: LAMA2; (-) strand; PAM type: NAAAAC; PAM sequence: AAAAAC
tatagaagaattatttcttc

SEQ ID NO: 6375 - DNA, 20 bp, Artificial Sequence
  Description of Artificial Sequence: Synthetic oligonucleotide
  Target: LAMA2; (-) strand; PAM type: NAAAAC; PAM sequence: AAAAAC
aaatatggtatcaactgtgg

SEQ ID NO: 6376 - DNA, 20 bp, Artificial Sequence
  Description of Artificial Sequence: Synthetic oligonucleotide
  Target: LAMA2; (-) strand; PAM type: NAAAAC; PAM sequence: GAAAAC
ataaatcttaaatattcctg

SEQ ID NO: 6377 - DNA, 20 bp, Artificial Sequence
  Description of Artificial Sequence: Synthetic oligonucleotide
  Target: LAMA2; (-) strand; PAM type: NAAAAC; PAM sequence: GAAAAC
ctagctgggagagaggagaa

SEQ ID NO: 6378 - DNA, 20 bp, Artificial Sequence
  Description of Artificial Sequence: Synthetic oligonucleotide
  Target: LAMA2; (-) strand; PAM type: NAAAAC; PAM sequence: TAAAAC
tctagtatgaatcttgagga

SEQ ID NO: 6379 - DNA, 20 bp, Artificial Sequence
  Description of Artificial Sequence: Synthetic oligonucleotide
  Target: LAMA2; (-) strand; PAM type: NAAAAC; PAM sequence: TAAAAC
tggagaatgaacacacattt

SEQ ID NO: 6380 - DNA, 20 bp, Artificial Sequence
  Description of Artificial Sequence: Synthetic oligonucleotide
  Target: LAMA2; (-) strand; PAM type: NAAAAC; PAM sequence: GAAAAC
atttctattatctatacact

SEQ ID NO: 6381 - DNA, 20 bp, Artificial Sequence
  Description of Artificial Sequence: Synthetic oligonucleotide
  Target: LAMA2; (-) strand; PAM type: NAAAAC; PAM sequence: AAAAAC
actgaaattctccataataa

SEQ ID NO: 6382 - DNA, 20 bp, Artificial Sequence
  Description of Artificial Sequence: Synthetic oligonucleotide
  Target: LAMA2; (-) strand; PAM type: NAAAAC; PAM sequence: GAAAAC
tgatcattatcacagcaaac

SEQ ID NO: 6383 - DNA, 20 bp, Artificial Sequence
  Description of Artificial Sequence: Synthetic oligonucleotide
  Target: LAMA2; (-) strand; PAM type: NAAAAC; PAM sequence: AAAAAC
tgtcaaaattgaaggggatc

SEQ ID NO: 6384 - DNA, 20 bp, Artificial Sequence
  Description of Artificial Sequence: Synthetic oligonucleotide
  Target: LAMA2; (-) strand; PAM type: NAAAAC; PAM sequence: AAAAAC
gcatggcaaagaagattttt

SEQ ID NO: 6385 - DNA, 20 bp, Artificial Sequence
  Description of Artificial Sequence: Synthetic oligonucleotide
  Target: LAMA2; (-) strand; PAM type: NAAAAC; PAM sequence: AAAAAC
ataatatattatattattgg

SEQ ID NO: 6386 - DNA, 20 bp, Artificial Sequence
  Description of Artificial Sequence: Synthetic oligonucleotide
  Target: LAMA2; (-) strand; PAM type: NAAAAC; PAM sequence: TAAAAC
tatataaatataatataata

SEQ ID NO: 6387 - DNA, 20 bp, Artificial Sequence
  Description of Artificial Sequence: Synthetic oligonucleotide
  Target: LAMA2; (-) strand; PAM type: NAAAAC; PAM sequence: AAAAAC
cctgctctttctttcttacc

SEQ ID NO: 6388 - DNA, 20 bp, Artificial Sequence
  Description of Artificial Sequence: Synthetic oligonucleotide
  Target: LAMA2; (-) strand; PAM type: NAAAAC; PAM sequence: GAAAAC
aaaaacatgtttatcatttg

SEQ ID NO: 6389 - DNA, 20 bp, Artificial Sequence
  Description of Artificial Sequence: Synthetic oligonucleotide
  Target: LAMA2; (-) strand; PAM type: NAAAAC; PAM sequence: AAAAAC
tcttccttccgcatgtaaat

SEQ ID NO: 6390 - DNA, 20 bp, Artificial Sequence
  Description of Artificial Sequence: Synthetic oligonucleotide
  Target: LAMA2; (-) strand; PAM type: NAAAAC; PAM sequence: GAAAAC
agtagctaattttgtggaag

SEQ ID NO: 6391 - DNA, 20 bp, Artificial Sequence
  Description of Artificial Sequence: Synthetic oligonucleotide
  Target: LAMA2; (-) strand; PAM type: NAAAAC; PAM sequence: GAAAAC
atgactctctttgtagacta

SEQ ID NO: 6392 - DNA, 20 bp, Artificial Sequence
  Description of Artificial Sequence: Synthetic oligonucleotide
  Target: LAMA2; (-) strand; PAM type: NAAAAC; PAM sequence: GAAAAC
atactcacggcaagtagtat

SEQ ID NO: 6393 - DNA, 20 bp, Artificial Sequence
  Description of Artificial Sequence: Synthetic oligonucleotide
  Target: LAMA2; (-) strand; PAM type: NAAAAC; PAM sequence: AAAAAC
taattaattaatgttatcgt

SEQ ID NO: 6394 - DNA, 20 bp, Artificial Sequence
  Description of Artificial Sequence: Synthetic oligonucleotide
  Target: LAMA2; (-) strand; PAM type: NAAAAC; PAM sequence: AAAAAC
aacaaaagaactgcttttct

SEQ ID NO: 6395 - DNA, 20 bp, Artificial Sequence
  Description of Artificial Sequence: Synthetic oligonucleotide
  Target: LAMA2; (-) strand; PAM type: NAAAAC; PAM sequence: AAAAAC
ggctctaggttctcctttta

SEQ ID NO: 6396 - DNA, 20 bp, Artificial Sequence
  Description of Artificial Sequence: Synthetic oligonucleotide
  Target: LAMA2; (-) strand; PAM type: NAAAAC; PAM sequence: TAAAAC
aaagctgtctgaggttattc

SEQ ID NO: 6397 - DNA, 20 bp, Artificial Sequence
  Description of Artificial Sequence: Synthetic oligonucleotide
  Target: LAMA2; (-) strand; PAM type: NAAAAC; PAM sequence: CAAAAC
atatgctatctccaaacata

SEQ ID NO: 6398 - DNA, 20 bp, Artificial Sequence
  Description of Artificial Sequence: Synthetic oligonucleotide
  Target: LAMA2; (-) strand; PAM type: NAAAAC; PAM sequence: AAAAAC
tcagaagtttaaaagacaac

SEQ ID NO: 6399 - DNA, 20 bp, Artificial Sequence
  Description of Artificial Sequence: Synthetic oligonucleotide
  Target: LAMA2; (-) strand; PAM type: NAAAAC; PAM sequence: GAAAAC
gaagagagacctgtgatcag

SEQ ID NO: 6400 - DNA, 20 bp, Artificial Sequence
  Description of Artificial Sequence: Synthetic oligonucleotide
  Target: LAMA2; (-) strand; PAM type: NAAAAC; PAM sequence: CAAAAC
ttttaatatacgaaggtata

SEQ ID NO: 6401 - DNA, 20 bp, Artificial Sequence
  Description of Artificial Sequence: Synthetic oligonucleotide
  Target: LAMA2; (-) strand; PAM type: NAAAAC; PAM sequence: AAAAAC
gaattttgttctagtttgaa

SEQ ID NO: 6402 - DNA, 20 bp, Artificial Sequence
  Description of Artificial Sequence: Synthetic oligonucleotide
  Target: LAMA2; (-) strand; PAM type: NAAAAC; PAM sequence: CAAAAC
accataaaataaaataaaaa

SEQ ID NO: 6403 - DNA, 20 bp, Artificial Sequence
  Description of Artificial Sequence: Synthetic oligonucleotide
  Target: LAMA2; (-) strand; PAM type: NAAAAC; PAM sequence: AAAAAC
aaccaaccataaaataaaat

SEQ ID NO: 6404 - DNA, 20 bp, Artificial Sequence
  Description of Artificial Sequence: Synthetic oligonucleotide
  Target: LAMA2; (-) strand; PAM type: NAAAAC; PAM sequence: AAAAAC
cccgccacatattgggcttt

SEQ ID NO: 6405 - DNA, 20 bp, Artificial Sequence
  Description of Artificial Sequence: Synthetic oligonucleotide
  Target: LAMA2; (-) strand; PAM type: NAAAAC; PAM sequence: TAAAAC
tgtgataatgagccaagaaa

SEQ ID NO: 6406 - DNA, 20 bp, Artificial Sequence
  Description of Artificial Sequence: Synthetic oligonucleotide
  Target: LAMA2; (-) strand; PAM type: NAAAAC; PAM sequence: AAAAAC
aatcaggcctaacatttact

SEQ ID NO: 6407 - DNA, 20 bp, Artificial Sequence
  Description of Artificial Sequence: Synthetic oligonucleotide
  Target: LAMA2; (-) strand; PAM type: NAAAAC; PAM sequence: CAAAAC
aggaaaaaatagtctcggga

SEQ ID NO: 6408 - DNA, 20 bp, Artificial Sequence
  Description of Artificial Sequence: Synthetic oligonucleotide
  Target: LAMA2; (-) strand; PAM type: NAAAAC; PAM sequence: GAAAAC
aatttgtttcaaaggctaaa

SEQ ID NO: 6409 - DNA, 20 bp, Artificial Sequence
  Description of Artificial Sequence: Synthetic oligonucleotide
  Target: LAMA2; (-) strand; PAM type: NAAAAC; PAM sequence: TAAAAC
aaagactaaacataatatat

SEQ ID NO: 6410 - DNA, 20 bp, Artificial Sequence
  Description of Artificial Sequence: Synthetic oligonucleotide
  Target: LAMA2; (-) strand; PAM type: NAAAAC; PAM sequence: AAAAAC
attaaattcacctatataaa

SEQ ID NO: 6411 - DNA, 20 bp, Artificial Sequence
  Description of Artificial Sequence: Synthetic oligonucleotide
  Target: LAMA2; (-) strand; PAM type: NAAAAC; PAM sequence: TAAAAC
ctgttacagaagtcagaccc

SEQ ID NO: 6412 - DNA, 20 bp, Artificial Sequence
  Description of Artificial Sequence: Synthetic oligonucleotide
  Target: LAMA2; (-) strand; PAM type: NAAAAC; PAM sequence: AAAAAC
ttttggggtaccaggaaaaa

SEQ ID NO: 6413 - DNA, 20 bp, Artificial Sequence
  Description of Artificial Sequence: Synthetic oligonucleotide
  Target: LAMA2; (-) strand; PAM type: NAAAAC; PAM sequence: AAAAAC
ctaactcaactaattgtaac

SEQ ID NO: 6414 - DNA, 20 bp, Artificial Sequence
  Description of Artificial Sequence: Synthetic oligonucleotide
  Target: LAMA2; (-) strand; PAM type: NAAAAC; PAM sequence: TAAAAC
acaatgtataacacaattaa

SEQ ID NO: 6415 - DNA, 20 bp, Artificial Sequence
  Description of Artificial Sequence: Synthetic oligonucleotide
  Target: LAMA2; (-) strand; PAM type: NAAAAC; PAM sequence: GAAAAC
atcataacactaaatagaaa

SEQ ID NO: 6416 - DNA, 20 bp, Artificial Sequence
  Description of Artificial Sequence: Synthetic oligonucleotide
  Target: LAMA2; (-) strand; PAM type: NAAAAC; PAM sequence: AAAAAC
tgatgagcccgatctgcagt

SEQ ID NO: 6417 - DNA, 20 bp, Artificial Sequence
  Description of Artificial Sequence: Synthetic oligonucleotide
  Target: LAMA2; (-) strand; PAM type: NAAAAC; PAM sequence: AAAAAC
acttaaggatatttggaaat

SEQ ID NO: 6418 - DNA, 20 bp, Artificial Sequence
  Description of Artificial Sequence: Synthetic oligonucleotide
  Target: LAMA2; (-) strand; PAM type: NAAAAC; PAM sequence: GAAAAC
agcttcaccggtataagagg

SEQ ID NO: 6419 - DNA, 20 bp, Artificial Sequence
  Description of Artificial Sequence: Synthetic oligonucleotide
  Target: LAMA2; (-) strand; PAM type: NAAAAC; PAM sequence: CAAAAC
tgcccaattacagagctcta

SEQ ID NO: 6420 - DNA, 20 bp, Artificial Sequence
  Description of Artificial Sequence: Synthetic oligonucleotide
  Target: LAMA2; (-) strand; PAM type: NAAAAC; PAM sequence: TAAAAC
ctcaactacttcctgaaacc

SEQ ID NO: 6421 - DNA, 20 bp, Artificial Sequence
  Description of Artificial Sequence: Synthetic oligonucleotide
  Target: LAMA2; (-) strand; PAM type: NAAAAC; PAM sequence: CAAAAC
tcatctactccattgcaaag

SEQ ID NO: 6422 - DNA, 20 bp, Artificial Sequence
  Description of Artificial Sequence: Synthetic oligonucleotide
  Target: LAMA2; (-) strand; PAM type: NAAAAC; PAM sequence: CAAAAC
aaaattataatgctagaagg

SEQ ID NO: 6423 - DNA, 20 bp, Artificial Sequence
  Description of Artificial Sequence: Synthetic oligonucleotide
  Target: LAMA2; (-) strand; PAM type: NAAAAC; PAM sequence: AAAAAC
acaaacaaaccccccctcaa

SEQ ID NO: 6424 - DNA, 20 bp, Artificial Sequence
  Description of Artificial Sequence: Synthetic oligonucleotide
  Target: LAMA2; (-) strand; PAM type: NAAAAC; PAM sequence: AAAAAC
caacaatatggatgaattac

SEQ ID NO: 6425 - DNA, 20 bp, Artificial Sequence
  Description of Artificial Sequence: Synthetic oligonucleotide
  Target: LAMA2; (-) strand; PAM type: NAAAAC; PAM sequence: GAAAAC
tgttcttaagaaaaaaaaga

SEQ ID NO: 6426 - DNA, 20 bp, Artificial Sequence
  Description of Artificial Sequence: Synthetic oligonucleotide
  Target: LAMA2; (-) strand; PAM type: NAAAAC; PAM sequence: GAAAAC
aaactctaaaacttcttgaa

SEQ ID NO: 6427 - DNA, 20 bp, Artificial Sequence
  Description of Artificial Sequence: Synthetic oligonucleotide
  Target: LAMA2; (-) strand; PAM type: NAAAAC; PAM sequence: TAAAAC
acatttaagagctaaaactc

SEQ ID NO: 6428 - DNA, 20 bp, Artificial Sequence
  Description of Artificial Sequence: Synthetic oligonucleotide
  Target: LAMA2; (-) strand; PAM type: NAAAAC; PAM sequence: TAAAAC
ccaaacctacatttaagagc

SEQ ID NO: 6429 - DNA, 20 bp, Artificial Sequence
  Description of Artificial Sequence: Synthetic oligonucleotide
  Target: LAMA2; (-) strand; PAM type: NAAAAC; PAM sequence: AAAAAC
atatgcaaagcttgcacatc

SEQ ID NO: 6430 - DNA, 20 bp, Artificial Sequence
  Description of Artificial Sequence: Synthetic oligonucleotide
  Target: LAMA2; (-) strand; PAM type: NAAAAC; PAM sequence: TAAAAC
tattctagtaacaagcaatt

SEQ ID NO: 6431 - DNA, 20 bp, Artificial Sequence
  Description of Artificial Sequence: Synthetic oligonucleotide
  Target: LAMA2; (-) strand; PAM type: NAAAAC; PAM sequence: CAAAAC
aaaacacgagggggcatcct

SEQ ID NO: 6432 - DNA, 20 bp, Artificial Sequence
  Description of Artificial Sequence: Synthetic oligonucleotide
  Target: LAMA2; (-) strand; PAM type: NAAAAC; PAM sequence: AAAAAC
ataaaagctcttagcaaact

SEQ ID NO: 6433 - DNA, 20 bp, Artificial Sequence
  Description of Artificial Sequence: Synthetic oligonucleotide
  Target: LAMA2; (-) strand; PAM type: NAAAAC; PAM sequence: GAAAAC
ttttctacctcattgattgt

SEQ ID NO: 6434 - DNA, 20 bp, Artificial Sequence
  Description of Artificial Sequence: Synthetic oligonucleotide
  Target: LAMA2; (-) strand; PAM type: NAAAAC; PAM sequence: CAAAAC
aagttatcacatttattagg

SEQ ID NO: 6435 - DNA, 20 bp, Artificial Sequence
  Description of Artificial Sequence: Synthetic oligonucleotide
  Target: LAMA2; (-) strand; PAM type: NAAAAC; PAM sequence: AAAAAC
aaacaaaaaacaaaaaacaa

SEQ ID NO: 6436 - DNA, 20 bp, Artificial Sequence
  Description of Artificial Sequence: Synthetic oligonucleotide
  Target: LAMA2; (-) strand; PAM type: NAAAAC; PAM sequence: AAAAAC
cgtctcaaaaacaaaaaaca

SEQ ID NO: 6437 - DNA, 20 bp, Artificial Sequence
  Description of Artificial Sequence: Synthetic oligonucleotide
  Target: LAMA2; (-) strand; PAM type: NAAAAC; PAM sequence: AAAAAC
aagactccgtctcaaaaaca

SEQ ID NO: 6438 - DNA, 20 bp, Artificial Sequence
  Description of Artificial Sequence: Synthetic oligonucleotide
  Target: LAMA2; (-) strand; PAM type: NAAAAC; PAM sequence: AAAAAC
tcagagcaagactccgtctc

SEQ ID NO: 6439 - DNA, 20 bp, Artificial Sequence
  Description of Artificial Sequence: Synthetic oligonucleotide
  Target: LAMA2; (-) strand; PAM type: NAAAAC; PAM sequence: TAAAAC
atattaaaccaagtgaaaat

SEQ ID NO: 6440 - DNA, 20 bp, Artificial Sequence
  Description of Artificial Sequence: Synthetic oligonucleotide
  Target: LAMA2; (-) strand; PAM type: NAAAAC; PAM sequence: TAAAAC
ctgaacactattccgggcca

SEQ ID NO: 6441 - DNA, 20 bp, Artificial Sequence
  Description of Artificial Sequence: Synthetic oligonucleotide
  Target: LAMA2; (-) strand; PAM type: NAAAAC; PAM sequence: AAAAAC
ctgagagaacatgtagatct

SEQ ID NO: 6442 - DNA, 20 bp, Artificial Sequence
  Description of Artificial Sequence: Synthetic oligonucleotide
  Target: LAMA2; (-) strand; PAM type: NAAAAC; PAM sequence: TAAAAC
tgctcaaaaatacatgtgaa

SEQ ID NO: 6443 - DNA, 20 bp, Artificial Sequence
  Description of Artificial Sequence: Synthetic oligonucleotide
  Target: LAMA2; (-) strand; PAM type: NAAAAC; PAM sequence: AAAAAC
agtgagatctcatttctaca

SEQ ID NO: 6444 - DNA, 20 bp, Artificial Sequence
  Description of Artificial Sequence: Synthetic oligonucleotide
  Target: LAMA2; (-) strand; PAM type: NAAAAC; PAM sequence: CAAAAC
taaagatgtatattcctaga

SEQ ID NO: 6445 - DNA, 20 bp, Artificial Sequence
  Description of Artificial Sequence: Synthetic oligonucleotide
  Target: LAMA2; (-) strand; PAM type: NAAAAC; PAM sequence: AAAAAC
aaaacatcttcggaaaaaaa

SEQ ID NO: 6446 - DNA, 20 bp, Artificial Sequence
  Description of Artificial Sequence: Synthetic oligonucleotide
  Target: LAMA2; (-) strand; PAM type: NAAAAC; PAM sequence: AAAAAC
tttaggattacatactctgc

SEQ ID NO: 6447 - DNA, 20 bp, Artificial Sequence
  Description of Artificial Sequence: Synthetic oligonucleotide
  Target: LAMA2; (-) strand; PAM type: NAAAAC; PAM sequence: GAAAAC
aattattaaacacacaaaaa

SEQ ID NO: 6448 - DNA, 20 bp, Artificial Sequence
  Description of Artificial Sequence: Synthetic oligonucleotide
  Target: LAMA2; (-) strand; PAM type: NAAAAC; PAM sequence: GAAAAC
ctttcatttccaaatttgat

SEQ ID NO: 6449 - DNA, 20 bp, Artificial Sequence
  Description of Artificial Sequence: Synthetic oligonucleotide
  Target: LAMA2; (-) strand; PAM type: NAAAAC; PAM sequence: AAAAAC
aaaatagactcaattggatt

SEQ ID NO: 6450 - DNA, 20 bp, Artificial Sequence
  Description of Artificial Sequence: Synthetic oligonucleotide
  Target: LAMA2; (-) strand; PAM type: NAAAAC; PAM sequence: CAAAAC
ttctgctgcaccttccctaa

SEQ ID NO: 6451 - DNA, 20 bp, Artificial Sequence
  Description of Artificial Sequence: Synthetic oligonucleotide
  Target: LAMA2; (-) strand; PAM type: NAAAAC; PAM sequence: GAAAAC
gatgaaggaaaatggcattg

SEQ ID NO: 6452 - DNA, 20 bp, Artificial Sequence
  Description of Artificial Sequence: Synthetic oligonucleotide
  Target: LAMA2; (-) strand; PAM type: NAAAAC; PAM sequence: AAAAAC
gtgatttctgagagaaggaa

SEQ ID NO: 6453 - DNA, 20 bp, Artificial Sequence
  Description of Artificial Sequence: Synthetic oligonucleotide
  Target: LAMA2; (-) strand; PAM type: NAAAAC; PAM sequence: TAAAAC
atatcatagcattctgtgga

SEQ ID NO: 6454 - DNA, 20 bp, Artificial Sequence
  Description of Artificial Sequence: Synthetic oligonucleotide
  Target: LAMA2; (-) strand; PAM type: NAAAAC; PAM sequence: TAAAAC
catcccagttttaaaaacag

SEQ ID NO: 6455 - DNA, 20 bp, Artificial Sequence
  Description of Artificial Sequence: Synthetic oligonucleotide
  Target: LAMA2; (-) strand; PAM type: NAAAAC; PAM sequence: AAAAAC
attaaagtcatcccagtttt

SEQ ID NO: 6456 - DNA, 20 bp, Artificial Sequence
  Description of Artificial Sequence: Synthetic oligonucleotide
  Target: LAMA2; (-) strand; PAM type: NAAAAC; PAM sequence: TAAAAC
aagttatccaaataattgta

SEQ ID NO: 6457 - DNA, 20 bp, Artificial Sequence
  Description of Artificial Sequence: Synthetic oligonucleotide
  Target: LAMA2; (-) strand; PAM type: NAAAAC; PAM sequence: CAAAAC
ttaatagaaaatcatgttat

SEQ ID NO: 6458 - DNA, 20 bp, Artificial Sequence
  Description of Artificial Sequence: Synthetic oligonucleotide
  Target: LAMA2; (-) strand; PAM type: NAAAAC; PAM sequence: AAAAAC
caattccatttcactgttta

SEQ ID NO: 6459 - DNA, 20 bp, Artificial Sequence
  Description of Artificial Sequence: Synthetic oligonucleotide
  Target: LAMA2; (-) strand; PAM type: NAAAAC; PAM sequence: AAAAAC
ggtgaaaccctgtctctatt

SEQ ID NO: 6460 - DNA, 20 bp, Artificial Sequence
  Description of Artificial Sequence: Synthetic oligonucleotide
  Target: LAMA2; (-) strand; PAM type: NAAAAC; PAM sequence: AAAAAC
tacaagcctatagaggagat

SEQ ID NO: 6461 - DNA, 20 bp, Artificial Sequence
  Description of Artificial Sequence: Synthetic oligonucleotide
  Target: LAMA2; (-) strand; PAM type: NAAAAC; PAM sequence: TAAAAC
taacaaacactgaatgaagt

SEQ ID NO: 6462 - DNA, 20 bp, Artificial Sequence
  Description of Artificial Sequence: Synthetic oligonucleotide
  Target: LAMA2; (-) strand; PAM type: NAAAAC; PAM sequence: GAAAAC
gccaacaaatgcatatcaat

SEQ ID NO: 6463 - DNA, 20 bp, Artificial Sequence
  Description of Artificial Sequence: Synthetic oligonucleotide
  Target: LAMA2; (-) strand; PAM type: NAAAAC; PAM sequence: AAAAAC
gaaaatttcaaaagcaacat

SEQ ID NO: 6464 - DNA, 20 bp, Artificial Sequence
  Description of Artificial Sequence: Synthetic oligonucleotide
  Target: LAMA2; (-) strand; PAM type: NAAAAC; PAM sequence: CAAAAC
tctttttaaaaaatttaaaa

SEQ ID NO: 6465 - DNA, 20 bp, Artificial Sequence
  Description of Artificial Sequence: Synthetic oligonucleotide
  Target: LAMA2; (-) strand; PAM type: NAAAAC; PAM sequence: TAAAAC
catactctttttaaaaaatt

SEQ ID NO: 6466 - DNA, 20 bp, Artificial Sequence
  Description of Artificial Sequence: Synthetic oligonucleotide
  Target: LAMA2; (-) strand; PAM type: NAAAAC; PAM sequence: CAAAAC
tgccctcactcttcccatct

SEQ ID NO: 6467 - DNA, 20 bp, Artificial Sequence
  Description of Artificial Sequence: Synthetic oligonucleotide
  Target: LAMA2; (-) strand; PAM type: NAAAAC; PAM sequence: TAAAAC
ttacgctttggacatttctt

SEQ ID NO: 6468 - DNA, 20 bp, Artificial Sequence
  Description of Artificial Sequence: Synthetic oligonucleotide
  Target: LAMA2; (-) strand; PAM type: NAAAAC; PAM sequence: AAAAAC
gcaacaatctctggatgttg

SEQ ID NO: 6469 - DNA, 20 bp, Artificial Sequence
  Description of Artificial Sequence: Synthetic oligonucleotide
  Target: LAMA2; (-) strand; PAM type: NAAAAC; PAM sequence: CAAAAC
cactatgacaaaactgaatg

SEQ ID NO: 6470 - DNA, 20 bp, Artificial Sequence
  Description of Artificial Sequence: Synthetic oligonucleotide
  Target: LAMA2; (-) strand; PAM type: NAAAAC; PAM sequence: CAAAAC
aagaagagaaatcactatga

SEQ ID NO: 6471 - DNA, 20 bp, Artificial Sequence
  Description of Artificial Sequence: Synthetic oligonucleotide
  Target: LAMA2; (-) strand; PAM type: NAAAAC; PAM sequence: CAAAAC
tatcttctatcattatactg

SEQ ID NO: 6472 - DNA, 20 bp, Artificial Sequence
  Description of Artificial Sequence: Synthetic oligonucleotide
  Target: LAMA2; (-) strand; PAM type: NAAAAC; PAM sequence: GAAAAC
ttggccaattttggtcataa

SEQ ID NO: 6473 - DNA, 20 bp, Artificial Sequence
  Description of Artificial Sequence: Synthetic oligonucleotide
  Target: LAMA2; (-) strand; PAM type: NAAAAC; PAM sequence: TAAAAC
atctcatttggtgaggtatg

SEQ ID NO: 6474 - DNA, 20 bp, Artificial Sequence
  Description of Artificial Sequence: Synthetic oligonucleotide
  Target: LAMA2; (-) strand; PAM type: NAAAAC; PAM sequence: AAAAAC
aatgtattctaaagtttcaa

SEQ ID NO: 6475 - DNA, 20 bp, Artificial Sequence
  Description of Artificial Sequence: Synthetic oligonucleotide
  Target: LAMA2; (-) strand; PAM type: NAAAAC; PAM sequence: AAAAAC
ggggactattcaaacctttt

SEQ ID NO: 6476 - DNA, 20 bp, Artificial Sequence
  Description of Artificial Sequence: Synthetic oligonucleotide
  Target: LAMA2; (-) strand; PAM type: NAAAAC; PAM sequence: AAAAAC
aaccactccccttctgcaag

SEQ ID NO: 6477 - DNA, 20 bp, Artificial Sequence
  Description of Artificial Sequence: Synthetic oligonucleotide
  Target: LAMA2; (-) strand; PAM type: NAAAAC; PAM sequence: GAAAAC
atgacctttcaggaacttta

SEQ ID NO: 6478 - DNA, 20 bp, Artificial Sequence
  Description of Artificial Sequence: Synthetic oligonucleotide
  Target: LAMA2; (-) strand; PAM type: NAAAAC; PAM sequence: TAAAAC
gctataataaataggcttat

SEQ ID NO: 6479 - DNA, 20 bp, Artificial Sequence
  Description of Artificial Sequence: Synthetic oligonucleotide
  Target: LAMA2; (-) strand; PAM type: NAAAAC; PAM sequence: CAAAAC
gttctatataaaaatatttt

SEQ ID NO: 6480 - DNA, 20 bp, Artificial Sequence
  Description of Artificial Sequence: Synthetic oligonucleotide
  Target: LAMA2; (-) strand; PAM type: NAAAAC; PAM sequence: CAAAAC
ttaataataatattaaccat

SEQ ID NO: 6481 - DNA, 20 bp, Artificial Sequence
  Description of Artificial Sequence: Synthetic oligonucleotide
  Target: LAMA2; (-) strand; PAM type: NAAAAC; PAM sequence: AAAAAC
gtaaaaacccaagatttagc

SEQ ID NO: 6482 - DNA, 20 bp, Artificial Sequence
  Description of Artificial Sequence: Synthetic oligonucleotide
  Target: LAMA2; (-) strand; PAM type: NAAAAC; PAM sequence: AAAAAC
aatccttaggatgtataggt

SEQ ID NO: 6483 - DNA, 20 bp, Artificial Sequence
  Description of Artificial Sequence: Synthetic oligonucleotide
  Target: LAMA2; (-) strand; PAM type: NAAAAC; PAM sequence: CAAAAC
atcattttaagcatgtgtca

SEQ ID NO: 6484 - DNA, 20 bp, Artificial Sequence
  Description of Artificial Sequence: Synthetic oligonucleotide
  Target: LAMA2; (-) strand; PAM type: NAAAAC; PAM sequence: TAAAAC
caagtgcacacagttaaaag

SEQ ID NO: 6485 - DNA, 20 bp, Artificial Sequence
  Description of Artificial Sequence: Synthetic oligonucleotide
  Target: LAMA2; (-) strand; PAM type: NAAAAC; PAM sequence: GAAAAC
attagaggccatgggttgtg

SEQ ID NO: 6486 - DNA, 20 bp, Artificial Sequence
  Description of Artificial Sequence: Synthetic oligonucleotide
  Target: LAMA2; (-) strand; PAM type: NAAAAC; PAM sequence: CAAAAC
tggaatgggatgtattattt

SEQ ID NO: 6487 - DNA, 20 bp, Artificial Sequence
  Description of Artificial Sequence: Synthetic oligonucleotide
  Target: LAMA2; (-) strand; PAM type: NAAAAC; PAM sequence: AAAAAC
cttgcaaccatattgtggat

SEQ ID NO: 6488 - DNA, 20 bp, Artificial Sequence
  Description of Artificial Sequence: Synthetic oligonucleotide
  Target: LAMA2; (-) strand; PAM type: NAAAAC; PAM sequence: TAAAAC
ttataataattaggcatttc

SEQ ID NO: 6489 - DNA, 20 bp, Artificial Sequence
  Description of Artificial Sequence: Synthetic oligonucleotide
  Target: LAMA2; (-) strand; PAM type: NAAAAC; PAM sequence: CAAAAC
aggatagaagctgaaactat

SEQ ID NO: 6490 - DNA, 20 bp, Artificial Sequence
  Description of Artificial Sequence: Synthetic oligonucleotide
  Target: LAMA2; (-) strand; PAM type: NAAAAC; PAM sequence: GAAAAC
ctcaacacttgtctgtacat

SEQ ID NO: 6491 - DNA, 20 bp, Artificial Sequence
  Description of Artificial Sequence: Synthetic oligonucleotide
  Target: LAMA2; (-) strand; PAM type: NAAAAC; PAM sequence: TAAAAC
acagtggtcccataagatta

SEQ ID NO: 6492 - DNA, 20 bp, Artificial Sequence
  Description of Artificial Sequence: Synthetic oligonucleotide
  Target: LAMA2; (-) strand; PAM type: NAAAAC; PAM sequence: AAAAAC
atgcttgtgctggagctcat

SEQ ID NO: 6493 - DNA, 20 bp, Artificial Sequence
  Description of Artificial Sequence: Synthetic oligonucleotide
  Target: LAMA2; (-) strand; PAM type: NAAAAC; PAM sequence: AAAAAC
gtgctgttttttttaaaaaa

SEQ ID NO: 6494 - DNA, 20 bp, Artificial Sequence
  Description of Artificial Sequence: Synthetic oligonucleotide
  Target: LAMA2; (-) strand; PAM type: NAAAAC; PAM sequence: TAAAAC
caacgcaaagattagaaact

SEQ ID NO: 6495 - DNA, 20 bp, Artificial Sequence
  Description of Artificial Sequence: Synthetic oligonucleotide
  Target: LAMA2; (-) strand; PAM type: NAAAAC; PAM sequence: TAAAAC
gttgaggcccgagtttgttt

SEQ ID NO: 6496 - DNA, 20 bp, Artificial Sequence
  Description of Artificial Sequence: Synthetic oligonucleotide
  Target: LAMA2; (-) strand; PAM type: NAAAAC; PAM sequence: TAAAAC
ttagcaagctgaccactgaa

SEQ ID NO: 6497 - DNA, 20 bp, Artificial Sequence
  Description of Artificial Sequence: Synthetic oligonucleotide
  Target: LAMA2; (-) strand; PAM type: NAAAAC; PAM sequence: TAAAAC
cccaactttgagcaagctga

SEQ ID NO: 6498 - DNA, 20 bp, Artificial Sequence
  Description of Artificial Sequence: Synthetic oligonucleotide
  Target: LAMA2; (-) strand; PAM type: NAAAAC; PAM sequence: GAAAAC
cacagctctggcacgaagat

SEQ ID NO: 6499 - DNA, 20 bp, Artificial Sequence
  Description of Artificial Sequence: Synthetic oligonucleotide
  Target: LAMA2; (-) strand; PAM type: NAAAAC; PAM sequence: GAAAAC
taaaaatctgaaagcaaaca

SEQ ID NO: 6500 - DNA, 20 bp, Artificial Sequence
  Description of Artificial Sequence: Synthetic oligonucleotide
  Target: LAMA2; (-) strand; PAM type: NAAAAC; PAM sequence: AAAAAC
atgtccaatgaaacacagca

SEQ ID NO: 6501 - DNA, 20 bp, Artificial Sequence
  Description of Artificial Sequence: Synthetic oligonucleotide
  Target: LAMA2; (-) strand; PAM type: NAAAAC; PAM sequence: TAAAAC
aaaaattggtgggaaatact

SEQ ID NO: 6502 - DNA, 20 bp, Artificial Sequence
  Description of Artificial Sequence: Synthetic oligonucleotide
  Target: LAMA2; (-) strand; PAM type: NAAAAC; PAM sequence: TAAAAC
aaaatgtaaaggacaagaca

SEQ ID NO: 6503 - DNA, 20 bp, Artificial Sequence
  Description of Artificial Sequence: Synthetic oligonucleotide
  Target: LAMA2; (-) strand; PAM type: NAAAAC; PAM sequence: AAAAAC
tcagcatctcaggggaaaaa

SEQ ID NO: 6504 - DNA, 20 bp, Artificial Sequence
  Description of Artificial Sequence: Synthetic oligonucleotide
  Target: LAMA2; (-) strand; PAM type: NAAAAC; PAM sequence: GAAAAC
aaactggcagcgaggagcag

SEQ ID NO: 6505 - DNA, 20 bp, Artificial Sequence
  Description of Artificial Sequence: Synthetic oligonucleotide
  Target: LAMA2; (-) strand; PAM type: NAAAAC; PAM sequence: AAAAAC
caaaaaccaaacaacaacaa

SEQ ID NO: 6506 - DNA, 20 bp, Artificial Sequence
  Description of Artificial Sequence: Synthetic oligonucleotide
  Target: LAMA2; (-) strand; PAM type: NAAAAC; PAM sequence: AAAAAC
ggaaaaaaaaaaaaaaaaac

SEQ ID NO: 6507 - DNA, 20 bp, Artificial Sequence
  Description of Artificial Sequence: Synthetic oligonucleotide
  Target: LAMA2; (-) strand; PAM type: NAAAAC; PAM sequence: AAAAAC
acagtgggaaaaaaaaaaaa

SEQ ID NO: 6508 - DNA, 20 bp, Artificial Sequence
  Description of Artificial Sequence: Synthetic oligonucleotide
  Target: LAMA2; (-) strand; PAM type: NAAAAC; PAM sequence: TAAAAC
aataagagctaaaaggtaag

SEQ ID NO: 6509 - DNA, 20 bp, Artificial Sequence
  Description of Artificial Sequence: Synthetic oligonucleotide
  Target: LAMA2; (-) strand; PAM type: NAAAAC; PAM sequence: TAAAAC
gtgcttgatatagacaacct

SEQ ID NO: 6510 - DNA, 20 bp, Artificial Sequence
  Description of Artificial Sequence: Synthetic oligonucleotide
  Target: LAMA2; (-) strand; PAM type: NAAAAC; PAM sequence: CAAAAC
gtacatttactatgttgaaa

SEQ ID NO: 6511 - DNA, 20 bp, Artificial Sequence
  Description of Artificial Sequence: Synthetic oligonucleotide
  Target: LAMA2; (-) strand; PAM type: NAAAAC; PAM sequence: AAAAAC
attggatatcaaatacatgt

SEQ ID NO: 6512 - DNA, 20 bp, Artificial Sequence
  Description of Artificial Sequence: Synthetic oligonucleotide
  Target: LAMA2; (-) strand; PAM type: NAAAAC; PAM sequence: AAAAAC
attattttgggagacaattt

SEQ ID NO: 6513 - DNA, 20 bp, Artificial Sequence
  Description of Artificial Sequence: Synthetic oligonucleotide
  Target: LAMA2; (-) strand; PAM type: NAAAAC; PAM sequence: AAAAAC
ttatggttctgtttaaggtg

SEQ ID NO: 6514 - DNA, 20 bp, Artificial Sequence
  Description of Artificial Sequence: Synthetic oligonucleotide
  Target: LAMA2; (-) strand; PAM type: NAAAAC; PAM sequence: AAAAAC
gtatttcatcaaatccttac

SEQ ID NO: 6515 - DNA, 20 bp, Artificial Sequence
  Description of Artificial Sequence: Synthetic oligonucleotide
  Target: LAMA2; (-) strand; PAM type: NAAAAC; PAM sequence: AAAAAC
ggaaaggtgtgaagataaag

SEQ ID NO: 6516 - DNA, 20 bp, Artificial Sequence
  Description of Artificial Sequence: Synthetic oligonucleotide
  Target: LAMA2; (-) strand; PAM type: NAAAAC; PAM sequence: CAAAAC
ggtagattaaataaggttta

SEQ ID NO: 6517 - DNA, 20 bp, Artificial Sequence
  Description of Artificial Sequence: Synthetic oligonucleotide
  Target: LAMA2; (-) strand; PAM type: NAAAAC; PAM sequence: TAAAAC
ctacattttattttccttta

SEQ ID NO: 6518 - DNA, 20 bp, Artificial Sequence
  Description of Artificial Sequence: Synthetic oligonucleotide
  Target: LAMA2; (-) strand; PAM type: NAAAAC; PAM sequence: GAAAAC
tgatattttactgggattta

SEQ ID NO: 6519 - DNA, 20 bp, Artificial Sequence
  Description of Artificial Sequence: Synthetic oligonucleotide
  Target: LAMA2; (-) strand; PAM type: NAAAAC; PAM sequence: GAAAAC
aagtttttttttgcacactg

SEQ ID NO: 6520 - DNA, 20 bp, Artificial Sequence
  Description of Artificial Sequence: Synthetic oligonucleotide
  Target: LAMA2; (-) strand; PAM type: NAAAAC; PAM sequence: TAAAAC
agaaacattccccgatgacc

SEQ ID NO: 6521 - DNA, 20 bp, Artificial Sequence
  Description of Artificial Sequence: Synthetic oligonucleotide
  Target: LAMA2; (-) strand; PAM type: NAAAAC; PAM sequence: CAAAAC
acttcagttaatggtgtgcc

SEQ ID NO: 6522 - DNA, 20 bp, Artificial Sequence
  Description of Artificial Sequence: Synthetic oligonucleotide
  Target: LAMA2; (-) strand; PAM type: NAAAAC; PAM sequence: CAAAAC
taagatctttgttgctaaag

SEQ ID NO: 6523 - DNA, 20 bp, Artificial Sequence
  Description of Artificial Sequence: Synthetic oligonucleotide
  Target: LAMA2; (-) strand; PAM type: NAAAAC; PAM sequence: TAAAAC
ccatggaattaatgtttgtt

SEQ ID NO: 6524 - DNA, 20 bp, Artificial Sequence
  Description of Artificial Sequence: Synthetic oligonucleotide
  Target: LAMA2; (-) strand; PAM type: NAAAAC; PAM sequence: AAAAAC
ttgggaaaataataatttaa

SEQ ID NO: 6525 - DNA, 20 bp, Artificial Sequence
  Description of Artificial Sequence: Synthetic oligonucleotide
  Target: LAMA2; (-) strand; PAM type: NAAAAC; PAM sequence: TAAAAC
taaatacagaggagtcaatc

SEQ ID NO: 6526 - DNA, 20 bp, Artificial Sequence
  Description of Artificial Sequence: Synthetic oligonucleotide
  Target: LAMA2; (-) strand; PAM type: NAAAAC; PAM sequence: GAAAAC
gtgtgggcaaaaaggtaaat

SEQ ID NO: 6527 - DNA, 20 bp, Artificial Sequence
  Description of Artificial Sequence: Synthetic oligonucleotide
  Target: LAMA2; (-) strand; PAM type: NAAAAC; PAM sequence: TAAAAC
tcaaaagcaaattcttagag

SEQ ID NO: 6528 - DNA, 20 bp, Artificial Sequence
  Description of Artificial Sequence: Synthetic oligonucleotide
  Target: LAMA2; (-) strand; PAM type: NAAAAC; PAM sequence: TAAAAC
aatccaaatggcttactttt

SEQ ID NO: 6529 - DNA, 20 bp, Artificial Sequence
  Description of Artificial Sequence: Synthetic oligonucleotide
  Target: LAMA2; (-) strand; PAM type: NAAAAC; PAM sequence: AAAAAC
attaacctttttttcaaaat

SEQ ID NO: 6530 - DNA, 20 bp, Artificial Sequence
  Description of Artificial Sequence: Synthetic oligonucleotide
  Target: LAMA2; (-) strand; PAM type: NAAAAC; PAM sequence: AAAAAC
tttttgggggtaacctgcct

SEQ ID NO: 6531 - DNA, 20 bp, Artificial Sequence
  Description of Artificial Sequence: Synthetic oligonucleotide
  Target: LAMA2; (-) strand; PAM type: NAAAAC; PAM sequence: CAAAAC
caacaagacagggacaaaat

SEQ ID NO: 6532 - DNA, 20 bp, Artificial Sequence
  Description of Artificial Sequence: Synthetic oligonucleotide
  Target: LAMA2; (-) strand; PAM type: NAAAAC; PAM sequence: CAAAAC
agtgtaactacaggaccaac

SEQ ID NO: 6533 - DNA, 20 bp, Artificial Sequence
  Description of Artificial Sequence: Synthetic oligonucleotide
  Target: LAMA2; (-) strand; PAM type: NAAAAC; PAM sequence: TAAAAC
attttattcttgaaatttct

SEQ ID NO: 6534 - DNA, 20 bp, Artificial Sequence
  Description of Artificial Sequence: Synthetic oligonucleotide
  Target: LAMA2; (-) strand; PAM type: NAAAAC; PAM sequence: GAAAAC
aacaacaatgaaacaaaaat

SEQ ID NO: 6535 - DNA, 20 bp, Artificial Sequence
  Description of Artificial Sequence: Synthetic oligonucleotide
  Target: LAMA2; (-) strand; PAM type: NAAAAC; PAM sequence: TAAAAC
ctcaaattatacaaatcata

SEQ ID NO: 6536 - DNA, 20 bp, Artificial Sequence
  Description of Artificial Sequence: Synthetic oligonucleotide
  Target: LAMA2; (-) strand; PAM type: NAAAAC; PAM sequence: AAAAAC
atgtttccatttgctctgcc

SEQ ID NO: 6537 - DNA, 20 bp, Artificial Sequence
  Description of Artificial Sequence: Synthetic oligonucleotide
  Target: LAMA2; (-) strand; PAM type: NAAAAC; PAM sequence: GAAAAC
tcactaaatcagttgatgct

SEQ ID NO: 6538 - DNA, 20 bp, Artificial Sequence
  Description of Artificial Sequence: Synthetic oligonucleotide
  Target: LAMA2; (-) strand; PAM type: NAAAAC; PAM sequence: AAAAAC
gcattggaaacttggaaatt

SEQ ID NO: 6539 - DNA, 20 bp, Artificial Sequence
  Description of Artificial Sequence: Synthetic oligonucleotide
  Target: LAMA2; (-) strand; PAM type: NAAAAC; PAM sequence: TAAAAC
tcagctgcattcccgttaga

SEQ ID NO: 6540 - DNA, 20 bp, Artificial Sequence
  Description of Artificial Sequence: Synthetic oligonucleotide
  Target: LAMA2; (-) strand; PAM type: NAAAAC; PAM sequence: GAAAAC
aaaaagactccacaagactt

SEQ ID NO: 6541 - DNA, 20 bp, Artificial Sequence
  Description of Artificial Sequence: Synthetic oligonucleotide
  Target: LAMA2; (-) strand; PAM type: NAAAAC; PAM sequence: TAAAAC
tttctaataattaggtctta

SEQ ID NO: 6542 - DNA, 20 bp, Artificial Sequence
  Description of Artificial Sequence: Synthetic oligonucleotide
  Target: LAMA2; (-) strand; PAM type: NAAAAC; PAM sequence: GAAAAC
ctatataaattttttttctt

SEQ ID NO: 6543 - DNA, 20 bp, Artificial Sequence
  Description of Artificial Sequence: Synthetic oligonucleotide
  Target: LAMA2; (-) strand; PAM type: NAAAAC; PAM sequence: AAAAAC
aaggctaggacgtcacaatg

SEQ ID NO: 6544 - DNA, 20 bp, Artificial Sequence
  Description of Artificial Sequence: Synthetic oligonucleotide
  Target: LAMA2; (-) strand; PAM type: NAAAAC; PAM sequence: GAAAAC
attgtttgcctattgaaaag

SEQ ID NO: 6545 - DNA, 20 bp, Artificial Sequence
  Description of Artificial Sequence: Synthetic oligonucleotide
  Target: LAMA2; (-) strand; PAM type: NAAAAC; PAM sequence: GAAAAC
tcataagcaatatggtaaga

SEQ ID NO: 6546 - DNA, 20 bp, Artificial Sequence
  Description of Artificial Sequence: Synthetic oligonucleotide
  Target: LAMA2; (-) strand; PAM type: NAAAAC; PAM sequence: TAAAAC
tatactgctatcaattatgc

SEQ ID NO: 6547 - DNA, 20 bp, Artificial Sequence
  Description of Artificial Sequence: Synthetic oligonucleotide
  Target: LAMA2; (-) strand; PAM type: NAAAAC; PAM sequence: TAAAAC
gcgaagtctatggatctttc

SEQ ID NO: 6548 - DNA, 20 bp, Artificial Sequence
  Description of Artificial Sequence: Synthetic oligonucleotide
  Target: LAMA2; (-) strand; PAM type: NAAAAC; PAM sequence: CAAAAC
tggagcataaaataagatct

SEQ ID NO: 6549 - DNA, 20 bp, Artificial Sequence
  Description of Artificial Sequence: Synthetic oligonucleotide
  Target: LAMA2; (-) strand; PAM type: NAAAAC; PAM sequence: TAAAAC
tacagctgttgctggttata

SEQ ID NO: 6550 - DNA, 20 bp, Artificial Sequence
  Description of Artificial Sequence: Synthetic oligonucleotide
  Target: LAMA2; (-) strand; PAM type: NAAAAC; PAM sequence: AAAAAC
taacaatgtttgaggactgg

SEQ ID NO: 6551 - DNA, 20 bp, Artificial Sequence
  Description of Artificial Sequence: Synthetic oligonucleotide
  Target: LAMA2; (-) strand; PAM type: NAAAAC; PAM sequence: GAAAAC
tagaaaaggcaaaacatgaa

SEQ ID NO: 6552 - DNA, 20 bp, Artificial Sequence
  Description of Artificial Sequence: Synthetic oligonucleotide
  Target: LAMA2; (-) strand; PAM type: NAAAAC; PAM sequence: CAAAAC
cctgtgctggttagaaaagg

SEQ ID NO: 6553 - DNA, 20 bp, Artificial Sequence
  Description of Artificial Sequence: Synthetic oligonucleotide
  Target: LAMA2; (-) strand; PAM type: NAAAAC; PAM sequence: AAAAAC
gttgttttggcttaattgct

SEQ ID NO: 6554 - DNA, 20 bp, Artificial Sequence
  Description of Artificial Sequence: Synthetic oligonucleotide
  Target: LAMA2; (-) strand; PAM type: NAAAAC; PAM sequence: GAAAAC
ctgctgttgttgatggaatt

SEQ ID NO: 6555 - DNA, 20 bp, Artificial Sequence
  Description of Artificial Sequence: Synthetic oligonucleotide
  Target: LAMA2; (-) strand; PAM type: NAAAAC; PAM sequence: CAAAAC
ggtcttttgttttgatgcaa

SEQ ID NO: 6556 - DNA, 20 bp, Artificial Sequence
  Description of Artificial Sequence: Synthetic oligonucleotide
  Target: LAMA2; (-) strand; PAM type: NAAAAC; PAM sequence: CAAAAC
agaactggaatcaaggcctc

SEQ ID NO: 6557 - DNA, 20 bp, Artificial Sequence
  Description of Artificial Sequence: Synthetic oligonucleotide
  Target: LAMA2; (-) strand; PAM type: NAAAAC; PAM sequence: CAAAAC
aaggcaatgccaacttgagg

SEQ ID NO: 6558 - DNA, 20 bp, Artificial Sequence
  Description of Artificial Sequence: Synthetic oligonucleotide
  Target: LAMA2; (-) strand; PAM type: NAAAAC; PAM sequence: TAAAAC
tttagactcaaacaatatgc

SEQ ID NO: 6559 - DNA, 20 bp, Artificial Sequence
  Description of Artificial Sequence: Synthetic oligonucleotide
  Target: LAMA2; (-) strand; PAM type: NAAAAC; PAM sequence: TAAAAC
gcttctgaggttaactctta

SEQ ID NO: 6560 - DNA, 20 bp, Artificial Sequence
  Description of Artificial Sequence: Synthetic oligonucleotide
  Target: LAMA2; (-) strand; PAM type: NAAAAC; PAM sequence: TAAAAC
aataaagcaaataagaatta

SEQ ID NO: 6561 - DNA, 20 bp, Artificial Sequence
  Description of Artificial Sequence: Synthetic oligonucleotide
  Target: LAMA2; (-) strand; PAM type: NAAAAC; PAM sequence: AAAAAC
ttaatatttttttctggaat

SEQ ID NO: 6562 - DNA, 20 bp, Artificial Sequence
  Description of Artificial Sequence: Synthetic oligonucleotide
  Target: LAMA2; (-) strand; PAM type: NAAAAC; PAM sequence: AAAAAC
agcaaaagagtctagatatc

SEQ ID NO: 6563 - DNA, 20 bp, Artificial Sequence
  Description of Artificial Sequence: Synthetic oligonucleotide
  Target: LAMA2; (-) strand; PAM type: NAAAAC; PAM sequence: GAAAAC
agtttagtgaaaggtgaaga

SEQ ID NO: 6564 - DNA, 20 bp, Artificial Sequence
  Description of Artificial Sequence: Synthetic oligonucleotide
  Target: LAMA2; (-) strand; PAM type: NAAAAC; PAM sequence: CAAAAC
tgtcttattttatctgattt

SEQ ID NO: 6565 - DNA, 20 bp, Artificial Sequence
  Description of Artificial Sequence: Synthetic oligonucleotide
  Target: LAMA2; (-) strand; PAM type: NAAAAC; PAM sequence: TAAAAC
tccaccatgattacatgtgc

SEQ ID NO: 6566 - DNA, 20 bp, Artificial Sequence
  Description of Artificial Sequence: Synthetic oligonucleotide
  Target: LAMA2; (-) strand; PAM type: NAAAAC; PAM sequence: AAAAAC
aataaaagctgatatatccc

SEQ ID NO: 6567 - DNA, 20 bp, Artificial Sequence
  Description of Artificial Sequence: Synthetic oligonucleotide
  Target: LAMA2; (-) strand; PAM type: NAAAAC; PAM sequence: GAAAAC
cttatctcaggttgcaagta

SEQ ID NO: 6568 - DNA, 20 bp, Artificial Sequence
  Description of Artificial Sequence: Synthetic oligonucleotide
  Target: LAMA2; (-) strand; PAM type: NAAAAC; PAM sequence: TAAAAC
ctctgtagatcaagatagga

SEQ ID NO: 6569 - DNA, 20 bp, Artificial Sequence
  Description of Artificial Sequence: Synthetic oligonucleotide
  Target: LAMA2; (-) strand; PAM type: NAAAAC; PAM sequence: AAAAAC
tttggtggcaactggctatt

SEQ ID NO: 6570 - DNA, 20 bp, Artificial Sequence
  Description of Artificial Sequence: Synthetic oligonucleotide
  Target: LAMA2; (-) strand; PAM type: NAAAAC; PAM sequence: GAAAAC
atgacacagcttagactaca

SEQ ID NO: 6571 - DNA, 20 bp, Artificial Sequence
  Description of Artificial Sequence: Synthetic oligonucleotide
  Target: LAMA2; (-) strand; PAM type: NAAAAC; PAM sequence: CAAAAC
actcaaatatcttttactaa

SEQ ID NO: 6572 - DNA, 20 bp, Artificial Sequence
  Description of Artificial Sequence: Synthetic oligonucleotide
  Target: LAMA2; (-) strand; PAM type: NAAAAC; PAM sequence: GAAAAC
ctcttcaaataaaacttgct

SEQ ID NO: 6573 - DNA, 20 bp, Artificial Sequence
  Description of Artificial Sequence: Synthetic oligonucleotide
  Target: LAMA2; (-) strand; PAM type: NAAAAC; PAM sequence: TAAAAC
agtttagtttactcttcaaa

SEQ ID NO: 6574 - DNA, 20 bp, Artificial Sequence
  Description of Artificial Sequence: Synthetic oligonucleotide
  Target: LAMA2; (-) strand; PAM type: NAAAAC; PAM sequence: TAAAAC
agtttgtctttcaaggtcaa

SEQ ID NO: 6575 - DNA, 20 bp, Artificial Sequence
  Description of Artificial Sequence: Synthetic oligonucleotide
  Target: LAMA2; (-) strand; PAM type: NAAAAC; PAM sequence: CAAAAC
tcagaaactgatgcgttgca

SEQ ID NO: 6576 - DNA, 20 bp, Artificial Sequence
  Description of Artificial Sequence: Synthetic oligonucleotide
  Target: LAMA2; (-) strand; PAM type: NAAAAC; PAM sequence: CAAAAC
tcaaagatggtgtaactctt

SEQ ID NO: 6577 - DNA, 20 bp, Artificial Sequence
  Description of Artificial Sequence: Synthetic oligonucleotide
  Target: LAMA2; (-) strand; PAM type: NAAAAC; PAM sequence: GAAAAC
attctatatataatacatgg

SEQ ID NO: 6578 - DNA, 20 bp, Artificial Sequence
  Description of Artificial Sequence: Synthetic oligonucleotide
  Target: LAMA2; (-) strand; PAM type: NAAAAC; PAM sequence: TAAAAC
attggaaatggaatgcaaat

SEQ ID NO: 6579 - DNA, 20 bp, Artificial Sequence
  Description of Artificial Sequence: Synthetic oligonucleotide
  Target: LAMA2; (-) strand; PAM type: NAAAAC; PAM sequence: AAAAAC
caagctgcaattcataggtt

SEQ ID NO: 6580 - DNA, 20 bp, Artificial Sequence
  Description of Artificial Sequence: Synthetic oligonucleotide
  Target: LAMA2; (-) strand; PAM type: NAAAAC; PAM sequence: CAAAAC
ggacgggaagaaaatcagca

SEQ ID NO: 6581 - DNA, 20 bp, Artificial Sequence
  Description of Artificial Sequence: Synthetic oligonucleotide
  Target: LAMA2; (-) strand; PAM type: NAAAAC; PAM sequence: AAAAAC
gaggaacaggagaatacatt

SEQ ID NO: 6582 - DNA, 20 bp, Artificial Sequence
  Description of Artificial Sequence: Synthetic oligonucleotide
  Target: LAMA2; (-) strand; PAM type: NAAAAC; PAM sequence: GAAAAC
ctgaatgtgagaacaagata

SEQ ID NO: 6583 - DNA, 20 bp, Artificial Sequence
  Description of Artificial Sequence: Synthetic oligonucleotide
  Target: LAMA2; (-) strand; PAM type: NAAAAC; PAM sequence: GAAAAC
gaggttggggttggccggaa

SEQ ID NO: 6584 - DNA, 20 bp, Artificial Sequence
  Description of Artificial Sequence: Synthetic oligonucleotide
  Target: LAMA2; (-) strand; PAM type: NAAAAC; PAM sequence: CAAAAC
tttttgtgagagaagggtat

SEQ ID NO: 6585 - DNA, 20 bp, Artificial Sequence
  Description of Artificial Sequence: Synthetic oligonucleotide
  Target: LAMA2; (-) strand; PAM type: NAAAAC; PAM sequence: TAAAAC
aaaaccatgtagccaaagga

SEQ ID NO: 6586 - DNA, 20 bp, Artificial Sequence
  Description of Artificial Sequence: Synthetic oligonucleotide
  Target: LAMA2; (-) strand; PAM type: NAAAAC; PAM sequence: AAAAAC
taaaaatattccagtaattg

SEQ ID NO: 6587 - DNA, 20 bp, Artificial Sequence
  Description of Artificial Sequence: Synthetic oligonucleotide
  Target: LAMA2; (-) strand; PAM type: NAAAAC; PAM sequence: GAAAAC
gtccacattaaacaattaga

SEQ ID NO: 6588 - DNA, 20 bp, Artificial Sequence
  Description of Artificial Sequence: Synthetic oligonucleotide
  Target: LAMA2; (-) strand; PAM type: NAAAAC; PAM sequence: GAAAAC
cctgagctgcttaatggaga

SEQ ID NO: 6589 - DNA, 20 bp, Artificial Sequence
  Description of Artificial Sequence: Synthetic oligonucleotide
  Target: LAMA2; (-) strand; PAM type: NAAAAC; PAM sequence: AAAAAC
tgaatcttttagcagattta

SEQ ID NO: 6590 - DNA, 20 bp, Artificial Sequence
  Description of Artificial Sequence: Synthetic oligonucleotide
  Target: LAMA2; (-) strand; PAM type: NAAAAC; PAM sequence: AAAAAC
aaataattgctaaaggctag

SEQ ID NO: 6591 - DNA, 20 bp, Artificial Sequence
  Description of Artificial Sequence: Synthetic oligonucleotide
  Target: LAMA2; (-) strand; PAM type: NAAAAC; PAM sequence: TAAAAC
aggaacctgtccacagggaa

SEQ ID NO: 6592 - DNA, 20 bp, Artificial Sequence
  Description of Artificial Sequence: Synthetic oligonucleotide
  Target: LAMA2; (-) strand; PAM type: NAAAAC; PAM sequence: AAAAAC
tattatagttcttgagtttg

SEQ ID NO: 6593 - DNA, 20 bp, Artificial Sequence
  Description of Artificial Sequence: Synthetic oligonucleotide
  Target: LAMA2; (-) strand; PAM type: NAAAAC; PAM sequence: TAAAAC
cacatatttaagtgacataa

SEQ ID NO: 6594 - DNA, 20 bp, Artificial Sequence
  Description of Artificial Sequence: Synthetic oligonucleotide
  Target: LAMA2; (-) strand; PAM type: NAAAAC; PAM sequence: TAAAAC
taatgtactttgaatgtttg

SEQ ID NO: 6595 - DNA, 20 bp, Artificial Sequence
  Description of Artificial Sequence: Synthetic oligonucleotide
  Target: LAMA2; (-) strand; PAM type: NAAAAC; PAM sequence: TAAAAC
ctgatcggcattcttttcat

SEQ ID NO: 6596 - DNA, 20 bp, Artificial Sequence
  Description of Artificial Sequence: Synthetic oligonucleotide
  Target: LAMA2; (-) strand; PAM type: NAAAAC; PAM sequence: CAAAAC
agcgggttttgtgtagacca

SEQ ID NO: 6597 - DNA, 20 bp, Artificial Sequence
  Description of Artificial Sequence: Synthetic oligonucleotide
  Target: LAMA2; (-) strand; PAM type: NAAAAC; PAM sequence: CAAAAC
ctgtaatgtctaagcgcaga

SEQ ID NO: 6598 - DNA, 20 bp, Artificial Sequence
  Description of Artificial Sequence: Synthetic oligonucleotide
  Target: LAMA2; (-) strand; PAM type: NAAAAC; PAM sequence: AAAAAC
taaaaaataaagtctgttta

SEQ ID NO: 6599 - DNA, 20 bp, Artificial Sequence
  Description of Artificial Sequence: Synthetic oligonucleotide
  Target: LAMA2; (-) strand; PAM type: NAAAAC; PAM sequence: TAAAAC
atagaggagttttcgggcag

SEQ ID NO: 6600 - DNA, 20 bp, Artificial Sequence
  Description of Artificial Sequence: Synthetic oligonucleotide
  Target: LAMA2; (-) strand; PAM type: NAAAAC; PAM sequence: CAAAAC
gctatatattccaaaaaagg

SEQ ID NO: 6601 - DNA, 20 bp, Artificial Sequence
  Description of Artificial Sequence: Synthetic oligonucleotide
  Target: LAMA2; (-) strand; PAM type: NAAAAC; PAM sequence: GAAAAC
tatattcacccaaataggtt

SEQ ID NO: 6602 - DNA, 20 bp, Artificial Sequence
  Description of Artificial Sequence: Synthetic oligonucleotide
  Target: LAMA2; (-) strand; PAM type: NAAAAC; PAM sequence: CAAAAC
tacattttggtaatttcttt

SEQ ID NO: 6603 - DNA, 20 bp, Artificial Sequence
  Description of Artificial Sequence: Synthetic oligonucleotide
  Target: LAMA2; (-) strand; PAM type: NAAAAC; PAM sequence: AAAAAC
aatgacaaaatccaaacact

SEQ ID NO: 6604 - DNA, 20 bp, Artificial Sequence
  Description of Artificial Sequence: Synthetic oligonucleotide
  Target: LAMA2; (-) strand; PAM type: NAAAAC; PAM sequence: TAAAAC
gtcattaaggaattgcaaac

SEQ ID NO: 6605 - DNA, 20 bp, Artificial Sequence
  Description of Artificial Sequence: Synthetic oligonucleotide
  Target: LAMA2; (-) strand; PAM type: NAAAAC; PAM sequence: GAAAAC
aaaaactctgaattcgacaa

SEQ ID NO: 6606 - DNA, 20 bp, Artificial Sequence
  Description of Artificial Sequence: Synthetic oligonucleotide
  Target: LAMA2; (-) strand; PAM type: NAAAAC; PAM sequence: AAAAAC
actattacccaaaatataca

SEQ ID NO: 6607 - DNA, 20 bp, Artificial Sequence
  Description of Artificial Sequence: Synthetic oligonucleotide
  Target: LAMA2; (-) strand; PAM type: NAAAAC; PAM sequence: AAAAAC
agctgggcttcgttacaatt

SEQ ID NO: 6608 - DNA, 20 bp, Artificial Sequence
  Description of Artificial Sequence: Synthetic oligonucleotide
  Target: LAMA2; (-) strand; PAM type: NAAAAC; PAM sequence: CAAAAC
atagacctaagtgtaaaatg

SEQ ID NO: 6609 - DNA, 20 bp, Artificial Sequence
  Description of Artificial Sequence: Synthetic oligonucleotide
  Target: LAMA2; (-) strand; PAM type: NAAAAC; PAM sequence: TAAAAC
tttgcaagttttttgaaatc

SEQ ID NO: 6610 - DNA, 20 bp, Artificial Sequence
  Description of Artificial Sequence: Synthetic oligonucleotide
  Target: LAMA2; (-) strand; PAM type: NAAAAC; PAM sequence: AAAAAC
atgggatcctgaaacagtaa

SEQ ID NO: 6611 - DNA, 20 bp, Artificial Sequence
  Description of Artificial Sequence: Synthetic oligonucleotide
  Target: LAMA2; (-) strand; PAM type: NAAAAC; PAM sequence: AAAAAC
acctctgaagtttttcccac

SEQ ID NO: 6612 - DNA, 20 bp, Artificial Sequence
  Description of Artificial Sequence: Synthetic oligonucleotide
  Target: LAMA2; (-) strand; PAM type: NAAAAC; PAM sequence: AAAAAC
ggaattagatttctccattt

SEQ ID NO: 6613 - DNA, 20 bp, Artificial Sequence
  Description of Artificial Sequence: Synthetic oligonucleotide
  Target: LAMA2; (-) strand; PAM type: NAAAAC; PAM sequence: AAAAAC
attgtcattggttatcttat

SEQ ID NO: 6614 - DNA, 20 bp, Artificial Sequence
  Description of Artificial Sequence: Synthetic oligonucleotide
  Target: LAMA2; (-) strand; PAM type: NAAAAC; PAM sequence: AAAAAC
aaaggttggagaattaagag

SEQ ID NO: 6615 - DNA, 20 bp, Artificial Sequence
  Description of Artificial Sequence: Synthetic oligonucleotide
  Target: LAMA2; (-) strand; PAM type: NAAAAC; PAM sequence: GAAAAC
gaaagtgttatacagtgagg

SEQ ID NO: 6616 - DNA, 20 bp, Artificial Sequence
  Description of Artificial Sequence: Synthetic oligonucleotide
  Target: LAMA2; (-) strand; PAM type: NAAAAC; PAM sequence: TAAAAC
actgggcatatactggcgga

SEQ ID NO: 6617 - DNA, 20 bp, Artificial Sequence
  Description of Artificial Sequence: Synthetic oligonucleotide
  Target: LAMA2; (-) strand; PAM type: NAAAAC; PAM sequence: AAAAAC
aaaagcagagagaccagcta

SEQ ID NO: 6618 - DNA, 20 bp, Artificial Sequence
  Description of Artificial Sequence: Synthetic oligonucleotide
  Target: LAMA2; (-) strand; PAM type: NAAAAC; PAM sequence: GAAAAC
gttaagaggtgtttatcaat

SEQ ID NO: 6619 - DNA, 20 bp, Artificial Sequence
  Description of Artificial Sequence: Synthetic oligonucleotide
  Target: LAMA2; (-) strand; PAM type: NAAAAC; PAM sequence: AAAAAC
tattggcacttaaatcgttt

SEQ ID NO: 6620 - DNA, 20 bp, Artificial Sequence
  Description of Artificial Sequence: Synthetic oligonucleotide
  Target: LAMA2; (-) strand; PAM type: NAAAAC; PAM sequence: AAAAAC
gttagcagttgaaatctttt

SEQ ID NO: 6621 - DNA, 20 bp, Artificial Sequence
  Description of Artificial Sequence: Synthetic oligonucleotide
  Target: LAMA2; (-) strand; PAM type: NAAAAC; PAM sequence: AAAAAC
aaaatataaaaggagaaata

SEQ ID NO: 6622 - DNA, 20 bp, Artificial Sequence
  Description of Artificial Sequence: Synthetic oligonucleotide
  Target: LAMA2; (-) strand; PAM type: NAAAAC; PAM sequence: TAAAAC
attttctgccttctttatgt

SEQ ID NO: 6623 - DNA, 20 bp, Artificial Sequence
  Description of Artificial Sequence: Synthetic oligonucleotide
  Target: LAMA2; (-) strand; PAM type: NAAAAC; PAM sequence: AAAAAC
aaagagtagtaaaatacatg

SEQ ID NO: 6624 - DNA, 20 bp, Artificial Sequence
  Description of Artificial Sequence: Synthetic oligonucleotide
  Target: LAMA2; (-) strand; PAM type: NAAAAC; PAM sequence: AAAAAC
tgttacacaggttaaaaaaa

SEQ ID NO: 6625 - DNA, 20 bp, Artificial Sequence
  Description of Artificial Sequence: Synthetic oligonucleotide
  Target: LAMA2; (-) strand; PAM type: NAAAAC; PAM sequence: CAAAAC
ttaactcttctctacttatc

SEQ ID NO: 6626 - DNA, 20 bp, Artificial Sequence
  Description of Artificial Sequence: Synthetic oligonucleotide
  Target: LAMA2; (-) strand; PAM type: NAAAAC; PAM sequence: AAAAAC
agttgttatatacaggacta

SEQ ID NO: 6627 - DNA, 20 bp, Artificial Sequence
  Description of Artificial Sequence: Synthetic oligonucleotide
  Target: LAMA2; (-) strand; PAM type: NAAAAC; PAM sequence: CAAAAC
gttttagtatattaaatatg

SEQ ID NO: 6628 - DNA, 20 bp, Artificial Sequence
  Description of Artificial Sequence: Synthetic oligonucleotide
  Target: LAMA2; (-) strand; PAM type: NAAAAC; PAM sequence: TAAAAC
ctccatgataagaaagaagt

SEQ ID NO: 6629 - DNA, 20 bp, Artificial Sequence
  Description of Artificial Sequence: Synthetic oligonucleotide
  Target: LAMA2; (-) strand; PAM type: NAAAAC; PAM sequence: TAAAAC
atgctctggatttattcttc

SEQ ID NO: 6630 - DNA, 20 bp, Artificial Sequence
  Description of Artificial Sequence: Synthetic oligonucleotide
  Target: LAMA2; (-) strand; PAM type: NAAAAC; PAM sequence: CAAAAC
agcaaagtaaaacagaaccc

SEQ ID NO: 6631 - DNA, 20 bp, Artificial Sequence
  Description of Artificial Sequence: Synthetic oligonucleotide
  Target: LAMA2; (-) strand; PAM type: NAAAAC; PAM sequence: TAAAAC
atgcagcagtgtcagcaaag

SEQ ID NO: 6632 - DNA, 20 bp, Artificial Sequence
  Description of Artificial Sequence: Synthetic oligonucleotide
  Target: LAMA2; (-) strand; PAM type: NAAAAC; PAM sequence: AAAAAC
gagctgtatttggtctttta

SEQ ID NO: 6633 - DNA, 20 bp, Artificial Sequence
  Description of Artificial Sequence: Synthetic oligonucleotide
  Target: LAMA2; (-) strand; PAM type: NAAAAC; PAM sequence: CAAAAC
ctttcaaataaaaacaataa

SEQ ID NO: 6634 - DNA, 20 bp, Artificial Sequence
  Description of Artificial Sequence: Synthetic oligonucleotide
  Target: LAMA2; (-) strand; PAM type: NAAAAC; PAM sequence: AAAAAC
tactttaaatactttcaaat

SEQ ID NO: 6635 - DNA, 20 bp, Artificial Sequence
  Description of Artificial Sequence: Synthetic oligonucleotide
  Target: LAMA2; (-) strand; PAM type: NAAAAC; PAM sequence: AAAAAC
ccaagcaacagatgttcatt

SEQ ID NO: 6636 - DNA, 20 bp, Artificial Sequence
  Description of Artificial Sequence: Synthetic oligonucleotide
  Target: LAMA2; (-) strand; PAM type: NAAAAC; PAM sequence: AAAAAC
atgttttactgcttcaagca

SEQ ID NO: 6637 - DNA, 20 bp, Artificial Sequence
  Description of Artificial Sequence: Synthetic oligonucleotide
  Target: LAMA2; (-) strand; PAM type: NAAAAC; PAM sequence: TAAAAC
cctcaaattagctctcaaat

SEQ ID NO: 6638 - DNA, 20 bp, Artificial Sequence
  Description of Artificial Sequence: Synthetic oligonucleotide
  Target: LAMA2; (-) strand; PAM type: NAAAAC; PAM sequence: TAAAAC
gtgttgataataggatctac

SEQ ID NO: 6639 - DNA, 20 bp, Artificial Sequence
  Description of Artificial Sequence: Synthetic oligonucleotide
  Target: LAMA2; (-) strand; PAM type: NAAAAC; PAM sequence: TAAAAC
aattctaataatgcgtggaa

SEQ ID NO: 6640 - DNA, 20 bp, Artificial Sequence
  Description of Artificial Sequence: Synthetic oligonucleotide
  Target: LAMA2; (-) strand; PAM type: NAAAAC; PAM sequence: GAAAAC
actgttttcatactaagact

SEQ ID NO: 6641 - DNA, 20 bp, Artificial Sequence
  Description of Artificial Sequence: Synthetic oligonucleotide
  Target: LAMA2; (-) strand; PAM type: NAAAAC; PAM sequence: CAAAAC
taaaaattcctcaggagaag

SEQ ID NO: 6642 - DNA, 20 bp, Artificial Sequence
  Description of Artificial Sequence: Synthetic oligonucleotide
  Target: LAMA2; (-) strand; PAM type: NAAAAC; PAM sequence: GAAAAC
agggaaagaattagtagaca

SEQ ID NO: 6643 - DNA, 20 bp, Artificial Sequence
  Description of Artificial Sequence: Synthetic oligonucleotide
  Target: LAMA2; (-) strand; PAM type: NAAAAC; PAM sequence: TAAAAC
ataaattacacatggcccat

SEQ ID NO: 6644 - DNA, 20 bp, Artificial Sequence
  Description of Artificial Sequence: Synthetic oligonucleotide
  Target: LAMA2; (-) strand; PAM type: NAAAAC; PAM sequence: AAAAAC
gctactttatcttcattatg

SEQ ID NO: 6645 - DNA, 20 bp, Artificial Sequence
  Description of Artificial Sequence: Synthetic oligonucleotide
  Target: LAMA2; (-) strand; PAM type: NAAAAC; PAM sequence: CAAAAC
aataaaaaaaagaaaaacat

SEQ ID NO: 6646 - DNA, 20 bp, Artificial Sequence
  Description of Artificial Sequence: Synthetic oligonucleotide
  Target: LAMA2; (-) strand; PAM type: NAAAAC; PAM sequence: AAAAAC
aacatgagaataaaaaaaag

SEQ ID NO: 6647 - DNA, 20 bp, Artificial Sequence
  Description of Artificial Sequence: Synthetic oligonucleotide
  Target: LAMA2; (-) strand; PAM type: NAAAAC; PAM sequence: AAAAAC
cttaaagtaaaaaggaaaat

SEQ ID NO: 6648 - DNA, 20 bp, Artificial Sequence
  Description of Artificial Sequence: Synthetic oligonucleotide
  Target: LAMA2; (-) strand; PAM type: NAAAAC; PAM sequence: TAAAAC
catacataatttctttaaat

SEQ ID NO: 6649 - DNA, 20 bp, Artificial Sequence
  Description of Artificial Sequence: Synthetic oligonucleotide
  Target: LAMA2; (-) strand; PAM type: NAAAAC; PAM sequence: GAAAAC
atttctataatattaccttt

SEQ ID NO: 6650 - DNA, 20 bp, Artificial Sequence
  Description of Artificial Sequence: Synthetic oligonucleotide
  Target: LAMA2; (-) strand; PAM type: NAAAAC; PAM sequence: AAAAAC
tactcaggtaagagtttaaa

SEQ ID NO: 6651 - DNA, 20 bp, Artificial Sequence
  Description of Artificial Sequence: Synthetic oligonucleotide
  Target: LAMA2; (-) strand; PAM type: NAAAAC; PAM sequence: GAAAAC
agtaaacaaacatgccacat

SEQ ID NO: 6652 - DNA, 20 bp, Artificial Sequence
  Description of Artificial Sequence: Synthetic oligonucleotide
  Target: LAMA2; (-) strand; PAM type: NAAAAC; PAM sequence: TAAAAC
tcatttacagctgcaggggg

SEQ ID NO: 6653 - DNA, 20 bp, Artificial Sequence
  Description of Artificial Sequence: Synthetic oligonucleotide
  Target: LAMA2; (-) strand; PAM type: NAAAAC; PAM sequence: GAAAAC
atacgtgtgataaaaattta

SEQ ID NO: 6654 - DNA, 20 bp, Artificial Sequence
  Description of Artificial Sequence: Synthetic oligonucleotide
  Target: LAMA2; (-) strand; PAM type: NAAAAC; PAM sequence: AAAAAC
agcaaatatctccaggttgg

SEQ ID NO: 6655 - DNA, 20 bp, Artificial Sequence
  Description of Artificial Sequence: Synthetic oligonucleotide
  Target: LAMA2; (-) strand; PAM type: NAAAAC; PAM sequence: CAAAAC
tccctaatgcagatgattaa

SEQ ID NO: 6656 - DNA, 20 bp, Artificial Sequence
  Description of Artificial Sequence: Synthetic oligonucleotide
  Target: LAMA2; (-) strand; PAM type: NAAAAC; PAM sequence: TAAAAC
ttatccaaaggtatttttat

SEQ ID NO: 6657 - DNA, 20 bp, Artificial Sequence
  Description of Artificial Sequence: Synthetic oligonucleotide
  Target: LAMA2; (-) strand; PAM type: NAAAAC; PAM sequence: GAAAAC
actgtgtgctaaatcaagtt

SEQ ID NO: 6658 - DNA, 20 bp, Artificial Sequence
  Description of Artificial Sequence: Synthetic oligonucleotide
  Target: LAMA2; (-) strand; PAM type: NAAAAC; PAM sequence: GAAAAC
tgaaaagaatgagaaaataa

SEQ ID NO: 6659 - DNA, 20 bp, Artificial Sequence
  Description of Artificial Sequence: Synthetic oligonucleotide
  Target: LAMA2; (-) strand; PAM type: NAAAAC; PAM sequence: AAAAAC
ctggtcattaaaaacaaaac

SEQ ID NO: 6660 - DNA, 20 bp, Artificial Sequence
  Description of Artificial Sequence: Synthetic oligonucleotide
  Target: LAMA2; (-) strand; PAM type: NAAAAC; PAM sequence: CAAAAC
tggtaactggtcattaaaaa

SEQ ID NO: 6661 - DNA, 20 bp, Artificial Sequence
  Description of Artificial Sequence: Synthetic oligonucleotide
  Target: LAMA2; (-) strand; PAM type: NAAAAC; PAM sequence: AAAAAC
ggcgatggtaactggtcatt

SEQ ID NO: 6662 - DNA, 20 bp, Artificial Sequence
  Description of Artificial Sequence: Synthetic oligonucleotide
  Target: LAMA2; (-) strand; PAM type: NAAAAC; PAM sequence: GAAAAC
ctgttggagtcagatacttt

SEQ ID NO: 6663 - DNA, 20 bp, Artificial Sequence
  Description of Artificial Sequence: Synthetic oligonucleotide
  Target: LAMA2; (-) strand; PAM type: NAAAAC; PAM sequence: TAAAAC
ttaatcactggaggaatttt

SEQ ID NO: 6664 - DNA, 20 bp, Artificial Sequence
  Description of Artificial Sequence: Synthetic oligonucleotide
  Target: LAMA2; (-) strand; PAM type: NAAAAC; PAM sequence: AAAAAC
cttcctatggctctcaggat

SEQ ID NO: 6665 - DNA, 20 bp, Artificial Sequence
  Description of Artificial Sequence: Synthetic oligonucleotide
  Target: LAMA2; (-) strand; PAM type: NAAAAC; PAM sequence: AAAAAC
tatcacactattttccgata

SEQ ID NO: 6666 - DNA, 20 bp, Artificial Sequence
  Description of Artificial Sequence: Synthetic oligonucleotide
  Target: LAMA2; (-) strand; PAM type: NAAAAC; PAM sequence: AAAAAC
aaagattagatgagtacaat

SEQ ID NO: 6667 - DNA, 20 bp, Artificial Sequence
  Description of Artificial Sequence: Synthetic oligonucleotide
  Target: LAMA2; (-) strand; PAM type: NAAAAC; PAM sequence: GAAAAC
tggcactttatttattcacg

SEQ ID NO: 6668 - DNA, 20 bp, Artificial Sequence
  Description of Artificial Sequence: Synthetic oligonucleotide
  Target: LAMA2; (-) strand; PAM type: NAAAAC; PAM sequence: AAAAAC
tacttttgccgggagttgct

SEQ ID NO: 6669 - DNA, 20 bp, Artificial Sequence
  Description of Artificial Sequence: Synthetic oligonucleotide
  Target: LAMA2; (-) strand; PAM type: NAAAAC; PAM sequence: GAAAAC
ttaccatgtgaggacacagt

SEQ ID NO: 6670 - DNA, 20 bp, Artificial Sequence
  Description of Artificial Sequence: Synthetic oligonucleotide
  Target: LAMA2; (-) strand; PAM type: NAAAAC; PAM sequence: TAAAAC
tgcgatactagttaaggaat

SEQ ID NO: 6671 - DNA, 20 bp, Artificial Sequence
  Description of Artificial Sequence: Synthetic oligonucleotide
  Target: LAMA2; (-) strand; PAM type: NAAAAC; PAM sequence: GAAAAC
aaataattttatctccacaa

SEQ ID NO: 6672 - DNA, 20 bp, Artificial Sequence
  Description of Artificial Sequence: Synthetic oligonucleotide
  Target: LAMA2; (-) strand; PAM type: NAAAAC; PAM sequence: AAAAAC
tgtccttcatcgctgtggac

SEQ ID NO: 6673 - DNA, 20 bp, Artificial Sequence
  Description of Artificial Sequence: Synthetic oligonucleotide
  Target: LAMA2; (-) strand; PAM type: NAAAAC; PAM sequence: AAAAAC
caaaatacacaaacatttcc

SEQ ID NO: 6674 - DNA, 20 bp, Artificial Sequence
  Description of Artificial Sequence: Synthetic oligonucleotide
  Target: LAMA2; (-) strand; PAM type: NAAAAC; PAM sequence: CAAAAC
tctctactatttatgctagt

SEQ ID NO: 6675 - DNA, 20 bp, Artificial Sequence
  Description of Artificial Sequence: Synthetic oligonucleotide
  Target: LAMA2; (-) strand; PAM type: NAAAAC; PAM sequence: CAAAAC
agaggtcttcaaaaataacc

SEQ ID NO: 6676 - DNA, 20 bp, Artificial Sequence
  Description of Artificial Sequence: Synthetic oligonucleotide
  Target: LAMA2; (-) strand; PAM type: NAAAAC; PAM sequence: AAAAAC
gggctcactcaagagaaacc

SEQ ID NO: 6677 - DNA, 20 bp, Artificial Sequence
  Description of Artificial Sequence: Synthetic oligonucleotide
  Target: LAMA2; (-) strand; PAM type: NAAAAC; PAM sequence: TAAAAC
tgctgaaaataatcatacaa

SEQ ID NO: 6678 - DNA, 20 bp, Artificial Sequence
  Description of Artificial Sequence: Synthetic oligonucleotide
  Target: LAMA2; (-) strand; PAM type: NAAAAC; PAM sequence: AAAAAC
ttttattcattctgttcatg

SEQ ID NO: 6679 - DNA, 20 bp, Artificial Sequence
  Description of Artificial Sequence: Synthetic oligonucleotide
  Target: LAMA2; (-) strand; PAM type: NAAAAC; PAM sequence: GAAAAC
gtttttccttttaagttatt

SEQ ID NO: 6680 - DNA, 20 bp, Artificial Sequence
  Description of Artificial Sequence: Synthetic oligonucleotide
  Target: LAMA2; (-) strand; PAM type: NAAAAC; PAM sequence: GAAAAC
ttcttggtgattatatgtag

SEQ ID NO: 6681 - DNA, 20 bp, Artificial Sequence
  Description of Artificial Sequence: Synthetic oligonucleotide
  Target: LAMA2; (-) strand; PAM type: NAAAAC; PAM sequence: AAAAAC
ctatgacctggaaatgtttt

SEQ ID NO: 6682 - DNA, 20 bp, Artificial Sequence
  Description of Artificial Sequence: Synthetic oligonucleotide
  Target: LAMA2; (-) strand; PAM type: NAAAAC; PAM sequence: AAAAAC
atggacctctctgagtggtc

SEQ ID NO: 6683 - DNA, 20 bp, Artificial Sequence
  Description of Artificial Sequence: Synthetic oligonucleotide
  Target: LAMA2; (-) strand; PAM type: NAAAAC; PAM sequence: CAAAAC
aaggaaagaagataatgttt

SEQ ID NO: 6684 - DNA, 20 bp, Artificial Sequence
  Description of Artificial Sequence: Synthetic oligonucleotide
  Target: LAMA2; (-) strand; PAM type: NAAAAC; PAM sequence: AAAAAC
ccccagaattcaagaatatt

SEQ ID NO: 6685 - DNA, 20 bp, Artificial Sequence
  Description of Artificial Sequence: Synthetic oligonucleotide
  Target: LAMA2; (-) strand; PAM type: NAAAAC; PAM sequence: GAAAAC
gtttaatacatattcttagt

SEQ ID NO: 6686 - DNA, 20 bp, Artificial Sequence
  Description of Artificial Sequence: Synthetic oligonucleotide
  Target: LAMA2; (-) strand; PAM type: NAAAAC; PAM sequence: TAAAAC
ctatggtacttggtttttgg

SEQ ID NO: 6687 - DNA, 20 bp, Artificial Sequence
  Description of Artificial Sequence: Synthetic oligonucleotide
  Target: LAMA2; (-) strand; PAM type: NAAAAC; PAM sequence: TAAAAC
ttgaagtatgttttttattt

SEQ ID NO: 6688 - DNA, 20 bp, Artificial Sequence
  Description of Artificial Sequence: Synthetic oligonucleotide
  Target: LAMA2; (-) strand; PAM type: NAAAAC; PAM sequence: TAAAAC
tctgatcatttaaaagaaat

SEQ ID NO: 6689 - DNA, 20 bp, Artificial Sequence
  Description of Artificial Sequence: Synthetic oligonucleotide
  Target: LAMA2; (-) strand; PAM type: NAAAAC; PAM sequence: TAAAAC
gagatcgagaccatcccggc

SEQ ID NO: 6690 - DNA, 20 bp, Artificial Sequence
  Description of Artificial Sequence: Synthetic oligonucleotide
  Target: LAMA2; (-) strand; PAM type: NAAAAC; PAM sequence: TAAAAC
cgggggagattggtggggaa

SEQ ID NO: 6691 - DNA, 20 bp, Artificial Sequence
  Description of Artificial Sequence: Synthetic oligonucleotide
  Target: LAMA2; (-) strand; PAM type: NAAAAC; PAM sequence: GAAAAC
gaaagcaaaatatacagtaa

SEQ ID NO: 6692 - DNA, 20 bp, Artificial Sequence
  Description of Artificial Sequence: Synthetic oligonucleotide
  Target: LAMA2; (-) strand; PAM type: NAAAAC; PAM sequence: CAAAAC
atgtgcccagtggacctcag

SEQ ID NO: 6693 - DNA, 20 bp, Artificial Sequence
  Description of Artificial Sequence: Synthetic oligonucleotide
  Target: LAMA2; (-) strand; PAM type: NAAAAC; PAM sequence: AAAAAC
cctcccctctgaggcccata

SEQ ID NO: 6694 - DNA, 20 bp, Artificial Sequence
  Description of Artificial Sequence: Synthetic oligonucleotide
  Target: LAMA2; (-) strand; PAM type: NAAAAC; PAM sequence: GAAAAC
aaacagagggagcaggcgat

SEQ ID NO: 6695 - DNA, 20 bp, Artificial Sequence
  Description of Artificial Sequence: Synthetic oligonucleotide
  Target: LAMA2; (-) strand; PAM type: NAAAAC; PAM sequence: GAAAAC
caccacagtcaccaagcagt

SEQ ID NO: 6696 - DNA, 20 bp, Artificial Sequence
  Description of Artificial Sequence: Synthetic oligonucleotide
  Target: LAMA2; (-) strand; PAM type: NAAAAC; PAM sequence: CAAAAC
aaaaggaaataggaacaaaa

SEQ ID NO: 6697 - DNA, 20 bp, Artificial Sequence
  Description of Artificial Sequence: Synthetic oligonucleotide
  Target: LAMA2; (-) strand; PAM type: NAAAAC; PAM sequence: CAAAAC
ctgagaaaaggaaataggaa

SEQ ID NO: 6698 - DNA, 20 bp, Artificial Sequence
  Description of Artificial Sequence: Synthetic oligonucleotide
  Target: LAMA2; (-) strand; PAM type: NAAAAC; PAM sequence: AAAAAC
tctagttaatgtccagaatc

SEQ ID NO: 6699 - DNA, 20 bp, Artificial Sequence
  Description of Artificial Sequence: Synthetic oligonucleotide
  Target: LAMA2; (-) strand; PAM type: NAAAAC; PAM sequence: AAAAAC
taaatatcacccatttgtag

SEQ ID NO: 6700 - DNA, 20 bp, Artificial Sequence
  Description of Artificial Sequence: Synthetic oligonucleotide
  Target: LAMA2; (-) strand; PAM type: NAAAAC; PAM sequence: GAAAAC
ttaaaaatattttcaataaa

SEQ ID NO: 6701 - DNA, 20 bp, Artificial Sequence
  Description of Artificial Sequence: Synthetic oligonucleotide
  Target: LAMA2; (-) strand; PAM type: NAAAAC; PAM sequence: TAAAAC
gttaatgtgccaagataata

SEQ ID NO: 6702 - DNA, 20 bp, Artificial Sequence
  Description of Artificial Sequence: Synthetic oligonucleotide
  Target: LAMA2; (-) strand; PAM type: NAAAAC; PAM sequence: CAAAAC
gaattgatttatttacccaa

SEQ ID NO: 6703 - DNA, 20 bp, Artificial Sequence
  Description of Artificial Sequence: Synthetic oligonucleotide
  Target: LAMA2; (-) strand; PAM type: NAAAAC; PAM sequence: TAAAAC
taagaaaatgtgagataatt

SEQ ID NO: 6704 - DNA, 20 bp, Artificial Sequence
  Description of Artificial Sequence: Synthetic oligonucleotide
  Target: LAMA2; (-) strand; PAM type: NAAAAC; PAM sequence: CAAAAC
aaaatttcaactatatcatg

SEQ ID NO: 6705 - DNA, 20 bp, Artificial Sequence
  Description of Artificial Sequence: Synthetic oligonucleotide
  Target: LAMA2; (-) strand; PAM type: NAAAAC; PAM sequence: GAAAAC
tttcacatgataagggaatg

SEQ ID NO: 6706 - DNA, 20 bp, Artificial Sequence
  Description of Artificial Sequence: Synthetic oligonucleotide
  Target: LAMA2; (-) strand; PAM type: NAAAAC; PAM sequence: AAAAAC
ataatataattttctttttt

SEQ ID NO: 6707 - DNA, 20 bp, Artificial Sequence
  Description of Artificial Sequence: Synthetic oligonucleotide
  Target: LAMA2; (-) strand; PAM type: NAAAAC; PAM sequence: AAAAAC
cttctatagtatctgtgaat

SEQ ID NO: 6708 - DNA, 20 bp, Artificial Sequence
  Description of Artificial Sequence: Synthetic oligonucleotide
  Target: LAMA2; (-) strand; PAM type: NAAAAC; PAM sequence: AAAAAC
atatctgtaaatttttagga

SEQ ID NO: 6709 - DNA, 20 bp, Artificial Sequence
  Description of Artificial Sequence: Synthetic oligonucleotide
  Target: LAMA2; (-) strand; PAM type: NAAAAC; PAM sequence: TAAAAC
ttccaattccatatgaattg

SEQ ID NO: 6710 - DNA, 20 bp, Artificial Sequence
  Description of Artificial Sequence: Synthetic oligonucleotide
  Target: LAMA2; (-) strand; PAM type: NAAAAC; PAM sequence: TAAAAC
gtttaatacttttattgagt

SEQ ID NO: 6711 - DNA, 20 bp, Artificial Sequence
  Description of Artificial Sequence: Synthetic oligonucleotide
  Target: LAMA2; (-) strand; PAM type: NAAAAC; PAM sequence: AAAAAC
gacaagagtttacctatata

SEQ ID NO: 6712 - DNA, 20 bp, Artificial Sequence
  Description of Artificial Sequence: Synthetic oligonucleotide
  Target: LAMA2; (-) strand; PAM type: NAAAAC; PAM sequence: TAAAAC
catggaatactatgcagtca

SEQ ID NO: 6713 - DNA, 20 bp, Artificial Sequence
  Description of Artificial Sequence: Synthetic oligonucleotide
  Target: LAMA2; (-) strand; PAM type: NAAAAC; PAM sequence: GAAAAC
gatgaaactagacaaaaaaa

SEQ ID NO: 6714 - DNA, 20 bp, Artificial Sequence
  Description of Artificial Sequence: Synthetic oligonucleotide
  Target: LAMA2; (-) strand; PAM type: NAAAAC; PAM sequence: GAAAAC
gacaatgagcaaagagaaga

SEQ ID NO: 6715 - DNA, 20 bp, Artificial Sequence
  Description of Artificial Sequence: Synthetic oligonucleotide
  Target: LAMA2; (-) strand; PAM type: NAAAAC; PAM sequence: GAAAAC
gattctctaaacaaacacat

SEQ ID NO: 6716 - DNA, 20 bp, Artificial Sequence
  Description of Artificial Sequence: Synthetic oligonucleotide
  Target: LAMA2; (-) strand; PAM type: NAAAAC; PAM sequence: CAAAAC
tggttataggttttctgaat

SEQ ID NO: 6717 - DNA, 20 bp, Artificial Sequence
  Description of Artificial Sequence: Synthetic oligonucleotide
  Target: LAMA2; (-) strand; PAM type: NAAAAC; PAM sequence: AAAAAC
tgatgatgttttctgctggg

SEQ ID NO: 6718 - DNA, 20 bp, Artificial Sequence
  Description of Artificial Sequence: Synthetic oligonucleotide
  Target: LAMA2; (-) strand; PAM type: NAAAAC; PAM sequence: GAAAAC
ccttggcaaattattctcca

SEQ ID NO: 6719 - DNA, 20 bp, Artificial Sequence
  Description of Artificial Sequence: Synthetic oligonucleotide
  Target: LAMA2; (-) strand; PAM type: NAAAAC; PAM sequence: CAAAAC
tgcatcttaaagcggtatgg

SEQ ID NO: 6720 - DNA, 20 bp, Artificial Sequence
  Description of Artificial Sequence: Synthetic oligonucleotide
  Target: LAMA2; (-) strand; PAM type: NAAAAC; PAM sequence: TAAAAC
aaaaacaaatgtcatacatc

SEQ ID NO: 6721 - DNA, 20 bp, Artificial Sequence
  Description of Artificial Sequence: Synthetic oligonucleotide
  Target: LAMA2; (-) strand; PAM type: NAAAAC; PAM sequence: AAAAAC
gacctgttgcctgtggacag

SEQ ID NO: 6722 - DNA, 20 bp, Artificial Sequence
  Description of Artificial Sequence: Synthetic oligonucleotide
  Target: LAMA2; (-) strand; PAM type: NAAAAC; PAM sequence: AAAAAC
ccgattaactggaatataat

SEQ ID NO: 6723 - DNA, 20 bp, Artificial Sequence
  Description of Artificial Sequence: Synthetic oligonucleotide
  Target: LAMA2; (-) strand; PAM type: NAAAAC; PAM sequence: TAAAAC
gataggtagacaacattttg

SEQ ID NO: 6724 - DNA, 20 bp, Artificial Sequence
  Description of Artificial Sequence: Synthetic oligonucleotide
  Target: LAMA2; (-) strand; PAM type: NAAAAC; PAM sequence: AAAAAC
ggcctgggtttgatactctt

SEQ ID NO: 6725 - DNA, 20 bp, Artificial Sequence
  Description of Artificial Sequence: Synthetic oligonucleotide
  Target: LAMA2; (-) strand; PAM type: NAAAAC; PAM sequence: TAAAAC
ttaatgatatattcttaaca

SEQ ID NO: 6726 - DNA, 20 bp, Artificial Sequence
  Description of Artificial Sequence: Synthetic oligonucleotide
  Target: LAMA2; (-) strand; PAM type: NAAAAC; PAM sequence: GAAAAC
caaggggaagaaataatact

SEQ ID NO: 6727 - DNA, 20 bp, Artificial Sequence
  Description of Artificial Sequence: Synthetic oligonucleotide
  Target: LAMA2; (-) strand; PAM type: NAAAAC; PAM sequence: GAAAAC
gtggtttgacaagcctatga

SEQ ID NO: 6728 - DNA, 20 bp, Artificial Sequence
  Description of Artificial Sequence: Synthetic oligonucleotide
  Target: LAMA2; (-) strand; PAM type: NAAAAC; PAM sequence: CAAAAC
tactagaaatacacagttag

SEQ ID NO: 6729 - DNA, 20 bp, Artificial Sequence
  Description of Artificial Sequence: Synthetic oligonucleotide
  Target: LAMA2; (-) strand; PAM type: NAAAAC; PAM sequence: TAAAAC
atgccaaatataaatgattt

SEQ ID NO: 6730 - DNA, 20 bp, Artificial Sequence
  Description of Artificial Sequence: Synthetic oligonucleotide
  Target: LAMA2; (-) strand; PAM type: NAAAAC; PAM sequence: CAAAAC
atatcagcttctactgagac

SEQ ID NO: 6731 - DNA, 20 bp, Artificial Sequence
  Description of Artificial Sequence: Synthetic oligonucleotide
  Target: LAMA2; (-) strand; PAM type: NAAAAC; PAM sequence: GAAAAC
gaaatgtcataatgtagcaa

SEQ ID NO: 6732 - DNA, 20 bp, Artificial Sequence
  Description of Artificial Sequence: Synthetic oligonucleotide
  Target: LAMA2; (-) strand; PAM type: NAAAAC; PAM sequence: CAAAAC
tatattcaaaaattaaaaag

SEQ ID NO: 6733 - DNA, 20 bp, Artificial Sequence
  Description of Artificial Sequence: Synthetic oligonucleotide
  Target: LAMA2; (-) strand; PAM type: NAAAAC; PAM sequence: TAAAAC
gggataaattaagaaggaaa

SEQ ID NO: 6734 - DNA, 20 bp, Artificial Sequence
  Description of Artificial Sequence: Synthetic oligonucleotide
  Target: LAMA2; (-) strand; PAM type: NAAAAC; PAM sequence: TAAAAC
gaaggcttcaactggtttga

SEQ ID NO: 6735 - DNA, 20 bp, Artificial Sequence
  Description of Artificial Sequence: Synthetic oligonucleotide
  Target: LAMA2; (-) strand; PAM type: NAAAAC; PAM sequence: CAAAAC
tcacactctaaaggaggaat

SEQ ID NO: 6736 - DNA, 20 bp, Artificial Sequence
  Description of Artificial Sequence: Synthetic oligonucleotide
  Target: LAMA2; (-) strand; PAM type: NAAAAC; PAM sequence: AAAAAC
tctaaattaacttacttgca

SEQ ID NO: 6737 - DNA, 20 bp, Artificial Sequence
  Description of Artificial Sequence: Synthetic oligonucleotide
  Target: LAMA2; (-) strand; PAM type: NAAAAC; PAM sequence: TAAAAC
cagccagtggaatgaaaaac

SEQ ID NO: 6738 - DNA, 20 bp, Artificial Sequence
  Description of Artificial Sequence: Synthetic oligonucleotide
  Target: LAMA2; (-) strand; PAM type: NAAAAC; PAM sequence: AAAAAC
cctctgcagccagtggaatg

SEQ ID NO: 6739 - DNA, 20 bp, Artificial Sequence
  Description of Artificial Sequence: Synthetic oligonucleotide
  Target: LAMA2; (-) strand; PAM type: NAAAAC; PAM sequence: GAAAAC
ttttacatatggcaaataaa

SEQ ID NO: 6740 - DNA, 20 bp, Artificial Sequence
  Description of Artificial Sequence: Synthetic oligonucleotide
  Target: LAMA2; (-) strand; PAM type: NAAAAC; PAM sequence: TAAAAC
aactatgtacgatctcaaaa

SEQ ID NO: 6741 - DNA, 20 bp, Artificial Sequence
  Description of Artificial Sequence: Synthetic oligonucleotide
  Target: LAMA2; (-) strand; PAM type: NAAAAC; PAM sequence: CAAAAC
tctctaaagatcacatccac

SEQ ID NO: 6742 - DNA, 20 bp, Artificial Sequence
  Description of Artificial Sequence: Synthetic oligonucleotide
  Target: LAMA2; (-) strand; PAM type: NAAAAC; PAM sequence: GAAAAC
acttacaaaataatagcgag

SEQ ID NO: 6743 - DNA, 20 bp, Artificial Sequence
  Description of Artificial Sequence: Synthetic oligonucleotide
  Target: LAMA2; (-) strand; PAM type: NAAAAC; PAM sequence: TAAAAC
attccagcaaagcacggctc

SEQ ID NO: 6744 - DNA, 20 bp, Artificial Sequence
  Description of Artificial Sequence: Synthetic oligonucleotide
  Target: LAMA2; (-) strand; PAM type: NAAAAC; PAM sequence: AAAAAC
ccaaagacctgacatcactg

SEQ ID NO: 6745 - DNA, 20 bp, Artificial Sequence
  Description of Artificial Sequence: Synthetic oligonucleotide
  Target: LAMA2; (-) strand; PAM type: NAAAAC; PAM sequence: AAAAAC
ttctgtttttcaatgtttta

SEQ ID NO: 6746 - DNA, 20 bp, Artificial Sequence
  Description of Artificial Sequence: Synthetic oligonucleotide
  Target: LAMA2; (-) strand; PAM type: NAAAAC; PAM sequence: TAAAAC
tgccgtgagggacaatgtac

SEQ ID NO: 6747 - DNA, 20 bp, Artificial Sequence
  Description of Artificial Sequence: Synthetic oligonucleotide
  Target: LAMA2; (-) strand; PAM type: NAAAAC; PAM sequence: AAAAAC
tgggtagagaagaacatgcc

SEQ ID NO: 6748 - DNA, 20 bp, Artificial Sequence
  Description of Artificial Sequence: Synthetic oligonucleotide
  Target: LAMA2; (-) strand; PAM type: NAAAAC; PAM sequence: TAAAAC
aagattatcataaagaactg

SEQ ID NO: 6749 - DNA, 20 bp, Artificial Sequence
  Description of Artificial Sequence: Synthetic oligonucleotide
  Target: LAMA2; (-) strand; PAM type: NAAAAC; PAM sequence: CAAAAC
agaatagcattgtctatgtg

SEQ ID NO: 6750 - DNA, 20 bp, Artificial Sequence
  Description of Artificial Sequence: Synthetic oligonucleotide
  Target: LAMA2; (-) strand; PAM type: NAAAAC; PAM sequence: CAAAAC
ttctaccaaggattgatagt

SEQ ID NO: 6751 - DNA, 20 bp, Artificial Sequence
  Description of Artificial Sequence: Synthetic oligonucleotide
  Target: LAMA2; (-) strand; PAM type: NAAAAC; PAM sequence: AAAAAC
ttagtgaaaattcaaattga

SEQ ID NO: 6752 - DNA, 20 bp, Artificial Sequence
  Description of Artificial Sequence: Synthetic oligonucleotide
  Target: LAMA2; (-) strand; PAM type: NAAAAC; PAM sequence: GAAAAC
atagtcatttttctcataaa

SEQ ID NO: 6753 - DNA, 20 bp, Artificial Sequence
  Description of Artificial Sequence: Synthetic oligonucleotide
  Target: LAMA2; (-) strand; PAM type: NAAAAC; PAM sequence: AAAAAC
aatacacattaaagaaatgg

SEQ ID NO: 6754 - DNA, 20 bp, Artificial Sequence
  Description of Artificial Sequence: Synthetic oligonucleotide
  Target: LAMA2; (-) strand; PAM type: NAAAAC; PAM sequence: AAAAAC
cccattgattccacttattt

SEQ ID NO: 6755 - DNA, 20 bp, Artificial Sequence
  Description of Artificial Sequence: Synthetic oligonucleotide
  Target: LAMA2; (-) strand; PAM type: NAAAAC; PAM sequence: AAAAAC
gtcttcattttctgcgaata

SEQ ID NO: 6756 - DNA, 20 bp, Artificial Sequence
  Description of Artificial Sequence: Synthetic oligonucleotide
  Target: LAMA2; (-) strand; PAM type: NAAAAC; PAM sequence: CAAAAC
taaaagttaacaacagtctt

SEQ ID NO: 6757 - DNA, 20 bp, Artificial Sequence
  Description of Artificial Sequence: Synthetic oligonucleotide
  Target: LAMA2; (-) strand; PAM type: NAAAAC; PAM sequence: AAAAAC
aagaagaattcatgagtaag

SEQ ID NO: 6758 - DNA, 20 bp, Artificial Sequence
  Description of Artificial Sequence: Synthetic oligonucleotide
  Target: LAMA2; (-) strand; PAM type: NAAAAC; PAM sequence: AAAAAC
tttttaaacgttaaaaaagt

SEQ ID NO: 6759 - DNA, 20 bp, Artificial Sequence
  Description of Artificial Sequence: Synthetic oligonucleotide
  Target: LAMA2; (-) strand; PAM type: NAAAAC; PAM sequence: GAAAAC
tttatccacatgagcttcat

SEQ ID NO: 6760 - DNA, 20 bp, Artificial Sequence
  Description of Artificial Sequence: Synthetic oligonucleotide
  Target: LAMA2; (-) strand; PAM type: NAAAAC; PAM sequence: CAAAAC
gcagatgagggtatgaaaaa

SEQ ID NO: 6761 - DNA, 20 bp, Artificial Sequence
  Description of Artificial Sequence: Synthetic oligonucleotide
  Target: LAMA2; (-) strand; PAM type: NAAAAC; PAM sequence: AAAAAC
tgtcagcagatgagggtatg

SEQ ID NO: 6762 - DNA, 20 bp, Artificial Sequence
  Description of Artificial Sequence: Synthetic oligonucleotide
  Target: LAMA2; (-) strand; PAM type: NAAAAC; PAM sequence: TAAAAC
gtgatgaaataaataattca

SEQ ID NO: 6763 - DNA, 20 bp, Artificial Sequence
  Description of Artificial Sequence: Synthetic oligonucleotide
  Target: LAMA2; (-) strand; PAM type: NAAAAC; PAM sequence: TAAAAC
ctcataatagaggataggat

SEQ ID NO: 6764 - DNA, 20 bp, Artificial Sequence
  Description of Artificial Sequence: Synthetic oligonucleotide
  Target: LAMA2; (-) strand; PAM type: NAAAAC; PAM sequence: GAAAAC
ttctatgttttagtaagata

SEQ ID NO: 6765 - DNA, 20 bp, Artificial Sequence
  Description of Artificial Sequence: Synthetic oligonucleotide
  Target: LAMA2; (-) strand; PAM type: NAAAAC; PAM sequence: CAAAAC
caggcaatttcacatggaag

SEQ ID NO: 6766 - DNA, 20 bp, Artificial Sequence
  Description of Artificial Sequence: Synthetic oligonucleotide
  Target: LAMA2; (-) strand; PAM type: NAAAAC; PAM sequence: CAAAAC
tagctacgcaatgtttaaag

SEQ ID NO: 6767 - DNA, 20 bp, Artificial Sequence
  Description of Artificial Sequence: Synthetic oligonucleotide
  Target: LAMA2; (-) strand; PAM type: NAAAAC; PAM sequence: AAAAAC
aaactttttataacactatt

SEQ ID NO: 6768 - DNA, 20 bp, Artificial Sequence
  Description of Artificial Sequence: Synthetic oligonucleotide
  Target: LAMA2; (-) strand; PAM type: NAAAAC; PAM sequence: AAAAAC
aaaagtgagcttcagtgggt

SEQ ID NO: 6769 - DNA, 20 bp, Artificial Sequence
  Description of Artificial Sequence: Synthetic oligonucleotide
  Target: LAMA2; (-) strand; PAM type: NAAAAC; PAM sequence: TAAAAC
tgacattctacaaattattc

SEQ ID NO: 6770 - DNA, 20 bp, Artificial Sequence
  Description of Artificial Sequence: Synthetic oligonucleotide
  Target: LAMA2; (-) strand; PAM type: NAAAAC; PAM sequence: AAAAAC
tgaagaacattttgatgttg

SEQ ID NO: 6771 - DNA, 20 bp, Artificial Sequence
  Description of Artificial Sequence: Synthetic oligonucleotide
  Target: LAMA2; (-) strand; PAM type: NAAAAC; PAM sequence: CAAAAC
tttgaaatttacaaacaaaa

SEQ ID NO: 6772 - DNA, 20 bp, Artificial Sequence
  Description of Artificial Sequence: Synthetic oligonucleotide
  Target: LAMA2; (-) strand; PAM type: NAAAAC; PAM sequence: CAAAAC
tgtcttttgaaatttacaaa

SEQ ID NO: 6773 - DNA, 20 bp, Artificial Sequence
  Description of Artificial Sequence: Synthetic oligonucleotide
  Target: LAMA2; (-) strand; PAM type: NAAAAC; PAM sequence: TAAAAC
tataccagaattcccagttt

SEQ ID NO: 6774 - DNA, 20 bp, Artificial Sequence
  Description of Artificial Sequence: Synthetic oligonucleotide
  Target: LAMA2; (-) strand; PAM type: NAAAAC; PAM sequence: CAAAAC
cagctatttcctatctactc

SEQ ID NO: 6775 - DNA, 20 bp, Artificial Sequence
  Description of Artificial Sequence: Synthetic oligonucleotide
  Target: LAMA2; (-) strand; PAM type: NAAAAC; PAM sequence: GAAAAC
agcctttcttgttcaaacaa

SEQ ID NO: 6776 - DNA, 20 bp, Artificial Sequence
  Description of Artificial Sequence: Synthetic oligonucleotide
  Target: LAMA2; (-) strand; PAM type: NAAAAC; PAM sequence: GAAAAC
aaaacagaatttttgacatg

SEQ ID NO: 6777 - DNA, 20 bp, Artificial Sequence
  Description of Artificial Sequence: Synthetic oligonucleotide
  Target: LAMA2; (-) strand; PAM type: NAAAAC; PAM sequence: AAAAAC
cctagttccaaagttgttca

SEQ ID NO: 6778 - DNA, 20 bp, Artificial Sequence
  Description of Artificial Sequence: Synthetic oligonucleotide
  Target: LAMA2; (-) strand; PAM type: NAAAAC; PAM sequence: TAAAAC
catgttggctaaatcttaca

SEQ ID NO: 6779 - DNA, 20 bp, Artificial Sequence
  Description of Artificial Sequence: Synthetic oligonucleotide
  Target: LAMA2; (-) strand; PAM type: NAAAAC; PAM sequence: TAAAAC
tctttttcctaaatggaccc

SEQ ID NO: 6780 - DNA, 20 bp, Artificial Sequence
  Description of Artificial Sequence: Synthetic oligonucleotide
  Target: LAMA2; (-) strand; PAM type: NAAAAC; PAM sequence: CAAAAC
ttgtgttgtaattccatttc

SEQ ID NO: 6781 - DNA, 20 bp, Artificial Sequence
  Description of Artificial Sequence: Synthetic oligonucleotide
  Target: LAMA2; (-) strand; PAM type: NAAAAC; PAM sequence: CAAAAC
aatgtaatattcatttagta

SEQ ID NO: 6782 - DNA, 20 bp, Artificial Sequence
  Description of Artificial Sequence: Synthetic oligonucleotide
  Target: LAMA2; (-) strand; PAM type: NAAAAC; PAM sequence: TAAAAC
ggtatttcttttaaacaact

SEQ ID NO: 6783 - DNA, 20 bp, Artificial Sequence
  Description of Artificial Sequence: Synthetic oligonucleotide
  Target: LAMA2; (-) strand; PAM type: NAAAAC; PAM sequence: AAAAAC
aagtgccatcttggaagcat

SEQ ID NO: 6784 - DNA, 20 bp, Artificial Sequence
  Description of Artificial Sequence: Synthetic oligonucleotide
  Target: LAMA2; (-) strand; PAM type: NAAAAC; PAM sequence: TAAAAC
gtctaagagagaagccattt

SEQ ID NO: 6785 - DNA, 20 bp, Artificial Sequence
  Description of Artificial Sequence: Synthetic oligonucleotide
  Target: LAMA2; (-) strand; PAM type: NAAAAC; PAM sequence: AAAAAC
cctgtatcaactaaaaatac

SEQ ID NO: 6786 - DNA, 20 bp, Artificial Sequence
  Description of Artificial Sequence: Synthetic oligonucleotide
  Target: LAMA2; (-) strand; PAM type: NAAAAC; PAM sequence: AAAAAC
ggtaagcctggtaaaaaaaa

SEQ ID NO: 6787 - DNA, 20 bp, Artificial Sequence
  Description of Artificial Sequence: Synthetic oligonucleotide
  Target: LAMA2; (-) strand; PAM type: NAAAAC; PAM sequence: CAAAAC
caaaacaaaacaaaacaaaa

SEQ ID NO: 6788 - DNA, 20 bp, Artificial Sequence
  Description of Artificial Sequence: Synthetic oligonucleotide
  Target: LAMA2; (-) strand; PAM type: NAAAAC; PAM sequence: CAAAAC
caaaacaaaacaaaacaaaa

SEQ ID NO: 6789 - DNA, 20 bp, Artificial Sequence
  Description of Artificial Sequence: Synthetic oligonucleotide
  Target: LAMA2; (-) strand; PAM type: NAAAAC; PAM sequence: CAAAAC
caaaacaaaacaaaacaaaa

SEQ ID NO: 6790 - DNA, 20 bp, Artificial Sequence
  Description of Artificial Sequence: Synthetic oligonucleotide
  Target: LAMA2; (-) strand; PAM type: NAAAAC; PAM sequence: CAAAAC
caaaacaaaacaaaacaaaa

SEQ ID NO: 6791 - DNA, 20 bp, Artificial Sequence
  Description of Artificial Sequence: Synthetic oligonucleotide
  Target: LAMA2; (-) strand; PAM type: NAAAAC; PAM sequence: CAAAAC
caaaacaaaacaaaacaaaa

SEQ ID NO: 6792 - DNA, 20 bp, Artificial Sequence
  Description of Artificial Sequence: Synthetic oligonucleotide
  Target: LAMA2; (-) strand; PAM type: NAAAAC; PAM sequence: CAAAAC
catgtcaaaacaaaacaaaa

SEQ ID NO: 6793 - DNA, 20 bp, Artificial Sequence
  Description of Artificial Sequence: Synthetic oligonucleotide
  Target: LAMA2; (-) strand; PAM type: NAAAAC; PAM sequence: CAAAAC
gactccatgtcaaaacaaaa

SEQ ID NO: 6794 - DNA, 20 bp, Artificial Sequence
  Description of Artificial Sequence: Synthetic oligonucleotide
  Target: LAMA2; (-) strand; PAM type: NAAAAC; PAM sequence: CAAAAC
agtgagactccatgtcaaaa

SEQ ID NO: 6795 - DNA, 20 bp, Artificial Sequence
  Description of Artificial Sequence: Synthetic oligonucleotide
  Target: LAMA2; (-) strand; PAM type: NAAAAC; PAM sequence: CAAAAC
gacaaagtgagactccatgt

SEQ ID NO: 6796 - DNA, 20 bp, Artificial Sequence
  Description of Artificial Sequence: Synthetic oligonucleotide
  Target: LAMA2; (-) strand; PAM type: NAAAAC; PAM sequence: AAAAAC
taataaatcagttttgttta

SEQ ID NO: 6797 - DNA, 20 bp, Artificial Sequence
  Description of Artificial Sequence: Synthetic oligonucleotide
  Target: LAMA2; (-) strand; PAM type: NAAAAC; PAM sequence: CAAAAC
aggtgagtgaaaatgaattg

SEQ ID NO: 6798 - DNA, 20 bp, Artificial Sequence
  Description of Artificial Sequence: Synthetic oligonucleotide
  Target: LAMA2; (-) strand; PAM type: NAAAAC; PAM sequence: CAAAAC
caacaagatagcctagaaac

SEQ ID NO: 6799 - DNA, 20 bp, Artificial Sequence
  Description of Artificial Sequence: Synthetic oligonucleotide
  Target: LAMA2; (-) strand; PAM type: NAAAAC; PAM sequence: GAAAAC
tgtaatttgcacatttggaa

SEQ ID NO: 6800 - DNA, 20 bp, Artificial Sequence
  Description of Artificial Sequence: Synthetic oligonucleotide
  Target: LAMA2; (-) strand; PAM type: NAAAAC; PAM sequence: AAAAAC
cagatactttgatctttaaa

SEQ ID NO: 6801 - DNA, 20 bp, Artificial Sequence
  Description of Artificial Sequence: Synthetic oligonucleotide
  Target: LAMA2; (-) strand; PAM type: NAAAAC; PAM sequence: AAAAAC
ctgatacttgtggtaaagat

SEQ ID NO: 6802 - DNA, 20 bp, Artificial Sequence
  Description of Artificial Sequence: Synthetic oligonucleotide
  Target: LAMA2; (-) strand; PAM type: NAAAAC; PAM sequence: AAAAAC
aatctagttcagagaaatac

SEQ ID NO: 6803 - DNA, 20 bp, Artificial Sequence
  Description of Artificial Sequence: Synthetic oligonucleotide
  Target: LAMA2; (-) strand; PAM type: NAAAAC; PAM sequence: GAAAAC
aacagggagttgagaattgg

SEQ ID NO: 6804 - DNA, 20 bp, Artificial Sequence
  Description of Artificial Sequence: Synthetic oligonucleotide
  Target: LAMA2; (-) strand; PAM type: NAAAAC; PAM sequence: AAAAAC
atgcacacacacttttgctg

SEQ ID NO: 6805 - DNA, 20 bp, Artificial Sequence
  Description of Artificial Sequence: Synthetic oligonucleotide
  Target: LAMA2; (-) strand; PAM type: NAAAAC; PAM sequence: CAAAAC
tttgagacaagcagtcataa

SEQ ID NO: 6806 - DNA, 20 bp, Artificial Sequence
  Description of Artificial Sequence: Synthetic oligonucleotide
  Target: LAMA2; (-) strand; PAM type: NAAAAC; PAM sequence: GAAAAC
ttgtttttaagaatttaaga

SEQ ID NO: 6807 - DNA, 20 bp, Artificial Sequence
  Description of Artificial Sequence: Synthetic oligonucleotide
  Target: LAMA2; (-) strand; PAM type: NAAAAC; PAM sequence: TAAAAC
tttcataaatgcaagttaag

SEQ ID NO: 6808 - DNA, 20 bp, Artificial Sequence
  Description of Artificial Sequence: Synthetic oligonucleotide
  Target: LAMA2; (-) strand; PAM type: NAAAAC; PAM sequence: CAAAAC
actgatgccacagataaaga

SEQ ID NO: 6809 - DNA, 20 bp, Artificial Sequence
  Description of Artificial Sequence: Synthetic oligonucleotide
  Target: LAMA2; (-) strand; PAM type: NAAAAC; PAM sequence: AAAAAC
aactaaaacaagaatataca

SEQ ID NO: 6810 - DNA, 20 bp, Artificial Sequence
  Description of Artificial Sequence: Synthetic oligonucleotide
  Target: LAMA2; (-) strand; PAM type: NAAAAC; PAM sequence: TAAAAC
cactttgctcttgaggcaac

SEQ ID NO: 6811 - DNA, 20 bp, Artificial Sequence
  Description of Artificial Sequence: Synthetic oligonucleotide
  Target: LAMA2; (-) strand; PAM type: NAAAAC; PAM sequence: AAAAAC
cagaagatgaggtatactta

SEQ ID NO: 6812 - DNA, 20 bp, Artificial Sequence
  Description of Artificial Sequence: Synthetic oligonucleotide
  Target: LAMA2; (-) strand; PAM type: NAAAAC; PAM sequence: AAAAAC
aagagcaacttgagaacttt

SEQ ID NO: 6813 - DNA, 20 bp, Artificial Sequence
  Description of Artificial Sequence: Synthetic oligonucleotide
  Target: LAMA2; (-) strand; PAM type: NAAAAC; PAM sequence: AAAAAC
gcaagaagcctccttctatg

SEQ ID NO: 6814 - DNA, 20 bp, Artificial Sequence
  Description of Artificial Sequence: Synthetic oligonucleotide
  Target: LAMA2; (-) strand; PAM type: NAAAAC; PAM sequence: GAAAAC
ggtttttagaacacacataa

SEQ ID NO: 6815 - DNA, 20 bp, Artificial Sequence
  Description of Artificial Sequence: Synthetic oligonucleotide
  Target: LAMA2; (-) strand; PAM type: NAAAAC; PAM sequence: AAAAAC
atttactcagattatctggg

SEQ ID NO: 6816 - DNA, 20 bp, Artificial Sequence
  Description of Artificial Sequence: Synthetic oligonucleotide
  Target: LAMA2; (-) strand; PAM type: NAAAAC; PAM sequence: AAAAAC
attctggtgcctacaacttt

SEQ ID NO: 6817 - DNA, 20 bp, Artificial Sequence
  Description of Artificial Sequence: Synthetic oligonucleotide
  Target: LAMA2; (-) strand; PAM type: NAAAAC; PAM sequence: AAAAAC
cttacctttgcaaattttat

SEQ ID NO: 6818 - DNA, 20 bp, Artificial Sequence
  Description of Artificial Sequence: Synthetic oligonucleotide
  Target: LAMA2; (-) strand; PAM type: NAAAAC; PAM sequence: AAAAAC
tgaggtactcacagacacaa

SEQ ID NO: 6819 - DNA, 20 bp, Artificial Sequence
  Description of Artificial Sequence: Synthetic oligonucleotide
  Target: LAMA2; (-) strand; PAM type: NAAAAC; PAM sequence: TAAAAC
aaaaaaaatcctgtaagaga

SEQ ID NO: 6820 - DNA, 20 bp, Artificial Sequence
  Description of Artificial Sequence: Synthetic oligonucleotide
  Target: LAMA2; (-) strand; PAM type: NAAAAC; PAM sequence: CAAAAC
attttgtttaagattattga

SEQ ID NO: 6821 - DNA, 20 bp, Artificial Sequence
  Description of Artificial Sequence: Synthetic oligonucleotide
  Target: LAMA2; (-) strand; PAM type: NAAAAC; PAM sequence: CAAAAC
acgtgaatctctgcaaccta

SEQ ID NO: 6822 - DNA, 20 bp, Artificial Sequence
  Description of Artificial Sequence: Synthetic oligonucleotide
  Target: LAMA2; (-) strand; PAM type: NAAAAC; PAM sequence: AAAAAC
attcacacttgttcttttct

SEQ ID NO: 6823 - DNA, 20 bp, Artificial Sequence
  Description of Artificial Sequence: Synthetic oligonucleotide
  Target: LAMA2; (-) strand; PAM type: NAAAAC; PAM sequence: AAAAAC
taccgttatagggtagaaaa

SEQ ID NO: 6824 - DNA, 20 bp, Artificial Sequence
  Description of Artificial Sequence: Synthetic oligonucleotide
  Target: LAMA2; (-) strand; PAM type: NAAAAC; PAM sequence: TAAAAC
cacagctcaaaaagatacac

SEQ ID NO: 6825 - DNA, 20 bp, Artificial Sequence
  Description of Artificial Sequence: Synthetic oligonucleotide
  Target: LAMA2; (-) strand; PAM type: NAAAAC; PAM sequence: CAAAAC
gtgtgtaattagagaactca

SEQ ID NO: 6826 - DNA, 20 bp, Artificial Sequence
  Description of Artificial Sequence: Synthetic oligonucleotide
  Target: LAMA2; (-) strand; PAM type: NAAAAC; PAM sequence: AAAAAC
agggttggggctgacctgct

SEQ ID NO: 6827 - DNA, 20 bp, Artificial Sequence
  Description of Artificial Sequence: Synthetic oligonucleotide
  Target: LAMA2; (-) strand; PAM type: NAAAAC; PAM sequence: TAAAAC
attgaataaatgcaaatttc

SEQ ID NO: 6828 - DNA, 20 bp, Artificial Sequence
  Description of Artificial Sequence: Synthetic oligonucleotide
  Target: LAMA2; (-) strand; PAM type: NAAAAC; PAM sequence: GAAAAC
ccagttcatttaattcatta

SEQ ID NO: 6829 - DNA, 20 bp, Artificial Sequence
  Description of Artificial Sequence: Synthetic oligonucleotide
  Target: LAMA2; (-) strand; PAM type: NAAAAC; PAM sequence: CAAAAC
tcctatgtcaggcacaaact

SEQ ID NO: 6830 - DNA, 20 bp, Artificial Sequence
  Description of Artificial Sequence: Synthetic oligonucleotide
  Target: LAMA2; (-) strand; PAM type: NAAAAC; PAM sequence: AAAAAC
gccaccgtgctagaataagt

SEQ ID NO: 6831 - DNA, 20 bp, Artificial Sequence
  Description of Artificial Sequence: Synthetic oligonucleotide
  Target: LAMA2; (-) strand; PAM type: NAAAAC; PAM sequence: GAAAAC
cgtaaaatgtgagttcattt

SEQ ID NO: 6832 - DNA, 20 bp, Artificial Sequence
  Description of Artificial Sequence: Synthetic oligonucleotide
  Target: LAMA2; (-) strand; PAM type: NAAAAC; PAM sequence: AAAAAC
ctatattgcattattactgt

SEQ ID NO: 6833 - DNA, 20 bp, Artificial Sequence
  Description of Artificial Sequence: Synthetic oligonucleotide
  Target: LAMA2; (-) strand; PAM type: NAAAAC; PAM sequence: TAAAAC
tacctgcttatgtgatcaga

SEQ ID NO: 6834 - DNA, 20 bp, Artificial Sequence
  Description of Artificial Sequence: Synthetic oligonucleotide
  Target: LAMA2; (-) strand; PAM type: NAAAAC; PAM sequence: TAAAAC
tatgatatcacaccctttct

SEQ ID NO: 6835 - DNA, 20 bp, Artificial Sequence
  Description of Artificial Sequence: Synthetic oligonucleotide
  Target: LAMA2; (-) strand; PAM type: NAAAAC; PAM sequence: TAAAAC
tgctgtagttacagtaaacc

SEQ ID NO: 6836 - DNA, 20 bp, Artificial Sequence
  Description of Artificial Sequence: Synthetic oligonucleotide
  Target: LAMA2; (-) strand; PAM type: NAAAAC; PAM sequence: AAAAAC
atatatgagaagacatgtgg

SEQ ID NO: 6837 - DNA, 20 bp, Artificial Sequence
  Description of Artificial Sequence: Synthetic oligonucleotide
  Target: LAMA2; (-) strand; PAM type: NAAAAC; PAM sequence: TAAAAC
tctaatatctgtcctatttt

SEQ ID NO: 6838 - DNA, 20 bp, Artificial Sequence
  Description of Artificial Sequence: Synthetic oligonucleotide
  Target: LAMA2; (-) strand; PAM type: NAAAAC; PAM sequence: TAAAAC
ctagttgagaataattcata

SEQ ID NO: 6839 - DNA, 20 bp, Artificial Sequence
  Description of Artificial Sequence: Synthetic oligonucleotide
  Target: LAMA2; (-) strand; PAM type: NAAAAC; PAM sequence: GAAAAC
atttttagaaatcattctaa

SEQ ID NO: 6840 - DNA, 20 bp, Artificial Sequence
  Description of Artificial Sequence: Synthetic oligonucleotide
  Target: LAMA2; (-) strand; PAM type: NAAAAC; PAM sequence: TAAAAC
gctaaaagaaaatagattta

SEQ ID NO: 6841 - DNA, 20 bp, Artificial Sequence
  Description of Artificial Sequence: Synthetic oligonucleotide
  Target: LAMA2; (-) strand; PAM type: NAAAAC; PAM sequence: AAAAAC
acctcaaaccagacttttgt

SEQ ID NO: 6842 - DNA, 20 bp, Artificial Sequence
  Description of Artificial Sequence: Synthetic oligonucleotide
  Target: LAMA2; (-) strand; PAM type: NAAAAC; PAM sequence: GAAAAC
ttcagaatcagtgttctttg

SEQ ID NO: 6843 - DNA, 20 bp, Artificial Sequence
  Description of Artificial Sequence: Synthetic oligonucleotide
  Target: LAMA2; (-) strand; PAM type: NAAAAC; PAM sequence: TAAAAC
gagcatagtggtcatttaat

SEQ ID NO: 6844 - DNA, 20 bp, Artificial Sequence
  Description of Artificial Sequence: Synthetic oligonucleotide
  Target: LAMA2; (-) strand; PAM type: NAAAAC; PAM sequence: AAAAAC
attaaacaaaacaaaaaatt

SEQ ID NO: 6845 - DNA, 20 bp, Artificial Sequence
  Description of Artificial Sequence: Synthetic oligonucleotide
  Target: LAMA2; (-) strand; PAM type: NAAAAC; PAM sequence: CAAAAC
aaaataccaaactaattaaa

SEQ ID NO: 6846 - DNA, 20 bp, Artificial Sequence
  Description of Artificial Sequence: Synthetic oligonucleotide
  Target: LAMA2; (-) strand; PAM type: NAAAAC; PAM sequence: AAAAAC
caatgctgtatcatgaaagt

SEQ ID NO: 6847 - DNA, 20 bp, Artificial Sequence
  Description of Artificial Sequence: Synthetic oligonucleotide
  Target: LAMA2; (-) strand; PAM type: NAAAAC; PAM sequence: TAAAAC
ataattacattttcatttag

SEQ ID NO: 6848 - DNA, 20 bp, Artificial Sequence
  Description of Artificial Sequence: Synthetic oligonucleotide
  Target: LAMA2; (-) strand; PAM type: NAAAAC; PAM sequence: AAAAAC
aggaaaaaaaaaacaaaaat

SEQ ID NO: 6849 - DNA, 20 bp, Artificial Sequence
  Description of Artificial Sequence: Synthetic oligonucleotide
  Target: LAMA2; (-) strand; PAM type: NAAAAC; PAM sequence: AAAAAC
ataacgggaaagaggaaaaa

SEQ ID NO: 6850 - DNA, 20 bp, Artificial Sequence
  Description of Artificial Sequence: Synthetic oligonucleotide
  Target: LAMA2; (-) strand; PAM type: NAAAAC; PAM sequence: CAAAAC
acagctgggctctgaaatgc

SEQ ID NO: 6851 - DNA, 20 bp, Artificial Sequence
  Description of Artificial Sequence: Synthetic oligonucleotide
  Target: LAMA2; (-) strand; PAM type: NAAAAC; PAM sequence: TAAAAC
gtcttacaactgtatcatga

SEQ ID NO: 6852 - DNA, 20 bp, Artificial Sequence
  Description of Artificial Sequence: Synthetic oligonucleotide
  Target: LAMA2; (-) strand; PAM type: NAAAAC; PAM sequence: AAAAAC
gcatgaggaaaaacaggtgg

SEQ ID NO: 6853 - DNA, 20 bp, Artificial Sequence
  Description of Artificial Sequence: Synthetic oligonucleotide
  Target: LAMA2; (-) strand; PAM type: NAAAAC; PAM sequence: AAAAAC
gaaaaacacatggcatgagg

SEQ ID NO: 6854 - DNA, 20 bp, Artificial Sequence
  Description of Artificial Sequence: Synthetic oligonucleotide
  Target: LAMA2; (-) strand; PAM type: NAAAAC; PAM sequence: AAAAAC
ttcctttttttatcttaatg

SEQ ID NO: 6855 - DNA, 20 bp, Artificial Sequence
  Description of Artificial Sequence: Synthetic oligonucleotide
  Target: LAMA2; (-) strand; PAM type: NAAAAC; PAM sequence: AAAAAC
tggtggtaatcagcatcggt

SEQ ID NO: 6856 - DNA, 20 bp, Artificial Sequence
  Description of Artificial Sequence: Synthetic oligonucleotide
  Target: LAMA2; (-) strand; PAM type: NAAAAC; PAM sequence: AAAAAC
aaaataaagcaaccaaatgc

SEQ ID NO: 6857 - DNA, 20 bp, Artificial Sequence
  Description of Artificial Sequence: Synthetic oligonucleotide
  Target: LAMA2; (-) strand; PAM type: NAAAAC; PAM sequence: AAAAAC
cttttggattatatagtcta

SEQ ID NO: 6858 - DNA, 20 bp, Artificial Sequence
  Description of Artificial Sequence: Synthetic oligonucleotide
  Target: LAMA2; (-) strand; PAM type: NAAAAC; PAM sequence: TAAAAC
atctctttaaggcttttaag

SEQ ID NO: 6859 - DNA, 20 bp, Artificial Sequence
  Description of Artificial Sequence: Synthetic oligonucleotide
  Target: LAMA2; (-) strand; PAM type: NAAAAC; PAM sequence: GAAAAC
aaagttagaaaaaaaaatct

SEQ ID NO: 6860 - DNA, 20 bp, Artificial Sequence
  Description of Artificial Sequence: Synthetic oligonucleotide
  Target: LAMA2; (-) strand; PAM type: NAAAAC; PAM sequence: AAAAAC
ctatataccaaaaagttttt

SEQ ID NO: 6861 - DNA, 20 bp, Artificial Sequence
  Description of Artificial Sequence: Synthetic oligonucleotide
  Target: LAMA2; (-) strand; PAM type: NAAAAC; PAM sequence: AAAAAC
aatgtgtttagagaactatc

SEQ ID NO: 6862 - DNA, 20 bp, Artificial Sequence
  Description of Artificial Sequence: Synthetic oligonucleotide
  Target: LAMA2; (-) strand; PAM type: NAAAAC; PAM sequence: AAAAAC
gtagtgttggaaaaaaagag

SEQ ID NO: 6863 - DNA, 20 bp, Artificial Sequence
  Description of Artificial Sequence: Synthetic oligonucleotide
  Target: LAMA2; (-) strand; PAM type: NAAAAC; PAM sequence: AAAAAC
atatttaacgttttcatttt

SEQ ID NO: 6864 - DNA, 20 bp, Artificial Sequence
  Description of Artificial Sequence: Synthetic oligonucleotide
  Target: LAMA2; (-) strand; PAM type: NAAAAC; PAM sequence: TAAAAC
ttgaagattaaaattctcag

SEQ ID NO: 6865 - DNA, 20 bp, Artificial Sequence
  Description of Artificial Sequence: Synthetic oligonucleotide
  Target: LAMA2; (-) strand; PAM type: NAAAAC; PAM sequence: TAAAAC
ggagttttagatagttcaga

SEQ ID NO: 6866 - DNA, 20 bp, Artificial Sequence
  Description of Artificial Sequence: Synthetic oligonucleotide
  Target: LAMA2; (-) strand; PAM type: NAAAAC; PAM sequence: TAAAAC
gtccttgctcagtataaaat

SEQ ID NO: 6867 - DNA, 20 bp, Artificial Sequence
  Description of Artificial Sequence: Synthetic oligonucleotide
  Target: LAMA2; (-) strand; PAM type: NAAAAC; PAM sequence: TAAAAC
gaccaaaccttaaaaataaa

SEQ ID NO: 6868 - DNA, 20 bp, Artificial Sequence
  Description of Artificial Sequence: Synthetic oligonucleotide
  Target: LAMA2; (-) strand; PAM type: NAAAAC; PAM sequence: GAAAAC
attgtccctaagtttccttt

SEQ ID NO: 6869 - DNA, 20 bp, Artificial Sequence
  Description of Artificial Sequence: Synthetic oligonucleotide
  Target: LAMA2; (-) strand; PAM type: NAAAAC; PAM sequence: GAAAAC
atcataggtttagaaagcag

SEQ ID NO: 6870 - DNA, 20 bp, Artificial Sequence
  Description of Artificial Sequence: Synthetic oligonucleotide
  Target: LAMA2; (-) strand; PAM type: NAAAAC; PAM sequence: CAAAAC
tggcacaggggagagctcca

SEQ ID NO: 6871 - DNA, 20 bp, Artificial Sequence
  Description of Artificial Sequence: Synthetic oligonucleotide
  Target: LAMA2; (-) strand; PAM type: NAAAAC; PAM sequence: AAAAAC
ctatgaaccctttcattgag

SEQ ID NO: 6872 - DNA, 20 bp, Artificial Sequence
  Description of Artificial Sequence: Synthetic oligonucleotide
  Target: LAMA2; (-) strand; PAM type: NAAAAC; PAM sequence: TAAAAC
tacatactaaaattgatttt

SEQ ID NO: 6873 - DNA, 20 bp, Artificial Sequence
  Description of Artificial Sequence: Synthetic oligonucleotide
  Target: LAMA2; (-) strand; PAM type: NAAAAC; PAM sequence: CAAAAC
aacatgatagctccacaata

SEQ ID NO: 6874 - DNA, 20 bp, Artificial Sequence
  Description of Artificial Sequence: Synthetic oligonucleotide
  Target: LAMA2; (-) strand; PAM type: NAAAAC; PAM sequence: TAAAAC
gatatgagttattaaaatgt

SEQ ID NO: 6875 - DNA, 20 bp, Artificial Sequence
  Description of Artificial Sequence: Synthetic oligonucleotide
  Target: LAMA2; (-) strand; PAM type: NAAAAC; PAM sequence: TAAAAC
aaaccgttagctttgaaata

SEQ ID NO: 6876 - DNA, 20 bp, Artificial Sequence
  Description of Artificial Sequence: Synthetic oligonucleotide
  Target: LAMA2; (-) strand; PAM type: NAAAAC; PAM sequence: CAAAAC
acaaataactctatgggtat

SEQ ID NO: 6877 - DNA, 20 bp, Artificial Sequence
  Description of Artificial Sequence: Synthetic oligonucleotide
  Target: LAMA2; (-) strand; PAM type: NAAAAC; PAM sequence: GAAAAC
tgctcaccatctgtcaaagg

SEQ ID NO: 6878 - DNA, 20 bp, Artificial Sequence
  Description of Artificial Sequence: Synthetic oligonucleotide
  Target: LAMA2; (-) strand; PAM type: NAAAAC; PAM sequence: TAAAAC
tgcgttggtcctctaactta

SEQ ID NO: 6879 - DNA, 20 bp, Artificial Sequence
  Description of Artificial Sequence: Synthetic oligonucleotide
  Target: LAMA2; (-) strand; PAM type: NAAAAC; PAM sequence: GAAAAC
ttattttctcaaacggtttt

SEQ ID NO: 6880 - DNA, 20 bp, Artificial Sequence
  Description of Artificial Sequence: Synthetic oligonucleotide
  Target: LAMA2; (-) strand; PAM type: NAAAAC; PAM sequence: AAAAAC
tacctaataataataataat

SEQ ID NO: 6881 - DNA, 20 bp, Artificial Sequence
  Description of Artificial Sequence: Synthetic oligonucleotide
  Target: LAMA2; (-) strand; PAM type: NAAAAC; PAM sequence: CAAAAC
ctgtaattaacaatgaatgg

SEQ ID NO: 6882 - DNA, 20 bp, Artificial Sequence
  Description of Artificial Sequence: Synthetic oligonucleotide
  Target: LAMA2; (-) strand; PAM type: NAAAAC; PAM sequence: GAAAAC
tcacatacattcagaacaat

SEQ ID NO: 6883 - DNA, 20 bp, Artificial Sequence
  Description of Artificial Sequence: Synthetic oligonucleotide
  Target: LAMA2; (-) strand; PAM type: NAAAAC; PAM sequence: AAAAAC
gaagaaagctttcccagaag

SEQ ID NO: 6884 - DNA, 20 bp, Artificial Sequence
  Description of Artificial Sequence: Synthetic oligonucleotide
  Target: LAMA2; (-) strand; PAM type: NAAAAC; PAM sequence: TAAAAC
tgtgggtttaagattttttt

SEQ ID NO: 6885 - DNA, 20 bp, Artificial Sequence
  Description of Artificial Sequence: Synthetic oligonucleotide
  Target: LAMA2; (-) strand; PAM type: NAAAAC; PAM sequence: GAAAAC
acttaaaaagggcattgcta

SEQ ID NO: 6886 - DNA, 20 bp, Artificial Sequence
  Description of Artificial Sequence: Synthetic oligonucleotide
  Target: LAMA2; (-) strand; PAM type: NAAAAC; PAM sequence: GAAAAC
ttcctgagacgagaatttca

SEQ ID NO: 6887 - DNA, 20 bp, Artificial Sequence
  Description of Artificial Sequence: Synthetic oligonucleotide
  Target: LAMA2; (-) strand; PAM type: NAAAAC; PAM sequence: CAAAAC
actatggaaaaatgtgttgg

SEQ ID NO: 6888 - DNA, 20 bp, Artificial Sequence
  Description of Artificial Sequence: Synthetic oligonucleotide
  Target: LAMA2; (-) strand; PAM type: NAAAAC; PAM sequence: AAAAAC
aatggatttcgctgtggctc

SEQ ID NO: 6889 - DNA, 20 bp, Artificial Sequence
  Description of Artificial Sequence: Synthetic oligonucleotide
  Target: LAMA2; (-) strand; PAM type: NAAAAC; PAM sequence: AAAAAC
aaaccacatgtagaactgga

SEQ ID NO: 6890 - DNA, 20 bp, Artificial Sequence
  Description of Artificial Sequence: Synthetic oligonucleotide
  Target: LAMA2; (-) strand; PAM type: NAAAAC; PAM sequence: TAAAAC
tacttgactttataaagaag

SEQ ID NO: 6891 - DNA, 20 bp, Artificial Sequence
  Description of Artificial Sequence: Synthetic oligonucleotide
  Target: LAMA2; (-) strand; PAM type: NAAAAC; PAM sequence: GAAAAC
acttacttcatatctggaga

SEQ ID NO: 6892 - DNA, 20 bp, Artificial Sequence
  Description of Artificial Sequence: Synthetic oligonucleotide
  Target: LAMA2; (-) strand; PAM type: NAAAAC; PAM sequence: GAAAAC
gggatcatgaatggattact

SEQ ID NO: 6893 - DNA, 20 bp, Artificial Sequence
  Description of Artificial Sequence: Synthetic oligonucleotide
  Target: LAMA2; (-) strand; PAM type: NAAAAC; PAM sequence: AAAAAC
gtggtgtattactagtttct

SEQ ID NO: 6894 - DNA, 20 bp, Artificial Sequence
  Description of Artificial Sequence: Synthetic oligonucleotide
  Target: LAMA2; (-) strand; PAM type: NAAAAC; PAM sequence: TAAAAC
attgaacaaacattatcttt

SEQ ID NO: 6895 - DNA, 20 bp, Artificial Sequence
  Description of Artificial Sequence: Synthetic oligonucleotide
  Target: LAMA2; (-) strand; PAM type: NAAAAC; PAM sequence: AAAAAC
gagtatagtttctaatagtg

SEQ ID NO: 6896 - DNA, 20 bp, Artificial Sequence
  Description of Artificial Sequence: Synthetic oligonucleotide
  Target: LAMA2; (-) strand; PAM type: NAAAAC; PAM sequence: GAAAAC
acaattcaggtatgtgtatt

SEQ ID NO: 6897 - DNA, 20 bp, Artificial Sequence
  Description of Artificial Sequence: Synthetic oligonucleotide
  Target: LAMA2; (-) strand; PAM type: NAAAAC; PAM sequence: TAAAAC
gcaatataaataaatgtaaa

SEQ ID NO: 6898 - DNA, 20 bp, Artificial Sequence
  Description of Artificial Sequence: Synthetic oligonucleotide
  Target: LAMA2; (-) strand; PAM type: NAAAAC; PAM sequence: GAAAAC
tgttttctaattcttcaact

SEQ ID NO: 6899 - DNA, 20 bp, Artificial Sequence
  Description of Artificial Sequence: Synthetic oligonucleotide
  Target: LAMA2; (-) strand; PAM type: NAAAAC; PAM sequence: TAAAAC
gatatatctattaaaaacat

SEQ ID NO: 6900 - DNA, 20 bp, Artificial Sequence
  Description of Artificial Sequence: Synthetic oligonucleotide
  Target: LAMA2; (-) strand; PAM type: NAAAAC; PAM sequence: AAAAAC
agtagcatgatatatctatt

SEQ ID NO: 6901 - DNA, 20 bp, Artificial Sequence
  Description of Artificial Sequence: Synthetic oligonucleotide
  Target: LAMA2; (-) strand; PAM type: NAAAAC; PAM sequence: TAAAAC
tgctctgttttcggaaaagt

SEQ ID NO: 6902 - DNA, 20 bp, Artificial Sequence
  Description of Artificial Sequence: Synthetic oligonucleotide
  Target: LAMA2; (-) strand; PAM type: NAAAAC; PAM sequence: AAAAAC
aagagtgaaactccatctca

SEQ ID NO: 6903 - DNA, 20 bp, Artificial Sequence
  Description of Artificial Sequence: Synthetic oligonucleotide
  Target: LAMA2; (-) strand; PAM type: NAAAAC; PAM sequence: TAAAAC
acataagaaaggaaacaaat

SEQ ID NO: 6904 - DNA, 20 bp, Artificial Sequence
  Description of Artificial Sequence: Synthetic oligonucleotide
  Target: LAMA2; (-) strand; PAM type: NAAAAC; PAM sequence: TAAAAC
atttgttacaaaataaactg

SEQ ID NO: 6905 - DNA, 20 bp, Artificial Sequence
  Description of Artificial Sequence: Synthetic oligonucleotide
  Target: LAMA2; (-) strand; PAM type: NAAAAC; PAM sequence: CAAAAC
gagatttatattacatttat

SEQ ID NO: 6906 - DNA, 20 bp, Artificial Sequence
  Description of Artificial Sequence: Synthetic oligonucleotide
  Target: LAMA2; (-) strand; PAM type: NAAAAC; PAM sequence: CAAAAC
caccaaattggtaacggggc

SEQ ID NO: 6907 - DNA, 20 bp, Artificial Sequence
  Description of Artificial Sequence: Synthetic oligonucleotide
  Target: LAMA2; (-) strand; PAM type: NAAAAC; PAM sequence: TAAAAC
cactaatctctcaaatgtgt

SEQ ID NO: 6908 - DNA, 20 bp, Artificial Sequence
  Description of Artificial Sequence: Synthetic oligonucleotide
  Target: LAMA2; (-) strand; PAM type: NAAAAC; PAM sequence: AAAAAC
gaacctgtctcaaaaagaaa

SEQ ID NO: 6909 - DNA, 20 bp, Artificial Sequence
  Description of Artificial Sequence: Synthetic oligonucleotide
  Target: LAMA2; (-) strand; PAM type: NAAAAC; PAM sequence: TAAAAC
caggatggatactgttttaa

SEQ ID NO: 6910 - DNA, 20 bp, Artificial Sequence
  Description of Artificial Sequence: Synthetic oligonucleotide
  Target: LAMA2; (-) strand; PAM type: NAAAAC; PAM sequence: TAAAAC
caggcagaagcagtgcttaa

SEQ ID NO: 6911 - DNA, 20 bp, Artificial Sequence
  Description of Artificial Sequence: Synthetic oligonucleotide
  Target: LAMA2; (-) strand; PAM type: NAAAAC; PAM sequence: AAAAAC
ctggtcaagccattttagaa

SEQ ID NO: 6912 - DNA, 20 bp, Artificial Sequence
  Description of Artificial Sequence: Synthetic oligonucleotide
  Target: LAMA2; (-) strand; PAM type: NAAAAC; PAM sequence: CAAAAC
gtagactggacaggtgtatc

SEQ ID NO: 6913 - DNA, 20 bp, Artificial Sequence
  Description of Artificial Sequence: Synthetic oligonucleotide
  Target: LAMA2; (-) strand; PAM type: NAAAAC; PAM sequence: CAAAAC
ccgaaattcacacagctatg

SEQ ID NO: 6914 - DNA, 20 bp, Artificial Sequence
  Description of Artificial Sequence: Synthetic oligonucleotide
  Target: LAMA2; (-) strand; PAM type: NAAAAC; PAM sequence: GAAAAC
aaatttatgtatatttctga

SEQ ID NO: 6915 - DNA, 20 bp, Artificial Sequence
  Description of Artificial Sequence: Synthetic oligonucleotide
  Target: LAMA2; (-) strand; PAM type: NAAAAC; PAM sequence: AAAAAC
tagcgtaattctttaagaat

SEQ ID NO: 6916 - DNA, 20 bp, Artificial Sequence
  Description of Artificial Sequence: Synthetic oligonucleotide
  Target: LAMA2; (-) strand; PAM type: NAAAAC; PAM sequence: AAAAAC
ctgtaaaatacccaggagag

SEQ ID NO: 6917 - DNA, 20 bp, Artificial Sequence
  Description of Artificial Sequence: Synthetic oligonucleotide
  Target: LAMA2; (-) strand; PAM type: NAAAAC; PAM sequence: TAAAAC
tgcattttcataaaggagag

SEQ ID NO: 6918 - DNA, 20 bp, Artificial Sequence
  Description of Artificial Sequence: Synthetic oligonucleotide
  Target: LAMA2; (-) strand; PAM type: NAAAAC; PAM sequence: GAAAAC
cagtttatgggtagatgttt

SEQ ID NO: 6919 - DNA, 20 bp, Artificial Sequence
  Description of Artificial Sequence: Synthetic oligonucleotide
  Target: LAMA2; (-) strand; PAM type: NAAAAC; PAM sequence: AAAAAC
tggtttgggaagtaattttt

SEQ ID NO: 6920 - DNA, 20 bp, Artificial Sequence
  Description of Artificial Sequence: Synthetic oligonucleotide
  Target: LAMA2; (-) strand; PAM type: NAAAAC; PAM sequence: AAAAAC
gtaaagactggctggagtat

SEQ ID NO: 6921 - DNA, 20 bp, Artificial Sequence
  Description of Artificial Sequence: Synthetic oligonucleotide
  Target: LAMA2; (-) strand; PAM type: NAAAAC; PAM sequence: CAAAAC
gacagagcgagactctgtct

SEQ ID NO: 6922 - DNA, 20 bp, Artificial Sequence
  Description of Artificial Sequence: Synthetic oligonucleotide
  Target: LAMA2; (-) strand; PAM type: NAAAAC; PAM sequence: AAAAAC
ctcataatctaatctatcta

SEQ ID NO: 6923 - DNA, 20 bp, Artificial Sequence
  Description of Artificial Sequence: Synthetic oligonucleotide
  Target: LAMA2; (-) strand; PAM type: NAAAAC; PAM sequence: CAAAAC
taaaaaagattaacttgctc

SEQ ID NO: 6924 - DNA, 20 bp, Artificial Sequence
  Description of Artificial Sequence: Synthetic oligonucleotide
  Target: LAMA2; (-) strand; PAM type: NAAAAC; PAM sequence: CAAAAC
attttgtgaatattgattta

SEQ ID NO: 6925 - DNA, 20 bp, Artificial Sequence
  Description of Artificial Sequence: Synthetic oligonucleotide
  Target: LAMA2; (-) strand; PAM type: NAAAAC; PAM sequence: TAAAAC
taagaaaatgcaaatatgca

SEQ ID NO: 6926 - DNA, 20 bp, Artificial Sequence
  Description of Artificial Sequence: Synthetic oligonucleotide
  Target: LAMA2; (-) strand; PAM type: NAAAAC; PAM sequence: CAAAAC
tgttcccctctgagcatttg

SEQ ID NO: 6927 - DNA, 20 bp, Artificial Sequence
  Description of Artificial Sequence: Synthetic oligonucleotide
  Target: LAMA2; (-) strand; PAM type: NAAAAC; PAM sequence: CAAAAC
aagagccttacctgctttgg

SEQ ID NO: 6928 - DNA, 20 bp, Artificial Sequence
  Description of Artificial Sequence: Synthetic oligonucleotide
  Target: LAMA2; (-) strand; PAM type: NAAAAC; PAM sequence: AAAAAC
ctccagaaactggaaggtag

SEQ ID NO: 6929 - DNA, 20 bp, Artificial Sequence
  Description of Artificial Sequence: Synthetic oligonucleotide
  Target: LAMA2; (-) strand; PAM type: NAAAAC; PAM sequence: TAAAAC
taccttcatgaccagtgata

SEQ ID NO: 6930 - DNA, 20 bp, Artificial Sequence
  Description of Artificial Sequence: Synthetic oligonucleotide
  Target: LAMA2; (-) strand; PAM type: NAAAAC; PAM sequence: CAAAAC
agaacagtttggaggttcct

SEQ ID NO: 6931 - DNA, 20 bp, Artificial Sequence
  Description of Artificial Sequence: Synthetic oligonucleotide
  Target: LAMA2; (-) strand; PAM type: NAAAAC; PAM sequence: CAAAAC
atcatcagagaaatgcaaat

SEQ ID NO: 6932 - DNA, 20 bp, Artificial Sequence
  Description of Artificial Sequence: Synthetic oligonucleotide
  Target: LAMA2; (-) strand; PAM type: NAAAAC; PAM sequence: AAAAAC
caaaagaagatattcagatg

SEQ ID NO: 6933 - DNA, 20 bp, Artificial Sequence
  Description of Artificial Sequence: Synthetic oligonucleotide
  Target: LAMA2; (-) strand; PAM type: NAAAAC; PAM sequence: TAAAAC
caactatgaaactattacaa

SEQ ID NO: 6934 - DNA, 20 bp, Artificial Sequence
  Description of Artificial Sequence: Synthetic oligonucleotide
  Target: LAMA2; (-) strand; PAM type: NAAAAC; PAM sequence: GAAAAC
tcttcaataaatggtgcagg

SEQ ID NO: 6935 - DNA, 20 bp, Artificial Sequence
  Description of Artificial Sequence: Synthetic oligonucleotide
  Target: LAMA2; (-) strand; PAM type: NAAAAC; PAM sequence: TAAAAC
ggaaagtacaataaaaacta

SEQ ID NO: 6936 - DNA, 20 bp, Artificial Sequence
  Description of Artificial Sequence: Synthetic oligonucleotide
  Target: LAMA2; (-) strand; PAM type: NAAAAC; PAM sequence: AAAAAC
atcttagaggaaagtacaat

SEQ ID NO: 6937 - DNA, 20 bp, Artificial Sequence
  Description of Artificial Sequence: Synthetic oligonucleotide
  Target: LAMA2; (-) strand; PAM type: NAAAAC; PAM sequence: GAAAAC
ccccagtgattgggtcgctg

SEQ ID NO: 6938 - DNA, 20 bp, Artificial Sequence
  Description of Artificial Sequence: Synthetic oligonucleotide
  Target: LAMA2; (-) strand; PAM type: NAAAAC; PAM sequence: TAAAAC
agctgaattgctctgcaaaa

SEQ ID NO: 6939 - DNA, 20 bp, Artificial Sequence
  Description of Artificial Sequence: Synthetic oligonucleotide
  Target: LAMA2; (-) strand; PAM type: NAAAAC; PAM sequence: AAAAAC
agtctctctgttgggtaaag

SEQ ID NO: 6940 - DNA, 20 bp, Artificial Sequence
  Description of Artificial Sequence: Synthetic oligonucleotide
  Target: LAMA2; (-) strand; PAM type: NAAAAC; PAM sequence: GAAAAC
ttgaagtaatccagaaggat

SEQ ID NO: 6941 - DNA, 20 bp, Artificial Sequence
  Description of Artificial Sequence: Synthetic oligonucleotide
  Target: LAMA2; (-) strand; PAM type: NAAAAC; PAM sequence: GAAAAC
atactggcctacaacatgct

SEQ ID NO: 6942 - DNA, 20 bp, Artificial Sequence
  Description of Artificial Sequence: Synthetic oligonucleotide
  Target: LAMA2; (-) strand; PAM type: NAAAAC; PAM sequence: GAAAAC
tcctatttaataaccaaata

SEQ ID NO: 6943 - DNA, 20 bp, Artificial Sequence
  Description of Artificial Sequence: Synthetic oligonucleotide
  Target: LAMA2; (-) strand; PAM type: NAAAAC; PAM sequence: AAAAAC
gaaagaggaagaaagcaaga

SEQ ID NO: 6944 - DNA, 20 bp, Artificial Sequence
  Description of Artificial Sequence: Synthetic oligonucleotide
  Target: LAMA2; (-) strand; PAM type: NAAAAC; PAM sequence: TAAAAC
aagtatgtttgaaaatttgg

SEQ ID NO: 6945 - DNA, 20 bp, Artificial Sequence
  Description of Artificial Sequence: Synthetic oligonucleotide
  Target: LAMA2; (-) strand; PAM type: NAAAAC; PAM sequence: AAAAAC
acgaaacatattgaaacact

SEQ ID NO: 6946 - DNA, 20 bp, Artificial Sequence
  Description of Artificial Sequence: Synthetic oligonucleotide
  Target: LAMA2; (-) strand; PAM type: NAAAAC; PAM sequence: TAAAAC
gggcatattgaaaaaaattt

SEQ ID NO: 6947 - DNA, 20 bp, Artificial Sequence
  Description of Artificial Sequence: Synthetic oligonucleotide
  Target: LAMA2; (-) strand; PAM type: NAAAAC; PAM sequence: CAAAAC
cacgtaaatataaatgtttt

SEQ ID NO: 6948 - DNA, 20 bp, Artificial Sequence
  Description of Artificial Sequence: Synthetic oligonucleotide
  Target: LAMA2; (-) strand; PAM type: NAAAAC; PAM sequence: TAAAAC
attgaagcaaaagatctttt

SEQ ID NO: 6949 - DNA, 20 bp, Artificial Sequence
  Description of Artificial Sequence: Synthetic oligonucleotide
  Target: LAMA2; (-) strand; PAM type: NAAAAC; PAM sequence: GAAAAC
ttttaatagttataacatat

SEQ ID NO: 6950 - DNA, 20 bp, Artificial Sequence
  Description of Artificial Sequence: Synthetic oligonucleotide
  Target: LAMA2; (-) strand; PAM type: NAAAAC; PAM sequence: CAAAAC
cttttatccttaaaatcaca

SEQ ID NO: 6951 - DNA, 20 bp, Artificial Sequence
  Description of Artificial Sequence: Synthetic oligonucleotide
  Target: LAMA2; (-) strand; PAM type: NAAAAC; PAM sequence: CAAAAC
aatcatgggttaaaggagaa

SEQ ID NO: 6952 - DNA, 20 bp, Artificial Sequence
  Description of Artificial Sequence: Synthetic oligonucleotide
  Target: LAMA2; (-) strand; PAM type: NAAAAC; PAM sequence: AAAAAC
taaagcataggcagtttttt

SEQ ID NO: 6953 - DNA, 20 bp, Artificial Sequence
  Description of Artificial Sequence: Synthetic oligonucleotide
  Target: LAMA2; (-) strand; PAM type: NAAAAC; PAM sequence: AAAAAC
ggaccaggtactagattttt

SEQ ID NO: 6954 - DNA, 20 bp, Artificial Sequence
  Description of Artificial Sequence: Synthetic oligonucleotide
  Target: LAMA2; (-) strand; PAM type: NAAAAC; PAM sequence: CAAAAC
cctcccccctccccccaccc

SEQ ID NO: 6955 - DNA, 20 bp, Artificial Sequence
  Description of Artificial Sequence: Synthetic oligonucleotide
  Target: LAMA2; (-) strand; PAM type: NAAAAC; PAM sequence: TAAAAC
gtagaattctcaaatgacta

SEQ ID NO: 6956 - DNA, 20 bp, Artificial Sequence
  Description of Artificial Sequence: Synthetic oligonucleotide
  Target: LAMA2; (-) strand; PAM type: NAAAAC; PAM sequence: TAAAAC
cagatgtatgtttccacttt

SEQ ID NO: 6957 - DNA, 20 bp, Artificial Sequence
  Description of Artificial Sequence: Synthetic oligonucleotide
  Target: LAMA2; (-) strand; PAM type: NAAAAC; PAM sequence: TAAAAC
gaagaaacttttccctttca

SEQ ID NO: 6958 - DNA, 20 bp, Artificial Sequence
  Description of Artificial Sequence: Synthetic oligonucleotide
  Target: LAMA2; (+) strand; PAM type: NAAAAC; PAM sequence: CAAAAC
acccaaaagacatgtacatt

SEQ ID NO: 6959 - DNA, 20 bp, Artificial Sequence
  Description of Artificial Sequence: Synthetic oligonucleotide
  Target: LAMA2; (+) strand; PAM type: NAAAAC; PAM sequence: GAAAAC
ttaaaattatatggacttaa

SEQ ID NO: 6960 - DNA, 20 bp, Artificial Sequence
  Description of Artificial Sequence: Synthetic oligonucleotide
  Target: LAMA2; (+) strand; PAM type: NAAAAC; PAM sequence: AAAAAC
ttggaaacttgtgtccacac

SEQ ID NO: 6961 - DNA, 20 bp, Artificial Sequence
  Description of Artificial Sequence: Synthetic oligonucleotide
  Target: LAMA2; (+) strand; PAM type: NAAAAC; PAM sequence: CAAAAC
gcagttgtatcaataattgt

SEQ ID NO: 6962 - DNA, 20 bp, Artificial Sequence
  Description of Artificial Sequence: Synthetic oligonucleotide
  Target: LAMA2; (+) strand; PAM type: NAAAAC; PAM sequence: TAAAAC
atatgaccttttggaaaagg

SEQ ID NO: 6963 - DNA, 20 bp, Artificial Sequence
  Description of Artificial Sequence: Synthetic oligonucleotide
  Target: LAMA2; (+) strand; PAM type: NAAAAC; PAM sequence: TAAAAC
aatgtaattataaattacat

SEQ ID NO: 6964 - DNA, 20 bp, Artificial Sequence
  Description of Artificial Sequence: Synthetic oligonucleotide
  Target: LAMA2; (+) strand; PAM type: NAAAAC; PAM sequence: TAAAAC
gctcaactttgttgtgaatc

SEQ ID NO: 6965 - DNA, 20 bp, Artificial Sequence
  Description of Artificial Sequence: Synthetic oligonucleotide
  Target: LAMA2; (+) strand; PAM type: NAAAAC; PAM sequence: TAAAAC
gtaaagataattttgttttg

SEQ ID NO: 6966 - DNA, 20 bp, Artificial Sequence
  Description of Artificial Sequence: Synthetic oligonucleotide
  Target: LAMA2; (+) strand; PAM type: NAAAAC; PAM sequence: TAAAAC
gtgggaggaatgtaaaatta

SEQ ID NO: 6967 - DNA, 20 bp, Artificial Sequence
  Description of Artificial Sequence: Synthetic oligonucleotide
  Target: LAMA2; (+) strand; PAM type: NAAAAC; PAM sequence: CAAAAC
aagcaacatgactatacctc

SEQ ID NO: 6968 - DNA, 20 bp, Artificial Sequence
  Description of Artificial Sequence: Synthetic oligonucleotide
  Target: LAMA2; (+) strand; PAM type: NAAAAC; PAM sequence: GAAAAC
ttattgcaaaaggtcagaaa

SEQ ID NO: 6969 - DNA, 20 bp, Artificial Sequence
  Description of Artificial Sequence: Synthetic oligonucleotide
  Target: LAMA2; (+) strand; PAM type: NAAAAC; PAM sequence: TAAAAC
tcctttttataaatattcaa

SEQ ID NO: 6970 - DNA, 20 bp, Artificial Sequence
  Description of Artificial Sequence: Synthetic oligonucleotide
  Target: LAMA2; (+) strand; PAM type: NAAAAC; PAM sequence: AAAAAC
tctgctattagatgtacctg

SEQ ID NO: 6971 - DNA, 20 bp, Artificial Sequence
  Description of Artificial Sequence: Synthetic oligonucleotide
  Target: LAMA2; (+) strand; PAM type: NAAAAC; PAM sequence: AAAAAC
aggcaaaattagaccaaatt

SEQ ID NO: 6972 - DNA, 20 bp, Artificial Sequence
  Description of Artificial Sequence: Synthetic oligonucleotide
  Target: LAMA2; (+) strand; PAM type: NAAAAC; PAM sequence: GAAAAC
tacatcttaactataaaaaa

SEQ ID NO: 6973 - DNA, 20 bp, Artificial Sequence
  Description of Artificial Sequence: Synthetic oligonucleotide
  Target: LAMA2; (+) strand; PAM type: NAAAAC; PAM sequence: TAAAAC
tcaacatataaatgcttggg

SEQ ID NO: 6974 - DNA, 20 bp, Artificial Sequence
  Description of Artificial Sequence: Synthetic oligonucleotide
  Target: LAMA2; (+) strand; PAM type: NAAAAC; PAM sequence: AAAAAC
gacaaatgggtgtaaaatcc

SEQ ID NO: 6975 - DNA, 20 bp, Artificial Sequence
  Description of Artificial Sequence: Synthetic oligonucleotide
  Target: LAMA2; (+) strand; PAM type: NAAAAC; PAM sequence: AAAAAC
atagtagatgcatcctagaa

SEQ ID NO: 6976 - DNA, 20 bp, Artificial Sequence
  Description of Artificial Sequence: Synthetic oligonucleotide
  Target: LAMA2; (+) strand; PAM type: NAAAAC; PAM sequence: AAAAAC
aaaaaacaaacaaacaaaca

SEQ ID NO: 6977 - DNA, 20 bp, Artificial Sequence
  Description of Artificial Sequence: Synthetic oligonucleotide
  Target: LAMA2; (+) strand; PAM type: NAAAAC; PAM sequence: AAAAAC
aaccactgacctaggccata

SEQ ID NO: 6978 - DNA, 20 bp, Artificial Sequence
  Description of Artificial Sequence: Synthetic oligonucleotide
  Target: LAMA2; (+) strand; PAM type: NAAAAC; PAM sequence: AAAAAC
aggccataaaaaacaaatga

SEQ ID NO: 6979 - DNA, 20 bp, Artificial Sequence
  Description of Artificial Sequence: Synthetic oligonucleotide
  Target: LAMA2; (+) strand; PAM type: NAAAAC; PAM sequence: AAAAAC
aaaacaaatgaaaaaacaac

SEQ ID NO: 6980 - DNA, 20 bp, Artificial Sequence
  Description of Artificial Sequence: Synthetic oligonucleotide
  Target: LAMA2; (+) strand; PAM type: NAAAAC; PAM sequence: GAAAAC
ttctgaaatctttccaagag

SEQ ID NO: 6981 - DNA, 20 bp, Artificial Sequence
  Description of Artificial Sequence: Synthetic oligonucleotide
  Target: LAMA2; (+) strand; PAM type: NAAAAC; PAM sequence: TAAAAC
agaactttgttttcaacttt

SEQ ID NO: 6982 - DNA, 20 bp, Artificial Sequence
  Description of Artificial Sequence: Synthetic oligonucleotide
  Target: LAMA2; (+) strand; PAM type: NAAAAC; PAM sequence: GAAAAC
gcaaacaattctttaagttg

SEQ ID NO: 6983 - DNA, 20 bp, Artificial Sequence
  Description of Artificial Sequence: Synthetic oligonucleotide
  Target: LAMA2; (+) strand; PAM type: NAAAAC; PAM sequence: TAAAAC
aataactttatttcaacaac

SEQ ID NO: 6984 - DNA, 20 bp, Artificial Sequence
  Description of Artificial Sequence: Synthetic oligonucleotide
  Target: LAMA2; (+) strand; PAM type: NAAAAC; PAM sequence: CAAAAC
aaggttggctcacttttaca

SEQ ID NO: 6985 - DNA, 20 bp, Artificial Sequence
  Description of Artificial Sequence: Synthetic oligonucleotide
  Target: LAMA2; (+) strand; PAM type: NAAAAC; PAM sequence: AAAAAC
tcccttctgggatttaaaat

SEQ ID NO: 6986 - DNA, 20 bp, Artificial Sequence
  Description of Artificial Sequence: Synthetic oligonucleotide
  Target: LAMA2; (+) strand; PAM type: NAAAAC; PAM sequence: TAAAAC
catcgtcaattgcacagttc

SEQ ID NO: 6987 - DNA, 20 bp, Artificial Sequence
  Description of Artificial Sequence: Synthetic oligonucleotide
  Target: LAMA2; (+) strand; PAM type: NAAAAC; PAM sequence: CAAAAC
gagggagactctatctcaaa

SEQ ID NO: 6988 - DNA, 20 bp, Artificial Sequence
  Description of Artificial Sequence: Synthetic oligonucleotide
  Target: LAMA2; (+) strand; PAM type: NAAAAC; PAM sequence: CAAAAC
agactctatctcaaacaaaa

SEQ ID NO: 6989 - DNA, 20 bp, Artificial Sequence
  Description of Artificial Sequence: Synthetic oligonucleotide
  Target: LAMA2; (+) strand; PAM type: NAAAAC; PAM sequence: CAAAAC
ctatctcaaacaaaacaaaa

SEQ ID NO: 6990 - DNA, 20 bp, Artificial Sequence
  Description of Artificial Sequence: Synthetic oligonucleotide
  Target: LAMA2; (+) strand; PAM type: NAAAAC; PAM sequence: CAAAAC
tcaaacaaaacaaaacaaaa

SEQ ID NO: 6991 - DNA, 20 bp, Artificial Sequence
  Description of Artificial Sequence: Synthetic oligonucleotide
  Target: LAMA2; (+) strand; PAM type: NAAAAC; PAM sequence: GAAAAC
agctccgtttcagtaaatga

SEQ ID NO: 6992 - DNA, 20 bp, Artificial Sequence
  Description of Artificial Sequence: Synthetic oligonucleotide
  Target: LAMA2; (+) strand; PAM type: NAAAAC; PAM sequence: TAAAAC
atataccaagcagatagaaa

SEQ ID NO: 6993 - DNA, 20 bp, Artificial Sequence
  Description of Artificial Sequence: Synthetic oligonucleotide
  Target: LAMA2; (+) strand; PAM type: NAAAAC; PAM sequence: TAAAAC
attttaaatagtatgcactt

SEQ ID NO: 6994 - DNA, 20 bp, Artificial Sequence
  Description of Artificial Sequence: Synthetic oligonucleotide
  Target: LAMA2; (+) strand; PAM type: NAAAAC; PAM sequence: CAAAAC
catttaggaagatagtaagg

SEQ ID NO: 6995 - DNA, 20 bp, Artificial Sequence
  Description of Artificial Sequence: Synthetic oligonucleotide
  Target: LAMA2; (+) strand; PAM type: NAAAAC; PAM sequence: GAAAAC
ctatgcaaattcctgatgat

SEQ ID NO: 6996 - DNA, 20 bp, Artificial Sequence
  Description of Artificial Sequence: Synthetic oligonucleotide
  Target: LAMA2; (+) strand; PAM type: NAAAAC; PAM sequence: TAAAAC
atatacacacatgtattact

SEQ ID NO: 6997 - DNA, 20 bp, Artificial Sequence
  Description of Artificial Sequence: Synthetic oligonucleotide
  Target: LAMA2; (+) strand; PAM type: NAAAAC; PAM sequence: AAAAAC
aaattccttctgaaaagatg

SEQ ID NO: 6998 - DNA, 20 bp, Artificial Sequence
  Description of Artificial Sequence: Synthetic oligonucleotide
  Target: LAMA2; (+) strand; PAM type: NAAAAC; PAM sequence: AAAAAC
aaaaaccttgacatcttcat

SEQ ID NO: 6999 - DNA, 20 bp, Artificial Sequence
  Description of Artificial Sequence: Synthetic oligonucleotide
  Target: LAMA2; (+) strand; PAM type: NAAAAC; PAM sequence: GAAAAC
atctaaaaattgaatttcta

SEQ ID NO: 7000 - DNA, 20 bp, Artificial Sequence
  Description of Artificial Sequence: Synthetic oligonucleotide
  Target: LAMA2; (+) strand; PAM type: NAAAAC; PAM sequence: TAAAAC
ggtttgtcgtggtacatatg

SEQ ID NO: 7001 - DNA, 20 bp, Artificial Sequence
  Description of Artificial Sequence: Synthetic oligonucleotide
  Target: LAMA2; (+) strand; PAM type: NAAAAC; PAM sequence: TAAAAC
catatgtaaaacactgaata

SEQ ID NO: 7002 - DNA, 20 bp, Artificial Sequence
  Description of Artificial Sequence: Synthetic oligonucleotide
  Target: LAMA2; (+) strand; PAM type: NAAAAC; PAM sequence: AAAAAC
tttatagcttagcctacaat

SEQ ID NO: 7003 - DNA, 20 bp, Artificial Sequence
  Description of Artificial Sequence: Synthetic oligonucleotide
  Target: LAMA2; (+) strand; PAM type: NAAAAC; PAM sequence: GAAAAC
ttggaggtaactgaatcgta

SEQ ID NO: 7004 - DNA, 20 bp, Artificial Sequence
  Description of Artificial Sequence: Synthetic oligonucleotide
  Target: LAMA2; (+) strand; PAM type: NAAAAC; PAM sequence: TAAAAC
tcttctttattttatgagca

SEQ ID NO: 7005 - DNA, 20 bp, Artificial Sequence
  Description of Artificial Sequence: Synthetic oligonucleotide
  Target: LAMA2; (+) strand; PAM type: NAAAAC; PAM sequence: TAAAAC
gctctgtgtgagaagtgatt

SEQ ID NO: 7006 - DNA, 20 bp, Artificial Sequence
  Description of Artificial Sequence: Synthetic oligonucleotide
  Target: LAMA2; (+) strand; PAM type: NAAAAC; PAM sequence: AAAAAC
ttgttgataaactatttttt

SEQ ID NO: 7007 - DNA, 20 bp, Artificial Sequence
  Description of Artificial Sequence: Synthetic oligonucleotide
  Target: LAMA2; (+) strand; PAM type: NAAAAC; PAM sequence: AAAAAC
tgtattaaatctactattaa

SEQ ID NO: 7008 - DNA, 20 bp, Artificial Sequence
  Description of Artificial Sequence: Synthetic oligonucleotide
  Target: LAMA2; (+) strand; PAM type: NAAAAC; PAM sequence: AAAAAC
tactattaaaaaaaccacca

SEQ ID NO: 7009 - DNA, 20 bp, Artificial Sequence
  Description of Artificial Sequence: Synthetic oligonucleotide
  Target: LAMA2; (+) strand; PAM type: NAAAAC; PAM sequence: CAAAAC
ttaaaaaaaccaccaaaaaa

SEQ ID NO: 7010 - DNA, 20 bp, Artificial Sequence
  Description of Artificial Sequence: Synthetic oligonucleotide
  Target: LAMA2; (+) strand; PAM type: NAAAAC; PAM sequence: AAAAAC
accaccaaaaaacaaaacca

SEQ ID NO: 7011 - DNA, 20 bp, Artificial Sequence
  Description of Artificial Sequence: Synthetic oligonucleotide
  Target: LAMA2; (+) strand; PAM type: NAAAAC; PAM sequence: GAAAAC
tactctaacaaatctctaga

SEQ ID NO: 7012 - DNA, 20 bp, Artificial Sequence
  Description of Artificial Sequence: Synthetic oligonucleotide
  Target: LAMA2; (+) strand; PAM type: NAAAAC; PAM sequence: CAAAAC
gattttgaaaatatttcaga

SEQ ID NO: 7013 - DNA, 20 bp, Artificial Sequence
  Description of Artificial Sequence: Synthetic oligonucleotide
  Target: LAMA2; (+) strand; PAM type: NAAAAC; PAM sequence: TAAAAC
gtaagtattcagtgaaatta

SEQ ID NO: 7014 - DNA, 20 bp, Artificial Sequence
  Description of Artificial Sequence: Synthetic oligonucleotide
  Target: LAMA2; (+) strand; PAM type: NAAAAC; PAM sequence: TAAAAC
ttaatttaaaataccagtaa

SEQ ID NO: 7015 - DNA, 20 bp, Artificial Sequence
  Description of Artificial Sequence: Synthetic oligonucleotide
  Target: LAMA2; (+) strand; PAM type: NAAAAC; PAM sequence: TAAAAC
aaataattttatatccaaaa

SEQ ID NO: 7016 - DNA, 20 bp, Artificial Sequence
  Description of Artificial Sequence: Synthetic oligonucleotide
  Target: LAMA2; (+) strand; PAM type: NAAAAC; PAM sequence: CAAAAC
aatattctttgattctatac

SEQ ID NO: 7017 - DNA, 20 bp, Artificial Sequence
  Description of Artificial Sequence: Synthetic oligonucleotide
  Target: LAMA2; (+) strand; PAM type: NAAAAC; PAM sequence: AAAAAC
ttatcaaacaaatgagtctt

SEQ ID NO: 7018 - DNA, 20 bp, Artificial Sequence
  Description of Artificial Sequence: Synthetic oligonucleotide
  Target: LAMA2; (+) strand; PAM type: NAAAAC; PAM sequence: GAAAAC
ggctagtttagcttgcagct

SEQ ID NO: 7019 - DNA, 20 bp, Artificial Sequence
  Description of Artificial Sequence: Synthetic oligonucleotide
  Target: LAMA2; (+) strand; PAM type: NAAAAC; PAM sequence: GAAAAC
ttctgggagtgtgtggtggt

SEQ ID NO: 7020 - DNA, 20 bp, Artificial Sequence
  Description of Artificial Sequence: Synthetic oligonucleotide
  Target: LAMA2; (+) strand; PAM type: NAAAAC; PAM sequence: CAAAAC
attttgcaatcagaaaaagc

SEQ ID NO: 7021 - DNA, 20 bp, Artificial Sequence
  Description of Artificial Sequence: Synthetic oligonucleotide
  Target: LAMA2; (+) strand; PAM type: NAAAAC; PAM sequence: TAAAAC
gtggaaaaagcaggaagtgt

SEQ ID NO: 7022 - DNA, 20 bp, Artificial Sequence
  Description of Artificial Sequence: Synthetic oligonucleotide
  Target: LAMA2; (+) strand; PAM type: NAAAAC; PAM sequence: TAAAAC
gttttgtaatgttgagaacc

SEQ ID NO: 7023 - DNA, 20 bp, Artificial Sequence
  Description of Artificial Sequence: Synthetic oligonucleotide
  Target: LAMA2; (+) strand; PAM type: NAAAAC; PAM sequence: GAAAAC
tgctactggagtgatgctga

SEQ ID NO: 7024 - DNA, 20 bp, Artificial Sequence
  Description of Artificial Sequence: Synthetic oligonucleotide
  Target: LAMA2; (+) strand; PAM type: NAAAAC; PAM sequence: GAAAAC
ttttttagaaacatttttta

SEQ ID NO: 7025 - DNA, 20 bp, Artificial Sequence
  Description of Artificial Sequence: Synthetic oligonucleotide
  Target: LAMA2; (+) strand; PAM type: NAAAAC; PAM sequence: TAAAAC
tatttatttattcctttgga

SEQ ID NO: 7026 - DNA, 20 bp, Artificial Sequence
  Description of Artificial Sequence: Synthetic oligonucleotide
  Target: LAMA2; (+) strand; PAM type: NAAAAC; PAM sequence: TAAAAC
ctcggtgagaaatagtgaaa

SEQ ID NO: 7027 - DNA, 20 bp, Artificial Sequence
  Description of Artificial Sequence: Synthetic oligonucleotide
  Target: LAMA2; (+) strand; PAM type: NAAAAC; PAM sequence: GAAAAC
taatctcatttaacagaaga

SEQ ID NO: 7028 - DNA, 20 bp, Artificial Sequence
  Description of Artificial Sequence: Synthetic oligonucleotide
  Target: LAMA2; (+) strand; PAM type: NAAAAC; PAM sequence: TAAAAC
gttaagtaactttccaaaag

SEQ ID NO: 7029 - DNA, 20 bp, Artificial Sequence
  Description of Artificial Sequence: Synthetic oligonucleotide
  Target: LAMA2; (+) strand; PAM type: NAAAAC; PAM sequence: CAAAAC
taattggctcagggtatccc

SEQ ID NO: 7030 - DNA, 20 bp, Artificial Sequence
  Description of Artificial Sequence: Synthetic oligonucleotide
  Target: LAMA2; (+) strand; PAM type: NAAAAC; PAM sequence: TAAAAC
gattagatctttcctctgct

SEQ ID NO: 7031 - DNA, 20 bp, Artificial Sequence
  Description of Artificial Sequence: Synthetic oligonucleotide
  Target: LAMA2; (+) strand; PAM type: NAAAAC; PAM sequence: TAAAAC
agaccaagagtgttgccttt

SEQ ID NO: 7032 - DNA, 20 bp, Artificial Sequence
  Description of Artificial Sequence: Synthetic oligonucleotide
  Target: LAMA2; (+) strand; PAM type: NAAAAC; PAM sequence: AAAAAC
caggcaaaaagatatgtttt

SEQ ID NO: 7033 - DNA, 20 bp, Artificial Sequence
  Description of Artificial Sequence: Synthetic oligonucleotide
  Target: LAMA2; (+) strand; PAM type: NAAAAC; PAM sequence: AAAAAC
ttcccacttacagttattga

SEQ ID NO: 7034 - DNA, 20 bp, Artificial Sequence
  Description of Artificial Sequence: Synthetic oligonucleotide
  Target: LAMA2; (+) strand; PAM type: NAAAAC; PAM sequence: GAAAAC
catccattttttgcaaaaat

SEQ ID NO: 7035 - DNA, 20 bp, Artificial Sequence
  Description of Artificial Sequence: Synthetic oligonucleotide
  Target: LAMA2; (+) strand; PAM type: NAAAAC; PAM sequence: CAAAAC
tcattattcattatttgatc

SEQ ID NO: 7036 - DNA, 20 bp, Artificial Sequence
  Description of Artificial Sequence: Synthetic oligonucleotide
  Target: LAMA2; (+) strand; PAM type: NAAAAC; PAM sequence: AAAAAC
ttcattatttgatccaaaac

SEQ ID NO: 7037 - DNA, 20 bp, Artificial Sequence
  Description of Artificial Sequence: Synthetic oligonucleotide
  Target: LAMA2; (+) strand; PAM type: NAAAAC; PAM sequence: TAAAAC
agtgggggaaaagcccctta

SEQ ID NO: 7038 - DNA, 20 bp, Artificial Sequence
  Description of Artificial Sequence: Synthetic oligonucleotide
  Target: LAMA2; (+) strand; PAM type: NAAAAC; PAM sequence: GAAAAC
caactggtataataaaagaa

SEQ ID NO: 7039 - DNA, 20 bp, Artificial Sequence
  Description of Artificial Sequence: Synthetic oligonucleotide
  Target: LAMA2; (+) strand; PAM type: NAAAAC; PAM sequence: TAAAAC
attttctctagcagtaattc

SEQ ID NO: 7040 - DNA, 20 bp, Artificial Sequence
  Description of Artificial Sequence: Synthetic oligonucleotide
  Target: LAMA2; (+) strand; PAM type: NAAAAC; PAM sequence: AAAAAC
tataaagacagtctcttttt

SEQ ID NO: 7041 - DNA, 20 bp, Artificial Sequence
  Description of Artificial Sequence: Synthetic oligonucleotide
  Target: LAMA2; (+) strand; PAM type: NAAAAC; PAM sequence: AAAAAC
caattttgttgatcctttca

SEQ ID NO: 7042 - DNA, 20 bp, Artificial Sequence
  Description of Artificial Sequence: Synthetic oligonucleotide
  Target: LAMA2; (+) strand; PAM type: NAAAAC; PAM sequence: AAAAAC
tccctctttttacacaatta

SEQ ID NO: 7043 - DNA, 20 bp, Artificial Sequence
  Description of Artificial Sequence: Synthetic oligonucleotide
  Target: LAMA2; (+) strand; PAM type: NAAAAC; PAM sequence: TAAAAC
taaaattcttcataggtata

SEQ ID NO: 7044 - DNA, 20 bp, Artificial Sequence
  Description of Artificial Sequence: Synthetic oligonucleotide
  Target: LAMA2; (+) strand; PAM type: NAAAAC; PAM sequence: TAAAAC
accagaaaggcagattaagt

SEQ ID NO: 7045 - DNA, 20 bp, Artificial Sequence
  Description of Artificial Sequence: Synthetic oligonucleotide
  Target: LAMA2; (+) strand; PAM type: NAAAAC; PAM sequence: AAAAAC
aagctaaaaattaaaaattt

SEQ ID NO: 7046 - DNA, 20 bp, Artificial Sequence
  Description of Artificial Sequence: Synthetic oligonucleotide
  Target: LAMA2; (+) strand; PAM type: NAAAAC; PAM sequence: GAAAAC
atgtgattaatttagcccat

SEQ ID NO: 7047 - DNA, 20 bp, Artificial Sequence
  Description of Artificial Sequence: Synthetic oligonucleotide
  Target: LAMA2; (+) strand; PAM type: NAAAAC; PAM sequence: AAAAAC
gttttactgtcacaactccc

SEQ ID NO: 7048 - DNA, 20 bp, Artificial Sequence
  Description of Artificial Sequence: Synthetic oligonucleotide
  Target: LAMA2; (+) strand; PAM type: NAAAAC; PAM sequence: TAAAAC
ggtgaagatagcaaatcttc

SEQ ID NO: 7049 - DNA, 20 bp, Artificial Sequence
  Description of Artificial Sequence: Synthetic oligonucleotide
  Target: LAMA2; (+) strand; PAM type: NAAAAC; PAM sequence: AAAAAC
cacaagccagttataacatc

SEQ ID NO: 7050 - DNA, 20 bp, Artificial Sequence
  Description of Artificial Sequence: Synthetic oligonucleotide
  Target: LAMA2; (+) strand; PAM type: NAAAAC; PAM sequence: GAAAAC
tatagttgtatatttgtagt

SEQ ID NO: 7051 - DNA, 20 bp, Artificial Sequence
  Description of Artificial Sequence: Synthetic oligonucleotide
  Target: LAMA2; (+) strand; PAM type: NAAAAC; PAM sequence: AAAAAC
atagccaggtgaacaacaaa

SEQ ID NO: 7052 - DNA, 20 bp, Artificial Sequence
  Description of Artificial Sequence: Synthetic oligonucleotide
  Target: LAMA2; (+) strand; PAM type: NAAAAC; PAM sequence: AAAAAC
aggtgaacaacaaaaaaaac

SEQ ID NO: 7053 - DNA, 20 bp, Artificial Sequence
  Description of Artificial Sequence: Synthetic oligonucleotide
  Target: LAMA2; (+) strand; PAM type: NAAAAC; PAM sequence: AAAAAC
acaacaaaaaaaacaaaaac

SEQ ID NO: 7054 - DNA, 20 bp, Artificial Sequence
  Description of Artificial Sequence: Synthetic oligonucleotide
  Target: LAMA2; (+) strand; PAM type: NAAAAC; PAM sequence: AAAAAC
aaaaacaaaaacaaaaacaa

SEQ ID NO: 7055 - DNA, 20 bp, Artificial Sequence
  Description of Artificial Sequence: Synthetic oligonucleotide
  Target: LAMA2; (+) strand; PAM type: NAAAAC; PAM sequence: CAAAAC
tgggatatgagaattgaggc

SEQ ID NO: 7056 - DNA, 20 bp, Artificial Sequence
  Description of Artificial Sequence: Synthetic oligonucleotide
  Target: LAMA2; (+) strand; PAM type: NAAAAC; PAM sequence: TAAAAC
tagtccttgccaattttttt

SEQ ID NO: 7057 - DNA, 20 bp, Artificial Sequence
  Description of Artificial Sequence: Synthetic oligonucleotide
  Target: LAMA2; (+) strand; PAM type: NAAAAC; PAM sequence: AAAAAC
aagccttttttaaaaaaaaa

SEQ ID NO: 7058 - DNA, 20 bp, Artificial Sequence
  Description of Artificial Sequence: Synthetic oligonucleotide
  Target: LAMA2; (+) strand; PAM type: NAAAAC; PAM sequence: CAAAAC
cccaaagtaatgatgtttac

SEQ ID NO: 7059 - DNA, 20 bp, Artificial Sequence
  Description of Artificial Sequence: Synthetic oligonucleotide
  Target: LAMA2; (+) strand; PAM type: NAAAAC; PAM sequence: AAAAAC
gatttttagatatattgggg

SEQ ID NO: 7060 - DNA, 20 bp, Artificial Sequence
  Description of Artificial Sequence: Synthetic oligonucleotide
  Target: LAMA2; (+) strand; PAM type: NAAAAC; PAM sequence: GAAAAC
attcatggttgtgtttatct

SEQ ID NO: 7061 - DNA, 20 bp, Artificial Sequence
  Description of Artificial Sequence: Synthetic oligonucleotide
  Target: LAMA2; (+) strand; PAM type: NAAAAC; PAM sequence: AAAAAC
acccaacctattgtagaact

SEQ ID NO: 7062 - DNA, 20 bp, Artificial Sequence
  Description of Artificial Sequence: Synthetic oligonucleotide
  Target: LAMA2; (+) strand; PAM type: NAAAAC; PAM sequence: TAAAAC
ttttcagttacttttccatt

SEQ ID NO: 7063 - DNA, 20 bp, Artificial Sequence
  Description of Artificial Sequence: Synthetic oligonucleotide
  Target: LAMA2; (+) strand; PAM type: NAAAAC; PAM sequence: TAAAAC
ttcagctaggttaagcttta

SEQ ID NO: 7064 - DNA, 20 bp, Artificial Sequence
  Description of Artificial Sequence: Synthetic oligonucleotide
  Target: LAMA2; (+) strand; PAM type: NAAAAC; PAM sequence: GAAAAC
tatcaagaaaggaacacata

SEQ ID NO: 7065 - DNA, 20 bp, Artificial Sequence
  Description of Artificial Sequence: Synthetic oligonucleotide
  Target: LAMA2; (+) strand; PAM type: NAAAAC; PAM sequence: AAAAAC
gttggtaagttatgttaaac

SEQ ID NO: 7066 - DNA, 20 bp, Artificial Sequence
  Description of Artificial Sequence: Synthetic oligonucleotide
  Target: LAMA2; (+) strand; PAM type: NAAAAC; PAM sequence: CAAAAC
taagttatgttaaacaaaaa

SEQ ID NO: 7067 - DNA, 20 bp, Artificial Sequence
  Description of Artificial Sequence: Synthetic oligonucleotide
  Target: LAMA2; (+) strand; PAM type: NAAAAC; PAM sequence: GAAAAC
catttattatggcagtccta

SEQ ID NO: 7068 - DNA, 20 bp, Artificial Sequence
  Description of Artificial Sequence: Synthetic oligonucleotide
  Target: LAMA2; (+) strand; PAM type: NAAAAC; PAM sequence: TAAAAC
actactgactgctaacaaca

SEQ ID NO: 7069 - DNA, 20 bp, Artificial Sequence
  Description of Artificial Sequence: Synthetic oligonucleotide
  Target: LAMA2; (+) strand; PAM type: NAAAAC; PAM sequence: GAAAAC
aaaatggtgtgacaatcatg

SEQ ID NO: 7070 - DNA, 20 bp, Artificial Sequence
  Description of Artificial Sequence: Synthetic oligonucleotide
  Target: LAMA2; (+) strand; PAM type: NAAAAC; PAM sequence: CAAAAC
aaaacagtatggagggtcct

SEQ ID NO: 7071 - DNA, 20 bp, Artificial Sequence
  Description of Artificial Sequence: Synthetic oligonucleotide
  Target: LAMA2; (+) strand; PAM type: NAAAAC; PAM sequence: GAAAAC
ctcccagtgctctatacaga

SEQ ID NO: 7072 - DNA, 20 bp, Artificial Sequence
  Description of Artificial Sequence: Synthetic oligonucleotide
  Target: LAMA2; (+) strand; PAM type: NAAAAC; PAM sequence: AAAAAC
gttcttgacttcttttaaaa

SEQ ID NO: 7073 - DNA, 20 bp, Artificial Sequence
  Description of Artificial Sequence: Synthetic oligonucleotide
  Target: LAMA2; (+) strand; PAM type: NAAAAC; PAM sequence: TAAAAC
agagttggaaaggaaatttt

SEQ ID NO: 7074 - DNA, 20 bp, Artificial Sequence
  Description of Artificial Sequence: Synthetic oligonucleotide
  Target: LAMA2; (+) strand; PAM type: NAAAAC; PAM sequence: CAAAAC
tataaaccatcgagcaagca

SEQ ID NO: 7075 - DNA, 20 bp, Artificial Sequence
  Description of Artificial Sequence: Synthetic oligonucleotide
  Target: LAMA2; (+) strand; PAM type: NAAAAC; PAM sequence: AAAAAC
tcaacaaaatgtttataaat

SEQ ID NO: 7076 - DNA, 20 bp, Artificial Sequence
  Description of Artificial Sequence: Synthetic oligonucleotide
  Target: LAMA2; (+) strand; PAM type: NAAAAC; PAM sequence: AAAAAC
tcagaattttctaataacac

SEQ ID NO: 7077 - DNA, 20 bp, Artificial Sequence
  Description of Artificial Sequence: Synthetic oligonucleotide
  Target: LAMA2; (+) strand; PAM type: NAAAAC; PAM sequence: AAAAAC
gcgttttcccgtacagatcc

SEQ ID NO: 7078 - DNA, 20 bp, Artificial Sequence
  Description of Artificial Sequence: Synthetic oligonucleotide
  Target: LAMA2; (+) strand; PAM type: NAAAAC; PAM sequence: GAAAAC
ccaatcgtagctggatattg

SEQ ID NO: 7079 - DNA, 20 bp, Artificial Sequence
  Description of Artificial Sequence: Synthetic oligonucleotide
  Target: LAMA2; (+) strand; PAM type: NAAAAC; PAM sequence: TAAAAC
gctggatattggaaaacgtg

SEQ ID NO: 7080 - DNA, 20 bp, Artificial Sequence
  Description of Artificial Sequence: Synthetic oligonucleotide
  Target: LAMA2; (+) strand; PAM type: NAAAAC; PAM sequence: AAAAAC
tacgcagtcccttgtaagtg

SEQ ID NO: 7081 - DNA, 20 bp, Artificial Sequence
  Description of Artificial Sequence: Synthetic oligonucleotide
  Target: LAMA2; (+) strand; PAM type: NAAAAC; PAM sequence: TAAAAC
tgtgcatctcaacttccttt

SEQ ID NO: 7082 - DNA, 20 bp, Artificial Sequence
  Description of Artificial Sequence: Synthetic oligonucleotide
  Target: LAMA2; (+) strand; PAM type: NAAAAC; PAM sequence: TAAAAC
attaaggttgcattttattt

SEQ ID NO: 7083 - DNA, 20 bp, Artificial Sequence
  Description of Artificial Sequence: Synthetic oligonucleotide
  Target: LAMA2; (+) strand; PAM type: NAAAAC; PAM sequence: AAAAAC
ataaaatagttattaagtta

SEQ ID NO: 7084 - DNA, 20 bp, Artificial Sequence
  Description of Artificial Sequence: Synthetic oligonucleotide
  Target: LAMA2; (+) strand; PAM type: NAAAAC; PAM sequence: AAAAAC
gccttgaataataaaaggaa

SEQ ID NO: 7085 - DNA, 20 bp, Artificial Sequence
  Description of Artificial Sequence: Synthetic oligonucleotide
  Target: LAMA2; (+) strand; PAM type: NAAAAC; PAM sequence: TAAAAC
gtgctgaactgtgattcaat

SEQ ID NO: 7086 - DNA, 20 bp, Artificial Sequence
  Description of Artificial Sequence: Synthetic oligonucleotide
  Target: LAMA2; (+) strand; PAM type: NAAAAC; PAM sequence: GAAAAC
gcagttctttatagccttgt

SEQ ID NO: 7087 - DNA, 20 bp, Artificial Sequence
  Description of Artificial Sequence: Synthetic oligonucleotide
  Target: LAMA2; (+) strand; PAM type: NAAAAC; PAM sequence: CAAAAC
gctactcaaaatgcacaatt

SEQ ID NO: 7088 - DNA, 20 bp, Artificial Sequence
  Description of Artificial Sequence: Synthetic oligonucleotide
  Target: LAMA2; (+) strand; PAM type: NAAAAC; PAM sequence: AAAAAC
tcaattttgtttatctttaa

SEQ ID NO: 7089 - DNA, 20 bp, Artificial Sequence
  Description of Artificial Sequence: Synthetic oligonucleotide
  Target: LAMA2; (+) strand; PAM type: NAAAAC; PAM sequence: AAAAAC
tgatccctgctgcttgatcc

SEQ ID NO: 7090 - DNA, 20 bp, Artificial Sequence
  Description of Artificial Sequence: Synthetic oligonucleotide
  Target: LAMA2; (+) strand; PAM type: NAAAAC; PAM sequence: AAAAAC
gccccaccattgccttctag

SEQ ID NO: 7091 - DNA, 20 bp, Artificial Sequence
  Description of Artificial Sequence: Synthetic oligonucleotide
  Target: LAMA2; (+) strand; PAM type: NAAAAC; PAM sequence: AAAAAC
attataagctttaagagggc

SEQ ID NO: 7092 - DNA, 20 bp, Artificial Sequence
  Description of Artificial Sequence: Synthetic oligonucleotide
  Target: LAMA2; (+) strand; PAM type: NAAAAC; PAM sequence: TAAAAC
gcagcaaaaagcaatctcat

SEQ ID NO: 7093 - DNA, 20 bp, Artificial Sequence
  Description of Artificial Sequence: Synthetic oligonucleotide
  Target: LAMA2; (+) strand; PAM type: NAAAAC; PAM sequence: GAAAAC
atctcattaaaacaagctca

SEQ ID NO: 7094 - DNA, 20 bp, Artificial Sequence
  Description of Artificial Sequence: Synthetic oligonucleotide
  Target: LAMA2; (+) strand; PAM type: NAAAAC; PAM sequence: AAAAAC
gtcctttttatttacttttt

SEQ ID NO: 7095 - DNA, 20 bp, Artificial Sequence
  Description of Artificial Sequence: Synthetic oligonucleotide
  Target: LAMA2; (+) strand; PAM type: NAAAAC; PAM sequence: TAAAAC
aacactgttgtcatggagat

SEQ ID NO: 7096 - DNA, 20 bp, Artificial Sequence
  Description of Artificial Sequence: Synthetic oligonucleotide
  Target: LAMA2; (+) strand; PAM type: NAAAAC; PAM sequence: AAAAAC
ggttttatttctgtgtgatc

SEQ ID NO: 7097 - DNA, 20 bp, Artificial Sequence
  Description of Artificial Sequence: Synthetic oligonucleotide
  Target: LAMA2; (+) strand; PAM type: NAAAAC; PAM sequence: GAAAAC
ccgtttgctaacttatcaga

SEQ ID NO: 7098 - DNA, 20 bp, Artificial Sequence
  Description of Artificial Sequence: Synthetic oligonucleotide
  Target: LAMA2; (+) strand; PAM type: NAAAAC; PAM sequence: GAAAAC
tacccatggataatgtacaa

SEQ ID NO: 7099 - DNA, 20 bp, Artificial Sequence
  Description of Artificial Sequence: Synthetic oligonucleotide
  Target: LAMA2; (+) strand; PAM type: NAAAAC; PAM sequence: CAAAAC
tctactggagatttgttctc

SEQ ID NO: 7100 - DNA, 20 bp, Artificial Sequence
  Description of Artificial Sequence: Synthetic oligonucleotide
  Target: LAMA2; (+) strand; PAM type: NAAAAC; PAM sequence: AAAAAC
cagacttcagagggatatag

SEQ ID NO: 7101 - DNA, 20 bp, Artificial Sequence
  Description of Artificial Sequence: Synthetic oligonucleotide
  Target: LAMA2; (+) strand; PAM type: NAAAAC; PAM sequence: TAAAAC
gaccatctgttaaaaatttt

SEQ ID NO: 7102 - DNA, 20 bp, Artificial Sequence
  Description of Artificial Sequence: Synthetic oligonucleotide
  Target: LAMA2; (+) strand; PAM type: NAAAAC; PAM sequence: AAAAAC
ataatttattatacagtaat

SEQ ID NO: 7103 - DNA, 20 bp, Artificial Sequence
  Description of Artificial Sequence: Synthetic oligonucleotide
  Target: LAMA2; (+) strand; PAM type: NAAAAC; PAM sequence: TAAAAC
gtatttcaagattatattcc

SEQ ID NO: 7104 - DNA, 20 bp, Artificial Sequence
  Description of Artificial Sequence: Synthetic oligonucleotide
  Target: LAMA2; (+) strand; PAM type: NAAAAC; PAM sequence: AAAAAC
aaaccacctccagccacaca

SEQ ID NO: 7105 - DNA, 20 bp, Artificial Sequence
  Description of Artificial Sequence: Synthetic oligonucleotide
  Target: LAMA2; (+) strand; PAM type: NAAAAC; PAM sequence: CAAAAC
ctcatgtgagagctggaact

SEQ ID NO: 7106 - DNA, 20 bp, Artificial Sequence
  Description of Artificial Sequence: Synthetic oligonucleotide
  Target: LAMA2; (+) strand; PAM type: NAAAAC; PAM sequence: AAAAAC
gaaacaaaatgaaaagaaga

SEQ ID NO: 7107 - DNA, 20 bp, Artificial Sequence
  Description of Artificial Sequence: Synthetic oligonucleotide
  Target: LAMA2; (+) strand; PAM type: NAAAAC; PAM sequence: TAAAAC
tgtaacttattttagagttt

SEQ ID NO: 7108 - DNA, 20 bp, Artificial Sequence
  Description of Artificial Sequence: Synthetic oligonucleotide
  Target: LAMA2; (+) strand; PAM type: NAAAAC; PAM sequence: TAAAAC
ttaaaatgttcaattttcac

SEQ ID NO: 7109 - DNA, 20 bp, Artificial Sequence
  Description of Artificial Sequence: Synthetic oligonucleotide
  Target: LAMA2; (+) strand; PAM type: NAAAAC; PAM sequence: AAAAAC
ttgagaatttgggactacca

SEQ ID NO: 7110 - DNA, 20 bp, Artificial Sequence
  Description of Artificial Sequence: Synthetic oligonucleotide
  Target: LAMA2; (+) strand; PAM type: NAAAAC; PAM sequence: CAAAAC
ggaggcaggaaaagagaaga

SEQ ID NO: 7111 - DNA, 20 bp, Artificial Sequence
  Description of Artificial Sequence: Synthetic oligonucleotide
  Target: LAMA2; (+) strand; PAM type: NAAAAC; PAM sequence: AAAAAC
atatgacactacttccaaat

SEQ ID NO: 7112 - DNA, 20 bp, Artificial Sequence
  Description of Artificial Sequence: Synthetic oligonucleotide
  Target: LAMA2; (+) strand; PAM type: NAAAAC; PAM sequence: CAAAAC
caaaagcttcttattgtccc

SEQ ID NO: 7113 - DNA, 20 bp, Artificial Sequence
  Description of Artificial Sequence: Synthetic oligonucleotide
  Target: LAMA2; (+) strand; PAM type: NAAAAC; PAM sequence: AAAAAC
ctttggctattttgtttaaa

SEQ ID NO: 7114 - DNA, 20 bp, Artificial Sequence
  Description of Artificial Sequence: Synthetic oligonucleotide
  Target: LAMA2; (+) strand; PAM type: NAAAAC; PAM sequence: GAAAAC
aagaccctgtcttgaaaaaa

SEQ ID NO: 7115 - DNA, 20 bp, Artificial Sequence
  Description of Artificial Sequence: Synthetic oligonucleotide
  Target: LAMA2; (+) strand; PAM type: NAAAAC; PAM sequence: AAAAAC
ctgtcttgaaaaaagaaaac

SEQ ID NO: 7116 - DNA, 20 bp, Artificial Sequence
  Description of Artificial Sequence: Synthetic oligonucleotide
  Target: LAMA2; (+) strand; PAM type: NAAAAC; PAM sequence: AAAAAC
cgttactttaattttgtgtg

SEQ ID NO: 7117 - DNA, 20 bp, Artificial Sequence
  Description of Artificial Sequence: Synthetic oligonucleotide
  Target: LAMA2; (+) strand; PAM type: NAAAAC; PAM sequence: AAAAAC
agatacagtctttaaggaag

SEQ ID NO: 7118 - DNA, 20 bp, Artificial Sequence
  Description of Artificial Sequence: Synthetic oligonucleotide
  Target: LAMA2; (+) strand; PAM type: NAAAAC; PAM sequence: AAAAAC
caagatgtgccccttattga

SEQ ID NO: 7119 - DNA, 20 bp, Artificial Sequence
  Description of Artificial Sequence: Synthetic oligonucleotide
  Target: LAMA2; (+) strand; PAM type: NAAAAC; PAM sequence: AAAAAC
gtgccccttattgaaaaaac

SEQ ID NO: 7120 - DNA, 20 bp, Artificial Sequence
  Description of Artificial Sequence: Synthetic oligonucleotide
  Target: LAMA2; (+) strand; PAM type: NAAAAC; PAM sequence: CAAAAC
ccttattgaaaaaacaaaaa

SEQ ID NO: 7121 - DNA, 20 bp, Artificial Sequence
  Description of Artificial Sequence: Synthetic oligonucleotide
  Target: LAMA2; (+) strand; PAM type: NAAAAC; PAM sequence: TAAAAC
ggctatcattttagctgtta

SEQ ID NO: 7122 - DNA, 20 bp, Artificial Sequence
  Description of Artificial Sequence: Synthetic oligonucleotide
  Target: LAMA2; (+) strand; PAM type: NAAAAC; PAM sequence: AAAAAC
ggtgttatttagcatttctc

SEQ ID NO: 7123 - DNA, 20 bp, Artificial Sequence
  Description of Artificial Sequence: Synthetic oligonucleotide
  Target: LAMA2; (+) strand; PAM type: NAAAAC; PAM sequence: AAAAAC
gatataatacatttgggtga

SEQ ID NO: 7124 - DNA, 20 bp, Artificial Sequence
  Description of Artificial Sequence: Synthetic oligonucleotide
  Target: LAMA2; (+) strand; PAM type: NAAAAC; PAM sequence: TAAAAC
gggatctttttaagagcttt

SEQ ID NO: 7125 - DNA, 20 bp, Artificial Sequence
  Description of Artificial Sequence: Synthetic oligonucleotide
  Target: LAMA2; (+) strand; PAM type: NAAAAC; PAM sequence: AAAAAC
agattccctcgttgaaactc

SEQ ID NO: 7126 - DNA, 20 bp, Artificial Sequence
  Description of Artificial Sequence: Synthetic oligonucleotide
  Target: LAMA2; (+) strand; PAM type: NAAAAC; PAM sequence: CAAAAC
gcaaaatatgtaaaagaact

SEQ ID NO: 7127 - DNA, 20 bp, Artificial Sequence
  Description of Artificial Sequence: Synthetic oligonucleotide
  Target: LAMA2; (+) strand; PAM type: NAAAAC; PAM sequence: TAAAAC
tggatacagtttgggtttaa

SEQ ID NO: 7128 - DNA, 20 bp, Artificial Sequence
  Description of Artificial Sequence: Synthetic oligonucleotide
  Target: LAMA2; (+) strand; PAM type: NAAAAC; PAM sequence: AAAAAC
attgagctattaatcattgt

SEQ ID NO: 7129 - DNA, 20 bp, Artificial Sequence
  Description of Artificial Sequence: Synthetic oligonucleotide
  Target: LAMA2; (+) strand; PAM type: NAAAAC; PAM sequence: AAAAAC
ctaaatagactatagtatgc

SEQ ID NO: 7130 - DNA, 20 bp, Artificial Sequence
  Description of Artificial Sequence: Synthetic oligonucleotide
  Target: LAMA2; (+) strand; PAM type: NAAAAC; PAM sequence: CAAAAC
aaaaaataaagacagctgat

SEQ ID NO: 7131 - DNA, 20 bp, Artificial Sequence
  Description of Artificial Sequence: Synthetic oligonucleotide
  Target: LAMA2; (+) strand; PAM type: NAAAAC; PAM sequence: CAAAAC
aatcttacaggtttaatact

SEQ ID NO: 7132 - DNA, 20 bp, Artificial Sequence
  Description of Artificial Sequence: Synthetic oligonucleotide
  Target: LAMA2; (+) strand; PAM type: NAAAAC; PAM sequence: AAAAAC
aataagtaatctaatgaatc

SEQ ID NO: 7133 - DNA, 20 bp, Artificial Sequence
  Description of Artificial Sequence: Synthetic oligonucleotide
  Target: LAMA2; (+) strand; PAM type: NAAAAC; PAM sequence: TAAAAC
gcttcttagagcaaaagttt

SEQ ID NO: 7134 - DNA, 20 bp, Artificial Sequence
  Description of Artificial Sequence: Synthetic oligonucleotide
  Target: LAMA2; (+) strand; PAM type: NAAAAC; PAM sequence: TAAAAC
atatataatgctaacattgt

SEQ ID NO: 7135 - DNA, 20 bp, Artificial Sequence
  Description of Artificial Sequence: Synthetic oligonucleotide
  Target: LAMA2; (+) strand; PAM type: NAAAAC; PAM sequence: GAAAAC
tatttgtgtttcattgttaa

SEQ ID NO: 7136 - DNA, 20 bp, Artificial Sequence
  Description of Artificial Sequence: Synthetic oligonucleotide
  Target: LAMA2; (+) strand; PAM type: NAAAAC; PAM sequence: GAAAAC
ctaactctcttttcttctta

SEQ ID NO: 7137 - DNA, 20 bp, Artificial Sequence
  Description of Artificial Sequence: Synthetic oligonucleotide
  Target: LAMA2; (+) strand; PAM type: NAAAAC; PAM sequence: AAAAAC
tataaaatttttattacttt

SEQ ID NO: 7138 - DNA, 20 bp, Artificial Sequence
  Description of Artificial Sequence: Synthetic oligonucleotide
  Target: LAMA2; (+) strand; PAM type: NAAAAC; PAM sequence: CAAAAC
aggagagccagtctgggtcc

SEQ ID NO: 7139 - DNA, 20 bp, Artificial Sequence
  Description of Artificial Sequence: Synthetic oligonucleotide
  Target: LAMA2; (+) strand; PAM type: NAAAAC; PAM sequence: GAAAAC
ggctctatttctcttcattt

SEQ ID NO: 7140 - DNA, 20 bp, Artificial Sequence
  Description of Artificial Sequence: Synthetic oligonucleotide
  Target: LAMA2; (+) strand; PAM type: NAAAAC; PAM sequence: TAAAAC
ctcacatttctccttctgaa

SEQ ID NO: 7141 - DNA, 20 bp, Artificial Sequence
  Description of Artificial Sequence: Synthetic oligonucleotide
  Target: LAMA2; (+) strand; PAM type: NAAAAC; PAM sequence: CAAAAC
atattccttttttggaaaag

SEQ ID NO: 7142 - DNA, 20 bp, Artificial Sequence
  Description of Artificial Sequence: Synthetic oligonucleotide
  Target: LAMA2; (+) strand; PAM type: NAAAAC; PAM sequence: CAAAAC
ttgcatcaaaagaacctcag

SEQ ID NO: 7143 - DNA, 20 bp, Artificial Sequence
  Description of Artificial Sequence: Synthetic oligonucleotide
  Target: LAMA2; (+) strand; PAM type: NAAAAC; PAM sequence: CAAAAC
aaagaacctcagcaaaacct

SEQ ID NO: 7144 - DNA, 20 bp, Artificial Sequence
  Description of Artificial Sequence: Synthetic oligonucleotide
  Target: LAMA2; (+) strand; PAM type: NAAAAC; PAM sequence: CAAAAC
atgtatgcttttcctatggc

SEQ ID NO: 7145 - DNA, 20 bp, Artificial Sequence
  Description of Artificial Sequence: Synthetic oligonucleotide
  Target: LAMA2; (+) strand; PAM type: NAAAAC; PAM sequence: TAAAAC
atgctgacaaggagagaggt

SEQ ID NO: 7146 - DNA, 20 bp, Artificial Sequence
  Description of Artificial Sequence: Synthetic oligonucleotide
  Target: LAMA2; (+) strand; PAM type: NAAAAC; PAM sequence: CAAAAC
aagccatgccttttagctga

SEQ ID NO: 7147 - DNA, 20 bp, Artificial Sequence
  Description of Artificial Sequence: Synthetic oligonucleotide
  Target: LAMA2; (+) strand; PAM type: NAAAAC; PAM sequence: AAAAAC
ggcattcaatgcactttgaa

SEQ ID NO: 7148 - DNA, 20 bp, Artificial Sequence
  Description of Artificial Sequence: Synthetic oligonucleotide
  Target: LAMA2; (+) strand; PAM type: NAAAAC; PAM sequence: CAAAAC
cagatgtatcacttgaaatc

SEQ ID NO: 7149 - DNA, 20 bp, Artificial Sequence
  Description of Artificial Sequence: Synthetic oligonucleotide
  Target: LAMA2; (+) strand; PAM type: NAAAAC; PAM sequence: GAAAAC
ctgagctgaccaatatattg

SEQ ID NO: 7150 - DNA, 20 bp, Artificial Sequence
  Description of Artificial Sequence: Synthetic oligonucleotide
  Target: LAMA2; (+) strand; PAM type: NAAAAC; PAM sequence: TAAAAC
tttctcttgtgcaagtttga

SEQ ID NO: 7151 - DNA, 20 bp, Artificial Sequence
  Description of Artificial Sequence: Synthetic oligonucleotide
  Target: LAMA2; (+) strand; PAM type: NAAAAC; PAM sequence: GAAAAC
aaatactaatgtgtatttta

SEQ ID NO: 7152 - DNA, 20 bp, Artificial Sequence
  Description of Artificial Sequence: Synthetic oligonucleotide
  Target: LAMA2; (+) strand; PAM type: NAAAAC; PAM sequence: GAAAAC
ttatttaattattctaaatt

SEQ ID NO: 7153 - DNA, 20 bp, Artificial Sequence
  Description of Artificial Sequence: Synthetic oligonucleotide
  Target: LAMA2; (+) strand; PAM type: NAAAAC; PAM sequence: AAAAAC
cattattacttatgtcacat

SEQ ID NO: 7154 - DNA, 20 bp, Artificial Sequence
  Description of Artificial Sequence: Synthetic oligonucleotide
  Target: LAMA2; (+) strand; PAM type: NAAAAC; PAM sequence: TAAAAC
tttgaacaatctgactattc

SEQ ID NO: 7155 - DNA, 20 bp, Artificial Sequence
  Description of Artificial Sequence: Synthetic oligonucleotide
  Target: LAMA2; (+) strand; PAM type: NAAAAC; PAM sequence: CAAAAC
atatttaaatagtcacagat

SEQ ID NO: 7156 - DNA, 20 bp, Artificial Sequence
  Description of Artificial Sequence: Synthetic oligonucleotide
  Target: LAMA2; (+) strand; PAM type: NAAAAC; PAM sequence: AAAAAC
tctcaatgctaaatattcat

SEQ ID NO: 7157 - DNA, 20 bp, Artificial Sequence
  Description of Artificial Sequence: Synthetic oligonucleotide
  Target: LAMA2; (+) strand; PAM type: NAAAAC; PAM sequence: GAAAAC
aataagttctaaaaggaaaa

SEQ ID NO: 7158 - DNA, 20 bp, Artificial Sequence
  Description of Artificial Sequence: Synthetic oligonucleotide
  Target: LAMA2; (+) strand; PAM type: NAAAAC; PAM sequence: GAAAAC
ggcactgttctaagcaatgg

SEQ ID NO: 7159 - DNA, 20 bp, Artificial Sequence
  Description of Artificial Sequence: Synthetic oligonucleotide
  Target: LAMA2; (+) strand; PAM type: NAAAAC; PAM sequence: GAAAAC
tgctaaggatgggaagaaat

SEQ ID NO: 7160 - DNA, 20 bp, Artificial Sequence
  Description of Artificial Sequence: Synthetic oligonucleotide
  Target: LAMA2; (+) strand; PAM type: NAAAAC; PAM sequence: GAAAAC
aggagggaagatgacagacg

SEQ ID NO: 7161 - DNA, 20 bp, Artificial Sequence
  Description of Artificial Sequence: Synthetic oligonucleotide
  Target: LAMA2; (+) strand; PAM type: NAAAAC; PAM sequence: TAAAAC
taaaaatgcttctatttgga

SEQ ID NO: 7162 - DNA, 20 bp, Artificial Sequence
  Description of Artificial Sequence: Synthetic oligonucleotide
  Target: LAMA2; (+) strand; PAM type: NAAAAC; PAM sequence: TAAAAC
tttggataaaacaaaaaaat

SEQ ID NO: 7163 - DNA, 20 bp, Artificial Sequence
  Description of Artificial Sequence: Synthetic oligonucleotide
  Target: LAMA2; (+) strand; PAM type: NAAAAC; PAM sequence: GAAAAC
aacaacaaaaatctataata

SEQ ID NO: 7164 - DNA, 20 bp, Artificial Sequence
  Description of Artificial Sequence: Synthetic oligonucleotide
  Target: LAMA2; (+) strand; PAM type: NAAAAC; PAM sequence: TAAAAC
tttaaaaaaatttgcttgaa

SEQ ID NO: 7165 - DNA, 20 bp, Artificial Sequence
  Description of Artificial Sequence: Synthetic oligonucleotide
  Target: LAMA2; (+) strand; PAM type: NAAAAC; PAM sequence: AAAAAC
tgaagcaattacactgtttg

SEQ ID NO: 7166 - DNA, 20 bp, Artificial Sequence
  Description of Artificial Sequence: Synthetic oligonucleotide
  Target: LAMA2; (+) strand; PAM type: NAAAAC; PAM sequence: CAAAAC
attacttccttctggatgag

SEQ ID NO: 7167 - DNA, 20 bp, Artificial Sequence
  Description of Artificial Sequence: Synthetic oligonucleotide
  Target: LAMA2; (+) strand; PAM type: NAAAAC; PAM sequence: TAAAAC
tagaactgttagagcatcca

SEQ ID NO: 7168 - DNA, 20 bp, Artificial Sequence
  Description of Artificial Sequence: Synthetic oligonucleotide
  Target: LAMA2; (+) strand; PAM type: NAAAAC; PAM sequence: AAAAAC
attttgtttagagcaccttt

SEQ ID NO: 7169 - DNA, 20 bp, Artificial Sequence
  Description of Artificial Sequence: Synthetic oligonucleotide
  Target: LAMA2; (+) strand; PAM type: NAAAAC; PAM sequence: CAAAAC
attttattaactttgaatat

SEQ ID NO: 7170 - DNA, 20 bp, Artificial Sequence
  Description of Artificial Sequence: Synthetic oligonucleotide
  Target: LAMA2; (+) strand; PAM type: NAAAAC; PAM sequence: AAAAAC
ctattaggaccatatggcag

SEQ ID NO: 7171 - DNA, 20 bp, Artificial Sequence
  Description of Artificial Sequence: Synthetic oligonucleotide
  Target: LAMA2; (+) strand; PAM type: NAAAAC; PAM sequence: TAAAAC
gcaggagaatttcaggcaaa

SEQ ID NO: 7172 - DNA, 20 bp, Artificial Sequence
  Description of Artificial Sequence: Synthetic oligonucleotide
  Target: LAMA2; (+) strand; PAM type: NAAAAC; PAM sequence: AAAAAC
ttttttaaaatgatatcatt

SEQ ID NO: 7173 - DNA, 20 bp, Artificial Sequence
  Description of Artificial Sequence: Synthetic oligonucleotide
  Target: LAMA2; (+) strand; PAM type: NAAAAC; PAM sequence: GAAAAC
ttgaagtaatgtcacaagaa

SEQ ID NO: 7174 - DNA, 20 bp, Artificial Sequence
  Description of Artificial Sequence: Synthetic oligonucleotide
  Target: LAMA2; (+) strand; PAM type: NAAAAC; PAM sequence: GAAAAC
aatttctttgagtaatctca

SEQ ID NO: 7175 - DNA, 20 bp, Artificial Sequence
  Description of Artificial Sequence: Synthetic oligonucleotide
  Target: LAMA2; (+) strand; PAM type: NAAAAC; PAM sequence: CAAAAC
ttcatttataaagttcttgt

SEQ ID NO: 7176 - DNA, 20 bp, Artificial Sequence
  Description of Artificial Sequence: Synthetic oligonucleotide
  Target: LAMA2; (+) strand; PAM type: NAAAAC; PAM sequence: TAAAAC
gagataatgagactttcata

SEQ ID NO: 7177 - DNA, 20 bp, Artificial Sequence
  Description of Artificial Sequence: Synthetic oligonucleotide
  Target: LAMA2; (+) strand; PAM type: NAAAAC; PAM sequence: CAAAAC
gcacttctagcctccactct

SEQ ID NO: 7178 - DNA, 20 bp, Artificial Sequence
  Description of Artificial Sequence: Synthetic oligonucleotide
  Target: LAMA2; (+) strand; PAM type: NAAAAC; PAM sequence: TAAAAC
actagagaaagaaaatgaga

SEQ ID NO: 7179 - DNA, 20 bp, Artificial Sequence
  Description of Artificial Sequence: Synthetic oligonucleotide
  Target: LAMA2; (+) strand; PAM type: NAAAAC; PAM sequence: AAAAAC
tgccaatatgtatagatctc

SEQ ID NO: 7180 - DNA, 20 bp, Artificial Sequence
  Description of Artificial Sequence: Synthetic oligonucleotide
  Target: LAMA2; (+) strand; PAM type: NAAAAC; PAM sequence: GAAAAC
aaggatggagaggacaatgg

SEQ ID NO: 7181 - DNA, 20 bp, Artificial Sequence
  Description of Artificial Sequence: Synthetic oligonucleotide
  Target: LAMA2; (+) strand; PAM type: NAAAAC; PAM sequence: GAAAAC
tgaagcagtaaagtgattta

SEQ ID NO: 7182 - DNA, 20 bp, Artificial Sequence
  Description of Artificial Sequence: Synthetic oligonucleotide
  Target: LAMA2; (+) strand; PAM type: NAAAAC; PAM sequence: CAAAAC
cagctactgtgttttcttta

SEQ ID NO: 7183 - DNA, 20 bp, Artificial Sequence
  Description of Artificial Sequence: Synthetic oligonucleotide
  Target: LAMA2; (+) strand; PAM type: NAAAAC; PAM sequence: AAAAAC
tctgataagtacagcttttt

SEQ ID NO: 7184 - DNA, 20 bp, Artificial Sequence
  Description of Artificial Sequence: Synthetic oligonucleotide
  Target: LAMA2; (+) strand; PAM type: NAAAAC; PAM sequence: TAAAAC
cttcaaaccaccatgcagtt

SEQ ID NO: 7185 - DNA, 20 bp, Artificial Sequence
  Description of Artificial Sequence: Synthetic oligonucleotide
  Target: LAMA2; (+) strand; PAM type: NAAAAC; PAM sequence: GAAAAC
tgtaaggcaaaaatagagat

SEQ ID NO: 7186 - DNA, 20 bp, Artificial Sequence
  Description of Artificial Sequence: Synthetic oligonucleotide
  Target: LAMA2; (+) strand; PAM type: NAAAAC; PAM sequence: CAAAAC
aagaaaatgacacacaagaa

SEQ ID NO: 7187 - DNA, 20 bp, Artificial Sequence
  Description of Artificial Sequence: Synthetic oligonucleotide
  Target: LAMA2; (+) strand; PAM type: NAAAAC; PAM sequence: AAAAAC
tatttgttttataatgatgt

SEQ ID NO: 7188 - DNA, 20 bp, Artificial Sequence
  Description of Artificial Sequence: Synthetic oligonucleotide
  Target: LAMA2; (+) strand; PAM type: NAAAAC; PAM sequence: AAAAAC
attggggcagagaaaatgag

SEQ ID NO: 7189 - DNA, 20 bp, Artificial Sequence
  Description of Artificial Sequence: Synthetic oligonucleotide
  Target: LAMA2; (+) strand; PAM type: NAAAAC; PAM sequence: CAAAAC
ttgggttattttctattgaa

SEQ ID NO: 7190 - DNA, 20 bp, Artificial Sequence
  Description of Artificial Sequence: Synthetic oligonucleotide
  Target: LAMA2; (+) strand; PAM type: NAAAAC; PAM sequence: TAAAAC
cagagatgagctaaacaaat

SEQ ID NO: 7191 - DNA, 20 bp, Artificial Sequence
  Description of Artificial Sequence: Synthetic oligonucleotide
  Target: LAMA2; (+) strand; PAM type: NAAAAC; PAM sequence: GAAAAC
aaactgaagcatttaattta

SEQ ID NO: 7192 - DNA, 20 bp, Artificial Sequence
  Description of Artificial Sequence: Synthetic oligonucleotide
  Target: LAMA2; (+) strand; PAM type: NAAAAC; PAM sequence: AAAAAC
tttcctggaaagttaaatgg

SEQ ID NO: 7193 - DNA, 20 bp, Artificial Sequence
  Description of Artificial Sequence: Synthetic oligonucleotide
  Target: LAMA2; (+) strand; PAM type: NAAAAC; PAM sequence: GAAAAC
aaaggattatttgtcttcaa

SEQ ID NO: 7194 - DNA, 20 bp, Artificial Sequence
  Description of Artificial Sequence: Synthetic oligonucleotide
  Target: LAMA2; (+) strand; PAM type: NAAAAC; PAM sequence: TAAAAC
tcctcacatatgctaatgta

SEQ ID NO: 7195 - DNA, 20 bp, Artificial Sequence
  Description of Artificial Sequence: Synthetic oligonucleotide
  Target: LAMA2; (+) strand; PAM type: NAAAAC; PAM sequence: TAAAAC
ttctttattatgaccactat

SEQ ID NO: 7196 - DNA, 20 bp, Artificial Sequence
  Description of Artificial Sequence: Synthetic oligonucleotide
  Target: LAMA2; (+) strand; PAM type: NAAAAC; PAM sequence: GAAAAC
accactattaaaaccaaaca

SEQ ID NO: 7197 - DNA, 20 bp, Artificial Sequence
  Description of Artificial Sequence: Synthetic oligonucleotide
  Target: LAMA2; (+) strand; PAM type: NAAAAC; PAM sequence: TAAAAC
tgtattctaactcacaggaa

SEQ ID NO: 7198 - DNA, 20 bp, Artificial Sequence
  Description of Artificial Sequence: Synthetic oligonucleotide
  Target: LAMA2; (+) strand; PAM type: NAAAAC; PAM sequence: TAAAAC
ataaatgtgtacctaacaaa

SEQ ID NO: 7199 - DNA, 20 bp, Artificial Sequence
  Description of Artificial Sequence: Synthetic oligonucleotide
  Target: LAMA2; (+) strand; PAM type: NAAAAC; PAM sequence: AAAAAC
tcaggtttgtaacattgcat

SEQ ID NO: 7200 - DNA, 20 bp, Artificial Sequence
  Description of Artificial Sequence: Synthetic oligonucleotide
  Target: LAMA2; (+) strand; PAM type: NAAAAC; PAM sequence: GAAAAC
attcaagttttaatttttat

SEQ ID NO: 7201 - DNA, 20 bp, Artificial Sequence
  Description of Artificial Sequence: Synthetic oligonucleotide
  Target: LAMA2; (+) strand; PAM type: NAAAAC; PAM sequence: TAAAAC
aattgatacggtcaactgtt

SEQ ID NO: 7202 - DNA, 20 bp, Artificial Sequence
  Description of Artificial Sequence: Synthetic oligonucleotide
  Target: LAMA2; (+) strand; PAM type: NAAAAC; PAM sequence: AAAAAC
attaatttttatgaaataat

SEQ ID NO: 7203 - DNA, 20 bp, Artificial Sequence
  Description of Artificial Sequence: Synthetic oligonucleotide
  Target: LAMA2; (+) strand; PAM type: NAAAAC; PAM sequence: AAAAAC
cacacacatcaatcacgcca

SEQ ID NO: 7204 - DNA, 20 bp, Artificial Sequence
  Description of Artificial Sequence: Synthetic oligonucleotide
  Target: LAMA2; (+) strand; PAM type: NAAAAC; PAM sequence: AAAAAC
tgtaaaaagattgtttttaa

SEQ ID NO: 7205 - DNA, 20 bp, Artificial Sequence
  Description of Artificial Sequence: Synthetic oligonucleotide
  Target: LAMA2; (+) strand; PAM type: NAAAAC; PAM sequence: AAAAAC
ttttctgggcagagaaaatt

SEQ ID NO: 7206 - DNA, 20 bp, Artificial Sequence
  Description of Artificial Sequence: Synthetic oligonucleotide
  Target: LAMA2; (+) strand; PAM type: NAAAAC; PAM sequence: TAAAAC
gctactttgaattcggtttt

SEQ ID NO: 7207 - DNA, 20 bp, Artificial Sequence
  Description of Artificial Sequence: Synthetic oligonucleotide
  Target: LAMA2; (+) strand; PAM type: NAAAAC; PAM sequence: TAAAAC
cctaatttctcattcttaag

SEQ ID NO: 7208 - DNA, 20 bp, Artificial Sequence
  Description of Artificial Sequence: Synthetic oligonucleotide
  Target: LAMA2; (+) strand; PAM type: NAAAAC; PAM sequence: CAAAAC
tattgatagtatcaacatga

SEQ ID NO: 7209 - DNA, 20 bp, Artificial Sequence
  Description of Artificial Sequence: Synthetic oligonucleotide
  Target: LAMA2; (+) strand; PAM type: NAAAAC; PAM sequence: CAAAAC
gtaattagagaaatgcaaat

SEQ ID NO: 7210 - DNA, 20 bp, Artificial Sequence
  Description of Artificial Sequence: Synthetic oligonucleotide
  Target: LAMA2; (+) strand; PAM type: NAAAAC; PAM sequence: GAAAAC
agcaaactaacagaggaaca

SEQ ID NO: 7211 - DNA, 20 bp, Artificial Sequence
  Description of Artificial Sequence: Synthetic oligonucleotide
  Target: LAMA2; (+) strand; PAM type: NAAAAC; PAM sequence: GAAAAC
tggattttcagagagaaaga

SEQ ID NO: 7212 - DNA, 20 bp, Artificial Sequence
  Description of Artificial Sequence: Synthetic oligonucleotide
  Target: LAMA2; (+) strand; PAM type: NAAAAC; PAM sequence: GAAAAC
agggtcctgtctgttagaag

SEQ ID NO: 7213 - DNA, 20 bp, Artificial Sequence
  Description of Artificial Sequence: Synthetic oligonucleotide
  Target: LAMA2; (+) strand; PAM type: NAAAAC; PAM sequence: GAAAAC
ccagaaaggacatctacacc

SEQ ID NO: 7214 - DNA, 20 bp, Artificial Sequence
  Description of Artificial Sequence: Synthetic oligonucleotide
  Target: LAMA2; (+) strand; PAM type: NAAAAC; PAM sequence: TAAAAC
catcaaagaccaaaagtaga

SEQ ID NO: 7215 - DNA, 20 bp, Artificial Sequence
  Description of Artificial Sequence: Synthetic oligonucleotide
  Target: LAMA2; (+) strand; PAM type: NAAAAC; PAM sequence: AAAAAC
taaaaccacaaagatgggga

SEQ ID NO: 7216 - DNA, 20 bp, Artificial Sequence
  Description of Artificial Sequence: Synthetic oligonucleotide
  Target: LAMA2; (+) strand; PAM type: NAAAAC; PAM sequence: AAAAAC
atggggaaaaaacagaacag

SEQ ID NO: 7217 - DNA, 20 bp, Artificial Sequence
  Description of Artificial Sequence: Synthetic oligonucleotide
  Target: LAMA2; (+) strand; PAM type: NAAAAC; PAM sequence: TAAAAC
aacagaaaaactggaaactc

SEQ ID NO: 7218 - DNA, 20 bp, Artificial Sequence
  Description of Artificial Sequence: Synthetic oligonucleotide
  Target: LAMA2; (+) strand; PAM type: NAAAAC; PAM sequence: GAAAAC
aaaccaaaggcaaagaagtt

SEQ ID NO: 7219 - DNA, 20 bp, Artificial Sequence
  Description of Artificial Sequence: Synthetic oligonucleotide
  Target: LAMA2; (+) strand; PAM type: NAAAAC; PAM sequence: GAAAAC
ttaaaggagctgatggagct

SEQ ID NO: 7220 - DNA, 20 bp, Artificial Sequence
  Description of Artificial Sequence: Synthetic oligonucleotide
  Target: LAMA2; (+) strand; PAM type: NAAAAC; PAM sequence: GAAAAC
tggagaatgaaaccaagttg

SEQ ID NO: 7221 - DNA, 20 bp, Artificial Sequence
  Description of Artificial Sequence: Synthetic oligonucleotide
  Target: LAMA2; (+) strand; PAM type: NAAAAC; PAM sequence: GAAAAC
gaagatctaccaagccaatg

SEQ ID NO: 7222 - DNA, 20 bp, Artificial Sequence
  Description of Artificial Sequence: Synthetic oligonucleotide
  Target: LAMA2; (+) strand; PAM type: NAAAAC; PAM sequence: CAAAAC
gttgcaatcctagtctctga

SEQ ID NO: 7223 - DNA, 20 bp, Artificial Sequence
  Description of Artificial Sequence: Synthetic oligonucleotide
  Target: LAMA2; (+) strand; PAM type: NAAAAC; PAM sequence: AAAAAC
ctgaaggaaatagagacaca

SEQ ID NO: 7224 - DNA, 20 bp, Artificial Sequence
  Description of Artificial Sequence: Synthetic oligonucleotide
  Target: LAMA2; (+) strand; PAM type: NAAAAC; PAM sequence: AAAAAC
atataaacagagccaaagac

SEQ ID NO: 7225 - DNA, 20 bp, Artificial Sequence
  Description of Artificial Sequence: Synthetic oligonucleotide
  Target: LAMA2; (+) strand; PAM type: NAAAAC; PAM sequence: AAAAAC
attcaacaacccttcatgct

SEQ ID NO: 7226 - DNA, 20 bp, Artificial Sequence
  Description of Artificial Sequence: Synthetic oligonucleotide
  Target: LAMA2; (+) strand; PAM type: NAAAAC; PAM sequence: AAAAAC
caatatcatactgaatgggc

SEQ ID NO: 7227 - DNA, 20 bp, Artificial Sequence
  Description of Artificial Sequence: Synthetic oligonucleotide
  Target: LAMA2; (+) strand; PAM type: NAAAAC; PAM sequence: GAAAAC
aaactggaagcattcccttt

SEQ ID NO: 7228 - DNA, 20 bp, Artificial Sequence
  Description of Artificial Sequence: Synthetic oligonucleotide
  Target: LAMA2; (+) strand; PAM type: NAAAAC; PAM sequence: GAAAAC
acgacatgattgtttatcta

SEQ ID NO: 7229 - DNA, 20 bp, Artificial Sequence
  Description of Artificial Sequence: Synthetic oligonucleotide
  Target: LAMA2; (+) strand; PAM type: NAAAAC; PAM sequence: AAAAAC
actttcttcacagaattgga

SEQ ID NO: 7230 - DNA, 20 bp, Artificial Sequence
  Description of Artificial Sequence: Synthetic oligonucleotide
  Target: LAMA2; (+) strand; PAM type: NAAAAC; PAM sequence: CAAAAC
tactacaaggctacagtaac

SEQ ID NO: 7231 - DNA, 20 bp, Artificial Sequence
  Description of Artificial Sequence: Synthetic oligonucleotide
  Target: LAMA2; (+) strand; PAM type: NAAAAC; PAM sequence: AAAAAC
aaacagcatggtactggtac

SEQ ID NO: 7232 - DNA, 20 bp, Artificial Sequence
  Description of Artificial Sequence: Synthetic oligonucleotide
  Target: LAMA2; (+) strand; PAM type: NAAAAC; PAM sequence: AAAAAC
tgatctttgacaaacctgag

SEQ ID NO: 7233 - DNA, 20 bp, Artificial Sequence
  Description of Artificial Sequence: Synthetic oligonucleotide
  Target: LAMA2; (+) strand; PAM type: NAAAAC; PAM sequence: GAAAAC
tatttaataaatggtgctgg

SEQ ID NO: 7234 - DNA, 20 bp, Artificial Sequence
  Description of Artificial Sequence: Synthetic oligonucleotide
  Target: LAMA2; (+) strand; PAM type: NAAAAC; PAM sequence: TAAAAC
aaagatttaaacgttaaacc

SEQ ID NO: 7235 - DNA, 20 bp, Artificial Sequence
  Description of Artificial Sequence: Synthetic oligonucleotide
  Target: LAMA2; (+) strand; PAM type: NAAAAC; PAM sequence: AAAAAC
aacgttaaacctaaaaccat

SEQ ID NO: 7236 - DNA, 20 bp, Artificial Sequence
  Description of Artificial Sequence: Synthetic oligonucleotide
  Target: LAMA2; (+) strand; PAM type: NAAAAC; PAM sequence: GAAAAC
aaaccataaaaaccctagaa

SEQ ID NO: 7237 - DNA, 20 bp, Artificial Sequence
  Description of Artificial Sequence: Synthetic oligonucleotide
  Target: LAMA2; (+) strand; PAM type: NAAAAC; PAM sequence: CAAAAC
gtgggcaaggacttcatgtc

SEQ ID NO: 7238 - DNA, 20 bp, Artificial Sequence
  Description of Artificial Sequence: Synthetic oligonucleotide
  Target: LAMA2; (+) strand; PAM type: NAAAAC; PAM sequence: AAAAAC
ctcaaacaaatttacaagaa

SEQ ID NO: 7239 - DNA, 20 bp, Artificial Sequence
  Description of Artificial Sequence: Synthetic oligonucleotide
  Target: LAMA2; (+) strand; PAM type: NAAAAC; PAM sequence: AAAAAC
agaagacatttatgcagcca

SEQ ID NO: 7240 - DNA, 20 bp, Artificial Sequence
  Description of Artificial Sequence: Synthetic oligonucleotide
  Target: LAMA2; (+) strand; PAM type: NAAAAC; PAM sequence: CAAAAC
gccatcagagaaatgcaaat

SEQ ID NO: 7241 - DNA, 20 bp, Artificial Sequence
  Description of Artificial Sequence: Synthetic oligonucleotide
  Target: LAMA2; (+) strand; PAM type: NAAAAC; PAM sequence: AAAAAC
agtaaactatcgcaagaaca

SEQ ID NO: 7242 - DNA, 20 bp, Artificial Sequence
  Description of Artificial Sequence: Synthetic oligonucleotide
  Target: LAMA2; (+) strand; PAM type: NAAAAC; PAM sequence: TAAAAC
cacaatgtgcacatgtaccc

SEQ ID NO: 7243 - DNA, 20 bp, Artificial Sequence
  Description of Artificial Sequence: Synthetic oligonucleotide
  Target: LAMA2; (+) strand; PAM type: NAAAAC; PAM sequence: TAAAAC
agcacttaacacctttttca

SEQ ID NO: 7244 - DNA, 20 bp, Artificial Sequence
  Description of Artificial Sequence: Synthetic oligonucleotide
  Target: LAMA2; (+) strand; PAM type: NAAAAC; PAM sequence: TAAAAC
atgcaatccgaattttcaag

SEQ ID NO: 7245 - DNA, 20 bp, Artificial Sequence
  Description of Artificial Sequence: Synthetic oligonucleotide
  Target: LAMA2; (+) strand; PAM type: NAAAAC; PAM sequence: CAAAAC
tcagattcatcactaacttt

SEQ ID NO: 7246 - DNA, 20 bp, Artificial Sequence
  Description of Artificial Sequence: Synthetic oligonucleotide
  Target: LAMA2; (+) strand; PAM type: NAAAAC; PAM sequence: AAAAAC
agacattcattctggaaaga

SEQ ID NO: 7247 - DNA, 20 bp, Artificial Sequence
  Description of Artificial Sequence: Synthetic oligonucleotide
  Target: LAMA2; (+) strand; PAM type: NAAAAC; PAM sequence: AAAAAC
ctgtcctctttttttttctg

SEQ ID NO: 7248 - DNA, 20 bp, Artificial Sequence
  Description of Artificial Sequence: Synthetic oligonucleotide
  Target: LAMA2; (+) strand; PAM type: NAAAAC; PAM sequence: GAAAAC
tattataaaataatatcaaa

SEQ ID NO: 7249 - DNA, 20 bp, Artificial Sequence
  Description of Artificial Sequence: Synthetic oligonucleotide
  Target: LAMA2; (+) strand; PAM type: NAAAAC; PAM sequence: GAAAAC
tactgtggagtgagctcctg

SEQ ID NO: 7250 - DNA, 20 bp, Artificial Sequence
  Description of Artificial Sequence: Synthetic oligonucleotide
  Target: LAMA2; (+) strand; PAM type: NAAAAC; PAM sequence: GAAAAC
agcatcaacttaatcttctg

SEQ ID NO: 7251 - DNA, 20 bp, Artificial Sequence
  Description of Artificial Sequence: Synthetic oligonucleotide
  Target: LAMA2; (+) strand; PAM type: NAAAAC; PAM sequence: TAAAAC
gattttagcacttctaacaa

SEQ ID NO: 7252 - DNA, 20 bp, Artificial Sequence
  Description of Artificial Sequence: Synthetic oligonucleotide
  Target: LAMA2; (+) strand; PAM type: NAAAAC; PAM sequence: AAAAAC
aattataatttagattcttt

SEQ ID NO: 7253 - DNA, 20 bp, Artificial Sequence
  Description of Artificial Sequence: Synthetic oligonucleotide
  Target: LAMA2; (+) strand; PAM type: NAAAAC; PAM sequence: AAAAAC
taggttcagggccagaggac

SEQ ID NO: 7254 - DNA, 20 bp, Artificial Sequence
  Description of Artificial Sequence: Synthetic oligonucleotide
  Target: LAMA2; (+) strand; PAM type: NAAAAC; PAM sequence: AAAAAC
cctcaagagaaaagggattt

SEQ ID NO: 7255 - DNA, 20 bp, Artificial Sequence
  Description of Artificial Sequence: Synthetic oligonucleotide
  Target: LAMA2; (+) strand; PAM type: NAAAAC; PAM sequence: AAAAAC
gaatggcatttcacattgag

SEQ ID NO: 7256 - DNA, 20 bp, Artificial Sequence
  Description of Artificial Sequence: Synthetic oligonucleotide
  Target: LAMA2; (+) strand; PAM type: NAAAAC; PAM sequence: AAAAAC
caacaaatttggtttctttt

SEQ ID NO: 7257 - DNA, 20 bp, Artificial Sequence
  Description of Artificial Sequence: Synthetic oligonucleotide
  Target: LAMA2; (+) strand; PAM type: NAAAAC; PAM sequence: AAAAAC
aagaaaatgtattaaaagag

SEQ ID NO: 7258 - DNA, 20 bp, Artificial Sequence
  Description of Artificial Sequence: Synthetic oligonucleotide
  Target: LAMA2; (+) strand; PAM type: NAAAAC; PAM sequence: TAAAAC
gcaaagataatattgtagtt

SEQ ID NO: 7259 - DNA, 20 bp, Artificial Sequence
  Description of Artificial Sequence: Synthetic oligonucleotide
  Target: LAMA2; (+) strand; PAM type: NAAAAC; PAM sequence: GAAAAC
cagctattaaggtggtcaag

SEQ ID NO: 7260 - DNA, 20 bp, Artificial Sequence
  Description of Artificial Sequence: Synthetic oligonucleotide
  Target: LAMA2; (+) strand; PAM type: NAAAAC; PAM sequence: CAAAAC
cactggcctggaaaagctgg

SEQ ID NO: 7261 - DNA, 20 bp, Artificial Sequence
  Description of Artificial Sequence: Synthetic oligonucleotide
  Target: LAMA2; (+) strand; PAM type: NAAAAC; PAM sequence: TAAAAC
aatagtgaacctatcatctt

SEQ ID NO: 7262 - DNA, 20 bp, Artificial Sequence
  Description of Artificial Sequence: Synthetic oligonucleotide
  Target: LAMA2; (+) strand; PAM type: NAAAAC; PAM sequence: AAAAAC
ttcacaccattcctcttcct

SEQ ID NO: 7263 - DNA, 20 bp, Artificial Sequence
  Description of Artificial Sequence: Synthetic oligonucleotide
  Target: LAMA2; (+) strand; PAM type: NAAAAC; PAM sequence: AAAAAC
tccacaagcatttcaccatg

SEQ ID NO: 7264 - DNA, 20 bp, Artificial Sequence
  Description of Artificial Sequence: Synthetic oligonucleotide
  Target: LAMA2; (+) strand; PAM type: NAAAAC; PAM sequence: AAAAAC
taaacttgcatccaaccgag

SEQ ID NO: 7265 - DNA, 20 bp, Artificial Sequence
  Description of Artificial Sequence: Synthetic oligonucleotide
  Target: LAMA2; (+) strand; PAM type: NAAAAC; PAM sequence: CAAAAC
cagaaacttctgtctaactg

SEQ ID NO: 7266 - DNA, 20 bp, Artificial Sequence
  Description of Artificial Sequence: Synthetic oligonucleotide
  Target: LAMA2; (+) strand; PAM type: NAAAAC; PAM sequence: TAAAAC
atctatgacaatgttaaaag

SEQ ID NO: 7267 - DNA, 20 bp, Artificial Sequence
  Description of Artificial Sequence: Synthetic oligonucleotide
  Target: LAMA2; (+) strand; PAM type: NAAAAC; PAM sequence: AAAAAC
atgagacataaaagtgcttt

SEQ ID NO: 7268 - DNA, 20 bp, Artificial Sequence
  Description of Artificial Sequence: Synthetic oligonucleotide
  Target: LAMA2; (+) strand; PAM type: NAAAAC; PAM sequence: GAAAAC
atgtggtaaaaatcactttg

SEQ ID NO: 7269 - DNA, 20 bp, Artificial Sequence
  Description of Artificial Sequence: Synthetic oligonucleotide
  Target: LAMA2; (+) strand; PAM type: NAAAAC; PAM sequence: AAAAAC
gaaagaaaagctcaataaat

SEQ ID NO: 7270 - DNA, 20 bp, Artificial Sequence
  Description of Artificial Sequence: Synthetic oligonucleotide
  Target: LAMA2; (+) strand; PAM type: NAAAAC; PAM sequence: TAAAAC
tcacacttaaagaattaaaa

SEQ ID NO: 7271 - DNA, 20 bp, Artificial Sequence
  Description of Artificial Sequence: Synthetic oligonucleotide
  Target: LAMA2; (+) strand; PAM type: NAAAAC; PAM sequence: AAAAAC
tcctgtctactttgcatgga

SEQ ID NO: 7272 - DNA, 20 bp, Artificial Sequence
  Description of Artificial Sequence: Synthetic oligonucleotide
  Target: LAMA2; (+) strand; PAM type: NAAAAC; PAM sequence: TAAAAC
acgtaaatattgtctaatac

SEQ ID NO: 7273 - DNA, 20 bp, Artificial Sequence
  Description of Artificial Sequence: Synthetic oligonucleotide
  Target: LAMA2; (+) strand; PAM type: NAAAAC; PAM sequence: TAAAAC
atattacttaaaatataaat

SEQ ID NO: 7274 - DNA, 20 bp, Artificial Sequence
  Description of Artificial Sequence: Synthetic oligonucleotide
  Target: LAMA2; (+) strand; PAM type: NAAAAC; PAM sequence: TAAAAC
tttttgtccaagagtcatat

SEQ ID NO: 7275 - DNA, 20 bp, Artificial Sequence
  Description of Artificial Sequence: Synthetic oligonucleotide
  Target: LAMA2; (+) strand; PAM type: NAAAAC; PAM sequence: AAAAAC
gctgaggcaggagaattgct

SEQ ID NO: 7276 - DNA, 20 bp, Artificial Sequence
  Description of Artificial Sequence: Synthetic oligonucleotide
  Target: LAMA2; (+) strand; PAM type: NAAAAC; PAM sequence: TAAAAC
taacagatttatttattttt

SEQ ID NO: 7277 - DNA, 20 bp, Artificial Sequence
  Description of Artificial Sequence: Synthetic oligonucleotide
  Target: LAMA2; (+) strand; PAM type: NAAAAC; PAM sequence: GAAAAC
gctttaaacaatattagaaa

SEQ ID NO: 7278 - DNA, 20 bp, Artificial Sequence
  Description of Artificial Sequence: Synthetic oligonucleotide
  Target: LAMA2; (+) strand; PAM type: NAAAAC; PAM sequence: AAAAAC
ttttcctttcaataataagc

SEQ ID NO: 7279 - DNA, 20 bp, Artificial Sequence
  Description of Artificial Sequence: Synthetic oligonucleotide
  Target: LAMA2; (+) strand; PAM type: NAAAAC; PAM sequence: TAAAAC
cagcattcagtttctctcca

SEQ ID NO: 7280 - DNA, 20 bp, Artificial Sequence
  Description of Artificial Sequence: Synthetic oligonucleotide
  Target: LAMA2; (+) strand; PAM type: NAAAAC; PAM sequence: TAAAAC
catgactcagaaattttata

SEQ ID NO: 7281 - DNA, 20 bp, Artificial Sequence
  Description of Artificial Sequence: Synthetic oligonucleotide
  Target: LAMA2; (+) strand; PAM type: NAAAAC; PAM sequence: TAAAAC
gcaacctctgcctcccaggt

SEQ ID NO: 7282 - DNA, 20 bp, Artificial Sequence
  Description of Artificial Sequence: Synthetic oligonucleotide
  Target: LAMA2; (+) strand; PAM type: NAAAAC; PAM sequence: GAAAAC
gtttcaattttaagataaca

SEQ ID NO: 7283 - DNA, 20 bp, Artificial Sequence
  Description of Artificial Sequence: Synthetic oligonucleotide
  Target: LAMA2; (+) strand; PAM type: NAAAAC; PAM sequence: TAAAAC
ggtggcgaaaaatgtgaatt

SEQ ID NO: 7284 - DNA, 20 bp, Artificial Sequence
  Description of Artificial Sequence: Synthetic oligonucleotide
  Target: LAMA2; (+) strand; PAM type: NAAAAC; PAM sequence: AAAAAC
tgaatttaaaacatattttg

SEQ ID NO: 7285 - DNA, 20 bp, Artificial Sequence
  Description of Artificial Sequence: Synthetic oligonucleotide
  Target: LAMA2; (+) strand; PAM type: NAAAAC; PAM sequence: GAAAAC
agtgaatgaatctatatact

SEQ ID NO: 7286 - DNA, 20 bp, Artificial Sequence
  Description of Artificial Sequence: Synthetic oligonucleotide
  Target: LAMA2; (+) strand; PAM type: NAAAAC; PAM sequence: GAAAAC
caagtaagaagttccatatg

SEQ ID NO: 7287 - DNA, 20 bp, Artificial Sequence
  Description of Artificial Sequence: Synthetic oligonucleotide
  Target: LAMA2; (+) strand; PAM type: NAAAAC; PAM sequence: TAAAAC
aagcaaaaatctcatgacgc

SEQ ID NO: 7288 - DNA, 20 bp, Artificial Sequence
  Description of Artificial Sequence: Synthetic oligonucleotide
  Target: LAMA2; (+) strand; PAM type: NAAAAC; PAM sequence: AAAAAC
atgtgtatgtggcagcatat

SEQ ID NO: 7289 - DNA, 20 bp, Artificial Sequence
  Description of Artificial Sequence: Synthetic oligonucleotide
  Target: LAMA2; (+) strand; PAM type: NAAAAC; PAM sequence: CAAAAC
cttatagtcagattgattct

SEQ ID NO: 7290 - DNA, 20 bp, Artificial Sequence
  Description of Artificial Sequence: Synthetic oligonucleotide
  Target: LAMA2; (+) strand; PAM type: NAAAAC; PAM sequence: AAAAAC
atggctgttcataactggaa

SEQ ID NO: 7291 - DNA, 20 bp, Artificial Sequence
  Description of Artificial Sequence: Synthetic oligonucleotide
  Target: LAMA2; (+) strand; PAM type: NAAAAC; PAM sequence: AAAAAC
ggcaaaaataaaattctgac

SEQ ID NO: 7292 - DNA, 20 bp, Artificial Sequence
  Description of Artificial Sequence: Synthetic oligonucleotide
  Target: LAMA2; (+) strand; PAM type: NAAAAC; PAM sequence: TAAAAC
ctgtgaaaaaaatttgtcta

SEQ ID NO: 7293 - DNA, 20 bp, Artificial Sequence
  Description of Artificial Sequence: Synthetic oligonucleotide
  Target: LAMA2; (+) strand; PAM type: NAAAAC; PAM sequence: TAAAAC
tagaatttgcttttatagca

SEQ ID NO: 7294 - DNA, 20 bp, Artificial Sequence
  Description of Artificial Sequence: Synthetic oligonucleotide
  Target: LAMA2; (+) strand; PAM type: NAAAAC; PAM sequence: TAAAAC
tttctgggcttccaagtcac

SEQ ID NO: 7295 - DNA, 20 bp, Artificial Sequence
  Description of Artificial Sequence: Synthetic oligonucleotide
  Target: LAMA2; (+) strand; PAM type: NAAAAC; PAM sequence: CAAAAC
atagtaatgaacaaggtaaa

SEQ ID NO: 7296 - DNA, 20 bp, Artificial Sequence
  Description of Artificial Sequence: Synthetic oligonucleotide
  Target: LAMA2; (+) strand; PAM type: NAAAAC; PAM sequence: GAAAAC
tgatcagatttgaatcttaa

SEQ ID NO: 7297 - DNA, 20 bp, Artificial Sequence
  Description of Artificial Sequence: Synthetic oligonucleotide
  Target: LAMA2; (+) strand; PAM type: NAAAAC; PAM sequence: GAAAAC
cgggtggggattagaacgct

SEQ ID NO: 7298 - DNA, 20 bp, Artificial Sequence
  Description of Artificial Sequence: Synthetic oligonucleotide
  Target: LAMA2; (+) strand; PAM type: NAAAAC; PAM sequence: GAAAAC
tctaagtcttttaagccaga

SEQ ID NO: 7299 - DNA, 20 bp, Artificial Sequence
  Description of Artificial Sequence: Synthetic oligonucleotide
  Target: LAMA2; (+) strand; PAM type: NAAAAC; PAM sequence: CAAAAC
tctacaagtggaacataaac

SEQ ID NO: 7300 - DNA, 20 bp, Artificial Sequence
  Description of Artificial Sequence: Synthetic oligonucleotide
  Target: LAMA2; (+) strand; PAM type: NAAAAC; PAM sequence: GAAAAC
ttgggtatctactatataga

SEQ ID NO: 7301 - DNA, 20 bp, Artificial Sequence
  Description of Artificial Sequence: Synthetic oligonucleotide
  Target: LAMA2; (+) strand; PAM type: NAAAAC; PAM sequence: TAAAAC
tagtttaatatttaagctga

SEQ ID NO: 7302 - DNA, 20 bp, Artificial Sequence
  Description of Artificial Sequence: Synthetic oligonucleotide
  Target: LAMA2; (+) strand; PAM type: NAAAAC; PAM sequence: GAAAAC
cagagttgatgggaaaattt

SEQ ID NO: 7303 - DNA, 20 bp, Artificial Sequence
  Description of Artificial Sequence: Synthetic oligonucleotide
  Target: LAMA2; (+) strand; PAM type: NAAAAC; PAM sequence: CAAAAC
ttttcacttagctagtgtac

SEQ ID NO: 7304 - DNA, 20 bp, Artificial Sequence
  Description of Artificial Sequence: Synthetic oligonucleotide
  Target: LAMA2; (+) strand; PAM type: NAAAAC; PAM sequence: GAAAAC
aattctgtgtggcaaagtca

SEQ ID NO: 7305 - DNA, 20 bp, Artificial Sequence
  Description of Artificial Sequence: Synthetic oligonucleotide
  Target: LAMA2; (+) strand; PAM type: NAAAAC; PAM sequence: GAAAAC
gaagtgttgtcactgctgga

SEQ ID NO: 7306 - DNA, 20 bp, Artificial Sequence
  Description of Artificial Sequence: Synthetic oligonucleotide
  Target: LAMA2; (+) strand; PAM type: NAAAAC; PAM sequence: TAAAAC
tgcaaaaaggagtactttct

SEQ ID NO: 7307 - DNA, 20 bp, Artificial Sequence
  Description of Artificial Sequence: Synthetic oligonucleotide
  Target: LAMA2; (+) strand; PAM type: NAAAAC; PAM sequence: GAAAAC
gaattatgaaaattgtgttt

SEQ ID NO: 7308 - DNA, 20 bp, Artificial Sequence
  Description of Artificial Sequence: Synthetic oligonucleotide
  Target: LAMA2; (+) strand; PAM type: NAAAAC; PAM sequence: GAAAAC
acttgtgtagtgcttcaaaa

SEQ ID NO: 7309 - DNA, 20 bp, Artificial Sequence
  Description of Artificial Sequence: Synthetic oligonucleotide
  Target: LAMA2; (+) strand; PAM type: NAAAAC; PAM sequence: GAAAAC
tatatgagattaaagaactg

SEQ ID NO: 7310 - DNA, 20 bp, Artificial Sequence
  Description of Artificial Sequence: Synthetic oligonucleotide
  Target: LAMA2; (+) strand; PAM type: NAAAAC; PAM sequence: AAAAAC
caggcctgtgggtttcttgg

SEQ ID NO: 7311 - DNA, 20 bp, Artificial Sequence
  Description of Artificial Sequence: Synthetic oligonucleotide
  Target: LAMA2; (+) strand; PAM type: NAAAAC; PAM sequence: CAAAAC
atcagttgaggtcaggagtt

SEQ ID NO: 7312 - DNA, 20 bp, Artificial Sequence
  Description of Artificial Sequence: Synthetic oligonucleotide
  Target: LAMA2; (+) strand; PAM type: NAAAAC; PAM sequence: CAAAAC
aaccagcctggctgatatgg

SEQ ID NO: 7313 - DNA, 20 bp, Artificial Sequence
  Description of Artificial Sequence: Synthetic oligonucleotide
  Target: LAMA2; (+) strand; PAM type: NAAAAC; PAM sequence: AAAAAC
ccaggtttggctattatgat

SEQ ID NO: 7314 - DNA, 20 bp, Artificial Sequence
  Description of Artificial Sequence: Synthetic oligonucleotide
  Target: LAMA2; (+) strand; PAM type: NAAAAC; PAM sequence: AAAAAC
gaaggacttttatatttatt

SEQ ID NO: 7315 - DNA, 20 bp, Artificial Sequence
  Description of Artificial Sequence: Synthetic oligonucleotide
  Target: LAMA2; (+) strand; PAM type: NAAAAC; PAM sequence: TAAAAC
taatataatgccatttaatc

SEQ ID NO: 7316 - DNA, 20 bp, Artificial Sequence
  Description of Artificial Sequence: Synthetic oligonucleotide
  Target: LAMA2; (+) strand; PAM type: NAAAAC; PAM sequence: TAAAAC
tcactagttcttcaagccag

SEQ ID NO: 7317 - DNA, 20 bp, Artificial Sequence
  Description of Artificial Sequence: Synthetic oligonucleotide
  Target: LAMA2; (+) strand; PAM type: NAAAAC; PAM sequence: AAAAAC
tggtataaacacatccaaat

SEQ ID NO: 7318 - DNA, 20 bp, Artificial Sequence
  Description of Artificial Sequence: Synthetic oligonucleotide
  Target: LAMA2; (+) strand; PAM type: NAAAAC; PAM sequence: TAAAAC
aagcaactattccctgacca

SEQ ID NO: 7319 - DNA, 20 bp, Artificial Sequence
  Description of Artificial Sequence: Synthetic oligonucleotide
  Target: LAMA2; (+) strand; PAM type: NAAAAC; PAM sequence: GAAAAC
tgtctttagttttatggtta

SEQ ID NO: 7320 - DNA, 20 bp, Artificial Sequence
  Description of Artificial Sequence: Synthetic oligonucleotide
  Target: LAMA2; (+) strand; PAM type: NAAAAC; PAM sequence: CAAAAC
gggagtcttacccatacctg

SEQ ID NO: 7321 - DNA, 20 bp, Artificial Sequence
  Description of Artificial Sequence: Synthetic oligonucleotide
  Target: LAMA2; (+) strand; PAM type: NAAAAC; PAM sequence: TAAAAC
agaactggagaaaagtccac

SEQ ID NO: 7322 - DNA, 20 bp, Artificial Sequence
  Description of Artificial Sequence: Synthetic oligonucleotide
  Target: LAMA2; (+) strand; PAM type: NAAAAC; PAM sequence: AAAAAC
tatcacgagaacagcatgag

SEQ ID NO: 7323 - DNA, 20 bp, Artificial Sequence
  Description of Artificial Sequence: Synthetic oligonucleotide
  Target: LAMA2; (+) strand; PAM type: NAAAAC; PAM sequence: CAAAAC
tgtctggcataatatgtgct

SEQ ID NO: 7324 - DNA, 20 bp, Artificial Sequence
  Description of Artificial Sequence: Synthetic oligonucleotide
  Target: LAMA2; (+) strand; PAM type: NAAAAC; PAM sequence: AAAAAC
aagataaaaaaaaataaggt

SEQ ID NO: 7325 - DNA, 20 bp, Artificial Sequence
  Description of Artificial Sequence: Synthetic oligonucleotide
  Target: LAMA2; (+) strand; PAM type: NAAAAC; PAM sequence: TAAAAC
aaatggtactctacttttta

SEQ ID NO: 7326 - DNA, 20 bp, Artificial Sequence
  Description of Artificial Sequence: Synthetic oligonucleotide
  Target: LAMA2; (+) strand; PAM type: NAAAAC; PAM sequence: AAAAAC
acctcaactttcagctgaag

SEQ ID NO: 7327 - DNA, 20 bp, Artificial Sequence
  Description of Artificial Sequence: Synthetic oligonucleotide
  Target: LAMA2; (+) strand; PAM type: NAAAAC; PAM sequence: GAAAAC
tatctttttttaacagaaaa

SEQ ID NO: 7328 - DNA, 20 bp, Artificial Sequence
  Description of Artificial Sequence: Synthetic oligonucleotide
  Target: LAMA2; (+) strand; PAM type: NAAAAC; PAM sequence: TAAAAC
ctagatctatgctggtttca

SEQ ID NO: 7329 - DNA, 20 bp, Artificial Sequence
  Description of Artificial Sequence: Synthetic oligonucleotide
  Target: LAMA2; (+) strand; PAM type: NAAAAC; PAM sequence: GAAAAC
agatcttggtaaaaaaggca

SEQ ID NO: 7330 - DNA, 20 bp, Artificial Sequence
  Description of Artificial Sequence: Synthetic oligonucleotide
  Target: LAMA2; (+) strand; PAM type: NAAAAC; PAM sequence: AAAAAC
agatcgtatctatgaaagtt

SEQ ID NO: 7331 - DNA, 20 bp, Artificial Sequence
  Description of Artificial Sequence: Synthetic oligonucleotide
  Target: LAMA2; (+) strand; PAM type: NAAAAC; PAM sequence: CAAAAC
cgcagtgtcgaatctgcaat

SEQ ID NO: 7332 - DNA, 20 bp, Artificial Sequence
  Description of Artificial Sequence: Synthetic oligonucleotide
  Target: LAMA2; (+) strand; PAM type: NAAAAC; PAM sequence: TAAAAC
aattagagagataaaatatg

SEQ ID NO: 7333 - DNA, 20 bp, Artificial Sequence
  Description of Artificial Sequence: Synthetic oligonucleotide
  Target: LAMA2; (+) strand; PAM type: NAAAAC; PAM sequence: GAAAAC
ttatataatttaggaatgca

SEQ ID NO: 7334 - DNA, 20 bp, Artificial Sequence
  Description of Artificial Sequence: Synthetic oligonucleotide
  Target: LAMA2; (+) strand; PAM type: NAAAAC; PAM sequence: GAAAAC
gtgtgtatcacagaatatca

SEQ ID NO: 7335 - DNA, 20 bp, Artificial Sequence
  Description of Artificial Sequence: Synthetic oligonucleotide
  Target: LAMA2; (+) strand; PAM type: NAAAAC; PAM sequence: AAAAAC
catggtgtctctctagaagt

SEQ ID NO: 7336 - DNA, 20 bp, Artificial Sequence
  Description of Artificial Sequence: Synthetic oligonucleotide
  Target: LAMA2; (+) strand; PAM type: NAAAAC; PAM sequence: AAAAAC
atgggtcattaagcataggc

SEQ ID NO: 7337 - DNA, 20 bp, Artificial Sequence
  Description of Artificial Sequence: Synthetic oligonucleotide
  Target: LAMA2; (+) strand; PAM type: NAAAAC; PAM sequence: TAAAAC
aattagagagataaaatatg

SEQ ID NO: 7338 - DNA, 20 bp, Artificial Sequence
  Description of Artificial Sequence: Synthetic oligonucleotide
  Target: LAMA2; (+) strand; PAM type: NAAAAC; PAM sequence: TAAAAC
tactagaaatttagaaagaa

SEQ ID NO: 7339 - DNA, 20 bp, Artificial Sequence
  Description of Artificial Sequence: Synthetic oligonucleotide
  Target: LAMA2; (+) strand; PAM type: NAAAAC; PAM sequence: GAAAAC
gcagttaattatcctgcaaa

SEQ ID NO: 7340 - DNA, 20 bp, Artificial Sequence
  Description of Artificial Sequence: Synthetic oligonucleotide
  Target: LAMA2; (+) strand; PAM type: NAAAAC; PAM sequence: TAAAAC
ctataataccataaatagct

SEQ ID NO: 7341 - DNA, 20 bp, Artificial Sequence
  Description of Artificial Sequence: Synthetic oligonucleotide
  Target: LAMA2; (+) strand; PAM type: NAAAAC; PAM sequence: CAAAAC
tacaacttgtctctaagatt

SEQ ID NO: 7342 - DNA, 20 bp, Artificial Sequence
  Description of Artificial Sequence: Synthetic oligonucleotide
  Target: LAMA2; (+) strand; PAM type: NAAAAC; PAM sequence: AAAAAC
attttgatattatgggtttt

SEQ ID NO: 7343 - DNA, 20 bp, Artificial Sequence
  Description of Artificial Sequence: Synthetic oligonucleotide
  Target: LAMA2; (+) strand; PAM type: NAAAAC; PAM sequence: AAAAAC
tggaggttattattacttgg

SEQ ID NO: 7344 - DNA, 20 bp, Artificial Sequence
  Description of Artificial Sequence: Synthetic oligonucleotide
  Target: LAMA2; (+) strand; PAM type: NAAAAC; PAM sequence: GAAAAC
agcttctgtaagggccaagg

SEQ ID NO: 7345 - DNA, 20 bp, Artificial Sequence
  Description of Artificial Sequence: Synthetic oligonucleotide
  Target: LAMA2; (+) strand; PAM type: NAAAAC; PAM sequence: GAAAAC
gtgaaatgagttaaattaat

SEQ ID NO: 7346 - DNA, 20 bp, Artificial Sequence
  Description of Artificial Sequence: Synthetic oligonucleotide
  Target: LAMA2; (+) strand; PAM type: NAAAAC; PAM sequence: TAAAAC
tagatacgggagtatcagag

SEQ ID NO: 7347 - DNA, 20 bp, Artificial Sequence
  Description of Artificial Sequence: Synthetic oligonucleotide
  Target: LAMA2; (+) strand; PAM type: NAAAAC; PAM sequence: TAAAAC
aatttaacagcattttatgt

SEQ ID NO: 7348 - DNA, 20 bp, Artificial Sequence
  Description of Artificial Sequence: Synthetic oligonucleotide
  Target: LAMA2; (+) strand; PAM type: NAAAAC; PAM sequence: AAAAAC
tgttccagtgacgtgtatat

SEQ ID NO: 7349 - DNA, 20 bp, Artificial Sequence
  Description of Artificial Sequence: Synthetic oligonucleotide
  Target: LAMA2; (+) strand; PAM type: NAAAAC; PAM sequence: TAAAAC
tcaaacgttaataagatgtc

SEQ ID NO: 7350 - DNA, 20 bp, Artificial Sequence
  Description of Artificial Sequence: Synthetic oligonucleotide
  Target: LAMA2; (+) strand; PAM type: NAAAAC; PAM sequence: TAAAAC
aagctgattggcaggcgggg

SEQ ID NO: 7351 - DNA, 20 bp, Artificial Sequence
  Description of Artificial Sequence: Synthetic oligonucleotide
  Target: LAMA2; (+) strand; PAM type: NAAAAC; PAM sequence: CAAAAC
tctcttcctggtctatccct

SEQ ID NO: 7352 - DNA, 20 bp, Artificial Sequence
  Description of Artificial Sequence: Synthetic oligonucleotide
  Target: LAMA2; (+) strand; PAM type: NAAAAC; PAM sequence: TAAAAC
gttaaacatttctgcaataa

SEQ ID NO: 7353 - DNA, 20 bp, Artificial Sequence
  Description of Artificial Sequence: Synthetic oligonucleotide
  Target: LAMA2; (+) strand; PAM type: NAAAAC; PAM sequence: CAAAAC
gaaacaatggaagagattag

SEQ ID NO: 7354 - DNA, 20 bp, Artificial Sequence
  Description of Artificial Sequence: Synthetic oligonucleotide
  Target: LAMA2; (+) strand; PAM type: NAAAAC; PAM sequence: CAAAAC
atttttgatgaacatagatg

SEQ ID NO: 7355 - DNA, 20 bp, Artificial Sequence
  Description of Artificial Sequence: Synthetic oligonucleotide
  Target: LAMA2; (+) strand; PAM type: NAAAAC; PAM sequence: GAAAAC
atgacataatcttacatata

SEQ ID NO: 7356 - DNA, 20 bp, Artificial Sequence
  Description of Artificial Sequence: Synthetic oligonucleotide
  Target: LAMA2; (+) strand; PAM type: NAAAAC; PAM sequence: AAAAAC
tatgtctttatcagcagtgt

SEQ ID NO: 7357 - DNA, 20 bp, Artificial Sequence
  Description of Artificial Sequence: Synthetic oligonucleotide
  Target: LAMA2; (+) strand; PAM type: NAAAAC; PAM sequence: GAAAAC
agatgaaagactggtacact

SEQ ID NO: 7358 - DNA, 20 bp, Artificial Sequence
  Description of Artificial Sequence: Synthetic oligonucleotide
  Target: LAMA2; (+) strand; PAM type: NAAAAC; PAM sequence: TAAAAC
gactggtacactgaaaactg

SEQ ID NO: 7359 - DNA, 20 bp, Artificial Sequence
  Description of Artificial Sequence: Synthetic oligonucleotide
  Target: LAMA2; (+) strand; PAM type: NAAAAC; PAM sequence: GAAAAC
ttgaagacacaaataaatgg

SEQ ID NO: 7360 - DNA, 20 bp, Artificial Sequence
  Description of Artificial Sequence: Synthetic oligonucleotide
  Target: LAMA2; (+) strand; PAM type: NAAAAC; PAM sequence: CAAAAC
tactacaaagctgtagtaat

SEQ ID NO: 7361 - DNA, 20 bp, Artificial Sequence
  Description of Artificial Sequence: Synthetic oligonucleotide
  Target: LAMA2; (+) strand; PAM type: NAAAAC; PAM sequence: AAAAAC
aaacagtatgctgctaactt

SEQ ID NO: 7362 - DNA, 20 bp, Artificial Sequence
  Description of Artificial Sequence: Synthetic oligonucleotide
  Target: LAMA2; (+) strand; PAM type: NAAAAC; PAM sequence: TAAAAC
tgaattaaagactgaaactg

SEQ ID NO: 7363 - DNA, 20 bp, Artificial Sequence
  Description of Artificial Sequence: Synthetic oligonucleotide
  Target: LAMA2; (+) strand; PAM type: NAAAAC; PAM sequence: GAAAAC
aaactgtaaaactactgaaa

SEQ ID NO: 7364 - DNA, 20 bp, Artificial Sequence
  Description of Artificial Sequence: Synthetic oligonucleotide
  Target: LAMA2; (+) strand; PAM type: NAAAAC; PAM sequence: TAAAAC
ccaaagcacaggaaacacaa

SEQ ID NO: 7365 - DNA, 20 bp, Artificial Sequence
  Description of Artificial Sequence: Synthetic oligonucleotide
  Target: LAMA2; (+) strand; PAM type: NAAAAC; PAM sequence: TAAAAC
tttcactgtgcttcttatga

SEQ ID NO: 7366 - DNA, 20 bp, Artificial Sequence
  Description of Artificial Sequence: Synthetic oligonucleotide
  Target: LAMA2; (+) strand; PAM type: NAAAAC; PAM sequence: CAAAAC
tgcctgatgacttccacaca

SEQ ID NO: 7367 - DNA, 20 bp, Artificial Sequence
  Description of Artificial Sequence: Synthetic oligonucleotide
  Target: LAMA2; (+) strand; PAM type: NAAAAC; PAM sequence: AAAAAC
ttatttaaaaataaggaatt

SEQ ID NO: 7368 - DNA, 20 bp, Artificial Sequence
  Description of Artificial Sequence: Synthetic oligonucleotide
  Target: LAMA2; (+) strand; PAM type: NAAAAC; PAM sequence: AAAAAC
tagatcttgaaactgtgact

SEQ ID NO: 7369 - DNA, 20 bp, Artificial Sequence
  Description of Artificial Sequence: Synthetic oligonucleotide
  Target: LAMA2; (+) strand; PAM type: NAAAAC; PAM sequence: CAAAAC
atgtgaaaaatggaaaataa

SEQ ID NO: 7370 - DNA, 20 bp, Artificial Sequence
  Description of Artificial Sequence: Synthetic oligonucleotide
  Target: LAMA2; (+) strand; PAM type: NAAAAC; PAM sequence: GAAAAC
ccaacatatggcagtgactt

SEQ ID NO: 7371 - DNA, 20 bp, Artificial Sequence
  Description of Artificial Sequence: Synthetic oligonucleotide
  Target: LAMA2; (+) strand; PAM type: NAAAAC; PAM sequence: CAAAAC
gaaacctcatctctaccaaa

SEQ ID NO: 7372 - DNA, 20 bp, Artificial Sequence
  Description of Artificial Sequence: Synthetic oligonucleotide
  Target: LAMA2; (+) strand; PAM type: NAAAAC; PAM sequence: CAAAAC
ctcatctctaccaaacaaaa

SEQ ID NO: 7373 - DNA, 20 bp, Artificial Sequence
  Description of Artificial Sequence: Synthetic oligonucleotide
  Target: LAMA2; (+) strand; PAM type: NAAAAC; PAM sequence: CAAAAC
ctctaccaaacaaaacaaaa

SEQ ID NO: 7374 - DNA, 20 bp, Artificial Sequence
  Description of Artificial Sequence: Synthetic oligonucleotide
  Target: LAMA2; (+) strand; PAM type: NAAAAC; PAM sequence: CAAAAC
ccaaacaaaacaaaacaaaa

SEQ ID NO: 7375 - DNA, 20 bp, Artificial Sequence
  Description of Artificial Sequence: Synthetic oligonucleotide
  Target: LAMA2; (+) strand; PAM type: NAAAAC; PAM sequence: CAAAAC
caaaacaaaacaaaacaaaa

SEQ ID NO: 7376 - DNA, 20 bp, Artificial Sequence
  Description of Artificial Sequence: Synthetic oligonucleotide
  Target: LAMA2; (+) strand; PAM type: NAAAAC; PAM sequence: CAAAAC
aacaaaacaaaacaaaaccc

SEQ ID NO: 7377 - DNA, 20 bp, Artificial Sequence
  Description of Artificial Sequence: Synthetic oligonucleotide
  Target: LAMA2; (+) strand; PAM type: NAAAAC; PAM sequence: AAAAAC
tttattttatttacagtttt

SEQ ID NO: 7378 - DNA, 20 bp, Artificial Sequence
  Description of Artificial Sequence: Synthetic oligonucleotide
  Target: LAMA2; (+) strand; PAM type: NAAAAC; PAM sequence: TAAAAC
ctgaattattgcttcaatat

SEQ ID NO: 7379 - DNA, 20 bp, Artificial Sequence
  Description of Artificial Sequence: Synthetic oligonucleotide
  Target: LAMA2; (+) strand; PAM type: NAAAAC; PAM sequence: AAAAAC
tgatatttgagctgagaatt

SEQ ID NO: 7380 - DNA, 20 bp, Artificial Sequence
  Description of Artificial Sequence: Synthetic oligonucleotide
  Target: LAMA2; (+) strand; PAM type: NAAAAC; PAM sequence: GAAAAC
gattatagtgagataagtgt

SEQ ID NO: 7381 - DNA, 20 bp, Artificial Sequence
  Description of Artificial Sequence: Synthetic oligonucleotide
  Target: LAMA2; (+) strand; PAM type: NAAAAC; PAM sequence: CAAAAC
gacagagcaagacgctgtct

SEQ ID NO: 7382 - DNA, 20 bp, Artificial Sequence
  Description of Artificial Sequence: Synthetic oligonucleotide
  Target: LAMA2; (+) strand; PAM type: NAAAAC; PAM sequence: CAAAAC
agcaagacgctgtctcaaaa

SEQ ID NO: 7383 - DNA, 20 bp, Artificial Sequence
  Description of Artificial Sequence: Synthetic oligonucleotide
  Target: LAMA2; (+) strand; PAM type: NAAAAC; PAM sequence: AAAAAC
aatacctaaacataggggga

SEQ ID NO: 7384 - DNA, 20 bp, Artificial Sequence
  Description of Artificial Sequence: Synthetic oligonucleotide
  Target: LAMA2; (+) strand; PAM type: NAAAAC; PAM sequence: CAAAAC
aaagtaatacattcccttgt

SEQ ID NO: 7385 - DNA, 20 bp, Artificial Sequence
  Description of Artificial Sequence: Synthetic oligonucleotide
  Target: LAMA2; (+) strand; PAM type: NAAAAC; PAM sequence: TAAAAC
tacaactaaggagatcagtt

SEQ ID NO: 7386 - DNA, 20 bp, Artificial Sequence
  Description of Artificial Sequence: Synthetic oligonucleotide
  Target: LAMA2; (+) strand; PAM type: NAAAAC; PAM sequence: TAAAAC
tggaaatatgggaatgttta

SEQ ID NO: 7387 - DNA, 20 bp, Artificial Sequence
  Description of Artificial Sequence: Synthetic oligonucleotide
  Target: LAMA2; (+) strand; PAM type: NAAAAC; PAM sequence: TAAAAC
acactatttctcactttctt

SEQ ID NO: 7388 - DNA, 20 bp, Artificial Sequence
  Description of Artificial Sequence: Synthetic oligonucleotide
  Target: LAMA2; (+) strand; PAM type: NAAAAC; PAM sequence: AAAAAC
agtctgaaaatattacatac

SEQ ID NO: 7389 - DNA, 20 bp, Artificial Sequence
  Description of Artificial Sequence: Synthetic oligonucleotide
  Target: LAMA2; (+) strand; PAM type: NAAAAC; PAM sequence: GAAAAC
gtcgccaatgcaaggcccat

SEQ ID NO: 7390 - DNA, 20 bp, Artificial Sequence
  Description of Artificial Sequence: Synthetic oligonucleotide
  Target: LAMA2; (+) strand; PAM type: NAAAAC; PAM sequence: GAAAAC
tcctcaaaatgacacagtta

SEQ ID NO: 7391 - DNA, 20 bp, Artificial Sequence
  Description of Artificial Sequence: Synthetic oligonucleotide
  Target: LAMA2; (+) strand; PAM type: NAAAAC; PAM sequence: AAAAAC
ataattgtgagaatctcact

SEQ ID NO: 7392 - DNA, 20 bp, Artificial Sequence
  Description of Artificial Sequence: Synthetic oligonucleotide
  Target: LAMA2; (+) strand; PAM type: NAAAAC; PAM sequence: TAAAAC
tacagaggagtcttagaatt

SEQ ID NO: 7393 - DNA, 20 bp, Artificial Sequence
  Description of Artificial Sequence: Synthetic oligonucleotide
  Target: LAMA2; (+) strand; PAM type: NAAAAC; PAM sequence: CAAAAC
gccttcagagaaatgcaaat

SEQ ID NO: 7394 - DNA, 20 bp, Artificial Sequence
  Description of Artificial Sequence: Synthetic oligonucleotide
  Target: LAMA2; (+) strand; PAM type: NAAAAC; PAM sequence: TAAAAC
attatcaatgtggaaaatgc

SEQ ID NO: 7395 - DNA, 20 bp, Artificial Sequence
  Description of Artificial Sequence: Synthetic oligonucleotide
  Target: LAMA2; (+) strand; PAM type: NAAAAC; PAM sequence: AAAAAC
tgctaaaacaacttgctatt

SEQ ID NO: 7396 - DNA, 20 bp, Artificial Sequence
  Description of Artificial Sequence: Synthetic oligonucleotide
  Target: LAMA2; (+) strand; PAM type: NAAAAC; PAM sequence: AAAAAC
ataacaatcaaaatattcct

SEQ ID NO: 7397 - DNA, 20 bp, Artificial Sequence
  Description of Artificial Sequence: Synthetic oligonucleotide
  Target: LAMA2; (+) strand; PAM type: NAAAAC; PAM sequence: CAAAAC
aaacatattgagaactttaa

SEQ ID NO: 7398 - DNA, 20 bp, Artificial Sequence
  Description of Artificial Sequence: Synthetic oligonucleotide
  Target: LAMA2; (+) strand; PAM type: NAAAAC; PAM sequence: AAAAAC
aggtttccaaacgtttcaac

SEQ ID NO: 7399 - DNA, 20 bp, Artificial Sequence
  Description of Artificial Sequence: Synthetic oligonucleotide
  Target: LAMA2; (+) strand; PAM type: NAAAAC; PAM sequence: TAAAAC
ttaattctcttgatttttat

SEQ ID NO: 7400 - DNA, 20 bp, Artificial Sequence
  Description of Artificial Sequence: Synthetic oligonucleotide
  Target: LAMA2; (+) strand; PAM type: NAAAAC; PAM sequence: AAAAAC
tctttattcattgcaataat

SEQ ID NO: 7401 - DNA, 20 bp, Artificial Sequence
  Description of Artificial Sequence: Synthetic oligonucleotide
  Target: LAMA2; (+) strand; PAM type: NAAAAC; PAM sequence: AAAAAC
ataataaaaacaaacaaaca

SEQ ID NO: 7402 - DNA, 20 bp, Artificial Sequence
  Description of Artificial Sequence: Synthetic oligonucleotide
  Target: LAMA2; (+) strand; PAM type: NAAAAC; PAM sequence: TAAAAC
gtgttgcttgataatatttg

SEQ ID NO: 7403 - DNA, 20 bp, Artificial Sequence
  Description of Artificial Sequence: Synthetic oligonucleotide
  Target: LAMA2; (+) strand; PAM type: NAAAAC; PAM sequence: AAAAAC
aatctgcaatacatattttg

SEQ ID NO: 7404 - DNA, 20 bp, Artificial Sequence
  Description of Artificial Sequence: Synthetic oligonucleotide
  Target: LAMA2; (+) strand; PAM type: NAAAAC; PAM sequence: CAAAAC
gcagccaaacttgctaacag

SEQ ID NO: 7405 - DNA, 20 bp, Artificial Sequence
  Description of Artificial Sequence: Synthetic oligonucleotide
  Target: LAMA2; (+) strand; PAM type: NAAAAC; PAM sequence: CAAAAC
aaggcaaacttgcttcataa

SEQ ID NO: 7406 - DNA, 20 bp, Artificial Sequence
  Description of Artificial Sequence: Synthetic oligonucleotide
  Target: LAMA2; (+) strand; PAM type: NAAAAC; PAM sequence: CAAAAC
ttgcaaaaagcaaaagtagg

SEQ ID NO: 7407 - DNA, 20 bp, Artificial Sequence
  Description of Artificial Sequence: Synthetic oligonucleotide
  Target: LAMA2; (+) strand; PAM type: NAAAAC; PAM sequence: TAAAAC
ttaccacaaacttaatggct

SEQ ID NO: 7408 - DNA, 20 bp, Artificial Sequence
  Description of Artificial Sequence: Synthetic oligonucleotide
  Target: LAMA2; (+) strand; PAM type: NAAAAC; PAM sequence: CAAAAC
tttcccccttttctattcca

SEQ ID NO: 7409 - DNA, 20 bp, Artificial Sequence
  Description of Artificial Sequence: Synthetic oligonucleotide
  Target: LAMA2; (+) strand; PAM type: NAAAAC; PAM sequence: AAAAAC
ttggtaaatacagaagcaca

SEQ ID NO: 7410 - DNA, 20 bp, Artificial Sequence
  Description of Artificial Sequence: Synthetic oligonucleotide
  Target: LAMA2; (+) strand; PAM type: NAAAAC; PAM sequence: AAAAAC
cacctgcttccaagtttttt

SEQ ID NO: 7411 - DNA, 20 bp, Artificial Sequence
  Description of Artificial Sequence: Synthetic oligonucleotide
  Target: LAMA2; (+) strand; PAM type: NAAAAC; PAM sequence: GAAAAC
tctctactactatatttcct

SEQ ID NO: 7412 - DNA, 20 bp, Artificial Sequence
  Description of Artificial Sequence: Synthetic oligonucleotide
  Target: LAMA2; (+) strand; PAM type: NAAAAC; PAM sequence: AAAAAC
cattgatttaaacccttttg

SEQ ID NO: 7413 - DNA, 20 bp, Artificial Sequence
  Description of Artificial Sequence: Synthetic oligonucleotide
  Target: LAMA2; (+) strand; PAM type: NAAAAC; PAM sequence: TAAAAC
tgtaaacttataaggggaca

SEQ ID NO: 7414 - DNA, 20 bp, Artificial Sequence
  Description of Artificial Sequence: Synthetic oligonucleotide
  Target: LAMA2; (+) strand; PAM type: NAAAAC; PAM sequence: TAAAAC
cacattaatgtttttaagtt

SEQ ID NO: 7415 - DNA, 20 bp, Artificial Sequence
  Description of Artificial Sequence: Synthetic oligonucleotide
  Target: LAMA2; (+) strand; PAM type: NAAAAC; PAM sequence: GAAAAC
ttccaatgggtattaagctt

SEQ ID NO: 7416 - DNA, 20 bp, Artificial Sequence
  Description of Artificial Sequence: Synthetic oligonucleotide
  Target: LAMA2; (+) strand; PAM type: NAAAAC; PAM sequence: AAAAAC
ttggataaataagagaattg

SEQ ID NO: 7417 - DNA, 20 bp, Artificial Sequence
  Description of Artificial Sequence: Synthetic oligonucleotide
  Target: LAMA2; (+) strand; PAM type: NAAAAC; PAM sequence: CAAAAC
caaaagtctctgtaaatctc

SEQ ID NO: 7418 - DNA, 20 bp, Artificial Sequence
  Description of Artificial Sequence: Synthetic oligonucleotide
  Target: LAMA2; (+) strand; PAM type: NAAAAC; PAM sequence: AAAAAC
gaggtctcctgaacactggt

SEQ ID NO: 7419 - DNA, 20 bp, Artificial Sequence
  Description of Artificial Sequence: Synthetic oligonucleotide
  Target: LAMA2; (+) strand; PAM type: NAAAAC; PAM sequence: GAAAAC
ttttgaagagtctttataat

SEQ ID NO: 7420 - DNA, 20 bp, Artificial Sequence
  Description of Artificial Sequence: Synthetic oligonucleotide
  Target: LAMA2; (+) strand; PAM type: NAAAAC; PAM sequence: GAAAAC
cagttaataaaagtagcata

SEQ ID NO: 7421 - DNA, 20 bp, Artificial Sequence
  Description of Artificial Sequence: Synthetic oligonucleotide
  Target: LAMA2; (+) strand; PAM type: NAAAAC; PAM sequence: AAAAAC
tacattttaaaagtttactc

SEQ ID NO: 7422 - DNA, 20 bp, Artificial Sequence
  Description of Artificial Sequence: Synthetic oligonucleotide
  Target: LAMA2; (+) strand; PAM type: NAAAAC; PAM sequence: AAAAAC
tgttcaatatgaactgtcta

SEQ ID NO: 7423 - DNA, 20 bp, Artificial Sequence
  Description of Artificial Sequence: Synthetic oligonucleotide
  Target: LAMA2; (+) strand; PAM type: NAAAAC; PAM sequence: TAAAAC
aagataattttatttaaaag

SEQ ID NO: 7424 - DNA, 20 bp, Artificial Sequence
  Description of Artificial Sequence: Synthetic oligonucleotide
  Target: LAMA2; (+) strand; PAM type: NAAAAC; PAM sequence: TAAAAC
tcacctgcagtgatactcaa

SEQ ID NO: 7425 - DNA, 20 bp, Artificial Sequence
  Description of Artificial Sequence: Synthetic oligonucleotide
  Target: LAMA2; (+) strand; PAM type: NAAAAC; PAM sequence: CAAAAC
gtatgcatgagttaccatgt

SEQ ID NO: 7426 - DNA, 20 bp, Artificial Sequence
  Description of Artificial Sequence: Synthetic oligonucleotide
  Target: LAMA2; (+) strand; PAM type: NAAAAC; PAM sequence: CAAAAC
gacacagatatgcactacca

SEQ ID NO: 7427 - DNA, 20 bp, Artificial Sequence
  Description of Artificial Sequence: Synthetic oligonucleotide
  Target: LAMA2; (+) strand; PAM type: NAAAAC; PAM sequence: CAAAAC
tcttttaaagccatggttgt

SEQ ID NO: 7428 - DNA, 20 bp, Artificial Sequence
  Description of Artificial Sequence: Synthetic oligonucleotide
  Target: LAMA2; (+) strand; PAM type: NAAAAC; PAM sequence: CAAAAC
taaagccatggttgtcaaaa

SEQ ID NO: 7429 - DNA, 20 bp, Artificial Sequence
  Description of Artificial Sequence: Synthetic oligonucleotide
  Target: LAMA2; (+) strand; PAM type: NAAAAC; PAM sequence: GAAAAC
aaaatggagaggtaagatga

SEQ ID NO: 7430 - DNA, 20 bp, Artificial Sequence
  Description of Artificial Sequence: Synthetic oligonucleotide
  Target: LAMA2; (+) strand; PAM type: NAAAAC; PAM sequence: AAAAAC
tgagttattaaataaaaaag

SEQ ID NO: 7431 - DNA, 20 bp, Artificial Sequence
  Description of Artificial Sequence: Synthetic oligonucleotide
  Target: LAMA2; (+) strand; PAM type: NAAAAC; PAM sequence: GAAAAC
catttatatttacattttca

SEQ ID NO: 7432 - DNA, 20 bp, Artificial Sequence
  Description of Artificial Sequence: Synthetic oligonucleotide
  Target: LAMA2; (+) strand; PAM type: NAAAAC; PAM sequence: AAAAAC
caaaaataccagttttgggg

SEQ ID NO: 7433 - DNA, 20 bp, Artificial Sequence
  Description of Artificial Sequence: Synthetic oligonucleotide
  Target: LAMA2; (+) strand; PAM type: NAAAAC; PAM sequence: AAAAAC
actcctaaacaacacttact

SEQ ID NO: 7434 - DNA, 20 bp, Artificial Sequence
  Description of Artificial Sequence: Synthetic oligonucleotide
  Target: LAMA2; (+) strand; PAM type: NAAAAC; PAM sequence: CAAAAC
aattattaattgtttatgtt

SEQ ID NO: 7435 - DNA, 20 bp, Artificial Sequence
  Description of Artificial Sequence: Synthetic oligonucleotide
  Target: LAMA2; (+) strand; PAM type: NAAAAC; PAM sequence: TAAAAC
caaacatataaaccagtaaa

SEQ ID NO: 7436 - DNA, 20 bp, Artificial Sequence
  Description of Artificial Sequence: Synthetic oligonucleotide
  Target: LAMA2; (+) strand; PAM type: NAAAAC; PAM sequence: GAAAAC
gataacttctcagaatatgg

SEQ ID NO: 7437 - DNA, 20 bp, Artificial Sequence
  Description of Artificial Sequence: Synthetic oligonucleotide
  Target: LAMA2; (+) strand; PAM type: NAAAAC; PAM sequence: GAAAAC
tgatgtctttcatcagttca

SEQ ID NO: 7438 - DNA, 20 bp, Artificial Sequence
  Description of Artificial Sequence: Synthetic oligonucleotide
  Target: LAMA2; (+) strand; PAM type: NAAAAC; PAM sequence: TAAAAC
aataatgacaatgcacatgt

SEQ ID NO: 7439 - DNA, 20 bp, Artificial Sequence
  Description of Artificial Sequence: Synthetic oligonucleotide
  Target: LAMA2; (+) strand; PAM type: NAAAAC; PAM sequence: AAAAAC
ttaaatatgtcagaaataag

SEQ ID NO: 7440 - DNA, 20 bp, Artificial Sequence
  Description of Artificial Sequence: Synthetic oligonucleotide
  Target: LAMA2; (+) strand; PAM type: NAAAAC; PAM sequence: TAAAAC
gaggctttgagcaaaagcct

SEQ ID NO: 7441 - DNA, 20 bp, Artificial Sequence
  Description of Artificial Sequence: Synthetic oligonucleotide
  Target: LAMA2; (+) strand; PAM type: NAAAAC; PAM sequence: TAAAAC
tgagcaaataaacttcgaac

SEQ ID NO: 7442 - DNA, 20 bp, Artificial Sequence
  Description of Artificial Sequence: Synthetic oligonucleotide
  Target: LAMA2; (+) strand; PAM type: NAAAAC; PAM sequence: AAAAAC
aaattaatgcagtattgttg

SEQ ID NO: 7443 - DNA, 20 bp, Artificial Sequence
  Description of Artificial Sequence: Synthetic oligonucleotide
  Target: LAMA2; (+) strand; PAM type: NAAAAC; PAM sequence: GAAAAC
tgagaatggaatcctgagga

SEQ ID NO: 7444 - DNA, 20 bp, Artificial Sequence
  Description of Artificial Sequence: Synthetic oligonucleotide
  Target: LAMA2; (+) strand; PAM type: NAAAAC; PAM sequence: CAAAAC
atcaaattagatttttatgg

SEQ ID NO: 7445 - DNA, 20 bp, Artificial Sequence
  Description of Artificial Sequence: Synthetic oligonucleotide
  Target: LAMA2; (+) strand; PAM type: NAAAAC; PAM sequence: AAAAAC
ctgaaggaataagcaaagca

SEQ ID NO: 7446 - DNA, 20 bp, Artificial Sequence
  Description of Artificial Sequence: Synthetic oligonucleotide
  Target: LAMA2; (+) strand; PAM type: NAAAAC; PAM sequence: TAAAAC
caagtagacaaaaataataa

SEQ ID NO: 7447 - DNA, 20 bp, Artificial Sequence
  Description of Artificial Sequence: Synthetic oligonucleotide
  Target: LAMA2; (+) strand; PAM type: NAAAAC; PAM sequence: AAAAAC
gcaataggaaatatgaccat

SEQ ID NO: 7448 - DNA, 20 bp, Artificial Sequence
  Description of Artificial Sequence: Synthetic oligonucleotide
  Target: LAMA2; (+) strand; PAM type: NAAAAC; PAM sequence: CAAAAC
tttactcacagaagattcct

SEQ ID NO: 7449 - DNA, 20 bp, Artificial Sequence
  Description of Artificial Sequence: Synthetic oligonucleotide
  Target: LAMA2; (+) strand; PAM type: NAAAAC; PAM sequence: TAAAAC
aagtctttaaaattggctgc

SEQ ID NO: 7450 - DNA, 20 bp, Artificial Sequence
  Description of Artificial Sequence: Synthetic oligonucleotide
  Target: LAMA2; (+) strand; PAM type: NAAAAC; PAM sequence: GAAAAC
catcttatagtaaaatttat

SEQ ID NO: 7451 - DNA, 20 bp, Artificial Sequence
  Description of Artificial Sequence: Synthetic oligonucleotide
  Target: LAMA2; (+) strand; PAM type: NAAAAC; PAM sequence: CAAAAC
taaatacatttttggtcaaa

SEQ ID NO: 7452 - DNA, 20 bp, Artificial Sequence
  Description of Artificial Sequence: Synthetic oligonucleotide
  Target: LAMA2; (+) strand; PAM type: NAAAAC; PAM sequence: AAAAAC
gcttgtcagttttgatccaa

SEQ ID NO: 7453 - DNA, 20 bp, Artificial Sequence
  Description of Artificial Sequence: Synthetic oligonucleotide
  Target: LAMA2; (+) strand; PAM type: NAAAAC; PAM sequence: AAAAAC
gacctgttacttcttgtgtg

SEQ ID NO: 7454 - DNA, 20 bp, Artificial Sequence
  Description of Artificial Sequence: Synthetic oligonucleotide
  Target: LAMA2; (+) strand; PAM type: NAAAAC; PAM sequence: CAAAAC
taagaagcacttcaggttgt

SEQ ID NO: 7455 - DNA, 20 bp, Artificial Sequence
  Description of Artificial Sequence: Synthetic oligonucleotide
  Target: LAMA2; (+) strand; PAM type: NAAAAC; PAM sequence: AAAAAC
catccaccatctctactcgg

SEQ ID NO: 7456 - DNA, 20 bp, Artificial Sequence
  Description of Artificial Sequence: Synthetic oligonucleotide
  Target: LAMA2; (+) strand; PAM type: NAAAAC; PAM sequence: GAAAAC
ctaggcccctgctatgaagt

SEQ ID NO: 7457 - DNA, 20 bp, Artificial Sequence
  Description of Artificial Sequence: Synthetic oligonucleotide
  Target: LAMA2; (+) strand; PAM type: NAAAAC; PAM sequence: TAAAAC
taggggcattttacatgttt

SEQ ID NO: 7458 - DNA, 20 bp, Artificial Sequence
  Description of Artificial Sequence: Synthetic oligonucleotide
  Target: LAMA2; (+) strand; PAM type: NAAAAC; PAM sequence: AAAAAC
tacagagagagagagaaaaa

SEQ ID NO: 7459 - DNA, 20 bp, Artificial Sequence
  Description of Artificial Sequence: Synthetic oligonucleotide
  Target: LAMA2; (+) strand; PAM type: NAAAAC; PAM sequence: TAAAAC
aggctgcttgtaccaaactg

SEQ ID NO: 7460 - DNA, 20 bp, Artificial Sequence
  Description of Artificial Sequence: Synthetic oligonucleotide
  Target: LAMA2; (+) strand; PAM type: NAAAAC; PAM sequence: GAAAAC
attttaaacatacacttagg

SEQ ID NO: 7461 - DNA, 20 bp, Artificial Sequence
  Description of Artificial Sequence: Synthetic oligonucleotide
  Target: LAMA2; (+) strand; PAM type: NAAAAC; PAM sequence: AAAAAC
aacatacacttagggaaaac

SEQ ID NO: 7462 - DNA, 20 bp, Artificial Sequence
  Description of Artificial Sequence: Synthetic oligonucleotide
  Target: LAMA2; (+) strand; PAM type: NAAAAC; PAM sequence: AAAAAC
cacttagggaaaacaaaaac

SEQ ID NO: 7463 - DNA, 20 bp, Artificial Sequence
  Description of Artificial Sequence: Synthetic oligonucleotide
  Target: LAMA2; (+) strand; PAM type: NAAAAC; PAM sequence: CAAAAC
agggaaaacaaaaacaaaaa

SEQ ID NO: 7464 - DNA, 20 bp, Artificial Sequence
  Description of Artificial Sequence: Synthetic oligonucleotide
  Target: LAMA2; (+) strand; PAM type: NAAAAC; PAM sequence: CAAAAC
gacaatcttttaataatttc

SEQ ID NO: 7465 - DNA, 20 bp, Artificial Sequence
  Description of Artificial Sequence: Synthetic oligonucleotide
  Target: LAMA2; (+) strand; PAM type: NAAAAC; PAM sequence: CAAAAC
atgggccatttaaatatagg

SEQ ID NO: 7466 - DNA, 20 bp, Artificial Sequence
  Description of Artificial Sequence: Synthetic oligonucleotide
  Target: LAMA2; (+) strand; PAM type: NAAAAC; PAM sequence: CAAAAC
aaatataggcaaaacaacaa

SEQ ID NO: 7467 - DNA, 20 bp, Artificial Sequence
  Description of Artificial Sequence: Synthetic oligonucleotide
  Target: LAMA2; (+) strand; PAM type: NAAAAC; PAM sequence: AAAAAC
acaaaacaaagcaaacaagt

SEQ ID NO: 7468 - DNA, 20 bp, Artificial Sequence
  Description of Artificial Sequence: Synthetic oligonucleotide
  Target: LAMA2; (+) strand; PAM type: NAAAAC; PAM sequence: CAAAAC
ttaaagaacagctaaagatt

SEQ ID NO: 7469 - DNA, 20 bp, Artificial Sequence
  Description of Artificial Sequence: Synthetic oligonucleotide
  Target: LAMA2; (+) strand; PAM type: NAAAAC; PAM sequence: GAAAAC
actcacacaattccctaaag

SEQ ID NO: 7470 - DNA, 20 bp, Artificial Sequence
  Description of Artificial Sequence: Synthetic oligonucleotide
  Target: LAMA2; (+) strand; PAM type: NAAAAC; PAM sequence: AAAAAC
tctgtatttgctttttttaa

SEQ ID NO: 7471 - DNA, 20 bp, Artificial Sequence
  Description of Artificial Sequence: Synthetic oligonucleotide
  Target: LAMA2; (+) strand; PAM type: NAAAAC; PAM sequence: AAAAAC
tctatatacttcctctatcc

SEQ ID NO: 7472 - DNA, 20 bp, Artificial Sequence
  Description of Artificial Sequence: Synthetic oligonucleotide
  Target: LAMA2; (+) strand; PAM type: NAAAAC; PAM sequence: GAAAAC
agacaccagaatgttgccca

SEQ ID NO: 7473 - DNA, 20 bp, Artificial Sequence
  Description of Artificial Sequence: Synthetic oligonucleotide
  Target: LAMA2; (+) strand; PAM type: NAAAAC; PAM sequence: GAAAAC
tttatacatttatttattct

SEQ ID NO: 7474 - DNA, 20 bp, Artificial Sequence
  Description of Artificial Sequence: Synthetic oligonucleotide
  Target: LAMA2; (+) strand; PAM type: NAAAAC; PAM sequence: CAAAAC
tgtcaaggtggcatacatga

SEQ ID NO: 7475 - DNA, 20 bp, Artificial Sequence
  Description of Artificial Sequence: Synthetic oligonucleotide
  Target: LAMA2; (+) strand; PAM type: NAAAAC; PAM sequence: GAAAAC
tgttcccattttgcaaataa

SEQ ID NO: 7476 - DNA, 20 bp, Artificial Sequence
  Description of Artificial Sequence: Synthetic oligonucleotide
  Target: LAMA2; (+) strand; PAM type: NAAAAC; PAM sequence: AAAAAC
cagaggtgattgtgtctaat

SEQ ID NO: 7477 - DNA, 20 bp, Artificial Sequence
  Description of Artificial Sequence: Synthetic oligonucleotide
  Target: LAMA2; (+) strand; PAM type: NAAAAC; PAM sequence: AAAAAC
tggatttgaagtaaaaaata

SEQ ID NO: 7478 - DNA, 20 bp, Artificial Sequence
  Description of Artificial Sequence: Synthetic oligonucleotide
  Target: LAMA2; (+) strand; PAM type: NAAAAC; PAM sequence: AAAAAC
tgaagtaaaaaataaaaaac

SEQ ID NO: 7479 - DNA, 20 bp, Artificial Sequence
  Description of Artificial Sequence: Synthetic oligonucleotide
  Target: LAMA2; (+) strand; PAM type: NAAAAC; PAM sequence: AAAAAC
gacatgcatctgattaatgt

SEQ ID NO: 7480 - DNA, 20 bp, Artificial Sequence
  Description of Artificial Sequence: Synthetic oligonucleotide
  Target: LAMA2; (+) strand; PAM type: NAAAAC; PAM sequence: GAAAAC
aagagtgaggaactaagtct

SEQ ID NO: 7481 - DNA, 20 bp, Artificial Sequence
  Description of Artificial Sequence: Synthetic oligonucleotide
  Target: LAMA2; (+) strand; PAM type: NAAAAC; PAM sequence: TAAAAC
aaagtcaaaatcaaatgaaa

SEQ ID NO: 7482 - DNA, 20 bp, Artificial Sequence
  Description of Artificial Sequence: Synthetic oligonucleotide
  Target: LAMA2; (+) strand; PAM type: NAAAAC; PAM sequence: CAAAAC
agattacgattagtatacca

SEQ ID NO: 7483 - DNA, 20 bp, Artificial Sequence
  Description of Artificial Sequence: Synthetic oligonucleotide
  Target: LAMA2; (+) strand; PAM type: NAAAAC; PAM sequence: AAAAAC
attatttgcagggaacttat

SEQ ID NO: 7484 - DNA, 20 bp, Artificial Sequence
  Description of Artificial Sequence: Synthetic oligonucleotide
  Target: LAMA2; (+) strand; PAM type: NAAAAC; PAM sequence: TAAAAC
taaatgttttagacatttct

SEQ ID NO: 7485 - DNA, 20 bp, Artificial Sequence
  Description of Artificial Sequence: Synthetic oligonucleotide
  Target: LAMA2; (+) strand; PAM type: NAAAAC; PAM sequence: CAAAAC
catttcttaaaacttataag

SEQ ID NO: 7486 - DNA, 20 bp, Artificial Sequence
  Description of Artificial Sequence: Synthetic oligonucleotide
  Target: LAMA2; (+) strand; PAM type: NAAAAC; PAM sequence: GAAAAC
atatgtagctaattgactat

SEQ ID NO: 7487 - DNA, 20 bp, Artificial Sequence
  Description of Artificial Sequence: Synthetic oligonucleotide
  Target: LAMA2; (+) strand; PAM type: NAAAAC; PAM sequence: AAAAAC
gtgaaaccctgtctctacta

SEQ ID NO: 7488 - DNA, 20 bp, Artificial Sequence
  Description of Artificial Sequence: Synthetic oligonucleotide
  Target: LAMA2; (+) strand; PAM type: NAAAAC; PAM sequence: CAAAAC
tataaggaaactaaaatagt

SEQ ID NO: 7489 - DNA, 20 bp, Artificial Sequence
  Description of Artificial Sequence: Synthetic oligonucleotide
  Target: LAMA2; (+) strand; PAM type: NAAAAC; PAM sequence: GAAAAC
taataataaagagagtgaga

SEQ ID NO: 7490 - DNA, 20 bp, Artificial Sequence
  Description of Artificial Sequence: Synthetic oligonucleotide
  Target: LAMA2; (+) strand; PAM type: NAAAAC; PAM sequence: TAAAAC
gagagatgaagtagagcttg

SEQ ID NO: 7491 - DNA, 20 bp, Artificial Sequence
  Description of Artificial Sequence: Synthetic oligonucleotide
  Target: LAMA2; (+) strand; PAM type: NAAAAC; PAM sequence: AAAAAC
aggagtccaggtccataaag

SEQ ID NO: 7492 - DNA, 20 bp, Artificial Sequence
  Description of Artificial Sequence: Synthetic oligonucleotide
  Target: LAMA2; (+) strand; PAM type: NAAAAC; PAM sequence: AAAAAC
taaaaaataaaaagccatca

SEQ ID NO: 7493 - DNA, 20 bp, Artificial Sequence
  Description of Artificial Sequence: Synthetic oligonucleotide
  Target: LAMA2; (+) strand; PAM type: NAAAAC; PAM sequence: TAAAAC
ataaaatctcatattttgaa

SEQ ID NO: 7494 - DNA, 20 bp, Artificial Sequence
  Description of Artificial Sequence: Synthetic oligonucleotide
  Target: LAMA2; (+) strand; PAM type: NAAAAC; PAM sequence: AAAAAC
tttctttttttgagaaccag

SEQ ID NO: 7495 - DNA, 20 bp, Artificial Sequence
  Description of Artificial Sequence: Synthetic oligonucleotide
  Target: LAMA2; (+) strand; PAM type: NAAAAC; PAM sequence: CAAAAC
aatacaaagaaagccagaat

SEQ ID NO: 7496 - DNA, 20 bp, Artificial Sequence
  Description of Artificial Sequence: Synthetic oligonucleotide
  Target: LAMA2; (+) strand; PAM type: NAAAAC; PAM sequence: TAAAAC
aatatgggtcctcagggcca

SEQ ID NO: 7497 - DNA, 20 bp, Artificial Sequence
  Description of Artificial Sequence: Synthetic oligonucleotide
  Target: LAMA2; (+) strand; PAM type: NAAAAC; PAM sequence: CAAAAC
gagtgcagatatcttttcgg

SEQ ID NO: 7498 - DNA, 20 bp, Artificial Sequence
  Description of Artificial Sequence: Synthetic oligonucleotide
  Target: LAMA2; (+) strand; PAM type: NAAAAC; PAM sequence: GAAAAC
ttctacttttagttgttttg

SEQ ID NO: 7499 - DNA, 20 bp, Artificial Sequence
  Description of Artificial Sequence: Synthetic oligonucleotide
  Target: LAMA2; (+) strand; PAM type: NAAAAC; PAM sequence: CAAAAC
tatactttgggggtcaaatt

SEQ ID NO: 7500 - DNA, 20 bp, Artificial Sequence
  Description of Artificial Sequence: Synthetic oligonucleotide
  Target: LAMA2; (+) strand; PAM type: NAAAAC; PAM sequence: AAAAAC
gaaaaatttcaggaataagg

SEQ ID NO: 7501 - DNA, 20 bp, Artificial Sequence
  Description of Artificial Sequence: Synthetic oligonucleotide
  Target: LAMA2; (+) strand; PAM type: NAAAAC; PAM sequence: TAAAAC
tataagggaggagactcaag

SEQ ID NO: 7502 - DNA, 20 bp, Artificial Sequence
  Description of Artificial Sequence: Synthetic oligonucleotide
  Target: LAMA2; (+) strand; PAM type: NAAAAC; PAM sequence: TAAAAC
gagatcgagaccatcccggc

SEQ ID NO: 7503 - DNA, 20 bp, Artificial Sequence
  Description of Artificial Sequence: Synthetic oligonucleotide
  Target: LAMA2; (+) strand; PAM type: NAAAAC; PAM sequence: AAAAAC
aatattgatcagattttcag

SEQ ID NO: 7504 - DNA, 20 bp, Artificial Sequence
  Description of Artificial Sequence: Synthetic oligonucleotide
  Target: LAMA2; (+) strand; PAM type: NAAAAC; PAM sequence: GAAAAC
ttgtgagccagtttagaaat

SEQ ID NO: 7505 - DNA, 20 bp, Artificial Sequence
  Description of Artificial Sequence: Synthetic oligonucleotide
  Target: LAMA2; (+) strand; PAM type: NAAAAC; PAM sequence: CAAAAC
tagaaatgaaaacaaacaaa

SEQ ID NO: 7506 - DNA, 20 bp, Artificial Sequence
  Description of Artificial Sequence: Synthetic oligonucleotide
  Target: LAMA2; (+) strand; PAM type: NAAAAC; PAM sequence: GAAAAC
aaagcatattacaaataatt

SEQ ID NO: 7507 - DNA, 20 bp, Artificial Sequence
  Description of Artificial Sequence: Synthetic oligonucleotide
  Target: LAMA2; (+) strand; PAM type: NAAAAC; PAM sequence: GAAAAC
gtgtgcttgctaaatctaca

SEQ ID NO: 7508 - DNA, 20 bp, Artificial Sequence
  Description of Artificial Sequence: Synthetic oligonucleotide
  Target: LAMA2; (+) strand; PAM type: NAAAAC; PAM sequence: CAAAAC
tgcacagagccaacatccta

SEQ ID NO: 7509 - DNA, 20 bp, Artificial Sequence
  Description of Artificial Sequence: Synthetic oligonucleotide
  Target: LAMA2; (+) strand; PAM type: NAAAAC; PAM sequence: GAAAAC
ttttatttacctttgttaga

SEQ ID NO: 7510 - DNA, 20 bp, Artificial Sequence
  Description of Artificial Sequence: Synthetic oligonucleotide
  Target: LAMA2; (+) strand; PAM type: NAAAAC; PAM sequence: CAAAAC
aaaaattagtcatgtgaaag

SEQ ID NO: 7511 - DNA, 20 bp, Artificial Sequence
  Description of Artificial Sequence: Synthetic oligonucleotide
  Target: LAMA2; (+) strand; PAM type: NAAAAC; PAM sequence: GAAAAC
agtgttcccacacggggact

SEQ ID NO: 7512 - DNA, 20 bp, Artificial Sequence
  Description of Artificial Sequence: Synthetic oligonucleotide
  Target: LAMA2; (+) strand; PAM type: NAAAAC; PAM sequence: CAAAAC
tcccacacggggactgaaaa

SEQ ID NO: 7513 - DNA, 20 bp, Artificial Sequence
  Description of Artificial Sequence: Synthetic oligonucleotide
  Target: LAMA2; (+) strand; PAM type: NAAAAC; PAM sequence: GAAAAC
cataaagcatacgtattttt

SEQ ID NO: 7514 - DNA, 20 bp, Artificial Sequence
  Description of Artificial Sequence: Synthetic oligonucleotide
  Target: LAMA2; (+) strand; PAM type: NAAAAC; PAM sequence: CAAAAC
atctctggttggggcacacc

SEQ ID NO: 7515 - DNA, 20 bp, Artificial Sequence
  Description of Artificial Sequence: Synthetic oligonucleotide
  Target: LAMA2; (+) strand; PAM type: NAAAAC; PAM sequence: AAAAAC
tatactttaactgaagaaag

SEQ ID NO: 7516 - DNA, 20 bp, Artificial Sequence
  Description of Artificial Sequence: Synthetic oligonucleotide
  Target: LAMA2; (+) strand; PAM type: NAAAAC; PAM sequence: GAAAAC
aatagcaaataatctttaaa

SEQ ID NO: 7517 - DNA, 20 bp, Artificial Sequence
  Description of Artificial Sequence: Synthetic oligonucleotide
  Target: LAMA2; (+) strand; PAM type: NAAAAC; PAM sequence: AAAAAC
gaaaattgacagaatacttc

SEQ ID NO: 7518 - DNA, 20 bp, Artificial Sequence
  Description of Artificial Sequence: Synthetic oligonucleotide
  Target: LAMA2; (+) strand; PAM type: NAAAAC; PAM sequence: GAAAAC
agtagctgaagcggtagaag

SEQ ID NO: 7519 - DNA, 20 bp, Artificial Sequence
  Description of Artificial Sequence: Synthetic oligonucleotide
  Target: LAMA2; (+) strand; PAM type: NAAAAC; PAM sequence: CAAAAC
ttatagctcttcaagctttc

SEQ ID NO: 7520 - DNA, 20 bp, Artificial Sequence
  Description of Artificial Sequence: Synthetic oligonucleotide
  Target: LAMA2; (+) strand; PAM type: NAAAAC; PAM sequence: GAAAAC
ccccccctttatttgccttg

SEQ ID NO: 7521 - DNA, 20 bp, Artificial Sequence
  Description of Artificial Sequence: Synthetic oligonucleotide
  Target: LAMA2; (+) strand; PAM type: NAAAAC; PAM sequence: AAAAAC
gagtgtcattttaaactcta

SEQ ID NO: 7522 - DNA, 20 bp, Artificial Sequence
  Description of Artificial Sequence: Synthetic oligonucleotide
  Target: LAMA2; (+) strand; PAM type: NAAAAC; PAM sequence: CAAAAC
aaaggaaaaaaaaatacaca

SEQ ID NO: 7523 - DNA, 20 bp, Artificial Sequence
  Description of Artificial Sequence: Synthetic oligonucleotide
  Target: LAMA2; (+) strand; PAM type: NAAAAC; PAM sequence: TAAAAC
aaatacagataacgacaacc

SEQ ID NO: 7524 - DNA, 20 bp, Artificial Sequence
  Description of Artificial Sequence: Synthetic oligonucleotide
  Target: LAMA2; (+) strand; PAM type: NAAAAC; PAM sequence: GAAAAC
aaatcaatatttaaattttg

SEQ ID NO: 7525 - DNA, 20 bp, Artificial Sequence
  Description of Artificial Sequence: Synthetic oligonucleotide
  Target: LAMA2; (+) strand; PAM type: NAAAAC; PAM sequence: AAAAAC
gagctgagacgctgcacttc

SEQ ID NO: 7526 - DNA, 20 bp, Artificial Sequence
  Description of Artificial Sequence: Synthetic oligonucleotide
  Target: LAMA2; (+) strand; PAM type: NAAAAC; PAM sequence: GAAAAC
aaaaatgcagtgctatagga

SEQ ID NO: 7527 - DNA, 20 bp, Artificial Sequence
  Description of Artificial Sequence: Synthetic oligonucleotide
  Target: LAMA2; (+) strand; PAM type: NAAAAC; PAM sequence: CAAAAC
atattgtaaattgtctcatg

SEQ ID NO: 7528 - DNA, 20 bp, Artificial Sequence
  Description of Artificial Sequence: Synthetic oligonucleotide
  Target: LAMA2; (+) strand; PAM type: NAAAAC; PAM sequence: GAAAAC
tggatttttcacttgtttaa

SEQ ID NO: 7529 - DNA, 20 bp, Artificial Sequence
  Description of Artificial Sequence: Synthetic oligonucleotide
  Target: LAMA2; (+) strand; PAM type: NAAAAC; PAM sequence: AAAAAC
agacactatatgtatgtaac

SEQ ID NO: 7530 - DNA, 20 bp, Artificial Sequence
  Description of Artificial Sequence: Synthetic oligonucleotide
  Target: LAMA2; (+) strand; PAM type: NAAAAC; PAM sequence: TAAAAC
ttcttttcaaatccatcaag

SEQ ID NO: 7531 - DNA, 20 bp, Artificial Sequence
  Description of Artificial Sequence: Synthetic oligonucleotide
  Target: LAMA2; (+) strand; PAM type: NAAAAC; PAM sequence: TAAAAC
gtttcttgcaagaaactatg

SEQ ID NO: 7532 - DNA, 20 bp, Artificial Sequence
  Description of Artificial Sequence: Synthetic oligonucleotide
  Target: LAMA2; (+) strand; PAM type: NAAAAC; PAM sequence: AAAAAC
agctgtccttagccccagat

SEQ ID NO: 7533 - DNA, 20 bp, Artificial Sequence
  Description of Artificial Sequence: Synthetic oligonucleotide
  Target: LAMA2; (+) strand; PAM type: NAAAAC; PAM sequence: GAAAAC
aatcagccatcacagtataa

SEQ ID NO: 7534 - DNA, 20 bp, Artificial Sequence
  Description of Artificial Sequence: Synthetic oligonucleotide
  Target: LAMA2; (+) strand; PAM type: NAAAAC; PAM sequence: GAAAAC
aggaaactaacacaggaaca

SEQ ID NO: 7535 - DNA, 20 bp, Artificial Sequence
  Description of Artificial Sequence: Synthetic oligonucleotide
  Target: LAMA2; (+) strand; PAM type: NAAAAC; PAM sequence: TAAAAC
caacattttgaggggagcct

SEQ ID NO: 7536 - DNA, 20 bp, Artificial Sequence
  Description of Artificial Sequence: Synthetic oligonucleotide
  Target: LAMA2; (+) strand; PAM type: NAAAAC; PAM sequence: AAAAAC
aacaagctaatcgaccccca

SEQ ID NO: 7537 - DNA, 20 bp, Artificial Sequence
  Description of Artificial Sequence: Synthetic oligonucleotide
  Target: LAMA2; (+) strand; PAM type: NAAAAC; PAM sequence: TAAAAC
agagctggaacttttctaac

SEQ ID NO: 7538 - DNA, 20 bp, Artificial Sequence
  Description of Artificial Sequence: Synthetic oligonucleotide
  Target: LAMA2; (+) strand; PAM type: NAAAAC; PAM sequence: AAAAAC
actaagtatatatggccttc

SEQ ID NO: 7539 - DNA, 20 bp, Artificial Sequence
  Description of Artificial Sequence: Synthetic oligonucleotide
  Target: LAMA2; (+) strand; PAM type: NAAAAC; PAM sequence: TAAAAC
tgtcagacatgacaggtctt

SEQ ID NO: 7540 - DNA, 20 bp, Artificial Sequence
  Description of Artificial Sequence: Synthetic oligonucleotide
  Target: LAMA2; (+) strand; PAM type: NAAAAC; PAM sequence: CAAAAC
tgtgtttctacgtttaaata

SEQ ID NO: 7541 - DNA, 20 bp, Artificial Sequence
  Description of Artificial Sequence: Synthetic oligonucleotide
  Target: LAMA2; (+) strand; PAM type: NAAAAC; PAM sequence: AAAAAC
tctacgtttaaatacaaaac

SEQ ID NO: 7542 - DNA, 20 bp, Artificial Sequence
  Description of Artificial Sequence: Synthetic oligonucleotide
  Target: LAMA2; (+) strand; PAM type: NAAAAC; PAM sequence: AAAAAC
gaggtcgtatttccaaactg

SEQ ID NO: 7543 - DNA, 20 bp, Artificial Sequence
  Description of Artificial Sequence: Synthetic oligonucleotide
  Target: LAMA2; (+) strand; PAM type: NAAAAC; PAM sequence: AAAAAC
aactgaaaaacaaacatttt

SEQ ID NO: 7544 - DNA, 20 bp, Artificial Sequence
  Description of Artificial Sequence: Synthetic oligonucleotide
  Target: LAMA2; (+) strand; PAM type: NAAAAC; PAM sequence: AAAAAC
taagttgctgatgatagaga

SEQ ID NO: 7545 - DNA, 20 bp, Artificial Sequence
  Description of Artificial Sequence: Synthetic oligonucleotide
  Target: LAMA2; (+) strand; PAM type: NAAAAC; PAM sequence: TAAAAC
gaatggggaagagcccctta

SEQ ID NO: 7546 - DNA, 20 bp, Artificial Sequence
  Description of Artificial Sequence: Synthetic oligonucleotide
  Target: LAMA2; (+) strand; PAM type: NAAAAC; PAM sequence: TAAAAC
tgtatgttgccctaaagata

SEQ ID NO: 7547 - DNA, 20 bp, Artificial Sequence
  Description of Artificial Sequence: Synthetic oligonucleotide
  Target: LAMA2; (+) strand; PAM type: NAAAAC; PAM sequence: CAAAAC
gaaactctccattaacatag

SEQ ID NO: 7548 - DNA, 20 bp, Artificial Sequence
  Description of Artificial Sequence: Synthetic oligonucleotide
  Target: LAMA2; (+) strand; PAM type: NAAAAC; PAM sequence: CAAAAC
agttaacctgttagaaagat

SEQ ID NO: 7549 - DNA, 20 bp, Artificial Sequence
  Description of Artificial Sequence: Synthetic oligonucleotide
  Target: LAMA2; (+) strand; PAM type: NAAAAC; PAM sequence: TAAAAC
ataatgaaggaagtatcaat

SEQ ID NO: 7550 - DNA, 20 bp, Artificial Sequence
  Description of Artificial Sequence: Synthetic oligonucleotide
  Target: LAMA2; (+) strand; PAM type: NAAAAC; PAM sequence: CAAAAC
ggcattctgctaagcattct

SEQ ID NO: 7551 - DNA, 20 bp, Artificial Sequence
  Description of Artificial Sequence: Synthetic oligonucleotide
  Target: LAMA2; (+) strand; PAM type: NAAAAC; PAM sequence: GAAAAC
agaacagtgtctggcattga

SEQ ID NO: 7552 - DNA, 20 bp, Artificial Sequence
  Description of Artificial Sequence: Synthetic oligonucleotide
  Target: LAMA2; (+) strand; PAM type: NAAAAC; PAM sequence: CAAAAC
atataaaattgcacgttagt

SEQ ID NO: 7553 - DNA, 20 bp, Artificial Sequence
  Description of Artificial Sequence: Synthetic oligonucleotide
  Target: LAMA2; (+) strand; PAM type: NAAAAC; PAM sequence: CAAAAC
gtgtctgcattaattgtacc

SEQ ID NO: 7554 - DNA, 20 bp, Artificial Sequence
  Description of Artificial Sequence: Synthetic oligonucleotide
  Target: LAMA2; (+) strand; PAM type: NAAAAC; PAM sequence: TAAAAC
aaatctttgaggatgtaaga

SEQ ID NO: 7555 - DNA, 20 bp, Artificial Sequence
  Description of Artificial Sequence: Synthetic oligonucleotide
  Target: LAMA2; (+) strand; PAM type: NAAAAC; PAM sequence: AAAAAC
tctaaatatttttttatcct

SEQ ID NO: 7556 - DNA, 20 bp, Artificial Sequence
  Description of Artificial Sequence: Synthetic oligonucleotide
  Target: LAMA2; (+) strand; PAM type: NAAAAC; PAM sequence: GAAAAC
aaaaaaaatggtggttgaag

SEQ ID NO: 7557 - DNA, 20 bp, Artificial Sequence
  Description of Artificial Sequence: Synthetic oligonucleotide
  Target: LAMA2; (+) strand; PAM type: NAAAAC; PAM sequence: CAAAAC
gatattgcatttttaaagca

SEQ ID NO: 7558 - DNA, 20 bp, Artificial Sequence
  Description of Artificial Sequence: Synthetic oligonucleotide
  Target: LAMA2; (+) strand; PAM type: NAAAAC; PAM sequence: AAAAAC
gaagtcttgatgcagttcat

SEQ ID NO: 7559 - DNA, 20 bp, Artificial Sequence
  Description of Artificial Sequence: Synthetic oligonucleotide
  Target: LAMA2; (+) strand; PAM type: NAAAAC; PAM sequence: AAAAAC
cccatttaaaaaaaggcatc

SEQ ID NO: 7560 - DNA, 20 bp, Artificial Sequence
  Description of Artificial Sequence: Synthetic oligonucleotide
  Target: LAMA2; (+) strand; PAM type: NAAAAC; PAM sequence: AAAAAC
attccacccatgccatgggt

SEQ ID NO: 7561 - DNA, 20 bp, Artificial Sequence
  Description of Artificial Sequence: Synthetic oligonucleotide
  Target: LAMA2; (+) strand; PAM type: NAAAAC; PAM sequence: CAAAAC
cagcattctgacattagctt

SEQ ID NO: 7562 - DNA, 20 bp, Artificial Sequence
  Description of Artificial Sequence: Synthetic oligonucleotide
  Target: LAMA2; (+) strand; PAM type: NAAAAC; PAM sequence: CAAAAC
cagacagccatagaaatgag

SEQ ID NO: 7563 - DNA, 20 bp, Artificial Sequence
  Description of Artificial Sequence: Synthetic oligonucleotide
  Target: LAMA2; (+) strand; PAM type: NAAAAC; PAM sequence: AAAAAC
gccatcgaatgctgccatca

SEQ ID NO: 7564 - DNA, 20 bp, Artificial Sequence
  Description of Artificial Sequence: Synthetic oligonucleotide
  Target: LAMA2; (+) strand; PAM type: NAAAAC; PAM sequence: TAAAAC
tcctccaagatgtggctaga

SEQ ID NO: 7565 - DNA, 20 bp, Artificial Sequence
  Description of Artificial Sequence: Synthetic oligonucleotide
  Target: LAMA2; (+) strand; PAM type: NAAAAC; PAM sequence: AAAAAC
attttcctaatcttttccaa

SEQ ID NO: 7566 - DNA, 20 bp, Artificial Sequence
  Description of Artificial Sequence: Synthetic oligonucleotide
  Target: LAMA2; (+) strand; PAM type: NAAAAC; PAM sequence: CAAAAC
gtcatttttgtttgaagtca

SEQ ID NO: 7567 - DNA, 20 bp, Artificial Sequence
  Description of Artificial Sequence: Synthetic oligonucleotide
  Target: LAMA2; (+) strand; PAM type: NAAAAC; PAM sequence: GAAAAC
gtttgaagtcacaaaactat

SEQ ID NO: 7568 - DNA, 20 bp, Artificial Sequence
  Description of Artificial Sequence: Synthetic oligonucleotide
  Target: LAMA2; (+) strand; PAM type: NAAAAC; PAM sequence: TAAAAC
gacacttataccatgtatga

SEQ ID NO: 7569 - DNA, 20 bp, Artificial Sequence
  Description of Artificial Sequence: Synthetic oligonucleotide
  Target: LAMA2; (+) strand; PAM type: NAAAAC; PAM sequence: TAAAAC
attttttttaggcttttgtt

SEQ ID NO: 7570 - DNA, 20 bp, Artificial Sequence
  Description of Artificial Sequence: Synthetic oligonucleotide
  Target: LAMA2; (+) strand; PAM type: NAAAAC; PAM sequence: GAAAAC
aacaatagtatcatgtttga

SEQ ID NO: 7571 - DNA, 20 bp, Artificial Sequence
  Description of Artificial Sequence: Synthetic oligonucleotide
  Target: LAMA2; (+) strand; PAM type: NAAAAC; PAM sequence: TAAAAC
attcaaaatgacatgcaaat

SEQ ID NO: 7572 - DNA, 20 bp, Artificial Sequence
  Description of Artificial Sequence: Synthetic oligonucleotide
  Target: LAMA2; (+) strand; PAM type: NAAAAC; PAM sequence: CAAAAC
ataactgaaacctcagacag

SEQ ID NO: 7573 - DNA, 20 bp, Artificial Sequence
  Description of Artificial Sequence: Synthetic oligonucleotide
  Target: LAMA2; (+) strand; PAM type: NAAAAC; PAM sequence: GAAAAC
tttgttaggacagattagtg

SEQ ID NO: 7574 - DNA, 20 bp, Artificial Sequence
  Description of Artificial Sequence: Synthetic oligonucleotide
  Target: LAMA2; (+) strand; PAM type: NAAAAC; PAM sequence: GAAAAC
ctttatggttggtagcacct

SEQ ID NO: 7575 - DNA, 20 bp, Artificial Sequence
  Description of Artificial Sequence: Synthetic oligonucleotide
  Target: LAMA2; (+) strand; PAM type: NAAAAC; PAM sequence: TAAAAC
gtatacaagataaaaaggaa

SEQ ID NO: 7576 - DNA, 20 bp, Artificial Sequence
  Description of Artificial Sequence: Synthetic oligonucleotide
  Target: LAMA2; (+) strand; PAM type: NAAAAC; PAM sequence: TAAAAC
aatttgctgctctgtattat

SEQ ID NO: 7577 - DNA, 20 bp, Artificial Sequence
  Description of Artificial Sequence: Synthetic oligonucleotide
  Target: LAMA2; (+) strand; PAM type: NAAAAC; PAM sequence: TAAAAC
cttgttacctgctttcttta

SEQ ID NO: 7578 - DNA, 20 bp, Artificial Sequence
  Description of Artificial Sequence: Synthetic oligonucleotide
  Target: LAMA2; (+) strand; PAM type: NAAAAC; PAM sequence: AAAAAC
gactaaattttgaaatatta

SEQ ID NO: 7579 - DNA, 20 bp, Artificial Sequence
  Description of Artificial Sequence: Synthetic oligonucleotide
  Target: LAMA2; (+) strand; PAM type: NAAAAC; PAM sequence: GAAAAC
gagtttccccaaaaatctat

SEQ ID NO: 7580 - DNA, 20 bp, Artificial Sequence
  Description of Artificial Sequence: Synthetic oligonucleotide
  Target: LAMA2; (+) strand; PAM type: NAAAAC; PAM sequence: AAAAAC
aattacttttcaattattgt

SEQ ID NO: 7581 - DNA, 20 bp, Artificial Sequence
  Description of Artificial Sequence: Synthetic oligonucleotide
  Target: LAMA2; (+) strand; PAM type: NAAAAC; PAM sequence: AAAAAC
caattttgttgaccctttca

SEQ ID NO: 7582 - DNA, 20 bp, Artificial Sequence
  Description of Artificial Sequence: Synthetic oligonucleotide
  Target: LAMA2; (+) strand; PAM type: NAAAAC; PAM sequence: AAAAAC
gtaagagcactttaaatatt

SEQ ID NO: 7583 - DNA, 20 bp, Artificial Sequence
  Description of Artificial Sequence: Synthetic oligonucleotide
  Target: LAMA2; (+) strand; PAM type: NAAAAC; PAM sequence: TAAAAC
aattttttgttgttcttctg

SEQ ID NO: 7584 - DNA, 20 bp, Artificial Sequence
  Description of Artificial Sequence: Synthetic oligonucleotide
  Target: LAMA2; (+) strand; PAM type: NAAAAC; PAM sequence: GAAAAC
ccataagagtttcaagtttt

SEQ ID NO: 7585 - DNA, 20 bp, Artificial Sequence
  Description of Artificial Sequence: Synthetic oligonucleotide
  Target: LAMA2; (+) strand; PAM type: NAAAAC; PAM sequence: GAAAAC
aaaaattaactagcattaca

SEQ ID NO: 7586 - DNA, 20 bp, Artificial Sequence
  Description of Artificial Sequence: Synthetic oligonucleotide
  Target: LAMA2; (+) strand; PAM type: NAAAAC; PAM sequence: TAAAAC
taaaaaaaattaactatcat

SEQ ID NO: 7587 - DNA, 20 bp, Artificial Sequence
  Description of Artificial Sequence: Synthetic oligonucleotide
  Target: LAMA2; (+) strand; PAM type: NAAAAC; PAM sequence: TAAAAC
attttaaaggttactgtcat

SEQ ID NO: 7588 - DNA, 20 bp, Artificial Sequence
  Description of Artificial Sequence: Synthetic oligonucleotide
  Target: LAMA2; (+) strand; PAM type: NAAAAC; PAM sequence: CAAAAC
gcacctggatcctgtcattg

SEQ ID NO: 7589 - DNA, 20 bp, Artificial Sequence
  Description of Artificial Sequence: Synthetic oligonucleotide
  Target: LAMA2; (+) strand; PAM type: NAAAAC; PAM sequence: AAAAAC
aaggcttgttattttataac

SEQ ID NO: 7590 - DNA, 20 bp, Artificial Sequence
  Description of Artificial Sequence: Synthetic oligonucleotide
  Target: LAMA2; (+) strand; PAM type: NAAAAC; PAM sequence: TAAAAC
cactagaaatagcaaccctt

SEQ ID NO: 7591 - DNA, 20 bp, Artificial Sequence
  Description of Artificial Sequence: Synthetic oligonucleotide
  Target: LAMA2; (+) strand; PAM type: NAAAAC; PAM sequence: TAAAAC
attttgaactactgaaataa

SEQ ID NO: 7592 - DNA, 20 bp, Artificial Sequence
  Description of Artificial Sequence: Synthetic oligonucleotide
  Target: LAMA2; (+) strand; PAM type: NAAAAC; PAM sequence: CAAAAC
gcatcttctctagtatttat

SEQ ID NO: 7593 - DNA, 20 bp, Artificial Sequence
  Description of Artificial Sequence: Synthetic oligonucleotide
  Target: LAMA2; (+) strand; PAM type: NAAAAC; PAM sequence: CAAAAC
tgtgtgctttattctctttt

SEQ ID NO: 7594 - DNA, 20 bp, Artificial Sequence
  Description of Artificial Sequence: Synthetic oligonucleotide
  Target: LAMA2; (+) strand; PAM type: NAAAAC; PAM sequence: CAAAAC
ttgctcaaataaaggacagt

SEQ ID NO: 7595 - DNA, 20 bp, Artificial Sequence
  Description of Artificial Sequence: Synthetic oligonucleotide
  Target: LAMA2; (+) strand; PAM type: NAAAAC; PAM sequence: AAAAAC
tataaaatcaaacagggaag

SEQ ID NO: 7596 - DNA, 20 bp, Artificial Sequence
  Description of Artificial Sequence: Synthetic oligonucleotide
  Target: LAMA2; (+) strand; PAM type: NAAAAC; PAM sequence: GAAAAC
accatgtgatatcttaaata

SEQ ID NO: 7597 - DNA, 20 bp, Artificial Sequence
  Description of Artificial Sequence: Synthetic oligonucleotide
  Target: LAMA2; (+) strand; PAM type: NAAAAC; PAM sequence: AAAAAC
aactaaattgtttcaggatt

SEQ ID NO: 7598 - DNA, 20 bp, Artificial Sequence
  Description of Artificial Sequence: Synthetic oligonucleotide
  Target: LAMA2; (+) strand; PAM type: NAAAAC; PAM sequence: TAAAAC
cttgcagaaagcaagtttca

SEQ ID NO: 7599 - DNA, 20 bp, Artificial Sequence
  Description of Artificial Sequence: Synthetic oligonucleotide
  Target: LAMA2; (+) strand; PAM type: NAAAAC; PAM sequence: AAAAAC
aacagttcatactgtttcac

SEQ ID NO: 7600 - DNA, 20 bp, Artificial Sequence
  Description of Artificial Sequence: Synthetic oligonucleotide
  Target: LAMA2; (+) strand; PAM type: NAAAAC; PAM sequence: AAAAAC
tagatatgtcaactgattgt

SEQ ID NO: 7601 - DNA, 20 bp, Artificial Sequence
  Description of Artificial Sequence: Synthetic oligonucleotide
  Target: LAMA2; (+) strand; PAM type: NAAAAC; PAM sequence: AAAAAC
gagaagaatgatcatgagtt

SEQ ID NO: 7602 - DNA, 20 bp, Artificial Sequence
  Description of Artificial Sequence: Synthetic oligonucleotide
  Target: LAMA2; (+) strand; PAM type: NAAAAC; PAM sequence: GAAAAC
aaataagtctacccctagta

SEQ ID NO: 7603 - DNA, 20 bp, Artificial Sequence
  Description of Artificial Sequence: Synthetic oligonucleotide
  Target: LAMA2; (+) strand; PAM type: NAAAAC; PAM sequence: TAAAAC
caagacaaagagaaaaatat

SEQ ID NO: 7604 - DNA, 20 bp, Artificial Sequence
  Description of Artificial Sequence: Synthetic oligonucleotide
  Target: LAMA2; (+) strand; PAM type: NAAAAC; PAM sequence: AAAAAC
aaaatacttagaatagcaag

SEQ ID NO: 7605 - DNA, 20 bp, Artificial Sequence
  Description of Artificial Sequence: Synthetic oligonucleotide
  Target: LAMA2; (+) strand; PAM type: NAAAAC; PAM sequence: TAAAAC
tctagtatctttgaaggtga

SEQ ID NO: 7606 - DNA, 20 bp, Artificial Sequence
  Description of Artificial Sequence: Synthetic oligonucleotide
  Target: LAMA2; (+) strand; PAM type: NAAAAC; PAM sequence: AAAAAC
acatccaaacatttacccca

SEQ ID NO: 7607 - DNA, 20 bp, Artificial Sequence
  Description of Artificial Sequence: Synthetic oligonucleotide
  Target: LAMA2; (+) strand; PAM type: NAAAAC; PAM sequence: AAAAAC
aactcttacaatgtatagag

SEQ ID NO: 7608 - DNA, 20 bp, Artificial Sequence
  Description of Artificial Sequence: Synthetic oligonucleotide
  Target: LAMA2; (+) strand; PAM type: NAAAAC; PAM sequence: AAAAAC
tttcagaaacttcaggtgga

SEQ ID NO: 7609 - DNA, 20 bp, Artificial Sequence
  Description of Artificial Sequence: Synthetic oligonucleotide
  Target: LAMA2; (+) strand; PAM type: NAAAAC; PAM sequence: TAAAAC
gtattatttatatcaagttg

SEQ ID NO: 7610 - DNA, 20 bp, Artificial Sequence
  Description of Artificial Sequence: Synthetic oligonucleotide
  Target: LAMA2; (+) strand; PAM type: NAAAAC; PAM sequence: TAAAAC
ttatatcaagttgtaaaaca

SEQ ID NO: 7611 - DNA, 20 bp, Artificial Sequence
  Description of Artificial Sequence: Synthetic oligonucleotide
  Target: LAMA2; (+) strand; PAM type: NAAAAC; PAM sequence: TAAAAC
tagagaaacaggaaagggaa

SEQ ID NO: 7612 - DNA, 20 bp, Artificial Sequence
  Description of Artificial Sequence: Synthetic oligonucleotide
  Target: LAMA2; (+) strand; PAM type: NAAAAC; PAM sequence: GAAAAC
gtctaaaggtcataacagaa

SEQ ID NO: 7613 - DNA, 20 bp, Artificial Sequence
  Description of Artificial Sequence: Synthetic oligonucleotide
  Target: LAMA2; (+) strand; PAM type: NAAAAC; PAM sequence: AAAAAC
taattaactacaaactacca

SEQ ID NO: 7614 - DNA, 20 bp, Artificial Sequence
  Description of Artificial Sequence: Synthetic oligonucleotide
  Target: LAMA2; (+) strand; PAM type: NAAAAC; PAM sequence: GAAAAC
ttctatgagaaagaatacaa

SEQ ID NO: 7615 - DNA, 20 bp, Artificial Sequence
  Description of Artificial Sequence: Synthetic oligonucleotide
  Target: LAMA2; (+) strand; PAM type: NAAAAC; PAM sequence: AAAAAC
cggtgactatttctccagag

SEQ ID NO: 7616 - DNA, 20 bp, Artificial Sequence
  Description of Artificial Sequence: Synthetic oligonucleotide
  Target: LAMA2; (+) strand; PAM type: NAAAAC; PAM sequence: AAAAAC
gtatctcacttcaagaaatc

SEQ ID NO: 7617 - DNA, 20 bp, Artificial Sequence
  Description of Artificial Sequence: Synthetic oligonucleotide
  Target: LAMA2; (+) strand; PAM type: NAAAAC; PAM sequence: GAAAAC
aaaaatagattaagtagatt

SEQ ID NO: 7618 - DNA, 20 bp, Artificial Sequence
  Description of Artificial Sequence: Synthetic oligonucleotide
  Target: LAMA2; (+) strand; PAM type: NAAAAC; PAM sequence: TAAAAC
attttgtttagattaacagt

SEQ ID NO: 7619 - DNA, 20 bp, Artificial Sequence
  Description of Artificial Sequence: Synthetic oligonucleotide
  Target: LAMA2; (+) strand; PAM type: NAAAAC; PAM sequence: CAAAAC
aacattcagtctggaaggta

SEQ ID NO: 7620 - DNA, 20 bp, Artificial Sequence
  Description of Artificial Sequence: Synthetic oligonucleotide
  Target: LAMA2; (+) strand; PAM type: NAAAAC; PAM sequence: AAAAAC
cactttcaagctgggaatca

SEQ ID NO: 7621 - DNA, 20 bp, Artificial Sequence
  Description of Artificial Sequence: Synthetic oligonucleotide
  Target: LAMA2; (+) strand; PAM type: NAAAAC; PAM sequence: AAAAAC
gagtcacaaagaaattttga

SEQ ID NO: 7622 - DNA, 20 bp, Artificial Sequence
  Description of Artificial Sequence: Synthetic oligonucleotide
  Target: LAMA2; (+) strand; PAM type: NAAAAC; PAM sequence: TAAAAC
tcagtatcaaaaagttaatt

SEQ ID NO: 7623 - DNA, 20 bp, Artificial Sequence
  Description of Artificial Sequence: Synthetic oligonucleotide
  Target: LAMA2; (+) strand; PAM type: NAAAAC; PAM sequence: AAAAAC
atagcactttgctatgcatg

SEQ ID NO: 7624 - DNA, 20 bp, Artificial Sequence
  Description of Artificial Sequence: Synthetic oligonucleotide
  Target: LAMA2; (+) strand; PAM type: NAAAAC; PAM sequence: GAAAAC
ggtaatgtatacagggccac

SEQ ID NO: 7625 - DNA, 20 bp, Artificial Sequence
  Description of Artificial Sequence: Synthetic oligonucleotide
  Target: LAMA2; (+) strand; PAM type: NAAAAC; PAM sequence: GAAAAC
gattgtactgatgtgttaca

SEQ ID NO: 7626 - DNA, 20 bp, Artificial Sequence
  Description of Artificial Sequence: Synthetic oligonucleotide
  Target: LAMA2; (+) strand; PAM type: NAAAAC; PAM sequence: GAAAAC
ctgtaaaaagttaaccagag

SEQ ID NO: 7627 - DNA, 20 bp, Artificial Sequence
  Description of Artificial Sequence: Synthetic oligonucleotide
  Target: LAMA2; (+) strand; PAM type: NAAAAC; PAM sequence: GAAAAC
agggtgcatgatttaagaga

SEQ ID NO: 7628 - DNA, 20 bp, Artificial Sequence
  Description of Artificial Sequence: Synthetic oligonucleotide
  Target: LAMA2; (+) strand; PAM type: NAAAAC; PAM sequence: AAAAAC
atgttcgtatgcaagttgag

SEQ ID NO: 7629 - DNA, 20 bp, Artificial Sequence
  Description of Artificial Sequence: Synthetic oligonucleotide
  Target: LAMA2; (+) strand; PAM type: NAAAAC; PAM sequence: AAAAAC
tggctgaagcataaagatgt

SEQ ID NO: 7630 - DNA, 20 bp, Artificial Sequence
  Description of Artificial Sequence: Synthetic oligonucleotide
  Target: LAMA2; (+) strand; PAM type: NAAAAC; PAM sequence: GAAAAC
ttaaaaagcataggttcaat

SEQ ID NO: 7631 - DNA, 20 bp, Artificial Sequence
  Description of Artificial Sequence: Synthetic oligonucleotide
  Target: LAMA2; (+) strand; PAM type: NAAAAC; PAM sequence: CAAAAC
catcggtttctatttcattt

SEQ ID NO: 7632 - DNA, 20 bp, Artificial Sequence
  Description of Artificial Sequence: Synthetic oligonucleotide
  Target: LAMA2; (+) strand; PAM type: NAAAAC; PAM sequence: AAAAAC
tttaaagcccacacatatgt

SEQ ID NO: 7633 - DNA, 20 bp, Artificial Sequence
  Description of Artificial Sequence: Synthetic oligonucleotide
  Target: LAMA2; (+) strand; PAM type: NAAAAC; PAM sequence: AAAAAC
acatgtgagtattgaaatag

SEQ ID NO: 7634 - DNA, 20 bp, Artificial Sequence
  Description of Artificial Sequence: Synthetic oligonucleotide
  Target: LAMA2; (+) strand; PAM type: NAAAAC; PAM sequence: CAAAAC
ctctggtattcccaaaagaa

SEQ ID NO: 7635 - DNA, 20 bp, Artificial Sequence
  Description of Artificial Sequence: Synthetic oligonucleotide
  Target: LAMA2; (+) strand; PAM type: NAAAAC; PAM sequence: AAAAAC
atatactgtcaatttaaaaa

SEQ ID NO: 7636 - DNA, 20 bp, Artificial Sequence
  Description of Artificial Sequence: Synthetic oligonucleotide
  Target: LAMA2; (+) strand; PAM type: NAAAAC; PAM sequence: CAAAAC
cctaccgatcattttcacat

SEQ ID NO: 7637 - DNA, 20 bp, Artificial Sequence
  Description of Artificial Sequence: Synthetic oligonucleotide
  Target: LAMA2; (+) strand; PAM type: NAAAAC; PAM sequence: TAAAAC
ggatgtctgcctggttgtaa

SEQ ID NO: 7638 - DNA, 20 bp, Artificial Sequence
  Description of Artificial Sequence: Synthetic oligonucleotide
  Target: LAMA2; (+) strand; PAM type: NAAAAC; PAM sequence: GAAAAC
ggataatggatgaggcctag

SEQ ID NO: 7639 - DNA, 20 bp, Artificial Sequence
  Description of Artificial Sequence: Synthetic oligonucleotide
  Target: LAMA2; (+) strand; PAM type: NAAAAC; PAM sequence: CAAAAC
ttatgtgatttgttctttac

SEQ ID NO: 7640 - DNA, 20 bp, Artificial Sequence
  Description of Artificial Sequence: Synthetic oligonucleotide
  Target: LAMA2; (+) strand; PAM type: NAAAAC; PAM sequence: CAAAAC
acatgcttaacacaaacaaa

SEQ ID NO: 7641 - DNA, 20 bp, Artificial Sequence
  Description of Artificial Sequence: Synthetic oligonucleotide
  Target: LAMA2; (+) strand; PAM type: NAAAAC; PAM sequence: AAAAAC
tcttgctttacaaaataatt

SEQ ID NO: 7642 - DNA, 20 bp, Artificial Sequence
  Description of Artificial Sequence: Synthetic oligonucleotide
  Target: LAMA2; (+) strand; PAM type: NAAAAC; PAM sequence: TAAAAC
ccacagaccaacagtaacat

SEQ ID NO: 7643 - DNA, 20 bp, Artificial Sequence
  Description of Artificial Sequence: Synthetic oligonucleotide
  Target: LAMA2; (+) strand; PAM type: NAAAAC; PAM sequence: TAAAAC
taacattaaaacagagattt

SEQ ID NO: 7644 - DNA, 20 bp, Artificial Sequence
  Description of Artificial Sequence: Synthetic oligonucleotide
  Target: LAMA2; (+) strand; PAM type: NAAAAC; PAM sequence: AAAAAC
aaatgagaaaataagtatta

SEQ ID NO: 7645 - DNA, 20 bp, Artificial Sequence
  Description of Artificial Sequence: Synthetic oligonucleotide
  Target: LAMA2; (+) strand; PAM type: NAAAAC; PAM sequence: AAAAAC
aggagaatgttccatttaat

SEQ ID NO: 7646 - DNA, 20 bp, Artificial Sequence
  Description of Artificial Sequence: Synthetic oligonucleotide
  Target: LAMA2; (+) strand; PAM type: NAAAAC; PAM sequence: CAAAAC
gtttgtgatgtggttggcaa

SEQ ID NO: 7647 - DNA, 20 bp, Artificial Sequence
  Description of Artificial Sequence: Synthetic oligonucleotide
  Target: LAMA2; (+) strand; PAM type: NAAAAC; PAM sequence: CAAAAC
gtgtttatacagattctgca

SEQ ID NO: 7648 - DNA, 20 bp, Artificial Sequence
  Description of Artificial Sequence: Synthetic oligonucleotide
  Target: LAMA2; (+) strand; PAM type: NAAAAC; PAM sequence: CAAAAC
ctctggcaagattaatcaag

SEQ ID NO: 7649 - DNA, 20 bp, Artificial Sequence
  Description of Artificial Sequence: Synthetic oligonucleotide
  Target: LAMA2; (+) strand; PAM type: NAAAAC; PAM sequence: TAAAAC
ttaatcaagcaaaacgtggg

SEQ ID NO: 7650 - DNA, 20 bp, Artificial Sequence
  Description of Artificial Sequence: Synthetic oligonucleotide
  Target: LAMA2; (+) strand; PAM type: NAAAAC; PAM sequence: AAAAAC
tctaggaaaatgcaacttaa

SEQ ID NO: 7651 - DNA, 20 bp, Artificial Sequence
  Description of Artificial Sequence: Synthetic oligonucleotide
  Target: LAMA2; (+) strand; PAM type: NAAAAC; PAM sequence: GAAAAC
gacaagaggactatgaagaa

SEQ ID NO: 7652 - DNA, 20 bp, Artificial Sequence
  Description of Artificial Sequence: Synthetic oligonucleotide
  Target: LAMA2; (+) strand; PAM type: NAAAAC; PAM sequence: GAAAAC
ttgaggttactttaaaatta

SEQ ID NO: 7653 - DNA, 20 bp, Artificial Sequence
  Description of Artificial Sequence: Synthetic oligonucleotide
  Target: LAMA2; (+) strand; PAM type: NAAAAC; PAM sequence: GAAAAC
cttcatgtctgaaaaatttt

SEQ ID NO: 7654 - DNA, 20 bp, Artificial Sequence
  Description of Artificial Sequence: Synthetic oligonucleotide
  Target: LAMA2; (+) strand; PAM type: NAAAAC; PAM sequence: TAAAAC
agggatcagaaaggaagaaa

SEQ ID NO: 7655 - DNA, 20 bp, Artificial Sequence
  Description of Artificial Sequence: Synthetic oligonucleotide
  Target: LAMA2; (+) strand; PAM type: NAAAAC; PAM sequence: CAAAAC
gaccaccctggccaacatgg

SEQ ID NO: 7656 - DNA, 20 bp, Artificial Sequence
  Description of Artificial Sequence: Synthetic oligonucleotide
  Target: LAMA2; (+) strand; PAM type: NAAAAC; PAM sequence: TAAAAC
acactcttccacagatagca

SEQ ID NO: 7657 - DNA, 20 bp, Artificial Sequence
  Description of Artificial Sequence: Synthetic oligonucleotide
  Target: LAMA2; (+) strand; PAM type: NAAAAC; PAM sequence: GAAAAC
tgagttgcaaatatgtgaaa

SEQ ID NO: 7658 - DNA, 20 bp, Artificial Sequence
  Description of Artificial Sequence: Synthetic oligonucleotide
  Target: LAMA2; (+) strand; PAM type: NAAAAC; PAM sequence: GAAAAC
ggttcaccccaacaaatctt

SEQ ID NO: 7659 - DNA, 20 bp, Artificial Sequence
  Description of Artificial Sequence: Synthetic oligonucleotide
  Target: LAMA2; (+) strand; PAM type: NAAAAC; PAM sequence: AAAAAC
atgatgtttggcatcaaatc

SEQ ID NO: 7660 - DNA, 20 bp, Artificial Sequence
  Description of Artificial Sequence: Synthetic oligonucleotide
  Target: LAMA2; (+) strand; PAM type: NAAAAC; PAM sequence: AAAAAC
aattgtaaaagcaatcagaa

SEQ ID NO: 7661 - DNA, 20 bp, Artificial Sequence
  Description of Artificial Sequence: Synthetic oligonucleotide
  Target: LAMA2; (+) strand; PAM type: NAAAAC; PAM sequence: GAAAAC
aaaaaaaaaagaaaagaaaa

SEQ ID NO: 7662 - DNA, 20 bp, Artificial Sequence
  Description of Artificial Sequence: Synthetic oligonucleotide
  Target: LAMA2; (+) strand; PAM type: NAAAAC; PAM sequence: TAAAAC
tccaaatgttggtgtccccc

SEQ ID NO: 7663 - DNA, 20 bp, Artificial Sequence
  Description of Artificial Sequence: Synthetic oligonucleotide
  Target: LAMA2; (+) strand; PAM type: NAAAAC; PAM sequence: AAAAAC
gcagtatatttttaatgctt

SEQ ID NO: 7664 - DNA, 20 bp, Artificial Sequence
  Description of Artificial Sequence: Synthetic oligonucleotide
  Target: LAMA2; (+) strand; PAM type: NAAAAC; PAM sequence: AAAAAC
gatatgttaaagtattagga

SEQ ID NO: 7665 - DNA, 20 bp, Artificial Sequence
  Description of Artificial Sequence: Synthetic oligonucleotide
  Target: LAMA2; (+) strand; PAM type: NAAAAC; PAM sequence: CAAAAC
aacgcaagcaatcaaatgaa

SEQ ID NO: 7666 - DNA, 20 bp, Artificial Sequence
  Description of Artificial Sequence: Synthetic oligonucleotide
  Target: LAMA2; (+) strand; PAM type: NAAAAC; PAM sequence: CAAAAC
taccaggcaaaaatgtcttc

SEQ ID NO: 7667 - DNA, 20 bp, Artificial Sequence
  Description of Artificial Sequence: Synthetic oligonucleotide
  Target: LAMA2; (+) strand; PAM type: NAAAAC; PAM sequence: AAAAAC
atgtcttccaaaactgaaga

SEQ ID NO: 7668 - DNA, 20 bp, Artificial Sequence
  Description of Artificial Sequence: Synthetic oligonucleotide
  Target: LAMA2; (+) strand; PAM type: NAAAAC; PAM sequence: GAAAAC
tcatttcaaacttaaagaaa

SEQ ID NO: 7669 - DNA, 20 bp, Artificial Sequence
  Description of Artificial Sequence: Synthetic oligonucleotide
  Target: LAMA2; (+) strand; PAM type: NAAAAC; PAM sequence: TAAAAC
gtttcaataaactctcaatg

SEQ ID NO: 7670 - DNA, 20 bp, Artificial Sequence
  Description of Artificial Sequence: Synthetic oligonucleotide
  Target: LAMA2; (+) strand; PAM type: NAAAAC; PAM sequence: AAAAAC
tcagtaaaagacgtttgtta

SEQ ID NO: 7671 - DNA, 20 bp, Artificial Sequence
  Description of Artificial Sequence: Synthetic oligonucleotide
  Target: LAMA2; (+) strand; PAM type: NAAAAC; PAM sequence: CAAAAC
ggcagctttgcagcaaagtg

SEQ ID NO: 7672 - DNA, 20 bp, Artificial Sequence
  Description of Artificial Sequence: Synthetic oligonucleotide
  Target: LAMA2; (+) strand; PAM type: NAAAAC; PAM sequence: TAAAAC
tagcaaaccaatacaaatca

SEQ ID NO: 7673 - DNA, 20 bp, Artificial Sequence
  Description of Artificial Sequence: Synthetic oligonucleotide
  Target: LAMA2; (+) strand; PAM type: NAAAAC; PAM sequence: TAAAAC
tcattcttgttatatatata

SEQ ID NO: 7674 - DNA, 20 bp, Artificial Sequence
  Description of Artificial Sequence: Synthetic oligonucleotide
  Target: LAMA2; (+) strand; PAM type: NAAAAC; PAM sequence: CAAAAC
agtaaagatgcttgtaatat

SEQ ID NO: 7675 - DNA, 20 bp, Artificial Sequence
  Description of Artificial Sequence: Synthetic oligonucleotide
  Target: LAMA2; (+) strand; PAM type: NAAAAC; PAM sequence: AAAAAC
aaaatacccctgagaaaaaa

SEQ ID NO: 7676 - DNA, 20 bp, Artificial Sequence
  Description of Artificial Sequence: Synthetic oligonucleotide
  Target: LAMA2; (+) strand; PAM type: NAAAAC; PAM sequence: GAAAAC
agcagggagggcaaggaaag

SEQ ID NO: 7677 - DNA, 20 bp, Artificial Sequence
  Description of Artificial Sequence: Synthetic oligonucleotide
  Target: LAMA2; (+) strand; PAM type: NAAAAC; PAM sequence: TAAAAC
ctcgtgacagcttgatccca

SEQ ID NO: 7678 - DNA, 20 bp, Artificial Sequence
  Description of Artificial Sequence: Synthetic oligonucleotide
  Target: LAMA2; (+) strand; PAM type: NAAAAC; PAM sequence: CAAAAC
agccaggttaaggggttcag

SEQ ID NO: 7679 - DNA, 20 bp, Artificial Sequence
  Description of Artificial Sequence: Synthetic oligonucleotide
  Target: LAMA2; (+) strand; PAM type: NAAAAC; PAM sequence: AAAAAC
ttgactttccaaggctttaa

SEQ ID NO: 7680 - DNA, 20 bp, Artificial Sequence
  Description of Artificial Sequence: Synthetic oligonucleotide
  Target: LAMA2; (+) strand; PAM type: NAAAAC; PAM sequence: AAAAAC
ttaaaaaaacaaacaaacaa

SEQ ID NO: 7681 - DNA, 20 bp, Artificial Sequence
  Description of Artificial Sequence: Synthetic oligonucleotide
  Target: LAMA2; (+) strand; PAM type: NAAAAC; PAM sequence: AAAAAC
aaatcctaattagaacaccc

SEQ ID NO: 7682 - DNA, 20 bp, Artificial Sequence
  Description of Artificial Sequence: Synthetic oligonucleotide
  Target: LAMA2; (+) strand; PAM type: NAAAAC; PAM sequence: GAAAAC
catctgtggtttccccataa

SEQ ID NO: 7683 - DNA, 20 bp, Artificial Sequence
  Description of Artificial Sequence: Synthetic oligonucleotide
  Target: LAMA2; (+) strand; PAM type: NAAAAC; PAM sequence: GAAAAC
ataagaaaactaccttttgg

SEQ ID NO: 7684 - DNA, 20 bp, Artificial Sequence
  Description of Artificial Sequence: Synthetic oligonucleotide
  Target: LAMA2; (+) strand; PAM type: NAAAAC; PAM sequence: AAAAAC
ttcttacctatattacagga

SEQ ID NO: 7685 - DNA, 20 bp, Artificial Sequence
  Description of Artificial Sequence: Synthetic oligonucleotide
  Target: LAMA2; (+) strand; PAM type: NAAAAC; PAM sequence: TAAAAC
ctggtggagaagaatcttta

SEQ ID NO: 7686 - DNA, 20 bp, Artificial Sequence
  Description of Artificial Sequence: Synthetic oligonucleotide
  Target: LAMA2; (+) strand; PAM type: NAAAAC; PAM sequence: AAAAAC
aattatccatttacctcctg

SEQ ID NO: 7687 - DNA, 20 bp, Artificial Sequence
  Description of Artificial Sequence: Synthetic oligonucleotide
  Target: LAMA2; (+) strand; PAM type: NAAAAC; PAM sequence: AAAAAC
aaaggtattaattccttttt

SEQ ID NO: 7688 - DNA, 20 bp, Artificial Sequence
  Description of Artificial Sequence: Synthetic oligonucleotide
  Target: LAMA2; (+) strand; PAM type: NAAAAC; PAM sequence: GAAAAC
tttttctagtgccatttgtt

SEQ ID NO: 7689 - DNA, 20 bp, Artificial Sequence
  Description of Artificial Sequence: Synthetic oligonucleotide
  Target: LAMA2; (+) strand; PAM type: NAAAAC; PAM sequence: TAAAAC
cccttgacatttccagaaaa

SEQ ID NO: 7690 - DNA, 20 bp, Artificial Sequence
  Description of Artificial Sequence: Synthetic oligonucleotide
  Target: LAMA2; (+) strand; PAM type: NAAAAC; PAM sequence: CAAAAC
ttacaaatgatggatagcca

SEQ ID NO: 7691 - DNA, 20 bp, Artificial Sequence
  Description of Artificial Sequence: Synthetic oligonucleotide
  Target: LAMA2; (+) strand; PAM type: NAAAAC; PAM sequence: GAAAAC
ctttattgtttatattttat

SEQ ID NO: 7692 - DNA, 20 bp, Artificial Sequence
  Description of Artificial Sequence: Synthetic oligonucleotide
  Target: LAMA2; (+) strand; PAM type: NAAAAC; PAM sequence: CAAAAC
tagaagaatatccttgaggg

SEQ ID NO: 7693 - DNA, 20 bp, Artificial Sequence
  Description of Artificial Sequence: Synthetic oligonucleotide
  Target: LAMA2; (+) strand; PAM type: NAAAAC; PAM sequence: AAAAAC
ttaattaatggttgaagtac

SEQ ID NO: 7694 - DNA, 20 bp, Artificial Sequence
  Description of Artificial Sequence: Synthetic oligonucleotide
  Target: LAMA2; (+) strand; PAM type: NAAAAC; PAM sequence: GAAAAC
tttactcagtaaataataaa

SEQ ID NO: 7695 - DNA, 20 bp, Artificial Sequence
  Description of Artificial Sequence: Synthetic oligonucleotide
  Target: LAMA2; (+) strand; PAM type: NAAAAC; PAM sequence: TAAAAC
ttggaatactctgttcctat

SEQ ID NO: 7696 - DNA, 20 bp, Artificial Sequence
  Description of Artificial Sequence: Synthetic oligonucleotide
  Target: LAMA2; (+) strand; PAM type: NAAAAC; PAM sequence: CAAAAC
agaaactatctgtaatgaat

SEQ ID NO: 7697 - DNA, 20 bp, Artificial Sequence
  Description of Artificial Sequence: Synthetic oligonucleotide
  Target: LAMA2; (+) strand; PAM type: NAAAAC; PAM sequence: TAAAAC
aacagctgaaattgtgcttc

SEQ ID NO: 7698 - DNA, 20 bp, Artificial Sequence
  Description of Artificial Sequence: Synthetic oligonucleotide
  Target: LAMA2; (+) strand; PAM type: NAAAAC; PAM sequence: TAAAAC
tattattcaatatttatatg

SEQ ID NO: 7699 - DNA, 20 bp, Artificial Sequence
  Description of Artificial Sequence: Synthetic oligonucleotide
  Target: LAMA2; (+) strand; PAM type: NAAAAC; PAM sequence: AAAAAC
agaagacatttatgcagcca

SEQ ID NO: 7700 - DNA, 20 bp, Artificial Sequence
  Description of Artificial Sequence: Synthetic oligonucleotide
  Target: LAMA2; (+) strand; PAM type: NAAAAC; PAM sequence: CAAAAC
gccatcagagaaatgcaaat

SEQ ID NO: 7701 - DNA, 20 bp, Artificial Sequence
  Description of Artificial Sequence: Synthetic oligonucleotide
  Target: LAMA2; (+) strand; PAM type: NAAAAC; PAM sequence: AAAAAC
gtaaactatcacaaggacaa

SEQ ID NO: 7702 - DNA, 20 bp, Artificial Sequence
  Description of Artificial Sequence: Synthetic oligonucleotide
  Target: LAMA2; (+) strand; PAM type: NAAAAC; PAM sequence: TAAAAC
cacatggtgcacatgtaccc

SEQ ID NO: 7703 - DNA, 20 bp, Artificial Sequence
  Description of Artificial Sequence: Synthetic oligonucleotide
  Target: LAMA2; (+) strand; PAM type: NAAAAC; PAM sequence: AAAAAC
tgacttaatatattccttca

SEQ ID NO: 7704 - DNA, 20 bp, Artificial Sequence
  Description of Artificial Sequence: Synthetic oligonucleotide
  Target: LAMA2; (+) strand; PAM type: NAAAAC; PAM sequence: AAAAAC
caaagataagcaatgagcaa

SEQ ID NO: 7705 - DNA, 20 bp, Artificial Sequence
  Description of Artificial Sequence: Synthetic oligonucleotide
  Target: LAMA2; (+) strand; PAM type: NAAAAC; PAM sequence: TAAAAC
agataaaagtaatgacaagg

SEQ ID NO: 7706 - DNA, 20 bp, Artificial Sequence
  Description of Artificial Sequence: Synthetic oligonucleotide
  Target: LAMA2; (+) strand; PAM type: NAAAAC; PAM sequence: GAAAAC
ctgtatctcttttcagctgt

SEQ ID NO: 7707 - DNA, 20 bp, Artificial Sequence
  Description of Artificial Sequence: Synthetic oligonucleotide
  Target: LAMA2; (+) strand; PAM type: NAAAAC; PAM sequence: TAAAAC
aaactattattactaagtat

SEQ ID NO: 7708 - DNA, 20 bp, Artificial Sequence
  Description of Artificial Sequence: Synthetic oligonucleotide
  Target: LAMA2; (+) strand; PAM type: NAAAAC; PAM sequence: AAAAAC
acagagaaacatatacagct

SEQ ID NO: 7709 - DNA, 20 bp, Artificial Sequence
  Description of Artificial Sequence: Synthetic oligonucleotide
  Target: LAMA2; (+) strand; PAM type: NAAAAC; PAM sequence: TAAAAC
catttttaattataatattg

SEQ ID NO: 7710 - DNA, 20 bp, Artificial Sequence
  Description of Artificial Sequence: Synthetic oligonucleotide
  Target: LAMA2; (+) strand; PAM type: NAAAAC; PAM sequence: AAAAAC
tagatggggaagactgtggt

SEQ ID NO: 7711 - DNA, 20 bp, Artificial Sequence
  Description of Artificial Sequence: Synthetic oligonucleotide
  Target: LAMA2; (+) strand; PAM type: NAAAAC; PAM sequence: GAAAAC
agtgaccaaaaaagtagaag

SEQ ID NO: 7712 - DNA, 20 bp, Artificial Sequence
  Description of Artificial Sequence: Synthetic oligonucleotide
  Target: LAMA2; (+) strand; PAM type: NAAAAC; PAM sequence: TAAAAC
gttaagccaagtgaatacag

SEQ ID NO: 7713 - DNA, 20 bp, Artificial Sequence
  Description of Artificial Sequence: Synthetic oligonucleotide
  Target: LAMA2; (+) strand; PAM type: NAAAAC; PAM sequence: CAAAAC
tctatttattatatctagca

SEQ ID NO: 7714 - DNA, 20 bp, Artificial Sequence
  Description of Artificial Sequence: Synthetic oligonucleotide
  Target: LAMA2; (+) strand; PAM type: NAAAAC; PAM sequence: AAAAAC
gagcctgaatttttttaaat

SEQ ID NO: 7715 - DNA, 20 bp, Artificial Sequence
  Description of Artificial Sequence: Synthetic oligonucleotide
  Target: LAMA2; (+) strand; PAM type: NAAAAC; PAM sequence: TAAAAC
catttagtgcatcttagaca

SEQ ID NO: 7716 - DNA, 20 bp, Artificial Sequence
  Description of Artificial Sequence: Synthetic oligonucleotide
  Target: LAMA2; (+) strand; PAM type: NAAAAC; PAM sequence: GAAAAC
gtcgatatgtgctaggctta

SEQ ID NO: 7717 - DNA, 20 bp, Artificial Sequence
  Description of Artificial Sequence: Synthetic oligonucleotide
  Target: LAMA2; (+) strand; PAM type: NAAAAC; PAM sequence: AAAAAC
tttataatttttagctccct

SEQ ID NO: 7718 - DNA, 20 bp, Artificial Sequence
  Description of Artificial Sequence: Synthetic oligonucleotide
  Target: LAMA2; (+) strand; PAM type: NAAAAC; PAM sequence: AAAAAC
ccccttcactaagggtcttg

SEQ ID NO: 7719 - DNA, 20 bp, Artificial Sequence
  Description of Artificial Sequence: Synthetic oligonucleotide
  Target: LAMA2; (+) strand; PAM type: NAAAAC; PAM sequence: AAAAAC
ttgaataagtaaatttcatt

SEQ ID NO: 7720 - DNA, 20 bp, Artificial Sequence
  Description of Artificial Sequence: Synthetic oligonucleotide
  Target: LAMA2; (+) strand; PAM type: NAAAAC; PAM sequence: CAAAAC
tttataaatagctgcaaaat

SEQ ID NO: 7721 - DNA, 20 bp, Artificial Sequence
  Description of Artificial Sequence: Synthetic oligonucleotide
  Target: LAMA2; (+) strand; PAM type: NAAAAC; PAM sequence: TAAAAC
taggaatataacagggggca

SEQ ID NO: 7722 - DNA, 20 bp, Artificial Sequence
  Description of Artificial Sequence: Synthetic oligonucleotide
  Target: LAMA2; (+) strand; PAM type: NAAAAC; PAM sequence: TAAAAC
agaactaaatgtgtcaatta

SEQ ID NO: 7723 - DNA, 20 bp, Artificial Sequence
  Description of Artificial Sequence: Synthetic oligonucleotide
  Target: LAMA2; (+) strand; PAM type: NAAAAC; PAM sequence: AAAAAC
cttcaatgtcacccttctat

SEQ ID NO: 7724 - DNA, 20 bp, Artificial Sequence
  Description of Artificial Sequence: Synthetic oligonucleotide
  Target: LAMA2; (+) strand; PAM type: NAAAAC; PAM sequence: TAAAAC
cgttttaagagcacccctta

SEQ ID NO: 7725 - DNA, 20 bp, Artificial Sequence
  Description of Artificial Sequence: Synthetic oligonucleotide
  Target: LAMA2; (+) strand; PAM type: NAAAAC; PAM sequence: TAAAAC
tcctcttatgaatttctttt

SEQ ID NO: 7726 - DNA, 20 bp, Artificial Sequence
  Description of Artificial Sequence: Synthetic oligonucleotide
  Target: LAMA2; (+) strand; PAM type: NAAAAC; PAM sequence: AAAAAC
gtgcaagggtccaaaagctg

SEQ ID NO: 7727 - DNA, 20 bp, Artificial Sequence
  Description of Artificial Sequence: Synthetic oligonucleotide
  Target: LAMA2; (+) strand; PAM type: NAAAAC; PAM sequence: GAAAAC
taggccttcaaatgttccaa

SEQ ID NO: 7728 - DNA, 20 bp, Artificial Sequence
  Description of Artificial Sequence: Synthetic oligonucleotide
  Target: LAMA2; (+) strand; PAM type: NAAAAC; PAM sequence: TAAAAC
acactaaagcttccttattt

SEQ ID NO: 7729 - DNA, 20 bp, Artificial Sequence
  Description of Artificial Sequence: Synthetic oligonucleotide
  Target: LAMA2; (+) strand; PAM type: NAAAAC; PAM sequence: CAAAAC
ccatcactatgatctctccc

SEQ ID NO: 7730 - DNA, 20 bp, Artificial Sequence
  Description of Artificial Sequence: Synthetic oligonucleotide
  Target: LAMA2; (+) strand; PAM type: NAAAAC; PAM sequence: GAAAAC
gtttacagtattttaatttt

SEQ ID NO: 7731 - DNA, 20 bp, Artificial Sequence
  Description of Artificial Sequence: Synthetic oligonucleotide
  Target: LAMA2; (+) strand; PAM type: NAAAAC; PAM sequence: TAAAAC
attttgaaaactatacttat

SEQ ID NO: 7732 - DNA, 20 bp, Artificial Sequence
  Description of Artificial Sequence: Synthetic oligonucleotide
  Target: LAMA2; (+) strand; PAM type: NAAAAC; PAM sequence: TAAAAC
aagaaatctctgtattaata

SEQ ID NO: 7733 - DNA, 20 bp, Artificial Sequence
  Description of Artificial Sequence: Synthetic oligonucleotide
  Target: LAMA2; (+) strand; PAM type: NAAAAC; PAM sequence: GAAAAC
caaacataagttagtaaatg

SEQ ID NO: 7734 - DNA, 20 bp, Artificial Sequence
  Description of Artificial Sequence: Synthetic oligonucleotide
  Target: LAMA2; (+) strand; PAM type: NAAAAC; PAM sequence: GAAAAC
acaagtagtacgctaagtca

SEQ ID NO: 7735 - DNA, 20 bp, Artificial Sequence
  Description of Artificial Sequence: Synthetic oligonucleotide
  Target: LAMA2; (+) strand; PAM type: NAAAAC; PAM sequence: CAAAAC
ttactttgttacacagcaga

SEQ ID NO: 7736 - DNA, 20 bp, Artificial Sequence
  Description of Artificial Sequence: Synthetic oligonucleotide
  Target: LAMA2; (+) strand; PAM type: NAAAAC; PAM sequence: CAAAAC
ctctttttccccttgccaat

SEQ ID NO: 7737 - DNA, 20 bp, Artificial Sequence
  Description of Artificial Sequence: Synthetic oligonucleotide
  Target: LAMA2; (+) strand; PAM type: NAAAAC; PAM sequence: CAAAAC
attgtgaaaagaaatgctat

SEQ ID NO: 7738 - DNA, 20 bp, Artificial Sequence
  Description of Artificial Sequence: Synthetic oligonucleotide
  Target: LAMA2; (+) strand; PAM type: NAAAAC; PAM sequence: TAAAAC
cattaaggatgatgtaactt

SEQ ID NO: 7739 - DNA, 20 bp, Artificial Sequence
  Description of Artificial Sequence: Synthetic oligonucleotide
  Target: LAMA2; (+) strand; PAM type: NAAAAC; PAM sequence: CAAAAC
acatacactgaaggaaataa

SEQ ID NO: 7740 - DNA, 20 bp, Artificial Sequence
  Description of Artificial Sequence: Synthetic oligonucleotide
  Target: LAMA2; (+) strand; PAM type: NAAAAC; PAM sequence: TAAAAC
gaaataacaaaaccttgaag

SEQ ID NO: 7741 - DNA, 20 bp, Artificial Sequence
  Description of Artificial Sequence: Synthetic oligonucleotide
  Target: LAMA2; (+) strand; PAM type: NAAAAC; PAM sequence: GAAAAC
agccttctccagtcatgtgg

SEQ ID NO: 7742 - DNA, 20 bp, Artificial Sequence
  Description of Artificial Sequence: Synthetic oligonucleotide
  Target: LAMA2; (+) strand; PAM type: NAAAAC; PAM sequence: TAAAAC
tttccccctgaaggtagaat

SEQ ID NO: 7743 - DNA, 20 bp, Artificial Sequence
  Description of Artificial Sequence: Synthetic oligonucleotide
  Target: LAMA2; (+) strand; PAM type: NAAAAC; PAM sequence: GAAAAC
tgcacttactcctacctgtg

SEQ ID NO: 7744 - DNA, 20 bp, Artificial Sequence
  Description of Artificial Sequence: Synthetic oligonucleotide
  Target: LAMA2; (+) strand; PAM type: NAAAAC; PAM sequence: AAAAAC
aggctttggaaatatcacta

SEQ ID NO: 7745 - DNA, 20 bp, Artificial Sequence
  Description of Artificial Sequence: Synthetic oligonucleotide
  Target: LAMA2; (+) strand; PAM type: NAAAAC; PAM sequence: GAAAAC
ttttaattacagtctcttct

SEQ ID NO: 7746 - DNA, 20 bp, Artificial Sequence
  Description of Artificial Sequence: Synthetic oligonucleotide
  Target: LAMA2; (+) strand; PAM type: NAAAAC; PAM sequence: AAAAAC
cattaaactttccctatcaa

SEQ ID NO: 7747 - DNA, 20 bp, Artificial Sequence
  Description of Artificial Sequence: Synthetic oligonucleotide
  Target: LAMA2; (+) strand; PAM type: NAAAAC; PAM sequence: CAAAAC
gaagcgagggcaaggaggca

SEQ ID NO: 7748 - DNA, 20 bp, Artificial Sequence
  Description of Artificial Sequence: Synthetic oligonucleotide
  Target: LAMA2; (+) strand; PAM type: NAAAAC; PAM sequence: AAAAAC
gggtaactgtggcttgggaa

SEQ ID NO: 7749 - DNA, 20 bp, Artificial Sequence
  Description of Artificial Sequence: Synthetic oligonucleotide
  Target: LAMA2; (+) strand; PAM type: NAAAAC; PAM sequence: TAAAAC
tcacacaacttaaatggaag

SEQ ID NO: 7750 - DNA, 20 bp, Artificial Sequence
  Description of Artificial Sequence: Synthetic oligonucleotide
  Target: LAMA2; (+) strand; PAM type: NAAAAC; PAM sequence: TAAAAC
tcattttatgaaatatgagc

SEQ ID NO: 7751 - DNA, 20 bp, Artificial Sequence
  Description of Artificial Sequence: Synthetic oligonucleotide
  Target: LAMA2; (+) strand; PAM type: NAAAAC; PAM sequence: CAAAAC
gatgtggaacagttttatcc

SEQ ID NO: 7752 - DNA, 20 bp, Artificial Sequence
  Description of Artificial Sequence: Synthetic oligonucleotide
  Target: LAMA2; (+) strand; PAM type: NAAAAC; PAM sequence: AAAAAC
ctttattataaataggtatg

SEQ ID NO: 7753 - DNA, 20 bp, Artificial Sequence
  Description of Artificial Sequence: Synthetic oligonucleotide
  Target: LAMA2; (+) strand; PAM type: NAAAAC; PAM sequence: TAAAAC
tgtttgaaatatatacaaca

SEQ ID NO: 7754 - DNA, 20 bp, Artificial Sequence
  Description of Artificial Sequence: Synthetic oligonucleotide
  Target: LAMA2; (+) strand; PAM type: NAAAAC; PAM sequence: CAAAAC
gaccagactggccaacatgg

SEQ ID NO: 7755 - DNA, 20 bp, Artificial Sequence
  Description of Artificial Sequence: Synthetic oligonucleotide
  Target: LAMA2; (+) strand; PAM type: NAAAAC; PAM sequence: TAAAAC
agtgaccacccatctcacta

SEQ ID NO: 7756 - DNA, 20 bp, Artificial Sequence
  Description of Artificial Sequence: Synthetic oligonucleotide
  Target: LAMA2; (+) strand; PAM type: NAAAAC; PAM sequence: TAAAAC
ggctttgttttttttatttt

SEQ ID NO: 7757 - DNA, 20 bp, Artificial Sequence
  Description of Artificial Sequence: Synthetic oligonucleotide
  Target: LAMA2; (+) strand; PAM type: NAAAAC; PAM sequence: TAAAAC
agtagattgagtcatatttg

SEQ ID NO: 7758 - DNA, 20 bp, Artificial Sequence
  Description of Artificial Sequence: Synthetic oligonucleotide
  Target: LAMA2; (+) strand; PAM type: NAAAAC; PAM sequence: GAAAAC
ggaagatgaaggcacaagta

SEQ ID NO: 7759 - DNA, 20 bp, Artificial Sequence
  Description of Artificial Sequence: Synthetic oligonucleotide
  Target: LAMA2; (+) strand; PAM type: NAAAAC; PAM sequence: AAAAAC
actcagcaatcagaagatta

SEQ ID NO: 7760 - DNA, 20 bp, Artificial Sequence
  Description of Artificial Sequence: Synthetic oligonucleotide
  Target: LAMA2; (+) strand; PAM type: NAAAAC; PAM sequence: GAAAAC
atttcaattggcaattaagt

SEQ ID NO: 7761 - DNA, 20 bp, Artificial Sequence
  Description of Artificial Sequence: Synthetic oligonucleotide
  Target: LAMA2; (+) strand; PAM type: NAAAAC; PAM sequence: AAAAAC
tatcttgctatatatatata

SEQ ID NO: 7762 - DNA, 20 bp, Artificial Sequence
  Description of Artificial Sequence: Synthetic oligonucleotide
  Target: LAMA2; (+) strand; PAM type: NAAAAC; PAM sequence: TAAAAC
tactctggtgggaaatgtag

SEQ ID NO: 7763 - DNA, 20 bp, Artificial Sequence
  Description of Artificial Sequence: Synthetic oligonucleotide
  Target: LAMA2; (+) strand; PAM type: NAAAAC; PAM sequence: TAAAAC
ttttgtttttgtatcttttt

SEQ ID NO: 7764 - DNA, 20 bp, Artificial Sequence
  Description of Artificial Sequence: Synthetic oligonucleotide
  Target: LAMA2; (+) strand; PAM type: NAAAAC; PAM sequence: CAAAAC
tactggctttagtaactctt

SEQ ID NO: 7765 - DNA, 20 bp, Artificial Sequence
  Description of Artificial Sequence: Synthetic oligonucleotide
  Target: LAMA2; (+) strand; PAM type: NAAAAC; PAM sequence: TAAAAC
aaatgtctatcggtaatttt

SEQ ID NO: 7766 - DNA, 20 bp, Artificial Sequence
  Description of Artificial Sequence: Synthetic oligonucleotide
  Target: LAMA2; (+) strand; PAM type: NAAAAC; PAM sequence: CAAAAC
atcttggtctatttgactca

SEQ ID NO: 7767 - DNA, 20 bp, Artificial Sequence
  Description of Artificial Sequence: Synthetic oligonucleotide
  Target: LAMA2; (+) strand; PAM type: NAAAAC; PAM sequence: AAAAAC
caatggatttaatttaggcc

SEQ ID NO: 7768 - DNA, 20 bp, Artificial Sequence
  Description of Artificial Sequence: Synthetic oligonucleotide
  Target: LAMA2; (+) strand; PAM type: NAAAAC; PAM sequence: GAAAAC
agatttatctctaagaaaaa

SEQ ID NO: 7769 - DNA, 20 bp, Artificial Sequence
  Description of Artificial Sequence: Synthetic oligonucleotide
  Target: LAMA2; (+) strand; PAM type: NAAAAC; PAM sequence: CAAAAC
tgtctccaaaaaatgaaaat

SEQ ID NO: 7770 - DNA, 20 bp, Artificial Sequence
  Description of Artificial Sequence: Synthetic oligonucleotide
  Target: LAMA2; (+) strand; PAM type: NAAAAC; PAM sequence: AAAAAC
acaaataatgtgtatcactt

SEQ ID NO: 7771 - DNA, 20 bp, Artificial Sequence
  Description of Artificial Sequence: Synthetic oligonucleotide
  Target: LAMA2; (+) strand; PAM type: NAAAAC; PAM sequence: CAAAAC
taatgtgtatcacttaaaaa

SEQ ID NO: 7772 - DNA, 20 bp, Artificial Sequence
  Description of Artificial Sequence: Synthetic oligonucleotide
  Target: LAMA2; (+) strand; PAM type: NAAAAC; PAM sequence: GAAAAC
ggaaaaaataccttgatata

SEQ ID NO: 7773 - DNA, 20 bp, Artificial Sequence
  Description of Artificial Sequence: Synthetic oligonucleotide
  Target: LAMA2; (+) strand; PAM type: NAAAAC; PAM sequence: GAAAAC
tgtgtattttcttttacaca

SEQ ID NO: 7774 - DNA, 20 bp, Artificial Sequence
  Description of Artificial Sequence: Synthetic oligonucleotide
  Target: LAMA2; (+) strand; PAM type: NAAAAC; PAM sequence: TAAAAC
cagattcacctttctagaaa

SEQ ID NO: 7775 - DNA, 20 bp, Artificial Sequence
  Description of Artificial Sequence: Synthetic oligonucleotide
  Target: LAMA2; (+) strand; PAM type: NAAAAC; PAM sequence: CAAAAC
aaaattcattttttccttat

SEQ ID NO: 7776 - DNA, 20 bp, Artificial Sequence
  Description of Artificial Sequence: Synthetic oligonucleotide
  Target: LAMA2; (+) strand; PAM type: NAAAAC; PAM sequence: TAAAAC
gaatgagagggacaacgatg

SEQ ID NO: 7777 - DNA, 20 bp, Artificial Sequence
  Description of Artificial Sequence: Synthetic oligonucleotide
  Target: LAMA2; (+) strand; PAM type: NAAAAC; PAM sequence: GAAAAC
agtttagaaattttcgattt

SEQ ID NO: 7778 - DNA, 20 bp, Artificial Sequence
  Description of Artificial Sequence: Synthetic oligonucleotide
  Target: LAMA2; (+) strand; PAM type: NAAAAC; PAM sequence: CAAAAC
ttaattgagaggtggtgaca

SEQ ID NO: 7779 - DNA, 20 bp, Artificial Sequence
  Description of Artificial Sequence: Synthetic oligonucleotide
  Target: LAMA2; (+) strand; PAM type: NAAAAC; PAM sequence: AAAAAC
agagtagtgttactgaaaag

SEQ ID NO: 7780 - DNA, 20 bp, Artificial Sequence
  Description of Artificial Sequence: Synthetic oligonucleotide
  Target: LAMA2; (+) strand; PAM type: NAAAAC; PAM sequence: TAAAAC
gtactgcatttgcagagtat

SEQ ID NO: 7781 - DNA, 20 bp, Artificial Sequence
  Description of Artificial Sequence: Synthetic oligonucleotide
  Target: LAMA2; (+) strand; PAM type: NAAAAC; PAM sequence: CAAAAC
gcatttgcagagtattaaaa

SEQ ID NO: 7782 - DNA, 20 bp, Artificial Sequence
  Description of Artificial Sequence: Synthetic oligonucleotide
  Target: LAMA2; (+) strand; PAM type: NAAAAC; PAM sequence: AAAAAC
agagtattaaaacaaaacaa

SEQ ID NO: 7783 - DNA, 20 bp, Artificial Sequence
  Description of Artificial Sequence: Synthetic oligonucleotide
  Target: LAMA2; (+) strand; PAM type: NAAAAC; PAM sequence: GAAAAC
aaacaaaaaaacttattaag

SEQ ID NO: 7784 - DNA, 20 bp, Artificial Sequence
  Description of Artificial Sequence: Synthetic oligonucleotide
  Target: LAMA2; (+) strand; PAM type: NAAAAC; PAM sequence: GAAAAC
aacttcatgaatatctgtct

SEQ ID NO: 7785 - DNA, 20 bp, Artificial Sequence
  Description of Artificial Sequence: Synthetic oligonucleotide
  Target: LAMA2; (+) strand; PAM type: NAAAAC; PAM sequence: GAAAAC
taaagtataataataatttt

SEQ ID NO: 7786 - DNA, 20 bp, Artificial Sequence
  Description of Artificial Sequence: Synthetic oligonucleotide
  Target: LAMA2; (+) strand; PAM type: NAAAAC; PAM sequence: GAAAAC
tgtagtaatccccacagatg

SEQ ID NO: 7787 - DNA, 20 bp, Artificial Sequence
  Description of Artificial Sequence: Synthetic oligonucleotide
  Target: LAMA2; (+) strand; PAM type: NAAAAC; PAM sequence: GAAAAC
cctgttattttctgttatca

SEQ ID NO: 7788 - DNA, 20 bp, Artificial Sequence
  Description of Artificial Sequence: Synthetic oligonucleotide
  Target: LAMA2; (+) strand; PAM type: NAAAAC; PAM sequence: AAAAAC
gaaaacaaacacaaacaaac

SEQ ID NO: 7789 - DNA, 20 bp, Artificial Sequence
  Description of Artificial Sequence: Synthetic oligonucleotide
  Target: LAMA2; (+) strand; PAM type: NAAAAC; PAM sequence: GAAAAC
gttttcttcatgttgaaaat

SEQ ID NO: 7790 - DNA, 20 bp, Artificial Sequence
  Description of Artificial Sequence: Synthetic oligonucleotide
  Target: LAMA2; (+) strand; PAM type: NAAAAC; PAM sequence: AAAAAC
gtcatttgtagattaaaaat

SEQ ID NO: 7791 - DNA, 20 bp, Artificial Sequence
  Description of Artificial Sequence: Synthetic oligonucleotide
  Target: LAMA2; (+) strand; PAM type: NAAAAC; PAM sequence: CAAAAC
gtaggaaataatactcagcc

SEQ ID NO: 7792 - DNA, 20 bp, Artificial Sequence
  Description of Artificial Sequence: Synthetic oligonucleotide
  Target: LAMA2; (+) strand; PAM type: NAAAAC; PAM sequence: TAAAAC
atttgttgatgtgatatttc

SEQ ID NO: 7793 - DNA, 20 bp, Artificial Sequence
  Description of Artificial Sequence: Synthetic oligonucleotide
  Target: LAMA2; (+) strand; PAM type: NAAAAC; PAM sequence: TAAAAC
tagaagccttttttaactaa

SEQ ID NO: 7794 - DNA, 20 bp, Artificial Sequence
  Description of Artificial Sequence: Synthetic oligonucleotide
  Target: LAMA2; (+) strand; PAM type: NAAAAC; PAM sequence: AAAAAC
taaatcaataattggaaata

SEQ ID NO: 7795 - DNA, 20 bp, Artificial Sequence
  Description of Artificial Sequence: Synthetic oligonucleotide
  Target: LAMA2; (+) strand; PAM type: NAAAAC; PAM sequence: TAAAAC
taatttttgattcaattttt

SEQ ID NO: 7796 - DNA, 20 bp, Artificial Sequence
  Description of Artificial Sequence: Synthetic oligonucleotide
  Target: LAMA2; (+) strand; PAM type: NAAAAC; PAM sequence: AAAAAC
acatgcaaataattttacaa

SEQ ID NO: 7797 - DNA, 20 bp, Artificial Sequence
  Description of Artificial Sequence: Synthetic oligonucleotide
  Target: LAMA2; (+) strand; PAM type: NAAAAC; PAM sequence: TAAAAC
acttaaaaattgaaaggaag

SEQ ID NO: 7798 - DNA, 20 bp, Artificial Sequence
  Description of Artificial Sequence: Synthetic oligonucleotide
  Target: LAMA2; (+) strand; PAM type: NAAAAC; PAM sequence: AAAAAC
gaagtaagatttgcataatg

SEQ ID NO: 7799 - DNA, 20 bp, Artificial Sequence
  Description of Artificial Sequence: Synthetic oligonucleotide
  Target: LAMA2; (+) strand; PAM type: NAAAAC; PAM sequence: TAAAAC
tttttcaaacctaagatatt

SEQ ID NO: 7800 - DNA, 20 bp, Artificial Sequence
  Description of Artificial Sequence: Synthetic oligonucleotide
  Target: LAMA2; (+) strand; PAM type: NAAAAC; PAM sequence: AAAAAC
acctcttagagcagatttaa

SEQ ID NO: 7801 - DNA, 20 bp, Artificial Sequence
  Description of Artificial Sequence: Synthetic oligonucleotide
  Target: LAMA2; (+) strand; PAM type: NAAAAC; PAM sequence: CAAAAC
ggcatgagcctgaatgggct

SEQ ID NO: 7802 - DNA, 20 bp, Artificial Sequence
  Description of Artificial Sequence: Synthetic oligonucleotide
  Target: LAMA2; (+) strand; PAM type: NAAAAC; PAM sequence: CAAAAC
atgatagtcataacatgaca

SEQ ID NO: 7803 - DNA, 20 bp, Artificial Sequence
  Description of Artificial Sequence: Synthetic oligonucleotide
  Target: LAMA2; (+) strand; PAM type: NAAAAC; PAM sequence: TAAAAC
gaaagaaagtctgcaagcat

SEQ ID NO: 7804 - DNA, 20 bp, Artificial Sequence
  Description of Artificial Sequence: Synthetic oligonucleotide
  Target: LAMA2; (+) strand; PAM type: NAAAAC; PAM sequence: TAAAAC
gttataatgtcttttacatt

SEQ ID NO: 7805 - DNA, 20 bp, Artificial Sequence
  Description of Artificial Sequence: Synthetic oligonucleotide
  Target: LAMA2; (+) strand; PAM type: NAAAAC; PAM sequence: TAAAAC
atttaaaacaattttacatt

SEQ ID NO: 7806 - DNA, 20 bp, Artificial Sequence
  Description of Artificial Sequence: Synthetic oligonucleotide
  Target: LAMA2; (+) strand; PAM type: NAAAAC; PAM sequence: TAAAAC
atttaaaacaattttacatt

SEQ ID NO: 7807 - DNA, 20 bp, Artificial Sequence
  Description of Artificial Sequence: Synthetic oligonucleotide
  Target: LAMA2; (+) strand; PAM type: NAAAAC; PAM sequence: AAAAAC
ctttttaaaaatattttata

SEQ ID NO: 7808 - DNA, 20 bp, Artificial Sequence
  Description of Artificial Sequence: Synthetic oligonucleotide
  Target: LAMA2; (+) strand; PAM type: NAAAAC; PAM sequence: AAAAAC
tggttccatatgccaaagga

SEQ ID NO: 7809 - DNA, 20 bp, Artificial Sequence
  Description of Artificial Sequence: Synthetic oligonucleotide
  Target: LAMA2; (+) strand; PAM type: NAAAAC; PAM sequence: GAAAAC
aagggactagagcaggatga

SEQ ID NO: 7810 - DNA, 20 bp, Artificial Sequence
  Description of Artificial Sequence: Synthetic oligonucleotide
  Target: LAMA2; (+) strand; PAM type: NAAAAC; PAM sequence: AAAAAC
tcccttttgcattagctgtg

SEQ ID NO: 7811 - DNA, 20 bp, Artificial Sequence
  Description of Artificial Sequence: Synthetic oligonucleotide
  Target: LAMA2; (+) strand; PAM type: NAAAAC; PAM sequence: AAAAAC
tgtatatgaccttggttaag

SEQ ID NO: 7812 - DNA, 20 bp, Artificial Sequence
  Description of Artificial Sequence: Synthetic oligonucleotide
  Target: LAMA2; (+) strand; PAM type: NAAAAC; PAM sequence: AAAAAC
taaactgatttaggattata

SEQ ID NO: 7813 - DNA, 20 bp, Artificial Sequence
  Description of Artificial Sequence: Synthetic oligonucleotide
  Target: LAMA2; (+) strand; PAM type: NAAAAC; PAM sequence: GAAAAC
cagttctcacttttatgtct

SEQ ID NO: 7814 - DNA, 20 bp, Artificial Sequence
  Description of Artificial Sequence: Synthetic oligonucleotide
  Target: LAMA2; (+) strand; PAM type: NAAAAC; PAM sequence: GAAAAC
ttgccctgtcatatataata

SEQ ID NO: 7815 - DNA, 20 bp, Artificial Sequence
  Description of Artificial Sequence: Synthetic oligonucleotide
  Target: LAMA2; (+) strand; PAM type: NAAAAC; PAM sequence: GAAAAC
agaaaacaaatctacttagg

SEQ ID NO: 7816 - DNA, 20 bp, Artificial Sequence
  Description of Artificial Sequence: Synthetic oligonucleotide
  Target: LAMA2; (+) strand; PAM type: NAAAAC; PAM sequence: TAAAAC
taattgagggcatttccctt

SEQ ID NO: 7817 - DNA, 20 bp, Artificial Sequence
  Description of Artificial Sequence: Synthetic oligonucleotide
  Target: LAMA2; (+) strand; PAM type: NAAAAC; PAM sequence: TAAAAC
gatttctaccttgggagtta

SEQ ID NO: 7818 - DNA, 20 bp, Artificial Sequence
  Description of Artificial Sequence: Synthetic oligonucleotide
  Target: LAMA2; (+) strand; PAM type: NAAAAC; PAM sequence: AAAAAC
tcccccttgacatcattgcc

SEQ ID NO: 7819 - DNA, 20 bp, Artificial Sequence
  Description of Artificial Sequence: Synthetic oligonucleotide
  Target: LAMA2; (+) strand; PAM type: NAAAAC; PAM sequence: AAAAAC
ttgacatcattgccaaaaac

SEQ ID NO: 7820 - DNA, 20 bp, Artificial Sequence
  Description of Artificial Sequence: Synthetic oligonucleotide
  Target: LAMA2; (+) strand; PAM type: NAAAAC; PAM sequence: TAAAAC
tttctgaaccatctataatt

SEQ ID NO: 7821 - DNA, 20 bp, Artificial Sequence
  Description of Artificial Sequence: Synthetic oligonucleotide
  Target: LAMA2; (+) strand; PAM type: NAAAAC; PAM sequence: CAAAAC
tgcattaaaaatcttgtaat

SEQ ID NO: 7822 - DNA, 20 bp, Artificial Sequence
  Description of Artificial Sequence: Synthetic oligonucleotide
  Target: LAMA2; (+) strand; PAM type: NAAAAC; PAM sequence: AAAAAC
tctaaataagaccagaattt

SEQ ID NO: 7823 - DNA, 20 bp, Artificial Sequence
  Description of Artificial Sequence: Synthetic oligonucleotide
  Target: LAMA2; (+) strand; PAM type: NAAAAC; PAM sequence: CAAAAC
aatggccaaacaagatacaa

SEQ ID NO: 7824 - DNA, 20 bp, Artificial Sequence
  Description of Artificial Sequence: Synthetic oligonucleotide
  Target: LAMA2; (+) strand; PAM type: NAAAAC; PAM sequence: GAAAAC
tgaacactagttacagcttg

SEQ ID NO: 7825 - DNA, 20 bp, Artificial Sequence
  Description of Artificial Sequence: Synthetic oligonucleotide
  Target: LAMA2; (+) strand; PAM type: NAAAAC; PAM sequence: CAAAAC
ggaaaacattcacttagggc

SEQ ID NO: 7826 - DNA, 20 bp, Artificial Sequence
  Description of Artificial Sequence: Synthetic oligonucleotide
  Target: LAMA2; (+) strand; PAM type: NAAAAC; PAM sequence: AAAAAC
caattatttttggtggagtg

SEQ ID NO: 7827 - DNA, 20 bp, Artificial Sequence
  Description of Artificial Sequence: Synthetic oligonucleotide
  Target: LAMA2; (+) strand; PAM type: NAAAAC; PAM sequence: TAAAAC
tttcattttaaaaattatga

SEQ ID NO: 7828 - DNA, 20 bp, Artificial Sequence
  Description of Artificial Sequence: Synthetic oligonucleotide
  Target: LAMA2; (+) strand; PAM type: NAAAAC; PAM sequence: GAAAAC
aagtacctatacattttcta

SEQ ID NO: 7829 - DNA, 20 bp, Artificial Sequence
  Description of Artificial Sequence: Synthetic oligonucleotide
  Target: LAMA2; (+) strand; PAM type: NAAAAC; PAM sequence: TAAAAC
tgtagcagtaagttgcattt

SEQ ID NO: 7830 - DNA, 20 bp, Artificial Sequence
  Description of Artificial Sequence: Synthetic oligonucleotide
  Target: LAMA2; (+) strand; PAM type: NAAAAC; PAM sequence: AAAAAC
tatctacactgcagttgtag

SEQ ID NO: 7831 - DNA, 20 bp, Artificial Sequence
  Description of Artificial Sequence: Synthetic oligonucleotide
  Target: LAMA2; (+) strand; PAM type: NAAAAC; PAM sequence: CAAAAC
ataatgataattcattgaat

SEQ ID NO: 7832 - DNA, 20 bp, Artificial Sequence
  Description of Artificial Sequence: Synthetic oligonucleotide
  Target: LAMA2; (+) strand; PAM type: NAAAAC; PAM sequence: AAAAAC
ataaaaaagaatgtgagaat

SEQ ID NO: 7833 - DNA, 20 bp, Artificial Sequence
  Description of Artificial Sequence: Synthetic oligonucleotide
  Target: LAMA2; (+) strand; PAM type: NAAAAC; PAM sequence: TAAAAC
tcacttctatgcataagtgg

SEQ ID NO: 7834 - DNA, 20 bp, Artificial Sequence
  Description of Artificial Sequence: Synthetic oligonucleotide
  Target: LAMA2; (+) strand; PAM type: NAAAAC; PAM sequence: CAAAAC
ccattaaaatgacactttag

SEQ ID NO: 7835 - DNA, 20 bp, Artificial Sequence
  Description of Artificial Sequence: Synthetic oligonucleotide
  Target: LAMA2; (+) strand; PAM type: NAAAAC; PAM sequence: CAAAAC
accattttttaaacttaaca

SEQ ID NO: 7836 - DNA, 20 bp, Artificial Sequence
  Description of Artificial Sequence: Synthetic oligonucleotide
  Target: LAMA2; (+) strand; PAM type: NAAAAC; PAM sequence: AAAAAC
acagtaaatcattaaatcaa

SEQ ID NO: 7837 - DNA, 20 bp, Artificial Sequence
  Description of Artificial Sequence: Synthetic oligonucleotide
  Target: LAMA2; (+) strand; PAM type: NAAAAC; PAM sequence: TAAAAC
ctgatgtatctgtaaagaac

SEQ ID NO: 7838 - DNA, 20 bp, Artificial Sequence
  Description of Artificial Sequence: Synthetic oligonucleotide
  Target: LAMA2; (+) strand; PAM type: NAAAAC; PAM sequence: GAAAAC
acagggcacttaacaaatca

SEQ ID NO: 7839 - DNA, 20 bp, Artificial Sequence
  Description of Artificial Sequence: Synthetic oligonucleotide
  Target: LAMA2; (+) strand; PAM type: NAAAAC; PAM sequence: AAAAAC
ggtgaaacaccatctctgct

SEQ ID NO: 7840 - DNA, 20 bp, Artificial Sequence
  Description of Artificial Sequence: Synthetic oligonucleotide
  Target: LAMA2; (+) strand; PAM type: NAAAAC; PAM sequence: AAAAAC
ccgagtgagactccatctca

SEQ ID NO: 7841 - DNA, 20 bp, Artificial Sequence
  Description of Artificial Sequence: Synthetic oligonucleotide
  Target: LAMA2; (+) strand; PAM type: NAAAAC; PAM sequence: CAAAAC
tgagactccatctcaaaaaa

SEQ ID NO: 7842 - DNA, 20 bp, Artificial Sequence
  Description of Artificial Sequence: Synthetic oligonucleotide
  Target: LAMA2; (+) strand; PAM type: NAAAAC; PAM sequence: TAAAAC
ttaaagatgcattattttgc

SEQ ID NO: 7843 - DNA, 20 bp, Artificial Sequence
  Description of Artificial Sequence: Synthetic oligonucleotide
  Target: LAMA2; (+) strand; PAM type: NAAAAC; PAM sequence: TAAAAC
tattcaagttcatagggtca

SEQ ID NO: 7844 - DNA, 20 bp, Artificial Sequence
  Description of Artificial Sequence: Synthetic oligonucleotide
  Target: LAMA2; (+) strand; PAM type: NAAAAC; PAM sequence: GAAAAC
agagaaattgatttgtccaa

SEQ ID NO: 7845 - DNA, 20 bp, Artificial Sequence
  Description of Artificial Sequence: Synthetic oligonucleotide
  Target: LAMA2; (+) strand; PAM type: NAAAAC; PAM sequence: CAAAAC
actataaatggacaaatacc

SEQ ID NO: 7846 - DNA, 20 bp, Artificial Sequence
  Description of Artificial Sequence: Synthetic oligonucleotide
  Target: LAMA2; (+) strand; PAM type: NAAAAC; PAM sequence: CAAAAC
gtggttctcatatcacagga

SEQ ID NO: 7847 - DNA, 20 bp, Artificial Sequence
  Description of Artificial Sequence: Synthetic oligonucleotide
  Target: LAMA2; (+) strand; PAM type: NAAAAC; PAM sequence: CAAAAC
tctcatatcacaggacaaaa

SEQ ID NO: 7848 - DNA, 20 bp, Artificial Sequence
  Description of Artificial Sequence: Synthetic oligonucleotide
  Target: LAMA2; (+) strand; PAM type: NAAAAC; PAM sequence: AAAAAC
aaagtaaagaagaagaagta

SEQ ID NO: 7849 - DNA, 20 bp, Artificial Sequence
  Description of Artificial Sequence: Synthetic oligonucleotide
  Target: LAMA2; (+) strand; PAM type: NAAAAC; PAM sequence: AAAAAC
tcattatcacacatttttta

SEQ ID NO: 7850 - DNA, 20 bp, Artificial Sequence
  Description of Artificial Sequence: Synthetic oligonucleotide
  Target: LAMA2; (+) strand; PAM type: NAAAAC; PAM sequence: GAAAAC
aatggggttctgactcccgg

SEQ ID NO: 7851 - DNA, 20 bp, Artificial Sequence
  Description of Artificial Sequence: Synthetic oligonucleotide
  Target: LAMA2; (+) strand; PAM type: NAAAAC; PAM sequence: AAAAAC
gtttaaaataattttttttc

SEQ ID NO: 7852 - DNA, 20 bp, Artificial Sequence
  Description of Artificial Sequence: Synthetic oligonucleotide
  Target: LAMA2; (+) strand; PAM type: NAAAAC; PAM sequence: TAAAAC
cctaagcatatttatatcat

SEQ ID NO: 7853 - DNA, 20 bp, Artificial Sequence
  Description of Artificial Sequence: Synthetic oligonucleotide
  Target: LAMA2; (+) strand; PAM type: NAAAAC; PAM sequence: CAAAAC
ttatatcattaaaactgctt

SEQ ID NO: 7854 - DNA, 20 bp, Artificial Sequence
  Description of Artificial Sequence: Synthetic oligonucleotide
  Target: LAMA2; (+) strand; PAM type: NAAAAC; PAM sequence: TAAAAC
attagaactagaaataaaaa

SEQ ID NO: 7855 - DNA, 20 bp, Artificial Sequence
  Description of Artificial Sequence: Synthetic oligonucleotide
  Target: LAMA2; (+) strand; PAM type: NAAAAC; PAM sequence: TAAAAC
cccattttacattttaaaaa

SEQ ID NO: 7856 - DNA, 20 bp, Artificial Sequence
  Description of Artificial Sequence: Synthetic oligonucleotide
  Target: LAMA2; (+) strand; PAM type: NAAAAC; PAM sequence: TAAAAC
tcacttttataacttatttt

SEQ ID NO: 7857 - DNA, 20 bp, Artificial Sequence
  Description of Artificial Sequence: Synthetic oligonucleotide
  Target: LAMA2; (+) strand; PAM type: NAAAAC; PAM sequence: GAAAAC
aaaggtccatttgattgaat

SEQ ID NO: 7858 - DNA, 20 bp, Artificial Sequence
  Description of Artificial Sequence: Synthetic oligonucleotide
  Target: LAMA2; (+) strand; PAM type: NAAAAC; PAM sequence: AAAAAC
tttttttttcctggtacccc

SEQ ID NO: 7859 - DNA, 20 bp, Artificial Sequence
  Description of Artificial Sequence: Synthetic oligonucleotide
  Target: LAMA2; (+) strand; PAM type: NAAAAC; PAM sequence: GAAAAC
catctacttttggctgcctt

SEQ ID NO: 7860 - DNA, 20 bp, Artificial Sequence
  Description of Artificial Sequence: Synthetic oligonucleotide
  Target: LAMA2; (+) strand; PAM type: NAAAAC; PAM sequence: TAAAAC
tcagcaccatggtaagattt

SEQ ID NO: 7861 - DNA, 20 bp, Artificial Sequence
  Description of Artificial Sequence: Synthetic oligonucleotide
  Target: LAMA2; (+) strand; PAM type: NAAAAC; PAM sequence: TAAAAC
gaagcagtaggaataatatt

SEQ ID NO: 7862 - DNA, 20 bp, Artificial Sequence
  Description of Artificial Sequence: Synthetic oligonucleotide
  Target: LAMA2; (+) strand; PAM type: NAAAAC; PAM sequence: CAAAAC
accatagaaaaaaaaaagca

SEQ ID NO: 7863 - DNA, 20 bp, Artificial Sequence
  Description of Artificial Sequence: Synthetic oligonucleotide
  Target: LAMA2; (+) strand; PAM type: NAAAAC; PAM sequence: GAAAAC
tacattgtgctttggcacag

SEQ ID NO: 7864 - DNA, 20 bp, Artificial Sequence
  Description of Artificial Sequence: Synthetic oligonucleotide
  Target: LAMA2; (+) strand; PAM type: NAAAAC; PAM sequence: CAAAAC
ttagcaacaacagtaataac

SEQ ID NO: 7865 - DNA, 20 bp, Artificial Sequence
  Description of Artificial Sequence: Synthetic oligonucleotide
  Target: LAMA2; (+) strand; PAM type: NAAAAC; PAM sequence: AAAAAC
gcagatcgggctcatcaagg

SEQ ID NO: 7866 - DNA, 20 bp, Artificial Sequence
  Description of Artificial Sequence: Synthetic oligonucleotide
  Target: LAMA2; (+) strand; PAM type: NAAAAC; PAM sequence: TAAAAC
taagacaaaccaacacaata

SEQ ID NO: 7867 - DNA, 20 bp, Artificial Sequence
  Description of Artificial Sequence: Synthetic oligonucleotide
  Target: LAMA2; (+) strand; PAM type: NAAAAC; PAM sequence: GAAAAC
ttttcacaatcaatgaggta

SEQ ID NO: 7868 - DNA, 20 bp, Artificial Sequence
  Description of Artificial Sequence: Synthetic oligonucleotide
  Target: LAMA2; (+) strand; PAM type: NAAAAC; PAM sequence: GAAAAC
gtattctggagttgttggat

SEQ ID NO: 7869 - DNA, 20 bp, Artificial Sequence
  Description of Artificial Sequence: Synthetic oligonucleotide
  Target: LAMA2; (+) strand; PAM type: NAAAAC; PAM sequence: AAAAAC
cttcctataattcaatatct

SEQ ID NO: 7870 - DNA, 20 bp, Artificial Sequence
  Description of Artificial Sequence: Synthetic oligonucleotide
  Target: LAMA2; (+) strand; PAM type: NAAAAC; PAM sequence: AAAAAC
caaagaagaataaatactgt

SEQ ID NO: 7871 - DNA, 20 bp, Artificial Sequence
  Description of Artificial Sequence: Synthetic oligonucleotide
  Target: LAMA2; (+) strand; PAM type: NAAAAC; PAM sequence: TAAAAC
aaccaccttcacatgtatga

SEQ ID NO: 7872 - DNA, 20 bp, Artificial Sequence
  Description of Artificial Sequence: Synthetic oligonucleotide
  Target: LAMA2; (+) strand; PAM type: NAAAAC; PAM sequence: GAAAAC
tagaatatgctgacctagag

SEQ ID NO: 7873 - DNA, 20 bp, Artificial Sequence
  Description of Artificial Sequence: Synthetic oligonucleotide
  Target: LAMA2; (+) strand; PAM type: NAAAAC; PAM sequence: AAAAAC
gacatgtgattagaaaaaat

SEQ ID NO: 7874 - DNA, 20 bp, Artificial Sequence
  Description of Artificial Sequence: Synthetic oligonucleotide
  Target: LAMA2; (+) strand; PAM type: NAAAAC; PAM sequence: AAAAAC
tacatttttagaaagaaatc

SEQ ID NO: 7875 - DNA, 20 bp, Artificial Sequence
  Description of Artificial Sequence: Synthetic oligonucleotide
  Target: LAMA2; (+) strand; PAM type: NAAAAC; PAM sequence: GAAAAC
aatacattccaagtttctat

SEQ ID NO: 7876 - DNA, 20 bp, Artificial Sequence
  Description of Artificial Sequence: Synthetic oligonucleotide
  Target: LAMA2; (+) strand; PAM type: NAAAAC; PAM sequence: AAAAAC
cattatgaagaattacaaaa

SEQ ID NO: 7877 - DNA, 20 bp, Artificial Sequence
  Description of Artificial Sequence: Synthetic oligonucleotide
  Target: LAMA2; (+) strand; PAM type: NAAAAC; PAM sequence: CAAAAC
tgaagaattacaaaaaaaaa

SEQ ID NO: 7878 - DNA, 20 bp, Artificial Sequence
  Description of Artificial Sequence: Synthetic oligonucleotide
  Target: LAMA2; (+) strand; PAM type: NAAAAC; PAM sequence: GAAAAC
atacctgagactgattataa

SEQ ID NO: 7879 - DNA, 20 bp, Artificial Sequence
  Description of Artificial Sequence: Synthetic oligonucleotide
  Target: LAMA2; (+) strand; PAM type: NAAAAC; PAM sequence: TAAAAC
agcatgtgttttactgtttt

SEQ ID NO: 7880 - DNA, 20 bp, Artificial Sequence
  Description of Artificial Sequence: Synthetic oligonucleotide
  Target: LAMA2; (+) strand; PAM type: NAAAAC; PAM sequence: AAAAAC
actcaaagcagttggcaaag

SEQ ID NO: 7881 - DNA, 20 bp, Artificial Sequence
  Description of Artificial Sequence: Synthetic oligonucleotide
  Target: LAMA2; (+) strand; PAM type: NAAAAC; PAM sequence: CAAAAC
acagcctatggatggtcaaa

SEQ ID NO: 7882 - DNA, 20 bp, Artificial Sequence
  Description of Artificial Sequence: Synthetic oligonucleotide
  Target: LAMA2; (+) strand; PAM type: NAAAAC; PAM sequence: AAAAAC
atggatggtcaaacaaaacc

SEQ ID NO: 7883 - DNA, 20 bp, Artificial Sequence
  Description of Artificial Sequence: Synthetic oligonucleotide
  Target: LAMA2; (+) strand; PAM type: NAAAAC; PAM sequence: TAAAAC
ttggtggtatgtgtatacaa

SEQ ID NO: 7884 - DNA, 20 bp, Artificial Sequence
  Description of Artificial Sequence: Synthetic oligonucleotide
  Target: LAMA2; (+) strand; PAM type: NAAAAC; PAM sequence: TAAAAC
atacaataaaacttttcctg

SEQ ID NO: 7885 - DNA, 20 bp, Artificial Sequence
  Description of Artificial Sequence: Synthetic oligonucleotide
  Target: LAMA2; (+) strand; PAM type: NAAAAC; PAM sequence: TAAAAC
ggtaaatacagcaagaaatg

SEQ ID NO: 7886 - DNA, 20 bp, Artificial Sequence
  Description of Artificial Sequence: Synthetic oligonucleotide
  Target: LAMA2; (+) strand; PAM type: NAAAAC; PAM sequence: AAAAAC
ttagaacagatgtaaaaatc

SEQ ID NO: 7887 - DNA, 20 bp, Artificial Sequence
  Description of Artificial Sequence: Synthetic oligonucleotide
  Target: LAMA2; (+) strand; PAM type: NAAAAC; PAM sequence: CAAAAC
aagaagaaacagtactgaat

SEQ ID NO: 7888 - DNA, 20 bp, Artificial Sequence
  Description of Artificial Sequence: Synthetic oligonucleotide
  Target: LAMA2; (+) strand; PAM type: NAAAAC; PAM sequence: AAAAAC
agtaagttgatggaaaaaaa

SEQ ID NO: 7889 - DNA, 20 bp, Artificial Sequence
  Description of Artificial Sequence: Synthetic oligonucleotide
  Target: LAMA2; (+) strand; PAM type: NAAAAC; PAM sequence: AAAAAC
tgtatacatcttgggcgaag

SEQ ID NO: 7890 - DNA, 20 bp, Artificial Sequence
  Description of Artificial Sequence: Synthetic oligonucleotide
  Target: LAMA2; (+) strand; PAM type: NAAAAC; PAM sequence: AAAAAC
gtatgcaagaataaatgcca

SEQ ID NO: 7891 - DNA, 20 bp, Artificial Sequence
  Description of Artificial Sequence: Synthetic oligonucleotide
  Target: LAMA2; (+) strand; PAM type: NAAAAC; PAM sequence: AAAAAC
tttgagacaaagcagttgga

SEQ ID NO: 7892 - DNA, 20 bp, Artificial Sequence
  Description of Artificial Sequence: Synthetic oligonucleotide
  Target: LAMA2; (+) strand; PAM type: NAAAAC; PAM sequence: GAAAAC
gctgctgacatgcagctagg

SEQ ID NO: 7893 - DNA, 20 bp, Artificial Sequence
  Description of Artificial Sequence: Synthetic oligonucleotide
  Target: LAMA2; (+) strand; PAM type: NAAAAC; PAM sequence: AAAAAC
agctaaataataaggcttat

SEQ ID NO: 7894 - DNA, 20 bp, Artificial Sequence
  Description of Artificial Sequence: Synthetic oligonucleotide
  Target: LAMA2; (+) strand; PAM type: NAAAAC; PAM sequence: CAAAAC
tgaggggtagtagaaaatgg

SEQ ID NO: 7895 - DNA, 20 bp, Artificial Sequence
  Description of Artificial Sequence: Synthetic oligonucleotide
  Target: LAMA2; (+) strand; PAM type: NAAAAC; PAM sequence: GAAAAC
gcaatcatgatttttggagt

SEQ ID NO: 7896 - DNA, 20 bp, Artificial Sequence
  Description of Artificial Sequence: Synthetic oligonucleotide
  Target: LAMA2; (+) strand; PAM type: NAAAAC; PAM sequence: CAAAAC
attagacctgcctaggaaag

SEQ ID NO: 7897 - DNA, 20 bp, Artificial Sequence
  Description of Artificial Sequence: Synthetic oligonucleotide
  Target: LAMA2; (+) strand; PAM type: NAAAAC; PAM sequence: GAAAAC
aataagcacacaagacagca

SEQ ID NO: 7898 - DNA, 20 bp, Artificial Sequence
  Description of Artificial Sequence: Synthetic oligonucleotide
  Target: LAMA2; (+) strand; PAM type: NAAAAC; PAM sequence: AAAAAC
taataaaaaaaatatactta

SEQ ID NO: 7899 - DNA, 20 bp, Artificial Sequence
  Description of Artificial Sequence: Synthetic oligonucleotide
  Target: LAMA2; (+) strand; PAM type: NAAAAC; PAM sequence: AAAAAC
acatttttcctaatctcagt

SEQ ID NO: 7900 - DNA, 20 bp, Artificial Sequence
  Description of Artificial Sequence: Synthetic oligonucleotide
  Target: LAMA2; (+) strand; PAM type: NAAAAC; PAM sequence: TAAAAC
cattcataattcagtttcaa

SEQ ID NO: 7901 - DNA, 20 bp, Artificial Sequence
  Description of Artificial Sequence: Synthetic oligonucleotide
  Target: LAMA2; (+) strand; PAM type: NAAAAC; PAM sequence: CAAAAC
gaggtaacttttatttgaag

SEQ ID NO: 7902 - DNA, 20 bp, Artificial Sequence
  Description of Artificial Sequence: Synthetic oligonucleotide
  Target: LAMA2; (+) strand; PAM type: NAAAAC; PAM sequence: CAAAAC
cccagaaatttaaacagctt

SEQ ID NO: 7903 - DNA, 20 bp, Artificial Sequence
  Description of Artificial Sequence: Synthetic oligonucleotide
  Target: LAMA2; (+) strand; PAM type: NAAAAC; PAM sequence: CAAAAC
catataacttttgatacctt

SEQ ID NO: 7904 - DNA, 20 bp, Artificial Sequence
  Description of Artificial Sequence: Synthetic oligonucleotide
  Target: LAMA2; (+) strand; PAM type: NAAAAC; PAM sequence: AAAAAC
acaattattatttgtcaatt

SEQ ID NO: 7905 - DNA, 20 bp, Artificial Sequence
  Description of Artificial Sequence: Synthetic oligonucleotide
  Target: LAMA2; (+) strand; PAM type: NAAAAC; PAM sequence: AAAAAC
agaacatacttgaggttgac

SEQ ID NO: 7906 - DNA, 20 bp, Artificial Sequence
  Description of Artificial Sequence: Synthetic oligonucleotide
  Target: LAMA2; (+) strand; PAM type: NAAAAC; PAM sequence: CAAAAC
tatttttatatagaacacga

SEQ ID NO: 7907 - DNA, 20 bp, Artificial Sequence
  Description of Artificial Sequence: Synthetic oligonucleotide
  Target: LAMA2; (+) strand; PAM type: NAAAAC; PAM sequence: TAAAAC
gctatgagtcattacagtta

SEQ ID NO: 7908 - DNA, 20 bp, Artificial Sequence
  Description of Artificial Sequence: Synthetic oligonucleotide
  Target: LAMA2; (+) strand; PAM type: NAAAAC; PAM sequence: TAAAAC
ttacattttaaaagtaattt

SEQ ID NO: 7909 - DNA, 20 bp, Artificial Sequence
  Description of Artificial Sequence: Synthetic oligonucleotide
  Target: LAMA2; (+) strand; PAM type: NAAAAC; PAM sequence: CAAAAC
gacagatgattccactaggt

SEQ ID NO: 7910 - DNA, 20 bp, Artificial Sequence
  Description of Artificial Sequence: Synthetic oligonucleotide
  Target: LAMA2; (+) strand; PAM type: NAAAAC; PAM sequence: GAAAAC
tgtacacatagtgtatgggt

SEQ ID NO: 7911 - DNA, 20 bp, Artificial Sequence
  Description of Artificial Sequence: Synthetic oligonucleotide
  Target: LAMA2; (+) strand; PAM type: NAAAAC; PAM sequence: AAAAAC
cattctggatttaaaatgtt

SEQ ID NO: 7912 - DNA, 20 bp, Artificial Sequence
  Description of Artificial Sequence: Synthetic oligonucleotide
  Target: LAMA2; (+) strand; PAM type: NAAAAC; PAM sequence: TAAAAC
aaaatgtaaatgagcacaaa

SEQ ID NO: 7913 - DNA, 20 bp, Artificial Sequence
  Description of Artificial Sequence: Synthetic oligonucleotide
  Target: LAMA2; (+) strand; PAM type: NAAAAC; PAM sequence: AAAAAC
aatgataaatgaaaatcaag

SEQ ID NO: 7914 - DNA, 20 bp, Artificial Sequence
  Description of Artificial Sequence: Synthetic oligonucleotide
  Target: LAMA2; (+) strand; PAM type: NAAAAC; PAM sequence: TAAAAC
aagctgtcccttgtggctat

SEQ ID NO: 7915 - DNA, 20 bp, Artificial Sequence
  Description of Artificial Sequence: Synthetic oligonucleotide
  Target: LAMA2; (+) strand; PAM type: NAAAAC; PAM sequence: TAAAAC
ttttgtttacaaatataacc

SEQ ID NO: 7916 - DNA, 20 bp, Artificial Sequence
  Description of Artificial Sequence: Synthetic oligonucleotide
  Target: LAMA2; (+) strand; PAM type: NAAAAC; PAM sequence: AAAAAC
ttatttccagcaaacataga

SEQ ID NO: 7917 - DNA, 20 bp, Artificial Sequence
  Description of Artificial Sequence: Synthetic oligonucleotide
  Target: LAMA2; (+) strand; PAM type: NAAAAC; PAM sequence: CAAAAC
aacctcaatgaatctgtttc

SEQ ID NO: 7918 - DNA, 20 bp, Artificial Sequence
  Description of Artificial Sequence: Synthetic oligonucleotide
  Target: LAMA2; (+) strand; PAM type: NAAAAC; PAM sequence: AAAAAC
tgtctcagttcaccaagagg

SEQ ID NO: 7919 - DNA, 20 bp, Artificial Sequence
  Description of Artificial Sequence: Synthetic oligonucleotide
  Target: LAMA2; (+) strand; PAM type: NAAAAC; PAM sequence: AAAAAC
tttctgtttttttttttaaa

SEQ ID NO: 7920 - DNA, 20 bp, Artificial Sequence
  Description of Artificial Sequence: Synthetic oligonucleotide
  Target: LAMA2; (+) strand; PAM type: NAAAAC; PAM sequence: CAAAAC
catcaggatacgaaataaat

SEQ ID NO: 7921 - DNA, 20 bp, Artificial Sequence
  Description of Artificial Sequence: Synthetic oligonucleotide
  Target: LAMA2; (+) strand; PAM type: NAAAAC; PAM sequence: TAAAAC
tcaaaactaatctaaaatgt

SEQ ID NO: 7922 - DNA, 20 bp, Artificial Sequence
  Description of Artificial Sequence: Synthetic oligonucleotide
  Target: LAMA2; (+) strand; PAM type: NAAAAC; PAM sequence: CAAAAC
acttgcccatatctctcaga

SEQ ID NO: 7923 - DNA, 20 bp, Artificial Sequence
  Description of Artificial Sequence: Synthetic oligonucleotide
  Target: LAMA2; (+) strand; PAM type: NAAAAC; PAM sequence: TAAAAC
ttagacttttctaagagttt

SEQ ID NO: 7924 - DNA, 20 bp, Artificial Sequence
  Description of Artificial Sequence: Synthetic oligonucleotide
  Target: LAMA2; (+) strand; PAM type: NAAAAC; PAM sequence: GAAAAC
gtgtcaggctgcctgtcggg

SEQ ID NO: 7925 - DNA, 20 bp, Artificial Sequence
  Description of Artificial Sequence: Synthetic oligonucleotide
  Target: LAMA2; (+) strand; PAM type: NAAAAC; PAM sequence: AAAAAC
gtaattctccatgggatttg

SEQ ID NO: 7926 - DNA, 20 bp, Artificial Sequence
  Description of Artificial Sequence: Synthetic oligonucleotide
  Target: LAMA2; (+) strand; PAM type: NAAAAC; PAM sequence: AAAAAC
tccatatgacaatgttattt

SEQ ID NO: 7927 - DNA, 20 bp, Artificial Sequence
  Description of Artificial Sequence: Synthetic oligonucleotide
  Target: LAMA2; (+) strand; PAM type: NAAAAC; PAM sequence: CAAAAC
agccttgtggaactcatggt

SEQ ID NO: 7928 - DNA, 20 bp, Artificial Sequence
  Description of Artificial Sequence: Synthetic oligonucleotide
  Target: LAMA2; (+) strand; PAM type: NAAAAC; PAM sequence: GAAAAC
atgggactatctagttgcag

SEQ ID NO: 7929 - DNA, 20 bp, Artificial Sequence
  Description of Artificial Sequence: Synthetic oligonucleotide
  Target: LAMA2; (+) strand; PAM type: NAAAAC; PAM sequence: CAAAAC
ataacatgcttgcatcatca

SEQ ID NO: 7930 - DNA, 20 bp, Artificial Sequence
  Description of Artificial Sequence: Synthetic oligonucleotide
  Target: LAMA2; (+) strand; PAM type: NAAAAC; PAM sequence: AAAAAC
tgaaaccagtccctggtgcc

SEQ ID NO: 7931 - DNA, 20 bp, Artificial Sequence
  Description of Artificial Sequence: Synthetic oligonucleotide
  Target: LAMA2; (+) strand; PAM type: NAAAAC; PAM sequence: AAAAAC
tttttttccatcttaaaagc

SEQ ID NO: 7932 - DNA, 20 bp, Artificial Sequence
  Description of Artificial Sequence: Synthetic oligonucleotide
  Target: LAMA2; (+) strand; PAM type: NAAAAC; PAM sequence: AAAAAC
ccattctcctttgaattact

SEQ ID NO: 7933 - DNA, 20 bp, Artificial Sequence
  Description of Artificial Sequence: Synthetic oligonucleotide
  Target: LAMA2; (+) strand; PAM type: NAAAAC; PAM sequence: AAAAAC
atgctgatggttagtataag

SEQ ID NO: 7934 - DNA, 20 bp, Artificial Sequence
  Description of Artificial Sequence: Synthetic oligonucleotide
  Target: LAMA2; (+) strand; PAM type: NAAAAC; PAM sequence: GAAAAC
aacatttcttgtcatgttac

SEQ ID NO: 7935 - DNA, 20 bp, Artificial Sequence
  Description of Artificial Sequence: Synthetic oligonucleotide
  Target: LAMA2; (+) strand; PAM type: NAAAAC; PAM sequence: GAAAAC
agtttcttcatttatataat

SEQ ID NO: 7936 - DNA, 20 bp, Artificial Sequence
  Description of Artificial Sequence: Synthetic oligonucleotide
  Target: LAMA2; (+) strand; PAM type: NAAAAC; PAM sequence: GAAAAC
aatataaagtgcataggaaa

SEQ ID NO: 7937 - DNA, 20 bp, Artificial Sequence
  Description of Artificial Sequence: Synthetic oligonucleotide
  Target: LAMA2; (+) strand; PAM type: NAAAAC; PAM sequence: TAAAAC
aaaaaaatttttttgaagac

SEQ ID NO: 7938 - DNA, 20 bp, Artificial Sequence
  Description of Artificial Sequence: Synthetic oligonucleotide
  Target: LAMA2; (+) strand; PAM type: NAAAAC; PAM sequence: GAAAAC
gtgactaggggtcatgtatg

SEQ ID NO: 7939 - DNA, 20 bp, Artificial Sequence
  Description of Artificial Sequence: Synthetic oligonucleotide
  Target: LAMA2; (+) strand; PAM type: NAAAAC; PAM sequence: TAAAAC
tgtcgcaggatagtaagcaa

SEQ ID NO: 7940 - DNA, 20 bp, Artificial Sequence
  Description of Artificial Sequence: Synthetic oligonucleotide
  Target: LAMA2; (+) strand; PAM type: NAAAAC; PAM sequence: GAAAAC
ttactgtatatataatatct

SEQ ID NO: 7941 - DNA, 20 bp, Artificial Sequence
  Description of Artificial Sequence: Synthetic oligonucleotide
  Target: LAMA2; (+) strand; PAM type: NAAAAC; PAM sequence: CAAAAC
aataactgctattatgtgtc

SEQ ID NO: 7942 - DNA, 20 bp, Artificial Sequence
  Description of Artificial Sequence: Synthetic oligonucleotide
  Target: LAMA2; (+) strand; PAM type: NAAAAC; PAM sequence: CAAAAC
aactgtgtatgtaccaggac

SEQ ID NO: 7943 - DNA, 20 bp, Artificial Sequence
  Description of Artificial Sequence: Synthetic oligonucleotide
  Target: LAMA2; (+) strand; PAM type: NAAAAC; PAM sequence: TAAAAC
taaataacttgcttaagtca

SEQ ID NO: 7944 - DNA, 20 bp, Artificial Sequence
  Description of Artificial Sequence: Synthetic oligonucleotide
  Target: LAMA2; (+) strand; PAM type: NAAAAC; PAM sequence: AAAAAC
aatttttattcaccgtaagg

SEQ ID NO: 7945 - DNA, 20 bp, Artificial Sequence
  Description of Artificial Sequence: Synthetic oligonucleotide
  Target: LAMA2; (+) strand; PAM type: NAAAAC; PAM sequence: AAAAAC
cagttttccagtgtgcaaaa

SEQ ID NO: 7946 - DNA, 20 bp, Artificial Sequence
  Description of Artificial Sequence: Synthetic oligonucleotide
  Target: LAMA2; (+) strand; PAM type: NAAAAC; PAM sequence: TAAAAC
atctctataaaataagttct

SEQ ID NO: 7947 - DNA, 20 bp, Artificial Sequence
  Description of Artificial Sequence: Synthetic oligonucleotide
  Target: LAMA2; (+) strand; PAM type: NAAAAC; PAM sequence: GAAAAC
aatatctatcaatggctaca

SEQ ID NO: 7948 - DNA, 20 bp, Artificial Sequence
  Description of Artificial Sequence: Synthetic oligonucleotide
  Target: LAMA2; (+) strand; PAM type: NAAAAC; PAM sequence: GAAAAC
acttgtaccttgtcatattg

SEQ ID NO: 7949 - DNA, 20 bp, Artificial Sequence
  Description of Artificial Sequence: Synthetic oligonucleotide
  Target: LAMA2; (+) strand; PAM type: NAAAAC; PAM sequence: TAAAAC
tttctaacatctcatagagc

SEQ ID NO: 7950 - DNA, 20 bp, Artificial Sequence
  Description of Artificial Sequence: Synthetic oligonucleotide
  Target: LAMA2; (+) strand; PAM type: NAAAAC; PAM sequence: AAAAAC
attctaactatcactaaatt

SEQ ID NO: 7951 - DNA, 20 bp, Artificial Sequence
  Description of Artificial Sequence: Synthetic oligonucleotide
  Target: LAMA2; (+) strand; PAM type: NAAAAC; PAM sequence: TAAAAC
attaatgtaagacatattta

SEQ ID NO: 7952 - DNA, 20 bp, Artificial Sequence
  Description of Artificial Sequence: Synthetic oligonucleotide
  Target: LAMA2; (+) strand; PAM type: NAAAAC; PAM sequence: GAAAAC
gattgggaaataattatcaa

SEQ ID NO: 7953 - DNA, 20 bp, Artificial Sequence
  Description of Artificial Sequence: Synthetic oligonucleotide
  Target: LAMA2; (+) strand; PAM type: NAAAAC; PAM sequence: GAAAAC
gcactggtttatacattgat

SEQ ID NO: 7954 - DNA, 20 bp, Artificial Sequence
  Description of Artificial Sequence: Synthetic oligonucleotide
  Target: LAMA2; (+) strand; PAM type: NAAAAC; PAM sequence: GAAAAC
ttcggctttgtgtgcattct

SEQ ID NO: 7955 - DNA, 20 bp, Artificial Sequence
  Description of Artificial Sequence: Synthetic oligonucleotide
  Target: LAMA2; (+) strand; PAM type: NAAAAC; PAM sequence: TAAAAC
ttttttggaggagctcactg

SEQ ID NO: 7956 - DNA, 20 bp, Artificial Sequence
  Description of Artificial Sequence: Synthetic oligonucleotide
  Target: LAMA2; (+) strand; PAM type: NAAAAC; PAM sequence: CAAAAC
gtaaagaaaattcaaaggca

SEQ ID NO: 7957 - DNA, 20 bp, Artificial Sequence
  Description of Artificial Sequence: Synthetic oligonucleotide
  Target: LAMA2; (+) strand; PAM type: NAAAAC; PAM sequence: CAAAAC
tacaaaatacaaggcatgtg

SEQ ID NO: 7958 - DNA, 20 bp, Artificial Sequence
  Description of Artificial Sequence: Synthetic oligonucleotide
  Target: LAMA2; (+) strand; PAM type: NAAAAC; PAM sequence: GAAAAC
tgattatggccacattttag

SEQ ID NO: 7959 - DNA, 20 bp, Artificial Sequence
  Description of Artificial Sequence: Synthetic oligonucleotide
  Target: LAMA2; (+) strand; PAM type: NAAAAC; PAM sequence: AAAAAC
atcataagccagaaacacac

SEQ ID NO: 7960 - DNA, 20 bp, Artificial Sequence
  Description of Artificial Sequence: Synthetic oligonucleotide
  Target: LAMA2; (+) strand; PAM type: NAAAAC; PAM sequence: CAAAAC
tttagaaaaaaaattttagc

SEQ ID NO: 7961 - DNA, 20 bp, Artificial Sequence
  Description of Artificial Sequence: Synthetic oligonucleotide
  Target: LAMA2; (+) strand; PAM type: NAAAAC; PAM sequence: AAAAAC
ggcacttctccccaagacat

SEQ ID NO: 7962 - DNA, 20 bp, Artificial Sequence
  Description of Artificial Sequence: Synthetic oligonucleotide
  Target: LAMA2; (+) strand; PAM type: NAAAAC; PAM sequence: CAAAAC
aagtcctcattatctcttac

SEQ ID NO: 7963 - DNA, 20 bp, Artificial Sequence
  Description of Artificial Sequence: Synthetic oligonucleotide
  Target: LAMA2; (+) strand; PAM type: NAAAAC; PAM sequence: CAAAAC
ttcaaaccctacctctgcca

SEQ ID NO: 7964 - DNA, 20 bp, Artificial Sequence
  Description of Artificial Sequence: Synthetic oligonucleotide
  Target: LAMA2; (+) strand; PAM type: NAAAAC; PAM sequence: CAAAAC
actgggaatatataagtgaa

SEQ ID NO: 7965 - DNA, 20 bp, Artificial Sequence
  Description of Artificial Sequence: Synthetic oligonucleotide
  Target: LAMA2; (+) strand; PAM type: NAAAAC; PAM sequence: GAAAAC
ggagaagggaacagaaatca

SEQ ID NO: 7966 - DNA, 20 bp, Artificial Sequence
  Description of Artificial Sequence: Synthetic oligonucleotide
  Target: LAMA2; (+) strand; PAM type: NAAAAC; PAM sequence: AAAAAC
aacaaccaatgaactgggat

SEQ ID NO: 7967 - DNA, 20 bp, Artificial Sequence
  Description of Artificial Sequence: Synthetic oligonucleotide
  Target: LAMA2; (+) strand; PAM type: NAAAAC; PAM sequence: CAAAAC
gagagaagtttgtaacaacc

SEQ ID NO: 7968 - DNA, 20 bp, Artificial Sequence
  Description of Artificial Sequence: Synthetic oligonucleotide
  Target: LAMA2; (+) strand; PAM type: NAAAAC; PAM sequence: AAAAAC
tggtctaccagcattgtagt

SEQ ID NO: 7969 - DNA, 20 bp, Artificial Sequence
  Description of Artificial Sequence: Synthetic oligonucleotide
  Target: LAMA2; (+) strand; PAM type: NAAAAC; PAM sequence: GAAAAC
atggtaaagggtcacaatag

SEQ ID NO: 7970 - DNA, 20 bp, Artificial Sequence
  Description of Artificial Sequence: Synthetic oligonucleotide
  Target: LAMA2; (+) strand; PAM type: NAAAAC; PAM sequence: CAAAAC
agtttaaattacaatgcttt

SEQ ID NO: 7971 - DNA, 20 bp, Artificial Sequence
  Description of Artificial Sequence: Synthetic oligonucleotide
  Target: LAMA2; (+) strand; PAM type: NAAAAC; PAM sequence: TAAAAC
atccaatatttgcatatata

SEQ ID NO: 7972 - DNA, 20 bp, Artificial Sequence
  Description of Artificial Sequence: Synthetic oligonucleotide
  Target: LAMA2; (+) strand; PAM type: NAAAAC; PAM sequence: TAAAAC
cagactgatcaggttaggtc

SEQ ID NO: 7973 - DNA, 20 bp, Artificial Sequence
  Description of Artificial Sequence: Synthetic oligonucleotide
  Target: LAMA2; (+) strand; PAM type: NAAAAC; PAM sequence: AAAAAC
tttcattgaaaaaaataatc

SEQ ID NO: 7974 - DNA, 20 bp, Artificial Sequence
  Description of Artificial Sequence: Synthetic oligonucleotide
  Target: LAMA2; (+) strand; PAM type: NAAAAC; PAM sequence: TAAAAC
atatttacactgaccatata

SEQ ID NO: 7975 - DNA, 20 bp, Artificial Sequence
  Description of Artificial Sequence: Synthetic oligonucleotide
  Target: LAMA2; (+) strand; PAM type: NAAAAC; PAM sequence: AAAAAC
ccaatctgggacactatatt

SEQ ID NO: 7976 - DNA, 20 bp, Artificial Sequence
  Description of Artificial Sequence: Synthetic oligonucleotide
  Target: LAMA2; (+) strand; PAM type: NAAAAC; PAM sequence: CAAAAC
agtgtttttagcaattaagc

SEQ ID NO: 7977 - DNA, 20 bp, Artificial Sequence
  Description of Artificial Sequence: Synthetic oligonucleotide
  Target: LAMA2; (+) strand; PAM type: NAAAAC; PAM sequence: CAAAAC
tgctatcagttttgttgcat

SEQ ID NO: 7978 - DNA, 20 bp, Artificial Sequence
  Description of Artificial Sequence: Synthetic oligonucleotide
  Target: LAMA2; (+) strand; PAM type: NAAAAC; PAM sequence: CAAAAC
cataattttctcttgaacta

SEQ ID NO: 7979 - DNA, 20 bp, Artificial Sequence
  Description of Artificial Sequence: Synthetic oligonucleotide
  Target: LAMA2; (+) strand; PAM type: NAAAAC; PAM sequence: AAAAAC
atcatggatttgtgtatttc

SEQ ID NO: 7980 - DNA, 20 bp, Artificial Sequence
  Description of Artificial Sequence: Synthetic oligonucleotide
  Target: LAMA2; (+) strand; PAM type: NAAAAC; PAM sequence: CAAAAC
attctgctgaagagatcagg

SEQ ID NO: 7981 - DNA, 20 bp, Artificial Sequence
  Description of Artificial Sequence: Synthetic oligonucleotide
  Target: LAMA2; (+) strand; PAM type: NAAAAC; PAM sequence: TAAAAC
acctcgattaaaaataaata

SEQ ID NO: 7982 - DNA, 20 bp, Artificial Sequence
  Description of Artificial Sequence: Synthetic oligonucleotide
  Target: LAMA2; (+) strand; PAM type: NAAAAC; PAM sequence: TAAAAC
attgagactcctctaagatt

SEQ ID NO: 7983 - DNA, 20 bp, Artificial Sequence
  Description of Artificial Sequence: Synthetic oligonucleotide
  Target: LAMA2; (+) strand; PAM type: NAAAAC; PAM sequence: CAAAAC
aagtttagtattttgaaaca

SEQ ID NO: 7984 - DNA, 20 bp, Artificial Sequence
  Description of Artificial Sequence: Synthetic oligonucleotide
  Target: LAMA2; (+) strand; PAM type: NAAAAC; PAM sequence: TAAAAC
taacatatatttatttaaaa

SEQ ID NO: 7985 - DNA, 20 bp, Artificial Sequence
  Description of Artificial Sequence: Synthetic oligonucleotide
  Target: LAMA2; (+) strand; PAM type: NAAAAC; PAM sequence: GAAAAC
aatgtggttatcactgtaat

SEQ ID NO: 7986 - DNA, 20 bp, Artificial Sequence
  Description of Artificial Sequence: Synthetic oligonucleotide
  Target: LAMA2; (+) strand; PAM type: NAAAAC; PAM sequence: TAAAAC
tccaggtgttaggcaatcta

SEQ ID NO: 7987 - DNA, 20 bp, Artificial Sequence
  Description of Artificial Sequence: Synthetic oligonucleotide
  Target: LAMA2; (+) strand; PAM type: NAAAAC; PAM sequence: CAAAAC
ctctttttctgtgacatcca

SEQ ID NO: 7988 - DNA, 20 bp, Artificial Sequence
  Description of Artificial Sequence: Synthetic oligonucleotide
  Target: LAMA2; (+) strand; PAM type: NAAAAC; PAM sequence: GAAAAC
tctaggttcttcaagtcact

SEQ ID NO: 7989 - DNA, 20 bp, Artificial Sequence
  Description of Artificial Sequence: Synthetic oligonucleotide
  Target: LAMA2; (+) strand; PAM type: NAAAAC; PAM sequence: AAAAAC
gtagtgactgttgtgtagat

SEQ ID NO: 7990 - DNA, 20 bp, Artificial Sequence
  Description of Artificial Sequence: Synthetic oligonucleotide
  Target: LAMA2; (+) strand; PAM type: NAAAAC; PAM sequence: TAAAAC
agaattttatttaatatata

SEQ ID NO: 7991 - DNA, 20 bp, Artificial Sequence
  Description of Artificial Sequence: Synthetic oligonucleotide
  Target: LAMA2; (+) strand; PAM type: NAAAAC; PAM sequence: TAAAAC
atatataaaatatatacata

SEQ ID NO: 7992 - DNA, 20 bp, Artificial Sequence
  Description of Artificial Sequence: Synthetic oligonucleotide
  Target: LAMA2; (+) strand; PAM type: NAAAAC; PAM sequence: TAAAAC
tacatataaaacacatatca

SEQ ID NO: 7993 - DNA, 20 bp, Artificial Sequence
  Description of Artificial Sequence: Synthetic oligonucleotide
  Target: LAMA2; (+) strand; PAM type: NAAAAC; PAM sequence: TAAAAC
catatcataaaacatatata

SEQ ID NO: 7994 - DNA, 20 bp, Artificial Sequence
  Description of Artificial Sequence: Synthetic oligonucleotide
  Target: LAMA2; (+) strand; PAM type: NAAAAC; PAM sequence: TAAAAC
atattgcttggagcgtacta

SEQ ID NO: 7995 - DNA, 20 bp, Artificial Sequence
  Description of Artificial Sequence: Synthetic oligonucleotide
  Target: LAMA2; (+) strand; PAM type: NAAAAC; PAM sequence: CAAAAC
aacagctgaagatgaggaac

SEQ ID NO: 7996 - DNA, 20 bp, Artificial Sequence
  Description of Artificial Sequence: Synthetic oligonucleotide
  Target: LAMA2; (+) strand; PAM type: NAAAAC; PAM sequence: AAAAAC
gatttattcttgtatgaagt

SEQ ID NO: 7997 - DNA, 20 bp, Artificial Sequence
  Description of Artificial Sequence: Synthetic oligonucleotide
  Target: LAMA2; (+) strand; PAM type: NAAAAC; PAM sequence: GAAAAC
ttgtatgaagtaaaaactga

SEQ ID NO: 7998 - DNA, 20 bp, Artificial Sequence
  Description of Artificial Sequence: Synthetic oligonucleotide
  Target: LAMA2; (+) strand; PAM type: NAAAAC; PAM sequence: TAAAAC
tagaggtcaaatggaacttt

SEQ ID NO: 7999 - DNA, 20 bp, Artificial Sequence
  Description of Artificial Sequence: Synthetic oligonucleotide
  Target: LAMA2; (+) strand; PAM type: NAAAAC; PAM sequence: CAAAAC
tctgatctgaatcacatgtg

SEQ ID NO: 8000 - DNA, 20 bp, Artificial Sequence
  Description of Artificial Sequence: Synthetic oligonucleotide
  Target: LAMA2; (+) strand; PAM type: NAAAAC; PAM sequence: TAAAAC
cattccaaagtttagtagct

SEQ ID NO: 8001 - DNA, 20 bp, Artificial Sequence
  Description of Artificial Sequence: Synthetic oligonucleotide
  Target: LAMA2; (+) strand; PAM type: NAAAAC; PAM sequence: CAAAAC
catctctccctttcctgagt

SEQ ID NO: 8002 - DNA, 20 bp, Artificial Sequence
  Description of Artificial Sequence: Synthetic oligonucleotide
  Target: LAMA2; (+) strand; PAM type: NAAAAC; PAM sequence: AAAAAC
aagaccccatctctatgtta

SEQ ID NO: 8003 - DNA, 20 bp, Artificial Sequence
  Description of Artificial Sequence: Synthetic oligonucleotide
  Target: LAMA2; (+) strand; PAM type: NAAAAC; PAM sequence: CAAAAC
aataagcttccaggtggtgc

SEQ ID NO: 8004 - DNA, 20 bp, Artificial Sequence
  Description of Artificial Sequence: Synthetic oligonucleotide
  Target: LAMA2; (+) strand; PAM type: NAAAAC; PAM sequence: CAAAAC
cacctcattactctgcaatg

SEQ ID NO: 8005 - DNA, 20 bp, Artificial Sequence
  Description of Artificial Sequence: Synthetic oligonucleotide
  Target: LAMA2; (+) strand; PAM type: NAAAAC; PAM sequence: TAAAAC
gggcggtggtgctaagccat

SEQ ID NO: 8006 - DNA, 20 bp, Artificial Sequence
  Description of Artificial Sequence: Synthetic oligonucleotide
  Target: LAMA2; (+) strand; PAM type: NAAAAC; PAM sequence: GAAAAC
gtcaataaatattatcataa

SEQ ID NO: 8007 - DNA, 20 bp, Artificial Sequence
  Description of Artificial Sequence: Synthetic oligonucleotide
  Target: LAMA2; (+) strand; PAM type: NAAAAC; PAM sequence: TAAAAC
tacttatagctctataaaat

SEQ ID NO: 8008 - DNA, 20 bp, Artificial Sequence
  Description of Artificial Sequence: Synthetic oligonucleotide
  Target: LAMA2; (+) strand; PAM type: NAAAAC; PAM sequence: CAAAAC
ttaaaacaaattaatcctta

SEQ ID NO: 8009 - DNA, 20 bp, Artificial Sequence
  Description of Artificial Sequence: Synthetic oligonucleotide
  Target: LAMA2; (+) strand; PAM type: NAAAAC; PAM sequence: AAAAAC
aaaccaataaaattcaaatt

SEQ ID NO: 8010 - DNA, 20 bp, Artificial Sequence
  Description of Artificial Sequence: Synthetic oligonucleotide
  Target: LAMA2; (+) strand; PAM type: NAAAAC; PAM sequence: GAAAAC
tttaaggttatcatcaaaat

SEQ ID NO: 8011 - DNA, 20 bp, Artificial Sequence
  Description of Artificial Sequence: Synthetic oligonucleotide
  Target: LAMA2; (+) strand; PAM type: NAAAAC; PAM sequence: GAAAAC
tggtagttaacgaggtagga

SEQ ID NO: 8012 - DNA, 20 bp, Artificial Sequence
  Description of Artificial Sequence: Synthetic oligonucleotide
  Target: LAMA2; (+) strand; PAM type: NAAAAC; PAM sequence: TAAAAC
tagttgaacatgaaacattt

SEQ ID NO: 8013 - DNA, 20 bp, Artificial Sequence
  Description of Artificial Sequence: Synthetic oligonucleotide
  Target: LAMA2; (+) strand; PAM type: NAAAAC; PAM sequence: AAAAAC
ggatcaccttctggtattat

SEQ ID NO: 8014 - DNA, 20 bp, Artificial Sequence
  Description of Artificial Sequence: Synthetic oligonucleotide
  Target: LAMA2; (+) strand; PAM type: NAAAAC; PAM sequence: CAAAAC
gggtagttttgtggtctaca

SEQ ID NO: 8015 - DNA, 20 bp, Artificial Sequence
  Description of Artificial Sequence: Synthetic oligonucleotide
  Target: LAMA2; (+) strand; PAM type: NAAAAC; PAM sequence: AAAAAC
ctgttgtgaaaattaaatga

SEQ ID NO: 8016 - DNA, 20 bp, Artificial Sequence
  Description of Artificial Sequence: Synthetic oligonucleotide
  Target: LAMA2; (+) strand; PAM type: NAAAAC; PAM sequence: CAAAAC
gtgaaaattaaatgaaaaaa

SEQ ID NO: 8017 - DNA, 20 bp, Artificial Sequence
  Description of Artificial Sequence: Synthetic oligonucleotide
  Target: LAMA2; (+) strand; PAM type: NAAAAC; PAM sequence: AAAAAC
ttgattgtgtaaagagaaag

SEQ ID NO: 8018 - DNA, 20 bp, Artificial Sequence
  Description of Artificial Sequence: Synthetic oligonucleotide
  Target: LAMA2; (+) strand; PAM type: NAAAAC; PAM sequence: CAAAAC
aattggaaattttaaatttt

SEQ ID NO: 8019 - DNA, 20 bp, Artificial Sequence
  Description of Artificial Sequence: Synthetic oligonucleotide
  Target: LAMA2; (+) strand; PAM type: NAAAAC; PAM sequence: AAAAAC
ttcaaaactgcgatggtatt

SEQ ID NO: 8020 - DNA, 20 bp, Artificial Sequence
  Description of Artificial Sequence: Synthetic oligonucleotide
  Target: LAMA2; (+) strand; PAM type: NAAAAC; PAM sequence: GAAAAC
ttttgcagttagagaatgaa

SEQ ID NO: 8021 - DNA, 20 bp, Artificial Sequence
  Description of Artificial Sequence: Synthetic oligonucleotide
  Target: LAMA2; (+) strand; PAM type: NAAAAC; PAM sequence: TAAAAC
aactgcatgcaggtatataa

SEQ ID NO: 8022 - DNA, 20 bp, Artificial Sequence
  Description of Artificial Sequence: Synthetic oligonucleotide
  Target: LAMA2; (+) strand; PAM type: NAAAAC; PAM sequence: CAAAAC
actggggatagaagtgtgag

SEQ ID NO: 8023 - DNA, 20 bp, Artificial Sequence
  Description of Artificial Sequence: Synthetic oligonucleotide
  Target: LAMA2; (+) strand; PAM type: NAAAAC; PAM sequence: GAAAAC
atagaaaagttttactgccc

SEQ ID NO: 8024 - DNA, 20 bp, Artificial Sequence
  Description of Artificial Sequence: Synthetic oligonucleotide
  Target: LAMA2; (+) strand; PAM type: NAAAAC; PAM sequence: AAAAAC
tacagtagttttagatttca

SEQ ID NO: 8025 - DNA, 20 bp, Artificial Sequence
  Description of Artificial Sequence: Synthetic oligonucleotide
  Target: LAMA2; (+) strand; PAM type: NAAAAC; PAM sequence: AAAAAC
gaattatgagtttttgtggg

SEQ ID NO: 8026 - DNA, 20 bp, Artificial Sequence
  Description of Artificial Sequence: Synthetic oligonucleotide
  Target: LAMA2; (+) strand; PAM type: NAAAAC; PAM sequence: TAAAAC
taaaagatatatatataata

SEQ ID NO: 8027 - DNA, 20 bp, Artificial Sequence
  Description of Artificial Sequence: Synthetic oligonucleotide
  Target: LAMA2; (+) strand; PAM type: NAAAAC; PAM sequence: AAAAAC
gcctagacataaatactcta

SEQ ID NO: 8028 - DNA, 20 bp, Artificial Sequence
  Description of Artificial Sequence: Synthetic oligonucleotide
  Target: LAMA2; (+) strand; PAM type: NAAAAC; PAM sequence: CAAAAC
gacataaatactctaaaaaa

SEQ ID NO: 8029 - DNA, 20 bp, Artificial Sequence
  Description of Artificial Sequence: Synthetic oligonucleotide
  Target: LAMA2; (+) strand; PAM type: NAAAAC; PAM sequence: AAAAAC
agaaaaagaaatgggaaaaa

SEQ ID NO: 8030 - DNA, 20 bp, Artificial Sequence
  Description of Artificial Sequence: Synthetic oligonucleotide
  Target: LAMA2; (+) strand; PAM type: NAAAAC; PAM sequence: TAAAAC
agatggagatggtaatttaa

SEQ ID NO: 8031 - DNA, 20 bp, Artificial Sequence
  Description of Artificial Sequence: Synthetic oligonucleotide
  Target: LAMA2; (+) strand; PAM type: NAAAAC; PAM sequence: CAAAAC
tgtgttaattgactgaaagt

SEQ ID NO: 8032 - DNA, 20 bp, Artificial Sequence
  Description of Artificial Sequence: Synthetic oligonucleotide
  Target: LAMA2; (+) strand; PAM type: NAAAAC; PAM sequence: CAAAAC
ggagctggatatatgataaa

SEQ ID NO: 8033 - DNA, 20 bp, Artificial Sequence
  Description of Artificial Sequence: Synthetic oligonucleotide
  Target: LAMA2; (+) strand; PAM type: NAAAAC; PAM sequence: TAAAAC
gttttgcatatttaatatac

SEQ ID NO: 8034 - DNA, 20 bp, Artificial Sequence
  Description of Artificial Sequence: Synthetic oligonucleotide
  Target: LAMA2; (+) strand; PAM type: NAAAAC; PAM sequence: CAAAAC
tttatattccttcatttgtg

SEQ ID NO: 8035 - DNA, 20 bp, Artificial Sequence
  Description of Artificial Sequence: Synthetic oligonucleotide
  Target: LAMA2; (+) strand; PAM type: NAAAAC; PAM sequence: GAAAAC
cttcatttgtgcaaaacctt

SEQ ID NO: 8036 - DNA, 20 bp, Artificial Sequence
  Description of Artificial Sequence: Synthetic oligonucleotide
  Target: LAMA2; (+) strand; PAM type: NAAAAC; PAM sequence: CAAAAC
ctgccaacttggaccttatt

SEQ ID NO: 8037 - DNA, 20 bp, Artificial Sequence
  Description of Artificial Sequence: Synthetic oligonucleotide
  Target: LAMA2; (+) strand; PAM type: NAAAAC; PAM sequence: TAAAAC
ttggcatctttgatgtgtta

SEQ ID NO: 8038 - DNA, 20 bp, Artificial Sequence
  Description of Artificial Sequence: Synthetic oligonucleotide
  Target: LAMA2; (+) strand; PAM type: NAAAAC; PAM sequence: TAAAAC
ctttaattaacgtattgatc

SEQ ID NO: 8039 - DNA, 20 bp, Artificial Sequence
  Description of Artificial Sequence: Synthetic oligonucleotide
  Target: LAMA2; (+) strand; PAM type: NAAAAC; PAM sequence: CAAAAC
ttcagtaaataaaatatgga

SEQ ID NO: 8040 - DNA, 20 bp, Artificial Sequence
  Description of Artificial Sequence: Synthetic oligonucleotide
  Target: LAMA2; (+) strand; PAM type: NAAAAC; PAM sequence: AAAAAC
atcatcatttctcccaacag

SEQ ID NO: 8041 - DNA, 20 bp, Artificial Sequence
  Description of Artificial Sequence: Synthetic oligonucleotide
  Target: LAMA2; (+) strand; PAM type: NAAAAC; PAM sequence: AAAAAC
catccgcactcgccccccaa

SEQ ID NO: 8042 - DNA, 20 bp, Artificial Sequence
  Description of Artificial Sequence: Synthetic oligonucleotide
  Target: LAMA2; (+) strand; PAM type: NAAAAC; PAM sequence: TAAAAC
ttgttttttgcttgaagcag

SEQ ID NO: 8043 - DNA, 20 bp, Artificial Sequence
  Description of Artificial Sequence: Synthetic oligonucleotide
  Target: LAMA2; (+) strand; PAM type: NAAAAC; PAM sequence: CAAAAC
tgaagtgtccccctccaacc

SEQ ID NO: 8044 - DNA, 20 bp, Artificial Sequence
  Description of Artificial Sequence: Synthetic oligonucleotide
  Target: LAMA2; (+) strand; PAM type: NAAAAC; PAM sequence: GAAAAC
tttgttttcagtcttagtat

SEQ ID NO: 8045 - DNA, 20 bp, Artificial Sequence
  Description of Artificial Sequence: Synthetic oligonucleotide
  Target: LAMA2; (+) strand; PAM type: NAAAAC; PAM sequence: AAAAAC
atacttttgaataagagatg

SEQ ID NO: 8046 - DNA, 20 bp, Artificial Sequence
  Description of Artificial Sequence: Synthetic oligonucleotide
  Target: LAMA2; (+) strand; PAM type: NAAAAC; PAM sequence: TAAAAC
tatatatatgtatataaaca

SEQ ID NO: 8047 - DNA, 20 bp, Artificial Sequence
  Description of Artificial Sequence: Synthetic oligonucleotide
  Target: LAMA2; (+) strand; PAM type: NAAAAC; PAM sequence: TAAAAC
aataatctggaaaataacta

SEQ ID NO: 8048 - DNA, 20 bp, Artificial Sequence
  Description of Artificial Sequence: Synthetic oligonucleotide
  Target: LAMA2; (+) strand; PAM type: NAAAAC; PAM sequence: TAAAAC
ggaaaataactataaaactt

SEQ ID NO: 8049 - DNA, 20 bp, Artificial Sequence
  Description of Artificial Sequence: Synthetic oligonucleotide
  Target: LAMA2; (+) strand; PAM type: NAAAAC; PAM sequence: CAAAAC
gatgaggccatatttttctc

SEQ ID NO: 8050 - DNA, 20 bp, Artificial Sequence
  Description of Artificial Sequence: Synthetic oligonucleotide
  Target: LAMA2; (+) strand; PAM type: NAAAAC; PAM sequence: AAAAAC
gataaagtagcacacatacc

SEQ ID NO: 8051 - DNA, 20 bp, Artificial Sequence
  Description of Artificial Sequence: Synthetic oligonucleotide
  Target: LAMA2; (+) strand; PAM type: NAAAAC; PAM sequence: AAAAAC
taatatccaactggaaaaaa

SEQ ID NO: 8052 - DNA, 20 bp, Artificial Sequence
  Description of Artificial Sequence: Synthetic oligonucleotide
  Target: LAMA2; (+) strand; PAM type: NAAAAC; PAM sequence: CAAAAC
atcattagagaaatgcaagt

SEQ ID NO: 8053 - DNA, 20 bp, Artificial Sequence
  Description of Artificial Sequence: Synthetic oligonucleotide
  Target: LAMA2; (+) strand; PAM type: NAAAAC; PAM sequence: GAAAAC
agcaaactaatccaggaatg

SEQ ID NO: 8054 - DNA, 20 bp, Artificial Sequence
  Description of Artificial Sequence: Synthetic oligonucleotide
  Target: LAMA2; (+) strand; PAM type: NAAAAC; PAM sequence: TAAAAC
agttaatgcatgaggggctt

SEQ ID NO: 8055 - DNA, 20 bp, Artificial Sequence
  Description of Artificial Sequence: Synthetic oligonucleotide
  Target: LAMA2; (+) strand; PAM type: NAAAAC; PAM sequence: CAAAAC
gaccagcctggccaacatgg

SEQ ID NO: 8056 - DNA, 20 bp, Artificial Sequence
  Description of Artificial Sequence: Synthetic oligonucleotide
  Target: LAMA2; (+) strand; PAM type: NAAAAC; PAM sequence: AAAAAC
agactccatctcaaaaaaaa

SEQ ID NO: 8057 - DNA, 20 bp, Artificial Sequence
  Description of Artificial Sequence: Synthetic oligonucleotide
  Target: LAMA2; (+) strand; PAM type: NAAAAC; PAM sequence: AAAAAC
catctcaaaaaaaaaaaaac

SEQ ID NO: 8058 - DNA, 20 bp, Artificial Sequence
  Description of Artificial Sequence: Synthetic oligonucleotide
  Target: LAMA2; (+) strand; PAM type: NAAAAC; PAM sequence: AAAAAC
aaaacaaaaacaaacaaaca

SEQ ID NO: 8059 - DNA, 20 bp, Artificial Sequence
  Description of Artificial Sequence: Synthetic oligonucleotide
  Target: LAMA2; (+) strand; PAM type: NAAAAC; PAM sequence: AAAAAC
acatattcatttaacaaaga

SEQ ID NO: 8060 - DNA, 20 bp, Artificial Sequence
  Description of Artificial Sequence: Synthetic oligonucleotide
  Target: LAMA2; (+) strand; PAM type: NAAAAC; PAM sequence: AAAAAC
gtcggtggggggacacagag

SEQ ID NO: 8061 - DNA, 20 bp, Artificial Sequence
  Description of Artificial Sequence: Synthetic oligonucleotide
  Target: LAMA2; (+) strand; PAM type: NAAAAC; PAM sequence: CAAAAC
ttcaggagctctgcccagtg

SEQ ID NO: 8062 - DNA, 20 bp, Artificial Sequence
  Description of Artificial Sequence: Synthetic oligonucleotide
  Target: LAMA2; (+) strand; PAM type: NAAAAC; PAM sequence: GAAAAC
cagctgacaaaagagtttga

SEQ ID NO: 8063 - DNA, 20 bp, Artificial Sequence
  Description of Artificial Sequence: Synthetic oligonucleotide
  Target: LAMA2; (+) strand; PAM type: NAAAAC; PAM sequence: TAAAAC
cactccaggaaactttagtc

SEQ ID NO: 8064 - DNA, 20 bp, Artificial Sequence
  Description of Artificial Sequence: Synthetic oligonucleotide
  Target: LAMA2; (+) strand; PAM type: NAAAAC; PAM sequence: GAAAAC
cagaatagacatcatttgta

SEQ ID NO: 8065 - DNA, 20 bp, Artificial Sequence
  Description of Artificial Sequence: Synthetic oligonucleotide
  Target: LAMA2; (+) strand; PAM type: NAAAAC; PAM sequence: TAAAAC
agctgtaaatgaaaaagcta

SEQ ID NO: 8066 - DNA, 20 bp, Artificial Sequence
  Description of Artificial Sequence: Synthetic oligonucleotide
  Target: LAMA2; (+) strand; PAM type: NAAAAC; PAM sequence: AAAAAC
ctcgaaaattatcactttag

SEQ ID NO: 8067 - DNA, 20 bp, Artificial Sequence
  Description of Artificial Sequence: Synthetic oligonucleotide
  Target: LAMA2; (+) strand; PAM type: NAAAAC; PAM sequence: AAAAAC
aaactaggtaagttaaatcc

SEQ ID NO: 8068 - DNA, 20 bp, Artificial Sequence
  Description of Artificial Sequence: Synthetic oligonucleotide
  Target: LAMA2; (+) strand; PAM type: NAAAAC; PAM sequence: TAAAAC
ttggtatgtgaagtgaatct

SEQ ID NO: 8069 - DNA, 20 bp, Artificial Sequence
  Description of Artificial Sequence: Synthetic oligonucleotide
  Target: LAMA2; (+) strand; PAM type: NAAAAC; PAM sequence: AAAAAC
aatggagaaggatctccggg

SEQ ID NO: 8070 - DNA, 20 bp, Artificial Sequence
  Description of Artificial Sequence: Synthetic oligonucleotide
  Target: LAMA2; (+) strand; PAM type: NAAAAC; PAM sequence: AAAAAC
gggaaaaactggctgactac

SEQ ID NO: 8071 - DNA, 20 bp, Artificial Sequence
  Description of Artificial Sequence: Synthetic oligonucleotide
  Target: LAMA2; (+) strand; PAM type: NAAAAC; PAM sequence: AAAAAC
gcctatttgcagtaaatcag

SEQ ID NO: 8072 - DNA, 20 bp, Artificial Sequence
  Description of Artificial Sequence: Synthetic oligonucleotide
  Target: LAMA2; (+) strand; PAM type: NAAAAC; PAM sequence: TAAAAC
agttctgatggaactagaac

SEQ ID NO: 8073 - DNA, 20 bp, Artificial Sequence
  Description of Artificial Sequence: Synthetic oligonucleotide
  Target: LAMA2; (+) strand; PAM type: NAAAAC; PAM sequence: GAAAAC
tatctgactccaacaggtca

SEQ ID NO: 8074 - DNA, 20 bp, Artificial Sequence
  Description of Artificial Sequence: Synthetic oligonucleotide
  Target: LAMA2; (+) strand; PAM type: NAAAAC; PAM sequence: TAAAAC
tcgtttcttttagtgatgtt

SEQ ID NO: 8075 - DNA, 20 bp, Artificial Sequence
  Description of Artificial Sequence: Synthetic oligonucleotide
  Target: LAMA2; (+) strand; PAM type: NAAAAC; PAM sequence: GAAAAC
gatgcctatacaggttcgag

SEQ ID NO: 8076 - DNA, 20 bp, Artificial Sequence
  Description of Artificial Sequence: Synthetic oligonucleotide
  Target: LAMA2; (+) strand; PAM type: NAAAAC; PAM sequence: AAAAAC
acacaattaatacccaactc

SEQ ID NO: 8077 - DNA, 20 bp, Artificial Sequence
  Description of Artificial Sequence: Synthetic oligonucleotide
  Target: LAMA2; (+) strand; PAM type: NAAAAC; PAM sequence: TAAAAC
agaaccacgggtataaacac

SEQ ID NO: 8078 - DNA, 20 bp, Artificial Sequence
  Description of Artificial Sequence: Synthetic oligonucleotide
  Target: LAMA2; (+) strand; PAM type: NAAAAC; PAM sequence: AAAAAC
agaacatttcagaaactggg

SEQ ID NO: 8079 - DNA, 20 bp, Artificial Sequence
  Description of Artificial Sequence: Synthetic oligonucleotide
  Target: LAMA2; (+) strand; PAM type: NAAAAC; PAM sequence: AAAAAC
ggaagtgtccagtacagcag

SEQ ID NO: 8080 - DNA, 20 bp, Artificial Sequence
  Description of Artificial Sequence: Synthetic oligonucleotide
  Target: LAMA2; (+) strand; PAM type: NAAAAC; PAM sequence: GAAAAC
aaaagaaaaagaaaataaaa

SEQ ID NO: 8081 - DNA, 20 bp, Artificial Sequence
  Description of Artificial Sequence: Synthetic oligonucleotide
  Target: LAMA2; (+) strand; PAM type: NAAAAC; PAM sequence: CAAAAC
agaacagtatctagcaaagg

SEQ ID NO: 8082 - DNA, 20 bp, Artificial Sequence
  Description of Artificial Sequence: Synthetic oligonucleotide
  Target: LAMA2; (+) strand; PAM type: NAAAAC; PAM sequence: GAAAAC
aacccatcagtatctaatct

SEQ ID NO: 8083 - DNA, 20 bp, Artificial Sequence
  Description of Artificial Sequence: Synthetic oligonucleotide
  Target: LAMA2; (+) strand; PAM type: NAAAAC; PAM sequence: CAAAAC
gtgaagagtgaatgacatat

SEQ ID NO: 8084 - DNA, 20 bp, Artificial Sequence
  Description of Artificial Sequence: Synthetic oligonucleotide
  Target: LAMA2; (+) strand; PAM type: NAAAAC; PAM sequence: TAAAAC
atactagagatagtgatata

SEQ ID NO: 8085 - DNA, 20 bp, Artificial Sequence
  Description of Artificial Sequence: Synthetic oligonucleotide
  Target: LAMA2; (+) strand; PAM type: NAAAAC; PAM sequence: TAAAAC
cactagctcagtgcaaattt

SEQ ID NO: 8086 - DNA, 20 bp, Artificial Sequence
  Description of Artificial Sequence: Synthetic oligonucleotide
  Target: LAMA2; (+) strand; PAM type: NAAAAC; PAM sequence: AAAAAC
agctgctatagcaagagacc

SEQ ID NO: 8087 - DNA, 20 bp, Artificial Sequence
  Description of Artificial Sequence: Synthetic oligonucleotide
  Target: LAMA2; (+) strand; PAM type: NAAAAC; PAM sequence: CAAAAC
ctgagtggcttatatgcaat

SEQ ID NO: 8088 - DNA, 20 bp, Artificial Sequence
  Description of Artificial Sequence: Synthetic oligonucleotide
  Target: LAMA2; (+) strand; PAM type: NAAAAC; PAM sequence: AAAAAC
tagcattattgtctatagaa

SEQ ID NO: 8089 - DNA, 20 bp, Artificial Sequence
  Description of Artificial Sequence: Synthetic oligonucleotide
  Target: LAMA2; (+) strand; PAM type: NAAAAC; PAM sequence: TAAAAC
tcatagacgtgagtattggg

SEQ ID NO: 8090 - DNA, 20 bp, Artificial Sequence
  Description of Artificial Sequence: Synthetic oligonucleotide
  Target: LAMA2; (+) strand; PAM type: NAAAAC; PAM sequence: TAAAAC
gtaagtttgaagtttcattt

SEQ ID NO: 8091 - DNA, 20 bp, Artificial Sequence
  Description of Artificial Sequence: Synthetic oligonucleotide
  Target: LAMA2; (+) strand; PAM type: NAAAAC; PAM sequence: CAAAAC
actgcctgagctcgggagtt

SEQ ID NO: 8092 - DNA, 20 bp, Artificial Sequence
  Description of Artificial Sequence: Synthetic oligonucleotide
  Target: LAMA2; (+) strand; PAM type: NAAAAC; PAM sequence: AAAAAC
tgtctcaaaaaaaaaaaaaa

SEQ ID NO: 8093 - DNA, 20 bp, Artificial Sequence
  Description of Artificial Sequence: Synthetic oligonucleotide
  Target: LAMA2; (+) strand; PAM type: NAAAAC; PAM sequence: CAAAAC
tttcatgtttctaatggaat

SEQ ID NO: 8094 - DNA, 20 bp, Artificial Sequence
  Description of Artificial Sequence: Synthetic oligonucleotide
  Target: LAMA2; (+) strand; PAM type: NAAAAC; PAM sequence: GAAAAC
aaatataagtttaggttata

SEQ ID NO: 8095 - DNA, 20 bp, Artificial Sequence
  Description of Artificial Sequence: Synthetic oligonucleotide
  Target: LAMA2; (+) strand; PAM type: NAAAAC; PAM sequence: AAAAAC
ccagaatccttgatgaggct

SEQ ID NO: 8096 - DNA, 20 bp, Artificial Sequence
  Description of Artificial Sequence: Synthetic oligonucleotide
  Target: LAMA2; (+) strand; PAM type: NAAAAC; PAM sequence: CAAAAC
agatcttgcacatgaagcta

SEQ ID NO: 8097 - DNA, 20 bp, Artificial Sequence
  Description of Artificial Sequence: Synthetic oligonucleotide
  Target: LAMA2; (+) strand; PAM type: NAAAAC; PAM sequence: TAAAAC
tgtgctaccaactcacaaaa

SEQ ID NO: 8098 - DNA, 20 bp, Artificial Sequence
  Description of Artificial Sequence: Synthetic oligonucleotide
  Target: LAMA2; (+) strand; PAM type: NAAAAC; PAM sequence: AAAAAC
tataaaattcactttttaat

SEQ ID NO: 8099 - DNA, 20 bp, Artificial Sequence
  Description of Artificial Sequence: Synthetic oligonucleotide
  Target: LAMA2; (+) strand; PAM type: NAAAAC; PAM sequence: AAAAAC
gttttcaataacttaaaagg

SEQ ID NO: 8100 - DNA, 20 bp, Artificial Sequence
  Description of Artificial Sequence: Synthetic oligonucleotide
  Target: LAMA2; (+) strand; PAM type: NAAAAC; PAM sequence: GAAAAC
acttctctagagggtgcaag

SEQ ID NO: 8101 - DNA, 20 bp, Artificial Sequence
  Description of Artificial Sequence: Synthetic oligonucleotide
  Target: LAMA2; (+) strand; PAM type: NAAAAC; PAM sequence: TAAAAC
aacagagaattagatgtttt

SEQ ID NO: 8102 - DNA, 20 bp, Artificial Sequence
  Description of Artificial Sequence: Synthetic oligonucleotide
  Target: LAMA2; (+) strand; PAM type: NAAAAC; PAM sequence: CAAAAC
agggaagccagcccgagtcc

SEQ ID NO: 8103 - DNA, 20 bp, Artificial Sequence
  Description of Artificial Sequence: Synthetic oligonucleotide
  Target: LAMA2; (+) strand; PAM type: NAAAAC; PAM sequence: TAAAAC
ttgcaatgactgtcattttg

SEQ ID NO: 8104 - DNA, 20 bp, Artificial Sequence
  Description of Artificial Sequence: Synthetic oligonucleotide
  Target: LAMA2; (+) strand; PAM type: NAAAAC; PAM sequence: AAAAAC
attcctaatacaaggagagt

SEQ ID NO: 8105 - DNA, 20 bp, Artificial Sequence
  Description of Artificial Sequence: Synthetic oligonucleotide
  Target: LAMA2; (+) strand; PAM type: NAAAAC; PAM sequence: AAAAAC
attattaaatatgtggaatt

SEQ ID NO: 8106 - DNA, 20 bp, Artificial Sequence
  Description of Artificial Sequence: Synthetic oligonucleotide
  Target: LAMA2; (+) strand; PAM type: NAAAAC; PAM sequence: TAAAAC
aattaaaaacaaagtggaac

SEQ ID NO: 8107 - DNA, 20 bp, Artificial Sequence
  Description of Artificial Sequence: Synthetic oligonucleotide
  Target: LAMA2; (+) strand; PAM type: NAAAAC; PAM sequence: AAAAAC
atctagactgctgttttacc

SEQ ID NO: 8108 - DNA, 20 bp, Artificial Sequence
  Description of Artificial Sequence: Synthetic oligonucleotide
  Target: LAMA2; (+) strand; PAM type: NAAAAC; PAM sequence: TAAAAC
tcatattggattaaaatgtc

SEQ ID NO: 8109 - DNA, 20 bp, Artificial Sequence
  Description of Artificial Sequence: Synthetic oligonucleotide
  Target: LAMA2; (+) strand; PAM type: NAAAAC; PAM sequence: GAAAAC
gatagaataaaaggaacaag

SEQ ID NO: 8110 - DNA, 20 bp, Artificial Sequence
  Description of Artificial Sequence: Synthetic oligonucleotide
  Target: LAMA2; (+) strand; PAM type: NAAAAC; PAM sequence: CAAAAC
aatacaattagaaattggta

SEQ ID NO: 8111 - DNA, 20 bp, Artificial Sequence
  Description of Artificial Sequence: Synthetic oligonucleotide
  Target: LAMA2; (+) strand; PAM type: NAAAAC; PAM sequence: AAAAAC
tgacaaaaagttttaaaata

SEQ ID NO: 8112 - DNA, 20 bp, Artificial Sequence
  Description of Artificial Sequence: Synthetic oligonucleotide
  Target: LAMA2; (+) strand; PAM type: NAAAAC; PAM sequence: AAAAAC
agtaatccatggcttgagaa

SEQ ID NO: 8113 - DNA, 20 bp, Artificial Sequence
  Description of Artificial Sequence: Synthetic oligonucleotide
  Target: LAMA2; (+) strand; PAM type: NAAAAC; PAM sequence: CAAAAC
aaggcattagacagggttga

SEQ ID NO: 8114 - DNA, 20 bp, Artificial Sequence
  Description of Artificial Sequence: Synthetic oligonucleotide
  Target: LAMA2; (+) strand; PAM type: NAAAAC; PAM sequence: AAAAAC
cagaggacagtactacaaag

SEQ ID NO: 8115 - DNA, 20 bp, Artificial Sequence
  Description of Artificial Sequence: Synthetic oligonucleotide
  Target: LAMA2; (+) strand; PAM type: NAAAAC; PAM sequence: TAAAAC
aagctacaaatgaaatatta

SEQ ID NO: 8116 - DNA, 20 bp, Artificial Sequence
  Description of Artificial Sequence: Synthetic oligonucleotide
  Target: LAMA2; (+) strand; PAM type: NAAAAC; PAM sequence: TAAAAC
aaagatctgtaaatatacag

SEQ ID NO: 8117 - DNA, 20 bp, Artificial Sequence
  Description of Artificial Sequence: Synthetic oligonucleotide
  Target: LAMA2; (+) strand; PAM type: NAAAAC; PAM sequence: CAAAAC
acctctccattacctttact

SEQ ID NO: 8118 - DNA, 20 bp, Artificial Sequence
  Description of Artificial Sequence: Synthetic oligonucleotide
  Target: LAMA2; (+) strand; PAM type: NAAAAC; PAM sequence: GAAAAC
tctgtcatgctgtaattgag

SEQ ID NO: 8119 - DNA, 20 bp, Artificial Sequence
  Description of Artificial Sequence: Synthetic oligonucleotide
  Target: LAMA2; (+) strand; PAM type: NAAAAC; PAM sequence: AAAAAC
tgtctttaaaaagtaaacaa

SEQ ID NO: 8120 - DNA, 20 bp, Artificial Sequence
  Description of Artificial Sequence: Synthetic oligonucleotide
  Target: LAMA2; (+) strand; PAM type: NAAAAC; PAM sequence: GAAAAC
ctaataagtagtaggaagag

SEQ ID NO: 8121 - DNA, 20 bp, Artificial Sequence
  Description of Artificial Sequence: Synthetic oligonucleotide
  Target: LAMA2; (+) strand; PAM type: NAAAAC; PAM sequence: AAAAAC
ttaaacaattattaactaat

SEQ ID NO: 8122 - DNA, 20 bp, Artificial Sequence
  Description of Artificial Sequence: Synthetic oligonucleotide
  Target: LAMA2; (+) strand; PAM type: NAAAAC; PAM sequence: AAAAAC
agaatttattgtttaaaaaa

SEQ ID NO: 8123 - DNA, 20 bp, Artificial Sequence
  Description of Artificial Sequence: Synthetic oligonucleotide
  Target: LAMA2; (+) strand; PAM type: NAAAAC; PAM sequence: CAAAAC
ctttgaaaatcacaaactac

SEQ ID NO: 8124 - DNA, 20 bp, Artificial Sequence
  Description of Artificial Sequence: Synthetic oligonucleotide
  Target: LAMA2; (+) strand; PAM type: NAAAAC; PAM sequence: CAAAAC
agagaatttaatttgtagtt

SEQ ID NO: 8125 - DNA, 20 bp, Artificial Sequence
  Description of Artificial Sequence: Synthetic oligonucleotide
  Target: LAMA2; (+) strand; PAM type: NAAAAC; PAM sequence: AAAAAC
aaatgcgtctattttttttt

SEQ ID NO: 8126 - DNA, 20 bp, Artificial Sequence
  Description of Artificial Sequence: Synthetic oligonucleotide
  Target: LAMA2; (+) strand; PAM type: NAAAAC; PAM sequence: AAAAAC
cttcactacctgatcactat

SEQ ID NO: 8127 - DNA, 20 bp, Artificial Sequence
  Description of Artificial Sequence: Synthetic oligonucleotide
  Target: LAMA2; (+) strand; PAM type: NAAAAC; PAM sequence: AAAAAC
tataaaaacctattttttaa

SEQ ID NO: 8128 - DNA, 20 bp, Artificial Sequence
  Description of Artificial Sequence: Synthetic oligonucleotide
  Target: LAMA2; (+) strand; PAM type: NAAAAC; PAM sequence: TAAAAC
agagatgctagacctaactg

SEQ ID NO: 8129 - DNA, 20 bp, Artificial Sequence
  Description of Artificial Sequence: Synthetic oligonucleotide
  Target: LAMA2; (+) strand; PAM type: NAAAAC; PAM sequence: TAAAAC
aactgtaaaacataaaaata

SEQ ID NO: 8130 - DNA, 20 bp, Artificial Sequence
  Description of Artificial Sequence: Synthetic oligonucleotide
  Target: LAMA2; (+) strand; PAM type: NAAAAC; PAM sequence: GAAAAC
caaaagcatatcctcaaaag

SEQ ID NO: 8131 - DNA, 20 bp, Artificial Sequence
  Description of Artificial Sequence: Synthetic oligonucleotide
  Target: LAMA2; (+) strand; PAM type: NAAAAC; PAM sequence: CAAAAC
gattattcatatgtatcatt

SEQ ID NO: 8132 - DNA, 20 bp, Artificial Sequence
  Description of Artificial Sequence: Synthetic oligonucleotide
  Target: LAMA2; (+) strand; PAM type: NAAAAC; PAM sequence: GAAAAC
tcaatgttattagtcataag

SEQ ID NO: 8133 - DNA, 20 bp, Artificial Sequence
  Description of Artificial Sequence: Synthetic oligonucleotide
  Target: LAMA2; (+) strand; PAM type: NAAAAC; PAM sequence: CAAAAC
gtcataaggaaaacacaaag

SEQ ID NO: 8134 - DNA, 20 bp, Artificial Sequence
  Description of Artificial Sequence: Synthetic oligonucleotide
  Target: LAMA2; (+) strand; PAM type: NAAAAC; PAM sequence: GAAAAC
taaatagttcagatacttta

SEQ ID NO: 8135 - DNA, 20 bp, Artificial Sequence
  Description of Artificial Sequence: Synthetic oligonucleotide
  Target: LAMA2; (+) strand; PAM type: NAAAAC; PAM sequence: AAAAAC
aaacaggttgataatttctt

SEQ ID NO: 8136 - DNA, 20 bp, Artificial Sequence
  Description of Artificial Sequence: Synthetic oligonucleotide
  Target: LAMA2; (+) strand; PAM type: NAAAAC; PAM sequence: CAAAAC
gtctcatgggtgtacatatt

SEQ ID NO: 8137 - DNA, 20 bp, Artificial Sequence
  Description of Artificial Sequence: Synthetic oligonucleotide
  Target: LAMA2; (+) strand; PAM type: NAAAAC; PAM sequence: GAAAAC
ctctaaattgttttgattca

SEQ ID NO: 8138 - DNA, 20 bp, Artificial Sequence
  Description of Artificial Sequence: Synthetic oligonucleotide
  Target: LAMA2; (+) strand; PAM type: NAAAAC; PAM sequence: GAAAAC
aattcctgtttttcccagca

SEQ ID NO: 8139 - DNA, 20 bp, Artificial Sequence
  Description of Artificial Sequence: Synthetic oligonucleotide
  Target: LAMA2; (+) strand; PAM type: NAAAAC; PAM sequence: CAAAAC
atagcaagatcctgtctcta

SEQ ID NO: 8140 - DNA, 20 bp, Artificial Sequence
  Description of Artificial Sequence: Synthetic oligonucleotide
  Target: LAMA2; (+) strand; PAM type: NAAAAC; PAM sequence: AAAAAC
aagatcctgtctctaaaaag

SEQ ID NO: 8141 - DNA, 20 bp, Artificial Sequence
  Description of Artificial Sequence: Synthetic oligonucleotide
  Target: LAMA2; (+) strand; PAM type: NAAAAC; PAM sequence: TAAAAC
ccatcttcttttacaatttt

SEQ ID NO: 8142 - DNA, 20 bp, Artificial Sequence
  Description of Artificial Sequence: Synthetic oligonucleotide
  Target: LAMA2; (+) strand; PAM type: NAAAAC; PAM sequence: TAAAAC
gctgtgtattacaggtgaaa

SEQ ID NO: 8143 - DNA, 20 bp, Artificial Sequence
  Description of Artificial Sequence: Synthetic oligonucleotide
  Target: LAMA2; (+) strand; PAM type: NAAAAC; PAM sequence: CAAAAC
gaagaatgactgtaagaagc

SEQ ID NO: 8144 - DNA, 20 bp, Artificial Sequence
  Description of Artificial Sequence: Synthetic oligonucleotide
  Target: LAMA2; (+) strand; PAM type: NAAAAC; PAM sequence: GAAAAC
agtacattatttaaagtaat

SEQ ID NO: 8145 - DNA, 20 bp, Artificial Sequence
  Description of Artificial Sequence: Synthetic oligonucleotide
  Target: LAMA2; (+) strand; PAM type: NAAAAC; PAM sequence: GAAAAC
ctcaagtaataattcctcta

SEQ ID NO: 8146 - DNA, 20 bp, Artificial Sequence
  Description of Artificial Sequence: Synthetic oligonucleotide
  Target: LAMA2; (+) strand; PAM type: NAAAAC; PAM sequence: CAAAAC
ctgaaataggccctacagag

SEQ ID NO: 8147 - DNA, 20 bp, Artificial Sequence
  Description of Artificial Sequence: Synthetic oligonucleotide
  Target: LAMA2; (+) strand; PAM type: NAAAAC; PAM sequence: AAAAAC
ggtgaaaccctgtctctact

SEQ ID NO: 8148 - DNA, 20 bp, Artificial Sequence
  Description of Artificial Sequence: Synthetic oligonucleotide
  Target: LAMA2; (+) strand; PAM type: NAAAAC; PAM sequence: AAAAAC
tctatctaaaaaaaaaaaaa

SEQ ID NO: 8149 - DNA, 20 bp, Artificial Sequence
  Description of Artificial Sequence: Synthetic oligonucleotide
  Target: LAMA2; (+) strand; PAM type: NAAAAC; PAM sequence: TAAAAC
gaatggtggaaataaaaaaa

SEQ ID NO: 8150 - DNA, 20 bp, Artificial Sequence
  Description of Artificial Sequence: Synthetic oligonucleotide
  Target: LAMA2; (+) strand; PAM type: NAAAAC; PAM sequence: AAAAAC
gggtggacttccattagaga

SEQ ID NO: 8151 - DNA, 20 bp, Artificial Sequence
  Description of Artificial Sequence: Synthetic oligonucleotide
  Target: LAMA2; (+) strand; PAM type: NAAAAC; PAM sequence: AAAAAC
taaaaatggggcttagagct

SEQ ID NO: 8152 - DNA, 20 bp, Artificial Sequence
  Description of Artificial Sequence: Synthetic oligonucleotide
  Target: LAMA2; (+) strand; PAM type: NAAAAC; PAM sequence: GAAAAC
aattttcttgctgggcaaaa

SEQ ID NO: 8153 - DNA, 20 bp, Artificial Sequence
  Description of Artificial Sequence: Synthetic oligonucleotide
  Target: LAMA2; (+) strand; PAM type: NAAAAC; PAM sequence: AAAAAC
tacatatgtttaggaaatat

SEQ ID NO: 8154 - DNA, 20 bp, Artificial Sequence
  Description of Artificial Sequence: Synthetic oligonucleotide
  Target: LAMA2; (+) strand; PAM type: NAAAAC; PAM sequence: AAAAAC
ataaatagcattattataat

SEQ ID NO: 8155 - DNA, 20 bp, Artificial Sequence
  Description of Artificial Sequence: Synthetic oligonucleotide
  Target: LAMA2; (+) strand; PAM type: NAAAAC; PAM sequence: TAAAAC
attattataataaaaactgg

SEQ ID NO: 8156 - DNA, 20 bp, Artificial Sequence
  Description of Artificial Sequence: Synthetic oligonucleotide
  Target: LAMA2; (+) strand; PAM type: NAAAAC; PAM sequence: TAAAAC
aggagagggaatctagaaaa

SEQ ID NO: 8157 - DNA, 20 bp, Artificial Sequence
  Description of Artificial Sequence: Synthetic oligonucleotide
  Target: LAMA2; (+) strand; PAM type: NAAAAC; PAM sequence: AAAAAC
tttgaatgctccattatttt

SEQ ID NO: 8158 - DNA, 20 bp, Artificial Sequence
  Description of Artificial Sequence: Synthetic oligonucleotide
  Target: LAMA2; (+) strand; PAM type: NAAAAC; PAM sequence: TAAAAC
aagtttaaggtgtctgccta

SEQ ID NO: 8159 - DNA, 20 bp, Artificial Sequence
  Description of Artificial Sequence: Synthetic oligonucleotide
  Target: LAMA2; (+) strand; PAM type: NAAAAC; PAM sequence: TAAAAC
gttaggtggtttaagttttt

SEQ ID NO: 8160 - DNA, 20 bp, Artificial Sequence
  Description of Artificial Sequence: Synthetic oligonucleotide
  Target: LAMA2; (+) strand; PAM type: NAAAAC; PAM sequence: AAAAAC
ttaagttttttaaaacattg

SEQ ID NO: 8161 - DNA, 20 bp, Artificial Sequence
  Description of Artificial Sequence: Synthetic oligonucleotide
  Target: LAMA2; (+) strand; PAM type: NAAAAC; PAM sequence: TAAAAC
atgttattgtaaggattaag

SEQ ID NO: 8162 - DNA, 20 bp, Artificial Sequence
  Description of Artificial Sequence: Synthetic oligonucleotide
  Target: LAMA2; (+) strand; PAM type: NAAAAC; PAM sequence: CAAAAC
aacaattagtacgcatgtcc

SEQ ID NO: 8163 - DNA, 20 bp, Artificial Sequence
  Description of Artificial Sequence: Synthetic oligonucleotide
  Target: LAMA2; (+) strand; PAM type: NAAAAC; PAM sequence: AAAAAC
tctaaagtttagagaatatt

SEQ ID NO: 8164 - DNA, 20 bp, Artificial Sequence
  Description of Artificial Sequence: Synthetic oligonucleotide
  Target: LAMA2; (+) strand; PAM type: NAAAAC; PAM sequence: GAAAAC
aaactagtggaaagcagcta

SEQ ID NO: 8165 - DNA, 20 bp, Artificial Sequence
  Description of Artificial Sequence: Synthetic oligonucleotide
  Target: LAMA2; (+) strand; PAM type: NAAAAC; PAM sequence: AAAAAC
ttgctaaagtatcaagagaa

SEQ ID NO: 8166 - DNA, 20 bp, Artificial Sequence
  Description of Artificial Sequence: Synthetic oligonucleotide
  Target: LAMA2; (+) strand; PAM type: NAAAAC; PAM sequence: AAAAAC
tccaataattcaatgataat

SEQ ID NO: 8167 - DNA, 20 bp, Artificial Sequence
  Description of Artificial Sequence: Synthetic oligonucleotide
  Target: LAMA2; (+) strand; PAM type: NAAAAC; PAM sequence: TAAAAC
aagtataagctcagggatga

SEQ ID NO: 8168 - DNA, 20 bp, Artificial Sequence
  Description of Artificial Sequence: Synthetic oligonucleotide
  Target: LAMA2; (+) strand; PAM type: NAAAAC; PAM sequence: AAAAAC
gaagaccatctaaatggctt

SEQ ID NO: 8169 - DNA, 20 bp, Artificial Sequence
  Description of Artificial Sequence: Synthetic oligonucleotide
  Target: LAMA2; (+) strand; PAM type: NAAAAC; PAM sequence: TAAAAC
atatagacatcttattatta

SEQ ID NO: 8170 - DNA, 20 bp, Artificial Sequence
  Description of Artificial Sequence: Synthetic oligonucleotide
  Target: LAMA2; (+) strand; PAM type: NAAAAC; PAM sequence: AAAAAC
ctttaactattccaactttc

SEQ ID NO: 8171 - DNA, 20 bp, Artificial Sequence
  Description of Artificial Sequence: Synthetic oligonucleotide
  Target: LAMA2; (+) strand; PAM type: NAAAAC; PAM sequence: AAAAAC
atcctcataccaattggagc

SEQ ID NO: 8172 - DNA, 20 bp, Artificial Sequence
  Description of Artificial Sequence: Synthetic oligonucleotide
  Target: LAMA2; (+) strand; PAM type: NAAAAC; PAM sequence: AAAAAC
tttttacttttttaacgttt

SEQ ID NO: 8173 - DNA, 20 bp, Artificial Sequence
  Description of Artificial Sequence: Synthetic oligonucleotide
  Target: LAMA2; (+) strand; PAM type: NAAAAC; PAM sequence: GAAAAC
tatagaaaatttccaatgct

SEQ ID NO: 8174 - DNA, 20 bp, Artificial Sequence
  Description of Artificial Sequence: Synthetic oligonucleotide
  Target: LAMA2; (+) strand; PAM type: NAAAAC; PAM sequence: CAAAAC
aaactagcagacagcgtcgc

SEQ ID NO: 8175 - DNA, 20 bp, Artificial Sequence
  Description of Artificial Sequence: Synthetic oligonucleotide
  Target: LAMA2; (+) strand; PAM type: NAAAAC; PAM sequence: CAAAAC
taacattcagcagagagatg

SEQ ID NO: 8176 - DNA, 20 bp, Artificial Sequence
  Description of Artificial Sequence: Synthetic oligonucleotide
  Target: LAMA2; (+) strand; PAM type: NAAAAC; PAM sequence: AAAAAC
tttaatccgtgtgtgtaatt

SEQ ID NO: 8177 - DNA, 20 bp, Artificial Sequence
  Description of Artificial Sequence: Synthetic oligonucleotide
  Target: LAMA2; (+) strand; PAM type: NAAAAC; PAM sequence: GAAAAC
ttgacttaaggatttactga

SEQ ID NO: 8178 - DNA, 20 bp, Artificial Sequence
  Description of Artificial Sequence: Synthetic oligonucleotide
  Target: LAMA2; (+) strand; PAM type: NAAAAC; PAM sequence: AAAAAC
tatcaaaatatttggagtat

SEQ ID NO: 8179 - DNA, 20 bp, Artificial Sequence
  Description of Artificial Sequence: Synthetic oligonucleotide
  Target: LAMA2; (+) strand; PAM type: NAAAAC; PAM sequence: AAAAAC
cagggtgaaaaaggggagat

SEQ ID NO: 8180 - DNA, 20 bp, Artificial Sequence
  Description of Artificial Sequence: Synthetic oligonucleotide
  Target: LAMA2; (+) strand; PAM type: NAAAAC; PAM sequence: GAAAAC
tattcccactaaaaatgaat

SEQ ID NO: 8181 - DNA, 20 bp, Artificial Sequence
  Description of Artificial Sequence: Synthetic oligonucleotide
  Target: LAMA2; (+) strand; PAM type: NAAAAC; PAM sequence: TAAAAC
gggtctgttttctatcttac

SEQ ID NO: 8182 - DNA, 20 bp, Artificial Sequence
  Description of Artificial Sequence: Synthetic oligonucleotide
  Target: LAMA2; (+) strand; PAM type: NAAAAC; PAM sequence: GAAAAC
atgatagccacataaaagtg

SEQ ID NO: 8183 - DNA, 20 bp, Artificial Sequence
  Description of Artificial Sequence: Synthetic oligonucleotide
  Target: LAMA2; (+) strand; PAM type: NAAAAC; PAM sequence: TAAAAC
atatttggagaaacacataa

SEQ ID NO: 8184 - DNA, 20 bp, Artificial Sequence
  Description of Artificial Sequence: Synthetic oligonucleotide
  Target: LAMA2; (+) strand; PAM type: NAAAAC; PAM sequence: AAAAAC
agtttaaattgaaagtcaag

SEQ ID NO: 8185 - DNA, 20 bp, Artificial Sequence
  Description of Artificial Sequence: Synthetic oligonucleotide
  Target: LAMA2; (+) strand; PAM type: NAAAAC; PAM sequence: AAAAAC
acacataagagatcacttgg

SEQ ID NO: 8186 - DNA, 20 bp, Artificial Sequence
  Description of Artificial Sequence: Synthetic oligonucleotide
  Target: LAMA2; (+) strand; PAM type: NAAAAC; PAM sequence: AAAAAC
tccattttgaaacatttggc

SEQ ID NO: 8187 - DNA, 20 bp, Artificial Sequence
  Description of Artificial Sequence: Synthetic oligonucleotide
  Target: LAMA2; (+) strand; PAM type: NAAAAC; PAM sequence: TAAAAC
tgagttcaaaatacctactt

SEQ ID NO: 8188 - DNA, 20 bp, Artificial Sequence
  Description of Artificial Sequence: Synthetic oligonucleotide
  Target: LAMA2; (+) strand; PAM type: NAAAAC; PAM sequence: AAAAAC
ctttattttttttaacctac

SEQ ID NO: 8189 - DNA, 20 bp, Artificial Sequence
  Description of Artificial Sequence: Synthetic oligonucleotide
  Target: LAMA2; (+) strand; PAM type: NAAAAC; PAM sequence: GAAAAC
aagacggtgagaaaaagaaa

SEQ ID NO: 8190 - DNA, 20 bp, Artificial Sequence
  Description of Artificial Sequence: Synthetic oligonucleotide
  Target: LAMA2; (+) strand; PAM type: NAAAAC; PAM sequence: AAAAAC
aaagaaaaccaattttgtgt

SEQ ID NO: 8191 - DNA, 20 bp, Artificial Sequence
  Description of Artificial Sequence: Synthetic oligonucleotide
  Target: LAMA2; (+) strand; PAM type: NAAAAC; PAM sequence: AAAAAC
aacttgaggataacctaaag

SEQ ID NO: 8192 - DNA, 20 bp, Artificial Sequence
  Description of Artificial Sequence: Synthetic oligonucleotide
  Target: LAMA2; (+) strand; PAM type: NAAAAC; PAM sequence: TAAAAC
ataatcaccacttattgttt

SEQ ID NO: 8193 - DNA, 20 bp, Artificial Sequence
  Description of Artificial Sequence: Synthetic oligonucleotide
  Target: LAMA2; (+) strand; PAM type: NAAAAC; PAM sequence: GAAAAC
ataatacaaatagcaagaaa

SEQ ID NO: 8194 - DNA, 20 bp, Artificial Sequence
  Description of Artificial Sequence: Synthetic oligonucleotide
  Target: LAMA2; (+) strand; PAM type: NAAAAC; PAM sequence: AAAAAC
gagagtaccttcctcttgct

SEQ ID NO: 8195 - DNA, 20 bp, Artificial Sequence
  Description of Artificial Sequence: Synthetic oligonucleotide
  Target: LAMA2; (+) strand; PAM type: NAAAAC; PAM sequence: AAAAAC
gaattcacgactgactgaaa

SEQ ID NO: 8196 - DNA, 20 bp, Artificial Sequence
  Description of Artificial Sequence: Synthetic oligonucleotide
  Target: LAMA2; (+) strand; PAM type: NAAAAC; PAM sequence: GAAAAC
actgactgaaaaaaaaccta

SEQ ID NO: 8197 - DNA, 20 bp, Artificial Sequence
  Description of Artificial Sequence: Synthetic oligonucleotide
  Target: LAMA2; (+) strand; PAM type: NAAAAC; PAM sequence: GAAAAC
aaatcagtgaaaagatctga

SEQ ID NO: 8198 - DNA, 20 bp, Artificial Sequence
  Description of Artificial Sequence: Synthetic oligonucleotide
  Target: LAMA2; (+) strand; PAM type: NAAAAC; PAM sequence: CAAAAC
gagtgcttttcccctcctca

SEQ ID NO: 8199 - DNA, 20 bp, Artificial Sequence
  Description of Artificial Sequence: Synthetic oligonucleotide
  Target: LAMA2; (+) strand; PAM type: NAAAAC; PAM sequence: TAAAAC
aattcagacatgtaagcata

SEQ ID NO: 8200 - DNA, 20 bp, Artificial Sequence
  Description of Artificial Sequence: Synthetic oligonucleotide
  Target: LAMA2; (+) strand; PAM type: NAAAAC; PAM sequence: CAAAAC
gaccagcctgggccatgtca

SEQ ID NO: 8201 - DNA, 20 bp, Artificial Sequence
  Description of Artificial Sequence: Synthetic oligonucleotide
  Target: LAMA2; (+) strand; PAM type: NAAAAC; PAM sequence: CAAAAC
taacacatacttgacatgac

SEQ ID NO: 8202 - DNA, 20 bp, Artificial Sequence
  Description of Artificial Sequence: Synthetic oligonucleotide
  Target: LAMA2; (+) strand; PAM type: NAAAAC; PAM sequence: CAAAAC
aaatacctataactgaaaat

SEQ ID NO: 8203 - DNA, 20 bp, Artificial Sequence
  Description of Artificial Sequence: Synthetic oligonucleotide
  Target: LAMA2; (+) strand; PAM type: NAAAAC; PAM sequence: CAAAAC
tcagtttctgagagtatatt

SEQ ID NO: 8204 - DNA, 20 bp, Artificial Sequence
  Description of Artificial Sequence: Synthetic oligonucleotide
  Target: LAMA2; (+) strand; PAM type: NAAAAC; PAM sequence: GAAAAC
tgagagtatattcaaaacca

SEQ ID NO: 8205 - DNA, 20 bp, Artificial Sequence
  Description of Artificial Sequence: Synthetic oligonucleotide
  Target: LAMA2; (+) strand; PAM type: NAAAAC; PAM sequence: CAAAAC
cctcaactgtgttttttaaa

SEQ ID NO: 8206 - DNA, 20 bp, Artificial Sequence
  Description of Artificial Sequence: Synthetic oligonucleotide
  Target: LAMA2; (+) strand; PAM type: NAAAAC; PAM sequence: GAAAAC
caggaactaacttcccaact

SEQ ID NO: 8207 - DNA, 20 bp, Artificial Sequence
  Description of Artificial Sequence: Synthetic oligonucleotide
  Target: LAMA2; (+) strand; PAM type: NAAAAC; PAM sequence: GAAAAC
agggttggtaatttcctctt

SEQ ID NO: 8208 - DNA, 20 bp, Artificial Sequence
  Description of Artificial Sequence: Synthetic oligonucleotide
  Target: LAMA2; (+) strand; PAM type: NAAAAC; PAM sequence: CAAAAC
tttcttagtttaagtgatac

SEQ ID NO: 8209 - DNA, 20 bp, Artificial Sequence
  Description of Artificial Sequence: Synthetic oligonucleotide
  Target: LAMA2; (+) strand; PAM type: NAAAAC; PAM sequence: TAAAAC
tccatgtaaaatcacctgcc

SEQ ID NO: 8210 - DNA, 20 bp, Artificial Sequence
  Description of Artificial Sequence: Synthetic oligonucleotide
  Target: LAMA2; (+) strand; PAM type: NAAAAC; PAM sequence: GAAAAC
tcatagtcaaaattctagtg

SEQ ID NO: 8211 - DNA, 20 bp, Artificial Sequence
  Description of Artificial Sequence: Synthetic oligonucleotide
  Target: LAMA2; (+) strand; PAM type: NAAAAC; PAM sequence: GAAAAC
taacgtaggctttcagattt

SEQ ID NO: 8212 - DNA, 20 bp, Artificial Sequence
  Description of Artificial Sequence: Synthetic oligonucleotide
  Target: LAMA2; (+) strand; PAM type: NAAAAC; PAM sequence: GAAAAC
tagaaggcaaatgaaaggaa

SEQ ID NO: 8213 - DNA, 20 bp, Artificial Sequence
  Description of Artificial Sequence: Synthetic oligonucleotide
  Target: LAMA2; (+) strand; PAM type: NAAAAC; PAM sequence: AAAAAC
tctgcaaatggcgcttattg

SEQ ID NO: 8214 - DNA, 20 bp, Artificial Sequence
  Description of Artificial Sequence: Synthetic oligonucleotide
  Target: LAMA2; (+) strand; PAM type: NAAAAC; PAM sequence: GAAAAC
agtagtttcccagtttataa

SEQ ID NO: 8215 - DNA, 20 bp, Artificial Sequence
  Description of Artificial Sequence: Synthetic oligonucleotide
  Target: LAMA2; (+) strand; PAM type: NAAAAC; PAM sequence: CAAAAC
accatagaaaaatgcagttt

SEQ ID NO: 8216 - DNA, 20 bp, Artificial Sequence
  Description of Artificial Sequence: Synthetic oligonucleotide
  Target: LAMA2; (+) strand; PAM type: NAAAAC; PAM sequence: AAAAAC
cagttttctcttaaattctt

SEQ ID NO: 8217 - DNA, 20 bp, Artificial Sequence
  Description of Artificial Sequence: Synthetic oligonucleotide
  Target: LAMA2; (+) strand; PAM type: NAAAAC; PAM sequence: TAAAAC
gaaggtatgataaagctctg

SEQ ID NO: 8218 - DNA, 20 bp, Artificial Sequence
  Description of Artificial Sequence: Synthetic oligonucleotide
  Target: LAMA2; (+) strand; PAM type: NAAAAC; PAM sequence: GAAAAC
tttacttaacttgcatttat

SEQ ID NO: 8219 - DNA, 20 bp, Artificial Sequence
  Description of Artificial Sequence: Synthetic oligonucleotide
  Target: LAMA2; (+) strand; PAM type: NAAAAC; PAM sequence: CAAAAC
tcacaggagctataagcttt

SEQ ID NO: 8220 - DNA, 20 bp, Artificial Sequence
  Description of Artificial Sequence: Synthetic oligonucleotide
  Target: LAMA2; (+) strand; PAM type: NAAAAC; PAM sequence: CAAAAC
taaagtatgagaatttattc

SEQ ID NO: 8221 - DNA, 20 bp, Artificial Sequence
  Description of Artificial Sequence: Synthetic oligonucleotide
  Target: LAMA2; (+) strand; PAM type: NAAAAC; PAM sequence: TAAAAC
aggccctgcccctcaccatc

SEQ ID NO: 8222 - DNA, 20 bp, Artificial Sequence
  Description of Artificial Sequence: Synthetic oligonucleotide
  Target: LAMA2; (+) strand; PAM type: NAAAAC; PAM sequence: AAAAAC
tatgcaaatgtaattggcac

SEQ ID NO: 8223 - DNA, 20 bp, Artificial Sequence
  Description of Artificial Sequence: Synthetic oligonucleotide
  Target: LAMA2; (+) strand; PAM type: NAAAAC; PAM sequence: GAAAAC
atcagtctcagaaaaagaaa

SEQ ID NO: 8224 - DNA, 20 bp, Artificial Sequence
  Description of Artificial Sequence: Synthetic oligonucleotide
  Target: LAMA2; (+) strand; PAM type: NAAAAC; PAM sequence: GAAAAC
cagaatatgaaccaaaagct

SEQ ID NO: 8225 - DNA, 20 bp, Artificial Sequence
  Description of Artificial Sequence: Synthetic oligonucleotide
  Target: LAMA2; (+) strand; PAM type: NAAAAC; PAM sequence: TAAAAC
acatgttgatgggtttaacc

SEQ ID NO: 8226 - DNA, 20 bp, Artificial Sequence
  Description of Artificial Sequence: Synthetic oligonucleotide
  Target: LAMA2; (+) strand; PAM type: NAAAAC; PAM sequence: AAAAAC
tgttttcttatgtgtgttct

SEQ ID NO: 8227 - DNA, 20 bp, Artificial Sequence
  Description of Artificial Sequence: Synthetic oligonucleotide
  Target: LAMA2; (+) strand; PAM type: NAAAAC; PAM sequence: CAAAAC
atatgtgatctgtcatttac

SEQ ID NO: 8228 - DNA, 20 bp, Artificial Sequence
  Description of Artificial Sequence: Synthetic oligonucleotide
  Target: LAMA2; (+) strand; PAM type: NAAAAC; PAM sequence: CAAAAC
catttgtaatgtgtcaatgc

SEQ ID NO: 8229 - DNA, 20 bp, Artificial Sequence
  Description of Artificial Sequence: Synthetic oligonucleotide
  Target: LAMA2; (+) strand; PAM type: NAAAAC; PAM sequence: GAAAAC
agtgtttatttactgatgat

SEQ ID NO: 8230 - DNA, 20 bp, Artificial Sequence
  Description of Artificial Sequence: Synthetic oligonucleotide
  Target: LAMA2; (+) strand; PAM type: NAAAAC; PAM sequence: CAAAAC
actcagaggtggaattacca

SEQ ID NO: 8231 - DNA, 20 bp, Artificial Sequence
  Description of Artificial Sequence: Synthetic oligonucleotide
  Target: LAMA2; (+) strand; PAM type: NAAAAC; PAM sequence: TAAAAC
ctaaagcaattttgttaaat

SEQ ID NO: 8232 - DNA, 20 bp, Artificial Sequence
  Description of Artificial Sequence: Synthetic oligonucleotide
  Target: LAMA2; (+) strand; PAM type: NAAAAC; PAM sequence: TAAAAC
attttgttaaattaaaacta

SEQ ID NO: 8233 - DNA, 20 bp, Artificial Sequence
  Description of Artificial Sequence: Synthetic oligonucleotide
  Target: LAMA2; (+) strand; PAM type: NAAAAC; PAM sequence: AAAAAC
acatgtcataacagcaactc

SEQ ID NO: 8234 - DNA, 20 bp, Artificial Sequence
  Description of Artificial Sequence: Synthetic oligonucleotide
  Target: LAMA2; (+) strand; PAM type: NAAAAC; PAM sequence: CAAAAC
caaaagcctattatcaacaa

SEQ ID NO: 8235 - DNA, 20 bp, Artificial Sequence
  Description of Artificial Sequence: Synthetic oligonucleotide
  Target: LAMA2; (+) strand; PAM type: NAAAAC; PAM sequence: AAAAAC
acatcaccaggaagggagga

SEQ ID NO: 8236 - DNA, 20 bp, Artificial Sequence
  Description of Artificial Sequence: Synthetic oligonucleotide
  Target: LAMA2; (+) strand; PAM type: NAAAAC; PAM sequence: GAAAAC
tgtttatttgttgctttcag

SEQ ID NO: 8237 - DNA, 20 bp, Artificial Sequence
  Description of Artificial Sequence: Synthetic oligonucleotide
  Target: LAMA2; (+) strand; PAM type: NAAAAC; PAM sequence: CAAAAC
tctactaccaagtgctttta

SEQ ID NO: 8238 - DNA, 20 bp, Artificial Sequence
  Description of Artificial Sequence: Synthetic oligonucleotide
  Target: LAMA2; (+) strand; PAM type: NAAAAC; PAM sequence: AAAAAC
acaaaacataaagcacttaa

SEQ ID NO: 8239 - DNA, 20 bp, Artificial Sequence
  Description of Artificial Sequence: Synthetic oligonucleotide
  Target: LAMA2; (+) strand; PAM type: NAAAAC; PAM sequence: CAAAAC
tggcttccgttgtcagcaat

SEQ ID NO: 8240 - DNA, 20 bp, Artificial Sequence
  Description of Artificial Sequence: Synthetic oligonucleotide
  Target: LAMA2; (+) strand; PAM type: NAAAAC; PAM sequence: AAAAAC
attcactctgtcaagaattc

SEQ ID NO: 8241 - DNA, 20 bp, Artificial Sequence
  Description of Artificial Sequence: Synthetic oligonucleotide
  Target: LAMA2; (+) strand; PAM type: NAAAAC; PAM sequence: TAAAAC
gagagcttaatttgaaagca

SEQ ID NO: 8242 - DNA, 20 bp, Artificial Sequence
  Description of Artificial Sequence: Synthetic oligonucleotide
  Target: LAMA2; (+) strand; PAM type: NAAAAC; PAM sequence: TAAAAC
tttatgattcggggacattt

SEQ ID NO: 8243 - DNA, 20 bp, Artificial Sequence
  Description of Artificial Sequence: Synthetic oligonucleotide
  Target: LAMA2; (+) strand; PAM type: NAAAAC; PAM sequence: AAAAAC
agaaacctctcatatgggac

SEQ ID NO: 8244 - DNA, 20 bp, Artificial Sequence
  Description of Artificial Sequence: Synthetic oligonucleotide
  Target: LAMA2; (+) strand; PAM type: NAAAAC; PAM sequence: TAAAAC
tcaacttttattctatccat

SEQ ID NO: 8245 - DNA, 20 bp, Artificial Sequence
  Description of Artificial Sequence: Synthetic oligonucleotide
  Target: LAMA2; (+) strand; PAM type: NAAAAC; PAM sequence: TAAAAC
ggtgaaattttttattataa

SEQ ID NO: 8246 - DNA, 20 bp, Artificial Sequence
  Description of Artificial Sequence: Synthetic oligonucleotide
  Target: LAMA2; (+) strand; PAM type: NAAAAC; PAM sequence: AAAAAC
atgaaaagataaacatgtat

SEQ ID NO: 8247 - DNA, 20 bp, Artificial Sequence
  Description of Artificial Sequence: Synthetic oligonucleotide
  Target: LAMA2; (+) strand; PAM type: NAAAAC; PAM sequence: AAAAAC
tacttttatctgtgttactc

SEQ ID NO: 8248 - DNA, 20 bp, Artificial Sequence
  Description of Artificial Sequence: Synthetic oligonucleotide
  Target: LAMA2; (+) strand; PAM type: NAAAAC; PAM sequence: GAAAAC
atctgtgttactcaaaaact

SEQ ID NO: 8249 - DNA, 20 bp, Artificial Sequence
  Description of Artificial Sequence: Synthetic oligonucleotide
  Target: LAMA2; (+) strand; PAM type: NAAAAC; PAM sequence: TAAAAC
gcatgttaattattcctcag

SEQ ID NO: 8250 - DNA, 20 bp, Artificial Sequence
  Description of Artificial Sequence: Synthetic oligonucleotide
  Target: LAMA2; (+) strand; PAM type: NAAAAC; PAM sequence: TAAAAC
cttgagtttgcccagatggc

SEQ ID NO: 8251 - DNA, 20 bp, Artificial Sequence
  Description of Artificial Sequence: Synthetic oligonucleotide
  Target: LAMA2; (+) strand; PAM type: NAAAAC; PAM sequence: TAAAAC
gggcaaaggaagggatatta

SEQ ID NO: 8252 - DNA, 20 bp, Artificial Sequence
  Description of Artificial Sequence: Synthetic oligonucleotide
  Target: LAMA2; (+) strand; PAM type: NAAAAC; PAM sequence: AAAAAC
aaaagaataatagccaaagt

SEQ ID NO: 8253 - DNA, 20 bp, Artificial Sequence
  Description of Artificial Sequence: Synthetic oligonucleotide
  Target: LAMA2; (+) strand; PAM type: NAAAAC; PAM sequence: GAAAAC
attcattcatggataaggag

SEQ ID NO: 8254 - DNA, 20 bp, Artificial Sequence
  Description of Artificial Sequence: Synthetic oligonucleotide
  Target: LAMA2; (+) strand; PAM type: NAAAAC; PAM sequence: GAAAAC
aatgtatatgaaaaagtctt

SEQ ID NO: 8255 - DNA, 20 bp, Artificial Sequence
  Description of Artificial Sequence: Synthetic oligonucleotide
  Target: LAMA2; (+) strand; PAM type: NAAAAC; PAM sequence: TAAAAC
ccagtagttcctgtggatag

SEQ ID NO: 8256 - DNA, 20 bp, Artificial Sequence
  Description of Artificial Sequence: Synthetic oligonucleotide
  Target: LAMA2; (+) strand; PAM type: NAAAAC; PAM sequence: GAAAAC
aactacttatctagattata

SEQ ID NO: 8257 - DNA, 20 bp, Artificial Sequence
  Description of Artificial Sequence: Synthetic oligonucleotide
  Target: LAMA2; (+) strand; PAM type: NAAAAC; PAM sequence: AAAAAC
ggttgcagaaaggcctaatc

SEQ ID NO: 8258 - DNA, 20 bp, Artificial Sequence
  Description of Artificial Sequence: Synthetic oligonucleotide
  Target: LAMA2; (+) strand; PAM type: NAAAAC; PAM sequence: TAAAAC
agttaatttactgctcatta

SEQ ID NO: 8259 - DNA, 20 bp, Artificial Sequence
  Description of Artificial Sequence: Synthetic oligonucleotide
  Target: LAMA2; (+) strand; PAM type: NAAAAC; PAM sequence: AAAAAC
aatttaaagtgtcaagtcag

SEQ ID NO: 8260 - DNA, 20 bp, Artificial Sequence
  Description of Artificial Sequence: Synthetic oligonucleotide
  Target: LAMA2; (+) strand; PAM type: NAAAAC; PAM sequence: CAAAAC
catggtgtggcacattattt

SEQ ID NO: 8261 - DNA, 20 bp, Artificial Sequence
  Description of Artificial Sequence: Synthetic oligonucleotide
  Target: LAMA2; (+) strand; PAM type: NAAAAC; PAM sequence: TAAAAC
tatctattgacatgtttatt

SEQ ID NO: 8262 - DNA, 20 bp, Artificial Sequence
  Description of Artificial Sequence: Synthetic oligonucleotide
  Target: LAMA2; (+) strand; PAM type: NAAAAC; PAM sequence: TAAAAC
gaactgatccaagaaatttt

SEQ ID NO: 8263 - DNA, 20 bp, Artificial Sequence
  Description of Artificial Sequence: Synthetic oligonucleotide
  Target: LAMA2; (+) strand; PAM type: NAAAAC; PAM sequence: GAAAAC
gctgactgactgaacgaaaa

SEQ ID NO: 8264 - DNA, 20 bp, Artificial Sequence
  Description of Artificial Sequence: Synthetic oligonucleotide
  Target: LAMA2; (+) strand; PAM type: NAAAAC; PAM sequence: GAAAAC
ctactgatttggacagtgca

SEQ ID NO: 8265 - DNA, 20 bp, Artificial Sequence
  Description of Artificial Sequence: Synthetic oligonucleotide
  Target: LAMA2; (+) strand; PAM type: NAAAAC; PAM sequence: AAAAAC
actaaattaatctgttaaaa

SEQ ID NO: 8266 - DNA, 20 bp, Artificial Sequence
  Description of Artificial Sequence: Synthetic oligonucleotide
  Target: LAMA2; (+) strand; PAM type: NAAAAC; PAM sequence: AAAAAC
aacttttgagcaaggttttt

SEQ ID NO: 8267 - DNA, 20 bp, Artificial Sequence
  Description of Artificial Sequence: Synthetic oligonucleotide
  Target: LAMA2; (+) strand; PAM type: NAAAAC; PAM sequence: TAAAAC
cttctctttggtgaaaaaaa

SEQ ID NO: 8268 - DNA, 20 bp, Artificial Sequence
  Description of Artificial Sequence: Synthetic oligonucleotide
  Target: LAMA2; (+) strand; PAM type: NAAAAC; PAM sequence: GAAAAC
gatcagcttgtttttaaaat

SEQ ID NO: 8269 - DNA, 20 bp, Artificial Sequence
  Description of Artificial Sequence: Synthetic oligonucleotide
  Target: LAMA2; (+) strand; PAM type: NAAAAC; PAM sequence: GAAAAC
agtttgggaataagaaaaga

SEQ ID NO: 8270 - DNA, 20 bp, Artificial Sequence
  Description of Artificial Sequence: Synthetic oligonucleotide
  Target: LAMA2; (+) strand; PAM type: NAAAAC; PAM sequence: TAAAAC
agagaaaacacattaagaac

SEQ ID NO: 8271 - DNA, 20 bp, Artificial Sequence
  Description of Artificial Sequence: Synthetic oligonucleotide
  Target: LAMA2; (+) strand; PAM type: NAAAAC; PAM sequence: TAAAAC
gtagttttatctgaactatc

SEQ ID NO: 8272 - DNA, 20 bp, Artificial Sequence
  Description of Artificial Sequence: Synthetic oligonucleotide
  Target: LAMA2; (+) strand; PAM type: NAAAAC; PAM sequence: GAAAAC
atgatttgaaaattggaata

SEQ ID NO: 8273 - DNA, 20 bp, Artificial Sequence
  Description of Artificial Sequence: Synthetic oligonucleotide
  Target: LAMA2; (+) strand; PAM type: NAAAAC; PAM sequence: AAAAAC
gtattactttaatattgaga

SEQ ID NO: 8274 - DNA, 20 bp, Artificial Sequence
  Description of Artificial Sequence: Synthetic oligonucleotide
  Target: LAMA2; (+) strand; PAM type: NAAAAC; PAM sequence: TAAAAC
ataatggtcatacccatctg

SEQ ID NO: 8275 - DNA, 20 bp, Artificial Sequence
  Description of Artificial Sequence: Synthetic oligonucleotide
  Target: LAMA2; (+) strand; PAM type: NAAAAC; PAM sequence: AAAAAC
gctataattctgattttaac

SEQ ID NO: 8276 - DNA, 20 bp, Artificial Sequence
  Description of Artificial Sequence: Synthetic oligonucleotide
  Target: LAMA2; (+) strand; PAM type: NAAAAC; PAM sequence: GAAAAC
gacaccagcaccacctagga

SEQ ID NO: 8277 - DNA, 20 bp, Artificial Sequence
  Description of Artificial Sequence: Synthetic oligonucleotide
  Target: LAMA2; (+) strand; PAM type: NAAAAC; PAM sequence: CAAAAC
gacagagtgagactctgtct

SEQ ID NO: 8278 - DNA, 20 bp, Artificial Sequence
  Description of Artificial Sequence: Synthetic oligonucleotide
  Target: LAMA2; (+) strand; PAM type: NAAAAC; PAM sequence: TAAAAC
atatcttcaatcacattttt

SEQ ID NO: 8279 - DNA, 20 bp, Artificial Sequence
  Description of Artificial Sequence: Synthetic oligonucleotide
  Target: LAMA2; (+) strand; PAM type: NAAAAC; PAM sequence: AAAAAC
taatcttgtcaatagatagt

SEQ ID NO: 8280 - DNA, 20 bp, Artificial Sequence
  Description of Artificial Sequence: Synthetic oligonucleotide
  Target: LAMA2; (+) strand; PAM type: NAAAAC; PAM sequence: AAAAAC
tccttagccatctataaaaa

SEQ ID NO: 8281 - DNA, 20 bp, Artificial Sequence
  Description of Artificial Sequence: Synthetic oligonucleotide
  Target: LAMA2; (+) strand; PAM type: NAAAAC; PAM sequence: CAAAAC
gaaaagaacacttgattgaa

SEQ ID NO: 8282 - DNA, 20 bp, Artificial Sequence
  Description of Artificial Sequence: Synthetic oligonucleotide
  Target: LAMA2; (+) strand; PAM type: NAAAAC; PAM sequence: CAAAAC
tctttggtcatcaaacaaca

SEQ ID NO: 8283 - DNA, 20 bp, Artificial Sequence
  Description of Artificial Sequence: Synthetic oligonucleotide
  Target: LAMA2; (+) strand; PAM type: NAAAAC; PAM sequence: GAAAAC
aaatttctaaagtcactttg

SEQ ID NO: 8284 - DNA, 20 bp, Artificial Sequence
  Description of Artificial Sequence: Synthetic oligonucleotide
  Target: LAMA2; (+) strand; PAM type: NAAAAC; PAM sequence: TAAAAC
tttcaggatagtgcttaaaa

SEQ ID NO: 8285 - DNA, 20 bp, Artificial Sequence
  Description of Artificial Sequence: Synthetic oligonucleotide
  Target: LAMA2; (+) strand; PAM type: NAAAAC; PAM sequence: TAAAAC
aaaataaaacagattcctat

SEQ ID NO: 8286 - DNA, 20 bp, Artificial Sequence
  Description of Artificial Sequence: Synthetic oligonucleotide
  Target: LAMA2; (+) strand; PAM type: NAAAAC; PAM sequence: GAAAAC
tattaaaacaattacaataa

SEQ ID NO: 8287 - DNA, 20 bp, Artificial Sequence
  Description of Artificial Sequence: Synthetic oligonucleotide
  Target: LAMA2; (+) strand; PAM type: NAAAAC; PAM sequence: CAAAAC
tggggttcatgatgggatat

SEQ ID NO: 8288 - DNA, 20 bp, Artificial Sequence
  Description of Artificial Sequence: Synthetic oligonucleotide
  Target: LAMA2; (+) strand; PAM type: NAAAAC; PAM sequence: CAAAAC
aagatatttccagctgtttt

SEQ ID NO: 8289 - DNA, 20 bp, Artificial Sequence
  Description of Artificial Sequence: Synthetic oligonucleotide
  Target: LAMA2; (+) strand; PAM type: NAAAAC; PAM sequence: AAAAAC
gcagttatctccacctttgg

SEQ ID NO: 8290 - DNA, 20 bp, Artificial Sequence
  Description of Artificial Sequence: Synthetic oligonucleotide
  Target: LAMA2; (+) strand; PAM type: NAAAAC; PAM sequence: CAAAAC
caaataaggtatgcacacag

SEQ ID NO: 8291 - DNA, 20 bp, Artificial Sequence
  Description of Artificial Sequence: Synthetic oligonucleotide
  Target: LAMA2; (+) strand; PAM type: NAAAAC; PAM sequence: CAAAAC
aatccaatttgatgaggcct

SEQ ID NO: 8292 - DNA, 20 bp, Artificial Sequence
  Description of Artificial Sequence: Synthetic oligonucleotide
  Target: LAMA2; (+) strand; PAM type: NAAAAC; PAM sequence: GAAAAC
ttactaattatcctcttggg

SEQ ID NO: 8293 - DNA, 20 bp, Artificial Sequence
  Description of Artificial Sequence: Synthetic oligonucleotide
  Target: LAMA2; (+) strand; PAM type: NAAAAC; PAM sequence: AAAAAC
cccgtctctactaaaaatgc

SEQ ID NO: 8294 - DNA, 20 bp, Artificial Sequence
  Description of Artificial Sequence: Synthetic oligonucleotide
  Target: LAMA2; (+) strand; PAM type: NAAAAC; PAM sequence: AAAAAC
gagcaagactccaactcgga

SEQ ID NO: 8295 - DNA, 20 bp, Artificial Sequence
  Description of Artificial Sequence: Synthetic oligonucleotide
  Target: LAMA2; (+) strand; PAM type: NAAAAC; PAM sequence: CAAAAC
agactccaactcggaaaaaa

SEQ ID NO: 8296 - DNA, 20 bp, Artificial Sequence
  Description of Artificial Sequence: Synthetic oligonucleotide
  Target: LAMA2; (+) strand; PAM type: NAAAAC; PAM sequence: CAAAAC
ccaactcggaaaaaacaaaa

SEQ ID NO: 8297 - DNA, 20 bp, Artificial Sequence
  Description of Artificial Sequence: Synthetic oligonucleotide
  Target: LAMA2; (+) strand; PAM type: NAAAAC; PAM sequence: AAAAAC
cggaaaaaacaaaacaaaac

SEQ ID NO: 8298 - DNA, 20 bp, Artificial Sequence
  Description of Artificial Sequence: Synthetic oligonucleotide
  Target: LAMA2; (+) strand; PAM type: NAAAAC; PAM sequence: CAAAAC
gtagtcactgaactctgtgc

SEQ ID NO: 8299 - DNA, 20 bp, Artificial Sequence
  Description of Artificial Sequence: Synthetic oligonucleotide
  Target: LAMA2; (+) strand; PAM type: NAAAAC; PAM sequence: AAAAAC
gccagcagttcttactggac

SEQ ID NO: 8300 - DNA, 20 bp, Artificial Sequence
  Description of Artificial Sequence: Synthetic oligonucleotide
  Target: LAMA2; (+) strand; PAM type: NAAAAC; PAM sequence: GAAAAC
ataaatactttttaaaaatg

SEQ ID NO: 8301 - DNA, 20 bp, Artificial Sequence
  Description of Artificial Sequence: Synthetic oligonucleotide
  Target: LAMA2; (+) strand; PAM type: NAAAAC; PAM sequence: AAAAAC
ttggcaatgtccttctcaat

SEQ ID NO: 8302 - DNA, 20 bp, Artificial Sequence
  Description of Artificial Sequence: Synthetic oligonucleotide
  Target: LAMA2; (+) strand; PAM type: NAAAAC; PAM sequence: TAAAAC
cagaggcttatatccttcat

SEQ ID NO: 8303 - DNA, 20 bp, Artificial Sequence
  Description of Artificial Sequence: Synthetic oligonucleotide
  Target: LAMA2; (+) strand; PAM type: NAAAAC; PAM sequence: CAAAAC
tgactgttaagaccgaaact

SEQ ID NO: 8304 - DNA, 20 bp, Artificial Sequence
  Description of Artificial Sequence: Synthetic oligonucleotide
  Target: LAMA2; (+) strand; PAM type: NAAAAC; PAM sequence: GAAAAC
tctttacagttcaagtggat

SEQ ID NO: 8305 - DNA, 20 bp, Artificial Sequence
  Description of Artificial Sequence: Synthetic oligonucleotide
  Target: LAMA2; (+) strand; PAM type: NAAAAC; PAM sequence: CAAAAC
atgaaaacagaagatacatg

SEQ ID NO: 8306 - DNA, 20 bp, Artificial Sequence
  Description of Artificial Sequence: Synthetic oligonucleotide
  Target: LAMA2; (+) strand; PAM type: NAAAAC; PAM sequence: AAAAAC
gcttaattgtaaggaagcaa

SEQ ID NO: 8307 - DNA, 20 bp, Artificial Sequence
  Description of Artificial Sequence: Synthetic oligonucleotide
  Target: LAMA2; (+) strand; PAM type: NAAAAC; PAM sequence: CAAAAC
tccatcttcaattttgttta

SEQ ID NO: 8308 - DNA, 20 bp, Artificial Sequence
  Description of Artificial Sequence: Synthetic oligonucleotide
  Target: LAMA2; (+) strand; PAM type: NAAAAC; PAM sequence: GAAAAC
cattttcagttgaaatgttg

SEQ ID NO: 8309 - DNA, 20 bp, Artificial Sequence
  Description of Artificial Sequence: Synthetic oligonucleotide
  Target: LAMA2; (+) strand; PAM type: NAAAAC; PAM sequence: TAAAAC
agaaactagtaatacaccac

SEQ ID NO: 8310 - DNA, 20 bp, Artificial Sequence
  Description of Artificial Sequence: Synthetic oligonucleotide
  Target: LAMA2; (+) strand; PAM type: NAAAAC; PAM sequence: AAAAAC
ataaaaataaataaataaat

SEQ ID NO: 8311 - DNA, 20 bp, Artificial Sequence
  Description of Artificial Sequence: Synthetic oligonucleotide
  Target: LAMA2; (+) strand; PAM type: NAAAAC; PAM sequence: GAAAAC
ttgtcttgagtgcagatctt

SEQ ID NO: 8312 - DNA, 20 bp, Artificial Sequence
  Description of Artificial Sequence: Synthetic oligonucleotide
  Target: LAMA2; (+) strand; PAM type: NAAAAC; PAM sequence: GAAAAC
gccagataaccatcattcaa

SEQ ID NO: 8313 - DNA, 20 bp, Artificial Sequence
  Description of Artificial Sequence: Synthetic oligonucleotide
  Target: LAMA2; (+) strand; PAM type: NAAAAC; PAM sequence: GAAAAC
aatgtatgcggaagttatct

SEQ ID NO: 8314 - DNA, 20 bp, Artificial Sequence
  Description of Artificial Sequence: Synthetic oligonucleotide
  Target: LAMA2; (+) strand; PAM type: NAAAAC; PAM sequence: GAAAAC
tgttttcagttgaagaatta

SEQ ID NO: 8315 - DNA, 20 bp, Artificial Sequence
  Description of Artificial Sequence: Synthetic oligonucleotide
  Target: LAMA2; (+) strand; PAM type: NAAAAC; PAM sequence: GAAAAC
ttataaaaatgtttctagga

SEQ ID NO: 8316 - DNA, 20 bp, Artificial Sequence
  Description of Artificial Sequence: Synthetic oligonucleotide
  Target: LAMA2; (+) strand; PAM type: NAAAAC; PAM sequence: TAAAAC
agccatcggttacattaagt

SEQ ID NO: 8317 - DNA, 20 bp, Artificial Sequence
  Description of Artificial Sequence: Synthetic oligonucleotide
  Target: LAMA2; (+) strand; PAM type: NAAAAC; PAM sequence: TAAAAC
ttaagttaaaactgagtccc

SEQ ID NO: 8318 - DNA, 20 bp, Artificial Sequence
  Description of Artificial Sequence: Synthetic oligonucleotide
  Target: LAMA2; (+) strand; PAM type: NAAAAC; PAM sequence: GAAAAC
gtgtatgttttaacttttcc

SEQ ID NO: 8319 - DNA, 20 bp, Artificial Sequence
  Description of Artificial Sequence: Synthetic oligonucleotide
  Target: LAMA2; (+) strand; PAM type: NAAAAC; PAM sequence: TAAAAC
acatgagcgatagttggcac

SEQ ID NO: 8320 - DNA, 20 bp, Artificial Sequence
  Description of Artificial Sequence: Synthetic oligonucleotide
  Target: LAMA2; (+) strand; PAM type: NAAAAC; PAM sequence: GAAAAC
ttagcccatcgagagctaga

SEQ ID NO: 8321 - DNA, 20 bp, Artificial Sequence
  Description of Artificial Sequence: Synthetic oligonucleotide
  Target: LAMA2; (+) strand; PAM type: NAAAAC; PAM sequence: GAAAAC
aacctcacagtttaaaatgt

SEQ ID NO: 8322 - DNA, 20 bp, Artificial Sequence
  Description of Artificial Sequence: Synthetic oligonucleotide
  Target: LAMA2; (+) strand; PAM type: NAAAAC; PAM sequence: AAAAAC
tttaaaatgtgaaaactaag

SEQ ID NO: 8323 - DNA, 20 bp, Artificial Sequence
  Description of Artificial Sequence: Synthetic oligonucleotide
  Target: LAMA2; (+) strand; PAM type: NAAAAC; PAM sequence: GAAAAC
tactgatatgtatttaaaga

SEQ ID NO: 8324 - DNA, 20 bp, Artificial Sequence
  Description of Artificial Sequence: Synthetic oligonucleotide
  Target: LAMA2; (+) strand; PAM type: NAAAAC; PAM sequence: GAAAAC
atgagtgacagtgtgggggt

SEQ ID NO: 8325 - DNA, 20 bp, Artificial Sequence
  Description of Artificial Sequence: Synthetic oligonucleotide
  Target: LAMA2; (+) strand; PAM type: NAAAAC; PAM sequence: AAAAAC
ctgccaagcaaaggcaaatg

SEQ ID NO: 8326 - DNA, 20 bp, Artificial Sequence
  Description of Artificial Sequence: Synthetic oligonucleotide
  Target: LAMA2; (+) strand; PAM type: NAAAAC; PAM sequence: CAAAAC
atttgagagattagtgcgtc

SEQ ID NO: 8327 - DNA, 20 bp, Artificial Sequence
  Description of Artificial Sequence: Synthetic oligonucleotide
  Target: LAMA2; (+) strand; PAM type: NAAAAC; PAM sequence: GAAAAC
tttcagtggcaagcagagtt

SEQ ID NO: 8328 - DNA, 20 bp, Artificial Sequence
  Description of Artificial Sequence: Synthetic oligonucleotide
  Target: LAMA2; (+) strand; PAM type: NAAAAC; PAM sequence: AAAAAC
gctttccaaatgctgggatt

SEQ ID NO: 8329 - DNA, 20 bp, Artificial Sequence
  Description of Artificial Sequence: Synthetic oligonucleotide
  Target: LAMA2; (+) strand; PAM type: NAAAAC; PAM sequence: CAAAAC
gggggaggtcgagatttgta

SEQ ID NO: 8330 - DNA, 20 bp, Artificial Sequence
  Description of Artificial Sequence: Synthetic oligonucleotide
  Target: LAMA2; (+) strand; PAM type: NAAAAC; PAM sequence: AAAAAC
atcctaaggtacatattttt

SEQ ID NO: 8331 - DNA, 20 bp, Artificial Sequence
  Description of Artificial Sequence: Synthetic oligonucleotide
  Target: LAMA2; (+) strand; PAM type: NAAAAC; PAM sequence: TAAAAC
gaaggtgatagaagttttat

SEQ ID NO: 8332 - DNA, 20 bp, Artificial Sequence
  Description of Artificial Sequence: Synthetic oligonucleotide
  Target: LAMA2; (+) strand; PAM type: NAAAAC; PAM sequence: AAAAAC
acatcaccttggatgtcctt

SEQ ID NO: 8333 - DNA, 20 bp, Artificial Sequence
  Description of Artificial Sequence: Synthetic oligonucleotide
  Target: LAMA2; (+) strand; PAM type: NAAAAC; PAM sequence: AAAAAC
caacgaaacaacaacaaaat

SEQ ID NO: 8334 - DNA, 20 bp, Artificial Sequence
  Description of Artificial Sequence: Synthetic oligonucleotide
  Target: LAMA2; (+) strand; PAM type: NAAAAC; PAM sequence: AAAAAC
aacaaaataaaaacaaacca

SEQ ID NO: 8335 - DNA, 20 bp, Artificial Sequence
  Description of Artificial Sequence: Synthetic oligonucleotide
  Target: LAMA2; (+) strand; PAM type: NAAAAC; PAM sequence: CAAAAC
agaccaattttacggcattt

SEQ ID NO: 8336 - DNA, 20 bp, Artificial Sequence
  Description of Artificial Sequence: Synthetic oligonucleotide
  Target: LAMA2; (+) strand; PAM type: NAAAAC; PAM sequence: AAAAAC
agctattaagtgcagatctt

SEQ ID NO: 8337 - DNA, 20 bp, Artificial Sequence
  Description of Artificial Sequence: Synthetic oligonucleotide
  Target: LAMA2; (+) strand; PAM type: NAAAAC; PAM sequence: AAAAAC
tggaaatggggagggcaaga

SEQ ID NO: 8338 - DNA, 20 bp, Artificial Sequence
  Description of Artificial Sequence: Synthetic oligonucleotide
  Target: LAMA2; (+) strand; PAM type: NAAAAC; PAM sequence: GAAAAC
cattccagggtgtgatatga

SEQ ID NO: 8339 - DNA, 20 bp, Artificial Sequence
  Description of Artificial Sequence: Synthetic oligonucleotide
  Target: LAMA2; (+) strand; PAM type: NAAAAC; PAM sequence: AAAAAC
catttgatgacaccaaagtt

SEQ ID NO: 8340 - DNA, 20 bp, Artificial Sequence
  Description of Artificial Sequence: Synthetic oligonucleotide
  Target: LAMA2; (+) strand; PAM type: NAAAAC; PAM sequence: GAAAAC
ctaaccacacagtggtctgt

SEQ ID NO: 8341 - DNA, 20 bp, Artificial Sequence
  Description of Artificial Sequence: Synthetic oligonucleotide
  Target: LAMA2; (+) strand; PAM type: NAAAAC; PAM sequence: AAAAAC
cagttatttggaacaacttt

SEQ ID NO: 8342 - DNA, 20 bp, Artificial Sequence
  Description of Artificial Sequence: Synthetic oligonucleotide
  Target: LAMA2; (+) strand; PAM type: NAAAAC; PAM sequence: TAAAAC
tagataatatactgcctgat

SEQ ID NO: 8343 - DNA, 20 bp, Artificial Sequence
  Description of Artificial Sequence: Synthetic oligonucleotide
  Target: LAMA2; (+) strand; PAM type: NAAAAC; PAM sequence: AAAAAC
tagaaagccaaagaacctta

SEQ ID NO: 8344 - DNA, 20 bp, Artificial Sequence
  Description of Artificial Sequence: Synthetic oligonucleotide
  Target: LAMA2; (+) strand; PAM type: NAAAAC; PAM sequence: TAAAAC
caatcaaactaatgcacttt

SEQ ID NO: 8345 - DNA, 20 bp, Artificial Sequence
  Description of Artificial Sequence: Synthetic oligonucleotide
  Target: LAMA2; (+) strand; PAM type: NAAAAC; PAM sequence: TAAAAC
ctaccgaggagacttcgacc

SEQ ID NO: 8346 - DNA, 20 bp, Artificial Sequence
  Description of Artificial Sequence: Synthetic oligonucleotide
  Target: LAMA2; (+) strand; PAM type: NAAAAC; PAM sequence: GAAAAC
attaggtcacatgggcccat

SEQ ID NO: 8347 - DNA, 20 bp, Artificial Sequence
  Description of Artificial Sequence: Synthetic oligonucleotide
  Target: LAMA2; (+) strand; PAM type: NAAAAC; PAM sequence: CAAAAC
taacaaagatttctcttttg

SEQ ID NO: 8348 - DNA, 20 bp, Artificial Sequence
  Description of Artificial Sequence: Synthetic oligonucleotide
  Target: LAMA2; (+) strand; PAM type: NAAAAC; PAM sequence: CAAAAC
gatgagcctggccatcatag

SEQ ID NO: 8349 - DNA, 20 bp, Artificial Sequence
  Description of Artificial Sequence: Synthetic oligonucleotide
  Target: LAMA2; (+) strand; PAM type: NAAAAC; PAM sequence: AAAAAC
atatgctttttaggtctatc

SEQ ID NO: 8350 - DNA, 20 bp, Artificial Sequence
  Description of Artificial Sequence: Synthetic oligonucleotide
  Target: LAMA2; (+) strand; PAM type: NAAAAC; PAM sequence: AAAAAC
agcaattcacttgaatttct

SEQ ID NO: 8351 - DNA, 20 bp, Artificial Sequence
  Description of Artificial Sequence: Synthetic oligonucleotide
  Target: LAMA2; (+) strand; PAM type: NAAAAC; PAM sequence: TAAAAC
caggaacgtaagagaccaat

SEQ ID NO: 8352 - DNA, 20 bp, Artificial Sequence
  Description of Artificial Sequence: Synthetic oligonucleotide
  Target: LAMA2; (+) strand; PAM type: NAAAAC; PAM sequence: TAAAAC
acataaaggcaaagttctgc

SEQ ID NO: 8353 - DNA, 20 bp, Artificial Sequence
  Description of Artificial Sequence: Synthetic oligonucleotide
  Target: LAMA2; (+) strand; PAM type: NAAAAC; PAM sequence: AAAAAC
aaagcctaaagaccccacca

SEQ ID NO: 8354 - DNA, 20 bp, Artificial Sequence
  Description of Artificial Sequence: Synthetic oligonucleotide
  Target: LAMA2; (+) strand; PAM type: NAAAAC; PAM sequence: GAAAAC
aagtgaaaggtctctacaat

SEQ ID NO: 8355 - DNA, 20 bp, Artificial Sequence
  Description of Artificial Sequence: Synthetic oligonucleotide
  Target: LAMA2; (+) strand; PAM type: NAAAAC; PAM sequence: GAAAAC
accccacctacagggaagca

SEQ ID NO: 8356 - DNA, 20 bp, Artificial Sequence
  Description of Artificial Sequence: Synthetic oligonucleotide
  Target: LAMA2; (+) strand; PAM type: NAAAAC; PAM sequence: AAAAAC
tacagggaagcagaaaacag

SEQ ID NO: 8357 - DNA, 20 bp, Artificial Sequence
  Description of Artificial Sequence: Synthetic oligonucleotide
  Target: LAMA2; (+) strand; PAM type: NAAAAC; PAM sequence: CAAAAC
tcttataattctggatcaaa

SEQ ID NO: 8358 - DNA, 20 bp, Artificial Sequence
  Description of Artificial Sequence: Synthetic oligonucleotide
  Target: LAMA2; (+) strand; PAM type: NAAAAC; PAM sequence: GAAAAC
cagaagagatcacttcactg

SEQ ID NO: 8359 - DNA, 20 bp, Artificial Sequence
  Description of Artificial Sequence: Synthetic oligonucleotide
  Target: LAMA2; (+) strand; PAM type: NAAAAC; PAM sequence: TAAAAC
caccatttagtgtgccccac

SEQ ID NO: 8360 - DNA, 20 bp, Artificial Sequence
  Description of Artificial Sequence: Synthetic oligonucleotide
  Target: LAMA2; (+) strand; PAM type: NAAAAC; PAM sequence: AAAAAC
agcatccagctaccatttca

SEQ ID NO: 8361 - DNA, 20 bp, Artificial Sequence
  Description of Artificial Sequence: Synthetic oligonucleotide
  Target: LAMA2; (+) strand; PAM type: NAAAAC; PAM sequence: GAAAAC
cagcaggtaaacagagaagg

SEQ ID NO: 8362 - DNA, 20 bp, Artificial Sequence
  Description of Artificial Sequence: Synthetic oligonucleotide
  Target: LAMA2; (+) strand; PAM type: NAAAAC; PAM sequence: AAAAAC
aggggcttttccacattact

SEQ ID NO: 8363 - DNA, 20 bp, Artificial Sequence
  Description of Artificial Sequence: Synthetic oligonucleotide
  Target: LAMA2; (+) strand; PAM type: NAAAAC; PAM sequence: TAAAAC
atgaaggaaaaaaatataat

SEQ ID NO: 8364 - DNA, 20 bp, Artificial Sequence
  Description of Artificial Sequence: Synthetic oligonucleotide
  Target: LAMA2; (+) strand; PAM type: NAAAAC; PAM sequence: GAAAAC
tctcttatgttactggtttt

SEQ ID NO: 8365 - DNA, 20 bp, Artificial Sequence
  Description of Artificial Sequence: Synthetic oligonucleotide
  Target: LAMA2; (+) strand; PAM type: NAAAAC; PAM sequence: AAAAAC
acaattctattagtaaggct

SEQ ID NO: 8366 - DNA, 20 bp, Artificial Sequence
  Description of Artificial Sequence: Synthetic oligonucleotide
  Target: LAMA2; (+) strand; PAM type: NAAAAC; PAM sequence: CAAAAC
tctattagtaaggctaaaaa

SEQ ID NO: 8367 - DNA, 20 bp, Artificial Sequence
  Description of Artificial Sequence: Synthetic oligonucleotide
  Target: LAMA2; (+) strand; PAM type: NAAAAC; PAM sequence: TAAAAC
acaaaaccactaactttgca

SEQ ID NO: 8368 - DNA, 20 bp, Artificial Sequence
  Description of Artificial Sequence: Synthetic oligonucleotide
  Target: LAMA2; (+) strand; PAM type: NAAAAC; PAM sequence: CAAAAC
taaccccaggaagagtctgt

SEQ ID NO: 8369 - DNA, 20 bp, Artificial Sequence
  Description of Artificial Sequence: Synthetic oligonucleotide
  Target: LAMA2; (+) strand; PAM type: NAAAAC; PAM sequence: TAAAAC
gtcaaaacaagtatatcaag

SEQ ID NO: 8370 - DNA, 20 bp, Artificial Sequence
  Description of Artificial Sequence: Synthetic oligonucleotide
  Target: LAMA2; (+) strand; PAM type: NAAAAC; PAM sequence: CAAAAC
tatgggctttggggagatgc

SEQ ID NO: 8371 - DNA, 20 bp, Artificial Sequence
  Description of Artificial Sequence: Synthetic oligonucleotide
  Target: LAMA2; (+) strand; PAM type: NAAAAC; PAM sequence: AAAAAC
agcttagctcagtgttttta

SEQ ID NO: 8372 - DNA, 20 bp, Artificial Sequence
  Description of Artificial Sequence: Synthetic oligonucleotide
  Target: LAMA2; (+) strand; PAM type: NAAAAC; PAM sequence: AAAAAC
agtcaagcatgaggattctt

SEQ ID NO: 8373 - DNA, 20 bp, Artificial Sequence
  Description of Artificial Sequence: Synthetic oligonucleotide
  Target: LAMA2; (+) strand; PAM type: NAAAAC; PAM sequence: GAAAAC
tatttaataaatggtgctgg

SEQ ID NO: 8374 - DNA, 20 bp, Artificial Sequence
  Description of Artificial Sequence: Synthetic oligonucleotide
  Target: LAMA2; (+) strand; PAM type: NAAAAC; PAM sequence: TAAAAC
aaagacttaaacgttagacc

SEQ ID NO: 8375 - DNA, 20 bp, Artificial Sequence
  Description of Artificial Sequence: Synthetic oligonucleotide
  Target: LAMA2; (+) strand; PAM type: NAAAAC; PAM sequence: GAAAAC
aaaccatacaaaccctagaa

SEQ ID NO: 8376 - DNA, 20 bp, Artificial Sequence
  Description of Artificial Sequence: Synthetic oligonucleotide
  Target: LAMA2; (+) strand; PAM type: NAAAAC; PAM sequence: TAAAAC
atgggcaaggacttcatgtc

SEQ ID NO: 8377 - DNA, 20 bp, Artificial Sequence
  Description of Artificial Sequence: Synthetic oligonucleotide
  Target: LAMA2; (+) strand; PAM type: NAAAAC; PAM sequence: AAAAAC
ctcaaacaaatttacaagaa

SEQ ID NO: 8378 - DNA, 20 bp, Artificial Sequence
  Description of Artificial Sequence: Synthetic oligonucleotide
  Target: LAMA2; (+) strand; PAM type: NAAAAC; PAM sequence: CAAAAC
gccatcagagaaatgcaaat

SEQ ID NO: 8379 - DNA, 20 bp, Artificial Sequence
  Description of Artificial Sequence: Synthetic oligonucleotide
  Target: LAMA2; (+) strand; PAM type: NAAAAC; PAM sequence: AAAAAC
agtaaactatcacaaggaca

SEQ ID NO: 8380 - DNA, 20 bp, Artificial Sequence
  Description of Artificial Sequence: Synthetic oligonucleotide
  Target: LAMA2; (+) strand; PAM type: NAAAAC; PAM sequence: TAAAAC
aatctagtgaatttaatata

SEQ ID NO: 8381 - DNA, 20 bp, Artificial Sequence
  Description of Artificial Sequence: Synthetic oligonucleotide
  Target: LAMA2; (+) strand; PAM type: NAAAAC; PAM sequence: TAAAAC
tttaaccaaactttaagaaa

SEQ ID NO: 8382 - DNA, 20 bp, Artificial Sequence
  Description of Artificial Sequence: Synthetic oligonucleotide
  Target: LAMA2; (+) strand; PAM type: NAAAAC; PAM sequence: GAAAAC
tttaagaaataaaacttttt

SEQ ID NO: 8383 - DNA, 20 bp, Artificial Sequence
  Description of Artificial Sequence: Synthetic oligonucleotide
  Target: LAMA2; (+) strand; PAM type: NAAAAC; PAM sequence: CAAAAC
ctgcacagaaagatatgtaa

SEQ ID NO: 8384 - DNA, 20 bp, Artificial Sequence
  Description of Artificial Sequence: Synthetic oligonucleotide
  Target: LAMA2; (+) strand; PAM type: NAAAAC; PAM sequence: GAAAAC
tcaaatgtgaaaccaagact

SEQ ID NO: 8385 - DNA, 20 bp, Artificial Sequence
  Description of Artificial Sequence: Synthetic oligonucleotide
  Target: LAMA2; (+) strand; PAM type: NAAAAC; PAM sequence: CAAAAC
ttcactgaattaggtttgga

SEQ ID NO: 8386 - DNA, 20 bp, Artificial Sequence
  Description of Artificial Sequence: Synthetic oligonucleotide
  Target: LAMA2; (+) strand; PAM type: NAAAAC; PAM sequence: CAAAAC
aatcaaattagttcttatcc

SEQ ID NO: 8387 - DNA, 20 bp, Artificial Sequence
  Description of Artificial Sequence: Synthetic oligonucleotide
  Target: LAMA2; (+) strand; PAM type: NAAAAC; PAM sequence: AAAAAC
ggtgctttgcactttagaag

SEQ ID NO: 8388 - DNA, 20 bp, Artificial Sequence
  Description of Artificial Sequence: Synthetic oligonucleotide
  Target: LAMA2; (-) strand; PAM type: NNAGAAW; PAM sequence: TAAGAAT
caattgcctggatcatatgg

SEQ ID NO: 8389 - DNA, 20 bp, Artificial Sequence
  Description of Artificial Sequence: Synthetic oligonucleotide
  Target: LAMA2; (-) strand; PAM type: NNAGAAW; PAM sequence: CCAGAAA
aaatcccccaacctccattc

SEQ ID NO: 8390 - DNA, 20 bp, Artificial Sequence
  Description of Artificial Sequence: Synthetic oligonucleotide
  Target: LAMA2; (-) strand; PAM type: NNAGAAW; PAM sequence: TGAGAAA
ttcacttcatcatcatttgt

SEQ ID NO: 8391 - DNA, 20 bp, Artificial Sequence
  Description of Artificial Sequence: Synthetic oligonucleotide
  Target: LAMA2; (-) strand; PAM type: NNAGAAW; PAM sequence: TCAGAAA
cttaatattttttgtccctt

SEQ ID NO: 8392 - DNA, 20 bp, Artificial Sequence
  Description of Artificial Sequence: Synthetic oligonucleotide
  Target: LAMA2; (-) strand; PAM type: NNAGAAW; PAM sequence: AGAGAAA
aagatttaaatacatattct

SEQ ID NO: 8393 - DNA, 20 bp, Artificial Sequence
  Description of Artificial Sequence: Synthetic oligonucleotide
  Target: LAMA2; (-) strand; PAM type: NNAGAAW; PAM sequence: GAAGAAT
ttgttccagtttggggctat

SEQ ID NO: 8394 - DNA, 20 bp, Artificial Sequence
  Description of Artificial Sequence: Synthetic oligonucleotide
  Target: LAMA2; (-) strand; PAM type: NNAGAAW; PAM sequence: CCAGAAA
aaatcccccaacctccattc

SEQ ID NO: 8395 - DNA, 20 bp, Artificial Sequence
  Description of Artificial Sequence: Synthetic oligonucleotide
  Target: LAMA2; (-) strand; PAM type: NNAGAAW; PAM sequence: TGAGAAT
tattttacatgaaaatgcct

SEQ ID NO: 8396 - DNA, 20 bp, Artificial Sequence
  Description of Artificial Sequence: Synthetic oligonucleotide
  Target: LAMA2; (-) strand; PAM type: NNAGAAW; PAM sequence: TCAGAAT
aatatttataaaaaggaaaa

SEQ ID NO: 8397 - DNA, 20 bp, Artificial Sequence
  Description of Artificial Sequence: Synthetic oligonucleotide
  Target: LAMA2; (-) strand; PAM type: NNAGAAW; PAM sequence: TCAGAAT
ttctaaacctattgctattc

SEQ ID NO: 8398 - DNA, 20 bp, Artificial Sequence
  Description of Artificial Sequence: Synthetic oligonucleotide
  Target: LAMA2; (-) strand; PAM type: NNAGAAW; PAM sequence: CCAGAAA
ttagttctgttaatattata

SEQ ID NO: 8399 - DNA, 20 bp, Artificial Sequence
  Description of Artificial Sequence: Synthetic oligonucleotide
  Target: LAMA2; (-) strand; PAM type: NNAGAAW; PAM sequence: AGAGAAT
ttaagagagtattgctttga

SEQ ID NO: 8400 - DNA, 20 bp, Artificial Sequence
  Description of Artificial Sequence: Synthetic oligonucleotide
  Target: LAMA2; (-) strand; PAM type: NNAGAAW; PAM sequence: TAAGAAT
tcgattacactggggtcatc

SEQ ID NO: 8401 - DNA, 20 bp, Artificial Sequence
  Description of Artificial Sequence: Synthetic oligonucleotide
  Target: LAMA2; (-) strand; PAM type: NNAGAAW; PAM sequence: TTAGAAT
gttcctgaccaaactaatgg

SEQ ID NO: 8402 - DNA, 20 bp, Artificial Sequence
  Description of Artificial Sequence: Synthetic oligonucleotide
  Target: LAMA2; (-) strand; PAM type: NNAGAAW; PAM sequence: TGAGAAA
agctaggaacttttacctct

SEQ ID NO: 8403 - DNA, 20 bp, Artificial Sequence
  Description of Artificial Sequence: Synthetic oligonucleotide
  Target: LAMA2; (-) strand; PAM type: NNAGAAW; PAM sequence: AAAGAAA
atctgaacttcttttaaatt

SEQ ID NO: 8404 - DNA, 20 bp, Artificial Sequence
  Description of Artificial Sequence: Synthetic oligonucleotide
  Target: LAMA2; (-) strand; PAM type: NNAGAAW; PAM sequence: GGAGAAA
ggccgccgcctgagggtggg

SEQ ID NO: 8405 - DNA, 20 bp, Artificial Sequence
  Description of Artificial Sequence: Synthetic oligonucleotide
  Target: LAMA2; (-) strand; PAM type: NNAGAAW; PAM sequence: TCAGAAA
gttttcctcttggaaagatt

SEQ ID NO: 8406 - DNA, 20 bp, Artificial Sequence
  Description of Artificial Sequence: Synthetic oligonucleotide
  Target: LAMA2; (-) strand; PAM type: NNAGAAW; PAM sequence: GAAGAAA
tgcaggatgggctctgattt

SEQ ID NO: 8407 - DNA, 20 bp, Artificial Sequence
  Description of Artificial Sequence: Synthetic oligonucleotide
  Target: LAMA2; (-) strand; PAM type: NNAGAAW; PAM sequence: TTAGAAA
aaaaaaaccacataacttct

SEQ ID NO: 8408 - DNA, 20 bp, Artificial Sequence
  Description of Artificial Sequence: Synthetic oligonucleotide
  Target: LAMA2; (-) strand; PAM type: NNAGAAW; PAM sequence: AAAGAAA
ctggaggcgccattgccatg

SEQ ID NO: 8409 - DNA, 20 bp, Artificial Sequence
  Description of Artificial Sequence: Synthetic oligonucleotide
  Target: LAMA2; (-) strand; PAM type: NNAGAAW; PAM sequence: GGAGAAA
tcctctgtatttaagcaaaa

SEQ ID NO: 8410 - DNA, 20 bp, Artificial Sequence
  Description of Artificial Sequence: Synthetic oligonucleotide
  Target: LAMA2; (-) strand; PAM type: NNAGAAW; PAM sequence: GGAGAAT
taaacactaagaggctctga

SEQ ID NO: 8411 - DNA, 20 bp, Artificial Sequence
  Description of Artificial Sequence: Synthetic oligonucleotide
  Target: LAMA2; (-) strand; PAM type: NNAGAAW; PAM sequence: TCAGAAA
ttcaaagactccccaaagtt

SEQ ID NO: 8412 - DNA, 20 bp, Artificial Sequence
  Description of Artificial Sequence: Synthetic oligonucleotide
  Target: LAMA2; (-) strand; PAM type: NNAGAAW; PAM sequence: AAAGAAT
tgatacaggttttccaactt

SEQ ID NO: 8413 - DNA, 20 bp, Artificial Sequence
  Description of Artificial Sequence: Synthetic oligonucleotide
  Target: LAMA2; (-) strand; PAM type: NNAGAAW; PAM sequence: ATAGAAA
ttaatcagggagttattatt

SEQ ID NO: 8414 - DNA, 20 bp, Artificial Sequence
  Description of Artificial Sequence: Synthetic oligonucleotide
  Target: LAMA2; (-) strand; PAM type: NNAGAAW; PAM sequence: CAAGAAT
atgcaaggtcatttttattc

SEQ ID NO: 8415 - DNA, 20 bp, Artificial Sequence
  Description of Artificial Sequence: Synthetic oligonucleotide
  Target: LAMA2; (-) strand; PAM type: NNAGAAW; PAM sequence: GTAGAAT
gcaaagtttaatagttaaaa

SEQ ID NO: 8416 - DNA, 20 bp, Artificial Sequence
  Description of Artificial Sequence: Synthetic oligonucleotide
  Target: LAMA2; (-) strand; PAM type: NNAGAAW; PAM sequence: AGAGAAA
ataagaagggagaggaaaaa

SEQ ID NO: 8417 - DNA, 20 bp, Artificial Sequence
  Description of Artificial Sequence: Synthetic oligonucleotide
  Target: LAMA2; (-) strand; PAM type: NNAGAAW; PAM sequence: ATAGAAA
cttcatcttgtgcctgggtc

SEQ ID NO: 8418 - DNA, 20 bp, Artificial Sequence
  Description of Artificial Sequence: Synthetic oligonucleotide
  Target: LAMA2; (-) strand; PAM type: NNAGAAW; PAM sequence: ACAGAAT
agcatttaagtggtatcttg

SEQ ID NO: 8419 - DNA, 20 bp, Artificial Sequence
  Description of Artificial Sequence: Synthetic oligonucleotide
  Target: LAMA2; (-) strand; PAM type: NNAGAAW; PAM sequence: CTAGAAT
gacaaagacaataatatata

SEQ ID NO: 8420 - DNA, 20 bp, Artificial Sequence
  Description of Artificial Sequence: Synthetic oligonucleotide
  Target: LAMA2; (-) strand; PAM type: NNAGAAW; PAM sequence: TGAGAAT
taagttctaaatttgtcctt

SEQ ID NO: 8421 - DNA, 20 bp, Artificial Sequence
  Description of Artificial Sequence: Synthetic oligonucleotide
  Target: LAMA2; (-) strand; PAM type: NNAGAAW; PAM sequence: AAAGAAA
atggcctaaacaattaatgg

SEQ ID NO: 8422 - DNA, 20 bp, Artificial Sequence
  Description of Artificial Sequence: Synthetic oligonucleotide
  Target: LAMA2; (-) strand; PAM type: NNAGAAW; PAM sequence: AAAGAAA
cttcaatggaacaacactaa

SEQ ID NO: 8423 - DNA, 20 bp, Artificial Sequence
  Description of Artificial Sequence: Synthetic oligonucleotide
  Target: LAMA2; (-) strand; PAM type: NNAGAAW; PAM sequence: ACAGAAA
cagtgctagtataatcgaaa

SEQ ID NO: 8424 - DNA, 20 bp, Artificial Sequence
  Description of Artificial Sequence: Synthetic oligonucleotide
  Target: LAMA2; (-) strand; PAM type: NNAGAAW; PAM sequence: CTAGAAA
tctacacaattagcgcttgc

SEQ ID NO: 8425 - DNA, 20 bp, Artificial Sequence
  Description of Artificial Sequence: Synthetic oligonucleotide
  Target: LAMA2; (-) strand; PAM type: NNAGAAW; PAM sequence: AAAGAAA
tagaaaccacataagatttc

SEQ ID NO: 8426 - DNA, 20 bp, Artificial Sequence
  Description of Artificial Sequence: Synthetic oligonucleotide
  Target: LAMA2; (-) strand; PAM type: NNAGAAW; PAM sequence: ATAGAAA
atactacaatcgagtatgct

SEQ ID NO: 8427 - DNA, 20 bp, Artificial Sequence
  Description of Artificial Sequence: Synthetic oligonucleotide
  Target: LAMA2; (-) strand; PAM type: NNAGAAW; PAM sequence: AAAGAAT
cgtcaattttaaatatagct

SEQ ID NO: 8428 - DNA, 20 bp, Artificial Sequence
  Description of Artificial Sequence: Synthetic oligonucleotide
  Target: LAMA2; (-) strand; PAM type: NNAGAAW; PAM sequence: GCAGAAT
agacactgccttgctgaaat

SEQ ID NO: 8429 - DNA, 20 bp, Artificial Sequence
  Description of Artificial Sequence: Synthetic oligonucleotide
  Target: LAMA2; (-) strand; PAM type: NNAGAAW; PAM sequence: TCAGAAA
acatattattcacaagaata

SEQ ID NO: 8430 - DNA, 20 bp, Artificial Sequence
  Description of Artificial Sequence: Synthetic oligonucleotide
  Target: LAMA2; (-) strand; PAM type: NNAGAAW; PAM sequence: CAAGAAT
cagtttccacatattattca

SEQ ID NO: 8431 - DNA, 20 bp, Artificial Sequence
  Description of Artificial Sequence: Synthetic oligonucleotide
  Target: LAMA2; (-) strand; PAM type: NNAGAAW; PAM sequence: TAAGAAA
attaccaagatagttgagta

SEQ ID NO: 8432 - DNA, 20 bp, Artificial Sequence
  Description of Artificial Sequence: Synthetic oligonucleotide
  Target: LAMA2; (-) strand; PAM type: NNAGAAW; PAM sequence: TTAGAAT
tatggatccaccttcagcct

SEQ ID NO: 8433 - DNA, 20 bp, Artificial Sequence
  Description of Artificial Sequence: Synthetic oligonucleotide
  Target: LAMA2; (-) strand; PAM type: NNAGAAW; PAM sequence: TTAGAAT
aaaagcaatagactataata

SEQ ID NO: 8434 - DNA, 20 bp, Artificial Sequence
  Description of Artificial Sequence: Synthetic oligonucleotide
  Target: LAMA2; (-) strand; PAM type: NNAGAAW; PAM sequence: TCAGAAA
tttcttgacattttaagaat

SEQ ID NO: 8435 - DNA, 20 bp, Artificial Sequence
  Description of Artificial Sequence: Synthetic oligonucleotide
  Target: LAMA2; (-) strand; PAM type: NNAGAAW; PAM sequence: TAAGAAT
ttaacattttcttgacattt

SEQ ID NO: 8436 - DNA, 20 bp, Artificial Sequence
  Description of Artificial Sequence: Synthetic oligonucleotide
  Target: LAMA2; (-) strand; PAM type: NNAGAAW; PAM sequence: AAAGAAA
aaaaagttaacatatgcagc

SEQ ID NO: 8437 - DNA, 20 bp, Artificial Sequence
  Description of Artificial Sequence: Synthetic oligonucleotide
  Target: LAMA2; (-) strand; PAM type: NNAGAAW; PAM sequence: CCAGAAA
tagaaaaatcttaagataga

SEQ ID NO: 8438 - DNA, 20 bp, Artificial Sequence
  Description of Artificial Sequence: Synthetic oligonucleotide
  Target: LAMA2; (-) strand; PAM type: NNAGAAW; PAM sequence: GTAGAAA
agtttgcatgaaatcctagg

SEQ ID NO: 8439 - DNA, 20 bp, Artificial Sequence
  Description of Artificial Sequence: Synthetic oligonucleotide
  Target: LAMA2; (-) strand; PAM type: NNAGAAW; PAM sequence: CTAGAAT
gtcttaccaatggggaaagc

SEQ ID NO: 8440 - DNA, 20 bp, Artificial Sequence
  Description of Artificial Sequence: Synthetic oligonucleotide
  Target: LAMA2; (-) strand; PAM type: NNAGAAW; PAM sequence: GTAGAAT
gaagtggaatgctcttgaat

SEQ ID NO: 8441 - DNA, 20 bp, Artificial Sequence
  Description of Artificial Sequence: Synthetic oligonucleotide
  Target: LAMA2; (-) strand; PAM type: NNAGAAW; PAM sequence: GAAGAAA
tagcactgagttgccaaagg

SEQ ID NO: 8442 - DNA, 20 bp, Artificial Sequence
  Description of Artificial Sequence: Synthetic oligonucleotide
  Target: LAMA2; (-) strand; PAM type: NNAGAAW; PAM sequence: AAAGAAA
atttcaaatttcatatcata

SEQ ID NO: 8443 - DNA, 20 bp, Artificial Sequence
  Description of Artificial Sequence: Synthetic oligonucleotide
  Target: LAMA2; (-) strand; PAM type: NNAGAAW; PAM sequence: ATAGAAT
aacaaaaatggaaacagaac

SEQ ID NO: 8444 - DNA, 20 bp, Artificial Sequence
  Description of Artificial Sequence: Synthetic oligonucleotide
  Target: LAMA2; (-) strand; PAM type: NNAGAAW; PAM sequence: ACAGAAT
taccttttttgttctaaatg

SEQ ID NO: 8445 - DNA, 20 bp, Artificial Sequence
  Description of Artificial Sequence: Synthetic oligonucleotide
  Target: LAMA2; (-) strand; PAM type: NNAGAAW; PAM sequence: GGAGAAA
ggaggaaggaagaaaggaag

SEQ ID NO: 8446 - DNA, 20 bp, Artificial Sequence
  Description of Artificial Sequence: Synthetic oligonucleotide
  Target: LAMA2; (-) strand; PAM type: NNAGAAW; PAM sequence: GAAGAAA
aaataaagaaagggaggaag

SEQ ID NO: 8447 - DNA, 20 bp, Artificial Sequence
  Description of Artificial Sequence: Synthetic oligonucleotide
  Target: LAMA2; (-) strand; PAM type: NNAGAAW; PAM sequence: AAAGAAA
tactaagggaaaaggaaaat

SEQ ID NO: 8448 - DNA, 20 bp, Artificial Sequence
  Description of Artificial Sequence: Synthetic oligonucleotide
  Target: LAMA2; (-) strand; PAM type: NNAGAAW; PAM sequence: GAAGAAT
ttaccttattttattcacag

SEQ ID NO: 8449 - DNA, 20 bp, Artificial Sequence
  Description of Artificial Sequence: Synthetic oligonucleotide
  Target: LAMA2; (-) strand; PAM type: NNAGAAW; PAM sequence: TTAGAAT
cttcctaaatgttatatttg

SEQ ID NO: 8450 - DNA, 20 bp, Artificial Sequence
  Description of Artificial Sequence: Synthetic oligonucleotide
  Target: LAMA2; (-) strand; PAM type: NNAGAAW; PAM sequence: GGAGAAA
tccacactcaagattactta

SEQ ID NO: 8451 - DNA, 20 bp, Artificial Sequence
  Description of Artificial Sequence: Synthetic oligonucleotide
  Target: LAMA2; (-) strand; PAM type: NNAGAAW; PAM sequence: TTAGAAA
atatgatagactaacataac

SEQ ID NO: 8452 - DNA, 20 bp, Artificial Sequence
  Description of Artificial Sequence: Synthetic oligonucleotide
  Target: LAMA2; (-) strand; PAM type: NNAGAAW; PAM sequence: CAAGAAT
gtgtccagtaatcaaagttc

SEQ ID NO: 8453 - DNA, 20 bp, Artificial Sequence
  Description of Artificial Sequence: Synthetic oligonucleotide
  Target: LAMA2; (-) strand; PAM type: NNAGAAW; PAM sequence: AAAGAAT
gttacttcagaaaagccaat

SEQ ID NO: 8454 - DNA, 20 bp, Artificial Sequence
  Description of Artificial Sequence: Synthetic oligonucleotide
  Target: LAMA2; (-) strand; PAM type: NNAGAAW; PAM sequence: TCAGAAA
gtaacttctgtaaagttact

SEQ ID NO: 8455 - DNA, 20 bp, Artificial Sequence
  Description of Artificial Sequence: Synthetic oligonucleotide
  Target: LAMA2; (-) strand; PAM type: NNAGAAW; PAM sequence: ACAGAAA
cttaagacaacaaaaatcaa

SEQ ID NO: 8456 - DNA, 20 bp, Artificial Sequence
  Description of Artificial Sequence: Synthetic oligonucleotide
  Target: LAMA2; (-) strand; PAM type: NNAGAAW; PAM sequence: CTAGAAA
gtcaaggcaactagagtttt

SEQ ID NO: 8457 - DNA, 20 bp, Artificial Sequence
  Description of Artificial Sequence: Synthetic oligonucleotide
  Target: LAMA2; (-) strand; PAM type: NNAGAAW; PAM sequence: ATAGAAT
ctactaactctatttcttct

SEQ ID NO: 8458 - DNA, 20 bp, Artificial Sequence
  Description of Artificial Sequence: Synthetic oligonucleotide
  Target: LAMA2; (-) strand; PAM type: NNAGAAW; PAM sequence: AGAGAAT
gaagagtgtttctttcagcc

SEQ ID NO: 8459 - DNA, 20 bp, Artificial Sequence
  Description of Artificial Sequence: Synthetic oligonucleotide
  Target: LAMA2; (-) strand; PAM type: NNAGAAW; PAM sequence: TTAGAAT
tactgcagcacaaattctaa

SEQ ID NO: 8460 - DNA, 20 bp, Artificial Sequence
  Description of Artificial Sequence: Synthetic oligonucleotide
  Target: LAMA2; (-) strand; PAM type: NNAGAAW; PAM sequence: AAAGAAA
taagctataaagttgagaat

SEQ ID NO: 8461 - DNA, 20 bp, Artificial Sequence
  Description of Artificial Sequence: Synthetic oligonucleotide
  Target: LAMA2; (-) strand; PAM type: NNAGAAW; PAM sequence: TGAGAAT
tgtaggctaagctataaagt

SEQ ID NO: 8462 - DNA, 20 bp, Artificial Sequence
  Description of Artificial Sequence: Synthetic oligonucleotide
  Target: LAMA2; (-) strand; PAM type: NNAGAAW; PAM sequence: ATAGAAA
aacctaaacctatcttacga

SEQ ID NO: 8463 - DNA, 20 bp, Artificial Sequence
  Description of Artificial Sequence: Synthetic oligonucleotide
  Target: LAMA2; (-) strand; PAM type: NNAGAAW; PAM sequence: GAAGAAA
ttttatgctcataaaataaa

SEQ ID NO: 8464 - DNA, 20 bp, Artificial Sequence
  Description of Artificial Sequence: Synthetic oligonucleotide
  Target: LAMA2; (-) strand; PAM type: NNAGAAW; PAM sequence: TTAGAAT
gggtctcctcaaagaaattt

SEQ ID NO: 8465 - DNA, 20 bp, Artificial Sequence
  Description of Artificial Sequence: Synthetic oligonucleotide
  Target: LAMA2; (-) strand; PAM type: NNAGAAW; PAM sequence: AAAGAAA
tagtctcttagggtctcctc

SEQ ID NO: 8466 - DNA, 20 bp, Artificial Sequence
  Description of Artificial Sequence: Synthetic oligonucleotide
  Target: LAMA2; (-) strand; PAM type: NNAGAAW; PAM sequence: ACAGAAT
tgacttgctgtgtaacctcg

SEQ ID NO: 8467 - DNA, 20 bp, Artificial Sequence
  Description of Artificial Sequence: Synthetic oligonucleotide
  Target: LAMA2; (-) strand; PAM type: NNAGAAW; PAM sequence: CTAGAAA
catattcaacaatgagattc

SEQ ID NO: 8468 - DNA, 20 bp, Artificial Sequence
  Description of Artificial Sequence: Synthetic oligonucleotide
  Target: LAMA2; (-) strand; PAM type: NNAGAAW; PAM sequence: TAAGAAT
aaaacatatacttcatagac

SEQ ID NO: 8469 - DNA, 20 bp, Artificial Sequence
  Description of Artificial Sequence: Synthetic oligonucleotide
  Target: LAMA2; (-) strand; PAM type: NNAGAAW; PAM sequence: CAAGAAT
ttgtattaaataatgtattc

SEQ ID NO: 8470 - DNA, 20 bp, Artificial Sequence
  Description of Artificial Sequence: Synthetic oligonucleotide
  Target: LAMA2; (-) strand; PAM type: NNAGAAW; PAM sequence: TAAGAAT
taatacacaagtagacacac

SEQ ID NO: 8471 - DNA, 20 bp, Artificial Sequence
  Description of Artificial Sequence: Synthetic oligonucleotide
  Target: LAMA2; (-) strand; PAM type: NNAGAAW; PAM sequence: TTAGAAA
aaaatccagcgttcccaagt

SEQ ID NO: 8472 - DNA, 20 bp, Artificial Sequence
  Description of Artificial Sequence: Synthetic oligonucleotide
  Target: LAMA2; (-) strand; PAM type: NNAGAAW; PAM sequence: TCAGAAT
ccagtgacttttctaatgta

SEQ ID NO: 8473 - DNA, 20 bp, Artificial Sequence
  Description of Artificial Sequence: Synthetic oligonucleotide
  Target: LAMA2; (-) strand; PAM type: NNAGAAW; PAM sequence: TCAGAAT
tttagatggaaaattgaatt

SEQ ID NO: 8474 - DNA, 20 bp, Artificial Sequence
  Description of Artificial Sequence: Synthetic oligonucleotide
  Target: LAMA2; (-) strand; PAM type: NNAGAAW; PAM sequence: AAAGAAA
agccactggggaaaaaaaac

SEQ ID NO: 8475 - DNA, 20 bp, Artificial Sequence
  Description of Artificial Sequence: Synthetic oligonucleotide
  Target: LAMA2; (-) strand; PAM type: NNAGAAW; PAM sequence: ATAGAAT
ggataaaaaggaatcttgac

SEQ ID NO: 8476 - DNA, 20 bp, Artificial Sequence
  Description of Artificial Sequence: Synthetic oligonucleotide
  Target: LAMA2; (-) strand; PAM type: NNAGAAW; PAM sequence: TGAGAAT
tttgaacgcagaggcagaaa

SEQ ID NO: 8477 - DNA, 20 bp, Artificial Sequence
  Description of Artificial Sequence: Synthetic oligonucleotide
  Target: LAMA2; (-) strand; PAM type: NNAGAAW; PAM sequence: GCAGAAA
gtaataatttgaacgcagag

SEQ ID NO: 8478 - DNA, 20 bp, Artificial Sequence
  Description of Artificial Sequence: Synthetic oligonucleotide
  Target: LAMA2; (-) strand; PAM type: NNAGAAW; PAM sequence: AAAGAAT
ctgagttttggtatagaatc

SEQ ID NO: 8479 - DNA, 20 bp, Artificial Sequence
  Description of Artificial Sequence: Synthetic oligonucleotide
  Target: LAMA2; (-) strand; PAM type: NNAGAAW; PAM sequence: ATAGAAT
accacttactgagttttggt

SEQ ID NO: 8480 - DNA, 20 bp, Artificial Sequence
  Description of Artificial Sequence: Synthetic oligonucleotide
  Target: LAMA2; (-) strand; PAM type: NNAGAAW; PAM sequence: TAAGAAA
aatgtaattaaaatatttta

SEQ ID NO: 8481 - DNA, 20 bp, Artificial Sequence
  Description of Artificial Sequence: Synthetic oligonucleotide
  Target: LAMA2; (-) strand; PAM type: NNAGAAW; PAM sequence: ACAGAAA
aacaaaatttgtcaataact

SEQ ID NO: 8482 - DNA, 20 bp, Artificial Sequence
  Description of Artificial Sequence: Synthetic oligonucleotide
  Target: LAMA2; (-) strand; PAM type: NNAGAAW; PAM sequence: CAAGAAA
aatgaataaagtaactattt

SEQ ID NO: 8483 - DNA, 20 bp, Artificial Sequence
  Description of Artificial Sequence: Synthetic oligonucleotide
  Target: LAMA2; (-) strand; PAM type: NNAGAAW; PAM sequence: TAAGAAT
ttgtttgataaacattttct

SEQ ID NO: 8484 - DNA, 20 bp, Artificial Sequence
  Description of Artificial Sequence: Synthetic oligonucleotide
  Target: LAMA2; (-) strand; PAM type: NNAGAAW; PAM sequence: GAAGAAA
ttcaccaccacacactccca

SEQ ID NO: 8485 - DNA, 20 bp, Artificial Sequence
  Description of Artificial Sequence: Synthetic oligonucleotide
  Target: LAMA2; (-) strand; PAM type: NNAGAAW; PAM sequence: AAAGAAA
agtccaaccctgtagagctc

SEQ ID NO: 8486 - DNA, 20 bp, Artificial Sequence
  Description of Artificial Sequence: Synthetic oligonucleotide
  Target: LAMA2; (-) strand; PAM type: NNAGAAW; PAM sequence: GTAGAAT
ttcatatggctatagatttt

SEQ ID NO: 8487 - DNA, 20 bp, Artificial Sequence
  Description of Artificial Sequence: Synthetic oligonucleotide
  Target: LAMA2; (-) strand; PAM type: NNAGAAW; PAM sequence: AAAGAAA
ctggatttcttcccccttaa

SEQ ID NO: 8488 - DNA, 20 bp, Artificial Sequence
  Description of Artificial Sequence: Synthetic oligonucleotide
  Target: LAMA2; (-) strand; PAM type: NNAGAAW; PAM sequence: TCAGAAT
aaaatctcttctgctaatat

SEQ ID NO: 8489 - DNA, 20 bp, Artificial Sequence
  Description of Artificial Sequence: Synthetic oligonucleotide
  Target: LAMA2; (-) strand; PAM type: NNAGAAW; PAM sequence: TGAGAAA
atgaaggaaattccatattt

SEQ ID NO: 8490 - DNA, 20 bp, Artificial Sequence
  Description of Artificial Sequence: Synthetic oligonucleotide
  Target: LAMA2; (-) strand; PAM type: NNAGAAW; PAM sequence: CTAGAAA
aaatcacaaaacttcaaagg

SEQ ID NO: 8491 - DNA, 20 bp, Artificial Sequence
  Description of Artificial Sequence: Synthetic oligonucleotide
  Target: LAMA2; (-) strand; PAM type: NNAGAAW; PAM sequence: TTAGAAA
tacaaaaccttttaaatgct

SEQ ID NO: 8492 - DNA, 20 bp, Artificial Sequence
  Description of Artificial Sequence: Synthetic oligonucleotide
  Target: LAMA2; (-) strand; PAM type: NNAGAAW; PAM sequence: AAAGAAT
gtatgagatgggcacagaga

SEQ ID NO: 8493 - DNA, 20 bp, Artificial Sequence
  Description of Artificial Sequence: Synthetic oligonucleotide
  Target: LAMA2; (-) strand; PAM type: NNAGAAW; PAM sequence: AGAGAAA
caatggtatgagatgggcac

SEQ ID NO: 8494 - DNA, 20 bp, Artificial Sequence
  Description of Artificial Sequence: Synthetic oligonucleotide
  Target: LAMA2; (-) strand; PAM type: NNAGAAW; PAM sequence: AAAGAAA
catctcccaacaaataagaa

SEQ ID NO: 8495 - DNA, 20 bp, Artificial Sequence
  Description of Artificial Sequence: Synthetic oligonucleotide
  Target: LAMA2; (-) strand; PAM type: NNAGAAW; PAM sequence: TAAGAAA
tctggacatctcccaacaaa

SEQ ID NO: 8496 - DNA, 20 bp, Artificial Sequence
  Description of Artificial Sequence: Synthetic oligonucleotide
  Target: LAMA2; (-) strand; PAM type: NNAGAAW; PAM sequence: AAAGAAA
aacattgaacacctcctaac

SEQ ID NO: 8497 - DNA, 20 bp, Artificial Sequence
  Description of Artificial Sequence: Synthetic oligonucleotide
  Target: LAMA2; (-) strand; PAM type: NNAGAAW; PAM sequence: GCAGAAA
gtgttactggaatgtgtatg

SEQ ID NO: 8498 - DNA, 20 bp, Artificial Sequence
  Description of Artificial Sequence: Synthetic oligonucleotide
  Target: LAMA2; (-) strand; PAM type: NNAGAAW; PAM sequence: GCAGAAT
agaattgaaaagctattttt

SEQ ID NO: 8499 - DNA, 20 bp, Artificial Sequence
  Description of Artificial Sequence: Synthetic oligonucleotide
  Target: LAMA2; (-) strand; PAM type: NNAGAAW; PAM sequence: AGAGAAT
aagcttgagaaagagaataa

SEQ ID NO: 8500 - DNA, 20 bp, Artificial Sequence
  Description of Artificial Sequence: Synthetic oligonucleotide
  Target: LAMA2; (-) strand; PAM type: NNAGAAW; PAM sequence: AGAGAAT
attttatcaaagcttgagaa

SEQ ID NO: 8501 - DNA, 20 bp, Artificial Sequence
  Description of Artificial Sequence: Synthetic oligonucleotide
  Target: LAMA2; (-) strand; PAM type: NNAGAAW; PAM sequence: TGAGAAA
aaaaatattttatcaaagct

SEQ ID NO: 8502 - DNA, 20 bp, Artificial Sequence
  Description of Artificial Sequence: Synthetic oligonucleotide
  Target: LAMA2; (-) strand; PAM type: NNAGAAW; PAM sequence: GGAGAAA
caccacatcaggaactctat

SEQ ID NO: 8503 - DNA, 20 bp, Artificial Sequence
  Description of Artificial Sequence: Synthetic oligonucleotide
  Target: LAMA2; (-) strand; PAM type: NNAGAAW; PAM sequence: TTAGAAT
aaaatgtttctaaaaaacat

SEQ ID NO: 8504 - DNA, 20 bp, Artificial Sequence
  Description of Artificial Sequence: Synthetic oligonucleotide
  Target: LAMA2; (-) strand; PAM type: NNAGAAW; PAM sequence: AAAGAAT
agcacagcaaacattttaga

SEQ ID NO: 8505 - DNA, 20 bp, Artificial Sequence
  Description of Artificial Sequence: Synthetic oligonucleotide
  Target: LAMA2; (-) strand; PAM type: NNAGAAW; PAM sequence: TTAGAAA
ataacagcacagcaaacatt

SEQ ID NO: 8506 - DNA, 20 bp, Artificial Sequence
  Description of Artificial Sequence: Synthetic oligonucleotide
  Target: LAMA2; (-) strand; PAM type: NNAGAAW; PAM sequence: TAAGAAT
tcaggcatgcctgacacagt

SEQ ID NO: 8507 - DNA, 20 bp, Artificial Sequence
  Description of Artificial Sequence: Synthetic oligonucleotide
  Target: LAMA2; (-) strand; PAM type: NNAGAAW; PAM sequence: AGAGAAA
aacacttcatacaacaacaa

SEQ ID NO: 8508 - DNA, 20 bp, Artificial Sequence
  Description of Artificial Sequence: Synthetic oligonucleotide
  Target: LAMA2; (-) strand; PAM type: NNAGAAW; PAM sequence: GAAGAAA
gcttatttatttccttatgt

SEQ ID NO: 8509 - DNA, 20 bp, Artificial Sequence
  Description of Artificial Sequence: Synthetic oligonucleotide
  Target: LAMA2; (-) strand; PAM type: NNAGAAW; PAM sequence: GCAGAAT
tactctgggagttaccataa

SEQ ID NO: 8510 - DNA, 20 bp, Artificial Sequence
  Description of Artificial Sequence: Synthetic oligonucleotide
  Target: LAMA2; (-) strand; PAM type: NNAGAAW; PAM sequence: AGAGAAA
aattgattgtaaaatggaaa

SEQ ID NO: 8511 - DNA, 20 bp, Artificial Sequence
  Description of Artificial Sequence: Synthetic oligonucleotide
  Target: LAMA2; (-) strand; PAM type: NNAGAAW; PAM sequence: ATAGAAA
atttagaatttattcttata

SEQ ID NO: 8512 - DNA, 20 bp, Artificial Sequence
  Description of Artificial Sequence: Synthetic oligonucleotide
  Target: LAMA2; (-) strand; PAM type: NNAGAAW; PAM sequence: TTAGAAT
agacttaaaatctaatgaat

SEQ ID NO: 8513 - DNA, 20 bp, Artificial Sequence
  Description of Artificial Sequence: Synthetic oligonucleotide
  Target: LAMA2; (-) strand; PAM type: NNAGAAW; PAM sequence: AGAGAAA
aaagagaataatttgaaatc

SEQ ID NO: 8514 - DNA, 20 bp, Artificial Sequence
  Description of Artificial Sequence: Synthetic oligonucleotide
  Target: LAMA2; (-) strand; PAM type: NNAGAAW; PAM sequence: AGAGAAT
tgctggtaaataacagaaaa

SEQ ID NO: 8515 - DNA, 20 bp, Artificial Sequence
  Description of Artificial Sequence: Synthetic oligonucleotide
  Target: LAMA2; (-) strand; PAM type: NNAGAAW; PAM sequence: ACAGAAA
tttactgttgctggtaaata

SEQ ID NO: 8516 - DNA, 20 bp, Artificial Sequence
  Description of Artificial Sequence: Synthetic oligonucleotide
  Target: LAMA2; (-) strand; PAM type: NNAGAAW; PAM sequence: AAAGAAA
agataaacatttaattgttc

SEQ ID NO: 8517 - DNA, 20 bp, Artificial Sequence
  Description of Artificial Sequence: Synthetic oligonucleotide
  Target: LAMA2; (-) strand; PAM type: NNAGAAW; PAM sequence: GAAGAAA
ctggggagacaaacaacaaa

SEQ ID NO: 8518 - DNA, 20 bp, Artificial Sequence
  Description of Artificial Sequence: Synthetic oligonucleotide
  Target: LAMA2; (-) strand; PAM type: NNAGAAW; PAM sequence: ACAGAAA
tagaagctggagataaagca

SEQ ID NO: 8519 - DNA, 20 bp, Artificial Sequence
  Description of Artificial Sequence: Synthetic oligonucleotide
  Target: LAMA2; (-) strand; PAM type: NNAGAAW; PAM sequence: GTAGAAA
catactgtgtttcagtattt

SEQ ID NO: 8520 - DNA, 20 bp, Artificial Sequence
  Description of Artificial Sequence: Synthetic oligonucleotide
  Target: LAMA2; (-) strand; PAM type: NNAGAAW; PAM sequence: CAAGAAA
cagaaaagttctgactaagc

SEQ ID NO: 8521 - DNA, 20 bp, Artificial Sequence
  Description of Artificial Sequence: Synthetic oligonucleotide
  Target: LAMA2; (-) strand; PAM type: NNAGAAW; PAM sequence: CCAGAAA
catccaaaaagaccttccat

SEQ ID NO: 8522 - DNA, 20 bp, Artificial Sequence
  Description of Artificial Sequence: Synthetic oligonucleotide
  Target: LAMA2; (-) strand; PAM type: NNAGAAW; PAM sequence: AAAGAAA
ggtggtatctaaaaagaaac

SEQ ID NO: 8523 - DNA, 20 bp, Artificial Sequence
  Description of Artificial Sequence: Synthetic oligonucleotide
  Target: LAMA2; (-) strand; PAM type: NNAGAAW; PAM sequence: AAAGAAA
aggactttggtggtatctaa

SEQ ID NO: 8524 - DNA, 20 bp, Artificial Sequence
  Description of Artificial Sequence: Synthetic oligonucleotide
  Target: LAMA2; (-) strand; PAM type: NNAGAAW; PAM sequence: GAAGAAT
tttcattcttaaagtaagga

SEQ ID NO: 8525 - DNA, 20 bp, Artificial Sequence
  Description of Artificial Sequence: Synthetic oligonucleotide
  Target: LAMA2; (-) strand; PAM type: NNAGAAW; PAM sequence: GTAGAAA
gttcttttttctatcgttga

SEQ ID NO: 8526 - DNA, 20 bp, Artificial Sequence
  Description of Artificial Sequence: Synthetic oligonucleotide
  Target: LAMA2; (-) strand; PAM type: NNAGAAW; PAM sequence: ACAGAAT
aaaaataagcaaggatggaa

SEQ ID NO: 8527 - DNA, 20 bp, Artificial Sequence
  Description of Artificial Sequence: Synthetic oligonucleotide
  Target: LAMA2; (-) strand; PAM type: NNAGAAW; PAM sequence: TGAGAAT
ctaaatattctcctaagact

SEQ ID NO: 8528 - DNA, 20 bp, Artificial Sequence
  Description of Artificial Sequence: Synthetic oligonucleotide
  Target: LAMA2; (-) strand; PAM type: NNAGAAW; PAM sequence: GTAGAAT
aataaactctgcagtcaact

SEQ ID NO: 8529 - DNA, 20 bp, Artificial Sequence
  Description of Artificial Sequence: Synthetic oligonucleotide
  Target: LAMA2; (-) strand; PAM type: NNAGAAW; PAM sequence: CAAGAAA
ggcatgtattcttcatgaat

SEQ ID NO: 8530 - DNA, 20 bp, Artificial Sequence
  Description of Artificial Sequence: Synthetic oligonucleotide
  Target: LAMA2; (-) strand; PAM type: NNAGAAW; PAM sequence: GAAGAAT
ctccttcctgacatcatgaa

SEQ ID NO: 8531 - DNA, 20 bp, Artificial Sequence
  Description of Artificial Sequence: Synthetic oligonucleotide
  Target: LAMA2; (-) strand; PAM type: NNAGAAW; PAM sequence: TGAGAAA
gtgtttatatgctgagagtg

SEQ ID NO: 8532 - DNA, 20 bp, Artificial Sequence
  Description of Artificial Sequence: Synthetic oligonucleotide
  Target: LAMA2; (-) strand; PAM type: NNAGAAW; PAM sequence: CAAGAAA
catcaattttcttttacaat

SEQ ID NO: 8533 - DNA, 20 bp, Artificial Sequence
  Description of Artificial Sequence: Synthetic oligonucleotide
  Target: LAMA2; (-) strand; PAM type: NNAGAAW; PAM sequence: TGAGAAA
atgtttccctctggtgaaca

SEQ ID NO: 8534 - DNA, 20 bp, Artificial Sequence
  Description of Artificial Sequence: Synthetic oligonucleotide
  Target: LAMA2; (-) strand; PAM type: NNAGAAW; PAM sequence: TAAGAAT
ctttaaagtgaaagaaggag

SEQ ID NO: 8535 - DNA, 20 bp, Artificial Sequence
  Description of Artificial Sequence: Synthetic oligonucleotide
  Target: LAMA2; (-) strand; PAM type: NNAGAAW; PAM sequence: ATAGAAT
gtgactggtcatatttatga

SEQ ID NO: 8536 - DNA, 20 bp, Artificial Sequence
  Description of Artificial Sequence: Synthetic oligonucleotide
  Target: LAMA2; (-) strand; PAM type: NNAGAAW; PAM sequence: AAAGAAA
ttccagtaacagtgtcttac

SEQ ID NO: 8537 - DNA, 20 bp, Artificial Sequence
  Description of Artificial Sequence: Synthetic oligonucleotide
  Target: LAMA2; (-) strand; PAM type: NNAGAAW; PAM sequence: GTAGAAT
gaaattccatttgtagtgaa

SEQ ID NO: 8538 - DNA, 20 bp, Artificial Sequence
  Description of Artificial Sequence: Synthetic oligonucleotide
  Target: LAMA2; (-) strand; PAM type: NNAGAAW; PAM sequence: ACAGAAT
cacacataatgcattttaat

SEQ ID NO: 8539 - DNA, 20 bp, Artificial Sequence
  Description of Artificial Sequence: Synthetic oligonucleotide
  Target: LAMA2; (-) strand; PAM type: NNAGAAW; PAM sequence: ACAGAAT
tcaatggcaatttctttaaa

SEQ ID NO: 8540 - DNA, 20 bp, Artificial Sequence
  Description of Artificial Sequence: Synthetic oligonucleotide
  Target: LAMA2; (-) strand; PAM type: NNAGAAW; PAM sequence: TAAGAAA
accaacagtagccaataccc

SEQ ID NO: 8541 - DNA, 20 bp, Artificial Sequence
  Description of Artificial Sequence: Synthetic oligonucleotide
  Target: LAMA2; (-) strand; PAM type: NNAGAAW; PAM sequence: AGAGAAA
aaggttttagaattactgct

SEQ ID NO: 8542 - DNA, 20 bp, Artificial Sequence
  Description of Artificial Sequence: Synthetic oligonucleotide
  Target: LAMA2; (-) strand; PAM type: NNAGAAW; PAM sequence: TTAGAAT
gcttaatgtccacaaaggtt

SEQ ID NO: 8543 - DNA, 20 bp, Artificial Sequence
  Description of Artificial Sequence: Synthetic oligonucleotide
  Target: LAMA2; (-) strand; PAM type: NNAGAAW; PAM sequence: AGAGAAA
agaggataaagaagcttgca

SEQ ID NO: 8544 - DNA, 20 bp, Artificial Sequence
  Description of Artificial Sequence: Synthetic oligonucleotide
  Target: LAMA2; (-) strand; PAM type: NNAGAAW; PAM sequence: AGAGAAA
tcttaatttccctctttaaa

SEQ ID NO: 8545 - DNA, 20 bp, Artificial Sequence
  Description of Artificial Sequence: Synthetic oligonucleotide
  Target: LAMA2; (-) strand; PAM type: NNAGAAW; PAM sequence: TCAGAAA
agacgctctgtcaccaaatc

SEQ ID NO: 8546 - DNA, 20 bp, Artificial Sequence
  Description of Artificial Sequence: Synthetic oligonucleotide
  Target: LAMA2; (-) strand; PAM type: NNAGAAW; PAM sequence: CTAGAAT
ctcttaaggaaatggcggtt

SEQ ID NO: 8547 - DNA, 20 bp, Artificial Sequence
  Description of Artificial Sequence: Synthetic oligonucleotide
  Target: LAMA2; (-) strand; PAM type: NNAGAAW; PAM sequence: ACAGAAA
gaggtggttactaactccag

SEQ ID NO: 8548 - DNA, 20 bp, Artificial Sequence
  Description of Artificial Sequence: Synthetic oligonucleotide
  Target: LAMA2; (-) strand; PAM type: NNAGAAW; PAM sequence: TCAGAAA
gtaggtggtataatgacgag

SEQ ID NO: 8549 - DNA, 20 bp, Artificial Sequence
  Description of Artificial Sequence: Synthetic oligonucleotide
  Target: LAMA2; (-) strand; PAM type: NNAGAAW; PAM sequence: GTAGAAT
attctctgaatcacattatt

SEQ ID NO: 8550 - DNA, 20 bp, Artificial Sequence
  Description of Artificial Sequence: Synthetic oligonucleotide
  Target: LAMA2; (-) strand; PAM type: NNAGAAW; PAM sequence: AAAGAAA
aaaaaagaaaggaaaaaaat

SEQ ID NO: 8551 - DNA, 20 bp, Artificial Sequence
  Description of Artificial Sequence: Synthetic oligonucleotide
  Target: LAMA2; (-) strand; PAM type: NNAGAAW; PAM sequence: AAAGAAA
cttaaaaaaaaaaaaaaaaa

SEQ ID NO: 8552 - DNA, 20 bp, Artificial Sequence
  Description of Artificial Sequence: Synthetic oligonucleotide
  Target: LAMA2; (-) strand; PAM type: NNAGAAW; PAM sequence: GGAGAAT
ctactcaggaggctgaggca

SEQ ID NO: 8553 - DNA, 20 bp, Artificial Sequence
  Description of Artificial Sequence: Synthetic oligonucleotide
  Target: LAMA2; (-) strand; PAM type: NNAGAAW; PAM sequence: CAAGAAT
ccccatccctactaaaaata

SEQ ID NO: 8554 - DNA, 20 bp, Artificial Sequence
  Description of Artificial Sequence: Synthetic oligonucleotide
  Target: LAMA2; (-) strand; PAM type: NNAGAAW; PAM sequence: TAAGAAA
ttccgacctggcaataatgc

SEQ ID NO: 8555 - DNA, 20 bp, Artificial Sequence
  Description of Artificial Sequence: Synthetic oligonucleotide
  Target: LAMA2; (-) strand; PAM type: NNAGAAW; PAM sequence: AAAGAAA
ttaaaattggcacataagca

SEQ ID NO: 8556 - DNA, 20 bp, Artificial Sequence
  Description of Artificial Sequence: Synthetic oligonucleotide
  Target: LAMA2; (-) strand; PAM type: NNAGAAW; PAM sequence: CCAGAAT
ataatataggaaactatgac

SEQ ID NO: 8557 - DNA, 20 bp, Artificial Sequence
  Description of Artificial Sequence: Synthetic oligonucleotide
  Target: LAMA2; (-) strand; PAM type: NNAGAAW; PAM sequence: TCAGAAA
aatgattatcaaaatacgtg

SEQ ID NO: 8558 - DNA, 20 bp, Artificial Sequence
  Description of Artificial Sequence: Synthetic oligonucleotide
  Target: LAMA2; (-) strand; PAM type: NNAGAAW; PAM sequence: AAAGAAA
ctcaataaaccatattttcc

SEQ ID NO: 8559 - DNA, 20 bp, Artificial Sequence
  Description of Artificial Sequence: Synthetic oligonucleotide
  Target: LAMA2; (-) strand; PAM type: NNAGAAW; PAM sequence: ACAGAAA
ggtactatgcctgcaatgga

SEQ ID NO: 8560 - DNA, 20 bp, Artificial Sequence
  Description of Artificial Sequence: Synthetic oligonucleotide
  Target: LAMA2; (-) strand; PAM type: NNAGAAW; PAM sequence: ACAGAAT
aagtgaataaaatgcctgac

SEQ ID NO: 8561 - DNA, 20 bp, Artificial Sequence
  Description of Artificial Sequence: Synthetic oligonucleotide
  Target: LAMA2; (-) strand; PAM type: NNAGAAW; PAM sequence: AAAGAAA
aaacgaaaaaaacaaacaaa

SEQ ID NO: 8562 - DNA, 20 bp, Artificial Sequence
  Description of Artificial Sequence: Synthetic oligonucleotide
  Target: LAMA2; (-) strand; PAM type: NNAGAAW; PAM sequence: AAAGAAA
aaacttaaagtataataata

SEQ ID NO: 8563 - DNA, 20 bp, Artificial Sequence
  Description of Artificial Sequence: Synthetic oligonucleotide
  Target: LAMA2; (-) strand; PAM type: NNAGAAW; PAM sequence: CAAGAAT
tcattctcagcaaactatca

SEQ ID NO: 8564 - DNA, 20 bp, Artificial Sequence
  Description of Artificial Sequence: Synthetic oligonucleotide
  Target: LAMA2; (-) strand; PAM type: NNAGAAW; PAM sequence: TAAGAAA
ccaacaacgatagactggat

SEQ ID NO: 8565 - DNA, 20 bp, Artificial Sequence
  Description of Artificial Sequence: Synthetic oligonucleotide
  Target: LAMA2; (-) strand; PAM type: NNAGAAW; PAM sequence: CTAGAAA
gattcctcagggatctagaa

SEQ ID NO: 8566 - DNA, 20 bp, Artificial Sequence
  Description of Artificial Sequence: Synthetic oligonucleotide
  Target: LAMA2; (-) strand; PAM type: NNAGAAW; PAM sequence: GGAGAAA
acaggtgctggagaggatgt

SEQ ID NO: 8567 - DNA, 20 bp, Artificial Sequence
  Description of Artificial Sequence: Synthetic oligonucleotide
  Target: LAMA2; (-) strand; PAM type: NNAGAAW; PAM sequence: TTAGAAT
gagataccatctcacaccag

SEQ ID NO: 8568 - DNA, 20 bp, Artificial Sequence
  Description of Artificial Sequence: Synthetic oligonucleotide
  Target: LAMA2; (-) strand; PAM type: NNAGAAW; PAM sequence: AGAGAAA
gctcatcatcactggccatc

SEQ ID NO: 8569 - DNA, 20 bp, Artificial Sequence
  Description of Artificial Sequence: Synthetic oligonucleotide
  Target: LAMA2; (-) strand; PAM type: NNAGAAW; PAM sequence: CAAGAAA
aatgaactcaaacaaattta

SEQ ID NO: 8570 - DNA, 20 bp, Artificial Sequence
  Description of Artificial Sequence: Synthetic oligonucleotide
  Target: LAMA2; (-) strand; PAM type: NNAGAAW; PAM sequence: CCAGAAT
atctgacaaagggctaatat

SEQ ID NO: 8571 - DNA, 20 bp, Artificial Sequence
  Description of Artificial Sequence: Synthetic oligonucleotide
  Target: LAMA2; (-) strand; PAM type: NNAGAAW; PAM sequence: GGAGAAA
aacaggcaacctacaaaatg

SEQ ID NO: 8572 - DNA, 20 bp, Artificial Sequence
  Description of Artificial Sequence: Synthetic oligonucleotide
  Target: LAMA2; (-) strand; PAM type: NNAGAAW; PAM sequence: AAAGAAA
taaagagcttctgtgcagca

SEQ ID NO: 8573 - DNA, 20 bp, Artificial Sequence
  Description of Artificial Sequence: Synthetic oligonucleotide
  Target: LAMA2; (-) strand; PAM type: NNAGAAW; PAM sequence: GAAGAAA
ctaaaaccataaaaacccta

SEQ ID NO: 8574 - DNA, 20 bp, Artificial Sequence
  Description of Artificial Sequence: Synthetic oligonucleotide
  Target: LAMA2; (-) strand; PAM type: NNAGAAW; PAM sequence: GTAGAAA
gggaaactggctagccatat

SEQ ID NO: 8575 - DNA, 20 bp, Artificial Sequence
  Description of Artificial Sequence: Synthetic oligonucleotide
  Target: LAMA2; (-) strand; PAM type: NNAGAAW; PAM sequence: TGAGAAA
tatctgatctttgacaaacc

SEQ ID NO: 8576 - DNA, 20 bp, Artificial Sequence
  Description of Artificial Sequence: Synthetic oligonucleotide
  Target: LAMA2; (-) strand; PAM type: NNAGAAW; PAM sequence: TCAGAAA
aatggaacagaacagagccc

SEQ ID NO: 8577 - DNA, 20 bp, Artificial Sequence
  Description of Artificial Sequence: Synthetic oligonucleotide
  Target: LAMA2; (-) strand; PAM type: NNAGAAW; PAM sequence: ACAGAAT
agctaccaatgcctttcttc

SEQ ID NO: 8578 - DNA, 20 bp, Artificial Sequence
  Description of Artificial Sequence: Synthetic oligonucleotide
  Target: LAMA2; (-) strand; PAM type: NNAGAAW; PAM sequence: GAAGAAT
cattccatgctcatgggtag

SEQ ID NO: 8579 - DNA, 20 bp, Artificial Sequence
  Description of Artificial Sequence: Synthetic oligonucleotide
  Target: LAMA2; (-) strand; PAM type: NNAGAAW; PAM sequence: AGAGAAT
cccattcacaattgcttcaa

SEQ ID NO: 8580 - DNA, 20 bp, Artificial Sequence
  Description of Artificial Sequence: Synthetic oligonucleotide
  Target: LAMA2; (-) strand; PAM type: NNAGAAW; PAM sequence: CTAGAAA
cagacgacatgattgtatat

SEQ ID NO: 8581 - DNA, 20 bp, Artificial Sequence
  Description of Artificial Sequence: Synthetic oligonucleotide
  Target: LAMA2; (-) strand; PAM type: NNAGAAW; PAM sequence: GCAGAAA
acatgattatctcaatagat

SEQ ID NO: 8582 - DNA, 20 bp, Artificial Sequence
  Description of Artificial Sequence: Synthetic oligonucleotide
  Target: LAMA2; (-) strand; PAM type: NNAGAAW; PAM sequence: AGAGAAT
ggcagagacacaaccaaaaa

SEQ ID NO: 8583 - DNA, 20 bp, Artificial Sequence
  Description of Artificial Sequence: Synthetic oligonucleotide
  Target: LAMA2; (-) strand; PAM type: NNAGAAW; PAM sequence: ATAGAAA
ttctgaaactattccaatca

SEQ ID NO: 8584 - DNA, 20 bp, Artificial Sequence
  Description of Artificial Sequence: Synthetic oligonucleotide
  Target: LAMA2; (-) strand; PAM type: NNAGAAW; PAM sequence: GAAGAAA
caaataaactagaaaatcta

SEQ ID NO: 8585 - DNA, 20 bp, Artificial Sequence
  Description of Artificial Sequence: Synthetic oligonucleotide
  Target: LAMA2; (-) strand; PAM type: NNAGAAW; PAM sequence: CTAGAAA
aacacctctacgcaaataaa

SEQ ID NO: 8586 - DNA, 20 bp, Artificial Sequence
  Description of Artificial Sequence: Synthetic oligonucleotide
  Target: LAMA2; (-) strand; PAM type: NNAGAAW; PAM sequence: AGAGAAT
cagaaatacaaactaccatc

SEQ ID NO: 8587 - DNA, 20 bp, Artificial Sequence
  Description of Artificial Sequence: Synthetic oligonucleotide
  Target: LAMA2; (-) strand; PAM type: NNAGAAW; PAM sequence: ACAGAAA
gggatatcaccaccgatccc

SEQ ID NO: 8588 - DNA, 20 bp, Artificial Sequence
  Description of Artificial Sequence: Synthetic oligonucleotide
  Target: LAMA2; (-) strand; PAM type: NNAGAAW; PAM sequence: GAAGAAT
ctaataaagaaaaaaagaga

SEQ ID NO: 8589 - DNA, 20 bp, Artificial Sequence
  Description of Artificial Sequence: Synthetic oligonucleotide
  Target: LAMA2; (-) strand; PAM type: NNAGAAW; PAM sequence: AAAGAAA
agaccgctagcaagactaat

SEQ ID NO: 8590 - DNA, 20 bp, Artificial Sequence
  Description of Artificial Sequence: Synthetic oligonucleotide
  Target: LAMA2; (-) strand; PAM type: NNAGAAW; PAM sequence: CAAGAAA
attcaaaagctagcagaagg

SEQ ID NO: 8591 - DNA, 20 bp, Artificial Sequence
  Description of Artificial Sequence: Synthetic oligonucleotide
  Target: LAMA2; (-) strand; PAM type: NNAGAAW; PAM sequence: CTAGAAA
taacatcacaattaaaagaa

SEQ ID NO: 8592 - DNA, 20 bp, Artificial Sequence
  Description of Artificial Sequence: Synthetic oligonucleotide
  Target: LAMA2; (-) strand; PAM type: NNAGAAW; PAM sequence: CCAGAAT
aagaacaaagacacaacata

SEQ ID NO: 8593 - DNA, 20 bp, Artificial Sequence
  Description of Artificial Sequence: Synthetic oligonucleotide
  Target: LAMA2; (-) strand; PAM type: NNAGAAW; PAM sequence: GCAGAAA
gggtacataacgaaatgaag

SEQ ID NO: 8594 - DNA, 20 bp, Artificial Sequence
  Description of Artificial Sequence: Synthetic oligonucleotide
  Target: LAMA2; (-) strand; PAM type: NNAGAAW; PAM sequence: TAAGAAT
atcaaactagaactcaggat

SEQ ID NO: 8595 - DNA, 20 bp, Artificial Sequence
  Description of Artificial Sequence: Synthetic oligonucleotide
  Target: LAMA2; (-) strand; PAM type: NNAGAAW; PAM sequence: ACAGAAA
tcctcagcaaatgtaaaaga

SEQ ID NO: 8596 - DNA, 20 bp, Artificial Sequence
  Description of Artificial Sequence: Synthetic oligonucleotide
  Target: LAMA2; (-) strand; PAM type: NNAGAAW; PAM sequence: ACAGAAT
gaactctccaccccaaatca

SEQ ID NO: 8597 - DNA, 20 bp, Artificial Sequence
  Description of Artificial Sequence: Synthetic oligonucleotide
  Target: LAMA2; (-) strand; PAM type: NNAGAAW; PAM sequence: ACAGAAA
acactagacagatcaacgag

SEQ ID NO: 8598 - DNA, 20 bp, Artificial Sequence
  Description of Artificial Sequence: Synthetic oligonucleotide
  Target: LAMA2; (-) strand; PAM type: NNAGAAW; PAM sequence: GAAGAAA
gtaaagaccatcgagactag

SEQ ID NO: 8599 - DNA, 20 bp, Artificial Sequence
  Description of Artificial Sequence: Synthetic oligonucleotide
  Target: LAMA2; (-) strand; PAM type: NNAGAAW; PAM sequence: GGAGAAA
aactaagcttcataagcgaa

SEQ ID NO: 8600 - DNA, 20 bp, Artificial Sequence
  Description of Artificial Sequence: Synthetic oligonucleotide
  Target: LAMA2; (-) strand; PAM type: NNAGAAW; PAM sequence: CCAGAAT
taaagaaaagaattttcaac

SEQ ID NO: 8601 - DNA, 20 bp, Artificial Sequence
  Description of Artificial Sequence: Synthetic oligonucleotide
  Target: LAMA2; (-) strand; PAM type: NNAGAAW; PAM sequence: AAAGAAT
atattcaacattcttaaaga

SEQ ID NO: 8602 - DNA, 20 bp, Artificial Sequence
  Description of Artificial Sequence: Synthetic oligonucleotide
  Target: LAMA2; (-) strand; PAM type: NNAGAAW; PAM sequence: AAAGAAA
ggccaatattcaacattctt

SEQ ID NO: 8603 - DNA, 20 bp, Artificial Sequence
  Description of Artificial Sequence: Synthetic oligonucleotide
  Target: LAMA2; (-) strand; PAM type: NNAGAAW; PAM sequence: GCAGAAA
gactaacagcagatctctcg

SEQ ID NO: 8604 - DNA, 20 bp, Artificial Sequence
  Description of Artificial Sequence: Synthetic oligonucleotide
  Target: LAMA2; (-) strand; PAM type: NNAGAAW; PAM sequence: AGAGAAA
aaaatgttaagggcagccag

SEQ ID NO: 8605 - DNA, 20 bp, Artificial Sequence
  Description of Artificial Sequence: Synthetic oligonucleotide
  Target: LAMA2; (-) strand; PAM type: NNAGAAW; PAM sequence: CGAGAAA
aaggccacaaagatacttct

SEQ ID NO: 8606 - DNA, 20 bp, Artificial Sequence
  Description of Artificial Sequence: Synthetic oligonucleotide
  Target: LAMA2; (-) strand; PAM type: NNAGAAW; PAM sequence: GGAGAAT
ggtgtacctgaaagtgacgg

SEQ ID NO: 8607 - DNA, 20 bp, Artificial Sequence
  Description of Artificial Sequence: Synthetic oligonucleotide
  Target: LAMA2; (-) strand; PAM type: NNAGAAW; PAM sequence: CAAGAAA
aaagaaatgagcaaagcctc

SEQ ID NO: 8608 - DNA, 20 bp, Artificial Sequence
  Description of Artificial Sequence: Synthetic oligonucleotide
  Target: LAMA2; (-) strand; PAM type: NNAGAAW; PAM sequence: AAAGAAA
gtttagagaaaaaagaataa

SEQ ID NO: 8609 - DNA, 20 bp, Artificial Sequence
  Description of Artificial Sequence: Synthetic oligonucleotide
  Target: LAMA2; (-) strand; PAM type: NNAGAAW; PAM sequence: AAAGAAT
agaagggaagtttagagaaa

SEQ ID NO: 8610 - DNA, 20 bp, Artificial Sequence
  Description of Artificial Sequence: Synthetic oligonucleotide
  Target: LAMA2; (-) strand; PAM type: NNAGAAW; PAM sequence: AGAGAAA
tgaagcaagaagggaagttt

SEQ ID NO: 8611 - DNA, 20 bp, Artificial Sequence
  Description of Artificial Sequence: Synthetic oligonucleotide
  Target: LAMA2; (-) strand; PAM type: NNAGAAW; PAM sequence: GAAGAAA
ggagccgatgcgatcaactg

SEQ ID NO: 8612 - DNA, 20 bp, Artificial Sequence
  Description of Artificial Sequence: Synthetic oligonucleotide
  Target: LAMA2; (-) strand; PAM type: NNAGAAW; PAM sequence: GAAGAAT
ccaaggctcgagaactacgt

SEQ ID NO: 8613 - DNA, 20 bp, Artificial Sequence
  Description of Artificial Sequence: Synthetic oligonucleotide
  Target: LAMA2; (-) strand; PAM type: NNAGAAW; PAM sequence: AGAGAAA
ataactagaataaccaatac

SEQ ID NO: 8614 - DNA, 20 bp, Artificial Sequence
  Description of Artificial Sequence: Synthetic oligonucleotide
  Target: LAMA2; (-) strand; PAM type: NNAGAAW; PAM sequence: CTAGAAT
aaatttagaagaatgtataa

SEQ ID NO: 8615 - DNA, 20 bp, Artificial Sequence
  Description of Artificial Sequence: Synthetic oligonucleotide
  Target: LAMA2; (-) strand; PAM type: NNAGAAW; PAM sequence: GAAGAAT
aaaactttgaaaaaaattta

SEQ ID NO: 8616 - DNA, 20 bp, Artificial Sequence
  Description of Artificial Sequence: Synthetic oligonucleotide
  Target: LAMA2; (-) strand; PAM type: NNAGAAW; PAM sequence: ACAGAAA
aaagatggggaaaaaacaga

SEQ ID NO: 8617 - DNA, 20 bp, Artificial Sequence
  Description of Artificial Sequence: Synthetic oligonucleotide
  Target: LAMA2; (-) strand; PAM type: NNAGAAW; PAM sequence: ACAGAAA
gttagaaggaaaactaataa

SEQ ID NO: 8618 - DNA, 20 bp, Artificial Sequence
  Description of Artificial Sequence: Synthetic oligonucleotide
  Target: LAMA2; (-) strand; PAM type: NNAGAAW; PAM sequence: AAAGAAA
gggagttccctttcctagtc

SEQ ID NO: 8619 - DNA, 20 bp, Artificial Sequence
  Description of Artificial Sequence: Synthetic oligonucleotide
  Target: LAMA2; (-) strand; PAM type: NNAGAAW; PAM sequence: ATAGAAA
gtgtaaaaaaactttatttt

SEQ ID NO: 8620 - DNA, 20 bp, Artificial Sequence
  Description of Artificial Sequence: Synthetic oligonucleotide
  Target: LAMA2; (-) strand; PAM type: NNAGAAW; PAM sequence: GGAGAAA
agtgagggccttctgggaaa

SEQ ID NO: 8621 - DNA, 20 bp, Artificial Sequence
  Description of Artificial Sequence: Synthetic oligonucleotide
  Target: LAMA2; (-) strand; PAM type: NNAGAAW; PAM sequence: ACAGAAA
gactgggtgaaagaaggcag

SEQ ID NO: 8622 - DNA, 20 bp, Artificial Sequence
  Description of Artificial Sequence: Synthetic oligonucleotide
  Target: LAMA2; (-) strand; PAM type: NNAGAAW; PAM sequence: TTAGAAA
gactaagatcatgccttcat

SEQ ID NO: 8623 - DNA, 20 bp, Artificial Sequence
  Description of Artificial Sequence: Synthetic oligonucleotide
  Target: LAMA2; (-) strand; PAM type: NNAGAAW; PAM sequence: TGAGAAA
agggagaaaggaagaagtag

SEQ ID NO: 8624 - DNA, 20 bp, Artificial Sequence
  Description of Artificial Sequence: Synthetic oligonucleotide
  Target: LAMA2; (-) strand; PAM type: NNAGAAW; PAM sequence: GGAGAAA
ttttaattgtgtaaaaagag

SEQ ID NO: 8625 - DNA, 20 bp, Artificial Sequence
  Description of Artificial Sequence: Synthetic oligonucleotide
  Target: LAMA2; (-) strand; PAM type: NNAGAAW; PAM sequence: CCAGAAA
ttatagaaatctcaaatttg

SEQ ID NO: 8626 - DNA, 20 bp, Artificial Sequence
  Description of Artificial Sequence: Synthetic oligonucleotide
  Target: LAMA2; (-) strand; PAM type: NNAGAAW; PAM sequence: ATAGAAA
atatacctatgaagaatttt

SEQ ID NO: 8627 - DNA, 20 bp, Artificial Sequence
  Description of Artificial Sequence: Synthetic oligonucleotide
  Target: LAMA2; (-) strand; PAM type: NNAGAAW; PAM sequence: GAAGAAT
actctgttttatatacctat

SEQ ID NO: 8628 - DNA, 20 bp, Artificial Sequence
  Description of Artificial Sequence: Synthetic oligonucleotide
  Target: LAMA2; (-) strand; PAM type: NNAGAAW; PAM sequence: CCAGAAT
atggaaatgtttctacttcc

SEQ ID NO: 8629 - DNA, 20 bp, Artificial Sequence
  Description of Artificial Sequence: Synthetic oligonucleotide
  Target: LAMA2; (-) strand; PAM type: NNAGAAW; PAM sequence: TTAGAAT
tttaaaaggtctccagctac

SEQ ID NO: 8630 - DNA, 20 bp, Artificial Sequence
  Description of Artificial Sequence: Synthetic oligonucleotide
  Target: LAMA2; (-) strand; PAM type: NNAGAAW; PAM sequence: ATAGAAA
gtgaaactgatctttttttc

SEQ ID NO: 8631 - DNA, 20 bp, Artificial Sequence
  Description of Artificial Sequence: Synthetic oligonucleotide
  Target: LAMA2; (-) strand; PAM type: NNAGAAW; PAM sequence: TAAGAAT
ccacaaattgattccagaag

SEQ ID NO: 8632 - DNA, 20 bp, Artificial Sequence
  Description of Artificial Sequence: Synthetic oligonucleotide
  Target: LAMA2; (-) strand; PAM type: NNAGAAW; PAM sequence: GTAGAAA
catagaaagctatttttaaa

SEQ ID NO: 8633 - DNA, 20 bp, Artificial Sequence
  Description of Artificial Sequence: Synthetic oligonucleotide
  Target: LAMA2; (-) strand; PAM type: NNAGAAW; PAM sequence: ATAGAAA
actgaagcaaaccttcagcc

SEQ ID NO: 8634 - DNA, 20 bp, Artificial Sequence
  Description of Artificial Sequence: Synthetic oligonucleotide
  Target: LAMA2; (-) strand; PAM type: NNAGAAW; PAM sequence: GAAGAAA
ccgggagctataatgaactt

SEQ ID NO: 8635 - DNA, 20 bp, Artificial Sequence
  Description of Artificial Sequence: Synthetic oligonucleotide
  Target: LAMA2; (-) strand; PAM type: NNAGAAW; PAM sequence: AAAGAAT
ttcacctaaagtctctagta

SEQ ID NO: 8636 - DNA, 20 bp, Artificial Sequence
  Description of Artificial Sequence: Synthetic oligonucleotide
  Target: LAMA2; (-) strand; PAM type: NNAGAAW; PAM sequence: AAAGAAT
gtatgtatttttttaaagaa

SEQ ID NO: 8637 - DNA, 20 bp, Artificial Sequence
  Description of Artificial Sequence: Synthetic oligonucleotide
  Target: LAMA2; (-) strand; PAM type: NNAGAAW; PAM sequence: AAAGAAA
gtatgtgtatgtattttttt

SEQ ID NO: 8638 - DNA, 20 bp, Artificial Sequence
  Description of Artificial Sequence: Synthetic oligonucleotide
  Target: LAMA2; (-) strand; PAM type: NNAGAAW; PAM sequence: AGAGAAA
agcaggttagcaactaaaag

SEQ ID NO: 8639 - DNA, 20 bp, Artificial Sequence
  Description of Artificial Sequence: Synthetic oligonucleotide
  Target: LAMA2; (-) strand; PAM type: NNAGAAW; PAM sequence: ATAGAAT
gagaatcagaaacgctttgc

SEQ ID NO: 8640 - DNA, 20 bp, Artificial Sequence
  Description of Artificial Sequence: Synthetic oligonucleotide
  Target: LAMA2; (-) strand; PAM type: NNAGAAW; PAM sequence: TCAGAAA
tccacaaaatactaagagaa

SEQ ID NO: 8641 - DNA, 20 bp, Artificial Sequence
  Description of Artificial Sequence: Synthetic oligonucleotide
  Target: LAMA2; (-) strand; PAM type: NNAGAAW; PAM sequence: AGAGAAT
tgctgttccacaaaatacta

SEQ ID NO: 8642 - DNA, 20 bp, Artificial Sequence
  Description of Artificial Sequence: Synthetic oligonucleotide
  Target: LAMA2; (-) strand; PAM type: NNAGAAW; PAM sequence: AAAGAAA
cattattcaaatatagaaga

SEQ ID NO: 8643 - DNA, 20 bp, Artificial Sequence
  Description of Artificial Sequence: Synthetic oligonucleotide
  Target: LAMA2; (-) strand; PAM type: NNAGAAW; PAM sequence: GAAGAAA
tttatcattattcaaatata

SEQ ID NO: 8644 - DNA, 20 bp, Artificial Sequence
  Description of Artificial Sequence: Synthetic oligonucleotide
  Target: LAMA2; (-) strand; PAM type: NNAGAAW; PAM sequence: AGAGAAA
acactgccaagtttacctgc

SEQ ID NO: 8645 - DNA, 20 bp, Artificial Sequence
  Description of Artificial Sequence: Synthetic oligonucleotide
  Target: LAMA2; (-) strand; PAM type: NNAGAAW; PAM sequence: TTAGAAA
gctgtattacacatcttatt

SEQ ID NO: 8646 - DNA, 20 bp, Artificial Sequence
  Description of Artificial Sequence: Synthetic oligonucleotide
  Target: LAMA2; (-) strand; PAM type: NNAGAAW; PAM sequence: TGAGAAA
tggcttctccacatcaacac

SEQ ID NO: 8647 - DNA, 20 bp, Artificial Sequence
  Description of Artificial Sequence: Synthetic oligonucleotide
  Target: LAMA2; (-) strand; PAM type: NNAGAAW; PAM sequence: AAAGAAT
agaatgaaagaaaaaaatga

SEQ ID NO: 8648 - DNA, 20 bp, Artificial Sequence
  Description of Artificial Sequence: Synthetic oligonucleotide
  Target: LAMA2; (-) strand; PAM type: NNAGAAW; PAM sequence: AAAGAAA
aagccagcacaaagagaatg

SEQ ID NO: 8649 - DNA, 20 bp, Artificial Sequence
  Description of Artificial Sequence: Synthetic oligonucleotide
  Target: LAMA2; (-) strand; PAM type: NNAGAAW; PAM sequence: AGAGAAT
aggaaagaaagccagcacaa

SEQ ID NO: 8650 - DNA, 20 bp, Artificial Sequence
  Description of Artificial Sequence: Synthetic oligonucleotide
  Target: LAMA2; (-) strand; PAM type: NNAGAAW; PAM sequence: AAAGAAA
ccatgggattttaaaaaagg

SEQ ID NO: 8651 - DNA, 20 bp, Artificial Sequence
  Description of Artificial Sequence: Synthetic oligonucleotide
  Target: LAMA2; (-) strand; PAM type: NNAGAAW; PAM sequence: GTAGAAT
ttcaatttcatgttctattt

SEQ ID NO: 8652 - DNA, 20 bp, Artificial Sequence
  Description of Artificial Sequence: Synthetic oligonucleotide
  Target: LAMA2; (-) strand; PAM type: NNAGAAW; PAM sequence: TAAGAAA
agaatacacttttaaatagt

SEQ ID NO: 8653 - DNA, 20 bp, Artificial Sequence
  Description of Artificial Sequence: Synthetic oligonucleotide
  Target: LAMA2; (-) strand; PAM type: NNAGAAW; PAM sequence: GCAGAAT
aatgacttttaattgagaat

SEQ ID NO: 8654 - DNA, 20 bp, Artificial Sequence
  Description of Artificial Sequence: Synthetic oligonucleotide
  Target: LAMA2; (-) strand; PAM type: NNAGAAW; PAM sequence: TGAGAAT
aagataaaatgacttttaat

SEQ ID NO: 8655 - DNA, 20 bp, Artificial Sequence
  Description of Artificial Sequence: Synthetic oligonucleotide
  Target: LAMA2; (-) strand; PAM type: NNAGAAW; PAM sequence: AAAGAAA
ttgttgcttaaaaaggaata

SEQ ID NO: 8656 - DNA, 20 bp, Artificial Sequence
  Description of Artificial Sequence: Synthetic oligonucleotide
  Target: LAMA2; (-) strand; PAM type: NNAGAAW; PAM sequence: GGAGAAA
acattcagtaaagtggttgt

SEQ ID NO: 8657 - DNA, 20 bp, Artificial Sequence
  Description of Artificial Sequence: Synthetic oligonucleotide
  Target: LAMA2; (-) strand; PAM type: NNAGAAW; PAM sequence: TAAGAAA
aaaataaagagaaaaagttg

SEQ ID NO: 8658 - DNA, 20 bp, Artificial Sequence
  Description of Artificial Sequence: Synthetic oligonucleotide
  Target: LAMA2; (-) strand; PAM type: NNAGAAW; PAM sequence: AGAGAAA
agggtgagagtataaaataa

SEQ ID NO: 8659 - DNA, 20 bp, Artificial Sequence
  Description of Artificial Sequence: Synthetic oligonucleotide
  Target: LAMA2; (-) strand; PAM type: NNAGAAW; PAM sequence: AAAGAAA
gaaagaaagaaagaaaaaaa

SEQ ID NO: 8660 - DNA, 20 bp, Artificial Sequence
  Description of Artificial Sequence: Synthetic oligonucleotide
  Target: LAMA2; (-) strand; PAM type: NNAGAAW; PAM sequence: AAAGAAA
aaagaaagaaagaaagaaag

SEQ ID NO: 8661 - DNA, 20 bp, Artificial Sequence
  Description of Artificial Sequence: Synthetic oligonucleotide
  Target: LAMA2; (-) strand; PAM type: NNAGAAW; PAM sequence: AAAGAAA
aaagaaagaaagaaagaaag

SEQ ID NO: 8662 - DNA, 20 bp, Artificial Sequence
  Description of Artificial Sequence: Synthetic oligonucleotide
  Target: LAMA2; (-) strand; PAM type: NNAGAAW; PAM sequence: AAAGAAA
aaaaaaagaaagaaagaaag

SEQ ID NO: 8663 - DNA, 20 bp, Artificial Sequence
  Description of Artificial Sequence: Synthetic oligonucleotide
  Target: LAMA2; (-) strand; PAM type: NNAGAAW; PAM sequence: AAAGAAA
aaaaaaaaaaagaaagaaag

SEQ ID NO: 8664 - DNA, 20 bp, Artificial Sequence
  Description of Artificial Sequence: Synthetic oligonucleotide
  Target: LAMA2; (-) strand; PAM type: NNAGAAW; PAM sequence: AAAGAAA
aaaaaaaaaaaaaaagaaag

SEQ ID NO: 8665 - DNA, 20 bp, Artificial Sequence
  Description of Artificial Sequence: Synthetic oligonucleotide
  Target: LAMA2; (-) strand; PAM type: NNAGAAW; PAM sequence: AAAGAAA
tcaaaaaaaaaaaaaaaaag

SEQ ID NO: 8666 - DNA, 20 bp, Artificial Sequence
  Description of Artificial Sequence: Synthetic oligonucleotide
  Target: LAMA2; (-) strand; PAM type: NNAGAAW; PAM sequence: AAAGAAA
tgtctcaaaaaaaaaaaaaa

SEQ ID NO: 8667 - DNA, 20 bp, Artificial Sequence
  Description of Artificial Sequence: Synthetic oligonucleotide
  Target: LAMA2; (-) strand; PAM type: NNAGAAW; PAM sequence: ATAGAAA
gtaccatctttacaaaaaaa

SEQ ID NO: 8668 - DNA, 20 bp, Artificial Sequence
  Description of Artificial Sequence: Synthetic oligonucleotide
  Target: LAMA2; (-) strand; PAM type: NNAGAAW; PAM sequence: TAAGAAT
atagaagaaacaagaaatat

SEQ ID NO: 8669 - DNA, 20 bp, Artificial Sequence
  Description of Artificial Sequence: Synthetic oligonucleotide
  Target: LAMA2; (-) strand; PAM type: NNAGAAW; PAM sequence: CAAGAAA
aagaaaataaatagaagaaa

SEQ ID NO: 8670 - DNA, 20 bp, Artificial Sequence
  Description of Artificial Sequence: Synthetic oligonucleotide
  Target: LAMA2; (-) strand; PAM type: NNAGAAW; PAM sequence: GAAGAAA
taaagtaaagaaaataaata

SEQ ID NO: 8671 - DNA, 20 bp, Artificial Sequence
  Description of Artificial Sequence: Synthetic oligonucleotide
  Target: LAMA2; (-) strand; PAM type: NNAGAAW; PAM sequence: AAAGAAA
tataacaacgagtttaaagt

SEQ ID NO: 8672 - DNA, 20 bp, Artificial Sequence
  Description of Artificial Sequence: Synthetic oligonucleotide
  Target: LAMA2; (-) strand; PAM type: NNAGAAW; PAM sequence: ACAGAAA
tctaaatctttcactcacac

SEQ ID NO: 8673 - DNA, 20 bp, Artificial Sequence
  Description of Artificial Sequence: Synthetic oligonucleotide
  Target: LAMA2; (-) strand; PAM type: NNAGAAW; PAM sequence: GAAGAAT
aaacatcattactttgggaa

SEQ ID NO: 8674 - DNA, 20 bp, Artificial Sequence
  Description of Artificial Sequence: Synthetic oligonucleotide
  Target: LAMA2; (-) strand; PAM type: NNAGAAW; PAM sequence: TTAGAAT
ctaatttcacttgagatgat

SEQ ID NO: 8675 - DNA, 20 bp, Artificial Sequence
  Description of Artificial Sequence: Synthetic oligonucleotide
  Target: LAMA2; (-) strand; PAM type: NNAGAAW; PAM sequence: CTAGAAA
gtcacaaatcaaattttata

SEQ ID NO: 8676 - DNA, 20 bp, Artificial Sequence
  Description of Artificial Sequence: Synthetic oligonucleotide
  Target: LAMA2; (-) strand; PAM type: NNAGAAW; PAM sequence: GGAGAAA
cagtgaaaagtgatgggaga

SEQ ID NO: 8677 - DNA, 20 bp, Artificial Sequence
  Description of Artificial Sequence: Synthetic oligonucleotide
  Target: LAMA2; (-) strand; PAM type: NNAGAAW; PAM sequence: GAAGAAA
gattctcaaagagagaaata

SEQ ID NO: 8678 - DNA, 20 bp, Artificial Sequence
  Description of Artificial Sequence: Synthetic oligonucleotide
  Target: LAMA2; (-) strand; PAM type: NNAGAAW; PAM sequence: AGAGAAA
gtgcctcatgattctcaaag

SEQ ID NO: 8679 - DNA, 20 bp, Artificial Sequence
  Description of Artificial Sequence: Synthetic oligonucleotide
  Target: LAMA2; (-) strand; PAM type: NNAGAAW; PAM sequence: TGAGAAT
ataatgatgttgatgactag

SEQ ID NO: 8680 - DNA, 20 bp, Artificial Sequence
  Description of Artificial Sequence: Synthetic oligonucleotide
  Target: LAMA2; (-) strand; PAM type: NNAGAAW; PAM sequence: CAAGAAT
ggggagggctaaattgcaag

SEQ ID NO: 8681 - DNA, 20 bp, Artificial Sequence
  Description of Artificial Sequence: Synthetic oligonucleotide
  Target: LAMA2; (-) strand; PAM type: NNAGAAW; PAM sequence: TGAGAAT
catctaaaccagtccacttc

SEQ ID NO: 8682 - DNA, 20 bp, Artificial Sequence
  Description of Artificial Sequence: Synthetic oligonucleotide
  Target: LAMA2; (-) strand; PAM type: NNAGAAW; PAM sequence: TCAGAAT
ttccataaatccaaaggaat

SEQ ID NO: 8683 - DNA, 20 bp, Artificial Sequence
  Description of Artificial Sequence: Synthetic oligonucleotide
  Target: LAMA2; (-) strand; PAM type: NNAGAAW; PAM sequence: AAAGAAA
cgtcaaaaaaaaaaaaaaga

SEQ ID NO: 8684 - DNA, 20 bp, Artificial Sequence
  Description of Artificial Sequence: Synthetic oligonucleotide
  Target: LAMA2; (-) strand; PAM type: NNAGAAW; PAM sequence: AAAGAAA
gactccgtcaaaaaaaaaaa

SEQ ID NO: 8685 - DNA, 20 bp, Artificial Sequence
  Description of Artificial Sequence: Synthetic oligonucleotide
  Target: LAMA2; (-) strand; PAM type: NNAGAAW; PAM sequence: GGAGAAT
ctactctagaggctgaggaa

SEQ ID NO: 8686 - DNA, 20 bp, Artificial Sequence
  Description of Artificial Sequence: Synthetic oligonucleotide
  Target: LAMA2; (-) strand; PAM type: NNAGAAW; PAM sequence: GGAGAAA
gaggtcagaaagtgcttctt

SEQ ID NO: 8687 - DNA, 20 bp, Artificial Sequence
  Description of Artificial Sequence: Synthetic oligonucleotide
  Target: LAMA2; (-) strand; PAM type: NNAGAAW; PAM sequence: TCAGAAA
aattcaaactagtctagagg

SEQ ID NO: 8688 - DNA, 20 bp, Artificial Sequence
  Description of Artificial Sequence: Synthetic oligonucleotide
  Target: LAMA2; (-) strand; PAM type: NNAGAAW; PAM sequence: ACAGAAA
agaatagagccaatatgggt

SEQ ID NO: 8689 - DNA, 20 bp, Artificial Sequence
  Description of Artificial Sequence: Synthetic oligonucleotide
  Target: LAMA2; (-) strand; PAM type: NNAGAAW; PAM sequence: GAAGAAT
ggaaaagggtttgattaggg

SEQ ID NO: 8690 - DNA, 20 bp, Artificial Sequence
  Description of Artificial Sequence: Synthetic oligonucleotide
  Target: LAMA2; (-) strand; PAM type: NNAGAAW; PAM sequence: AGAGAAA
acaaatacttataaggccct

SEQ ID NO: 8691 - DNA, 20 bp, Artificial Sequence
  Description of Artificial Sequence: Synthetic oligonucleotide
  Target: LAMA2; (-) strand; PAM type: NNAGAAW; PAM sequence: TCAGAAA
tgcaaagacaggatcgatga

SEQ ID NO: 8692 - DNA, 20 bp, Artificial Sequence
  Description of Artificial Sequence: Synthetic oligonucleotide
  Target: LAMA2; (-) strand; PAM type: NNAGAAW; PAM sequence: TTAGAAA
ccttacttttagtcatcatt

SEQ ID NO: 8693 - DNA, 20 bp, Artificial Sequence
  Description of Artificial Sequence: Synthetic oligonucleotide
  Target: LAMA2; (-) strand; PAM type: NNAGAAW; PAM sequence: TTAGAAA
attcaacctacaaaaatagc

SEQ ID NO: 8694 - DNA, 20 bp, Artificial Sequence
  Description of Artificial Sequence: Synthetic oligonucleotide
  Target: LAMA2; (-) strand; PAM type: NNAGAAW; PAM sequence: TAAGAAA
ttggttccttctagacacag

SEQ ID NO: 8695 - DNA, 20 bp, Artificial Sequence
  Description of Artificial Sequence: Synthetic oligonucleotide
  Target: LAMA2; (-) strand; PAM type: NNAGAAW; PAM sequence: TAAGAAA
ccaacaaagatagactagat

SEQ ID NO: 8696 - DNA, 20 bp, Artificial Sequence
  Description of Artificial Sequence: Synthetic oligonucleotide
  Target: LAMA2; (-) strand; PAM type: NNAGAAW; PAM sequence: CTAGAAA
gattcctcagggatctagaa

SEQ ID NO: 8697 - DNA, 20 bp, Artificial Sequence
  Description of Artificial Sequence: Synthetic oligonucleotide
  Target: LAMA2; (-) strand; PAM type: NNAGAAW; PAM sequence: GGAGAAA
acaggggctggagaggatgt

SEQ ID NO: 8698 - DNA, 20 bp, Artificial Sequence
  Description of Artificial Sequence: Synthetic oligonucleotide
  Target: LAMA2; (-) strand; PAM type: NNAGAAW; PAM sequence: TTAGAAT
gagataccatctcacaccag

SEQ ID NO: 8699 - DNA, 20 bp, Artificial Sequence
  Description of Artificial Sequence: Synthetic oligonucleotide
  Target: LAMA2; (-) strand; PAM type: NNAGAAW; PAM sequence: AGAGAAA
gctcaccatcactggccatc

SEQ ID NO: 8700 - DNA, 20 bp, Artificial Sequence
  Description of Artificial Sequence: Synthetic oligonucleotide
  Target: LAMA2; (-) strand; PAM type: NNAGAAW; PAM sequence: CAAGAAA
aatgaactcaaacaaattta

SEQ ID NO: 8701 - DNA, 20 bp, Artificial Sequence
  Description of Artificial Sequence: Synthetic oligonucleotide
  Target: LAMA2; (-) strand; PAM type: NNAGAAW; PAM sequence: CCAGAAT
atctgacaaagggctaatat

SEQ ID NO: 8702 - DNA, 20 bp, Artificial Sequence
  Description of Artificial Sequence: Synthetic oligonucleotide
  Target: LAMA2; (-) strand; PAM type: NNAGAAW; PAM sequence: GGAGAAA
aacaggcaaccgacaaaatg

SEQ ID NO: 8703 - DNA, 20 bp, Artificial Sequence
  Description of Artificial Sequence: Synthetic oligonucleotide
  Target: LAMA2; (-) strand; PAM type: NNAGAAW; PAM sequence: AAAGAAA
taaagagcttctgcacagca

SEQ ID NO: 8704 - DNA, 20 bp, Artificial Sequence
  Description of Artificial Sequence: Synthetic oligonucleotide
  Target: LAMA2; (-) strand; PAM type: NNAGAAW; PAM sequence: GAAGAAA
ctaaaaccataaaaacacta

SEQ ID NO: 8705 - DNA, 20 bp, Artificial Sequence
  Description of Artificial Sequence: Synthetic oligonucleotide
  Target: LAMA2; (-) strand; PAM type: NNAGAAW; PAM sequence: AAAGAAT
aaatcaattcaagatggatt

SEQ ID NO: 8706 - DNA, 20 bp, Artificial Sequence
  Description of Artificial Sequence: Synthetic oligonucleotide
  Target: LAMA2; (-) strand; PAM type: NNAGAAW; PAM sequence: GTAGAAA
ggaaaactggctagccatat

SEQ ID NO: 8707 - DNA, 20 bp, Artificial Sequence
  Description of Artificial Sequence: Synthetic oligonucleotide
  Target: LAMA2; (-) strand; PAM type: NNAGAAW; PAM sequence: TGAGAAA
tatctgatctttgacaaacc

SEQ ID NO: 8708 - DNA, 20 bp, Artificial Sequence
  Description of Artificial Sequence: Synthetic oligonucleotide
  Target: LAMA2; (-) strand; PAM type: NNAGAAW; PAM sequence: TCAGAAA
aatggaacagaacagagccc

SEQ ID NO: 8709 - DNA, 20 bp, Artificial Sequence
  Description of Artificial Sequence: Synthetic oligonucleotide
  Target: LAMA2; (-) strand; PAM type: NNAGAAW; PAM sequence: GAAGAAT
cattccatgctcatgggtag

SEQ ID NO: 8710 - DNA, 20 bp, Artificial Sequence
  Description of Artificial Sequence: Synthetic oligonucleotide
  Target: LAMA2; (-) strand; PAM type: NNAGAAW; PAM sequence: TGAGAAA
tgtatttgtcattgcatcat

SEQ ID NO: 8711 - DNA, 20 bp, Artificial Sequence
  Description of Artificial Sequence: Synthetic oligonucleotide
  Target: LAMA2; (-) strand; PAM type: NNAGAAW; PAM sequence: CTAGAAT
atatcaaattaagggagcag

SEQ ID NO: 8712 - DNA, 20 bp, Artificial Sequence
  Description of Artificial Sequence: Synthetic oligonucleotide
  Target: LAMA2; (-) strand; PAM type: NNAGAAW; PAM sequence: TTAGAAT
ttatgagcagttgaatggta

SEQ ID NO: 8713 - DNA, 20 bp, Artificial Sequence
  Description of Artificial Sequence: Synthetic oligonucleotide
  Target: LAMA2; (-) strand; PAM type: NNAGAAW; PAM sequence: TCAGAAT
cattcatatggtagcatgtg

SEQ ID NO: 8714 - DNA, 20 bp, Artificial Sequence
  Description of Artificial Sequence: Synthetic oligonucleotide
  Target: LAMA2; (-) strand; PAM type: NNAGAAW; PAM sequence: GCAGAAT
tgactggtatatttcactta

SEQ ID NO: 8715 - DNA, 20 bp, Artificial Sequence
  Description of Artificial Sequence: Synthetic oligonucleotide
  Target: LAMA2; (-) strand; PAM type: NNAGAAW; PAM sequence: GTAGAAT
attctgactactctaggtaa

SEQ ID NO: 8716 - DNA, 20 bp, Artificial Sequence
  Description of Artificial Sequence: Synthetic oligonucleotide
  Target: LAMA2; (-) strand; PAM type: NNAGAAW; PAM sequence: CCAGAAT
accatcaacaccattcacat

SEQ ID NO: 8717 - DNA, 20 bp, Artificial Sequence
  Description of Artificial Sequence: Synthetic oligonucleotide
  Target: LAMA2; (-) strand; PAM type: NNAGAAW; PAM sequence: AAAGAAT
gtctatgtaaacgcagaact

SEQ ID NO: 8718 - DNA, 20 bp, Artificial Sequence
  Description of Artificial Sequence: Synthetic oligonucleotide
  Target: LAMA2; (-) strand; PAM type: NNAGAAW; PAM sequence: TGAGAAT
ataaaccatatattgctatg

SEQ ID NO: 8719 - DNA, 20 bp, Artificial Sequence
  Description of Artificial Sequence: Synthetic oligonucleotide
  Target: LAMA2; (-) strand; PAM type: NNAGAAW; PAM sequence: AAAGAAT
atgtgaaaaaaaaatgaatc

SEQ ID NO: 8720 - DNA, 20 bp, Artificial Sequence
  Description of Artificial Sequence: Synthetic oligonucleotide
  Target: LAMA2; (-) strand; PAM type: NNAGAAW; PAM sequence: AGAGAAT
cacaaagaatgtggcagaga

SEQ ID NO: 8721 - DNA, 20 bp, Artificial Sequence
  Description of Artificial Sequence: Synthetic oligonucleotide
  Target: LAMA2; (-) strand; PAM type: NNAGAAW; PAM sequence: AAAGAAT
tccagtggagacagaaccac

SEQ ID NO: 8722 - DNA, 20 bp, Artificial Sequence
  Description of Artificial Sequence: Synthetic oligonucleotide
  Target: LAMA2; (-) strand; PAM type: NNAGAAW; PAM sequence: ATAGAAT
ctcatgaatatttcatgaga

SEQ ID NO: 8723 - DNA, 20 bp, Artificial Sequence
  Description of Artificial Sequence: Synthetic oligonucleotide
  Target: LAMA2; (-) strand; PAM type: NNAGAAW; PAM sequence: TGAGAAT
acattctcatgaatatttca

SEQ ID NO: 8724 - DNA, 20 bp, Artificial Sequence
  Description of Artificial Sequence: Synthetic oligonucleotide
  Target: LAMA2; (-) strand; PAM type: NNAGAAW; PAM sequence: GTAGAAA
ggaaatgttagaagtaatat

SEQ ID NO: 8725 - DNA, 20 bp, Artificial Sequence
  Description of Artificial Sequence: Synthetic oligonucleotide
  Target: LAMA2; (-) strand; PAM type: NNAGAAW; PAM sequence: AAAGAAA
tagaatggaaaattttaggc

SEQ ID NO: 8726 - DNA, 20 bp, Artificial Sequence
  Description of Artificial Sequence: Synthetic oligonucleotide
  Target: LAMA2; (-) strand; PAM type: NNAGAAW; PAM sequence: ATAGAAT
aaaaggcacacaactttcaa

SEQ ID NO: 8727 - DNA, 20 bp, Artificial Sequence
  Description of Artificial Sequence: Synthetic oligonucleotide
  Target: LAMA2; (-) strand; PAM type: NNAGAAW; PAM sequence: AAAGAAA
catgtaggtgataaaaagaa

SEQ ID NO: 8728 - DNA, 20 bp, Artificial Sequence
  Description of Artificial Sequence: Synthetic oligonucleotide
  Target: LAMA2; (-) strand; PAM type: NNAGAAW; PAM sequence: AAAGAAA
cctccccatgtaggtgataa

SEQ ID NO: 8729 - DNA, 20 bp, Artificial Sequence
  Description of Artificial Sequence: Synthetic oligonucleotide
  Target: LAMA2; (-) strand; PAM type: NNAGAAW; PAM sequence: TCAGAAA
gtcaagaacagactcaaaac

SEQ ID NO: 8730 - DNA, 20 bp, Artificial Sequence
  Description of Artificial Sequence: Synthetic oligonucleotide
  Target: LAMA2; (-) strand; PAM type: NNAGAAW; PAM sequence: AAAGAAT
gaacaaatcagattgttatt

SEQ ID NO: 8731 - DNA, 20 bp, Artificial Sequence
  Description of Artificial Sequence: Synthetic oligonucleotide
  Target: LAMA2; (-) strand; PAM type: NNAGAAW; PAM sequence: GGAGAAA
ctttatttcaaaagggctga

SEQ ID NO: 8732 - DNA, 20 bp, Artificial Sequence
  Description of Artificial Sequence: Synthetic oligonucleotide
  Target: LAMA2; (-) strand; PAM type: NNAGAAW; PAM sequence: TTAGAAT
catcgatcattctcagtcct

SEQ ID NO: 8733 - DNA, 20 bp, Artificial Sequence
  Description of Artificial Sequence: Synthetic oligonucleotide
  Target: LAMA2; (-) strand; PAM type: NNAGAAW; PAM sequence: CAAGAAA
aatttaagtgcatttgttat

SEQ ID NO: 8734 - DNA, 20 bp, Artificial Sequence
  Description of Artificial Sequence: Synthetic oligonucleotide
  Target: LAMA2; (-) strand; PAM type: NNAGAAW; PAM sequence: TTAGAAA
acatttttgttatgtgtgtg

SEQ ID NO: 8735 - DNA, 20 bp, Artificial Sequence
  Description of Artificial Sequence: Synthetic oligonucleotide
  Target: LAMA2; (-) strand; PAM type: NNAGAAW; PAM sequence: ATAGAAA
tatttaaaaaagaatataaa

SEQ ID NO: 8736 - DNA, 20 bp, Artificial Sequence
  Description of Artificial Sequence: Synthetic oligonucleotide
  Target: LAMA2; (-) strand; PAM type: NNAGAAW; PAM sequence: AAAGAAT
ggtcaaaaccagtatttaaa

SEQ ID NO: 8737 - DNA, 20 bp, Artificial Sequence
  Description of Artificial Sequence: Synthetic oligonucleotide
  Target: LAMA2; (-) strand; PAM type: NNAGAAW; PAM sequence: ATAGAAA
aataaggatatccaaaggag

SEQ ID NO: 8738 - DNA, 20 bp, Artificial Sequence
  Description of Artificial Sequence: Synthetic oligonucleotide
  Target: LAMA2; (-) strand; PAM type: NNAGAAW; PAM sequence: GGAGAAT
aagaatgggatacttcagag

SEQ ID NO: 8739 - DNA, 20 bp, Artificial Sequence
  Description of Artificial Sequence: Synthetic oligonucleotide
  Target: LAMA2; (-) strand; PAM type: NNAGAAW; PAM sequence: AAAGAAT
gaggtgggtgaggactgtgg

SEQ ID NO: 8740 - DNA, 20 bp, Artificial Sequence
  Description of Artificial Sequence: Synthetic oligonucleotide
  Target: LAMA2; (-) strand; PAM type: NNAGAAW; PAM sequence: GCAGAAA
gaagactgatgggaccctca

SEQ ID NO: 8741 - DNA, 20 bp, Artificial Sequence
  Description of Artificial Sequence: Synthetic oligonucleotide
  Target: LAMA2; (-) strand; PAM type: NNAGAAW; PAM sequence: GAAGAAA
gctcactgatatagtaacgg

SEQ ID NO: 8742 - DNA, 20 bp, Artificial Sequence
  Description of Artificial Sequence: Synthetic oligonucleotide
  Target: LAMA2; (-) strand; PAM type: NNAGAAW; PAM sequence: ATAGAAT
taattgtgacaaaaaacgaa

SEQ ID NO: 8743 - DNA, 20 bp, Artificial Sequence
  Description of Artificial Sequence: Synthetic oligonucleotide
  Target: LAMA2; (-) strand; PAM type: NNAGAAW; PAM sequence: CCAGAAA
actttacagagaggaaagtt

SEQ ID NO: 8744 - DNA, 20 bp, Artificial Sequence
  Description of Artificial Sequence: Synthetic oligonucleotide
  Target: LAMA2; (-) strand; PAM type: NNAGAAW; PAM sequence: TAAGAAT
ccccaataggaattctatcg

SEQ ID NO: 8745 - DNA, 20 bp, Artificial Sequence
  Description of Artificial Sequence: Synthetic oligonucleotide
  Target: LAMA2; (-) strand; PAM type: NNAGAAW; PAM sequence: TCAGAAA
gagcattactattcactgat

SEQ ID NO: 8746 - DNA, 20 bp, Artificial Sequence
  Description of Artificial Sequence: Synthetic oligonucleotide
  Target: LAMA2; (-) strand; PAM type: NNAGAAW; PAM sequence: TTAGAAA
ttggctttgtttttgtgtta

SEQ ID NO: 8747 - DNA, 20 bp, Artificial Sequence
  Description of Artificial Sequence: Synthetic oligonucleotide
  Target: LAMA2; (-) strand; PAM type: NNAGAAW; PAM sequence: GAAGAAA
ctgttgtgtattccacttag

SEQ ID NO: 8748 - DNA, 20 bp, Artificial Sequence
  Description of Artificial Sequence: Synthetic oligonucleotide
  Target: LAMA2; (-) strand; PAM type: NNAGAAW; PAM sequence: GCAGAAT
gagtttctctacaggtacaa

SEQ ID NO: 8749 - DNA, 20 bp, Artificial Sequence
  Description of Artificial Sequence: Synthetic oligonucleotide
  Target: LAMA2; (-) strand; PAM type: NNAGAAW; PAM sequence: CAAGAAT
atatccagctacgattggta

SEQ ID NO: 8750 - DNA, 20 bp, Artificial Sequence
  Description of Artificial Sequence: Synthetic oligonucleotide
  Target: LAMA2; (-) strand; PAM type: NNAGAAW; PAM sequence: TTAGAAA
aggaaaatataagaaatact

SEQ ID NO: 8751 - DNA, 20 bp, Artificial Sequence
  Description of Artificial Sequence: Synthetic oligonucleotide
  Target: LAMA2; (-) strand; PAM type: NNAGAAW; PAM sequence: TAAGAAA
tgaaaagaaataggaaaata

SEQ ID NO: 8752 - DNA, 20 bp, Artificial Sequence
  Description of Artificial Sequence: Synthetic oligonucleotide
  Target: LAMA2; (-) strand; PAM type: NNAGAAW; PAM sequence: AAAGAAA
ggtgtaagcagtaggaatga

SEQ ID NO: 8753 - DNA, 20 bp, Artificial Sequence
  Description of Artificial Sequence: Synthetic oligonucleotide
  Target: LAMA2; (-) strand; PAM type: NNAGAAW; PAM sequence: GGAGAAT
atcctactatatgcccaaaa

SEQ ID NO: 8754 - DNA, 20 bp, Artificial Sequence
  Description of Artificial Sequence: Synthetic oligonucleotide
  Target: LAMA2; (-) strand; PAM type: NNAGAAW; PAM sequence: GTAGAAA
ggagggagaagagactttga

SEQ ID NO: 8755 - DNA, 20 bp, Artificial Sequence
  Description of Artificial Sequence: Synthetic oligonucleotide
  Target: LAMA2; (-) strand; PAM type: NNAGAAW; PAM sequence: GTAGAAT
aagattaatatgatagtgat

SEQ ID NO: 8756 - DNA, 20 bp, Artificial Sequence
  Description of Artificial Sequence: Synthetic oligonucleotide
  Target: LAMA2; (-) strand; PAM type: NNAGAAW; PAM sequence: TCAGAAA
tatataattagagttctatt

SEQ ID NO: 8757 - DNA, 20 bp, Artificial Sequence
  Description of Artificial Sequence: Synthetic oligonucleotide
  Target: LAMA2; (-) strand; PAM type: NNAGAAW; PAM sequence: TTAGAAA
ggaacagaaaagcgaacgtg

SEQ ID NO: 8758 - DNA, 20 bp, Artificial Sequence
  Description of Artificial Sequence: Synthetic oligonucleotide
  Target: LAMA2; (-) strand; PAM type: NNAGAAW; PAM sequence: ACAGAAA
agcatcttagaatcatagga

SEQ ID NO: 8759 - DNA, 20 bp, Artificial Sequence
  Description of Artificial Sequence: Synthetic oligonucleotide
  Target: LAMA2; (-) strand; PAM type: NNAGAAW; PAM sequence: TTAGAAT
caggactagcagagagcatc

SEQ ID NO: 8760 - DNA, 20 bp, Artificial Sequence
  Description of Artificial Sequence: Synthetic oligonucleotide
  Target: LAMA2; (-) strand; PAM type: NNAGAAW; PAM sequence: TAAGAAT
ctggcatttgaactgttact

SEQ ID NO: 8761 - DNA, 20 bp, Artificial Sequence
  Description of Artificial Sequence: Synthetic oligonucleotide
  Target: LAMA2; (-) strand; PAM type: NNAGAAW; PAM sequence: CCAGAAA
ccctttttttttgcagagat

SEQ ID NO: 8762 - DNA, 20 bp, Artificial Sequence
  Description of Artificial Sequence: Synthetic oligonucleotide
  Target: LAMA2; (-) strand; PAM type: NNAGAAW; PAM sequence: GAAGAAT
atgataaatttcttttgttt

SEQ ID NO: 8763 - DNA, 20 bp, Artificial Sequence
  Description of Artificial Sequence: Synthetic oligonucleotide
  Target: LAMA2; (-) strand; PAM type: NNAGAAW; PAM sequence: CTAGAAA
catttattgcctgaaaagtg

SEQ ID NO: 8764 - DNA, 20 bp, Artificial Sequence
  Description of Artificial Sequence: Synthetic oligonucleotide
  Target: LAMA2; (-) strand; PAM type: NNAGAAW; PAM sequence: AAAGAAT
tatttgctaggcattatgca

SEQ ID NO: 8765 - DNA, 20 bp, Artificial Sequence
  Description of Artificial Sequence: Synthetic oligonucleotide
  Target: LAMA2; (-) strand; PAM type: NNAGAAW; PAM sequence: GAAGAAA
tttgcctcgttgtgatttct

SEQ ID NO: 8766 - DNA, 20 bp, Artificial Sequence
  Description of Artificial Sequence: Synthetic oligonucleotide
  Target: LAMA2; (-) strand; PAM type: NNAGAAW; PAM sequence: TTAGAAA
gaaaagagtaaaagtggatc

SEQ ID NO: 8767 - DNA, 20 bp, Artificial Sequence
  Description of Artificial Sequence: Synthetic oligonucleotide
  Target: LAMA2; (-) strand; PAM type: NNAGAAW; PAM sequence: AGAGAAA
aaagctaaataaaattagtc

SEQ ID NO: 8768 - DNA, 20 bp, Artificial Sequence
  Description of Artificial Sequence: Synthetic oligonucleotide
  Target: LAMA2; (-) strand; PAM type: NNAGAAW; PAM sequence: AAAGAAA
gaagtcaaaactgaagccac

SEQ ID NO: 8769 - DNA, 20 bp, Artificial Sequence
  Description of Artificial Sequence: Synthetic oligonucleotide
  Target: LAMA2; (-) strand; PAM type: NNAGAAW; PAM sequence: AAAGAAT
aaaataatggagttaaatta

SEQ ID NO: 8770 - DNA, 20 bp, Artificial Sequence
  Description of Artificial Sequence: Synthetic oligonucleotide
  Target: LAMA2; (-) strand; PAM type: NNAGAAW; PAM sequence: GGAGAAA
ttggtgcttttaaagcagtt

SEQ ID NO: 8771 - DNA, 20 bp, Artificial Sequence
  Description of Artificial Sequence: Synthetic oligonucleotide
  Target: LAMA2; (-) strand; PAM type: NNAGAAW; PAM sequence: AAAGAAT
ttcaaggctaggataatgtc

SEQ ID NO: 8772 - DNA, 20 bp, Artificial Sequence
  Description of Artificial Sequence: Synthetic oligonucleotide
  Target: LAMA2; (-) strand; PAM type: NNAGAAW; PAM sequence: GTAGAAT
gcatattttaatattatttt

SEQ ID NO: 8773 - DNA, 20 bp, Artificial Sequence
  Description of Artificial Sequence: Synthetic oligonucleotide
  Target: LAMA2; (-) strand; PAM type: NNAGAAW; PAM sequence: GAAGAAT
tagcccttgcaatgtgtgat

SEQ ID NO: 8774 - DNA, 20 bp, Artificial Sequence
  Description of Artificial Sequence: Synthetic oligonucleotide
  Target: LAMA2; (-) strand; PAM type: NNAGAAW; PAM sequence: TGAGAAT
atgacccagagctccacttg

SEQ ID NO: 8775 - DNA, 20 bp, Artificial Sequence
  Description of Artificial Sequence: Synthetic oligonucleotide
  Target: LAMA2; (-) strand; PAM type: NNAGAAW; PAM sequence: GAAGAAA
gctctaatgcgtcactagtg

SEQ ID NO: 8776 - DNA, 20 bp, Artificial Sequence
  Description of Artificial Sequence: Synthetic oligonucleotide
  Target: LAMA2; (-) strand; PAM type: NNAGAAW; PAM sequence: ATAGAAA
cctctataaatctagaaaaa

SEQ ID NO: 8777 - DNA, 20 bp, Artificial Sequence
  Description of Artificial Sequence: Synthetic oligonucleotide
  Target: LAMA2; (-) strand; PAM type: NNAGAAW; PAM sequence: CTAGAAA
tcaattatacctctataaat

SEQ ID NO: 8778 - DNA, 20 bp, Artificial Sequence
  Description of Artificial Sequence: Synthetic oligonucleotide
  Target: LAMA2; (-) strand; PAM type: NNAGAAW; PAM sequence: CTAGAAT
tattaaatcgtcatgcatat

SEQ ID NO: 8779 - DNA, 20 bp, Artificial Sequence
  Description of Artificial Sequence: Synthetic oligonucleotide
  Target: LAMA2; (-) strand; PAM type: NNAGAAW; PAM sequence: ACAGAAT
aagttctagggatctaatgt

SEQ ID NO: 8780 - DNA, 20 bp, Artificial Sequence
  Description of Artificial Sequence: Synthetic oligonucleotide
  Target: LAMA2; (-) strand; PAM type: NNAGAAW; PAM sequence: GTAGAAT
tgaactcatagaagcagaga

SEQ ID NO: 8781 - DNA, 20 bp, Artificial Sequence
  Description of Artificial Sequence: Synthetic oligonucleotide
  Target: LAMA2; (-) strand; PAM type: NNAGAAW; PAM sequence: ATAGAAA
ctaggtgagataagccacac

SEQ ID NO: 8782 - DNA, 20 bp, Artificial Sequence
  Description of Artificial Sequence: Synthetic oligonucleotide
  Target: LAMA2; (-) strand; PAM type: NNAGAAW; PAM sequence: ACAGAAA
acacacacacacacacacac

SEQ ID NO: 8783 - DNA, 20 bp, Artificial Sequence
  Description of Artificial Sequence: Synthetic oligonucleotide
  Target: LAMA2; (-) strand; PAM type: NNAGAAW; PAM sequence: AAAGAAA
gttggtgaggaaacagagaa

SEQ ID NO: 8784 - DNA, 20 bp, Artificial Sequence
  Description of Artificial Sequence: Synthetic oligonucleotide
  Target: LAMA2; (-) strand; PAM type: NNAGAAW; PAM sequence: AGAGAAA
acacatgttggtgaggaaac

SEQ ID NO: 8785 - DNA, 20 bp, Artificial Sequence
  Description of Artificial Sequence: Synthetic oligonucleotide
  Target: LAMA2; (-) strand; PAM type: NNAGAAW; PAM sequence: CAAGAAA
gaattcatacaactcaatag

SEQ ID NO: 8786 - DNA, 20 bp, Artificial Sequence
  Description of Artificial Sequence: Synthetic oligonucleotide
  Target: LAMA2; (-) strand; PAM type: NNAGAAW; PAM sequence: AAAGAAA
aaagcttctaaaataaatat

SEQ ID NO: 8787 - DNA, 20 bp, Artificial Sequence
  Description of Artificial Sequence: Synthetic oligonucleotide
  Target: LAMA2; (-) strand; PAM type: NNAGAAW; PAM sequence: AAAGAAT
aaactagatatccacatgca

SEQ ID NO: 8788 - DNA, 20 bp, Artificial Sequence
  Description of Artificial Sequence: Synthetic oligonucleotide
  Target: LAMA2; (-) strand; PAM type: NNAGAAW; PAM sequence: CCAGAAA
gaccaatgaaacggaatagc

SEQ ID NO: 8789 - DNA, 20 bp, Artificial Sequence
  Description of Artificial Sequence: Synthetic oligonucleotide
  Target: LAMA2; (-) strand; PAM type: NNAGAAW; PAM sequence: TAAGAAA
caaaatatccaaagcaatct

SEQ ID NO: 8790 - DNA, 20 bp, Artificial Sequence
  Description of Artificial Sequence: Synthetic oligonucleotide
  Target: LAMA2; (-) strand; PAM type: NNAGAAW; PAM sequence: TAAGAAT
aacagttctaaaaaaaagaa

SEQ ID NO: 8791 - DNA, 20 bp, Artificial Sequence
  Description of Artificial Sequence: Synthetic oligonucleotide
  Target: LAMA2; (-) strand; PAM type: NNAGAAW; PAM sequence: AAAGAAT
agaaaaaacagttctaaaaa

SEQ ID NO: 8792 - DNA, 20 bp, Artificial Sequence
  Description of Artificial Sequence: Synthetic oligonucleotide
  Target: LAMA2; (-) strand; PAM type: NNAGAAW; PAM sequence: GTAGAAA
aagaaaaaaagaaagaaaat

SEQ ID NO: 8793 - DNA, 20 bp, Artificial Sequence
  Description of Artificial Sequence: Synthetic oligonucleotide
  Target: LAMA2; (-) strand; PAM type: NNAGAAW; PAM sequence: AAAGAAA
aaaaaaagaaagaaaaaaag

SEQ ID NO: 8794 - DNA, 20 bp, Artificial Sequence
  Description of Artificial Sequence: Synthetic oligonucleotide
  Target: LAMA2; (-) strand; PAM type: NNAGAAW; PAM sequence: AAAGAAA
cagaaaaaaaagaaagaaaa

SEQ ID NO: 8795 - DNA, 20 bp, Artificial Sequence
  Description of Artificial Sequence: Synthetic oligonucleotide
  Target: LAMA2; (-) strand; PAM type: NNAGAAW; PAM sequence: AAAGAAA
ttccacctcagaaaaaaaag

SEQ ID NO: 8796 - DNA, 20 bp, Artificial Sequence
  Description of Artificial Sequence: Synthetic oligonucleotide
  Target: LAMA2; (-) strand; PAM type: NNAGAAW; PAM sequence: AAAGAAA
gaaattccacctcagaaaaa

SEQ ID NO: 8797 - DNA, 20 bp, Artificial Sequence
  Description of Artificial Sequence: Synthetic oligonucleotide
  Target: LAMA2; (-) strand; PAM type: NNAGAAW; PAM sequence: TCAGAAA
gaaaagagggaaattccacc

SEQ ID NO: 8798 - DNA, 20 bp, Artificial Sequence
  Description of Artificial Sequence: Synthetic oligonucleotide
  Target: LAMA2; (-) strand; PAM type: NNAGAAW; PAM sequence: GGAGAAT
ctactcaggaggctgaggca

SEQ ID NO: 8799 - DNA, 20 bp, Artificial Sequence
  Description of Artificial Sequence: Synthetic oligonucleotide
  Target: LAMA2; (-) strand; PAM type: NNAGAAW; PAM sequence: TAAGAAA
tagcaaaaccccatctctac

SEQ ID NO: 8800 - DNA, 20 bp, Artificial Sequence
  Description of Artificial Sequence: Synthetic oligonucleotide
  Target: LAMA2; (-) strand; PAM type: NNAGAAW; PAM sequence: GTAGAAA
atggcaattttttagaaaat

SEQ ID NO: 8801 - DNA, 20 bp, Artificial Sequence
  Description of Artificial Sequence: Synthetic oligonucleotide
  Target: LAMA2; (-) strand; PAM type: NNAGAAW; PAM sequence: TTAGAAA
aacatttcaatggcaatttt

SEQ ID NO: 8802 - DNA, 20 bp, Artificial Sequence
  Description of Artificial Sequence: Synthetic oligonucleotide
  Target: LAMA2; (-) strand; PAM type: NNAGAAW; PAM sequence: AAAGAAA
aaaactataagacattgaag

SEQ ID NO: 8803 - DNA, 20 bp, Artificial Sequence
  Description of Artificial Sequence: Synthetic oligonucleotide
  Target: LAMA2; (-) strand; PAM type: NNAGAAW; PAM sequence: GAAGAAA
actgaaaactataagacatt

SEQ ID NO: 8804 - DNA, 20 bp, Artificial Sequence
  Description of Artificial Sequence: Synthetic oligonucleotide
  Target: LAMA2; (-) strand; PAM type: NNAGAAW; PAM sequence: TAAGAAA
aactcaaagtataataataa

SEQ ID NO: 8805 - DNA, 20 bp, Artificial Sequence
  Description of Artificial Sequence: Synthetic oligonucleotide
  Target: LAMA2; (-) strand; PAM type: NNAGAAW; PAM sequence: ACAGAAA
ctcagcaaaatatcacaagg

SEQ ID NO: 8806 - DNA, 20 bp, Artificial Sequence
  Description of Artificial Sequence: Synthetic oligonucleotide
  Target: LAMA2; (-) strand; PAM type: NNAGAAW; PAM sequence: AAAGAAA
ccatcaataatagactggat

SEQ ID NO: 8807 - DNA, 20 bp, Artificial Sequence
  Description of Artificial Sequence: Synthetic oligonucleotide
  Target: LAMA2; (-) strand; PAM type: NNAGAAW; PAM sequence: AAAGAAT
ttaacaacaaattatccaaa

SEQ ID NO: 8808 - DNA, 20 bp, Artificial Sequence
  Description of Artificial Sequence: Synthetic oligonucleotide
  Target: LAMA2; (-) strand; PAM type: NNAGAAW; PAM sequence: AAAGAAA
aagtgctattagaagctaat

SEQ ID NO: 8809 - DNA, 20 bp, Artificial Sequence
  Description of Artificial Sequence: Synthetic oligonucleotide
  Target: LAMA2; (-) strand; PAM type: NNAGAAW; PAM sequence: CAAGAAA
tcctagtcagagcaattcgg

SEQ ID NO: 8810 - DNA, 20 bp, Artificial Sequence
  Description of Artificial Sequence: Synthetic oligonucleotide
  Target: LAMA2; (-) strand; PAM type: NNAGAAW; PAM sequence: CAAGAAA
tgagaactcactcactatca

SEQ ID NO: 8811 - DNA, 20 bp, Artificial Sequence
  Description of Artificial Sequence: Synthetic oligonucleotide
  Target: LAMA2; (-) strand; PAM type: NNAGAAW; PAM sequence: ATAGAAA
aagctcccaacaaattaggt

SEQ ID NO: 8812 - DNA, 20 bp, Artificial Sequence
  Description of Artificial Sequence: Synthetic oligonucleotide
  Target: LAMA2; (-) strand; PAM type: NNAGAAW; PAM sequence: GTAGAAA
atcatattatcatctcagat

SEQ ID NO: 8813 - DNA, 20 bp, Artificial Sequence
  Description of Artificial Sequence: Synthetic oligonucleotide
  Target: LAMA2; (-) strand; PAM type: NNAGAAW; PAM sequence: AAAGAAT
gtataccactttcacagaat

SEQ ID NO: 8814 - DNA, 20 bp, Artificial Sequence
  Description of Artificial Sequence: Synthetic oligonucleotide
  Target: LAMA2; (-) strand; PAM type: NNAGAAW; PAM sequence: ACAGAAT
gactactgtataccactttc

SEQ ID NO: 8815 - DNA, 20 bp, Artificial Sequence
  Description of Artificial Sequence: Synthetic oligonucleotide
  Target: LAMA2; (-) strand; PAM type: NNAGAAW; PAM sequence: ATAGAAT
actttttcataggtatatac

SEQ ID NO: 8816 - DNA, 20 bp, Artificial Sequence
  Description of Artificial Sequence: Synthetic oligonucleotide
  Target: LAMA2; (-) strand; PAM type: NNAGAAW; PAM sequence: GGAGAAA
atcatctcacatcatcacaa

SEQ ID NO: 8817 - DNA, 20 bp, Artificial Sequence
  Description of Artificial Sequence: Synthetic oligonucleotide
  Target: LAMA2; (-) strand; PAM type: NNAGAAW; PAM sequence: TCAGAAA
gtcttccttctgatgcatca

SEQ ID NO: 8818 - DNA, 20 bp, Artificial Sequence
  Description of Artificial Sequence: Synthetic oligonucleotide
  Target: LAMA2; (-) strand; PAM type: NNAGAAW; PAM sequence: TCAGAAA
aaaatattaagtggaaaatt

SEQ ID NO: 8819 - DNA, 20 bp, Artificial Sequence
  Description of Artificial Sequence: Synthetic oligonucleotide
  Target: LAMA2; (-) strand; PAM type: NNAGAAW; PAM sequence: AAAGAAA
cagataaggacactacaaat

SEQ ID NO: 8820 - DNA, 20 bp, Artificial Sequence
  Description of Artificial Sequence: Synthetic oligonucleotide
  Target: LAMA2; (-) strand; PAM type: NNAGAAW; PAM sequence: AAAGAAA
agaaaaaaaaatctcccaat

SEQ ID NO: 8821 - DNA, 20 bp, Artificial Sequence
  Description of Artificial Sequence: Synthetic oligonucleotide
  Target: LAMA2; (-) strand; PAM type: NNAGAAW; PAM sequence: TCAGAAA
taatgagtaaggagaataaa

SEQ ID NO: 8822 - DNA, 20 bp, Artificial Sequence
  Description of Artificial Sequence: Synthetic oligonucleotide
  Target: LAMA2; (-) strand; PAM type: NNAGAAW; PAM sequence: GGAGAAT
gagtacctgataatgagtaa

SEQ ID NO: 8823 - DNA, 20 bp, Artificial Sequence
  Description of Artificial Sequence: Synthetic oligonucleotide
  Target: LAMA2; (-) strand; PAM type: NNAGAAW; PAM sequence: ATAGAAA
caagactgaatgatgaagaa

SEQ ID NO: 8824 - DNA, 20 bp, Artificial Sequence
  Description of Artificial Sequence: Synthetic oligonucleotide
  Target: LAMA2; (-) strand; PAM type: NNAGAAW; PAM sequence: GAAGAAA
atcgaccaagactgaatgat

SEQ ID NO: 8825 - DNA, 20 bp, Artificial Sequence
  Description of Artificial Sequence: Synthetic oligonucleotide
  Target: LAMA2; (-) strand; PAM type: NNAGAAW; PAM sequence: ATAGAAT
agttgataaaggctagacac

SEQ ID NO: 8826 - DNA, 20 bp, Artificial Sequence
  Description of Artificial Sequence: Synthetic oligonucleotide
  Target: LAMA2; (-) strand; PAM type: NNAGAAW; PAM sequence: ACAGAAA
attaaagaggagacattgca

SEQ ID NO: 8827 - DNA, 20 bp, Artificial Sequence
  Description of Artificial Sequence: Synthetic oligonucleotide
  Target: LAMA2; (-) strand; PAM type: NNAGAAW; PAM sequence: TAAGAAA
tgacaaaccttcagccaaac

SEQ ID NO: 8828 - DNA, 20 bp, Artificial Sequence
  Description of Artificial Sequence: Synthetic oligonucleotide
  Target: LAMA2; (-) strand; PAM type: NNAGAAW; PAM sequence: TAAGAAT
atagaaaagatcaatataag

SEQ ID NO: 8829 - DNA, 20 bp, Artificial Sequence
  Description of Artificial Sequence: Synthetic oligonucleotide
  Target: LAMA2; (-) strand; PAM type: NNAGAAW; PAM sequence: ATAGAAA
aaattgtgactagaaagaga

SEQ ID NO: 8830 - DNA, 20 bp, Artificial Sequence
  Description of Artificial Sequence: Synthetic oligonucleotide
  Target: LAMA2; (-) strand; PAM type: NNAGAAW; PAM sequence: AGAGAAT
aaatgaaattgtgactagaa

SEQ ID NO: 8831 - DNA, 20 bp, Artificial Sequence
  Description of Artificial Sequence: Synthetic oligonucleotide
  Target: LAMA2; (-) strand; PAM type: NNAGAAW; PAM sequence: CTAGAAA
ataaataaatgaaattgtga

SEQ ID NO: 8832 - DNA, 20 bp, Artificial Sequence
  Description of Artificial Sequence: Synthetic oligonucleotide
  Target: LAMA2; (-) strand; PAM type: NNAGAAW; PAM sequence: ATAGAAA
aaaaaaaaactaagacaaag

SEQ ID NO: 8833 - DNA, 20 bp, Artificial Sequence
  Description of Artificial Sequence: Synthetic oligonucleotide
  Target: LAMA2; (-) strand; PAM type: NNAGAAW; PAM sequence: AGAGAAA
gggtcaaagaagaaatccaa

SEQ ID NO: 8834 - DNA, 20 bp, Artificial Sequence
  Description of Artificial Sequence: Synthetic oligonucleotide
  Target: LAMA2; (-) strand; PAM type: NNAGAAW; PAM sequence: GAAGAAA
aaaatgaccaatgggtcaaa

SEQ ID NO: 8835 - DNA, 20 bp, Artificial Sequence
  Description of Artificial Sequence: Synthetic oligonucleotide
  Target: LAMA2; (-) strand; PAM type: NNAGAAW; PAM sequence: TCAGAAA
caggcagcctggctaaaaag

SEQ ID NO: 8836 - DNA, 20 bp, Artificial Sequence
  Description of Artificial Sequence: Synthetic oligonucleotide
  Target: LAMA2; (-) strand; PAM type: NNAGAAW; PAM sequence: TTAGAAT
tgtaagtggtgaagttgtaa

SEQ ID NO: 8837 - DNA, 20 bp, Artificial Sequence
  Description of Artificial Sequence: Synthetic oligonucleotide
  Target: LAMA2; (-) strand; PAM type: NNAGAAW; PAM sequence: AAAGAAT
taacaaaacataagtaagag

SEQ ID NO: 8838 - DNA, 20 bp, Artificial Sequence
  Description of Artificial Sequence: Synthetic oligonucleotide
  Target: LAMA2; (-) strand; PAM type: NNAGAAW; PAM sequence: AGAGAAA
aaattaacaaaacataagta

SEQ ID NO: 8839 - DNA, 20 bp, Artificial Sequence
  Description of Artificial Sequence: Synthetic oligonucleotide
  Target: LAMA2; (-) strand; PAM type: NNAGAAW; PAM sequence: ATAGAAT
taggtttgggagtcaagatg

SEQ ID NO: 8840 - DNA, 20 bp, Artificial Sequence
  Description of Artificial Sequence: Synthetic oligonucleotide
  Target: LAMA2; (-) strand; PAM type: NNAGAAW; PAM sequence: AGAGAAA
ctgaataactgttccaaata

SEQ ID NO: 8841 - DNA, 20 bp, Artificial Sequence
  Description of Artificial Sequence: Synthetic oligonucleotide
  Target: LAMA2; (-) strand; PAM type: NNAGAAW; PAM sequence: AGAGAAA
tgaacctgagttggaattga

SEQ ID NO: 8842 - DNA, 20 bp, Artificial Sequence
  Description of Artificial Sequence: Synthetic oligonucleotide
  Target: LAMA2; (-) strand; PAM type: NNAGAAW; PAM sequence: AAAGAAA
tcagatactttgttaagcaa

SEQ ID NO: 8843 - DNA, 20 bp, Artificial Sequence
  Description of Artificial Sequence: Synthetic oligonucleotide
  Target: LAMA2; (-) strand; PAM type: NNAGAAW; PAM sequence: AAAGAAA
gggagtgggcaagaaagaag

SEQ ID NO: 8844 - DNA, 20 bp, Artificial Sequence
  Description of Artificial Sequence: Synthetic oligonucleotide
  Target: LAMA2; (-) strand; PAM type: NNAGAAW; PAM sequence: GAAGAAA
agatgggagtgggcaagaaa

SEQ ID NO: 8845 - DNA, 20 bp, Artificial Sequence
  Description of Artificial Sequence: Synthetic oligonucleotide
  Target: LAMA2; (-) strand; PAM type: NNAGAAW; PAM sequence: CAAGAAA
agggatcagatgggagtggg

SEQ ID NO: 8846 - DNA, 20 bp, Artificial Sequence
  Description of Artificial Sequence: Synthetic oligonucleotide
  Target: LAMA2; (-) strand; PAM type: NNAGAAW; PAM sequence: CAAGAAT
tgaggcaaaatcatgatgag

SEQ ID NO: 8847 - DNA, 20 bp, Artificial Sequence
  Description of Artificial Sequence: Synthetic oligonucleotide
  Target: LAMA2; (-) strand; PAM type: NNAGAAW; PAM sequence: TCAGAAA
gtagaaggaacagaacacat

SEQ ID NO: 8848 - DNA, 20 bp, Artificial Sequence
  Description of Artificial Sequence: Synthetic oligonucleotide
  Target: LAMA2; (-) strand; PAM type: NNAGAAW; PAM sequence: ACAGAAA
agggaaagatggtaagaaaa

SEQ ID NO: 8849 - DNA, 20 bp, Artificial Sequence
  Description of Artificial Sequence: Synthetic oligonucleotide
  Target: LAMA2; (-) strand; PAM type: NNAGAAW; PAM sequence: TAAGAAA
cactaaagagggaaagatgg

SEQ ID NO: 8850 - DNA, 20 bp, Artificial Sequence
  Description of Artificial Sequence: Synthetic oligonucleotide
  Target: LAMA2; (-) strand; PAM type: NNAGAAW; PAM sequence: CTAGAAA
cgattctctcaccctggtct

SEQ ID NO: 8851 - DNA, 20 bp, Artificial Sequence
  Description of Artificial Sequence: Synthetic oligonucleotide
  Target: LAMA2; (-) strand; PAM type: NNAGAAW; PAM sequence: AAAGAAT
tattttttcaactattgacc

SEQ ID NO: 8852 - DNA, 20 bp, Artificial Sequence
  Description of Artificial Sequence: Synthetic oligonucleotide
  Target: LAMA2; (-) strand; PAM type: NNAGAAW; PAM sequence: ATAGAAT
atcaaactaagtgagggttc

SEQ ID NO: 8853 - DNA, 20 bp, Artificial Sequence
  Description of Artificial Sequence: Synthetic oligonucleotide
  Target: LAMA2; (-) strand; PAM type: NNAGAAW; PAM sequence: CCAGAAT
tctgagcacatctatttttt

SEQ ID NO: 8854 - DNA, 20 bp, Artificial Sequence
  Description of Artificial Sequence: Synthetic oligonucleotide
  Target: LAMA2; (-) strand; PAM type: NNAGAAW; PAM sequence: TGAGAAT
cgaaattactttggatcacg

SEQ ID NO: 8855 - DNA, 20 bp, Artificial Sequence
  Description of Artificial Sequence: Synthetic oligonucleotide
  Target: LAMA2; (-) strand; PAM type: NNAGAAW; PAM sequence: CGAGAAA
tgtagtcttcaatgggaaga

SEQ ID NO: 8856 - DNA, 20 bp, Artificial Sequence
  Description of Artificial Sequence: Synthetic oligonucleotide
  Target: LAMA2; (-) strand; PAM type: NNAGAAW; PAM sequence: GAAGAAA
tttccttttgagctcaactg

SEQ ID NO: 8857 - DNA, 20 bp, Artificial Sequence
  Description of Artificial Sequence: Synthetic oligonucleotide
  Target: LAMA2; (-) strand; PAM type: NNAGAAW; PAM sequence: TTAGAAT
agacccacatacaaatactt

SEQ ID NO: 8858 - DNA, 20 bp, Artificial Sequence
  Description of Artificial Sequence: Synthetic oligonucleotide
  Target: LAMA2; (-) strand; PAM type: NNAGAAW; PAM sequence: GAAGAAA
ttctacagaagcatcaacta

SEQ ID NO: 8859 - DNA, 20 bp, Artificial Sequence
  Description of Artificial Sequence: Synthetic oligonucleotide
  Target: LAMA2; (-) strand; PAM type: NNAGAAW; PAM sequence: TGAGAAA
aaagtcttatagaggacatc

SEQ ID NO: 8860 - DNA, 20 bp, Artificial Sequence
  Description of Artificial Sequence: Synthetic oligonucleotide
  Target: LAMA2; (-) strand; PAM type: NNAGAAW; PAM sequence: GAAGAAA
tagcttatgtgcaaaataaa

SEQ ID NO: 8861 - DNA, 20 bp, Artificial Sequence
  Description of Artificial Sequence: Synthetic oligonucleotide
  Target: LAMA2; (-) strand; PAM type: NNAGAAW; PAM sequence: ACAGAAA
gagacatagtttttgatcac

SEQ ID NO: 8862 - DNA, 20 bp, Artificial Sequence
  Description of Artificial Sequence: Synthetic oligonucleotide
  Target: LAMA2; (-) strand; PAM type: NNAGAAW; PAM sequence: AAAGAAA
acacacacacacaagaccac

SEQ ID NO: 8863 - DNA, 20 bp, Artificial Sequence
  Description of Artificial Sequence: Synthetic oligonucleotide
  Target: LAMA2; (-) strand; PAM type: NNAGAAW; PAM sequence: TGAGAAT
ccactcagaaggctgaggca

SEQ ID NO: 8864 - DNA, 20 bp, Artificial Sequence
  Description of Artificial Sequence: Synthetic oligonucleotide
  Target: LAMA2; (-) strand; PAM type: NNAGAAW; PAM sequence: GGAGAAT
catattgagaagccaagcca

SEQ ID NO: 8865 - DNA, 20 bp, Artificial Sequence
  Description of Artificial Sequence: Synthetic oligonucleotide
  Target: LAMA2; (-) strand; PAM type: NNAGAAW; PAM sequence: TGAGAAT
tctctctaaatctttattaa

SEQ ID NO: 8866 - DNA, 20 bp, Artificial Sequence
  Description of Artificial Sequence: Synthetic oligonucleotide
  Target: LAMA2; (-) strand; PAM type: NNAGAAW; PAM sequence: TGAGAAA
gtgaaccatagactattctt

SEQ ID NO: 8867 - DNA, 20 bp, Artificial Sequence
  Description of Artificial Sequence: Synthetic oligonucleotide
  Target: LAMA2; (-) strand; PAM type: NNAGAAW; PAM sequence: CAAGAAT
tctttaggattttagcaatg

SEQ ID NO: 8868 - DNA, 20 bp, Artificial Sequence
  Description of Artificial Sequence: Synthetic oligonucleotide
  Target: LAMA2; (-) strand; PAM type: NNAGAAW; PAM sequence: TTAGAAA
ccgccttaatcatcttttct

SEQ ID NO: 8869 - DNA, 20 bp, Artificial Sequence
  Description of Artificial Sequence: Synthetic oligonucleotide
  Target: LAMA2; (-) strand; PAM type: NNAGAAW; PAM sequence: GTAGAAT
ttgtgcttcctgtacagcct

SEQ ID NO: 8870 - DNA, 20 bp, Artificial Sequence
  Description of Artificial Sequence: Synthetic oligonucleotide
  Target: LAMA2; (-) strand; PAM type: NNAGAAW; PAM sequence: GGAGAAT
gggcctggtgggagatgatt

SEQ ID NO: 8871 - DNA, 20 bp, Artificial Sequence
  Description of Artificial Sequence: Synthetic oligonucleotide
  Target: LAMA2; (-) strand; PAM type: NNAGAAW; PAM sequence: TAAGAAA
cagatagaaggagaatgaaa

SEQ ID NO: 8872 - DNA, 20 bp, Artificial Sequence
  Description of Artificial Sequence: Synthetic oligonucleotide
  Target: LAMA2; (-) strand; PAM type: NNAGAAW; PAM sequence: GGAGAAT
ggattttatgacagatagaa

SEQ ID NO: 8873 - DNA, 20 bp, Artificial Sequence
  Description of Artificial Sequence: Synthetic oligonucleotide
  Target: LAMA2; (-) strand; PAM type: NNAGAAW; PAM sequence: TTAGAAT
tgtgaatcttgagggtcatc

SEQ ID NO: 8874 - DNA, 20 bp, Artificial Sequence
  Description of Artificial Sequence: Synthetic oligonucleotide
  Target: LAMA2; (-) strand; PAM type: NNAGAAW; PAM sequence: GAAGAAA
atcttccttttgagtagctt

SEQ ID NO: 8875 - DNA, 20 bp, Artificial Sequence
  Description of Artificial Sequence: Synthetic oligonucleotide
  Target: LAMA2; (-) strand; PAM type: NNAGAAW; PAM sequence: TCAGAAT
cttgattaagttgggtgccc

SEQ ID NO: 8876 - DNA, 20 bp, Artificial Sequence
  Description of Artificial Sequence: Synthetic oligonucleotide
  Target: LAMA2; (-) strand; PAM type: NNAGAAW; PAM sequence: AGAGAAA
atagaggtcacatacattga

SEQ ID NO: 8877 - DNA, 20 bp, Artificial Sequence
  Description of Artificial Sequence: Synthetic oligonucleotide
  Target: LAMA2; (-) strand; PAM type: NNAGAAW; PAM sequence: AAAGAAA
gctggtttatagataaagaa

SEQ ID NO: 8878 - DNA, 20 bp, Artificial Sequence
  Description of Artificial Sequence: Synthetic oligonucleotide
  Target: LAMA2; (-) strand; PAM type: NNAGAAW; PAM sequence: AAAGAAA
ctgggcgctggtttatagat

SEQ ID NO: 8879 - DNA, 20 bp, Artificial Sequence
  Description of Artificial Sequence: Synthetic oligonucleotide
  Target: LAMA2; (-) strand; PAM type: NNAGAAW; PAM sequence: TAAGAAA
tgttagcagagaatcatcaa

SEQ ID NO: 8880 - DNA, 20 bp, Artificial Sequence
  Description of Artificial Sequence: Synthetic oligonucleotide
  Target: LAMA2; (-) strand; PAM type: NNAGAAW; PAM sequence: AGAGAAT
cctacttatcaaatgttagc

SEQ ID NO: 8881 - DNA, 20 bp, Artificial Sequence
  Description of Artificial Sequence: Synthetic oligonucleotide
  Target: LAMA2; (-) strand; PAM type: NNAGAAW; PAM sequence: TTAGAAA
acagggtgatgtgtttgcaa

SEQ ID NO: 8882 - DNA, 20 bp, Artificial Sequence
  Description of Artificial Sequence: Synthetic oligonucleotide
  Target: LAMA2; (-) strand; PAM type: NNAGAAW; PAM sequence: TCAGAAA
aaacggaaaacgttaaagcc

SEQ ID NO: 8883 - DNA, 20 bp, Artificial Sequence
  Description of Artificial Sequence: Synthetic oligonucleotide
  Target: LAMA2; (-) strand; PAM type: NNAGAAW; PAM sequence: GTAGAAT
aagtaataaatgcttattag

SEQ ID NO: 8884 - DNA, 20 bp, Artificial Sequence
  Description of Artificial Sequence: Synthetic oligonucleotide
  Target: LAMA2; (-) strand; PAM type: NNAGAAW; PAM sequence: CAAGAAT
cctggctttctagttcatag

SEQ ID NO: 8885 - DNA, 20 bp, Artificial Sequence
  Description of Artificial Sequence: Synthetic oligonucleotide
  Target: LAMA2; (-) strand; PAM type: NNAGAAW; PAM sequence: GGAGAAA
taatatctttgttgatgaag

SEQ ID NO: 8886 - DNA, 20 bp, Artificial Sequence
  Description of Artificial Sequence: Synthetic oligonucleotide
  Target: LAMA2; (-) strand; PAM type: NNAGAAW; PAM sequence: AAAGAAA
tctgaggctgggtaatttat

SEQ ID NO: 8887 - DNA, 20 bp, Artificial Sequence
  Description of Artificial Sequence: Synthetic oligonucleotide
  Target: LAMA2; (-) strand; PAM type: NNAGAAW; PAM sequence: TAAGAAA
gccattttttgcactgcttt

SEQ ID NO: 8888 - DNA, 20 bp, Artificial Sequence
  Description of Artificial Sequence: Synthetic oligonucleotide
  Target: LAMA2; (-) strand; PAM type: NNAGAAW; PAM sequence: CTAGAAA
gggggatgtgcactaatgga

SEQ ID NO: 8889 - DNA, 20 bp, Artificial Sequence
  Description of Artificial Sequence: Synthetic oligonucleotide
  Target: LAMA2; (-) strand; PAM type: NNAGAAW; PAM sequence: TGAGAAA
catgaggatgagcgtgtcct

SEQ ID NO: 8890 - DNA, 20 bp, Artificial Sequence
  Description of Artificial Sequence: Synthetic oligonucleotide
  Target: LAMA2; (-) strand; PAM type: NNAGAAW; PAM sequence: GAAGAAT
tggcccttggttaaagaaga

SEQ ID NO: 8891 - DNA, 20 bp, Artificial Sequence
  Description of Artificial Sequence: Synthetic oligonucleotide
  Target: LAMA2; (-) strand; PAM type: NNAGAAW; PAM sequence: AAAGAAT
gacttgtgaaataaaaacag

SEQ ID NO: 8892 - DNA, 20 bp, Artificial Sequence
  Description of Artificial Sequence: Synthetic oligonucleotide
  Target: LAMA2; (-) strand; PAM type: NNAGAAW; PAM sequence: ACAGAAA
aaaagacttgtgaaataaaa

SEQ ID NO: 8893 - DNA, 20 bp, Artificial Sequence
  Description of Artificial Sequence: Synthetic oligonucleotide
  Target: LAMA2; (-) strand; PAM type: NNAGAAW; PAM sequence: TTAGAAT
tagtatttacatatatttgt

SEQ ID NO: 8894 - DNA, 20 bp, Artificial Sequence
  Description of Artificial Sequence: Synthetic oligonucleotide
  Target: LAMA2; (-) strand; PAM type: NNAGAAW; PAM sequence: GGAGAAA
agtcctagtagaatttagat

SEQ ID NO: 8895 - DNA, 20 bp, Artificial Sequence
  Description of Artificial Sequence: Synthetic oligonucleotide
  Target: LAMA2; (-) strand; PAM type: NNAGAAW; PAM sequence: GTAGAAT
ccataagacttctagtccta

SEQ ID NO: 8896 - DNA, 20 bp, Artificial Sequence
  Description of Artificial Sequence: Synthetic oligonucleotide
  Target: LAMA2; (-) strand; PAM type: NNAGAAW; PAM sequence: AGAGAAA
ggtcaaacagctaagaaggg

SEQ ID NO: 8897 - DNA, 20 bp, Artificial Sequence
  Description of Artificial Sequence: Synthetic oligonucleotide
  Target: LAMA2; (-) strand; PAM type: NNAGAAW; PAM sequence: CAAGAAA
tattattcccaatttacaga

SEQ ID NO: 8898 - DNA, 20 bp, Artificial Sequence
  Description of Artificial Sequence: Synthetic oligonucleotide
  Target: LAMA2; (-) strand; PAM type: NNAGAAW; PAM sequence: AAAGAAT
atacaatcacattattgttg

SEQ ID NO: 8899 - DNA, 20 bp, Artificial Sequence
  Description of Artificial Sequence: Synthetic oligonucleotide
  Target: LAMA2; (-) strand; PAM type: NNAGAAW; PAM sequence: ATAGAAA
gctccatgaaaatgaccatc

SEQ ID NO: 8900 - DNA, 20 bp, Artificial Sequence
  Description of Artificial Sequence: Synthetic oligonucleotide
  Target: LAMA2; (-) strand; PAM type: NNAGAAW; PAM sequence: AAAGAAA
atcctcttgaaaaatcttac

SEQ ID NO: 8901 - DNA, 20 bp, Artificial Sequence
  Description of Artificial Sequence: Synthetic oligonucleotide
  Target: LAMA2; (-) strand; PAM type: NNAGAAW; PAM sequence: GTAGAAT
acactagactgcaaatatca

SEQ ID NO: 8902 - DNA, 20 bp, Artificial Sequence
  Description of Artificial Sequence: Synthetic oligonucleotide
  Target: LAMA2; (-) strand; PAM type: NNAGAAW; PAM sequence: GGAGAAT
gaagcttttgcctctttaaa

SEQ ID NO: 8903 - DNA, 20 bp, Artificial Sequence
  Description of Artificial Sequence: Synthetic oligonucleotide
  Target: LAMA2; (-) strand; PAM type: NNAGAAW; PAM sequence: GTAGAAA
aaaataaataaataaaaagg

SEQ ID NO: 8904 - DNA, 20 bp, Artificial Sequence
  Description of Artificial Sequence: Synthetic oligonucleotide
  Target: LAMA2; (-) strand; PAM type: NNAGAAW; PAM sequence: ATAGAAA
gcttggtttacttatgaaat

SEQ ID NO: 8905 - DNA, 20 bp, Artificial Sequence
  Description of Artificial Sequence: Synthetic oligonucleotide
  Target: LAMA2; (-) strand; PAM type: NNAGAAW; PAM sequence: TCAGAAA
agtattttttcttttttaat

SEQ ID NO: 8906 - DNA, 20 bp, Artificial Sequence
  Description of Artificial Sequence: Synthetic oligonucleotide
  Target: LAMA2; (-) strand; PAM type: NNAGAAW; PAM sequence: GAAGAAA
aatatctaggacagtacatg

SEQ ID NO: 8907 - DNA, 20 bp, Artificial Sequence
  Description of Artificial Sequence: Synthetic oligonucleotide
  Target: LAMA2; (-) strand; PAM type: NNAGAAW; PAM sequence: AGAGAAA
agccattttaggcaccttac

SEQ ID NO: 8908 - DNA, 20 bp, Artificial Sequence
  Description of Artificial Sequence: Synthetic oligonucleotide
  Target: LAMA2; (-) strand; PAM type: NNAGAAW; PAM sequence: GCAGAAA
taaagctaatttttttgtga

SEQ ID NO: 8909 - DNA, 20 bp, Artificial Sequence
  Description of Artificial Sequence: Synthetic oligonucleotide
  Target: LAMA2; (-) strand; PAM type: NNAGAAW; PAM sequence: ATAGAAT
cacacagcccaccaattatt

SEQ ID NO: 8910 - DNA, 20 bp, Artificial Sequence
  Description of Artificial Sequence: Synthetic oligonucleotide
  Target: LAMA2; (-) strand; PAM type: NNAGAAW; PAM sequence: AAAGAAA
tcagtttggaagagaacgat

SEQ ID NO: 8911 - DNA, 20 bp, Artificial Sequence
  Description of Artificial Sequence: Synthetic oligonucleotide
  Target: LAMA2; (-) strand; PAM type: NNAGAAW; PAM sequence: TGAGAAA
tcattttgactagaaacacc

SEQ ID NO: 8912 - DNA, 20 bp, Artificial Sequence
  Description of Artificial Sequence: Synthetic oligonucleotide
  Target: LAMA2; (-) strand; PAM type: NNAGAAW; PAM sequence: CTAGAAA
ttgtaggtttgtcattttga

SEQ ID NO: 8913 - DNA, 20 bp, Artificial Sequence
  Description of Artificial Sequence: Synthetic oligonucleotide
  Target: LAMA2; (-) strand; PAM type: NNAGAAW; PAM sequence: TAAGAAA
tccctaaactttttgaagat

SEQ ID NO: 8914 - DNA, 20 bp, Artificial Sequence
  Description of Artificial Sequence: Synthetic oligonucleotide
  Target: LAMA2; (-) strand; PAM type: NNAGAAW; PAM sequence: CAAGAAT
gctaaaatgatagccgtctt

SEQ ID NO: 8915 - DNA, 20 bp, Artificial Sequence
  Description of Artificial Sequence: Synthetic oligonucleotide
  Target: LAMA2; (-) strand; PAM type: NNAGAAW; PAM sequence: AAAGAAT
atctcattttcctaagacac

SEQ ID NO: 8916 - DNA, 20 bp, Artificial Sequence
  Description of Artificial Sequence: Synthetic oligonucleotide
  Target: LAMA2; (-) strand; PAM type: NNAGAAW; PAM sequence: ATAGAAT
tttttaaagagctataaaaa

SEQ ID NO: 8917 - DNA, 20 bp, Artificial Sequence
  Description of Artificial Sequence: Synthetic oligonucleotide
  Target: LAMA2; (-) strand; PAM type: NNAGAAW; PAM sequence: TGAGAAA
aaaaacaactgccatgtttt

SEQ ID NO: 8918 - DNA, 20 bp, Artificial Sequence
  Description of Artificial Sequence: Synthetic oligonucleotide
  Target: LAMA2; (-) strand; PAM type: NNAGAAW; PAM sequence: GTAGAAA
atatgacaggtcagcacaga

SEQ ID NO: 8919 - DNA, 20 bp, Artificial Sequence
  Description of Artificial Sequence: Synthetic oligonucleotide
  Target: LAMA2; (-) strand; PAM type: NNAGAAW; PAM sequence: GAAGAAT
cttatctgttgtactgtact

SEQ ID NO: 8920 - DNA, 20 bp, Artificial Sequence
  Description of Artificial Sequence: Synthetic oligonucleotide
  Target: LAMA2; (-) strand; PAM type: NNAGAAW; PAM sequence: GTAGAAT
atgcaatctagtgtttcatt

SEQ ID NO: 8921 - DNA, 20 bp, Artificial Sequence
  Description of Artificial Sequence: Synthetic oligonucleotide
  Target: LAMA2; (-) strand; PAM type: NNAGAAW; PAM sequence: AAAGAAA
tggggagttcttagagtaac

SEQ ID NO: 8922 - DNA, 20 bp, Artificial Sequence
  Description of Artificial Sequence: Synthetic oligonucleotide
  Target: LAMA2; (-) strand; PAM type: NNAGAAW; PAM sequence: AAAGAAA
cattcttcttctgacatacc

SEQ ID NO: 8923 - DNA, 20 bp, Artificial Sequence
  Description of Artificial Sequence: Synthetic oligonucleotide
  Target: LAMA2; (-) strand; PAM type: NNAGAAW; PAM sequence: TCAGAAA
ttcctatctacaagtgtaat

SEQ ID NO: 8924 - DNA, 20 bp, Artificial Sequence
  Description of Artificial Sequence: Synthetic oligonucleotide
  Target: LAMA2; (-) strand; PAM type: NNAGAAW; PAM sequence: AAAGAAA
aatggtaaaagtaatagaag

SEQ ID NO: 8925 - DNA, 20 bp, Artificial Sequence
  Description of Artificial Sequence: Synthetic oligonucleotide
  Target: LAMA2; (-) strand; PAM type: NNAGAAW; PAM sequence: GAAGAAA
ctgcaatggtaaaagtaata

SEQ ID NO: 8926 - DNA, 20 bp, Artificial Sequence
  Description of Artificial Sequence: Synthetic oligonucleotide
  Target: LAMA2; (-) strand; PAM type: NNAGAAW; PAM sequence: CTAGAAA
gctcctcagatttgacacta

SEQ ID NO: 8927 - DNA, 20 bp, Artificial Sequence
  Description of Artificial Sequence: Synthetic oligonucleotide
  Target: LAMA2; (-) strand; PAM type: NNAGAAW; PAM sequence: TAAGAAT
tagcgaaatttatgataatg

SEQ ID NO: 8928 - DNA, 20 bp, Artificial Sequence
  Description of Artificial Sequence: Synthetic oligonucleotide
  Target: LAMA2; (-) strand; PAM type: NNAGAAW; PAM sequence: CAAGAAA
cttgagtaaaattgatggcc

SEQ ID NO: 8929 - DNA, 20 bp, Artificial Sequence
  Description of Artificial Sequence: Synthetic oligonucleotide
  Target: LAMA2; (-) strand; PAM type: NNAGAAW; PAM sequence: GAAGAAT
aaaaattccctaaaggcaga

SEQ ID NO: 8930 - DNA, 20 bp, Artificial Sequence
  Description of Artificial Sequence: Synthetic oligonucleotide
  Target: LAMA2; (-) strand; PAM type: NNAGAAW; PAM sequence: ACAGAAT
aatttactaccaatctacaa

SEQ ID NO: 8931 - DNA, 20 bp, Artificial Sequence
  Description of Artificial Sequence: Synthetic oligonucleotide
  Target: LAMA2; (-) strand; PAM type: NNAGAAW; PAM sequence: GGAGAAA
aagaaagcaataattgcgaa

SEQ ID NO: 8932 - DNA, 20 bp, Artificial Sequence
  Description of Artificial Sequence: Synthetic oligonucleotide
  Target: LAMA2; (-) strand; PAM type: NNAGAAW; PAM sequence: GAAGAAA
gaacaataggaaaagcctat

SEQ ID NO: 8933 - DNA, 20 bp, Artificial Sequence
  Description of Artificial Sequence: Synthetic oligonucleotide
  Target: LAMA2; (-) strand; PAM type: NNAGAAW; PAM sequence: AAAGAAT
agtataacctttaatttatg

SEQ ID NO: 8934 - DNA, 20 bp, Artificial Sequence
  Description of Artificial Sequence: Synthetic oligonucleotide
  Target: LAMA2; (-) strand; PAM type: NNAGAAW; PAM sequence: ACAGAAT
atcttctggatggacccaaa

SEQ ID NO: 8935 - DNA, 20 bp, Artificial Sequence
  Description of Artificial Sequence: Synthetic oligonucleotide
  Target: LAMA2; (-) strand; PAM type: NNAGAAW; PAM sequence: TGAGAAA
tgaaacacagaagagtgtcc

SEQ ID NO: 8936 - DNA, 20 bp, Artificial Sequence
  Description of Artificial Sequence: Synthetic oligonucleotide
  Target: LAMA2; (-) strand; PAM type: NNAGAAW; PAM sequence: ACAGAAT
ttcttaatttgataatattg

SEQ ID NO: 8937 - DNA, 20 bp, Artificial Sequence
  Description of Artificial Sequence: Synthetic oligonucleotide
  Target: LAMA2; (-) strand; PAM type: NNAGAAW; PAM sequence: AAAGAAT
aataaacactcaataattta

SEQ ID NO: 8938 - DNA, 20 bp, Artificial Sequence
  Description of Artificial Sequence: Synthetic oligonucleotide
  Target: LAMA2; (-) strand; PAM type: NNAGAAW; PAM sequence: ATAGAAT
acacagactacaaaataaaa

SEQ ID NO: 8939 - DNA, 20 bp, Artificial Sequence
  Description of Artificial Sequence: Synthetic oligonucleotide
  Target: LAMA2; (-) strand; PAM type: NNAGAAW; PAM sequence: AAAGAAT
atagaatgatgtaaatgcat

SEQ ID NO: 8940 - DNA, 20 bp, Artificial Sequence
  Description of Artificial Sequence: Synthetic oligonucleotide
  Target: LAMA2; (-) strand; PAM type: NNAGAAW; PAM sequence: ATAGAAT
aaagaacacacttgaaattg

SEQ ID NO: 8941 - DNA, 20 bp, Artificial Sequence
  Description of Artificial Sequence: Synthetic oligonucleotide
  Target: LAMA2; (-) strand; PAM type: NNAGAAW; PAM sequence: AAAGAAT
aaaaattaaagaaaaaagaa

SEQ ID NO: 8942 - DNA, 20 bp, Artificial Sequence
  Description of Artificial Sequence: Synthetic oligonucleotide
  Target: LAMA2; (-) strand; PAM type: NNAGAAW; PAM sequence: AAAGAAA
gcctggaaaaattaaagaaa

SEQ ID NO: 8943 - DNA, 20 bp, Artificial Sequence
  Description of Artificial Sequence: Synthetic oligonucleotide
  Target: LAMA2; (-) strand; PAM type: NNAGAAW; PAM sequence: AAAGAAA
tatttcagcctggaaaaatt

SEQ ID NO: 8944 - DNA, 20 bp, Artificial Sequence
  Description of Artificial Sequence: Synthetic oligonucleotide
  Target: LAMA2; (-) strand; PAM type: NNAGAAW; PAM sequence: AGAGAAA
agaaggcctaatggcaatct

SEQ ID NO: 8945 - DNA, 20 bp, Artificial Sequence
  Description of Artificial Sequence: Synthetic oligonucleotide
  Target: LAMA2; (-) strand; PAM type: NNAGAAW; PAM sequence: ATAGAAA
tcagtgaaacactggccatc

SEQ ID NO: 8946 - DNA, 20 bp, Artificial Sequence
  Description of Artificial Sequence: Synthetic oligonucleotide
  Target: LAMA2; (-) strand; PAM type: NNAGAAW; PAM sequence: GAAGAAT
catgaagtagtacagcctgg

SEQ ID NO: 8947 - DNA, 20 bp, Artificial Sequence
  Description of Artificial Sequence: Synthetic oligonucleotide
  Target: LAMA2; (-) strand; PAM type: NNAGAAW; PAM sequence: TGAGAAA
cttgatagtcaaatacatag

SEQ ID NO: 8948 - DNA, 20 bp, Artificial Sequence
  Description of Artificial Sequence: Synthetic oligonucleotide
  Target: LAMA2; (-) strand; PAM type: NNAGAAW; PAM sequence: TTAGAAA
tttaaagagcaataaatgga

SEQ ID NO: 8949 - DNA, 20 bp, Artificial Sequence
  Description of Artificial Sequence: Synthetic oligonucleotide
  Target: LAMA2; (-) strand; PAM type: NNAGAAW; PAM sequence: TAAGAAA
gaatatgcaatattttataa

SEQ ID NO: 8950 - DNA, 20 bp, Artificial Sequence
  Description of Artificial Sequence: Synthetic oligonucleotide
  Target: LAMA2; (-) strand; PAM type: NNAGAAW; PAM sequence: TAAGAAA
tcataaataattgtaatgat

SEQ ID NO: 8951 - DNA, 20 bp, Artificial Sequence
  Description of Artificial Sequence: Synthetic oligonucleotide
  Target: LAMA2; (-) strand; PAM type: NNAGAAW; PAM sequence: CTAGAAA
ttactgcctttaaaataaat

SEQ ID NO: 8952 - DNA, 20 bp, Artificial Sequence
  Description of Artificial Sequence: Synthetic oligonucleotide
  Target: LAMA2; (-) strand; PAM type: NNAGAAW; PAM sequence: TCAGAAA
gtgcagaataaatataaata

SEQ ID NO: 8953 - DNA, 20 bp, Artificial Sequence
  Description of Artificial Sequence: Synthetic oligonucleotide
  Target: LAMA2; (-) strand; PAM type: NNAGAAW; PAM sequence: GCAGAAT
atgatgatgagggtgaaggt

SEQ ID NO: 8954 - DNA, 20 bp, Artificial Sequence
  Description of Artificial Sequence: Synthetic oligonucleotide
  Target: LAMA2; (-) strand; PAM type: NNAGAAW; PAM sequence: GAAGAAT
ctgagagtgaaggagggatg

SEQ ID NO: 8955 - DNA, 20 bp, Artificial Sequence
  Description of Artificial Sequence: Synthetic oligonucleotide
  Target: LAMA2; (-) strand; PAM type: NNAGAAW; PAM sequence: GAAGAAA
aaatccgggggtaaatgcta

SEQ ID NO: 8956 - DNA, 20 bp, Artificial Sequence
  Description of Artificial Sequence: Synthetic oligonucleotide
  Target: LAMA2; (-) strand; PAM type: NNAGAAW; PAM sequence: GCAGAAA
gtatatgttgcaggatgtag

SEQ ID NO: 8957 - DNA, 20 bp, Artificial Sequence
  Description of Artificial Sequence: Synthetic oligonucleotide
  Target: LAMA2; (-) strand; PAM type: NNAGAAW; PAM sequence: AAAGAAA
gccaggcaacgatgtacaaa

SEQ ID NO: 8958 - DNA, 20 bp, Artificial Sequence
  Description of Artificial Sequence: Synthetic oligonucleotide
  Target: LAMA2; (-) strand; PAM type: NNAGAAW; PAM sequence: TCAGAAA
aagggagtttaataattctg

SEQ ID NO: 8959 - DNA, 20 bp, Artificial Sequence
  Description of Artificial Sequence: Synthetic oligonucleotide
  Target: LAMA2; (-) strand; PAM type: NNAGAAW; PAM sequence: AGAGAAA
ggaagctacaaaaatgtggg

SEQ ID NO: 8960 - DNA, 20 bp, Artificial Sequence
  Description of Artificial Sequence: Synthetic oligonucleotide
  Target: LAMA2; (-) strand; PAM type: NNAGAAW; PAM sequence: CTAGAAT
tgagaagagatgctttctac

SEQ ID NO: 8961 - DNA, 20 bp, Artificial Sequence
  Description of Artificial Sequence: Synthetic oligonucleotide
  Target: LAMA2; (-) strand; PAM type: NNAGAAW; PAM sequence: GAAGAAT
gttcatagagtaaggtgagt

SEQ ID NO: 8962 - DNA, 20 bp, Artificial Sequence
  Description of Artificial Sequence: Synthetic oligonucleotide
  Target: LAMA2; (-) strand; PAM type: NNAGAAW; PAM sequence: GAAGAAA
aaatcttagcagttttctaa

SEQ ID NO: 8963 - DNA, 20 bp, Artificial Sequence
  Description of Artificial Sequence: Synthetic oligonucleotide
  Target: LAMA2; (-) strand; PAM type: NNAGAAW; PAM sequence: GAAGAAA
tcaacatgaaaagagaaagg

SEQ ID NO: 8964 - DNA, 20 bp, Artificial Sequence
  Description of Artificial Sequence: Synthetic oligonucleotide
  Target: LAMA2; (-) strand; PAM type: NNAGAAW; PAM sequence: AGAGAAA
tagtgtatttcaacatgaaa

SEQ ID NO: 8965 - DNA, 20 bp, Artificial Sequence
  Description of Artificial Sequence: Synthetic oligonucleotide
  Target: LAMA2; (-) strand; PAM type: NNAGAAW; PAM sequence: TTAGAAA
attttttataatttattaat

SEQ ID NO: 8966 - DNA, 20 bp, Artificial Sequence
  Description of Artificial Sequence: Synthetic oligonucleotide
  Target: LAMA2; (-) strand; PAM type: NNAGAAW; PAM sequence: TAAGAAA
aaaaatcataaaactgttca

SEQ ID NO: 8967 - DNA, 20 bp, Artificial Sequence
  Description of Artificial Sequence: Synthetic oligonucleotide
  Target: LAMA2; (-) strand; PAM type: NNAGAAW; PAM sequence: GGAGAAT
ggcggggtggggccaaggcc

SEQ ID NO: 8968 - DNA, 20 bp, Artificial Sequence
  Description of Artificial Sequence: Synthetic oligonucleotide
  Target: LAMA2; (-) strand; PAM type: NNAGAAW; PAM sequence: AGAGAAA
agaaaaggaaataaaagaaa

SEQ ID NO: 8969 - DNA, 20 bp, Artificial Sequence
  Description of Artificial Sequence: Synthetic oligonucleotide
  Target: LAMA2; (-) strand; PAM type: NNAGAAW; PAM sequence: AAAGAAA
aatataaagaaaaggaaata

SEQ ID NO: 8970 - DNA, 20 bp, Artificial Sequence
  Description of Artificial Sequence: Synthetic oligonucleotide
  Target: LAMA2; (-) strand; PAM type: NNAGAAW; PAM sequence: AAAGAAA
caggggaaacaatagaatat

SEQ ID NO: 8971 - DNA, 20 bp, Artificial Sequence
  Description of Artificial Sequence: Synthetic oligonucleotide
  Target: LAMA2; (-) strand; PAM type: NNAGAAW; PAM sequence: ATAGAAT
aggtctccccaggggaaaca

SEQ ID NO: 8972 - DNA, 20 bp, Artificial Sequence
  Description of Artificial Sequence: Synthetic oligonucleotide
  Target: LAMA2; (-) strand; PAM type: NNAGAAW; PAM sequence: AAAGAAT
aaaagactactcaaagcaca

SEQ ID NO: 8973 - DNA, 20 bp, Artificial Sequence
  Description of Artificial Sequence: Synthetic oligonucleotide
  Target: LAMA2; (-) strand; PAM type: NNAGAAW; PAM sequence: AAAGAAA
gaaattttgtatctcccatg

SEQ ID NO: 8974 - DNA, 20 bp, Artificial Sequence
  Description of Artificial Sequence: Synthetic oligonucleotide
  Target: LAMA2; (-) strand; PAM type: NNAGAAW; PAM sequence: CCAGAAA
tattggacagcaaaattttc

SEQ ID NO: 8975 - DNA, 20 bp, Artificial Sequence
  Description of Artificial Sequence: Synthetic oligonucleotide
  Target: LAMA2; (-) strand; PAM type: NNAGAAW; PAM sequence: TAAGAAT
tgaaggatgaggggtgagga

SEQ ID NO: 8976 - DNA, 20 bp, Artificial Sequence
  Description of Artificial Sequence: Synthetic oligonucleotide
  Target: LAMA2; (-) strand; PAM type: NNAGAAW; PAM sequence: TAAGAAA
aattctctagggaaatttaa

SEQ ID NO: 8977 - DNA, 20 bp, Artificial Sequence
  Description of Artificial Sequence: Synthetic oligonucleotide
  Target: LAMA2; (-) strand; PAM type: NNAGAAW; PAM sequence: GCAGAAA
cgccagcaaatataaagcag

SEQ ID NO: 8978 - DNA, 20 bp, Artificial Sequence
  Description of Artificial Sequence: Synthetic oligonucleotide
  Target: LAMA2; (-) strand; PAM type: NNAGAAW; PAM sequence: GAAGAAT
agtgtcaacttgattggatt

SEQ ID NO: 8979 - DNA, 20 bp, Artificial Sequence
  Description of Artificial Sequence: Synthetic oligonucleotide
  Target: LAMA2; (-) strand; PAM type: NNAGAAW; PAM sequence: CCAGAAT
gttatttgagctgctgatcc

SEQ ID NO: 8980 - DNA, 20 bp, Artificial Sequence
  Description of Artificial Sequence: Synthetic oligonucleotide
  Target: LAMA2; (-) strand; PAM type: NNAGAAW; PAM sequence: TCAGAAA
atatggtccagaggatgaca

SEQ ID NO: 8981 - DNA, 20 bp, Artificial Sequence
  Description of Artificial Sequence: Synthetic oligonucleotide
  Target: LAMA2; (-) strand; PAM type: NNAGAAW; PAM sequence: TCAGAAT
actgaaagcatagatagggc

SEQ ID NO: 8982 - DNA, 20 bp, Artificial Sequence
  Description of Artificial Sequence: Synthetic oligonucleotide
  Target: LAMA2; (-) strand; PAM type: NNAGAAW; PAM sequence: AAAGAAA
ttctacctctgtctttagct

SEQ ID NO: 8983 - DNA, 20 bp, Artificial Sequence
  Description of Artificial Sequence: Synthetic oligonucleotide
  Target: LAMA2; (-) strand; PAM type: NNAGAAW; PAM sequence: AGAGAAA
aaaattctgttttcaaatga

SEQ ID NO: 8984 - DNA, 20 bp, Artificial Sequence
  Description of Artificial Sequence: Synthetic oligonucleotide
  Target: LAMA2; (-) strand; PAM type: NNAGAAW; PAM sequence: TGAGAAA
caaacttttcctttgccttt

SEQ ID NO: 8985 - DNA, 20 bp, Artificial Sequence
  Description of Artificial Sequence: Synthetic oligonucleotide
  Target: LAMA2; (-) strand; PAM type: NNAGAAW; PAM sequence: GGAGAAA
gtagtttgttttattcagaa

SEQ ID NO: 8986 - DNA, 20 bp, Artificial Sequence
  Description of Artificial Sequence: Synthetic oligonucleotide
  Target: LAMA2; (-) strand; PAM type: NNAGAAW; PAM sequence: ACAGAAA
aagggaagaaaggtaaaaat

SEQ ID NO: 8987 - DNA, 20 bp, Artificial Sequence
  Description of Artificial Sequence: Synthetic oligonucleotide
  Target: LAMA2; (-) strand; PAM type: NNAGAAW; PAM sequence: GAAGAAA
aggtcttagtatcaataagg

SEQ ID NO: 8988 - DNA, 20 bp, Artificial Sequence
  Description of Artificial Sequence: Synthetic oligonucleotide
  Target: LAMA2; (-) strand; PAM type: NNAGAAW; PAM sequence: CTAGAAT
acatgcaccatcatttcaac

SEQ ID NO: 8989 - DNA, 20 bp, Artificial Sequence
  Description of Artificial Sequence: Synthetic oligonucleotide
  Target: LAMA2; (-) strand; PAM type: NNAGAAW; PAM sequence: TAAGAAA
taggtaagaaattagattat

SEQ ID NO: 8990 - DNA, 20 bp, Artificial Sequence
  Description of Artificial Sequence: Synthetic oligonucleotide
  Target: LAMA2; (-) strand; PAM type: NNAGAAW; PAM sequence: TAAGAAA
aatgttgactgtctactagg

SEQ ID NO: 8991 - DNA, 20 bp, Artificial Sequence
  Description of Artificial Sequence: Synthetic oligonucleotide
  Target: LAMA2; (-) strand; PAM type: NNAGAAW; PAM sequence: AGAGAAA
cagcatattcaaagatcaaa

SEQ ID NO: 8992 - DNA, 20 bp, Artificial Sequence
  Description of Artificial Sequence: Synthetic oligonucleotide
  Target: LAMA2; (-) strand; PAM type: NNAGAAW; PAM sequence: AAAGAAA
ctttcttacaacttaccttc

SEQ ID NO: 8993 - DNA, 20 bp, Artificial Sequence
  Description of Artificial Sequence: Synthetic oligonucleotide
  Target: LAMA2; (-) strand; PAM type: NNAGAAW; PAM sequence: TAAGAAA
ttactaaaatgctgccttca

SEQ ID NO: 8994 - DNA, 20 bp, Artificial Sequence
  Description of Artificial Sequence: Synthetic oligonucleotide
  Target: LAMA2; (-) strand; PAM type: NNAGAAW; PAM sequence: AAAGAAA
cttcaattagagcctatcag

SEQ ID NO: 8995 - DNA, 20 bp, Artificial Sequence
  Description of Artificial Sequence: Synthetic oligonucleotide
  Target: LAMA2; (-) strand; PAM type: NNAGAAW; PAM sequence: TCAGAAA
caaacttcaattagagccta

SEQ ID NO: 8996 - DNA, 20 bp, Artificial Sequence
  Description of Artificial Sequence: Synthetic oligonucleotide
  Target: LAMA2; (-) strand; PAM type: NNAGAAW; PAM sequence: TCAGAAA
attcaatttcccaaataaat

SEQ ID NO: 8997 - DNA, 20 bp, Artificial Sequence
  Description of Artificial Sequence: Synthetic oligonucleotide
  Target: LAMA2; (-) strand; PAM type: NNAGAAW; PAM sequence: TAAGAAA
attggtcagctcagtgcttc

SEQ ID NO: 8998 - DNA, 20 bp, Artificial Sequence
  Description of Artificial Sequence: Synthetic oligonucleotide
  Target: LAMA2; (-) strand; PAM type: NNAGAAW; PAM sequence: TCAGAAT
aacagagcaaaatatttcac

SEQ ID NO: 8999 - DNA, 20 bp, Artificial Sequence
  Description of Artificial Sequence: Synthetic oligonucleotide
  Target: LAMA2; (-) strand; PAM type: NNAGAAW; PAM sequence: AGAGAAA
agttttatcaaacttgcaca

SEQ ID NO: 9000 - DNA, 20 bp, Artificial Sequence
  Description of Artificial Sequence: Synthetic oligonucleotide
  Target: LAMA2; (-) strand; PAM type: NNAGAAW; PAM sequence: ACAGAAT
ttccttcctcctggaatata

SEQ ID NO: 9001 - DNA, 20 bp, Artificial Sequence
  Description of Artificial Sequence: Synthetic oligonucleotide
  Target: LAMA2; (-) strand; PAM type: NNAGAAW; PAM sequence: TTAGAAT
tctttcatgatgttttcaat

SEQ ID NO: 9002 - DNA, 20 bp, Artificial Sequence
  Description of Artificial Sequence: Synthetic oligonucleotide
  Target: LAMA2; (-) strand; PAM type: NNAGAAW; PAM sequence: CAAGAAA
aaacgaatgattcaaataag

SEQ ID NO: 9003 - DNA, 20 bp, Artificial Sequence
  Description of Artificial Sequence: Synthetic oligonucleotide
  Target: LAMA2; (-) strand; PAM type: NNAGAAW; PAM sequence: GAAGAAT
gagcttagcctaagtagaaa

SEQ ID NO: 9004 - DNA, 20 bp, Artificial Sequence
  Description of Artificial Sequence: Synthetic oligonucleotide
  Target: LAMA2; (-) strand; PAM type: NNAGAAW; PAM sequence: GTAGAAA
cttttgagagcttagcctaa

SEQ ID NO: 9005 - DNA, 20 bp, Artificial Sequence
  Description of Artificial Sequence: Synthetic oligonucleotide
  Target: LAMA2; (-) strand; PAM type: NNAGAAW; PAM sequence: TTAGAAA
ttgttgaaaaatacctacac

SEQ ID NO: 9006 - DNA, 20 bp, Artificial Sequence
  Description of Artificial Sequence: Synthetic oligonucleotide
  Target: LAMA2; (-) strand; PAM type: NNAGAAW; PAM sequence: CCAGAAA
tgtaaaataaataaaactct

SEQ ID NO: 9007 - DNA, 20 bp, Artificial Sequence
  Description of Artificial Sequence: Synthetic oligonucleotide
  Target: LAMA2; (-) strand; PAM type: NNAGAAW; PAM sequence: AGAGAAA
aagctatatttcaacagaaa

SEQ ID NO: 9008 - DNA, 20 bp, Artificial Sequence
  Description of Artificial Sequence: Synthetic oligonucleotide
  Target: LAMA2; (-) strand; PAM type: NNAGAAW; PAM sequence: ACAGAAA
aaagagcaagctatatttca

SEQ ID NO: 9009 - DNA, 20 bp, Artificial Sequence
  Description of Artificial Sequence: Synthetic oligonucleotide
  Target: LAMA2; (-) strand; PAM type: NNAGAAW; PAM sequence: TTAGAAT
gtgatatcctaaaaagtgtt

SEQ ID NO: 9010 - DNA, 20 bp, Artificial Sequence
  Description of Artificial Sequence: Synthetic oligonucleotide
  Target: LAMA2; (-) strand; PAM type: NNAGAAW; PAM sequence: ACAGAAT
tgtgaagtcctacctattca

SEQ ID NO: 9011 - DNA, 20 bp, Artificial Sequence
  Description of Artificial Sequence: Synthetic oligonucleotide
  Target: LAMA2; (-) strand; PAM type: NNAGAAW; PAM sequence: AGAGAAA
tagaatattacttagcaaaa

SEQ ID NO: 9012 - DNA, 20 bp, Artificial Sequence
  Description of Artificial Sequence: Synthetic oligonucleotide
  Target: LAMA2; (-) strand; PAM type: NNAGAAW; PAM sequence: TTAGAAT
taaaatgtatggctaatctc

SEQ ID NO: 9013 - DNA, 20 bp, Artificial Sequence
  Description of Artificial Sequence: Synthetic oligonucleotide
  Target: LAMA2; (-) strand; PAM type: NNAGAAW; PAM sequence: AAAGAAA
acagaaggtagaaattacag

SEQ ID NO: 9014 - DNA, 20 bp, Artificial Sequence
  Description of Artificial Sequence: Synthetic oligonucleotide
  Target: LAMA2; (-) strand; PAM type: NNAGAAW; PAM sequence: ACAGAAA
gttcacagaaggtagaaatt

SEQ ID NO: 9015 - DNA, 20 bp, Artificial Sequence
  Description of Artificial Sequence: Synthetic oligonucleotide
  Target: LAMA2; (-) strand; PAM type: NNAGAAW; PAM sequence: GTAGAAA
caagaagttgttcacagaag

SEQ ID NO: 9016 - DNA, 20 bp, Artificial Sequence
  Description of Artificial Sequence: Synthetic oligonucleotide
  Target: LAMA2; (-) strand; PAM type: NNAGAAW; PAM sequence: CAAGAAA
acattctctgaggccttacc

SEQ ID NO: 9017 - DNA, 20 bp, Artificial Sequence
  Description of Artificial Sequence: Synthetic oligonucleotide
  Target: LAMA2; (-) strand; PAM type: NNAGAAW; PAM sequence: TAAGAAT
ttgaatcatttctcaaataa

SEQ ID NO: 9018 - DNA, 20 bp, Artificial Sequence
  Description of Artificial Sequence: Synthetic oligonucleotide
  Target: LAMA2; (-) strand; PAM type: NNAGAAW; PAM sequence: GAAGAAA
taaagaattaaccatttgat

SEQ ID NO: 9019 - DNA, 20 bp, Artificial Sequence
  Description of Artificial Sequence: Synthetic oligonucleotide
  Target: LAMA2; (-) strand; PAM type: NNAGAAW; PAM sequence: AAAGAAT
ttaaagaataaccatttaat

SEQ ID NO: 9020 - DNA, 20 bp, Artificial Sequence
  Description of Artificial Sequence: Synthetic oligonucleotide
  Target: LAMA2; (-) strand; PAM type: NNAGAAW; PAM sequence: AAAGAAT
agctcatctttgctcatttt

SEQ ID NO: 9021 - DNA, 20 bp, Artificial Sequence
  Description of Artificial Sequence: Synthetic oligonucleotide
  Target: LAMA2; (-) strand; PAM type: NNAGAAW; PAM sequence: GAAGAAT
ttcactagctgtattatgag

SEQ ID NO: 9022 - DNA, 20 bp, Artificial Sequence
  Description of Artificial Sequence: Synthetic oligonucleotide
  Target: LAMA2; (-) strand; PAM type: NNAGAAW; PAM sequence: TGAGAAT
aaatccgtgtttccctaggg

SEQ ID NO: 9023 - DNA, 20 bp, Artificial Sequence
  Description of Artificial Sequence: Synthetic oligonucleotide
  Target: LAMA2; (-) strand; PAM type: NNAGAAW; PAM sequence: ATAGAAA
aataatctgaggtgtaatta

SEQ ID NO: 9024 - DNA, 20 bp, Artificial Sequence
  Description of Artificial Sequence: Synthetic oligonucleotide
  Target: LAMA2; (-) strand; PAM type: NNAGAAW; PAM sequence: ATAGAAA
agataataatctgaggtgta

SEQ ID NO: 9025 - DNA, 20 bp, Artificial Sequence
  Description of Artificial Sequence: Synthetic oligonucleotide
  Target: LAMA2; (-) strand; PAM type: NNAGAAW; PAM sequence: ATAGAAA
tcttcggctaagactgaata

SEQ ID NO: 9026 - DNA, 20 bp, Artificial Sequence
  Description of Artificial Sequence: Synthetic oligonucleotide
  Target: LAMA2; (-) strand; PAM type: NNAGAAW; PAM sequence: TAAGAAT
cctctaaaataaaaacatca

SEQ ID NO: 9027 - DNA, 20 bp, Artificial Sequence
  Description of Artificial Sequence: Synthetic oligonucleotide
  Target: LAMA2; (-) strand; PAM type: NNAGAAW; PAM sequence: TTAGAAT
atctaatcaattcccaacat

SEQ ID NO: 9028 - DNA, 20 bp, Artificial Sequence
  Description of Artificial Sequence: Synthetic oligonucleotide
  Target: LAMA2; (-) strand; PAM type: NNAGAAW; PAM sequence: TAAGAAA
taggcagagtgacacagtat

SEQ ID NO: 9029 - DNA, 20 bp, Artificial Sequence
  Description of Artificial Sequence: Synthetic oligonucleotide
  Target: LAMA2; (-) strand; PAM type: NNAGAAW; PAM sequence: ATAGAAA
tcctgcagagcttggaaatt

SEQ ID NO: 9030 - DNA, 20 bp, Artificial Sequence
  Description of Artificial Sequence: Synthetic oligonucleotide
  Target: LAMA2; (-) strand; PAM type: NNAGAAW; PAM sequence: CCAGAAT
ctcactggccaaggtgttag

SEQ ID NO: 9031 - DNA, 20 bp, Artificial Sequence
  Description of Artificial Sequence: Synthetic oligonucleotide
  Target: LAMA2; (-) strand; PAM type: NNAGAAW; PAM sequence: AAAGAAA
tggagaccaaaaaagaggta

SEQ ID NO: 9032 - DNA, 20 bp, Artificial Sequence
  Description of Artificial Sequence: Synthetic oligonucleotide
  Target: LAMA2; (-) strand; PAM type: NNAGAAW; PAM sequence: TTAGAAA
ggaattcatgtccactgtct

SEQ ID NO: 9033 - DNA, 20 bp, Artificial Sequence
  Description of Artificial Sequence: Synthetic oligonucleotide
  Target: LAMA2; (-) strand; PAM type: NNAGAAW; PAM sequence: AAAGAAT
ttataaatttaaagacattt

SEQ ID NO: 9034 - DNA, 20 bp, Artificial Sequence
  Description of Artificial Sequence: Synthetic oligonucleotide
  Target: LAMA2; (-) strand; PAM type: NNAGAAW; PAM sequence: TAAGAAT
gaagataatttcaattttta

SEQ ID NO: 9035 - DNA, 20 bp, Artificial Sequence
  Description of Artificial Sequence: Synthetic oligonucleotide
  Target: LAMA2; (-) strand; PAM type: NNAGAAW; PAM sequence: GAAGAAA
tggtaaaatcaaatgcagct

SEQ ID NO: 9036 - DNA, 20 bp, Artificial Sequence
  Description of Artificial Sequence: Synthetic oligonucleotide
  Target: LAMA2; (-) strand; PAM type: NNAGAAW; PAM sequence: TTAGAAT
aactacttcatcagaataag

SEQ ID NO: 9037 - DNA, 20 bp, Artificial Sequence
  Description of Artificial Sequence: Synthetic oligonucleotide
  Target: LAMA2; (-) strand; PAM type: NNAGAAW; PAM sequence: TCAGAAT
ctgacaagggaactacttca

SEQ ID NO: 9038 - DNA, 20 bp, Artificial Sequence
  Description of Artificial Sequence: Synthetic oligonucleotide
  Target: LAMA2; (-) strand; PAM type: NNAGAAW; PAM sequence: TAAGAAA
acaaatcataaaacacactt

SEQ ID NO: 9039 - DNA, 20 bp, Artificial Sequence
  Description of Artificial Sequence: Synthetic oligonucleotide
  Target: LAMA2; (-) strand; PAM type: NNAGAAW; PAM sequence: TTAGAAT
taggctattctcattcttaa

SEQ ID NO: 9040 - DNA, 20 bp, Artificial Sequence
  Description of Artificial Sequence: Synthetic oligonucleotide
  Target: LAMA2; (-) strand; PAM type: NNAGAAW; PAM sequence: AGAGAAA
cccaaataaattccgcttta

SEQ ID NO: 9041 - DNA, 20 bp, Artificial Sequence
  Description of Artificial Sequence: Synthetic oligonucleotide
  Target: LAMA2; (-) strand; PAM type: NNAGAAW; PAM sequence: GTAGAAA
gagcattccacatgccagca

SEQ ID NO: 9042 - DNA, 20 bp, Artificial Sequence
  Description of Artificial Sequence: Synthetic oligonucleotide
  Target: LAMA2; (-) strand; PAM type: NNAGAAW; PAM sequence: TAAGAAA
ttcaaagtgctttcactatg

SEQ ID NO: 9043 - DNA, 20 bp, Artificial Sequence
  Description of Artificial Sequence: Synthetic oligonucleotide
  Target: LAMA2; (-) strand; PAM type: NNAGAAW; PAM sequence: GTAGAAT
attacttgctaaaataatgt

SEQ ID NO: 9044 - DNA, 20 bp, Artificial Sequence
  Description of Artificial Sequence: Synthetic oligonucleotide
  Target: LAMA2; (-) strand; PAM type: NNAGAAW; PAM sequence: CTAGAAT
ctgtacaggtaccacctttt

SEQ ID NO: 9045 - DNA, 20 bp, Artificial Sequence
  Description of Artificial Sequence: Synthetic oligonucleotide
  Target: LAMA2; (-) strand; PAM type: NNAGAAW; PAM sequence: CTAGAAT
gtttaataaagtgttaccag

SEQ ID NO: 9046 - DNA, 20 bp, Artificial Sequence
  Description of Artificial Sequence: Synthetic oligonucleotide
  Target: LAMA2; (-) strand; PAM type: NNAGAAW; PAM sequence: CCAGAAA
ctctagtcccatcaataccc

SEQ ID NO: 9047 - DNA, 20 bp, Artificial Sequence
  Description of Artificial Sequence: Synthetic oligonucleotide
  Target: LAMA2; (-) strand; PAM type: NNAGAAW; PAM sequence: AAAGAAT
aaataacctcaatatttttc

SEQ ID NO: 9048 - DNA, 20 bp, Artificial Sequence
  Description of Artificial Sequence: Synthetic oligonucleotide
  Target: LAMA2; (-) strand; PAM type: NNAGAAW; PAM sequence: CAAGAAT
tcagttgaaattgtatatct

SEQ ID NO: 9049 - DNA, 20 bp, Artificial Sequence
  Description of Artificial Sequence: Synthetic oligonucleotide
  Target: LAMA2; (-) strand; PAM type: NNAGAAW; PAM sequence: AAAGAAT
cctggcaaaagaaaaattat

SEQ ID NO: 9050 - DNA, 20 bp, Artificial Sequence
  Description of Artificial Sequence: Synthetic oligonucleotide
  Target: LAMA2; (-) strand; PAM type: NNAGAAW; PAM sequence: AAAGAAA
ggattataaggatcctggca

SEQ ID NO: 9051 - DNA, 20 bp, Artificial Sequence
  Description of Artificial Sequence: Synthetic oligonucleotide
  Target: LAMA2; (-) strand; PAM type: NNAGAAW; PAM sequence: GAAGAAA
ctttattctcaaattcccaa

SEQ ID NO: 9052 - DNA, 20 bp, Artificial Sequence
  Description of Artificial Sequence: Synthetic oligonucleotide
  Target: LAMA2; (-) strand; PAM type: NNAGAAW; PAM sequence: TTAGAAA
tcagtgttaatgtgcaaagc

SEQ ID NO: 9053 - DNA, 20 bp, Artificial Sequence
  Description of Artificial Sequence: Synthetic oligonucleotide
  Target: LAMA2; (-) strand; PAM type: NNAGAAW; PAM sequence: GGAGAAT
ctactccggaggccgaggca

SEQ ID NO: 9054 - DNA, 20 bp, Artificial Sequence
  Description of Artificial Sequence: Synthetic oligonucleotide
  Target: LAMA2; (-) strand; PAM type: NNAGAAW; PAM sequence: TGAGAAA
gtgagacttattcactatca

SEQ ID NO: 9055 - DNA, 20 bp, Artificial Sequence
  Description of Artificial Sequence: Synthetic oligonucleotide
  Target: LAMA2; (-) strand; PAM type: NNAGAAW; PAM sequence: GCAGAAA
ggggaggcctcacaatcatg

SEQ ID NO: 9056 - DNA, 20 bp, Artificial Sequence
  Description of Artificial Sequence: Synthetic oligonucleotide
  Target: LAMA2; (-) strand; PAM type: NNAGAAW; PAM sequence: AAAGAAA
tccattctcatgctgctaat

SEQ ID NO: 9057 - DNA, 20 bp, Artificial Sequence
  Description of Artificial Sequence: Synthetic oligonucleotide
  Target: LAMA2; (-) strand; PAM type: NNAGAAW; PAM sequence: AGAGAAA
tgtcatgattcttctctcaa

SEQ ID NO: 9058 - DNA, 20 bp, Artificial Sequence
  Description of Artificial Sequence: Synthetic oligonucleotide
  Target: LAMA2; (-) strand; PAM type: NNAGAAW; PAM sequence: CCAGAAT
ctcccactcatccttaaatc

SEQ ID NO: 9059 - DNA, 20 bp, Artificial Sequence
  Description of Artificial Sequence: Synthetic oligonucleotide
  Target: LAMA2; (-) strand; PAM type: NNAGAAW; PAM sequence: GGAGAAT
gctatggtcctgctacactt

SEQ ID NO: 9060 - DNA, 20 bp, Artificial Sequence
  Description of Artificial Sequence: Synthetic oligonucleotide
  Target: LAMA2; (-) strand; PAM type: NNAGAAW; PAM sequence: GCAGAAT
ttaatctcagaaagataaaa

SEQ ID NO: 9061 - DNA, 20 bp, Artificial Sequence
  Description of Artificial Sequence: Synthetic oligonucleotide
  Target: LAMA2; (-) strand; PAM type: NNAGAAW; PAM sequence: TCAGAAA
ggccagataaggcattaatc

SEQ ID NO: 9062 - DNA, 20 bp, Artificial Sequence
  Description of Artificial Sequence: Synthetic oligonucleotide
  Target: LAMA2; (-) strand; PAM type: NNAGAAW; PAM sequence: AAAGAAA
atgtattaagaagaggtggc

SEQ ID NO: 9063 - DNA, 20 bp, Artificial Sequence
  Description of Artificial Sequence: Synthetic oligonucleotide
  Target: LAMA2; (-) strand; PAM type: NNAGAAW; PAM sequence: GAAGAAA
agagagggggaggaacgaag

SEQ ID NO: 9064 - DNA, 20 bp, Artificial Sequence
  Description of Artificial Sequence: Synthetic oligonucleotide
  Target: LAMA2; (-) strand; PAM type: NNAGAAW; PAM sequence: GAAGAAA
gcaagaaagaaaggaggaag

SEQ ID NO: 9065 - DNA, 20 bp, Artificial Sequence
  Description of Artificial Sequence: Synthetic oligonucleotide
  Target: LAMA2; (-) strand; PAM type: NNAGAAW; PAM sequence: AAAGAAA
aaaagaaagaagaaagcaag

SEQ ID NO: 9066 - DNA, 20 bp, Artificial Sequence
  Description of Artificial Sequence: Synthetic oligonucleotide
  Target: LAMA2; (-) strand; PAM type: NNAGAAW; PAM sequence: CAAGAAA
aaagaaaagaaagaagaaag

SEQ ID NO: 9067 - DNA, 20 bp, Artificial Sequence
  Description of Artificial Sequence: Synthetic oligonucleotide
  Target: LAMA2; (-) strand; PAM type: NNAGAAW; PAM sequence: GAAGAAA
gaaagaataaagaaaagaaa

SEQ ID NO: 9068 - DNA, 20 bp, Artificial Sequence
  Description of Artificial Sequence: Synthetic oligonucleotide
  Target: LAMA2; (-) strand; PAM type: NNAGAAW; PAM sequence: AAAGAAA
aaaaaaagaaagaataaaga

SEQ ID NO: 9069 - DNA, 20 bp, Artificial Sequence
  Description of Artificial Sequence: Synthetic oligonucleotide
  Target: LAMA2; (-) strand; PAM type: NNAGAAW; PAM sequence: AAAGAAA
aaaaaaaaaaaagaaagaat

SEQ ID NO: 9070 - DNA, 20 bp, Artificial Sequence
  Description of Artificial Sequence: Synthetic oligonucleotide
  Target: LAMA2; (-) strand; PAM type: NNAGAAW; PAM sequence: AAAGAAT
cttgaaaaaaaaaaaaaaag

SEQ ID NO: 9071 - DNA, 20 bp, Artificial Sequence
  Description of Artificial Sequence: Synthetic oligonucleotide
  Target: LAMA2; (-) strand; PAM type: NNAGAAW; PAM sequence: AAAGAAA
agaccttgaaaaaaaaaaaa

SEQ ID NO: 9072 - DNA, 20 bp, Artificial Sequence
  Description of Artificial Sequence: Synthetic oligonucleotide
  Target: LAMA2; (-) strand; PAM type: NNAGAAW; PAM sequence: AAAGAAA
tttaagaatctctcaaaaaa

SEQ ID NO: 9073 - DNA, 20 bp, Artificial Sequence
  Description of Artificial Sequence: Synthetic oligonucleotide
  Target: LAMA2; (-) strand; PAM type: NNAGAAW; PAM sequence: TAAGAAT
atcgtaagtacaatctagtt

SEQ ID NO: 9074 - DNA, 20 bp, Artificial Sequence
  Description of Artificial Sequence: Synthetic oligonucleotide
  Target: LAMA2; (-) strand; PAM type: NNAGAAW; PAM sequence: TCAGAAA
tttgtgaagtggagacatac

SEQ ID NO: 9075 - DNA, 20 bp, Artificial Sequence
  Description of Artificial Sequence: Synthetic oligonucleotide
  Target: LAMA2; (-) strand; PAM type: NNAGAAW; PAM sequence: AGAGAAA
atcaaaacagtggtaaaact

SEQ ID NO: 9076 - DNA, 20 bp, Artificial Sequence
  Description of Artificial Sequence: Synthetic oligonucleotide
  Target: LAMA2; (-) strand; PAM type: NNAGAAW; PAM sequence: AGAGAAA
accatactctgaggcaaaca

SEQ ID NO: 9077 - DNA, 20 bp, Artificial Sequence
  Description of Artificial Sequence: Synthetic oligonucleotide
  Target: LAMA2; (-) strand; PAM type: NNAGAAW; PAM sequence: AGAGAAT
gcaatggctccaacctaggg

SEQ ID NO: 9078 - DNA, 20 bp, Artificial Sequence
  Description of Artificial Sequence: Synthetic oligonucleotide
  Target: LAMA2; (-) strand; PAM type: NNAGAAW; PAM sequence: CTAGAAT
atagtgctgaaagtacttag

SEQ ID NO: 9079 - DNA, 20 bp, Artificial Sequence
  Description of Artificial Sequence: Synthetic oligonucleotide
  Target: LAMA2; (-) strand; PAM type: NNAGAAW; PAM sequence: TAAGAAT
aaaagcatttggttaacagg

SEQ ID NO: 9080 - DNA, 20 bp, Artificial Sequence
  Description of Artificial Sequence: Synthetic oligonucleotide
  Target: LAMA2; (-) strand; PAM type: NNAGAAW; PAM sequence: TCAGAAA
ttaaggcacagagtaggtgg

SEQ ID NO: 9081 - DNA, 20 bp, Artificial Sequence
  Description of Artificial Sequence: Synthetic oligonucleotide
  Target: LAMA2; (-) strand; PAM type: NNAGAAW; PAM sequence: AAAGAAA
caaaaaaaaaaaaaaaaaag

SEQ ID NO: 9082 - DNA, 20 bp, Artificial Sequence
  Description of Artificial Sequence: Synthetic oligonucleotide
  Target: LAMA2; (-) strand; PAM type: NNAGAAW; PAM sequence: AAAGAAA
ctctcaaaaaaaaaaaaaaa

SEQ ID NO: 9083 - DNA, 20 bp, Artificial Sequence
  Description of Artificial Sequence: Synthetic oligonucleotide
  Target: LAMA2; (-) strand; PAM type: NNAGAAW; PAM sequence: ACAGAAT
tacttactatctaagccttt

SEQ ID NO: 9084 - DNA, 20 bp, Artificial Sequence
  Description of Artificial Sequence: Synthetic oligonucleotide
  Target: LAMA2; (-) strand; PAM type: NNAGAAW; PAM sequence: AAAGAAA
aaagttttctgagattactc

SEQ ID NO: 9085 - DNA, 20 bp, Artificial Sequence
  Description of Artificial Sequence: Synthetic oligonucleotide
  Target: LAMA2; (-) strand; PAM type: NNAGAAW; PAM sequence: GGAGAAA
atgaacctgtattgtgagtg

SEQ ID NO: 9086 - DNA, 20 bp, Artificial Sequence
  Description of Artificial Sequence: Synthetic oligonucleotide
  Target: LAMA2; (-) strand; PAM type: NNAGAAW; PAM sequence: ACAGAAA
aaaagtgatttatttttcac

SEQ ID NO: 9087 - DNA, 20 bp, Artificial Sequence
  Description of Artificial Sequence: Synthetic oligonucleotide
  Target: LAMA2; (-) strand; PAM type: NNAGAAW; PAM sequence: TGAGAAA
taatatgacccattattcca

SEQ ID NO: 9088 - DNA, 20 bp, Artificial Sequence
  Description of Artificial Sequence: Synthetic oligonucleotide
  Target: LAMA2; (-) strand; PAM type: NNAGAAW; PAM sequence: TTAGAAT
aagtctttgtggaggaaata

SEQ ID NO: 9089 - DNA, 20 bp, Artificial Sequence
  Description of Artificial Sequence: Synthetic oligonucleotide
  Target: LAMA2; (-) strand; PAM type: NNAGAAW; PAM sequence: CAAGAAA
tgatagtagttctcaagaag

SEQ ID NO: 9090 - DNA, 20 bp, Artificial Sequence
  Description of Artificial Sequence: Synthetic oligonucleotide
  Target: LAMA2; (-) strand; PAM type: NNAGAAW; PAM sequence: AAAGAAA
attttcattagtattgatca

SEQ ID NO: 9091 - DNA, 20 bp, Artificial Sequence
  Description of Artificial Sequence: Synthetic oligonucleotide
  Target: LAMA2; (-) strand; PAM type: NNAGAAW; PAM sequence: GTAGAAA
attagaatgtccttcaccaa

SEQ ID NO: 9092 - DNA, 20 bp, Artificial Sequence
  Description of Artificial Sequence: Synthetic oligonucleotide
  Target: LAMA2; (-) strand; PAM type: NNAGAAW; PAM sequence: TTAGAAT
tgacttaggcatctagatga

SEQ ID NO: 9093 - DNA, 20 bp, Artificial Sequence
  Description of Artificial Sequence: Synthetic oligonucleotide
  Target: LAMA2; (-) strand; PAM type: NNAGAAW; PAM sequence: AAAGAAT
agtgtgactgtgaggaacag

SEQ ID NO: 9094 - DNA, 20 bp, Artificial Sequence
  Description of Artificial Sequence: Synthetic oligonucleotide
  Target: LAMA2; (-) strand; PAM type: NNAGAAW; PAM sequence: ACAGAAA
attaagtgtgactgtgagga

SEQ ID NO: 9095 - DNA, 20 bp, Artificial Sequence
  Description of Artificial Sequence: Synthetic oligonucleotide
  Target: LAMA2; (-) strand; PAM type: NNAGAAW; PAM sequence: CGAGAAA
tgatcttaaaataggatagt

SEQ ID NO: 9096 - DNA, 20 bp, Artificial Sequence
  Description of Artificial Sequence: Synthetic oligonucleotide
  Target: LAMA2; (-) strand; PAM type: NNAGAAW; PAM sequence: TGAGAAT
cctggctagcaattaagaga

SEQ ID NO: 9097 - DNA, 20 bp, Artificial Sequence
  Description of Artificial Sequence: Synthetic oligonucleotide
  Target: LAMA2; (-) strand; PAM type: NNAGAAW; PAM sequence: AAAGAAA
attttctttctctagtaaga

SEQ ID NO: 9098 - DNA, 20 bp, Artificial Sequence
  Description of Artificial Sequence: Synthetic oligonucleotide
  Target: LAMA2; (-) strand; PAM type: NNAGAAW; PAM sequence: TAAGAAA
atctcattttctttctctag

SEQ ID NO: 9099 - DNA, 20 bp, Artificial Sequence
  Description of Artificial Sequence: Synthetic oligonucleotide
  Target: LAMA2; (-) strand; PAM type: NNAGAAW; PAM sequence: ATAGAAA
aagacaggcagaaaagtagg

SEQ ID NO: 9100 - DNA, 20 bp, Artificial Sequence
  Description of Artificial Sequence: Synthetic oligonucleotide
  Target: LAMA2; (-) strand; PAM type: NNAGAAW; PAM sequence: GCAGAAA
ggtgtttgcctctaagacag

SEQ ID NO: 9101 - DNA, 20 bp, Artificial Sequence
  Description of Artificial Sequence: Synthetic oligonucleotide
  Target: LAMA2; (-) strand; PAM type: NNAGAAW; PAM sequence: TAAGAAA
aattgtcagaagtcgtaggt

SEQ ID NO: 9102 - DNA, 20 bp, Artificial Sequence
  Description of Artificial Sequence: Synthetic oligonucleotide
  Target: LAMA2; (-) strand; PAM type: NNAGAAW; PAM sequence: TAAGAAA
acaacaatgatagactggat

SEQ ID NO: 9103 - DNA, 20 bp, Artificial Sequence
  Description of Artificial Sequence: Synthetic oligonucleotide
  Target: LAMA2; (-) strand; PAM type: NNAGAAW; PAM sequence: CTAGAAA
gattcctcagggatctagaa

SEQ ID NO: 9104 - DNA, 20 bp, Artificial Sequence
  Description of Artificial Sequence: Synthetic oligonucleotide
  Target: LAMA2; (-) strand; PAM type: NNAGAAW; PAM sequence: GGAGAAA
acaggggctggagaggatat

SEQ ID NO: 9105 - DNA, 20 bp, Artificial Sequence
  Description of Artificial Sequence: Synthetic oligonucleotide
  Target: LAMA2; (-) strand; PAM type: NNAGAAW; PAM sequence: TTAGAAT
gagataccatctcacaccag

SEQ ID NO: 9106 - DNA, 20 bp, Artificial Sequence
  Description of Artificial Sequence: Synthetic oligonucleotide
  Target: LAMA2; (-) strand; PAM type: NNAGAAW; PAM sequence: AGAGAAA
gctcaccatcactggccatc

SEQ ID NO: 9107 - DNA, 20 bp, Artificial Sequence
  Description of Artificial Sequence: Synthetic oligonucleotide
  Target: LAMA2; (-) strand; PAM type: NNAGAAW; PAM sequence: CTAGAAA
tctggaaaaacatgaattta

SEQ ID NO: 9108 - DNA, 20 bp, Artificial Sequence
  Description of Artificial Sequence: Synthetic oligonucleotide
  Target: LAMA2; (-) strand; PAM type: NNAGAAW; PAM sequence: CTAGAAT
cacactgcctgactatgcat

SEQ ID NO: 9109 - DNA, 20 bp, Artificial Sequence
  Description of Artificial Sequence: Synthetic oligonucleotide
  Target: LAMA2; (-) strand; PAM type: NNAGAAW; PAM sequence: GTAGAAT
cacactgcgaaaggtaggta

SEQ ID NO: 9110 - DNA, 20 bp, Artificial Sequence
  Description of Artificial Sequence: Synthetic oligonucleotide
  Target: LAMA2; (-) strand; PAM type: NNAGAAW; PAM sequence: CAAGAAT
atctatggagcatggggaaa

SEQ ID NO: 9111 - DNA, 20 bp, Artificial Sequence
  Description of Artificial Sequence: Synthetic oligonucleotide
  Target: LAMA2; (-) strand; PAM type: NNAGAAW; PAM sequence: GCAGAAA
tgaattataccagcatcatt

SEQ ID NO: 9112 - DNA, 20 bp, Artificial Sequence
  Description of Artificial Sequence: Synthetic oligonucleotide
  Target: LAMA2; (-) strand; PAM type: NNAGAAW; PAM sequence: CAAGAAT
acatattgactatagcacag

SEQ ID NO: 9113 - DNA, 20 bp, Artificial Sequence
  Description of Artificial Sequence: Synthetic oligonucleotide
  Target: LAMA2; (-) strand; PAM type: NNAGAAW; PAM sequence: AGAGAAA
acagagaaaaagagaaattt

SEQ ID NO: 9114 - DNA, 20 bp, Artificial Sequence
  Description of Artificial Sequence: Synthetic oligonucleotide
  Target: LAMA2; (-) strand; PAM type: NNAGAAW; PAM sequence: AGAGAAA
aattttttgaacagagaaaa

SEQ ID NO: 9115 - DNA, 20 bp, Artificial Sequence
  Description of Artificial Sequence: Synthetic oligonucleotide
  Target: LAMA2; (-) strand; PAM type: NNAGAAW; PAM sequence: AGAGAAA
aagttggaaattttttgaac

SEQ ID NO: 9116 - DNA, 20 bp, Artificial Sequence
  Description of Artificial Sequence: Synthetic oligonucleotide
  Target: LAMA2; (-) strand; PAM type: NNAGAAW; PAM sequence: TGAGAAA
catagaaaaatgtcttagta

SEQ ID NO: 9117 - DNA, 20 bp, Artificial Sequence
  Description of Artificial Sequence: Synthetic oligonucleotide
  Target: LAMA2; (-) strand; PAM type: NNAGAAW; PAM sequence: ATAGAAA
aaaagaaccttgtttcttcc

SEQ ID NO: 9118 - DNA, 20 bp, Artificial Sequence
  Description of Artificial Sequence: Synthetic oligonucleotide
  Target: LAMA2; (-) strand; PAM type: NNAGAAW; PAM sequence: TGAGAAA
atgaaaaccagtaagactag

SEQ ID NO: 9119 - DNA, 20 bp, Artificial Sequence
  Description of Artificial Sequence: Synthetic oligonucleotide
  Target: LAMA2; (-) strand; PAM type: NNAGAAW; PAM sequence: AAAGAAA
tggaatttatgttgttttgt

SEQ ID NO: 9120 - DNA, 20 bp, Artificial Sequence
  Description of Artificial Sequence: Synthetic oligonucleotide
  Target: LAMA2; (-) strand; PAM type: NNAGAAW; PAM sequence: CAAGAAA
agaaaatccacacggaagag

SEQ ID NO: 9121 - DNA, 20 bp, Artificial Sequence
  Description of Artificial Sequence: Synthetic oligonucleotide
  Target: LAMA2; (-) strand; PAM type: NNAGAAW; PAM sequence: GTAGAAA
acataccaagtaactaatta

SEQ ID NO: 9122 - DNA, 20 bp, Artificial Sequence
  Description of Artificial Sequence: Synthetic oligonucleotide
  Target: LAMA2; (-) strand; PAM type: NNAGAAW; PAM sequence: AAAGAAT
catcatgggcataaatctaa

SEQ ID NO: 9123 - DNA, 20 bp, Artificial Sequence
  Description of Artificial Sequence: Synthetic oligonucleotide
  Target: LAMA2; (-) strand; PAM type: NNAGAAW; PAM sequence: AAAGAAT
tactgagattatgattttaa

SEQ ID NO: 9124 - DNA, 20 bp, Artificial Sequence
  Description of Artificial Sequence: Synthetic oligonucleotide
  Target: LAMA2; (-) strand; PAM type: NNAGAAW; PAM sequence: AAAGAAT
attctagccaatatatagta

SEQ ID NO: 9125 - DNA, 20 bp, Artificial Sequence
  Description of Artificial Sequence: Synthetic oligonucleotide
  Target: LAMA2; (-) strand; PAM type: NNAGAAW; PAM sequence: AAAGAAT
aaaaactgggaaataaaaag

SEQ ID NO: 9126 - DNA, 20 bp, Artificial Sequence
  Description of Artificial Sequence: Synthetic oligonucleotide
  Target: LAMA2; (-) strand; PAM type: NNAGAAW; PAM sequence: AAAGAAA
ttctaaaaactgggaaataa

SEQ ID NO: 9127 - DNA, 20 bp, Artificial Sequence
  Description of Artificial Sequence: Synthetic oligonucleotide
  Target: LAMA2; (-) strand; PAM type: NNAGAAW; PAM sequence: AAAGAAT
tgagacaatttgattattga

SEQ ID NO: 9128 - DNA, 20 bp, Artificial Sequence
  Description of Artificial Sequence: Synthetic oligonucleotide
  Target: LAMA2; (-) strand; PAM type: NNAGAAW; PAM sequence: CTAGAAA
ggaaaactgagtttaaagga

SEQ ID NO: 9129 - DNA, 20 bp, Artificial Sequence
  Description of Artificial Sequence: Synthetic oligonucleotide
  Target: LAMA2; (-) strand; PAM type: NNAGAAW; PAM sequence: TGAGAAT
catcttaacactgaaaagca

SEQ ID NO: 9130 - DNA, 20 bp, Artificial Sequence
  Description of Artificial Sequence: Synthetic oligonucleotide
  Target: LAMA2; (-) strand; PAM type: NNAGAAW; PAM sequence: CAAGAAA
ataaggaaccagggctcctc

SEQ ID NO: 9131 - DNA, 20 bp, Artificial Sequence
  Description of Artificial Sequence: Synthetic oligonucleotide
  Target: LAMA2; (-) strand; PAM type: NNAGAAW; PAM sequence: CTAGAAA
acctgatccactgaaaagac

SEQ ID NO: 9132 - DNA, 20 bp, Artificial Sequence
  Description of Artificial Sequence: Synthetic oligonucleotide
  Target: LAMA2; (-) strand; PAM type: NNAGAAW; PAM sequence: TCAGAAT
catattcctaaatgggcatg

SEQ ID NO: 9133 - DNA, 20 bp, Artificial Sequence
  Description of Artificial Sequence: Synthetic oligonucleotide
  Target: LAMA2; (-) strand; PAM type: NNAGAAW; PAM sequence: TGAGAAA
gaatcaaaactttcagtgga

SEQ ID NO: 9134 - DNA, 20 bp, Artificial Sequence
  Description of Artificial Sequence: Synthetic oligonucleotide
  Target: LAMA2; (-) strand; PAM type: NNAGAAW; PAM sequence: TAAGAAA
tataaatataaaatcgtggc

SEQ ID NO: 9135 - DNA, 20 bp, Artificial Sequence
  Description of Artificial Sequence: Synthetic oligonucleotide
  Target: LAMA2; (-) strand; PAM type: NNAGAAW; PAM sequence: GAAGAAA
aatggttacacattagtgag

SEQ ID NO: 9136 - DNA, 20 bp, Artificial Sequence
  Description of Artificial Sequence: Synthetic oligonucleotide
  Target: LAMA2; (-) strand; PAM type: NNAGAAW; PAM sequence: CTAGAAA
ttatttgtagcagcaaaaga

SEQ ID NO: 9137 - DNA, 20 bp, Artificial Sequence
  Description of Artificial Sequence: Synthetic oligonucleotide
  Target: LAMA2; (-) strand; PAM type: NNAGAAW; PAM sequence: AAAGAAA
ctctaccaaaaatgcgaaaa

SEQ ID NO: 9138 - DNA, 20 bp, Artificial Sequence
  Description of Artificial Sequence: Synthetic oligonucleotide
  Target: LAMA2; (-) strand; PAM type: NNAGAAW; PAM sequence: TTAGAAA
ttgactgagtaatcacactt

SEQ ID NO: 9139 - DNA, 20 bp, Artificial Sequence
  Description of Artificial Sequence: Synthetic oligonucleotide
  Target: LAMA2; (-) strand; PAM type: NNAGAAW; PAM sequence: GAAGAAT
aaaatggcattactcccaaa

SEQ ID NO: 9140 - DNA, 20 bp, Artificial Sequence
  Description of Artificial Sequence: Synthetic oligonucleotide
  Target: LAMA2; (-) strand; PAM type: NNAGAAW; PAM sequence: CAAGAAT
aacaagtgatcagcaatggt

SEQ ID NO: 9141 - DNA, 20 bp, Artificial Sequence
  Description of Artificial Sequence: Synthetic oligonucleotide
  Target: LAMA2; (-) strand; PAM type: NNAGAAW; PAM sequence: AAAGAAA
acagagggagactctgtctc

SEQ ID NO: 9142 - DNA, 20 bp, Artificial Sequence
  Description of Artificial Sequence: Synthetic oligonucleotide
  Target: LAMA2; (-) strand; PAM type: NNAGAAW; PAM sequence: GGAGAAT
gtaatcccagctatttggga

SEQ ID NO: 9143 - DNA, 20 bp, Artificial Sequence
  Description of Artificial Sequence: Synthetic oligonucleotide
  Target: LAMA2; (-) strand; PAM type: NNAGAAW; PAM sequence: AGAGAAA
tacctaaaagtacatttgat

SEQ ID NO: 9144 - DNA, 20 bp, Artificial Sequence
  Description of Artificial Sequence: Synthetic oligonucleotide
  Target: LAMA2; (-) strand; PAM type: NNAGAAW; PAM sequence: ATAGAAA
ggtttagcaggttttgttca

SEQ ID NO: 9145 - DNA, 20 bp, Artificial Sequence
  Description of Artificial Sequence: Synthetic oligonucleotide
  Target: LAMA2; (-) strand; PAM type: NNAGAAW; PAM sequence: TAAGAAT
attgtgaaagttaaaaaagc

SEQ ID NO: 9146 - DNA, 20 bp, Artificial Sequence
  Description of Artificial Sequence: Synthetic oligonucleotide
  Target: LAMA2; (-) strand; PAM type: NNAGAAW; PAM sequence: TAAGAAT
aaactcaaagttaaaaaagc

SEQ ID NO: 9147 - DNA, 20 bp, Artificial Sequence
  Description of Artificial Sequence: Synthetic oligonucleotide
  Target: LAMA2; (-) strand; PAM type: NNAGAAW; PAM sequence: CCAGAAA
aaattcaatcttcatcaagc

SEQ ID NO: 9148 - DNA, 20 bp, Artificial Sequence
  Description of Artificial Sequence: Synthetic oligonucleotide
  Target: LAMA2; (-) strand; PAM type: NNAGAAW; PAM sequence: GAAGAAA
taaatgaacaattttaggct

SEQ ID NO: 9149 - DNA, 20 bp, Artificial Sequence
  Description of Artificial Sequence: Synthetic oligonucleotide
  Target: LAMA2; (-) strand; PAM type: NNAGAAW; PAM sequence: TGAGAAT
tattcagtatcctattaatt

SEQ ID NO: 9150 - DNA, 20 bp, Artificial Sequence
  Description of Artificial Sequence: Synthetic oligonucleotide
  Target: LAMA2; (-) strand; PAM type: NNAGAAW; PAM sequence: AAAGAAT
tttccatttaactttccagg

SEQ ID NO: 9151 - DNA, 20 bp, Artificial Sequence
  Description of Artificial Sequence: Synthetic oligonucleotide
  Target: LAMA2; (-) strand; PAM type: NNAGAAW; PAM sequence: ACAGAAT
tcaatatttgtgtttaactt

SEQ ID NO: 9152 - DNA, 20 bp, Artificial Sequence
  Description of Artificial Sequence: Synthetic oligonucleotide
  Target: LAMA2; (-) strand; PAM type: NNAGAAW; PAM sequence: TCAGAAT
gaagctaaaactcacttgat

SEQ ID NO: 9153 - DNA, 20 bp, Artificial Sequence
  Description of Artificial Sequence: Synthetic oligonucleotide
  Target: LAMA2; (-) strand; PAM type: NNAGAAW; PAM sequence: CAAGAAT
cccagctagaaaatgtacat

SEQ ID NO: 9154 - DNA, 20 bp, Artificial Sequence
  Description of Artificial Sequence: Synthetic oligonucleotide
  Target: LAMA2; (-) strand; PAM type: NNAGAAW; PAM sequence: CTAGAAA
cttgctttctagtcccccag

SEQ ID NO: 9155 - DNA, 20 bp, Artificial Sequence
  Description of Artificial Sequence: Synthetic oligonucleotide
  Target: LAMA2; (-) strand; PAM type: NNAGAAW; PAM sequence: GAAGAAT
gtataagcaaagcctgatgt

SEQ ID NO: 9156 - DNA, 20 bp, Artificial Sequence
  Description of Artificial Sequence: Synthetic oligonucleotide
  Target: LAMA2; (-) strand; PAM type: NNAGAAW; PAM sequence: TGAGAAA
acttcccagcctccagactg

SEQ ID NO: 9157 - DNA, 20 bp, Artificial Sequence
  Description of Artificial Sequence: Synthetic oligonucleotide
  Target: LAMA2; (-) strand; PAM type: NNAGAAW; PAM sequence: ACAGAAA
ccctttcatcatgcgaggct

SEQ ID NO: 9158 - DNA, 20 bp, Artificial Sequence
  Description of Artificial Sequence: Synthetic oligonucleotide
  Target: LAMA2; (-) strand; PAM type: NNAGAAW; PAM sequence: TAAGAAA
atagtggtcataataaagaa

SEQ ID NO: 9159 - DNA, 20 bp, Artificial Sequence
  Description of Artificial Sequence: Synthetic oligonucleotide
  Target: LAMA2; (-) strand; PAM type: NNAGAAW; PAM sequence: AAAGAAT
gttttaatagtggtcataat

SEQ ID NO: 9160 - DNA, 20 bp, Artificial Sequence
  Description of Artificial Sequence: Synthetic oligonucleotide
  Target: LAMA2; (-) strand; PAM type: NNAGAAW; PAM sequence: ACAGAAT
ctaaacaaatagtgtataca

SEQ ID NO: 9161 - DNA, 20 bp, Artificial Sequence
  Description of Artificial Sequence: Synthetic oligonucleotide
  Target: LAMA2; (-) strand; PAM type: NNAGAAW; PAM sequence: ACAGAAA
ataggccgaggacctaaaaa

SEQ ID NO: 9162 - DNA, 20 bp, Artificial Sequence
  Description of Artificial Sequence: Synthetic oligonucleotide
  Target: LAMA2; (-) strand; PAM type: NNAGAAW; PAM sequence: TTAGAAT
tattgttttattcctgtgag

SEQ ID NO: 9163 - DNA, 20 bp, Artificial Sequence
  Description of Artificial Sequence: Synthetic oligonucleotide
  Target: LAMA2; (-) strand; PAM type: NNAGAAW; PAM sequence: AGAGAAA
attaaggcaagataaatatg

SEQ ID NO: 9164 - DNA, 20 bp, Artificial Sequence
  Description of Artificial Sequence: Synthetic oligonucleotide
  Target: LAMA2; (-) strand; PAM type: NNAGAAW; PAM sequence: AAAGAAA
acaatccctcatcaaacact

SEQ ID NO: 9165 - DNA, 20 bp, Artificial Sequence
  Description of Artificial Sequence: Synthetic oligonucleotide
  Target: LAMA2; (-) strand; PAM type: NNAGAAW; PAM sequence: AGAGAAT
aaaaggaggaagcaaatcta

SEQ ID NO: 9166 - DNA, 20 bp, Artificial Sequence
  Description of Artificial Sequence: Synthetic oligonucleotide
  Target: LAMA2; (-) strand; PAM type: NNAGAAW; PAM sequence: AAAGAAT
tatcatctttaatttagtgt

SEQ ID NO: 9167 - DNA, 20 bp, Artificial Sequence
  Description of Artificial Sequence: Synthetic oligonucleotide
  Target: LAMA2; (-) strand; PAM type: NNAGAAW; PAM sequence: ACAGAAA
gaatttcgtacactaacaaa

SEQ ID NO: 9168 - DNA, 20 bp, Artificial Sequence
  Description of Artificial Sequence: Synthetic oligonucleotide
  Target: LAMA2; (-) strand; PAM type: NNAGAAW; PAM sequence: ACAGAAT
taaagaagttagccactatt

SEQ ID NO: 9169 - DNA, 20 bp, Artificial Sequence
  Description of Artificial Sequence: Synthetic oligonucleotide
  Target: LAMA2; (-) strand; PAM type: NNAGAAW; PAM sequence: CTAGAAT
tattctcattttattttgtc

SEQ ID NO: 9170 - DNA, 20 bp, Artificial Sequence
  Description of Artificial Sequence: Synthetic oligonucleotide
  Target: LAMA2; (-) strand; PAM type: NNAGAAW; PAM sequence: ATAGAAA
tgtacagatgtcaggggcac

SEQ ID NO: 9171 - DNA, 20 bp, Artificial Sequence
  Description of Artificial Sequence: Synthetic oligonucleotide
  Target: LAMA2; (-) strand; PAM type: NNAGAAW; PAM sequence: AAAGAAA
tttaaaataatgtagacata

SEQ ID NO: 9172 - DNA, 20 bp, Artificial Sequence
  Description of Artificial Sequence: Synthetic oligonucleotide
  Target: LAMA2; (-) strand; PAM type: NNAGAAW; PAM sequence: ACAGAAT
actactgaaataatctgacc

SEQ ID NO: 9173 - DNA, 20 bp, Artificial Sequence
  Description of Artificial Sequence: Synthetic oligonucleotide
  Target: LAMA2; (-) strand; PAM type: NNAGAAW; PAM sequence: ATAGAAT
aattaaggtaattggatatt

SEQ ID NO: 9174 - DNA, 20 bp, Artificial Sequence
  Description of Artificial Sequence: Synthetic oligonucleotide
  Target: LAMA2; (-) strand; PAM type: NNAGAAW; PAM sequence: CCAGAAA
tcctaccctagtctagctaa

SEQ ID NO: 9175 - DNA, 20 bp, Artificial Sequence
  Description of Artificial Sequence: Synthetic oligonucleotide
  Target: LAMA2; (-) strand; PAM type: NNAGAAW; PAM sequence: TGAGAAT
tggatagccctgtagataac

SEQ ID NO: 9176 - DNA, 20 bp, Artificial Sequence
  Description of Artificial Sequence: Synthetic oligonucleotide
  Target: LAMA2; (-) strand; PAM type: NNAGAAW; PAM sequence: GGAGAAA
gagagctctcattgatggga

SEQ ID NO: 9177 - DNA, 20 bp, Artificial Sequence
  Description of Artificial Sequence: Synthetic oligonucleotide
  Target: LAMA2; (-) strand; PAM type: NNAGAAW; PAM sequence: TCAGAAA
ggggttaagtgatttcatcc

SEQ ID NO: 9178 - DNA, 20 bp, Artificial Sequence
  Description of Artificial Sequence: Synthetic oligonucleotide
  Target: LAMA2; (-) strand; PAM type: NNAGAAW; PAM sequence: TCAGAAT
ttttcttttgagctttttag

SEQ ID NO: 9179 - DNA, 20 bp, Artificial Sequence
  Description of Artificial Sequence: Synthetic oligonucleotide
  Target: LAMA2; (-) strand; PAM type: NNAGAAW; PAM sequence: AGAGAAT
gtaatatcttcatatggaaa

SEQ ID NO: 9180 - DNA, 20 bp, Artificial Sequence
  Description of Artificial Sequence: Synthetic oligonucleotide
  Target: LAMA2; (-) strand; PAM type: NNAGAAW; PAM sequence: ATAGAAA
aaactcacataaaagacaga

SEQ ID NO: 9181 - DNA, 20 bp, Artificial Sequence
  Description of Artificial Sequence: Synthetic oligonucleotide
  Target: LAMA2; (-) strand; PAM type: NNAGAAW; PAM sequence: ACAGAAT
ctgagaaactcacataaaag

SEQ ID NO: 9182 - DNA, 20 bp, Artificial Sequence
  Description of Artificial Sequence: Synthetic oligonucleotide
  Target: LAMA2; (-) strand; PAM type: NNAGAAW; PAM sequence: TGAGAAA
agtgtctttcatgtatatac

SEQ ID NO: 9183 - DNA, 20 bp, Artificial Sequence
  Description of Artificial Sequence: Synthetic oligonucleotide
  Target: LAMA2; (-) strand; PAM type: NNAGAAW; PAM sequence: TCAGAAA
tctttcatagatctcttgtt

SEQ ID NO: 9184 - DNA, 20 bp, Artificial Sequence
  Description of Artificial Sequence: Synthetic oligonucleotide
  Target: LAMA2; (-) strand; PAM type: NNAGAAW; PAM sequence: CAAGAAT
ggataatacaaataagtgaa

SEQ ID NO: 9185 - DNA, 20 bp, Artificial Sequence
  Description of Artificial Sequence: Synthetic oligonucleotide
  Target: LAMA2; (-) strand; PAM type: NNAGAAW; PAM sequence: CCAGAAA
aagtttttaattttctctgc

SEQ ID NO: 9186 - DNA, 20 bp, Artificial Sequence
  Description of Artificial Sequence: Synthetic oligonucleotide
  Target: LAMA2; (-) strand; PAM type: NNAGAAW; PAM sequence: ATAGAAT
agggtgttatgttaaatata

SEQ ID NO: 9187 - DNA, 20 bp, Artificial Sequence
  Description of Artificial Sequence: Synthetic oligonucleotide
  Target: LAMA2; (-) strand; PAM type: NNAGAAW; PAM sequence: TTAGAAA
atacctcttaaactcatcct

SEQ ID NO: 9188 - DNA, 20 bp, Artificial Sequence
  Description of Artificial Sequence: Synthetic oligonucleotide
  Target: LAMA2; (-) strand; PAM type: NNAGAAW; PAM sequence: AAAGAAT
tggtatatcacagtatatac

SEQ ID NO: 9189 - DNA, 20 bp, Artificial Sequence
  Description of Artificial Sequence: Synthetic oligonucleotide
  Target: LAMA2; (-) strand; PAM type: NNAGAAW; PAM sequence: TCAGAAT
gagattcatctataggagaa

SEQ ID NO: 9190 - DNA, 20 bp, Artificial Sequence
  Description of Artificial Sequence: Synthetic oligonucleotide
  Target: LAMA2; (-) strand; PAM type: NNAGAAW; PAM sequence: GGAGAAT
aacgcagagattcatctata

SEQ ID NO: 9191 - DNA, 20 bp, Artificial Sequence
  Description of Artificial Sequence: Synthetic oligonucleotide
  Target: LAMA2; (-) strand; PAM type: NNAGAAW; PAM sequence: GGAGAAA
aacagaggggagagagagaa

SEQ ID NO: 9192 - DNA, 20 bp, Artificial Sequence
  Description of Artificial Sequence: Synthetic oligonucleotide
  Target: LAMA2; (-) strand; PAM type: NNAGAAW; PAM sequence: GAAGAAA
taaaaaattactgatttaaa

SEQ ID NO: 9193 - DNA, 20 bp, Artificial Sequence
  Description of Artificial Sequence: Synthetic oligonucleotide
  Target: LAMA2; (-) strand; PAM type: NNAGAAW; PAM sequence: TGAGAAA
tattttgttttacttaagaa

SEQ ID NO: 9194 - DNA, 20 bp, Artificial Sequence
  Description of Artificial Sequence: Synthetic oligonucleotide
  Target: LAMA2; (-) strand; PAM type: NNAGAAW; PAM sequence: TAAGAAT
tgtccttattttgttttact

SEQ ID NO: 9195 - DNA, 20 bp, Artificial Sequence
  Description of Artificial Sequence: Synthetic oligonucleotide
  Target: LAMA2; (-) strand; PAM type: NNAGAAW; PAM sequence: AAAGAAA
tcaaaaactctaaacgtcct

SEQ ID NO: 9196 - DNA, 20 bp, Artificial Sequence
  Description of Artificial Sequence: Synthetic oligonucleotide
  Target: LAMA2; (-) strand; PAM type: NNAGAAW; PAM sequence: AGAGAAT
attcatatacaaatcatcag

SEQ ID NO: 9197 - DNA, 20 bp, Artificial Sequence
  Description of Artificial Sequence: Synthetic oligonucleotide
  Target: LAMA2; (-) strand; PAM type: NNAGAAW; PAM sequence: AAAGAAT
gtcatgttgatactatcaat

SEQ ID NO: 9198 - DNA, 20 bp, Artificial Sequence
  Description of Artificial Sequence: Synthetic oligonucleotide
  Target: LAMA2; (-) strand; PAM type: NNAGAAW; PAM sequence: CCAGAAT
aggaatcaccacactgtctt

SEQ ID NO: 9199 - DNA, 20 bp, Artificial Sequence
  Description of Artificial Sequence: Synthetic oligonucleotide
  Target: LAMA2; (-) strand; PAM type: NNAGAAW; PAM sequence: GTAGAAT
cgtgtgcatgtgtctttata

SEQ ID NO: 9200 - DNA, 20 bp, Artificial Sequence
  Description of Artificial Sequence: Synthetic oligonucleotide
  Target: LAMA2; (-) strand; PAM type: NNAGAAW; PAM sequence: TGAGAAT
ctgttcctctgttagtttgc

SEQ ID NO: 9201 - DNA, 20 bp, Artificial Sequence
  Description of Artificial Sequence: Synthetic oligonucleotide
  Target: LAMA2; (-) strand; PAM type: NNAGAAW; PAM sequence: TGAGAAA
aactccttttatcttctgtc

SEQ ID NO: 9202 - DNA, 20 bp, Artificial Sequence
  Description of Artificial Sequence: Synthetic oligonucleotide
  Target: LAMA2; (-) strand; PAM type: NNAGAAW; PAM sequence: TTAGAAA
cctgtcatcatacttctgac

SEQ ID NO: 9203 - DNA, 20 bp, Artificial Sequence
  Description of Artificial Sequence: Synthetic oligonucleotide
  Target: LAMA2; (-) strand; PAM type: NNAGAAW; PAM sequence: GCAGAAA
ccggtacctcagatggaaat

SEQ ID NO: 9204 - DNA, 20 bp, Artificial Sequence
  Description of Artificial Sequence: Synthetic oligonucleotide
  Target: LAMA2; (-) strand; PAM type: NNAGAAW; PAM sequence: TAAGAAT
gggttgaaaattcttttctt

SEQ ID NO: 9205 - DNA, 20 bp, Artificial Sequence
  Description of Artificial Sequence: Synthetic oligonucleotide
  Target: LAMA2; (-) strand; PAM type: NNAGAAW; PAM sequence: GCAGAAT
ccagtttgtgtcttttaatt

SEQ ID NO: 9206 - DNA, 20 bp, Artificial Sequence
  Description of Artificial Sequence: Synthetic oligonucleotide
  Target: LAMA2; (-) strand; PAM type: NNAGAAW; PAM sequence: GTAGAAT
agttcctccttgtacctctg

SEQ ID NO: 9207 - DNA, 20 bp, Artificial Sequence
  Description of Artificial Sequence: Synthetic oligonucleotide
  Target: LAMA2; (-) strand; PAM type: NNAGAAW; PAM sequence: TCAGAAT
gtctctgcccggctttggta

SEQ ID NO: 9208 - DNA, 20 bp, Artificial Sequence
  Description of Artificial Sequence: Synthetic oligonucleotide
  Target: LAMA2; (-) strand; PAM type: NNAGAAW; PAM sequence: TAAGAAT
gtttgtctgttgttggtgta

SEQ ID NO: 9209 - DNA, 20 bp, Artificial Sequence
  Description of Artificial Sequence: Synthetic oligonucleotide
  Target: LAMA2; (-) strand; PAM type: NNAGAAW; PAM sequence: GAAGAAA
gtagttttttccaattctgt

SEQ ID NO: 9210 - DNA, 20 bp, Artificial Sequence
  Description of Artificial Sequence: Synthetic oligonucleotide
  Target: LAMA2; (-) strand; PAM type: NNAGAAW; PAM sequence: TGAGAAT
ttgttcttgcgatagtttac

SEQ ID NO: 9211 - DNA, 20 bp, Artificial Sequence
  Description of Artificial Sequence: Synthetic oligonucleotide
  Target: LAMA2; (-) strand; PAM type: NNAGAAW; PAM sequence: TGAGAAT
gttcaattcccacctatgag

SEQ ID NO: 9212 - DNA, 20 bp, Artificial Sequence
  Description of Artificial Sequence: Synthetic oligonucleotide
  Target: LAMA2; (-) strand; PAM type: NNAGAAW; PAM sequence: TAAGAAA
ttataaataaggcctgaaaa

SEQ ID NO: 9213 - DNA, 20 bp, Artificial Sequence
  Description of Artificial Sequence: Synthetic oligonucleotide
  Target: LAMA2; (-) strand; PAM type: NNAGAAW; PAM sequence: TTAGAAA
tatttataatttgacaataa

SEQ ID NO: 9214 - DNA, 20 bp, Artificial Sequence
  Description of Artificial Sequence: Synthetic oligonucleotide
  Target: LAMA2; (-) strand; PAM type: NNAGAAW; PAM sequence: GAAGAAT
gctggttaatagaatattat

SEQ ID NO: 9215 - DNA, 20 bp, Artificial Sequence
  Description of Artificial Sequence: Synthetic oligonucleotide
  Target: LAMA2; (-) strand; PAM type: NNAGAAW; PAM sequence: ATAGAAT
aaggtgttaagtgctggtta

SEQ ID NO: 9216 - DNA, 20 bp, Artificial Sequence
  Description of Artificial Sequence: Synthetic oligonucleotide
  Target: LAMA2; (-) strand; PAM type: NNAGAAW; PAM sequence: CCAGAAT
ttccagcatgttttttcttt

SEQ ID NO: 9217 - DNA, 20 bp, Artificial Sequence
  Description of Artificial Sequence: Synthetic oligonucleotide
  Target: LAMA2; (-) strand; PAM type: NNAGAAW; PAM sequence: TCAGAAA
gaaagaaaccttaatgtttt

SEQ ID NO: 9218 - DNA, 20 bp, Artificial Sequence
  Description of Artificial Sequence: Synthetic oligonucleotide
  Target: LAMA2; (-) strand; PAM type: NNAGAAW; PAM sequence: AAAGAAA
attaactaataagctttggg

SEQ ID NO: 9219 - DNA, 20 bp, Artificial Sequence
  Description of Artificial Sequence: Synthetic oligonucleotide
  Target: LAMA2; (-) strand; PAM type: NNAGAAW; PAM sequence: GGAGAAT
aaggaagggtgggaagagag

SEQ ID NO: 9220 - DNA, 20 bp, Artificial Sequence
  Description of Artificial Sequence: Synthetic oligonucleotide
  Target: LAMA2; (-) strand; PAM type: NNAGAAW; PAM sequence: GAAGAAA
aagaaaataaaggagatagg

SEQ ID NO: 9221 - DNA, 20 bp, Artificial Sequence
  Description of Artificial Sequence: Synthetic oligonucleotide
  Target: LAMA2; (-) strand; PAM type: NNAGAAW; PAM sequence: GAAGAAA
aaaaactaataaagaagaag

SEQ ID NO: 9222 - DNA, 20 bp, Artificial Sequence
  Description of Artificial Sequence: Synthetic oligonucleotide
  Target: LAMA2; (-) strand; PAM type: NNAGAAW; PAM sequence: AGAGAAT
ggtgagatattagagtggtc

SEQ ID NO: 9223 - DNA, 20 bp, Artificial Sequence
  Description of Artificial Sequence: Synthetic oligonucleotide
  Target: LAMA2; (-) strand; PAM type: NNAGAAW; PAM sequence: TGAGAAT
ttttataataaaaagcctga

SEQ ID NO: 9224 - DNA, 20 bp, Artificial Sequence
  Description of Artificial Sequence: Synthetic oligonucleotide
  Target: LAMA2; (-) strand; PAM type: NNAGAAW; PAM sequence: TGAGAAA
aagaagatacttgaaagtaa

SEQ ID NO: 9225 - DNA, 20 bp, Artificial Sequence
  Description of Artificial Sequence: Synthetic oligonucleotide
  Target: LAMA2; (-) strand; PAM type: NNAGAAW; PAM sequence: TTAGAAT
ttggattaatatatagaact

SEQ ID NO: 9226 - DNA, 20 bp, Artificial Sequence
  Description of Artificial Sequence: Synthetic oligonucleotide
  Target: LAMA2; (-) strand; PAM type: NNAGAAW; PAM sequence: AGAGAAA
caaacaagaaggaaaacaag

SEQ ID NO: 9227 - DNA, 20 bp, Artificial Sequence
  Description of Artificial Sequence: Synthetic oligonucleotide
  Target: LAMA2; (-) strand; PAM type: NNAGAAW; PAM sequence: TCAGAAA
agttaaaagatattaaacta

SEQ ID NO: 9228 - DNA, 20 bp, Artificial Sequence
  Description of Artificial Sequence: Synthetic oligonucleotide
  Target: LAMA2; (-) strand; PAM type: NNAGAAW; PAM sequence: AAAGAAA
aagaatgtttgaatcgggta

SEQ ID NO: 9229 - DNA, 20 bp, Artificial Sequence
  Description of Artificial Sequence: Synthetic oligonucleotide
  Target: LAMA2; (-) strand; PAM type: NNAGAAW; PAM sequence: CAAGAAT
tccagcctctaagatcaagg

SEQ ID NO: 9230 - DNA, 20 bp, Artificial Sequence
  Description of Artificial Sequence: Synthetic oligonucleotide
  Target: LAMA2; (-) strand; PAM type: NNAGAAW; PAM sequence: GCAGAAA
aggcagttcagaaatcaagg

SEQ ID NO: 9231 - DNA, 20 bp, Artificial Sequence
  Description of Artificial Sequence: Synthetic oligonucleotide
  Target: LAMA2; (-) strand; PAM type: NNAGAAW; PAM sequence: TCAGAAA
agactaactgcagaggcagt

SEQ ID NO: 9232 - DNA, 20 bp, Artificial Sequence
  Description of Artificial Sequence: Synthetic oligonucleotide
  Target: LAMA2; (-) strand; PAM type: NNAGAAW; PAM sequence: CTAGAAT
tatgggaagatgaatagcat

SEQ ID NO: 9233 - DNA, 20 bp, Artificial Sequence
  Description of Artificial Sequence: Synthetic oligonucleotide
  Target: LAMA2; (-) strand; PAM type: NNAGAAW; PAM sequence: GAAGAAA
tagaataaatccccattagt

SEQ ID NO: 9234 - DNA, 20 bp, Artificial Sequence
  Description of Artificial Sequence: Synthetic oligonucleotide
  Target: LAMA2; (-) strand; PAM type: NNAGAAW; PAM sequence: TTAGAAT
atactgaacaaaaaagttcc

SEQ ID NO: 9235 - DNA, 20 bp, Artificial Sequence
  Description of Artificial Sequence: Synthetic oligonucleotide
  Target: LAMA2; (-) strand; PAM type: NNAGAAW; PAM sequence: TCAGAAA
tatttctgactattccttca

SEQ ID NO: 9236 - DNA, 20 bp, Artificial Sequence
  Description of Artificial Sequence: Synthetic oligonucleotide
  Target: LAMA2; (-) strand; PAM type: NNAGAAW; PAM sequence: TCAGAAA
atacagtgtgttcctgtatt

SEQ ID NO: 9237 - DNA, 20 bp, Artificial Sequence
  Description of Artificial Sequence: Synthetic oligonucleotide
  Target: LAMA2; (-) strand; PAM type: NNAGAAW; PAM sequence: GAAGAAA
actcttaattttcagtactg

SEQ ID NO: 9238 - DNA, 20 bp, Artificial Sequence
  Description of Artificial Sequence: Synthetic oligonucleotide
  Target: LAMA2; (-) strand; PAM type: NNAGAAW; PAM sequence: TAAGAAT
ttagtctctcactagtaaaa

SEQ ID NO: 9239 - DNA, 20 bp, Artificial Sequence
  Description of Artificial Sequence: Synthetic oligonucleotide
  Target: LAMA2; (-) strand; PAM type: NNAGAAW; PAM sequence: AGAGAAA
tctggaatatttaaagaggt

SEQ ID NO: 9240 - DNA, 20 bp, Artificial Sequence
  Description of Artificial Sequence: Synthetic oligonucleotide
  Target: LAMA2; (-) strand; PAM type: NNAGAAW; PAM sequence: CAAGAAA
ggtctttgaattatgcatgc

SEQ ID NO: 9241 - DNA, 20 bp, Artificial Sequence
  Description of Artificial Sequence: Synthetic oligonucleotide
  Target: LAMA2; (-) strand; PAM type: NNAGAAW; PAM sequence: CAAGAAA
gtatactctccaaagatatc

SEQ ID NO: 9242 - DNA, 20 bp, Artificial Sequence
  Description of Artificial Sequence: Synthetic oligonucleotide
  Target: LAMA2; (-) strand; PAM type: NNAGAAW; PAM sequence: AAAGAAA
ttccaaagtgtttgaaagaa

SEQ ID NO: 9243 - DNA, 20 bp, Artificial Sequence
  Description of Artificial Sequence: Synthetic oligonucleotide
  Target: LAMA2; (-) strand; PAM type: NNAGAAW; PAM sequence: AAAGAAA
ttataattccaaagtgtttg

SEQ ID NO: 9244 - DNA, 20 bp, Artificial Sequence
  Description of Artificial Sequence: Synthetic oligonucleotide
  Target: LAMA2; (-) strand; PAM type: NNAGAAW; PAM sequence: AAAGAAT
agtcataaaactcagttttt

SEQ ID NO: 9245 - DNA, 20 bp, Artificial Sequence
  Description of Artificial Sequence: Synthetic oligonucleotide
  Target: LAMA2; (-) strand; PAM type: NNAGAAW; PAM sequence: TAAGAAT
ggaagacagctggtaggcgg

SEQ ID NO: 9246 - DNA, 20 bp, Artificial Sequence
  Description of Artificial Sequence: Synthetic oligonucleotide
  Target: LAMA2; (-) strand; PAM type: NNAGAAW; PAM sequence: CAAGAAA
agaggatcctgccatataat

SEQ ID NO: 9247 - DNA, 20 bp, Artificial Sequence
  Description of Artificial Sequence: Synthetic oligonucleotide
  Target: LAMA2; (-) strand; PAM type: NNAGAAW; PAM sequence: CTAGAAT
ttgaaacactgagccataag

SEQ ID NO: 9248 - DNA, 20 bp, Artificial Sequence
  Description of Artificial Sequence: Synthetic oligonucleotide
  Target: LAMA2; (-) strand; PAM type: NNAGAAW; PAM sequence: GCAGAAT
gctgctggcaaacaagtgct

SEQ ID NO: 9249 - DNA, 20 bp, Artificial Sequence
  Description of Artificial Sequence: Synthetic oligonucleotide
  Target: LAMA2; (-) strand; PAM type: NNAGAAW; PAM sequence: AAAGAAA
gttgccacactgttcctgac

SEQ ID NO: 9250 - DNA, 20 bp, Artificial Sequence
  Description of Artificial Sequence: Synthetic oligonucleotide
  Target: LAMA2; (-) strand; PAM type: NNAGAAW; PAM sequence: GTAGAAT
ggatcattctggttcaccag

SEQ ID NO: 9251 - DNA, 20 bp, Artificial Sequence
  Description of Artificial Sequence: Synthetic oligonucleotide
  Target: LAMA2; (-) strand; PAM type: NNAGAAW; PAM sequence: TTAGAAA
tgtatgatcattacccagat

SEQ ID NO: 9252 - DNA, 20 bp, Artificial Sequence
  Description of Artificial Sequence: Synthetic oligonucleotide
  Target: LAMA2; (-) strand; PAM type: NNAGAAW; PAM sequence: AGAGAAT
tcttttcatgcatgtttggt

SEQ ID NO: 9253 - DNA, 20 bp, Artificial Sequence
  Description of Artificial Sequence: Synthetic oligonucleotide
  Target: LAMA2; (-) strand; PAM type: NNAGAAW; PAM sequence: AAAGAAA
aaagaggaaagaaacaaatt

SEQ ID NO: 9254 - DNA, 20 bp, Artificial Sequence
  Description of Artificial Sequence: Synthetic oligonucleotide
  Target: LAMA2; (-) strand; PAM type: NNAGAAW; PAM sequence: AAAGAAA
tttcacctaaacgaaagagg

SEQ ID NO: 9255 - DNA, 20 bp, Artificial Sequence
  Description of Artificial Sequence: Synthetic oligonucleotide
  Target: LAMA2; (-) strand; PAM type: NNAGAAW; PAM sequence: AGAGAAT
aaatcccttttctcttgagg

SEQ ID NO: 9256 - DNA, 20 bp, Artificial Sequence
  Description of Artificial Sequence: Synthetic oligonucleotide
  Target: LAMA2; (-) strand; PAM type: NNAGAAW; PAM sequence: GGAGAAA
atttttgaaattttacctca

SEQ ID NO: 9257 - DNA, 20 bp, Artificial Sequence
  Description of Artificial Sequence: Synthetic oligonucleotide
  Target: LAMA2; (-) strand; PAM type: NNAGAAW; PAM sequence: CTAGAAT
cagaacctccaaaacatcat

SEQ ID NO: 9258 - DNA, 20 bp, Artificial Sequence
  Description of Artificial Sequence: Synthetic oligonucleotide
  Target: LAMA2; (-) strand; PAM type: NNAGAAW; PAM sequence: AAAGAAT
gactccatctcaaagaaaaa

SEQ ID NO: 9259 - DNA, 20 bp, Artificial Sequence
  Description of Artificial Sequence: Synthetic oligonucleotide
  Target: LAMA2; (-) strand; PAM type: NNAGAAW; PAM sequence: AAAGAAA
acagagcgagactccatctc

SEQ ID NO: 9260 - DNA, 20 bp, Artificial Sequence
  Description of Artificial Sequence: Synthetic oligonucleotide
  Target: LAMA2; (-) strand; PAM type: NNAGAAW; PAM sequence: GGAGAAT
ctactcgggaggctgaggca

SEQ ID NO: 9261 - DNA, 20 bp, Artificial Sequence
  Description of Artificial Sequence: Synthetic oligonucleotide
  Target: LAMA2; (-) strand; PAM type: NNAGAAW; PAM sequence: TAAGAAT
tccacatggataaatgggat

SEQ ID NO: 9262 - DNA, 20 bp, Artificial Sequence
  Description of Artificial Sequence: Synthetic oligonucleotide
  Target: LAMA2; (-) strand; PAM type: NNAGAAW; PAM sequence: AAAGAAT
aaagagaaggagagaggtac

SEQ ID NO: 9263 - DNA, 20 bp, Artificial Sequence
  Description of Artificial Sequence: Synthetic oligonucleotide
  Target: LAMA2; (-) strand; PAM type: NNAGAAW; PAM sequence: CTAGAAA
tggttaatttcagttactct

SEQ ID NO: 9264 - DNA, 20 bp, Artificial Sequence
  Description of Artificial Sequence: Synthetic oligonucleotide
  Target: LAMA2; (-) strand; PAM type: NNAGAAW; PAM sequence: TCAGAAT
actaagagaaacatgtgctc

SEQ ID NO: 9265 - DNA, 20 bp, Artificial Sequence
  Description of Artificial Sequence: Synthetic oligonucleotide
  Target: LAMA2; (-) strand; PAM type: NNAGAAW; PAM sequence: AGAGAAA
gtccggagtaaacagtacta

SEQ ID NO: 9266 - DNA, 20 bp, Artificial Sequence
  Description of Artificial Sequence: Synthetic oligonucleotide
  Target: LAMA2; (-) strand; PAM type: NNAGAAW; PAM sequence: AAAGAAA
actaccaaaaatagttttta

SEQ ID NO: 9267 - DNA, 20 bp, Artificial Sequence
  Description of Artificial Sequence: Synthetic oligonucleotide
  Target: LAMA2; (-) strand; PAM type: NNAGAAW; PAM sequence: GAAGAAT
agtagaaggaacacaagggt

SEQ ID NO: 9268 - DNA, 20 bp, Artificial Sequence
  Description of Artificial Sequence: Synthetic oligonucleotide
  Target: LAMA2; (-) strand; PAM type: NNAGAAW; PAM sequence: GCAGAAA
tacaatattatctttgcttt

SEQ ID NO: 9269 - DNA, 20 bp, Artificial Sequence
  Description of Artificial Sequence: Synthetic oligonucleotide
  Target: LAMA2; (-) strand; PAM type: NNAGAAW; PAM sequence: GCAGAAA
aagaaattttaaatgtttct

SEQ ID NO: 9270 - DNA, 20 bp, Artificial Sequence
  Description of Artificial Sequence: Synthetic oligonucleotide
  Target: LAMA2; (-) strand; PAM type: NNAGAAW; PAM sequence: GAAGAAA
ggtaagtacaaaatatagct

SEQ ID NO: 9271 - DNA, 20 bp, Artificial Sequence
  Description of Artificial Sequence: Synthetic oligonucleotide
  Target: LAMA2; (-) strand; PAM type: NNAGAAW; PAM sequence: TTAGAAA
aacaaagcataatattcaaa

SEQ ID NO: 9272 - DNA, 20 bp, Artificial Sequence
  Description of Artificial Sequence: Synthetic oligonucleotide
  Target: LAMA2; (-) strand; PAM type: NNAGAAW; PAM sequence: GAAGAAA
ttttacattacaacatgtta

SEQ ID NO: 9273 - DNA, 20 bp, Artificial Sequence
  Description of Artificial Sequence: Synthetic oligonucleotide
  Target: LAMA2; (-) strand; PAM type: NNAGAAW; PAM sequence: ACAGAAT
aataaatgtatactttatcc

SEQ ID NO: 9274 - DNA, 20 bp, Artificial Sequence
  Description of Artificial Sequence: Synthetic oligonucleotide
  Target: LAMA2; (-) strand; PAM type: NNAGAAW; PAM sequence: CAAGAAA
agctatttcctgtaaatagt

SEQ ID NO: 9275 - DNA, 20 bp, Artificial Sequence
  Description of Artificial Sequence: Synthetic oligonucleotide
  Target: LAMA2; (-) strand; PAM type: NNAGAAW; PAM sequence: ACAGAAT
tgaagaaccagaaaaaagat

SEQ ID NO: 9276 - DNA, 20 bp, Artificial Sequence
  Description of Artificial Sequence: Synthetic oligonucleotide
  Target: LAMA2; (-) strand; PAM type: NNAGAAW; PAM sequence: CCAGAAA
tgaactatcaccttgaagaa

SEQ ID NO: 9277 - DNA, 20 bp, Artificial Sequence
  Description of Artificial Sequence: Synthetic oligonucleotide
  Target: LAMA2; (-) strand; PAM type: NNAGAAW; PAM sequence: ATAGAAA
ttaaataaaaatgtaatcat

SEQ ID NO: 9278 - DNA, 20 bp, Artificial Sequence
  Description of Artificial Sequence: Synthetic oligonucleotide
  Target: LAMA2; (-) strand; PAM type: NNAGAAW; PAM sequence: CAAGAAT
gcatctctacttaaaatcta

SEQ ID NO: 9279 - DNA, 20 bp, Artificial Sequence
  Description of Artificial Sequence: Synthetic oligonucleotide
  Target: LAMA2; (-) strand; PAM type: NNAGAAW; PAM sequence: GAAGAAA
aatatttctaaaatatgtga

SEQ ID NO: 9280 - DNA, 20 bp, Artificial Sequence
  Description of Artificial Sequence: Synthetic oligonucleotide
  Target: LAMA2; (-) strand; PAM type: NNAGAAW; PAM sequence: AGAGAAT
tttattctctattctcatat

SEQ ID NO: 9281 - DNA, 20 bp, Artificial Sequence
  Description of Artificial Sequence: Synthetic oligonucleotide
  Target: LAMA2; (-) strand; PAM type: NNAGAAW; PAM sequence: CTAGAAT
cagttgctcaagacaaaaat

SEQ ID NO: 9282 - DNA, 20 bp, Artificial Sequence
  Description of Artificial Sequence: Synthetic oligonucleotide
  Target: LAMA2; (-) strand; PAM type: NNAGAAW; PAM sequence: GGAGAAT
ttctgatgctgctgaaatct

SEQ ID NO: 9283 - DNA, 20 bp, Artificial Sequence
  Description of Artificial Sequence: Synthetic oligonucleotide
  Target: LAMA2; (-) strand; PAM type: NNAGAAW; PAM sequence: ACAGAAA
atctttcttctgctttgtac

SEQ ID NO: 9284 - DNA, 20 bp, Artificial Sequence
  Description of Artificial Sequence: Synthetic oligonucleotide
  Target: LAMA2; (-) strand; PAM type: NNAGAAW; PAM sequence: ACAGAAT
cacagtgtagcacactgtgt

SEQ ID NO: 9285 - DNA, 20 bp, Artificial Sequence
  Description of Artificial Sequence: Synthetic oligonucleotide
  Target: LAMA2; (-) strand; PAM type: NNAGAAW; PAM sequence: AAAGAAA
ttgaatacatgtctagcttc

SEQ ID NO: 9286 - DNA, 20 bp, Artificial Sequence
  Description of Artificial Sequence: Synthetic oligonucleotide
  Target: LAMA2; (-) strand; PAM type: NNAGAAW; PAM sequence: TTAGAAT
atatatgccactagtgcttc

SEQ ID NO: 9287 - DNA, 20 bp, Artificial Sequence
  Description of Artificial Sequence: Synthetic oligonucleotide
  Target: LAMA2; (-) strand; PAM type: NNAGAAW; PAM sequence: CAAGAAT
ttagagtaccttagagttgg

SEQ ID NO: 9288 - DNA, 20 bp, Artificial Sequence
  Description of Artificial Sequence: Synthetic oligonucleotide
  Target: LAMA2; (-) strand; PAM type: NNAGAAW; PAM sequence: AAAGAAA
tcctagtgcagactacataa

SEQ ID NO: 9289 - DNA, 20 bp, Artificial Sequence
  Description of Artificial Sequence: Synthetic oligonucleotide
  Target: LAMA2; (-) strand; PAM type: NNAGAAW; PAM sequence: AAAGAAA
tagttaaaacacaaagggca

SEQ ID NO: 9290 - DNA, 20 bp, Artificial Sequence
  Description of Artificial Sequence: Synthetic oligonucleotide
  Target: LAMA2; (-) strand; PAM type: NNAGAAW; PAM sequence: AGAGAAT
ttatgtctcatctgaatcat

SEQ ID NO: 9291 - DNA, 20 bp, Artificial Sequence
  Description of Artificial Sequence: Synthetic oligonucleotide
  Target: LAMA2; (-) strand; PAM type: NNAGAAW; PAM sequence: TAAGAAT
aaagagaatattgcccatac

SEQ ID NO: 9292 - DNA, 20 bp, Artificial Sequence
  Description of Artificial Sequence: Synthetic oligonucleotide
  Target: LAMA2; (-) strand; PAM type: NNAGAAW; PAM sequence: AGAGAAT
taaccatcatatagatcaaa

SEQ ID NO: 9293 - DNA, 20 bp, Artificial Sequence
  Description of Artificial Sequence: Synthetic oligonucleotide
  Target: LAMA2; (-) strand; PAM type: NNAGAAW; PAM sequence: ATAGAAA
aatatataatgtatatatgt

SEQ ID NO: 9294 - DNA, 20 bp, Artificial Sequence
  Description of Artificial Sequence: Synthetic oligonucleotide
  Target: LAMA2; (-) strand; PAM type: NNAGAAW; PAM sequence: TCAGAAA
tcaatatattggaagattgt

SEQ ID NO: 9295 - DNA, 20 bp, Artificial Sequence
  Description of Artificial Sequence: Synthetic oligonucleotide
  Target: LAMA2; (-) strand; PAM type: NNAGAAW; PAM sequence: AAAGAAA
gcctcacaaaaatagaaaca

SEQ ID NO: 9296 - DNA, 20 bp, Artificial Sequence
  Description of Artificial Sequence: Synthetic oligonucleotide
  Target: LAMA2; (-) strand; PAM type: NNAGAAW; PAM sequence: ATAGAAA
aactatagtgcctcacaaaa

SEQ ID NO: 9297 - DNA, 20 bp, Artificial Sequence
  Description of Artificial Sequence: Synthetic oligonucleotide
  Target: LAMA2; (-) strand; PAM type: NNAGAAW; PAM sequence: TTAGAAA
gaataaatgaaataatggcg

SEQ ID NO: 9298 - DNA, 20 bp, Artificial Sequence
  Description of Artificial Sequence: Synthetic oligonucleotide
  Target: LAMA2; (-) strand; PAM type: NNAGAAW; PAM sequence: ATAGAAT
aaatgccaattttgtctttc

SEQ ID NO: 9299 - DNA, 20 bp, Artificial Sequence
  Description of Artificial Sequence: Synthetic oligonucleotide
  Target: LAMA2; (-) strand; PAM type: NNAGAAW; PAM sequence: TCAGAAA
cataatggaaagagatgcca

SEQ ID NO: 9300 - DNA, 20 bp, Artificial Sequence
  Description of Artificial Sequence: Synthetic oligonucleotide
  Target: LAMA2; (-) strand; PAM type: NNAGAAW; PAM sequence: GAAGAAA
tttgtacttacatatttatt

SEQ ID NO: 9301 - DNA, 20 bp, Artificial Sequence
  Description of Artificial Sequence: Synthetic oligonucleotide
  Target: LAMA2; (-) strand; PAM type: NNAGAAW; PAM sequence: TTAGAAA
tatgaataggaccctatcat

SEQ ID NO: 9302 - DNA, 20 bp, Artificial Sequence
  Description of Artificial Sequence: Synthetic oligonucleotide
  Target: LAMA2; (-) strand; PAM type: NNAGAAW; PAM sequence: ACAGAAA
ttaacctcttaagataaaac

SEQ ID NO: 9303 - DNA, 20 bp, Artificial Sequence
  Description of Artificial Sequence: Synthetic oligonucleotide
  Target: LAMA2; (-) strand; PAM type: NNAGAAW; PAM sequence: CAAGAAA
tggcaaataggacaagaata

SEQ ID NO: 9304 - DNA, 20 bp, Artificial Sequence
  Description of Artificial Sequence: Synthetic oligonucleotide
  Target: LAMA2; (-) strand; PAM type: NNAGAAW; PAM sequence: CAAGAAT
tataataatggcaaatagga

SEQ ID NO: 9305 - DNA, 20 bp, Artificial Sequence
  Description of Artificial Sequence: Synthetic oligonucleotide
  Target: LAMA2; (-) strand; PAM type: NNAGAAW; PAM sequence: TTAGAAT
ctaaagaaaagtcagactat

SEQ ID NO: 9306 - DNA, 20 bp, Artificial Sequence
  Description of Artificial Sequence: Synthetic oligonucleotide
  Target: LAMA2; (-) strand; PAM type: NNAGAAW; PAM sequence: AAAGAAA
gactttgagtgaagaactct

SEQ ID NO: 9307 - DNA, 20 bp, Artificial Sequence
  Description of Artificial Sequence: Synthetic oligonucleotide
  Target: LAMA2; (-) strand; PAM type: NNAGAAW; PAM sequence: GTAGAAA
cctgacaaggtagatccaat

SEQ ID NO: 9308 - DNA, 20 bp, Artificial Sequence
  Description of Artificial Sequence: Synthetic oligonucleotide
  Target: LAMA2; (-) strand; PAM type: NNAGAAW; PAM sequence: CAAGAAA
agcaaaatgagaaagtaaac

SEQ ID NO: 9309 - DNA, 20 bp, Artificial Sequence
  Description of Artificial Sequence: Synthetic oligonucleotide
  Target: LAMA2; (-) strand; PAM type: NNAGAAW; PAM sequence: TGAGAAA
gaggatgtgctccagcaaaa

SEQ ID NO: 9310 - DNA, 20 bp, Artificial Sequence
  Description of Artificial Sequence: Synthetic oligonucleotide
  Target: LAMA2; (-) strand; PAM type: NNAGAAW; PAM sequence: TCAGAAA
atgagttaaactggaaggac

SEQ ID NO: 9311 - DNA, 20 bp, Artificial Sequence
  Description of Artificial Sequence: Synthetic oligonucleotide
  Target: LAMA2; (-) strand; PAM type: NNAGAAW; PAM sequence: GGAGAAA
gagtttcaaaaaagtagact

SEQ ID NO: 9312 - DNA, 20 bp, Artificial Sequence
  Description of Artificial Sequence: Synthetic oligonucleotide
  Target: LAMA2; (-) strand; PAM type: NNAGAAW; PAM sequence: AGAGAAA
aaaaaaatactgaaaatatg

SEQ ID NO: 9313 - DNA, 20 bp, Artificial Sequence
  Description of Artificial Sequence: Synthetic oligonucleotide
  Target: LAMA2; (-) strand; PAM type: NNAGAAW; PAM sequence: AGAGAAA
ttgaaggcatcacccacaaa

SEQ ID NO: 9314 - DNA, 20 bp, Artificial Sequence
  Description of Artificial Sequence: Synthetic oligonucleotide
  Target: LAMA2; (-) strand; PAM type: NNAGAAW; PAM sequence: ATAGAAT
gaagagattcaagaagaaaa

SEQ ID NO: 9315 - DNA, 20 bp, Artificial Sequence
  Description of Artificial Sequence: Synthetic oligonucleotide
  Target: LAMA2; (-) strand; PAM type: NNAGAAW; PAM sequence: GAAGAAA
atatttttgaagagattcaa

SEQ ID NO: 9316 - DNA, 20 bp, Artificial Sequence
  Description of Artificial Sequence: Synthetic oligonucleotide
  Target: LAMA2; (-) strand; PAM type: NNAGAAW; PAM sequence: GAAGAAT
aaatagtccctcatggaaaa

SEQ ID NO: 9317 - DNA, 20 bp, Artificial Sequence
  Description of Artificial Sequence: Synthetic oligonucleotide
  Target: LAMA2; (-) strand; PAM type: NNAGAAW; PAM sequence: GGAGAAA
agtatggagattaccattct

SEQ ID NO: 9318 - DNA, 20 bp, Artificial Sequence
  Description of Artificial Sequence: Synthetic oligonucleotide
  Target: LAMA2; (-) strand; PAM type: NNAGAAW; PAM sequence: CCAGAAT
ggccaagaatagttgtggcc

SEQ ID NO: 9319 - DNA, 20 bp, Artificial Sequence
  Description of Artificial Sequence: Synthetic oligonucleotide
  Target: LAMA2; (-) strand; PAM type: NNAGAAW; PAM sequence: CAAGAAT
ttcaggggtagacaaaaggc

SEQ ID NO: 9320 - DNA, 20 bp, Artificial Sequence
  Description of Artificial Sequence: Synthetic oligonucleotide
  Target: LAMA2; (-) strand; PAM type: NNAGAAW; PAM sequence: TCAGAAA
ccatttgtggctgttagggc

SEQ ID NO: 9321 - DNA, 20 bp, Artificial Sequence
  Description of Artificial Sequence: Synthetic oligonucleotide
  Target: LAMA2; (-) strand; PAM type: NNAGAAW; PAM sequence: GGAGAAA
tcaaaatgaaaatccaaaaa

SEQ ID NO: 9322 - DNA, 20 bp, Artificial Sequence
  Description of Artificial Sequence: Synthetic oligonucleotide
  Target: LAMA2; (-) strand; PAM type: NNAGAAW; PAM sequence: AAAGAAA
aattattttaacttttgtat

SEQ ID NO: 9323 - DNA, 20 bp, Artificial Sequence
  Description of Artificial Sequence: Synthetic oligonucleotide
  Target: LAMA2; (-) strand; PAM type: NNAGAAW; PAM sequence: TCAGAAT
atgaaaggctaattttagca

SEQ ID NO: 9324 - DNA, 20 bp, Artificial Sequence
  Description of Artificial Sequence: Synthetic oligonucleotide
  Target: LAMA2; (-) strand; PAM type: NNAGAAW; PAM sequence: TAAGAAA
gtgcactttctgtatcagtt

SEQ ID NO: 9325 - DNA, 20 bp, Artificial Sequence
  Description of Artificial Sequence: Synthetic oligonucleotide
  Target: LAMA2; (-) strand; PAM type: NNAGAAW; PAM sequence: CCAGAAT
gcttttgaacatttttactt

SEQ ID NO: 9326 - DNA, 20 bp, Artificial Sequence
  Description of Artificial Sequence: Synthetic oligonucleotide
  Target: LAMA2; (-) strand; PAM type: NNAGAAW; PAM sequence: GAAGAAA
atatatgtttgtagcaaatt

SEQ ID NO: 9327 - DNA, 20 bp, Artificial Sequence
  Description of Artificial Sequence: Synthetic oligonucleotide
  Target: LAMA2; (-) strand; PAM type: NNAGAAW; PAM sequence: CTAGAAA
gcttctgctaattcttatgg

SEQ ID NO: 9328 - DNA, 20 bp, Artificial Sequence
  Description of Artificial Sequence: Synthetic oligonucleotide
  Target: LAMA2; (-) strand; PAM type: NNAGAAW; PAM sequence: AAAGAAA
ttgtaaaacctgcagtccct

SEQ ID NO: 9329 - DNA, 20 bp, Artificial Sequence
  Description of Artificial Sequence: Synthetic oligonucleotide
  Target: LAMA2; (-) strand; PAM type: NNAGAAW; PAM sequence: ATAGAAT
ttccttttaagtaaaacaaa

SEQ ID NO: 9330 - DNA, 20 bp, Artificial Sequence
  Description of Artificial Sequence: Synthetic oligonucleotide
  Target: LAMA2; (-) strand; PAM type: NNAGAAW; PAM sequence: GTAGAAT
tttcatgaataagcaaaaat

SEQ ID NO: 9331 - DNA, 20 bp, Artificial Sequence
  Description of Artificial Sequence: Synthetic oligonucleotide
  Target: LAMA2; (-) strand; PAM type: NNAGAAW; PAM sequence: ACAGAAT
caatgagagcctgccaatag

SEQ ID NO: 9332 - DNA, 20 bp, Artificial Sequence
  Description of Artificial Sequence: Synthetic oligonucleotide
  Target: LAMA2; (-) strand; PAM type: NNAGAAW; PAM sequence: TGAGAAT
caccaagaaaattttgcaac

SEQ ID NO: 9333 - DNA, 20 bp, Artificial Sequence
  Description of Artificial Sequence: Synthetic oligonucleotide
  Target: LAMA2; (-) strand; PAM type: NNAGAAW; PAM sequence: CAAGAAA
aagtacaatttcttaagcac

SEQ ID NO: 9334 - DNA, 20 bp, Artificial Sequence
  Description of Artificial Sequence: Synthetic oligonucleotide
  Target: LAMA2; (-) strand; PAM type: NNAGAAW; PAM sequence: TTAGAAA
gtctacagctgtgagttatg

SEQ ID NO: 9335 - DNA, 20 bp, Artificial Sequence
  Description of Artificial Sequence: Synthetic oligonucleotide
  Target: LAMA2; (-) strand; PAM type: NNAGAAW; PAM sequence: ATAGAAA
tgcaaagaagtcctctttaa

SEQ ID NO: 9336 - DNA, 20 bp, Artificial Sequence
  Description of Artificial Sequence: Synthetic oligonucleotide
  Target: LAMA2; (-) strand; PAM type: NNAGAAW; PAM sequence: TAAGAAA
gtgacatatcaagatataac

SEQ ID NO: 9337 - DNA, 20 bp, Artificial Sequence
  Description of Artificial Sequence: Synthetic oligonucleotide
  Target: LAMA2; (-) strand; PAM type: NNAGAAW; PAM sequence: GAAGAAT
aatgctgattgccaccagct

SEQ ID NO: 9338 - DNA, 20 bp, Artificial Sequence
  Description of Artificial Sequence: Synthetic oligonucleotide
  Target: LAMA2; (-) strand; PAM type: NNAGAAW; PAM sequence: AGAGAAA
atttaataacagttttatgg

SEQ ID NO: 9339 - DNA, 20 bp, Artificial Sequence
  Description of Artificial Sequence: Synthetic oligonucleotide
  Target: LAMA2; (-) strand; PAM type: NNAGAAW; PAM sequence: TCAGAAA
gagaaaaatcttcacttgat

SEQ ID NO: 9340 - DNA, 20 bp, Artificial Sequence
  Description of Artificial Sequence: Synthetic oligonucleotide
  Target: LAMA2; (-) strand; PAM type: NNAGAAW; PAM sequence: AGAGAAA
ataaagaattcagcaaagat

SEQ ID NO: 9341 - DNA, 20 bp, Artificial Sequence
  Description of Artificial Sequence: Synthetic oligonucleotide
  Target: LAMA2; (-) strand; PAM type: NNAGAAW; PAM sequence: AAAGAAT
aaagacatgttaaatgccat

SEQ ID NO: 9342 - DNA, 20 bp, Artificial Sequence
  Description of Artificial Sequence: Synthetic oligonucleotide
  Target: LAMA2; (-) strand; PAM type: NNAGAAW; PAM sequence: AAAGAAA
agtcatggaagagagtcccc

SEQ ID NO: 9343 - DNA, 20 bp, Artificial Sequence
  Description of Artificial Sequence: Synthetic oligonucleotide
  Target: LAMA2; (-) strand; PAM type: NNAGAAW; PAM sequence: AGAGAAT
gacaaacctaaaatggtgga

SEQ ID NO: 9344 - DNA, 20 bp, Artificial Sequence
  Description of Artificial Sequence: Synthetic oligonucleotide
  Target: LAMA2; (-) strand; PAM type: NNAGAAW; PAM sequence: GAAGAAT
tggtatgtaaggattacaca

SEQ ID NO: 9345 - DNA, 20 bp, Artificial Sequence
  Description of Artificial Sequence: Synthetic oligonucleotide
  Target: LAMA2; (-) strand; PAM type: NNAGAAW; PAM sequence: GCAGAAT
tatggaatggaaaaagagga

SEQ ID NO: 9346 - DNA, 20 bp, Artificial Sequence
  Description of Artificial Sequence: Synthetic oligonucleotide
  Target: LAMA2; (-) strand; PAM type: NNAGAAW; PAM sequence: ACAGAAA
ctgacactcaggtatagaat

SEQ ID NO: 9347 - DNA, 20 bp, Artificial Sequence
  Description of Artificial Sequence: Synthetic oligonucleotide
  Target: LAMA2; (-) strand; PAM type: NNAGAAW; PAM sequence: ATAGAAT
gtctttgctgacactcaggt

SEQ ID NO: 9348 - DNA, 20 bp, Artificial Sequence
  Description of Artificial Sequence: Synthetic oligonucleotide
  Target: LAMA2; (-) strand; PAM type: NNAGAAW; PAM sequence: TGAGAAT
aattaagaaggtaaaatcaa

SEQ ID NO: 9349 - DNA, 20 bp, Artificial Sequence
  Description of Artificial Sequence: Synthetic oligonucleotide
  Target: LAMA2; (-) strand; PAM type: NNAGAAW; PAM sequence: AGAGAAA
agagaaagaaaatcaattta

SEQ ID NO: 9350 - DNA, 20 bp, Artificial Sequence
  Description of Artificial Sequence: Synthetic oligonucleotide
  Target: LAMA2; (-) strand; PAM type: NNAGAAW; PAM sequence: AAAGAAA
tactaacattaggtatagag

SEQ ID NO: 9351 - DNA, 20 bp, Artificial Sequence
  Description of Artificial Sequence: Synthetic oligonucleotide
  Target: LAMA2; (-) strand; PAM type: NNAGAAW; PAM sequence: AGAGAAA
aaggtactaacattaggtat

SEQ ID NO: 9352 - DNA, 20 bp, Artificial Sequence
  Description of Artificial Sequence: Synthetic oligonucleotide
  Target: LAMA2; (-) strand; PAM type: NNAGAAW; PAM sequence: ATAGAAA
gttccagcaatgtaaaccag

SEQ ID NO: 9353 - DNA, 20 bp, Artificial Sequence
  Description of Artificial Sequence: Synthetic oligonucleotide
  Target: LAMA2; (-) strand; PAM type: NNAGAAW; PAM sequence: ACAGAAA
aaaaatggactgaatgacaa

SEQ ID NO: 9354 - DNA, 20 bp, Artificial Sequence
  Description of Artificial Sequence: Synthetic oligonucleotide
  Target: LAMA2; (-) strand; PAM type: NNAGAAW; PAM sequence: TCAGAAA
cttttaatacaaattaacgt

SEQ ID NO: 9355 - DNA, 20 bp, Artificial Sequence
  Description of Artificial Sequence: Synthetic oligonucleotide
  Target: LAMA2; (-) strand; PAM type: NNAGAAW; PAM sequence: TAAGAAT
actctgtttcctctaggaat

SEQ ID NO: 9356 - DNA, 20 bp, Artificial Sequence
  Description of Artificial Sequence: Synthetic oligonucleotide
  Target: LAMA2; (-) strand; PAM type: NNAGAAW; PAM sequence: AAAGAAA
aaaaaaaaaaaaaagaaaga

SEQ ID NO: 9357 - DNA, 20 bp, Artificial Sequence
  Description of Artificial Sequence: Synthetic oligonucleotide
  Target: LAMA2; (-) strand; PAM type: NNAGAAW; PAM sequence: AAAGAAA
aaaaaaaaaaaaaaaaaaag

SEQ ID NO: 9358 - DNA, 20 bp, Artificial Sequence
  Description of Artificial Sequence: Synthetic oligonucleotide
  Target: LAMA2; (-) strand; PAM type: NNAGAAW; PAM sequence: AAAGAAA
tcaaaaaaaaaaaaaaaaaa

SEQ ID NO: 9359 - DNA, 20 bp, Artificial Sequence
  Description of Artificial Sequence: Synthetic oligonucleotide
  Target: LAMA2; (-) strand; PAM type: NNAGAAW; PAM sequence: GGAGAAT
ctacttgggaggctgaggca

SEQ ID NO: 9360 - DNA, 20 bp, Artificial Sequence
  Description of Artificial Sequence: Synthetic oligonucleotide
  Target: LAMA2; (-) strand; PAM type: NNAGAAW; PAM sequence: TTAGAAA
tcatcatcatattaatttat

SEQ ID NO: 9361 - DNA, 20 bp, Artificial Sequence
  Description of Artificial Sequence: Synthetic oligonucleotide
  Target: LAMA2; (-) strand; PAM type: NNAGAAW; PAM sequence: TGAGAAA
ctacagataaacgactcaag

SEQ ID NO: 9362 - DNA, 20 bp, Artificial Sequence
  Description of Artificial Sequence: Synthetic oligonucleotide
  Target: LAMA2; (-) strand; PAM type: NNAGAAW; PAM sequence: ACAGAAT
tttttaaatccttaacacaa

SEQ ID NO: 9363 - DNA, 20 bp, Artificial Sequence
  Description of Artificial Sequence: Synthetic oligonucleotide
  Target: LAMA2; (-) strand; PAM type: NNAGAAW; PAM sequence: TGAGAAT
cttgtggctacataatgtat

SEQ ID NO: 9364 - DNA, 20 bp, Artificial Sequence
  Description of Artificial Sequence: Synthetic oligonucleotide
  Target: LAMA2; (-) strand; PAM type: NNAGAAW; PAM sequence: AAAGAAA
catatactttgttccaccaa

SEQ ID NO: 9365 - DNA, 20 bp, Artificial Sequence
  Description of Artificial Sequence: Synthetic oligonucleotide
  Target: LAMA2; (-) strand; PAM type: NNAGAAW; PAM sequence: ACAGAAA
cacttattttattctgcatg

SEQ ID NO: 9366 - DNA, 20 bp, Artificial Sequence
  Description of Artificial Sequence: Synthetic oligonucleotide
  Target: LAMA2; (-) strand; PAM type: NNAGAAW; PAM sequence: ACAGAAA
aaaatgttacataatttaat

SEQ ID NO: 9367 - DNA, 20 bp, Artificial Sequence
  Description of Artificial Sequence: Synthetic oligonucleotide
  Target: LAMA2; (-) strand; PAM type: NNAGAAW; PAM sequence: ATAGAAT
tgaatgaagttatttgggaa

SEQ ID NO: 9368 - DNA, 20 bp, Artificial Sequence
  Description of Artificial Sequence: Synthetic oligonucleotide
  Target: LAMA2; (-) strand; PAM type: NNAGAAW; PAM sequence: AGAGAAT
tcccacattagaaaacacct

SEQ ID NO: 9369 - DNA, 20 bp, Artificial Sequence
  Description of Artificial Sequence: Synthetic oligonucleotide
  Target: LAMA2; (-) strand; PAM type: NNAGAAW; PAM sequence: TTAGAAA
ttgtatttcactttcccaca

SEQ ID NO: 9370 - DNA, 20 bp, Artificial Sequence
  Description of Artificial Sequence: Synthetic oligonucleotide
  Target: LAMA2; (-) strand; PAM type: NNAGAAW; PAM sequence: AGAGAAA
aattttagttatggctgaac

SEQ ID NO: 9371 - DNA, 20 bp, Artificial Sequence
  Description of Artificial Sequence: Synthetic oligonucleotide
  Target: LAMA2; (-) strand; PAM type: NNAGAAW; PAM sequence: TAAGAAA
tcattttgcactgctattta

SEQ ID NO: 9372 - DNA, 20 bp, Artificial Sequence
  Description of Artificial Sequence: Synthetic oligonucleotide
  Target: LAMA2; (-) strand; PAM type: NNAGAAW; PAM sequence: TCAGAAT
tgtatacttcttctgaatct

SEQ ID NO: 9373 - DNA, 20 bp, Artificial Sequence
  Description of Artificial Sequence: Synthetic oligonucleotide
  Target: LAMA2; (-) strand; PAM type: NNAGAAW; PAM sequence: TTAGAAA
ctgtagatgtaatcataaca

SEQ ID NO: 9374 - DNA, 20 bp, Artificial Sequence
  Description of Artificial Sequence: Synthetic oligonucleotide
  Target: LAMA2; (-) strand; PAM type: NNAGAAW; PAM sequence: AAAGAAT
aaaacacaagttaccattaa

SEQ ID NO: 9375 - DNA, 20 bp, Artificial Sequence
  Description of Artificial Sequence: Synthetic oligonucleotide
  Target: LAMA2; (-) strand; PAM type: NNAGAAW; PAM sequence: AGAGAAA
tcaaaatctatccttctgat

SEQ ID NO: 9376 - DNA, 20 bp, Artificial Sequence
  Description of Artificial Sequence: Synthetic oligonucleotide
  Target: LAMA2; (-) strand; PAM type: NNAGAAW; PAM sequence: CCAGAAT
cctcacattcttgtctcact

SEQ ID NO: 9377 - DNA, 20 bp, Artificial Sequence
  Description of Artificial Sequence: Synthetic oligonucleotide
  Target: LAMA2; (-) strand; PAM type: NNAGAAW; PAM sequence: TTAGAAA
tggctgatatacaatatgag

SEQ ID NO: 9378 - DNA, 20 bp, Artificial Sequence
  Description of Artificial Sequence: Synthetic oligonucleotide
  Target: LAMA2; (-) strand; PAM type: NNAGAAW; PAM sequence: CAAGAAT
aatgaatacattaattaatg

SEQ ID NO: 9379 - DNA, 20 bp, Artificial Sequence
  Description of Artificial Sequence: Synthetic oligonucleotide
  Target: LAMA2; (-) strand; PAM type: NNAGAAW; PAM sequence: TGAGAAA
ttttgtctttgtctaccctg

SEQ ID NO: 9380 - DNA, 20 bp, Artificial Sequence
  Description of Artificial Sequence: Synthetic oligonucleotide
  Target: LAMA2; (-) strand; PAM type: NNAGAAW; PAM sequence: TTAGAAT
aagagctataaacaatattt

SEQ ID NO: 9381 - DNA, 20 bp, Artificial Sequence
  Description of Artificial Sequence: Synthetic oligonucleotide
  Target: LAMA2; (-) strand; PAM type: NNAGAAW; PAM sequence: CTAGAAA
tccatcatctaagatcatat

SEQ ID NO: 9382 - DNA, 20 bp, Artificial Sequence
  Description of Artificial Sequence: Synthetic oligonucleotide
  Target: LAMA2; (-) strand; PAM type: NNAGAAW; PAM sequence: TGAGAAT
tagacatttaaaaagtgttt

SEQ ID NO: 9383 - DNA, 20 bp, Artificial Sequence
  Description of Artificial Sequence: Synthetic oligonucleotide
  Target: LAMA2; (-) strand; PAM type: NNAGAAW; PAM sequence: TAAGAAA
ttccagttatgaacagccat

SEQ ID NO: 9384 - DNA, 20 bp, Artificial Sequence
  Description of Artificial Sequence: Synthetic oligonucleotide
  Target: LAMA2; (-) strand; PAM type: NNAGAAW; PAM sequence: TTAGAAA
tcaatttaagattttcaaaa

SEQ ID NO: 9385 - DNA, 20 bp, Artificial Sequence
  Description of Artificial Sequence: Synthetic oligonucleotide
  Target: LAMA2; (-) strand; PAM type: NNAGAAW; PAM sequence: CCAGAAT
ggtctgagaaaaaagtagcc

SEQ ID NO: 9386 - DNA, 20 bp, Artificial Sequence
  Description of Artificial Sequence: Synthetic oligonucleotide
  Target: LAMA2; (-) strand; PAM type: NNAGAAW; PAM sequence: TGAGAAA
aattggttgccctagaggtc

SEQ ID NO: 9387 - DNA, 20 bp, Artificial Sequence
  Description of Artificial Sequence: Synthetic oligonucleotide
  Target: LAMA2; (-) strand; PAM type: NNAGAAW; PAM sequence: AGAGAAA
gtaaaggtagatacaagtca

SEQ ID NO: 9388 - DNA, 20 bp, Artificial Sequence
  Description of Artificial Sequence: Synthetic oligonucleotide
  Target: LAMA2; (-) strand; PAM type: NNAGAAW; PAM sequence: TCAGAAT
tcagatattatgagtttttg

SEQ ID NO: 9389 - DNA, 20 bp, Artificial Sequence
  Description of Artificial Sequence: Synthetic oligonucleotide
  Target: LAMA2; (-) strand; PAM type: NNAGAAW; PAM sequence: TTAGAAT
ctaatgcatagtgtaaagaa

SEQ ID NO: 9390 - DNA, 20 bp, Artificial Sequence
  Description of Artificial Sequence: Synthetic oligonucleotide
  Target: LAMA2; (-) strand; PAM type: NNAGAAW; PAM sequence: AAAGAAT
ctcagcctaatgcatagtgt

SEQ ID NO: 9391 - DNA, 20 bp, Artificial Sequence
  Description of Artificial Sequence: Synthetic oligonucleotide
  Target: LAMA2; (-) strand; PAM type: NNAGAAW; PAM sequence: CCAGAAA
tgttttagtgacttggaagc

SEQ ID NO: 9392 - DNA, 20 bp, Artificial Sequence
  Description of Artificial Sequence: Synthetic oligonucleotide
  Target: LAMA2; (-) strand; PAM type: NNAGAAW; PAM sequence: TCAGAAA
acatggcaaactttcttttg

SEQ ID NO: 9393 - DNA, 20 bp, Artificial Sequence
  Description of Artificial Sequence: Synthetic oligonucleotide
  Target: LAMA2; (-) strand; PAM type: NNAGAAW; PAM sequence: AAAGAAA
aaaaaaaagaaaagaaaaga

SEQ ID NO: 9394 - DNA, 20 bp, Artificial Sequence
  Description of Artificial Sequence: Synthetic oligonucleotide
  Target: LAMA2; (-) strand; PAM type: NNAGAAW; PAM sequence: AAAGAAA
tttcaaaaaaaaagaaaaga

SEQ ID NO: 9395 - DNA, 20 bp, Artificial Sequence
  Description of Artificial Sequence: Synthetic oligonucleotide
  Target: LAMA2; (-) strand; PAM type: NNAGAAW; PAM sequence: AAAGAAA
ctccatttcaaaaaaaaaga

SEQ ID NO: 9396 - DNA, 20 bp, Artificial Sequence
  Description of Artificial Sequence: Synthetic oligonucleotide
  Target: LAMA2; (-) strand; PAM type: NNAGAAW; PAM sequence: AAAGAAA
taagactccatttcaaaaaa

SEQ ID NO: 9397 - DNA, 20 bp, Artificial Sequence
  Description of Artificial Sequence: Synthetic oligonucleotide
  Target: LAMA2; (-) strand; PAM type: NNAGAAW; PAM sequence: GGAGAAT
ctactcgggaggataaggca

SEQ ID NO: 9398 - DNA, 20 bp, Artificial Sequence
  Description of Artificial Sequence: Synthetic oligonucleotide
  Target: LAMA2; (-) strand; PAM type: NNAGAAW; PAM sequence: TAAGAAA
cacataaagggattctccaa

SEQ ID NO: 9399 - DNA, 20 bp, Artificial Sequence
  Description of Artificial Sequence: Synthetic oligonucleotide
  Target: LAMA2; (-) strand; PAM type: NNAGAAW; PAM sequence: CTAGAAA
tttccttgcttagggcttgt

SEQ ID NO: 9400 - DNA, 20 bp, Artificial Sequence
  Description of Artificial Sequence: Synthetic oligonucleotide
  Target: LAMA2; (-) strand; PAM type: NNAGAAW; PAM sequence: CTAGAAT
atactgcctttagtccgatt

SEQ ID NO: 9401 - DNA, 20 bp, Artificial Sequence
  Description of Artificial Sequence: Synthetic oligonucleotide
  Target: LAMA2; (-) strand; PAM type: NNAGAAW; PAM sequence: AGAGAAA
ttacccacccagtgtctcat

SEQ ID NO: 9402 - DNA, 20 bp, Artificial Sequence
  Description of Artificial Sequence: Synthetic oligonucleotide
  Target: LAMA2; (-) strand; PAM type: NNAGAAW; PAM sequence: ACAGAAA
aaagacttagaaaaaatgaa

SEQ ID NO: 9403 - DNA, 20 bp, Artificial Sequence
  Description of Artificial Sequence: Synthetic oligonucleotide
  Target: LAMA2; (-) strand; PAM type: NNAGAAW; PAM sequence: TTAGAAA
ttttctctggcttaaaagac

SEQ ID NO: 9404 - DNA, 20 bp, Artificial Sequence
  Description of Artificial Sequence: Synthetic oligonucleotide
  Target: LAMA2; (-) strand; PAM type: NNAGAAW; PAM sequence: ATAGAAA
caaaaaaaggtacttgtgat

SEQ ID NO: 9405 - DNA, 20 bp, Artificial Sequence
  Description of Artificial Sequence: Synthetic oligonucleotide
  Target: LAMA2; (-) strand; PAM type: NNAGAAW; PAM sequence: AGAGAAA
atagagggggtggcagttgg

SEQ ID NO: 9406 - DNA, 20 bp, Artificial Sequence
  Description of Artificial Sequence: Synthetic oligonucleotide
  Target: LAMA2; (-) strand; PAM type: NNAGAAW; PAM sequence: TGAGAAA
aaaggctttcagaatcatta

SEQ ID NO: 9407 - DNA, 20 bp, Artificial Sequence
  Description of Artificial Sequence: Synthetic oligonucleotide
  Target: LAMA2; (-) strand; PAM type: NNAGAAW; PAM sequence: TCAGAAT
ctaaatcatcccaaaggctt

SEQ ID NO: 9408 - DNA, 20 bp, Artificial Sequence
  Description of Artificial Sequence: Synthetic oligonucleotide
  Target: LAMA2; (-) strand; PAM type: NNAGAAW; PAM sequence: CAAGAAA
taacttcaagtctattttcc

SEQ ID NO: 9409 - DNA, 20 bp, Artificial Sequence
  Description of Artificial Sequence: Synthetic oligonucleotide
  Target: LAMA2; (-) strand; PAM type: NNAGAAW; PAM sequence: AAAGAAA
ttaaaaaaagaaaaaggaaa

SEQ ID NO: 9410 - DNA, 20 bp, Artificial Sequence
  Description of Artificial Sequence: Synthetic oligonucleotide
  Target: LAMA2; (-) strand; PAM type: NNAGAAW; PAM sequence: AAAGAAA
ccctaaatctaaaattaaaa

SEQ ID NO: 9411 - DNA, 20 bp, Artificial Sequence
  Description of Artificial Sequence: Synthetic oligonucleotide
  Target: LAMA2; (-) strand; PAM type: NNAGAAW; PAM sequence: GCAGAAA
ctaagtgaaataactcagaa

SEQ ID NO: 9412 - DNA, 20 bp, Artificial Sequence
  Description of Artificial Sequence: Synthetic oligonucleotide
  Target: LAMA2; (-) strand; PAM type: NNAGAAW; PAM sequence: AAAGAAA
aatctatgtgttggttggac

SEQ ID NO: 9413 - DNA, 20 bp, Artificial Sequence
  Description of Artificial Sequence: Synthetic oligonucleotide
  Target: LAMA2; (-) strand; PAM type: NNAGAAW; PAM sequence: AGAGAAA
ttagatatcggtgaggttgc

SEQ ID NO: 9414 - DNA, 20 bp, Artificial Sequence
  Description of Artificial Sequence: Synthetic oligonucleotide
  Target: LAMA2; (-) strand; PAM type: NNAGAAW; PAM sequence: TTAGAAT
gagataccaagtcatacaaa

SEQ ID NO: 9415 - DNA, 20 bp, Artificial Sequence
  Description of Artificial Sequence: Synthetic oligonucleotide
  Target: LAMA2; (-) strand; PAM type: NNAGAAW; PAM sequence: AAAGAAA
aaaaaaaagaaaagaaaaga

SEQ ID NO: 9416 - DNA, 20 bp, Artificial Sequence
  Description of Artificial Sequence: Synthetic oligonucleotide
  Target: LAMA2; (-) strand; PAM type: NNAGAAW; PAM sequence: AAAGAAA
aaaaaaaaaaaaagaaaaga

SEQ ID NO: 9417 - DNA, 20 bp, Artificial Sequence
  Description of Artificial Sequence: Synthetic oligonucleotide
  Target: LAMA2; (-) strand; PAM type: NNAGAAW; PAM sequence: AAAGAAA
ttctaaaaaaaaaaaaaaga

SEQ ID NO: 9418 - DNA, 20 bp, Artificial Sequence
  Description of Artificial Sequence: Synthetic oligonucleotide
  Target: LAMA2; (-) strand; PAM type: NNAGAAW; PAM sequence: AAAGAAA
gacacttctaaaaaaaaaaa

SEQ ID NO: 9419 - DNA, 20 bp, Artificial Sequence
  Description of Artificial Sequence: Synthetic oligonucleotide
  Target: LAMA2; (-) strand; PAM type: NNAGAAW; PAM sequence: CAAGAAA
ctataagaaacttaaatcaa

SEQ ID NO: 9420 - DNA, 20 bp, Artificial Sequence
  Description of Artificial Sequence: Synthetic oligonucleotide
  Target: LAMA2; (-) strand; PAM type: NNAGAAW; PAM sequence: TAAGAAA
tgactaatatccagaaacta

SEQ ID NO: 9421 - DNA, 20 bp, Artificial Sequence
  Description of Artificial Sequence: Synthetic oligonucleotide
  Target: LAMA2; (-) strand; PAM type: NNAGAAW; PAM sequence: CCAGAAA
atctgacaaatgactaatat

SEQ ID NO: 9422 - DNA, 20 bp, Artificial Sequence
  Description of Artificial Sequence: Synthetic oligonucleotide
  Target: LAMA2; (-) strand; PAM type: NNAGAAW; PAM sequence: ACAGAAA
aaacagacaactgcagaatg

SEQ ID NO: 9423 - DNA, 20 bp, Artificial Sequence
  Description of Artificial Sequence: Synthetic oligonucleotide
  Target: LAMA2; (-) strand; PAM type: NNAGAAW; PAM sequence: GCAGAAT
aacaaaataaacagacaact

SEQ ID NO: 9424 - DNA, 20 bp, Artificial Sequence
  Description of Artificial Sequence: Synthetic oligonucleotide
  Target: LAMA2; (-) strand; PAM type: NNAGAAW; PAM sequence: AAAGAAT
ttctcgacattggcctaggt

SEQ ID NO: 9425 - DNA, 20 bp, Artificial Sequence
  Description of Artificial Sequence: Synthetic oligonucleotide
  Target: LAMA2; (-) strand; PAM type: NNAGAAW; PAM sequence: AAAGAAA
tgcaagacctgaaaccataa

SEQ ID NO: 9426 - DNA, 20 bp, Artificial Sequence
  Description of Artificial Sequence: Synthetic oligonucleotide
  Target: LAMA2; (-) strand; PAM type: NNAGAAW; PAM sequence: GAAGAAT
tatttaataactggctagcg

SEQ ID NO: 9427 - DNA, 20 bp, Artificial Sequence
  Description of Artificial Sequence: Synthetic oligonucleotide
  Target: LAMA2; (-) strand; PAM type: NNAGAAW; PAM sequence: AGAGAAT
ataaggcaatgagacaaaat

SEQ ID NO: 9428 - DNA, 20 bp, Artificial Sequence
  Description of Artificial Sequence: Synthetic oligonucleotide
  Target: LAMA2; (-) strand; PAM type: NNAGAAW; PAM sequence: TTAGAAA
caatgtcatttttcacagaa

SEQ ID NO: 9429 - DNA, 20 bp, Artificial Sequence
  Description of Artificial Sequence: Synthetic oligonucleotide
  Target: LAMA2; (-) strand; PAM type: NNAGAAW; PAM sequence: ACAGAAT
aattaccaatgtcatttttc

SEQ ID NO: 9430 - DNA, 20 bp, Artificial Sequence
  Description of Artificial Sequence: Synthetic oligonucleotide
  Target: LAMA2; (-) strand; PAM type: NNAGAAW; PAM sequence: AAAGAAT
cattccatgctcatggatag

SEQ ID NO: 9431 - DNA, 20 bp, Artificial Sequence
  Description of Artificial Sequence: Synthetic oligonucleotide
  Target: LAMA2; (-) strand; PAM type: NNAGAAW; PAM sequence: ATAGAAA
aaaacattccatgctcatgg

SEQ ID NO: 9432 - DNA, 20 bp, Artificial Sequence
  Description of Artificial Sequence: Synthetic oligonucleotide
  Target: LAMA2; (-) strand; PAM type: NNAGAAW; PAM sequence: AAAGAAA
atttcttcaaaacactgagg

SEQ ID NO: 9433 - DNA, 20 bp, Artificial Sequence
  Description of Artificial Sequence: Synthetic oligonucleotide
  Target: LAMA2; (-) strand; PAM type: NNAGAAW; PAM sequence: TAAGAAA
gattaaaatttagacataca

SEQ ID NO: 9434 - DNA, 20 bp, Artificial Sequence
  Description of Artificial Sequence: Synthetic oligonucleotide
  Target: LAMA2; (-) strand; PAM type: NNAGAAW; PAM sequence: ATAGAAT
aatggatcttaggcatgttt

SEQ ID NO: 9435 - DNA, 20 bp, Artificial Sequence
  Description of Artificial Sequence: Synthetic oligonucleotide
  Target: LAMA2; (-) strand; PAM type: NNAGAAW; PAM sequence: AAAGAAA
agtatttttattgtaaccaa

SEQ ID NO: 9436 - DNA, 20 bp, Artificial Sequence
  Description of Artificial Sequence: Synthetic oligonucleotide
  Target: LAMA2; (-) strand; PAM type: NNAGAAW; PAM sequence: TCAGAAA
cttcttctttttttttttaa

SEQ ID NO: 9437 - DNA, 20 bp, Artificial Sequence
  Description of Artificial Sequence: Synthetic oligonucleotide
  Target: LAMA2; (-) strand; PAM type: NNAGAAW; PAM sequence: AAAGAAA
aatgcctaagagctgggggg

SEQ ID NO: 9438 - DNA, 20 bp, Artificial Sequence
  Description of Artificial Sequence: Synthetic oligonucleotide
  Target: LAMA2; (-) strand; PAM type: NNAGAAW; PAM sequence: AGAGAAT
ggcacaaagcaaaatgtgga

SEQ ID NO: 9439 - DNA, 20 bp, Artificial Sequence
  Description of Artificial Sequence: Synthetic oligonucleotide
  Target: LAMA2; (-) strand; PAM type: NNAGAAW; PAM sequence: GAAGAAA
atgttctaagacctatcaag

SEQ ID NO: 9440 - DNA, 20 bp, Artificial Sequence
  Description of Artificial Sequence: Synthetic oligonucleotide
  Target: LAMA2; (-) strand; PAM type: NNAGAAW; PAM sequence: AGAGAAT
ttcaatatttaaaagacaaa

SEQ ID NO: 9441 - DNA, 20 bp, Artificial Sequence
  Description of Artificial Sequence: Synthetic oligonucleotide
  Target: LAMA2; (-) strand; PAM type: NNAGAAW; PAM sequence: GGAGAAT
ctactcgggaggctgaggcg

SEQ ID NO: 9442 - DNA, 20 bp, Artificial Sequence
  Description of Artificial Sequence: Synthetic oligonucleotide
  Target: LAMA2; (-) strand; PAM type: NNAGAAW; PAM sequence: AAAGAAA
tctatctagctcacatcttt

SEQ ID NO: 9443 - DNA, 20 bp, Artificial Sequence
  Description of Artificial Sequence: Synthetic oligonucleotide
  Target: LAMA2; (-) strand; PAM type: NNAGAAW; PAM sequence: TCAGAAA
gaagtgaacaccgtgtcact

SEQ ID NO: 9444 - DNA, 20 bp, Artificial Sequence
  Description of Artificial Sequence: Synthetic oligonucleotide
  Target: LAMA2; (-) strand; PAM type: NNAGAAW; PAM sequence: ATAGAAA
gttgcttcatttaaatatct

SEQ ID NO: 9445 - DNA, 20 bp, Artificial Sequence
  Description of Artificial Sequence: Synthetic oligonucleotide
  Target: LAMA2; (-) strand; PAM type: NNAGAAW; PAM sequence: ATAGAAT
gtgaagatagaaagattagg

SEQ ID NO: 9446 - DNA, 20 bp, Artificial Sequence
  Description of Artificial Sequence: Synthetic oligonucleotide
  Target: LAMA2; (-) strand; PAM type: NNAGAAW; PAM sequence: ATAGAAA
gactcacacacagagtgaag

SEQ ID NO: 9447 - DNA, 20 bp, Artificial Sequence
  Description of Artificial Sequence: Synthetic oligonucleotide
  Target: LAMA2; (-) strand; PAM type: NNAGAAW; PAM sequence: AGAGAAA
agtcatatcagaggaatgaa

SEQ ID NO: 9448 - DNA, 20 bp, Artificial Sequence
  Description of Artificial Sequence: Synthetic oligonucleotide
  Target: LAMA2; (-) strand; PAM type: NNAGAAW; PAM sequence: AAAGAAA
ctagctaagtgaaaacattc

SEQ ID NO: 9449 - DNA, 20 bp, Artificial Sequence
  Description of Artificial Sequence: Synthetic oligonucleotide
  Target: LAMA2; (-) strand; PAM type: NNAGAAW; PAM sequence: TGAGAAA
atgcactgtataatctttct

SEQ ID NO: 9450 - DNA, 20 bp, Artificial Sequence
  Description of Artificial Sequence: Synthetic oligonucleotide
  Target: LAMA2; (-) strand; PAM type: NNAGAAW; PAM sequence: TAAGAAT
tcaaatttaaatttactgaa

SEQ ID NO: 9451 - DNA, 20 bp, Artificial Sequence
  Description of Artificial Sequence: Synthetic oligonucleotide
  Target: LAMA2; (-) strand; PAM type: NNAGAAW; PAM sequence: ACAGAAT
gtgttttctgactttgccac

SEQ ID NO: 9452 - DNA, 20 bp, Artificial Sequence
  Description of Artificial Sequence: Synthetic oligonucleotide
  Target: LAMA2; (-) strand; PAM type: NNAGAAW; PAM sequence: AAAGAAT
cattatcttgtcccttcaac

SEQ ID NO: 9453 - DNA, 20 bp, Artificial Sequence
  Description of Artificial Sequence: Synthetic oligonucleotide
  Target: LAMA2; (-) strand; PAM type: NNAGAAW; PAM sequence: TAAGAAT
tctaggttgtgagctactta

SEQ ID NO: 9454 - DNA, 20 bp, Artificial Sequence
  Description of Artificial Sequence: Synthetic oligonucleotide
  Target: LAMA2; (-) strand; PAM type: NNAGAAW; PAM sequence: CCAGAAA
aaaatgtgactccacagaaa

SEQ ID NO: 9455 - DNA, 20 bp, Artificial Sequence
  Description of Artificial Sequence: Synthetic oligonucleotide
  Target: LAMA2; (-) strand; PAM type: NNAGAAW; PAM sequence: ACAGAAA
cattaataaaatgtgactcc

SEQ ID NO: 9456 - DNA, 20 bp, Artificial Sequence
  Description of Artificial Sequence: Synthetic oligonucleotide
  Target: LAMA2; (-) strand; PAM type: NNAGAAW; PAM sequence: TAAGAAA
atttccaaatttctcagttt

SEQ ID NO: 9457 - DNA, 20 bp, Artificial Sequence
  Description of Artificial Sequence: Synthetic oligonucleotide
  Target: LAMA2; (-) strand; PAM type: NNAGAAW; PAM sequence: CCAGAAT
acaaatgaagaaacatatac

SEQ ID NO: 9458 - DNA, 20 bp, Artificial Sequence
  Description of Artificial Sequence: Synthetic oligonucleotide
  Target: LAMA2; (-) strand; PAM type: NNAGAAW; PAM sequence: GAAGAAA
caaacttgaattttacaaat

SEQ ID NO: 9459 - DNA, 20 bp, Artificial Sequence
  Description of Artificial Sequence: Synthetic oligonucleotide
  Target: LAMA2; (-) strand; PAM type: NNAGAAW; PAM sequence: GAAGAAT
aggttgttgtctggtggcaa

SEQ ID NO: 9460 - DNA, 20 bp, Artificial Sequence
  Description of Artificial Sequence: Synthetic oligonucleotide
  Target: LAMA2; (-) strand; PAM type: NNAGAAW; PAM sequence: TGAGAAA
tgaagcactacacaagtcaa

SEQ ID NO: 9461 - DNA, 20 bp, Artificial Sequence
  Description of Artificial Sequence: Synthetic oligonucleotide
  Target: LAMA2; (-) strand; PAM type: NNAGAAW; PAM sequence: TTAGAAT
tataaatgaagaactttgac

SEQ ID NO: 9462 - DNA, 20 bp, Artificial Sequence
  Description of Artificial Sequence: Synthetic oligonucleotide
  Target: LAMA2; (-) strand; PAM type: NNAGAAW; PAM sequence: CAAGAAA
gcaaaattgctgagtttttc

SEQ ID NO: 9463 - DNA, 20 bp, Artificial Sequence
  Description of Artificial Sequence: Synthetic oligonucleotide
  Target: LAMA2; (-) strand; PAM type: NNAGAAW; PAM sequence: TCAGAAT
aactatcttttcaacttcct

SEQ ID NO: 9464 - DNA, 20 bp, Artificial Sequence
  Description of Artificial Sequence: Synthetic oligonucleotide
  Target: LAMA2; (-) strand; PAM type: NNAGAAW; PAM sequence: GTAGAAA
tgacatttcttaaatcaaat

SEQ ID NO: 9465 - DNA, 20 bp, Artificial Sequence
  Description of Artificial Sequence: Synthetic oligonucleotide
  Target: LAMA2; (-) strand; PAM type: NNAGAAW; PAM sequence: ATAGAAA
aatgttggtcaaaaaaatct

SEQ ID NO: 9466 - DNA, 20 bp, Artificial Sequence
  Description of Artificial Sequence: Synthetic oligonucleotide
  Target: LAMA2; (-) strand; PAM type: NNAGAAW; PAM sequence: TTAGAAT
ccactatgcttggcctaatt

SEQ ID NO: 9467 - DNA, 20 bp, Artificial Sequence
  Description of Artificial Sequence: Synthetic oligonucleotide
  Target: LAMA2; (-) strand; PAM type: NNAGAAW; PAM sequence: AAAGAAA
gactgactgggaagaggcat

SEQ ID NO: 9468 - DNA, 20 bp, Artificial Sequence
  Description of Artificial Sequence: Synthetic oligonucleotide
  Target: LAMA2; (-) strand; PAM type: NNAGAAW; PAM sequence: TTAGAAA
tgtaaattagcacaaccctt

SEQ ID NO: 9469 - DNA, 20 bp, Artificial Sequence
  Description of Artificial Sequence: Synthetic oligonucleotide
  Target: LAMA2; (-) strand; PAM type: NNAGAAW; PAM sequence: AAAGAAA
atatatatgacaactataat

SEQ ID NO: 9470 - DNA, 20 bp, Artificial Sequence
  Description of Artificial Sequence: Synthetic oligonucleotide
  Target: LAMA2; (-) strand; PAM type: NNAGAAW; PAM sequence: ATAGAAT
atcattgcatatgtttgtaa

SEQ ID NO: 9471 - DNA, 20 bp, Artificial Sequence
  Description of Artificial Sequence: Synthetic oligonucleotide
  Target: LAMA2; (-) strand; PAM type: NNAGAAW; PAM sequence: ATAGAAA
aaatccactacatgtgatta

SEQ ID NO: 9472 - DNA, 20 bp, Artificial Sequence
  Description of Artificial Sequence: Synthetic oligonucleotide
  Target: LAMA2; (-) strand; PAM type: NNAGAAW; PAM sequence: CTAGAAT
tgaaaaatgtaacacagtat

SEQ ID NO: 9473 - DNA, 20 bp, Artificial Sequence
  Description of Artificial Sequence: Synthetic oligonucleotide
  Target: LAMA2; (-) strand; PAM type: NNAGAAW; PAM sequence: AAAGAAA
acgaaaattcttgtagcaaa

SEQ ID NO: 9474 - DNA, 20 bp, Artificial Sequence
  Description of Artificial Sequence: Synthetic oligonucleotide
  Target: LAMA2; (-) strand; PAM type: NNAGAAW; PAM sequence: TGAGAAA
taaaaagtaactcatactta

SEQ ID NO: 9475 - DNA, 20 bp, Artificial Sequence
  Description of Artificial Sequence: Synthetic oligonucleotide
  Target: LAMA2; (-) strand; PAM type: NNAGAAW; PAM sequence: AAAGAAT
ccaactgatgcgacaacaaa

SEQ ID NO: 9476 - DNA, 20 bp, Artificial Sequence
  Description of Artificial Sequence: Synthetic oligonucleotide
  Target: LAMA2; (-) strand; PAM type: NNAGAAW; PAM sequence: AAAGAAA
taggttctgcactctacagg

SEQ ID NO: 9477 - DNA, 20 bp, Artificial Sequence
  Description of Artificial Sequence: Synthetic oligonucleotide
  Target: LAMA2; (-) strand; PAM type: NNAGAAW; PAM sequence: ACAGAAA
gcaggtgtaaagagaggtcc

SEQ ID NO: 9478 - DNA, 20 bp, Artificial Sequence
  Description of Artificial Sequence: Synthetic oligonucleotide
  Target: LAMA2; (-) strand; PAM type: NNAGAAW; PAM sequence: ATAGAAA
ccagaatggctaaaactcaa

SEQ ID NO: 9479 - DNA, 20 bp, Artificial Sequence
  Description of Artificial Sequence: Synthetic oligonucleotide
  Target: LAMA2; (-) strand; PAM type: NNAGAAW; PAM sequence: CCAGAAT
gaaaaggcactggatgagct

SEQ ID NO: 9480 - DNA, 20 bp, Artificial Sequence
  Description of Artificial Sequence: Synthetic oligonucleotide
  Target: LAMA2; (-) strand; PAM type: NNAGAAW; PAM sequence: GCAGAAA
ccactttttggtttcaaatg

SEQ ID NO: 9481 - DNA, 20 bp, Artificial Sequence
  Description of Artificial Sequence: Synthetic oligonucleotide
  Target: LAMA2; (-) strand; PAM type: NNAGAAW; PAM sequence: CTAGAAA
tatatatggtaataggatat

SEQ ID NO: 9482 - DNA, 20 bp, Artificial Sequence
  Description of Artificial Sequence: Synthetic oligonucleotide
  Target: LAMA2; (-) strand; PAM type: NNAGAAW; PAM sequence: ATAGAAT
ttagaatattcatattatat

SEQ ID NO: 9483 - DNA, 20 bp, Artificial Sequence
  Description of Artificial Sequence: Synthetic oligonucleotide
  Target: LAMA2; (-) strand; PAM type: NNAGAAW; PAM sequence: TTAGAAT
actatgtattttattagaga

SEQ ID NO: 9484 - DNA, 20 bp, Artificial Sequence
  Description of Artificial Sequence: Synthetic oligonucleotide
  Target: LAMA2; (-) strand; PAM type: NNAGAAW; PAM sequence: GAAGAAT
tgctaatgaatgaccaattt

SEQ ID NO: 9485 - DNA, 20 bp, Artificial Sequence
  Description of Artificial Sequence: Synthetic oligonucleotide
  Target: LAMA2; (-) strand; PAM type: NNAGAAW; PAM sequence: CAAGAAA
tacaaagggattacagagta

SEQ ID NO: 9486 - DNA, 20 bp, Artificial Sequence
  Description of Artificial Sequence: Synthetic oligonucleotide
  Target: LAMA2; (-) strand; PAM type: NNAGAAW; PAM sequence: ATAGAAT
atgttgtatgttcagaaaat

SEQ ID NO: 9487 - DNA, 20 bp, Artificial Sequence
  Description of Artificial Sequence: Synthetic oligonucleotide
  Target: LAMA2; (-) strand; PAM type: NNAGAAW; PAM sequence: TCAGAAA
attttctttatgttgtatgt

SEQ ID NO: 9488 - DNA, 20 bp, Artificial Sequence
  Description of Artificial Sequence: Synthetic oligonucleotide
  Target: LAMA2; (-) strand; PAM type: NNAGAAW; PAM sequence: CAAGAAA
cagcaatcatgggaggaagc

SEQ ID NO: 9489 - DNA, 20 bp, Artificial Sequence
  Description of Artificial Sequence: Synthetic oligonucleotide
  Target: LAMA2; (-) strand; PAM type: NNAGAAW; PAM sequence: ATAGAAA
ttaaaaatttaatttacagt

SEQ ID NO: 9490 - DNA, 20 bp, Artificial Sequence
  Description of Artificial Sequence: Synthetic oligonucleotide
  Target: LAMA2; (-) strand; PAM type: NNAGAAW; PAM sequence: TGAGAAT
gtatgtctttattagtagca

SEQ ID NO: 9491 - DNA, 20 bp, Artificial Sequence
  Description of Artificial Sequence: Synthetic oligonucleotide
  Target: LAMA2; (-) strand; PAM type: NNAGAAW; PAM sequence: AAAGAAA
atctgttagggaaaatgaag

SEQ ID NO: 9492 - DNA, 20 bp, Artificial Sequence
  Description of Artificial Sequence: Synthetic oligonucleotide
  Target: LAMA2; (-) strand; PAM type: NNAGAAW; PAM sequence: GAAGAAA
gtttatctgttagggaaaat

SEQ ID NO: 9493 - DNA, 20 bp, Artificial Sequence
  Description of Artificial Sequence: Synthetic oligonucleotide
  Target: LAMA2; (-) strand; PAM type: NNAGAAW; PAM sequence: GGAGAAA
atcttgagctgaattttcaa

SEQ ID NO: 9494 - DNA, 20 bp, Artificial Sequence
  Description of Artificial Sequence: Synthetic oligonucleotide
  Target: LAMA2; (-) strand; PAM type: NNAGAAW; PAM sequence: TGAGAAT
atgccagacagtaaaggatc

SEQ ID NO: 9495 - DNA, 20 bp, Artificial Sequence
  Description of Artificial Sequence: Synthetic oligonucleotide
  Target: LAMA2; (-) strand; PAM type: NNAGAAW; PAM sequence: TTAGAAA
ataaagtattatttatttca

SEQ ID NO: 9496 - DNA, 20 bp, Artificial Sequence
  Description of Artificial Sequence: Synthetic oligonucleotide
  Target: LAMA2; (-) strand; PAM type: NNAGAAW; PAM sequence: AGAGAAA
agctaatgtaattgttggtt

SEQ ID NO: 9497 - DNA, 20 bp, Artificial Sequence
  Description of Artificial Sequence: Synthetic oligonucleotide
  Target: LAMA2; (-) strand; PAM type: NNAGAAW; PAM sequence: AAAGAAT
tctcccaaagagctgccccc

SEQ ID NO: 9498 - DNA, 20 bp, Artificial Sequence
  Description of Artificial Sequence: Synthetic oligonucleotide
  Target: LAMA2; (-) strand; PAM type: NNAGAAW; PAM sequence: AAAGAAA
gaaagaaacaaaaaattaaa

SEQ ID NO: 9499 - DNA, 20 bp, Artificial Sequence
  Description of Artificial Sequence: Synthetic oligonucleotide
  Target: LAMA2; (-) strand; PAM type: NNAGAAW; PAM sequence: AAAGAAA
ttggccttagaattgcattg

SEQ ID NO: 9500 - DNA, 20 bp, Artificial Sequence
  Description of Artificial Sequence: Synthetic oligonucleotide
  Target: LAMA2; (-) strand; PAM type: NNAGAAW; PAM sequence: TTAGAAT
ccttgcggacctggttggcc

SEQ ID NO: 9501 - DNA, 20 bp, Artificial Sequence
  Description of Artificial Sequence: Synthetic oligonucleotide
  Target: LAMA2; (-) strand; PAM type: NNAGAAW; PAM sequence: AAAGAAA
aaagaaagaaagaaaagaaa

SEQ ID NO: 9502 - DNA, 20 bp, Artificial Sequence
  Description of Artificial Sequence: Synthetic oligonucleotide
  Target: LAMA2; (-) strand; PAM type: NNAGAAW; PAM sequence: AAAGAAA
aagaaagaaagaaagaaaga

SEQ ID NO: 9503 - DNA, 20 bp, Artificial Sequence
  Description of Artificial Sequence: Synthetic oligonucleotide
  Target: LAMA2; (-) strand; PAM type: NNAGAAW; PAM sequence: AAAGAAA
aaagaaagaaagaaagaaag

SEQ ID NO: 9504 - DNA, 20 bp, Artificial Sequence
  Description of Artificial Sequence: Synthetic oligonucleotide
  Target: LAMA2; (-) strand; PAM type: NNAGAAW; PAM sequence: AAAGAAA
aaagaaagaaagaaagaaag

SEQ ID NO: 9505 - DNA, 20 bp, Artificial Sequence
  Description of Artificial Sequence: Synthetic oligonucleotide
  Target: LAMA2; (-) strand; PAM type: NNAGAAW; PAM sequence: AAAGAAA
aaagaaagaaagaaagaaag

SEQ ID NO: 9506 - DNA, 20 bp, Artificial Sequence
  Description of Artificial Sequence: Synthetic oligonucleotide
  Target: LAMA2; (-) strand; PAM type: NNAGAAW; PAM sequence: AAAGAAA
aaagaaagaaagaaagaaag

SEQ ID NO: 9507 - DNA, 20 bp, Artificial Sequence
  Description of Artificial Sequence: Synthetic oligonucleotide
  Target: LAMA2; (-) strand; PAM type: NNAGAAW; PAM sequence: AAAGAAA
aaagaaagaaagaaagaaag

SEQ ID NO: 9508 - DNA, 20 bp, Artificial Sequence
  Description of Artificial Sequence: Synthetic oligonucleotide
  Target: LAMA2; (-) strand; PAM type: NNAGAAW; PAM sequence: AAAGAAA
aaagaaagaaagaaagaaag

SEQ ID NO: 9509 - DNA, 20 bp, Artificial Sequence
  Description of Artificial Sequence: Synthetic oligonucleotide
  Target: LAMA2; (-) strand; PAM type: NNAGAAW; PAM sequence: AAAGAAA
aaagaaagaaagaaagaaag

SEQ ID NO: 9510 - DNA, 20 bp, Artificial Sequence
  Description of Artificial Sequence: Synthetic oligonucleotide
  Target: LAMA2; (-) strand; PAM type: NNAGAAW; PAM sequence: AAAGAAA
aaagaaagaaagaaagaaag

SEQ ID NO: 9511 - DNA, 20 bp, Artificial Sequence
  Description of Artificial Sequence: Synthetic oligonucleotide
  Target: LAMA2; (-) strand; PAM type: NNAGAAW; PAM sequence: AAAGAAA
aaggaaagaaagaaagaaag

SEQ ID NO: 9512 - DNA, 20 bp, Artificial Sequence
  Description of Artificial Sequence: Synthetic oligonucleotide
  Target: LAMA2; (-) strand; PAM type: NNAGAAW; PAM sequence: AAAGAAA
aaggaaggaaagaaagaaag

SEQ ID NO: 9513 - DNA, 20 bp, Artificial Sequence
  Description of Artificial Sequence: Synthetic oligonucleotide
  Target: LAMA2; (-) strand; PAM type: NNAGAAW; PAM sequence: AAAGAAA
aaggaaggaaggaaagaaag

SEQ ID NO: 9514 - DNA, 20 bp, Artificial Sequence
  Description of Artificial Sequence: Synthetic oligonucleotide
  Target: LAMA2; (-) strand; PAM type: NNAGAAW; PAM sequence: AAAGAAA
aaggaaggaaggaaggaaag

SEQ ID NO: 9515 - DNA, 20 bp, Artificial Sequence
  Description of Artificial Sequence: Synthetic oligonucleotide
  Target: LAMA2; (-) strand; PAM type: NNAGAAW; PAM sequence: AAAGAAA
aaggaaggaaggaaggaagg

SEQ ID NO: 9516 - DNA, 20 bp, Artificial Sequence
  Description of Artificial Sequence: Synthetic oligonucleotide
  Target: LAMA2; (-) strand; PAM type: NNAGAAW; PAM sequence: AAAGAAA
agagagagagagagagaaag

SEQ ID NO: 9517 - DNA, 20 bp, Artificial Sequence
  Description of Artificial Sequence: Synthetic oligonucleotide
  Target: LAMA2; (-) strand; PAM type: NNAGAAW; PAM sequence: AAAGAAA
agaaagagagagagagagag

SEQ ID NO: 9518 - DNA, 20 bp, Artificial Sequence
  Description of Artificial Sequence: Synthetic oligonucleotide
  Target: LAMA2; (-) strand; PAM type: NNAGAAW; PAM sequence: AGAGAAA
agaaagaaagagagagagag

SEQ ID NO: 9519 - DNA, 20 bp, Artificial Sequence
  Description of Artificial Sequence: Synthetic oligonucleotide
  Target: LAMA2; (-) strand; PAM type: NNAGAAW; PAM sequence: AAAGAAA
ggaagcaaagaaggaaggag

SEQ ID NO: 9520 - DNA, 20 bp, Artificial Sequence
  Description of Artificial Sequence: Synthetic oligonucleotide
  Target: LAMA2; (-) strand; PAM type: NNAGAAW; PAM sequence: GGAGAAA
ggaaggaagcaaagaaggaa

SEQ ID NO: 9521 - DNA, 20 bp, Artificial Sequence
  Description of Artificial Sequence: Synthetic oligonucleotide
  Target: LAMA2; (-) strand; PAM type: NNAGAAW; PAM sequence: AGAGAAA
agagagagagagagagagag

SEQ ID NO: 9522 - DNA, 20 bp, Artificial Sequence
  Description of Artificial Sequence: Synthetic oligonucleotide
  Target: LAMA2; (-) strand; PAM type: NNAGAAW; PAM sequence: CAAGAAA
gagacagaggaagactctgt

SEQ ID NO: 9523 - DNA, 20 bp, Artificial Sequence
  Description of Artificial Sequence: Synthetic oligonucleotide
  Target: LAMA2; (-) strand; PAM type: NNAGAAW; PAM sequence: GGAGAAT
ctacttggaaacctgaggca

SEQ ID NO: 9524 - DNA, 20 bp, Artificial Sequence
  Description of Artificial Sequence: Synthetic oligonucleotide
  Target: LAMA2; (-) strand; PAM type: NNAGAAW; PAM sequence: ATAGAAA
ctatatcaattcaacttctg

SEQ ID NO: 9525 - DNA, 20 bp, Artificial Sequence
  Description of Artificial Sequence: Synthetic oligonucleotide
  Target: LAMA2; (-) strand; PAM type: NNAGAAW; PAM sequence: GGAGAAA
gataatttgactctatttat

SEQ ID NO: 9526 - DNA, 20 bp, Artificial Sequence
  Description of Artificial Sequence: Synthetic oligonucleotide
  Target: LAMA2; (-) strand; PAM type: NNAGAAW; PAM sequence: GGAGAAA
taactgaaaaatctgttctt

SEQ ID NO: 9527 - DNA, 20 bp, Artificial Sequence
  Description of Artificial Sequence: Synthetic oligonucleotide
  Target: LAMA2; (-) strand; PAM type: NNAGAAW; PAM sequence: CCAGAAA
tataataaagcaatatattg

SEQ ID NO: 9528 - DNA, 20 bp, Artificial Sequence
  Description of Artificial Sequence: Synthetic oligonucleotide
  Target: LAMA2; (-) strand; PAM type: NNAGAAW; PAM sequence: AAAGAAT
ataaatactatgtgttatca

SEQ ID NO: 9529 - DNA, 20 bp, Artificial Sequence
  Description of Artificial Sequence: Synthetic oligonucleotide
  Target: LAMA2; (-) strand; PAM type: NNAGAAW; PAM sequence: CCAGAAA
gacaaatgaaggtgtgtaga

SEQ ID NO: 9530 - DNA, 20 bp, Artificial Sequence
  Description of Artificial Sequence: Synthetic oligonucleotide
  Target: LAMA2; (-) strand; PAM type: NNAGAAW; PAM sequence: AAAGAAT
gaagaagctcttaatggtaa

SEQ ID NO: 9531 - DNA, 20 bp, Artificial Sequence
  Description of Artificial Sequence: Synthetic oligonucleotide
  Target: LAMA2; (-) strand; PAM type: NNAGAAW; PAM sequence: TCAGAAA
ctgagttaataaccacaccc

SEQ ID NO: 9532 - DNA, 20 bp, Artificial Sequence
  Description of Artificial Sequence: Synthetic oligonucleotide
  Target: LAMA2; (-) strand; PAM type: NNAGAAW; PAM sequence: CCAGAAA
tagatataaagatttcttag

SEQ ID NO: 9533 - DNA, 20 bp, Artificial Sequence
  Description of Artificial Sequence: Synthetic oligonucleotide
  Target: LAMA2; (-) strand; PAM type: NNAGAAW; PAM sequence: TCAGAAA
ggagaagagaagaaggcatg

SEQ ID NO: 9534 - DNA, 20 bp, Artificial Sequence
  Description of Artificial Sequence: Synthetic oligonucleotide
  Target: LAMA2; (-) strand; PAM type: NNAGAAW; PAM sequence: GGAGAAT
ctactcgggaggctgaggca

SEQ ID NO: 9535 - DNA, 20 bp, Artificial Sequence
  Description of Artificial Sequence: Synthetic oligonucleotide
  Target: LAMA2; (-) strand; PAM type: NNAGAAW; PAM sequence: GAAGAAA
aaaaaaaaaaaaaaaaagga

SEQ ID NO: 9536 - DNA, 20 bp, Artificial Sequence
  Description of Artificial Sequence: Synthetic oligonucleotide
  Target: LAMA2; (-) strand; PAM type: NNAGAAW; PAM sequence: AGAGAAT
ctgctggggaggctgaggca

SEQ ID NO: 9537 - DNA, 20 bp, Artificial Sequence
  Description of Artificial Sequence: Synthetic oligonucleotide
  Target: LAMA2; (-) strand; PAM type: NNAGAAW; PAM sequence: AAAGAAT
aaaatacaaaaaaaaaaaaa

SEQ ID NO: 9538 - DNA, 20 bp, Artificial Sequence
  Description of Artificial Sequence: Synthetic oligonucleotide
  Target: LAMA2; (-) strand; PAM type: NNAGAAW; PAM sequence: AGAGAAA
taaggtctatttaaaaagac

SEQ ID NO: 9539 - DNA, 20 bp, Artificial Sequence
  Description of Artificial Sequence: Synthetic oligonucleotide
  Target: LAMA2; (-) strand; PAM type: NNAGAAW; PAM sequence: TGAGAAA
gggataaaaaatgtaaattg

SEQ ID NO: 9540 - DNA, 20 bp, Artificial Sequence
  Description of Artificial Sequence: Synthetic oligonucleotide
  Target: LAMA2; (-) strand; PAM type: NNAGAAW; PAM sequence: CAAGAAA
tgcctctctttaaccagctc

SEQ ID NO: 9541 - DNA, 20 bp, Artificial Sequence
  Description of Artificial Sequence: Synthetic oligonucleotide
  Target: LAMA2; (-) strand; PAM type: NNAGAAW; PAM sequence: AAAGAAA
aacaaaacaaaacaaaaaag

SEQ ID NO: 9542 - DNA, 20 bp, Artificial Sequence
  Description of Artificial Sequence: Synthetic oligonucleotide
  Target: LAMA2; (-) strand; PAM type: NNAGAAW; PAM sequence: AAAGAAA
acaaaacaaaacaaaacaaa

SEQ ID NO: 9543 - DNA, 20 bp, Artificial Sequence
  Description of Artificial Sequence: Synthetic oligonucleotide
  Target: LAMA2; (-) strand; PAM type: NNAGAAW; PAM sequence: GAAGAAT
cctctcaggaggctgaggca

SEQ ID NO: 9544 - DNA, 20 bp, Artificial Sequence
  Description of Artificial Sequence: Synthetic oligonucleotide
  Target: LAMA2; (-) strand; PAM type: NNAGAAW; PAM sequence: GGAGAAA
gggaccagcctaaccaacat

SEQ ID NO: 9545 - DNA, 20 bp, Artificial Sequence
  Description of Artificial Sequence: Synthetic oligonucleotide
  Target: LAMA2; (-) strand; PAM type: NNAGAAW; PAM sequence: CGAGAAA
ataccataacaacttacatc

SEQ ID NO: 9546 - DNA, 20 bp, Artificial Sequence
  Description of Artificial Sequence: Synthetic oligonucleotide
  Target: LAMA2; (-) strand; PAM type: NNAGAAW; PAM sequence: TTAGAAA
ctatgaatctgctgagtact

SEQ ID NO: 9547 - DNA, 20 bp, Artificial Sequence
  Description of Artificial Sequence: Synthetic oligonucleotide
  Target: LAMA2; (-) strand; PAM type: NNAGAAW; PAM sequence: ACAGAAT
tttcacatcaaggatacttg

SEQ ID NO: 9548 - DNA, 20 bp, Artificial Sequence
  Description of Artificial Sequence: Synthetic oligonucleotide
  Target: LAMA2; (-) strand; PAM type: NNAGAAW; PAM sequence: TAAGAAA
aagaaatcaagatcatcaaa

SEQ ID NO: 9549 - DNA, 20 bp, Artificial Sequence
  Description of Artificial Sequence: Synthetic oligonucleotide
  Target: LAMA2; (-) strand; PAM type: NNAGAAW; PAM sequence: GAAGAAA
acccagatttacatcttaat

SEQ ID NO: 9550 - DNA, 20 bp, Artificial Sequence
  Description of Artificial Sequence: Synthetic oligonucleotide
  Target: LAMA2; (-) strand; PAM type: NNAGAAW; PAM sequence: CAAGAAT
atctcatccatttttccagc

SEQ ID NO: 9551 - DNA, 20 bp, Artificial Sequence
  Description of Artificial Sequence: Synthetic oligonucleotide
  Target: LAMA2; (-) strand; PAM type: NNAGAAW; PAM sequence: ACAGAAT
aactttcaagagggtgaaag

SEQ ID NO: 9552 - DNA, 20 bp, Artificial Sequence
  Description of Artificial Sequence: Synthetic oligonucleotide
  Target: LAMA2; (-) strand; PAM type: NNAGAAW; PAM sequence: TTAGAAA
aaatccagactgtgactggt

SEQ ID NO: 9553 - DNA, 20 bp, Artificial Sequence
  Description of Artificial Sequence: Synthetic oligonucleotide
  Target: LAMA2; (-) strand; PAM type: NNAGAAW; PAM sequence: TGAGAAT
ctactcaggaggctgaggct

SEQ ID NO: 9554 - DNA, 20 bp, Artificial Sequence
  Description of Artificial Sequence: Synthetic oligonucleotide
  Target: LAMA2; (-) strand; PAM type: NNAGAAW; PAM sequence: ACAGAAA
ttgggaagcaaagtctatta

SEQ ID NO: 9555 - DNA, 20 bp, Artificial Sequence
  Description of Artificial Sequence: Synthetic oligonucleotide
  Target: LAMA2; (-) strand; PAM type: NNAGAAW; PAM sequence: ATAGAAA
gttcccttatttaaaaggag

SEQ ID NO: 9556 - DNA, 20 bp, Artificial Sequence
  Description of Artificial Sequence: Synthetic oligonucleotide
  Target: LAMA2; (-) strand; PAM type: NNAGAAW; PAM sequence: AGAGAAT
cacctcaggtcaaactgata

SEQ ID NO: 9557 - DNA, 20 bp, Artificial Sequence
  Description of Artificial Sequence: Synthetic oligonucleotide
  Target: LAMA2; (-) strand; PAM type: NNAGAAW; PAM sequence: ATAGAAA
gattgtgcgtttaatatgtg

SEQ ID NO: 9558 - DNA, 20 bp, Artificial Sequence
  Description of Artificial Sequence: Synthetic oligonucleotide
  Target: LAMA2; (-) strand; PAM type: NNAGAAW; PAM sequence: ACAGAAA
tctgaagaaaaataaatatc

SEQ ID NO: 9559 - DNA, 20 bp, Artificial Sequence
  Description of Artificial Sequence: Synthetic oligonucleotide
  Target: LAMA2; (-) strand; PAM type: NNAGAAW; PAM sequence: GAAGAAA
atattgttggcacttcttct

SEQ ID NO: 9560 - DNA, 20 bp, Artificial Sequence
  Description of Artificial Sequence: Synthetic oligonucleotide
  Target: LAMA2; (-) strand; PAM type: NNAGAAW; PAM sequence: GGAGAAT
ctacttgggaggctgaggca

SEQ ID NO: 9561 - DNA, 20 bp, Artificial Sequence
  Description of Artificial Sequence: Synthetic oligonucleotide
  Target: LAMA2; (-) strand; PAM type: NNAGAAW; PAM sequence: AAAGAAA
agaaagtaaaatcatcttta

SEQ ID NO: 9562 - DNA, 20 bp, Artificial Sequence
  Description of Artificial Sequence: Synthetic oligonucleotide
  Target: LAMA2; (-) strand; PAM type: NNAGAAW; PAM sequence: ATAGAAA
ctcaatgcaataggaatctg

SEQ ID NO: 9563 - DNA, 20 bp, Artificial Sequence
  Description of Artificial Sequence: Synthetic oligonucleotide
  Target: LAMA2; (-) strand; PAM type: NNAGAAW; PAM sequence: AGAGAAA
tttccagattcataattttc

SEQ ID NO: 9564 - DNA, 20 bp, Artificial Sequence
  Description of Artificial Sequence: Synthetic oligonucleotide
  Target: LAMA2; (-) strand; PAM type: NNAGAAW; PAM sequence: TGAGAAT
atgctttggggtgtcagtct

SEQ ID NO: 9565 - DNA, 20 bp, Artificial Sequence
  Description of Artificial Sequence: Synthetic oligonucleotide
  Target: LAMA2; (-) strand; PAM type: NNAGAAW; PAM sequence: ATAGAAA
gaaagtcggcacatttgccc

SEQ ID NO: 9566 - DNA, 20 bp, Artificial Sequence
  Description of Artificial Sequence: Synthetic oligonucleotide
  Target: LAMA2; (-) strand; PAM type: NNAGAAW; PAM sequence: CTAGAAA
cttaaattcctcacatctca

SEQ ID NO: 9567 - DNA, 20 bp, Artificial Sequence
  Description of Artificial Sequence: Synthetic oligonucleotide
  Target: LAMA2; (-) strand; PAM type: NNAGAAW; PAM sequence: ATAGAAA
aatcaaaagggagattagag

SEQ ID NO: 9568 - DNA, 20 bp, Artificial Sequence
  Description of Artificial Sequence: Synthetic oligonucleotide
  Target: LAMA2; (-) strand; PAM type: NNAGAAW; PAM sequence: TCAGAAA
attctatgagatattgaggc

SEQ ID NO: 9569 - DNA, 20 bp, Artificial Sequence
  Description of Artificial Sequence: Synthetic oligonucleotide
  Target: LAMA2; (-) strand; PAM type: NNAGAAW; PAM sequence: ACAGAAA
gtatgccatcaaccttgtta

SEQ ID NO: 9570 - DNA, 20 bp, Artificial Sequence
  Description of Artificial Sequence: Synthetic oligonucleotide
  Target: LAMA2; (-) strand; PAM type: NNAGAAW; PAM sequence: ACAGAAA
gggcaattttaaaggtaact

SEQ ID NO: 9571 - DNA, 20 bp, Artificial Sequence
  Description of Artificial Sequence: Synthetic oligonucleotide
  Target: LAMA2; (-) strand; PAM type: NNAGAAW; PAM sequence: ACAGAAT
gagagtaattcagattctca

SEQ ID NO: 9572 - DNA, 20 bp, Artificial Sequence
  Description of Artificial Sequence: Synthetic oligonucleotide
  Target: LAMA2; (-) strand; PAM type: NNAGAAW; PAM sequence: GAAGAAA
gcagcatcatatgaaaggaa

SEQ ID NO: 9573 - DNA, 20 bp, Artificial Sequence
  Description of Artificial Sequence: Synthetic oligonucleotide
  Target: LAMA2; (-) strand; PAM type: NNAGAAW; PAM sequence: TAAGAAA
aagaaaacaatggagagtga

SEQ ID NO: 9574 - DNA, 20 bp, Artificial Sequence
  Description of Artificial Sequence: Synthetic oligonucleotide
  Target: LAMA2; (-) strand; PAM type: NNAGAAW; PAM sequence: CAAGAAA
ggaccctttgttcatcttat

SEQ ID NO: 9575 - DNA, 20 bp, Artificial Sequence
  Description of Artificial Sequence: Synthetic oligonucleotide
  Target: LAMA2; (-) strand; PAM type: NNAGAAW; PAM sequence: GAAGAAA
ctgaatattgtgaagagaag

SEQ ID NO: 9576 - DNA, 20 bp, Artificial Sequence
  Description of Artificial Sequence: Synthetic oligonucleotide
  Target: LAMA2; (-) strand; PAM type: NNAGAAW; PAM sequence: GTAGAAA
gctgctgtatattagtgagg

SEQ ID NO: 9577 - DNA, 20 bp, Artificial Sequence
  Description of Artificial Sequence: Synthetic oligonucleotide
  Target: LAMA2; (-) strand; PAM type: NNAGAAW; PAM sequence: TGAGAAA
gatagtgctctgagacttcc

SEQ ID NO: 9578 - DNA, 20 bp, Artificial Sequence
  Description of Artificial Sequence: Synthetic oligonucleotide
  Target: LAMA2; (-) strand; PAM type: NNAGAAW; PAM sequence: GGAGAAT
tgcaatctaaaagaataaat

SEQ ID NO: 9579 - DNA, 20 bp, Artificial Sequence
  Description of Artificial Sequence: Synthetic oligonucleotide
  Target: LAMA2; (-) strand; PAM type: NNAGAAW; PAM sequence: AAAGAAT
attgttctatgtgcaatcta

SEQ ID NO: 9580 - DNA, 20 bp, Artificial Sequence
  Description of Artificial Sequence: Synthetic oligonucleotide
  Target: LAMA2; (-) strand; PAM type: NNAGAAW; PAM sequence: TTAGAAA
aattgataaaaacaggcaag

SEQ ID NO: 9581 - DNA, 20 bp, Artificial Sequence
  Description of Artificial Sequence: Synthetic oligonucleotide
  Target: LAMA2; (-) strand; PAM type: NNAGAAW; PAM sequence: AGAGAAA
cattaaactaaatgggagga

SEQ ID NO: 9582 - DNA, 20 bp, Artificial Sequence
  Description of Artificial Sequence: Synthetic oligonucleotide
  Target: LAMA2; (-) strand; PAM type: NNAGAAW; PAM sequence: ACAGAAT
caggtagacctgggttatat

SEQ ID NO: 9583 - DNA, 20 bp, Artificial Sequence
  Description of Artificial Sequence: Synthetic oligonucleotide
  Target: LAMA2; (-) strand; PAM type: NNAGAAW; PAM sequence: ATAGAAA
agtaggttgattttcaggaa

SEQ ID NO: 9584 - DNA, 20 bp, Artificial Sequence
  Description of Artificial Sequence: Synthetic oligonucleotide
  Target: LAMA2; (-) strand; PAM type: NNAGAAW; PAM sequence: GTAGAAA
aaattaaaatcttgagtcaa

SEQ ID NO: 9585 - DNA, 20 bp, Artificial Sequence
  Description of Artificial Sequence: Synthetic oligonucleotide
  Target: LAMA2; (-) strand; PAM type: NNAGAAW; PAM sequence: TAAGAAT
tattgtgaggagttacataa

SEQ ID NO: 9586 - DNA, 20 bp, Artificial Sequence
  Description of Artificial Sequence: Synthetic oligonucleotide
  Target: LAMA2; (-) strand; PAM type: NNAGAAW; PAM sequence: TTAGAAA
agccctgcccataataagct

SEQ ID NO: 9587 - DNA, 20 bp, Artificial Sequence
  Description of Artificial Sequence: Synthetic oligonucleotide
  Target: LAMA2; (-) strand; PAM type: NNAGAAW; PAM sequence: TTAGAAA
attatgtcttcagataccca

SEQ ID NO: 9588 - DNA, 20 bp, Artificial Sequence
  Description of Artificial Sequence: Synthetic oligonucleotide
  Target: LAMA2; (-) strand; PAM type: NNAGAAW; PAM sequence: CTAGAAA
tagaggcacactagagtata

SEQ ID NO: 9589 - DNA, 20 bp, Artificial Sequence
  Description of Artificial Sequence: Synthetic oligonucleotide
  Target: LAMA2; (-) strand; PAM type: NNAGAAW; PAM sequence: GTAGAAA
attaatccttcatgcggtag

SEQ ID NO: 9590 - DNA, 20 bp, Artificial Sequence
  Description of Artificial Sequence: Synthetic oligonucleotide
  Target: LAMA2; (-) strand; PAM type: NNAGAAW; PAM sequence: TGAGAAA
tatgctatgagtaaatagaa

SEQ ID NO: 9591 - DNA, 20 bp, Artificial Sequence
  Description of Artificial Sequence: Synthetic oligonucleotide
  Target: LAMA2; (-) strand; PAM type: NNAGAAW; PAM sequence: ATAGAAT
tcaaaatatgctatgagtaa

SEQ ID NO: 9592 - DNA, 20 bp, Artificial Sequence
  Description of Artificial Sequence: Synthetic oligonucleotide
  Target: LAMA2; (-) strand; PAM type: NNAGAAW; PAM sequence: ATAGAAT
ctggtaggaaaaagactaaa

SEQ ID NO: 9593 - DNA, 20 bp, Artificial Sequence
  Description of Artificial Sequence: Synthetic oligonucleotide
  Target: LAMA2; (-) strand; PAM type: NNAGAAW; PAM sequence: AAAGAAA
gagataatggctagatttta

SEQ ID NO: 9594 - DNA, 20 bp, Artificial Sequence
  Description of Artificial Sequence: Synthetic oligonucleotide
  Target: LAMA2; (-) strand; PAM type: NNAGAAW; PAM sequence: TAAGAAT
agtgaataaaatatttaggt

SEQ ID NO: 9595 - DNA, 20 bp, Artificial Sequence
  Description of Artificial Sequence: Synthetic oligonucleotide
  Target: LAMA2; (-) strand; PAM type: NNAGAAW; PAM sequence: ATAGAAA
aaaagtatagtaatatttgc

SEQ ID NO: 9596 - DNA, 20 bp, Artificial Sequence
  Description of Artificial Sequence: Synthetic oligonucleotide
  Target: LAMA2; (-) strand; PAM type: NNAGAAW; PAM sequence: AGAGAAA
cattaatgattctaggcttt

SEQ ID NO: 9597 - DNA, 20 bp, Artificial Sequence
  Description of Artificial Sequence: Synthetic oligonucleotide
  Target: LAMA2; (-) strand; PAM type: NNAGAAW; PAM sequence: GCAGAAA
gtattttatgttttattatt

SEQ ID NO: 9598 - DNA, 20 bp, Artificial Sequence
  Description of Artificial Sequence: Synthetic oligonucleotide
  Target: LAMA2; (-) strand; PAM type: NNAGAAW; PAM sequence: AAAGAAT
atgaggaaagaattgacatg

SEQ ID NO: 9599 - DNA, 20 bp, Artificial Sequence
  Description of Artificial Sequence: Synthetic oligonucleotide
  Target: LAMA2; (-) strand; PAM type: NNAGAAW; PAM sequence: AAAGAAT
tcagtaagaagagcatgagg

SEQ ID NO: 9600 - DNA, 20 bp, Artificial Sequence
  Description of Artificial Sequence: Synthetic oligonucleotide
  Target: LAMA2; (-) strand; PAM type: NNAGAAW; PAM sequence: TTAGAAA
ttcaattctgatcttttttc

SEQ ID NO: 9601 - DNA, 20 bp, Artificial Sequence
  Description of Artificial Sequence: Synthetic oligonucleotide
  Target: LAMA2; (-) strand; PAM type: NNAGAAW; PAM sequence: GTAGAAT
attagttccttaaatgtttg

SEQ ID NO: 9602 - DNA, 20 bp, Artificial Sequence
  Description of Artificial Sequence: Synthetic oligonucleotide
  Target: LAMA2; (-) strand; PAM type: NNAGAAW; PAM sequence: AGAGAAA
cttgtcttattcctgatctt

SEQ ID NO: 9603 - DNA, 20 bp, Artificial Sequence
  Description of Artificial Sequence: Synthetic oligonucleotide
  Target: LAMA2; (-) strand; PAM type: NNAGAAW; PAM sequence: ACAGAAT
attttgtatcctgctaattt

SEQ ID NO: 9604 - DNA, 20 bp, Artificial Sequence
  Description of Artificial Sequence: Synthetic oligonucleotide
  Target: LAMA2; (-) strand; PAM type: NNAGAAW; PAM sequence: AGAGAAT
atggatggcagcaggcaagg

SEQ ID NO: 9605 - DNA, 20 bp, Artificial Sequence
  Description of Artificial Sequence: Synthetic oligonucleotide
  Target: LAMA2; (-) strand; PAM type: NNAGAAW; PAM sequence: AAAGAAA
ctgagactgggcaatttaca

SEQ ID NO: 9606 - DNA, 20 bp, Artificial Sequence
  Description of Artificial Sequence: Synthetic oligonucleotide
  Target: LAMA2; (-) strand; PAM type: NNAGAAW; PAM sequence: GGAGAAT
ctacttgggaggctgaggca

SEQ ID NO: 9607 - DNA, 20 bp, Artificial Sequence
  Description of Artificial Sequence: Synthetic oligonucleotide
  Target: LAMA2; (-) strand; PAM type: NNAGAAW; PAM sequence: CAAGAAT
aaacgtcattggaattttga

SEQ ID NO: 9608 - DNA, 20 bp, Artificial Sequence
  Description of Artificial Sequence: Synthetic oligonucleotide
  Target: LAMA2; (-) strand; PAM type: NNAGAAW; PAM sequence: TTAGAAT
agtttcagtctttaattcat

SEQ ID NO: 9609 - DNA, 20 bp, Artificial Sequence
  Description of Artificial Sequence: Synthetic oligonucleotide
  Target: LAMA2; (-) strand; PAM type: NNAGAAW; PAM sequence: TAAGAAA
gaagaaaataattctagaca

SEQ ID NO: 9610 - DNA, 20 bp, Artificial Sequence
  Description of Artificial Sequence: Synthetic oligonucleotide
  Target: LAMA2; (-) strand; PAM type: NNAGAAW; PAM sequence: GAAGAAA
aaacaagctacattgaaatt

SEQ ID NO: 9611 - DNA, 20 bp, Artificial Sequence
  Description of Artificial Sequence: Synthetic oligonucleotide
  Target: LAMA2; (-) strand; PAM type: NNAGAAW; PAM sequence: GGAGAAA
tagatggtgatatattttat

SEQ ID NO: 9612 - DNA, 20 bp, Artificial Sequence
  Description of Artificial Sequence: Synthetic oligonucleotide
  Target: LAMA2; (-) strand; PAM type: NNAGAAW; PAM sequence: TTAGAAA
cacgcacaaaaaaattgcat

SEQ ID NO: 9613 - DNA, 20 bp, Artificial Sequence
  Description of Artificial Sequence: Synthetic oligonucleotide
  Target: LAMA2; (-) strand; PAM type: NNAGAAW; PAM sequence: TTAGAAA
ttgtgcactattctaagtgc

SEQ ID NO: 9614 - DNA, 20 bp, Artificial Sequence
  Description of Artificial Sequence: Synthetic oligonucleotide
  Target: LAMA2; (-) strand; PAM type: NNAGAAW; PAM sequence: TTAGAAA
ccttaaaggaaatttcataa

SEQ ID NO: 9615 - DNA, 20 bp, Artificial Sequence
  Description of Artificial Sequence: Synthetic oligonucleotide
  Target: LAMA2; (-) strand; PAM type: NNAGAAW; PAM sequence: TGAGAAA
acgtcaagcctccagaacta

SEQ ID NO: 9616 - DNA, 20 bp, Artificial Sequence
  Description of Artificial Sequence: Synthetic oligonucleotide
  Target: LAMA2; (-) strand; PAM type: NNAGAAW; PAM sequence: CCAGAAA
gtacccttataaatgaaacc

SEQ ID NO: 9617 - DNA, 20 bp, Artificial Sequence
  Description of Artificial Sequence: Synthetic oligonucleotide
  Target: LAMA2; (-) strand; PAM type: NNAGAAW; PAM sequence: CAAGAAT
ggtcatgaggacagagcccc

SEQ ID NO: 9618 - DNA, 20 bp, Artificial Sequence
  Description of Artificial Sequence: Synthetic oligonucleotide
  Target: LAMA2; (-) strand; PAM type: NNAGAAW; PAM sequence: GAAGAAA
aagaacatgcataggaactg

SEQ ID NO: 9619 - DNA, 20 bp, Artificial Sequence
  Description of Artificial Sequence: Synthetic oligonucleotide
  Target: LAMA2; (-) strand; PAM type: NNAGAAW; PAM sequence: TTAGAAT
gtgacagatacaactgaaat

SEQ ID NO: 9620 - DNA, 20 bp, Artificial Sequence
  Description of Artificial Sequence: Synthetic oligonucleotide
  Target: LAMA2; (-) strand; PAM type: NNAGAAW; PAM sequence: CTAGAAT
tttacattttcatggtattg

SEQ ID NO: 9621 - DNA, 20 bp, Artificial Sequence
  Description of Artificial Sequence: Synthetic oligonucleotide
  Target: LAMA2; (-) strand; PAM type: NNAGAAW; PAM sequence: ACAGAAT
tcttgttcagactttccata

SEQ ID NO: 9622 - DNA, 20 bp, Artificial Sequence
  Description of Artificial Sequence: Synthetic oligonucleotide
  Target: LAMA2; (-) strand; PAM type: NNAGAAW; PAM sequence: TTAGAAA
ctgcccacattcaatctatt

SEQ ID NO: 9623 - DNA, 20 bp, Artificial Sequence
  Description of Artificial Sequence: Synthetic oligonucleotide
  Target: LAMA2; (-) strand; PAM type: NNAGAAW; PAM sequence: TAAGAAT
gtaagtaaaaaattaaactc

SEQ ID NO: 9624 - DNA, 20 bp, Artificial Sequence
  Description of Artificial Sequence: Synthetic oligonucleotide
  Target: LAMA2; (-) strand; PAM type: NNAGAAW; PAM sequence: CAAGAAT
atcaatgaagccatttgact

SEQ ID NO: 9625 - DNA, 20 bp, Artificial Sequence
  Description of Artificial Sequence: Synthetic oligonucleotide
  Target: LAMA2; (-) strand; PAM type: NNAGAAW; PAM sequence: TAAGAAA
tacaattatataatcaaaaa

SEQ ID NO: 9626 - DNA, 20 bp, Artificial Sequence
  Description of Artificial Sequence: Synthetic oligonucleotide
  Target: LAMA2; (-) strand; PAM type: NNAGAAW; PAM sequence: CTAGAAA
ttcaaatatgtagtcaattt

SEQ ID NO: 9627 - DNA, 20 bp, Artificial Sequence
  Description of Artificial Sequence: Synthetic oligonucleotide
  Target: LAMA2; (-) strand; PAM type: NNAGAAW; PAM sequence: AAAGAAA
ccaacgcataagtcataggt

SEQ ID NO: 9628 - DNA, 20 bp, Artificial Sequence
  Description of Artificial Sequence: Synthetic oligonucleotide
  Target: LAMA2; (-) strand; PAM type: NNAGAAW; PAM sequence: ATAGAAA
acactttttaagctttctcc

SEQ ID NO: 9629 - DNA, 20 bp, Artificial Sequence
  Description of Artificial Sequence: Synthetic oligonucleotide
  Target: LAMA2; (-) strand; PAM type: NNAGAAW; PAM sequence: TCAGAAA
tataattaaaataacataaa

SEQ ID NO: 9630 - DNA, 20 bp, Artificial Sequence
  Description of Artificial Sequence: Synthetic oligonucleotide
  Target: LAMA2; (-) strand; PAM type: NNAGAAW; PAM sequence: GCAGAAA
catatctaaaatggaaagtt

SEQ ID NO: 9631 - DNA, 20 bp, Artificial Sequence
  Description of Artificial Sequence: Synthetic oligonucleotide
  Target: LAMA2; (-) strand; PAM type: NNAGAAW; PAM sequence: TTAGAAT
gcttcactggtgaatacaag

SEQ ID NO: 9632 - DNA, 20 bp, Artificial Sequence
  Description of Artificial Sequence: Synthetic oligonucleotide
  Target: LAMA2; (-) strand; PAM type: NNAGAAW; PAM sequence: AGAGAAA
tgtgactaaaacccatgcac

SEQ ID NO: 9633 - DNA, 20 bp, Artificial Sequence
  Description of Artificial Sequence: Synthetic oligonucleotide
  Target: LAMA2; (-) strand; PAM type: NNAGAAW; PAM sequence: TAAGAAA
actcaactaaactgaaaata

SEQ ID NO: 9634 - DNA, 20 bp, Artificial Sequence
  Description of Artificial Sequence: Synthetic oligonucleotide
  Target: LAMA2; (-) strand; PAM type: NNAGAAW; PAM sequence: AGAGAAA
caatataacaatttcacgat

SEQ ID NO: 9635 - DNA, 20 bp, Artificial Sequence
  Description of Artificial Sequence: Synthetic oligonucleotide
  Target: LAMA2; (-) strand; PAM type: NNAGAAW; PAM sequence: TAAGAAA
aggtatccatttcaagaagc

SEQ ID NO: 9636 - DNA, 20 bp, Artificial Sequence
  Description of Artificial Sequence: Synthetic oligonucleotide
  Target: LAMA2; (-) strand; PAM type: NNAGAAW; PAM sequence: TTAGAAT
agaaaaatttactatgaaaa

SEQ ID NO: 9637 - DNA, 20 bp, Artificial Sequence
  Description of Artificial Sequence: Synthetic oligonucleotide
  Target: LAMA2; (-) strand; PAM type: NNAGAAW; PAM sequence: ACAGAAA
ttctatataactcagaggcc

SEQ ID NO: 9638 - DNA, 20 bp, Artificial Sequence
  Description of Artificial Sequence: Synthetic oligonucleotide
  Target: LAMA2; (-) strand; PAM type: NNAGAAW; PAM sequence: TCAGAAA
ttagaaaaatactcaattgt

SEQ ID NO: 9639 - DNA, 20 bp, Artificial Sequence
  Description of Artificial Sequence: Synthetic oligonucleotide
  Target: LAMA2; (-) strand; PAM type: NNAGAAW; PAM sequence: TTAGAAA
taacaacaaaaacaaaacga

SEQ ID NO: 9640 - DNA, 20 bp, Artificial Sequence
  Description of Artificial Sequence: Synthetic oligonucleotide
  Target: LAMA2; (-) strand; PAM type: NNAGAAW; PAM sequence: AAAGAAT
gtctcaaaaagtttagtctc

SEQ ID NO: 9641 - DNA, 20 bp, Artificial Sequence
  Description of Artificial Sequence: Synthetic oligonucleotide
  Target: LAMA2; (-) strand; PAM type: NNAGAAW; PAM sequence: CCAGAAT
tgattctcccacctcagact

SEQ ID NO: 9642 - DNA, 20 bp, Artificial Sequence
  Description of Artificial Sequence: Synthetic oligonucleotide
  Target: LAMA2; (-) strand; PAM type: NNAGAAW; PAM sequence: ATAGAAT
tagtactgcaaccaacaact

SEQ ID NO: 9643 - DNA, 20 bp, Artificial Sequence
  Description of Artificial Sequence: Synthetic oligonucleotide
  Target: LAMA2; (-) strand; PAM type: NNAGAAW; PAM sequence: AGAGAAA
aacctatatcacgcaaacac

SEQ ID NO: 9644 - DNA, 20 bp, Artificial Sequence
  Description of Artificial Sequence: Synthetic oligonucleotide
  Target: LAMA2; (-) strand; PAM type: NNAGAAW; PAM sequence: TGAGAAA
atataagtacactcaacata

SEQ ID NO: 9645 - DNA, 20 bp, Artificial Sequence
  Description of Artificial Sequence: Synthetic oligonucleotide
  Target: LAMA2; (-) strand; PAM type: NNAGAAW; PAM sequence: TGAGAAT
taagacaaacagaaaacaga

SEQ ID NO: 9646 - DNA, 20 bp, Artificial Sequence
  Description of Artificial Sequence: Synthetic oligonucleotide
  Target: LAMA2; (-) strand; PAM type: NNAGAAW; PAM sequence: ACAGAAA
attagcaaaagataagacaa

SEQ ID NO: 9647 - DNA, 20 bp, Artificial Sequence
  Description of Artificial Sequence: Synthetic oligonucleotide
  Target: LAMA2; (-) strand; PAM type: NNAGAAW; PAM sequence: GAAGAAA
aaaagtaagaaagttatgag

SEQ ID NO: 9648 - DNA, 20 bp, Artificial Sequence
  Description of Artificial Sequence: Synthetic oligonucleotide
  Target: LAMA2; (-) strand; PAM type: NNAGAAW; PAM sequence: TAAGAAA
aaccttcagtattccaaaag

SEQ ID NO: 9649 - DNA, 20 bp, Artificial Sequence
  Description of Artificial Sequence: Synthetic oligonucleotide
  Target: LAMA2; (-) strand; PAM type: NNAGAAW; PAM sequence: GAAGAAA
cagaagacaagctaatgaaa

SEQ ID NO: 9650 - DNA, 20 bp, Artificial Sequence
  Description of Artificial Sequence: Synthetic oligonucleotide
  Target: LAMA2; (-) strand; PAM type: NNAGAAW; PAM sequence: ATAGAAT
gaattaaacatatgagaact

SEQ ID NO: 9651 - DNA, 20 bp, Artificial Sequence
  Description of Artificial Sequence: Synthetic oligonucleotide
  Target: LAMA2; (-) strand; PAM type: NNAGAAW; PAM sequence: ATAGAAT
ctatggagtttaatatatac

SEQ ID NO: 9652 - DNA, 20 bp, Artificial Sequence
  Description of Artificial Sequence: Synthetic oligonucleotide
  Target: LAMA2; (-) strand; PAM type: NNAGAAW; PAM sequence: ACAGAAA
ttcttgatggaagtttacta

SEQ ID NO: 9653 - DNA, 20 bp, Artificial Sequence
  Description of Artificial Sequence: Synthetic oligonucleotide
  Target: LAMA2; (-) strand; PAM type: NNAGAAW; PAM sequence: AAAGAAA
tttcatttaaaaaaggcaga

SEQ ID NO: 9654 - DNA, 20 bp, Artificial Sequence
  Description of Artificial Sequence: Synthetic oligonucleotide
  Target: LAMA2; (-) strand; PAM type: NNAGAAW; PAM sequence: GCAGAAA
caggctttcatttaaaaaag

SEQ ID NO: 9655 - DNA, 20 bp, Artificial Sequence
  Description of Artificial Sequence: Synthetic oligonucleotide
  Target: LAMA2; (-) strand; PAM type: NNAGAAW; PAM sequence: AAAGAAA
ggaaaataagtctcaaaagt

SEQ ID NO: 9656 - DNA, 20 bp, Artificial Sequence
  Description of Artificial Sequence: Synthetic oligonucleotide
  Target: LAMA2; (-) strand; PAM type: NNAGAAW; PAM sequence: CAAGAAA
aaaacaaaattccaaccagg

SEQ ID NO: 9657 - DNA, 20 bp, Artificial Sequence
  Description of Artificial Sequence: Synthetic oligonucleotide
  Target: LAMA2; (-) strand; PAM type: NNAGAAW; PAM sequence: ATAGAAA
gactttccgcttacttcatg

SEQ ID NO: 9658 - DNA, 20 bp, Artificial Sequence
  Description of Artificial Sequence: Synthetic oligonucleotide
  Target: LAMA2; (-) strand; PAM type: NNAGAAW; PAM sequence: ACAGAAT
ttggtgaaagacattgatcc

SEQ ID NO: 9659 - DNA, 20 bp, Artificial Sequence
  Description of Artificial Sequence: Synthetic oligonucleotide
  Target: LAMA2; (-) strand; PAM type: NNAGAAW; PAM sequence: TAAGAAT
acattcgagaaaatatcggc

SEQ ID NO: 9660 - DNA, 20 bp, Artificial Sequence
  Description of Artificial Sequence: Synthetic oligonucleotide
  Target: LAMA2; (-) strand; PAM type: NNAGAAW; PAM sequence: CGAGAAA
gaatggacagtaacaacatt

SEQ ID NO: 9661 - DNA, 20 bp, Artificial Sequence
  Description of Artificial Sequence: Synthetic oligonucleotide
  Target: LAMA2; (-) strand; PAM type: NNAGAAW; PAM sequence: AAAGAAT
gtctcagggagagtggagag

SEQ ID NO: 9662 - DNA, 20 bp, Artificial Sequence
  Description of Artificial Sequence: Synthetic oligonucleotide
  Target: LAMA2; (-) strand; PAM type: NNAGAAW; PAM sequence: AGAGAAA
tgaagtctcagggagagtgg

SEQ ID NO: 9663 - DNA, 20 bp, Artificial Sequence
  Description of Artificial Sequence: Synthetic oligonucleotide
  Target: LAMA2; (-) strand; PAM type: NNAGAAW; PAM sequence: ATAGAAT
aagacaaatgaaaagaagcc

SEQ ID NO: 9664 - DNA, 20 bp, Artificial Sequence
  Description of Artificial Sequence: Synthetic oligonucleotide
  Target: LAMA2; (-) strand; PAM type: NNAGAAW; PAM sequence: TGAGAAA
cacccagaaaatgtacagac

SEQ ID NO: 9665 - DNA, 20 bp, Artificial Sequence
  Description of Artificial Sequence: Synthetic oligonucleotide
  Target: LAMA2; (-) strand; PAM type: NNAGAAW; PAM sequence: CCAGAAA
tataccaaacaacaggtcac

SEQ ID NO: 9666 - DNA, 20 bp, Artificial Sequence
  Description of Artificial Sequence: Synthetic oligonucleotide
  Target: LAMA2; (-) strand; PAM type: NNAGAAW; PAM sequence: GCAGAAA
gtaatagaagattgaatcca

SEQ ID NO: 9667 - DNA, 20 bp, Artificial Sequence
  Description of Artificial Sequence: Synthetic oligonucleotide
  Target: LAMA2; (-) strand; PAM type: NNAGAAW; PAM sequence: ATAGAAA
caggaatgcatgaaaagaca

SEQ ID NO: 9668 - DNA, 20 bp, Artificial Sequence
  Description of Artificial Sequence: Synthetic oligonucleotide
  Target: LAMA2; (-) strand; PAM type: NNAGAAW; PAM sequence: CCAGAAT
taagagaaaaataacatctt

SEQ ID NO: 9669 - DNA, 20 bp, Artificial Sequence
  Description of Artificial Sequence: Synthetic oligonucleotide
  Target: LAMA2; (-) strand; PAM type: NNAGAAW; PAM sequence: AGAGAAA
aatgaaaataaatcatttta

SEQ ID NO: 9670 - DNA, 20 bp, Artificial Sequence
  Description of Artificial Sequence: Synthetic oligonucleotide
  Target: LAMA2; (-) strand; PAM type: NNAGAAW; PAM sequence: ACAGAAT
tgcctctacactaactcttg

SEQ ID NO: 9671 - DNA, 20 bp, Artificial Sequence
  Description of Artificial Sequence: Synthetic oligonucleotide
  Target: LAMA2; (-) strand; PAM type: NNAGAAW; PAM sequence: TCAGAAT
gagtaaactagaaacaacca

SEQ ID NO: 9672 - DNA, 20 bp, Artificial Sequence
  Description of Artificial Sequence: Synthetic oligonucleotide
  Target: LAMA2; (-) strand; PAM type: NNAGAAW; PAM sequence: CTAGAAA
tccctagaactaagagtaaa

SEQ ID NO: 9673 - DNA, 20 bp, Artificial Sequence
  Description of Artificial Sequence: Synthetic oligonucleotide
  Target: LAMA2; (-) strand; PAM type: NNAGAAW; PAM sequence: AGAGAAA
tgtgagggaccataattcat

SEQ ID NO: 9674 - DNA, 20 bp, Artificial Sequence
  Description of Artificial Sequence: Synthetic oligonucleotide
  Target: LAMA2; (-) strand; PAM type: NNAGAAW; PAM sequence: TTAGAAT
acaggataagaagataaaca

SEQ ID NO: 9675 - DNA, 20 bp, Artificial Sequence
  Description of Artificial Sequence: Synthetic oligonucleotide
  Target: LAMA2; (-) strand; PAM type: NNAGAAW; PAM sequence: AGAGAAA
acagttgaataggaggttat

SEQ ID NO: 9676 - DNA, 20 bp, Artificial Sequence
  Description of Artificial Sequence: Synthetic oligonucleotide
  Target: LAMA2; (-) strand; PAM type: NNAGAAW; PAM sequence: TAAGAAT
aggggcatgaagcttcttac

SEQ ID NO: 9677 - DNA, 20 bp, Artificial Sequence
  Description of Artificial Sequence: Synthetic oligonucleotide
  Target: LAMA2; (-) strand; PAM type: NNAGAAW; PAM sequence: CCAGAAT
ctgcgggtttctcattatac

SEQ ID NO: 9678 - DNA, 20 bp, Artificial Sequence
  Description of Artificial Sequence: Synthetic oligonucleotide
  Target: LAMA2; (-) strand; PAM type: NNAGAAW; PAM sequence: GCAGAAT
ctataatcattctccattta

SEQ ID NO: 9679 - DNA, 20 bp, Artificial Sequence
  Description of Artificial Sequence: Synthetic oligonucleotide
  Target: LAMA2; (-) strand; PAM type: NNAGAAW; PAM sequence: ACAGAAA
taatctaccatgaccttcct

SEQ ID NO: 9680 - DNA, 20 bp, Artificial Sequence
  Description of Artificial Sequence: Synthetic oligonucleotide
  Target: LAMA2; (-) strand; PAM type: NNAGAAW; PAM sequence: CCAGAAT
ttataaacattcccatattt

SEQ ID NO: 9681 - DNA, 20 bp, Artificial Sequence
  Description of Artificial Sequence: Synthetic oligonucleotide
  Target: LAMA2; (-) strand; PAM type: NNAGAAW; PAM sequence: TCAGAAT
atggagatctgttaattgta

SEQ ID NO: 9682 - DNA, 20 bp, Artificial Sequence
  Description of Artificial Sequence: Synthetic oligonucleotide
  Target: LAMA2; (-) strand; PAM type: NNAGAAW; PAM sequence: AAAGAAA
agtcctatgaggttctctta

SEQ ID NO: 9683 - DNA, 20 bp, Artificial Sequence
  Description of Artificial Sequence: Synthetic oligonucleotide
  Target: LAMA2; (-) strand; PAM type: NNAGAAW; PAM sequence: GAAGAAT
gaagtaggagctatttcagt

SEQ ID NO: 9684 - DNA, 20 bp, Artificial Sequence
  Description of Artificial Sequence: Synthetic oligonucleotide
  Target: LAMA2; (-) strand; PAM type: NNAGAAW; PAM sequence: AAAGAAT
gagaacaacagcttccagaa

SEQ ID NO: 9685 - DNA, 20 bp, Artificial Sequence
  Description of Artificial Sequence: Synthetic oligonucleotide
  Target: LAMA2; (-) strand; PAM type: NNAGAAW; PAM sequence: CCAGAAA
gtggatgagaacaacagctt

SEQ ID NO: 9686 - DNA, 20 bp, Artificial Sequence
  Description of Artificial Sequence: Synthetic oligonucleotide
  Target: LAMA2; (-) strand; PAM type: NNAGAAW; PAM sequence: TGAGAAA
tgatttagttttaaagaaag

SEQ ID NO: 9687 - DNA, 20 bp, Artificial Sequence
  Description of Artificial Sequence: Synthetic oligonucleotide
  Target: LAMA2; (-) strand; PAM type: NNAGAAW; PAM sequence: AAAGAAA
tcaaatcctgatttagtttt

SEQ ID NO: 9688 - DNA, 20 bp, Artificial Sequence
  Description of Artificial Sequence: Synthetic oligonucleotide
  Target: LAMA2; (-) strand; PAM type: NNAGAAW; PAM sequence: AAAGAAA
cagcaagactttgtctcaaa

SEQ ID NO: 9689 - DNA, 20 bp, Artificial Sequence
  Description of Artificial Sequence: Synthetic oligonucleotide
  Target: LAMA2; (-) strand; PAM type: NNAGAAW; PAM sequence: GGAGAAT
gtactcaggaagccgaggca

SEQ ID NO: 9690 - DNA, 20 bp, Artificial Sequence
  Description of Artificial Sequence: Synthetic oligonucleotide
  Target: LAMA2; (-) strand; PAM type: NNAGAAW; PAM sequence: GGAGAAT
tttaatattttattttttag

SEQ ID NO: 9691 - DNA, 20 bp, Artificial Sequence
  Description of Artificial Sequence: Synthetic oligonucleotide
  Target: LAMA2; (-) strand; PAM type: NNAGAAW; PAM sequence: TGAGAAA
gtgttaaacattgcatgagt

SEQ ID NO: 9692 - DNA, 20 bp, Artificial Sequence
  Description of Artificial Sequence: Synthetic oligonucleotide
  Target: LAMA2; (-) strand; PAM type: NNAGAAW; PAM sequence: AGAGAAT
tttgccagggactgggggag

SEQ ID NO: 9693 - DNA, 20 bp, Artificial Sequence
  Description of Artificial Sequence: Synthetic oligonucleotide
  Target: LAMA2; (-) strand; PAM type: NNAGAAW; PAM sequence: GTAGAAT
caaatttatagagacagaag

SEQ ID NO: 9694 - DNA, 20 bp, Artificial Sequence
  Description of Artificial Sequence: Synthetic oligonucleotide
  Target: LAMA2; (-) strand; PAM type: NNAGAAW; PAM sequence: CCAGAAT
gttccacttatatgacgtgc

SEQ ID NO: 9695 - DNA, 20 bp, Artificial Sequence
  Description of Artificial Sequence: Synthetic oligonucleotide
  Target: LAMA2; (-) strand; PAM type: NNAGAAW; PAM sequence: GAAGAAT
ctgatatatgctacaacgtg

SEQ ID NO: 9696 - DNA, 20 bp, Artificial Sequence
  Description of Artificial Sequence: Synthetic oligonucleotide
  Target: LAMA2; (-) strand; PAM type: NNAGAAW; PAM sequence: GTAGAAT
ggttcctcaaagaattaaca

SEQ ID NO: 9697 - DNA, 20 bp, Artificial Sequence
  Description of Artificial Sequence: Synthetic oligonucleotide
  Target: LAMA2; (-) strand; PAM type: NNAGAAW; PAM sequence: AAAGAAT
aaacaatatagtggttcctc

SEQ ID NO: 9698 - DNA, 20 bp, Artificial Sequence
  Description of Artificial Sequence: Synthetic oligonucleotide
  Target: LAMA2; (-) strand; PAM type: NNAGAAW; PAM sequence: TTAGAAT
ttggcaagggtgtggagaaa

SEQ ID NO: 9699 - DNA, 20 bp, Artificial Sequence
  Description of Artificial Sequence: Synthetic oligonucleotide
  Target: LAMA2; (-) strand; PAM type: NNAGAAW; PAM sequence: GGAGAAA
agaagtgttggcaagggtgt

SEQ ID NO: 9700 - DNA, 20 bp, Artificial Sequence
  Description of Artificial Sequence: Synthetic oligonucleotide
  Target: LAMA2; (-) strand; PAM type: NNAGAAW; PAM sequence: ACAGAAA
ttaaaaagaaaaaaaaaaaa

SEQ ID NO: 9701 - DNA, 20 bp, Artificial Sequence
  Description of Artificial Sequence: Synthetic oligonucleotide
  Target: LAMA2; (-) strand; PAM type: NNAGAAW; PAM sequence: AAAGAAA
atttgatgctaactatttaa

SEQ ID NO: 9702 - DNA, 20 bp, Artificial Sequence
  Description of Artificial Sequence: Synthetic oligonucleotide
  Target: LAMA2; (-) strand; PAM type: NNAGAAW; PAM sequence: CAAGAAA
acaatatttcaaaattgtct

SEQ ID NO: 9703 - DNA, 20 bp, Artificial Sequence
  Description of Artificial Sequence: Synthetic oligonucleotide
  Target: LAMA2; (-) strand; PAM type: NNAGAAW; PAM sequence: TTAGAAA
atctgacaatatagccaaat

SEQ ID NO: 9704 - DNA, 20 bp, Artificial Sequence
  Description of Artificial Sequence: Synthetic oligonucleotide
  Target: LAMA2; (-) strand; PAM type: NNAGAAW; PAM sequence: TCAGAAA
atacacggcaggctttgaca

SEQ ID NO: 9705 - DNA, 20 bp, Artificial Sequence
  Description of Artificial Sequence: Synthetic oligonucleotide
  Target: LAMA2; (-) strand; PAM type: NNAGAAW; PAM sequence: TTAGAAA
ccatacatgtatatgagaag

SEQ ID NO: 9706 - DNA, 20 bp, Artificial Sequence
  Description of Artificial Sequence: Synthetic oligonucleotide
  Target: LAMA2; (-) strand; PAM type: NNAGAAW; PAM sequence: TGAGAAT
ctgtccttgctatagtttgc

SEQ ID NO: 9707 - DNA, 20 bp, Artificial Sequence
  Description of Artificial Sequence: Synthetic oligonucleotide
  Target: LAMA2; (-) strand; PAM type: NNAGAAW; PAM sequence: CAAGAAA
tcaaaacatttggaaaaaat

SEQ ID NO: 9708 - DNA, 20 bp, Artificial Sequence
  Description of Artificial Sequence: Synthetic oligonucleotide
  Target: LAMA2; (-) strand; PAM type: NNAGAAW; PAM sequence: AAAGAAT
ttgcaattgaaattacccaa

SEQ ID NO: 9709 - DNA, 20 bp, Artificial Sequence
  Description of Artificial Sequence: Synthetic oligonucleotide
  Target: LAMA2; (-) strand; PAM type: NNAGAAW; PAM sequence: GAAGAAA
caatgaatcacactaaaaat

SEQ ID NO: 9710 - DNA, 20 bp, Artificial Sequence
  Description of Artificial Sequence: Synthetic oligonucleotide
  Target: LAMA2; (-) strand; PAM type: NNAGAAW; PAM sequence: TCAGAAA
attatccttattttctatct

SEQ ID NO: 9711 - DNA, 20 bp, Artificial Sequence
  Description of Artificial Sequence: Synthetic oligonucleotide
  Target: LAMA2; (-) strand; PAM type: NNAGAAW; PAM sequence: TGAGAAA
cagacaggaaagctcagaga

SEQ ID NO: 9712 - DNA, 20 bp, Artificial Sequence
  Description of Artificial Sequence: Synthetic oligonucleotide
  Target: LAMA2; (-) strand; PAM type: NNAGAAW; PAM sequence: TAAGAAA
gtggagtgagagaatataat

SEQ ID NO: 9713 - DNA, 20 bp, Artificial Sequence
  Description of Artificial Sequence: Synthetic oligonucleotide
  Target: LAMA2; (-) strand; PAM type: NNAGAAW; PAM sequence: AGAGAAT
aatattattgcagtggagtg

SEQ ID NO: 9714 - DNA, 20 bp, Artificial Sequence
  Description of Artificial Sequence: Synthetic oligonucleotide
  Target: LAMA2; (-) strand; PAM type: NNAGAAW; PAM sequence: AGAGAAA
ctccacattatgcaatcaat

SEQ ID NO: 9715 - DNA, 20 bp, Artificial Sequence
  Description of Artificial Sequence: Synthetic oligonucleotide
  Target: LAMA2; (-) strand; PAM type: NNAGAAW; PAM sequence: ACAGAAT
actttatgtgcattctcaaa

SEQ ID NO: 9716 - DNA, 20 bp, Artificial Sequence
  Description of Artificial Sequence: Synthetic oligonucleotide
  Target: LAMA2; (-) strand; PAM type: NNAGAAW; PAM sequence: TCAGAAT
gagtctcattttgttacagt

SEQ ID NO: 9717 - DNA, 20 bp, Artificial Sequence
  Description of Artificial Sequence: Synthetic oligonucleotide
  Target: LAMA2; (-) strand; PAM type: NNAGAAW; PAM sequence: AGAGAAT
agaagttttaataaaaatca

SEQ ID NO: 9718 - DNA, 20 bp, Artificial Sequence
  Description of Artificial Sequence: Synthetic oligonucleotide
  Target: LAMA2; (-) strand; PAM type: NNAGAAW; PAM sequence: AGAGAAA
taatgattttaaagagataa

SEQ ID NO: 9719 - DNA, 20 bp, Artificial Sequence
  Description of Artificial Sequence: Synthetic oligonucleotide
  Target: LAMA2; (-) strand; PAM type: NNAGAAW; PAM sequence: CAAGAAT
aatggaaaaaccaaatgttt

SEQ ID NO: 9720 - DNA, 20 bp, Artificial Sequence
  Description of Artificial Sequence: Synthetic oligonucleotide
  Target: LAMA2; (-) strand; PAM type: NNAGAAW; PAM sequence: ATAGAAA
gaatctatattgaaaacttt

SEQ ID NO: 9721 - DNA, 20 bp, Artificial Sequence
  Description of Artificial Sequence: Synthetic oligonucleotide
  Target: LAMA2; (-) strand; PAM type: NNAGAAW; PAM sequence: TCAGAAT
ttttttataagataaaaaaa

SEQ ID NO: 9722 - DNA, 20 bp, Artificial Sequence
  Description of Artificial Sequence: Synthetic oligonucleotide
  Target: LAMA2; (-) strand; PAM type: NNAGAAW; PAM sequence: ACAGAAA
tgtgagcagaggagaactag

SEQ ID NO: 9723 - DNA, 20 bp, Artificial Sequence
  Description of Artificial Sequence: Synthetic oligonucleotide
  Target: LAMA2; (-) strand; PAM type: NNAGAAW; PAM sequence: ATAGAAA
tcaaatttatttaattattg

SEQ ID NO: 9724 - DNA, 20 bp, Artificial Sequence
  Description of Artificial Sequence: Synthetic oligonucleotide
  Target: LAMA2; (-) strand; PAM type: NNAGAAW; PAM sequence: AAAGAAA
tattgcaatgaataaagaac

SEQ ID NO: 9725 - DNA, 20 bp, Artificial Sequence
  Description of Artificial Sequence: Synthetic oligonucleotide
  Target: LAMA2; (-) strand; PAM type: NNAGAAW; PAM sequence: AGAGAAA
tttaacaaacacagagagaa

SEQ ID NO: 9726 - DNA, 20 bp, Artificial Sequence
  Description of Artificial Sequence: Synthetic oligonucleotide
  Target: LAMA2; (-) strand; PAM type: NNAGAAW; PAM sequence: AGAGAAA
gaaacttttaacaaacacag

SEQ ID NO: 9727 - DNA, 20 bp, Artificial Sequence
  Description of Artificial Sequence: Synthetic oligonucleotide
  Target: LAMA2; (-) strand; PAM type: NNAGAAW; PAM sequence: AAAGAAA
aggtgttaatatagagtggt

SEQ ID NO: 9728 - DNA, 20 bp, Artificial Sequence
  Description of Artificial Sequence: Synthetic oligonucleotide
  Target: LAMA2; (-) strand; PAM type: NNAGAAW; PAM sequence: ACAGAAT
atgaaattatttaaagatga

SEQ ID NO: 9729 - DNA, 20 bp, Artificial Sequence
  Description of Artificial Sequence: Synthetic oligonucleotide
  Target: LAMA2; (-) strand; PAM type: NNAGAAW; PAM sequence: TTAGAAA
ttcttgacatgaacaacatt

SEQ ID NO: 9730 - DNA, 20 bp, Artificial Sequence
  Description of Artificial Sequence: Synthetic oligonucleotide
  Target: LAMA2; (-) strand; PAM type: NNAGAAW; PAM sequence: TTAGAAT
ctaggtcagaaacttcaaaa

SEQ ID NO: 9731 - DNA, 20 bp, Artificial Sequence
  Description of Artificial Sequence: Synthetic oligonucleotide
  Target: LAMA2; (-) strand; PAM type: NNAGAAW; PAM sequence: TCAGAAA
taatcatttttgtgtctagg

SEQ ID NO: 9732 - DNA, 20 bp, Artificial Sequence
  Description of Artificial Sequence: Synthetic oligonucleotide
  Target: LAMA2; (-) strand; PAM type: NNAGAAW; PAM sequence: TAAGAAT
gtttatgcctgcagtgagtc

SEQ ID NO: 9733 - DNA, 20 bp, Artificial Sequence
  Description of Artificial Sequence: Synthetic oligonucleotide
  Target: LAMA2; (-) strand; PAM type: NNAGAAW; PAM sequence: GAAGAAT
caaagccttattagaggtat

SEQ ID NO: 9734 - DNA, 20 bp, Artificial Sequence
  Description of Artificial Sequence: Synthetic oligonucleotide
  Target: LAMA2; (-) strand; PAM type: NNAGAAW; PAM sequence: TTAGAAA
acaaaatctagaagcaaatc

SEQ ID NO: 9735 - DNA, 20 bp, Artificial Sequence
  Description of Artificial Sequence: Synthetic oligonucleotide
  Target: LAMA2; (-) strand; PAM type: NNAGAAW; PAM sequence: CTAGAAA
aacatttgtaaaagccttca

SEQ ID NO: 9736 - DNA, 20 bp, Artificial Sequence
  Description of Artificial Sequence: Synthetic oligonucleotide
  Target: LAMA2; (-) strand; PAM type: NNAGAAW; PAM sequence: GAAGAAT
ctacaggaggcaaaaaagga

SEQ ID NO: 9737 - DNA, 20 bp, Artificial Sequence
  Description of Artificial Sequence: Synthetic oligonucleotide
  Target: LAMA2; (-) strand; PAM type: NNAGAAW; PAM sequence: GGAGAAA
tttaaaaacatgttaccatt

SEQ ID NO: 9738 - DNA, 20 bp, Artificial Sequence
  Description of Artificial Sequence: Synthetic oligonucleotide
  Target: LAMA2; (-) strand; PAM type: NNAGAAW; PAM sequence: TCAGAAA
ccgtccttttcatgctgcct

SEQ ID NO: 9739 - DNA, 20 bp, Artificial Sequence
  Description of Artificial Sequence: Synthetic oligonucleotide
  Target: LAMA2; (-) strand; PAM type: NNAGAAW; PAM sequence: TCAGAAA
acaacttcagtgacatcagg

SEQ ID NO: 9740 - DNA, 20 bp, Artificial Sequence
  Description of Artificial Sequence: Synthetic oligonucleotide
  Target: LAMA2; (-) strand; PAM type: NNAGAAW; PAM sequence: ATAGAAT
agttgctagcagtagatacc

SEQ ID NO: 9741 - DNA, 20 bp, Artificial Sequence
  Description of Artificial Sequence: Synthetic oligonucleotide
  Target: LAMA2; (-) strand; PAM type: NNAGAAW; PAM sequence: AAAGAAA
ggtaatatgttgtgttaaca

SEQ ID NO: 9742 - DNA, 20 bp, Artificial Sequence
  Description of Artificial Sequence: Synthetic oligonucleotide
  Target: LAMA2; (-) strand; PAM type: NNAGAAW; PAM sequence: AAAGAAA
ttctaccttagagcctccag

SEQ ID NO: 9743 - DNA, 20 bp, Artificial Sequence
  Description of Artificial Sequence: Synthetic oligonucleotide
  Target: LAMA2; (-) strand; PAM type: NNAGAAW; PAM sequence: CCAGAAA
tgaattctaccttagagcct

SEQ ID NO: 9744 - DNA, 20 bp, Artificial Sequence
  Description of Artificial Sequence: Synthetic oligonucleotide
  Target: LAMA2; (-) strand; PAM type: NNAGAAW; PAM sequence: TTAGAAA
ctatcctaaatgaatgaatt

SEQ ID NO: 9745 - DNA, 20 bp, Artificial Sequence
  Description of Artificial Sequence: Synthetic oligonucleotide
  Target: LAMA2; (-) strand; PAM type: NNAGAAW; PAM sequence: GTAGAAA
ccaaaggatgcaggtagcct

SEQ ID NO: 9746 - DNA, 20 bp, Artificial Sequence
  Description of Artificial Sequence: Synthetic oligonucleotide
  Target: LAMA2; (-) strand; PAM type: NNAGAAW; PAM sequence: TTAGAAA
aagagacaggtagtaactga

SEQ ID NO: 9747 - DNA, 20 bp, Artificial Sequence
  Description of Artificial Sequence: Synthetic oligonucleotide
  Target: LAMA2; (-) strand; PAM type: NNAGAAW; PAM sequence: ACAGAAA
tttgccaggcactttattac

SEQ ID NO: 9748 - DNA, 20 bp, Artificial Sequence
  Description of Artificial Sequence: Synthetic oligonucleotide
  Target: LAMA2; (-) strand; PAM type: NNAGAAW; PAM sequence: AGAGAAT
aaggttaacaatggcagagg

SEQ ID NO: 9749 - DNA, 20 bp, Artificial Sequence
  Description of Artificial Sequence: Synthetic oligonucleotide
  Target: LAMA2; (-) strand; PAM type: NNAGAAW; PAM sequence: AAAGAAA
ataaaattaaattaaaaaaa

SEQ ID NO: 9750 - DNA, 20 bp, Artificial Sequence
  Description of Artificial Sequence: Synthetic oligonucleotide
  Target: LAMA2; (-) strand; PAM type: NNAGAAW; PAM sequence: CAAGAAT
ccccctctgtgagaaacacc

SEQ ID NO: 9751 - DNA, 20 bp, Artificial Sequence
  Description of Artificial Sequence: Synthetic oligonucleotide
  Target: LAMA2; (-) strand; PAM type: NNAGAAW; PAM sequence: TGAGAAA
ccctgccaaatccccctctg

SEQ ID NO: 9752 - DNA, 20 bp, Artificial Sequence
  Description of Artificial Sequence: Synthetic oligonucleotide
  Target: LAMA2; (-) strand; PAM type: NNAGAAW; PAM sequence: TAAGAAA
gactccattttgttctgtac

SEQ ID NO: 9753 - DNA, 20 bp, Artificial Sequence
  Description of Artificial Sequence: Synthetic oligonucleotide
  Target: LAMA2; (-) strand; PAM type: NNAGAAW; PAM sequence: GTAGAAA
cagattgttgctgtgtctgt

SEQ ID NO: 9754 - DNA, 20 bp, Artificial Sequence
  Description of Artificial Sequence: Synthetic oligonucleotide
  Target: LAMA2; (-) strand; PAM type: NNAGAAW; PAM sequence: AGAGAAA
gggaaatgtggggaaaagat

SEQ ID NO: 9755 - DNA, 20 bp, Artificial Sequence
  Description of Artificial Sequence: Synthetic oligonucleotide
  Target: LAMA2; (-) strand; PAM type: NNAGAAW; PAM sequence: ATAGAAA
gatgatggtggttttgtgga

SEQ ID NO: 9756 - DNA, 20 bp, Artificial Sequence
  Description of Artificial Sequence: Synthetic oligonucleotide
  Target: LAMA2; (-) strand; PAM type: NNAGAAW; PAM sequence: GAAGAAA
agaataacaaatcaaagaca

SEQ ID NO: 9757 - DNA, 20 bp, Artificial Sequence
  Description of Artificial Sequence: Synthetic oligonucleotide
  Target: LAMA2; (-) strand; PAM type: NNAGAAW; PAM sequence: GTAGAAT
agaagtataatgttaacaga

SEQ ID NO: 9758 - DNA, 20 bp, Artificial Sequence
  Description of Artificial Sequence: Synthetic oligonucleotide
  Target: LAMA2; (-) strand; PAM type: NNAGAAW; PAM sequence: GGAGAAA
ttctaaaatttattcaccct

SEQ ID NO: 9759 - DNA, 20 bp, Artificial Sequence
  Description of Artificial Sequence: Synthetic oligonucleotide
  Target: LAMA2; (-) strand; PAM type: NNAGAAW; PAM sequence: TCAGAAA
atggtgtgaatcacaggcaa

SEQ ID NO: 9760 - DNA, 20 bp, Artificial Sequence
  Description of Artificial Sequence: Synthetic oligonucleotide
  Target: LAMA2; (-) strand; PAM type: NNAGAAW; PAM sequence: TAAGAAA
tcacaattttagtccagtct

SEQ ID NO: 9761 - DNA, 20 bp, Artificial Sequence
  Description of Artificial Sequence: Synthetic oligonucleotide
  Target: LAMA2; (-) strand; PAM type: NNAGAAW; PAM sequence: CAAGAAA
aatacactgcattcttagct

SEQ ID NO: 9762 - DNA, 20 bp, Artificial Sequence
  Description of Artificial Sequence: Synthetic oligonucleotide
  Target: LAMA2; (-) strand; PAM type: NNAGAAW; PAM sequence: TCAGAAT
tatatttgaaaatttttata

SEQ ID NO: 9763 - DNA, 20 bp, Artificial Sequence
  Description of Artificial Sequence: Synthetic oligonucleotide
  Target: LAMA2; (-) strand; PAM type: NNAGAAW; PAM sequence: AAAGAAT
agtaaatatttgttaatatt

SEQ ID NO: 9764 - DNA, 20 bp, Artificial Sequence
  Description of Artificial Sequence: Synthetic oligonucleotide
  Target: LAMA2; (-) strand; PAM type: NNAGAAW; PAM sequence: TAAGAAA
aagtagcaaaatgcaggatg

SEQ ID NO: 9765 - DNA, 20 bp, Artificial Sequence
  Description of Artificial Sequence: Synthetic oligonucleotide
  Target: LAMA2; (-) strand; PAM type: NNAGAAW; PAM sequence: AGAGAAA
ttttcaggaaatatagtagt

SEQ ID NO: 9766 - DNA, 20 bp, Artificial Sequence
  Description of Artificial Sequence: Synthetic oligonucleotide
  Target: LAMA2; (-) strand; PAM type: NNAGAAW; PAM sequence: CCAGAAA
ccattaatgctgatcaatga

SEQ ID NO: 9767 - DNA, 20 bp, Artificial Sequence
  Description of Artificial Sequence: Synthetic oligonucleotide
  Target: LAMA2; (-) strand; PAM type: NNAGAAW; PAM sequence: CAAGAAA
ttttaacaagcaataataag

SEQ ID NO: 9768 - DNA, 20 bp, Artificial Sequence
  Description of Artificial Sequence: Synthetic oligonucleotide
  Target: LAMA2; (-) strand; PAM type: NNAGAAW; PAM sequence: GAAGAAT
ttgattataaatgtgatttg

SEQ ID NO: 9769 - DNA, 20 bp, Artificial Sequence
  Description of Artificial Sequence: Synthetic oligonucleotide
  Target: LAMA2; (-) strand; PAM type: NNAGAAW; PAM sequence: AGAGAAT
acttattttcaatgtcccta

SEQ ID NO: 9770 - DNA, 20 bp, Artificial Sequence
  Description of Artificial Sequence: Synthetic oligonucleotide
  Target: LAMA2; (-) strand; PAM type: NNAGAAW; PAM sequence: TCAGAAT
aaatgaattattccaccacc

SEQ ID NO: 9771 - DNA, 20 bp, Artificial Sequence
  Description of Artificial Sequence: Synthetic oligonucleotide
  Target: LAMA2; (-) strand; PAM type: NNAGAAW; PAM sequence: AGAGAAA
taactggctcctgtattata

SEQ ID NO: 9772 - DNA, 20 bp, Artificial Sequence
  Description of Artificial Sequence: Synthetic oligonucleotide
  Target: LAMA2; (-) strand; PAM type: NNAGAAW; PAM sequence: CTAGAAT
ttacatttacttcaataaac

SEQ ID NO: 9773 - DNA, 20 bp, Artificial Sequence
  Description of Artificial Sequence: Synthetic oligonucleotide
  Target: LAMA2; (-) strand; PAM type: NNAGAAW; PAM sequence: TCAGAAA
acaaaaatgtgtaggcaatc

SEQ ID NO: 9774 - DNA, 20 bp, Artificial Sequence
  Description of Artificial Sequence: Synthetic oligonucleotide
  Target: LAMA2; (-) strand; PAM type: NNAGAAW; PAM sequence: GGAGAAT
ggtgaaaagtgggctgaaat

SEQ ID NO: 9775 - DNA, 20 bp, Artificial Sequence
  Description of Artificial Sequence: Synthetic oligonucleotide
  Target: LAMA2; (-) strand; PAM type: NNAGAAW; PAM sequence: CAAGAAA
aagaaaatagaaaccaataa

SEQ ID NO: 9776 - DNA, 20 bp, Artificial Sequence
  Description of Artificial Sequence: Synthetic oligonucleotide
  Target: LAMA2; (-) strand; PAM type: NNAGAAW; PAM sequence: ATAGAAA
agaaaaaagaaagaaagaaa

SEQ ID NO: 9777 - DNA, 20 bp, Artificial Sequence
  Description of Artificial Sequence: Synthetic oligonucleotide
  Target: LAMA2; (-) strand; PAM type: NNAGAAW; PAM sequence: AAAGAAA
acgctaaagaaaaaagaaag

SEQ ID NO: 9778 - DNA, 20 bp, Artificial Sequence
  Description of Artificial Sequence: Synthetic oligonucleotide
  Target: LAMA2; (-) strand; PAM type: NNAGAAW; PAM sequence: AAAGAAA
tgtgacgctaaagaaaaaag

SEQ ID NO: 9779 - DNA, 20 bp, Artificial Sequence
  Description of Artificial Sequence: Synthetic oligonucleotide
  Target: LAMA2; (-) strand; PAM type: NNAGAAW; PAM sequence: AAAGAAA
cccctgtgacgctaaagaaa

SEQ ID NO: 9780 - DNA, 20 bp, Artificial Sequence
  Description of Artificial Sequence: Synthetic oligonucleotide
  Target: LAMA2; (-) strand; PAM type: NNAGAAW; PAM sequence: AAAGAAA
agctcttcccctgtgacgct

SEQ ID NO: 9781 - DNA, 20 bp, Artificial Sequence
  Description of Artificial Sequence: Synthetic oligonucleotide
  Target: LAMA2; (-) strand; PAM type: NNAGAAW; PAM sequence: CCAGAAA
agagttatacaatatcagaa

SEQ ID NO: 9782 - DNA, 20 bp, Artificial Sequence
  Description of Artificial Sequence: Synthetic oligonucleotide
  Target: LAMA2; (-) strand; PAM type: NNAGAAW; PAM sequence: TAAGAAA
ccccagaagaatcacaaatc

SEQ ID NO: 9783 - DNA, 20 bp, Artificial Sequence
  Description of Artificial Sequence: Synthetic oligonucleotide
  Target: LAMA2; (-) strand; PAM type: NNAGAAW; PAM sequence: GAAGAAT
tcccagatcctttgtcccca

SEQ ID NO: 9784 - DNA, 20 bp, Artificial Sequence
  Description of Artificial Sequence: Synthetic oligonucleotide
  Target: LAMA2; (-) strand; PAM type: NNAGAAW; PAM sequence: GGAGAAT
ctactccggaagctgaggca

SEQ ID NO: 9785 - DNA, 20 bp, Artificial Sequence
  Description of Artificial Sequence: Synthetic oligonucleotide
  Target: LAMA2; (-) strand; PAM type: NNAGAAW; PAM sequence: CCAGAAT
atgttagttaagtctgaaaa

SEQ ID NO: 9786 - DNA, 20 bp, Artificial Sequence
  Description of Artificial Sequence: Synthetic oligonucleotide
  Target: LAMA2; (-) strand; PAM type: NNAGAAW; PAM sequence: TAAGAAT
atggagaatagggtctttct

SEQ ID NO: 9787 - DNA, 20 bp, Artificial Sequence
  Description of Artificial Sequence: Synthetic oligonucleotide
  Target: LAMA2; (-) strand; PAM type: NNAGAAW; PAM sequence: GGAGAAT
atctcatttagtgtggaaat

SEQ ID NO: 9788 - DNA, 20 bp, Artificial Sequence
  Description of Artificial Sequence: Synthetic oligonucleotide
  Target: LAMA2; (-) strand; PAM type: NNAGAAW; PAM sequence: TTAGAAA
ttatggataaagaactttgc

SEQ ID NO: 9789 - DNA, 20 bp, Artificial Sequence
  Description of Artificial Sequence: Synthetic oligonucleotide
  Target: LAMA2; (-) strand; PAM type: NNAGAAW; PAM sequence: TAAGAAA
tagagatcacaggtacccac

SEQ ID NO: 9790 - DNA, 20 bp, Artificial Sequence
  Description of Artificial Sequence: Synthetic oligonucleotide
  Target: LAMA2; (-) strand; PAM type: NNAGAAW; PAM sequence: CCAGAAA
ccaagtgagcctgtttcctt

SEQ ID NO: 9791 - DNA, 20 bp, Artificial Sequence
  Description of Artificial Sequence: Synthetic oligonucleotide
  Target: LAMA2; (-) strand; PAM type: NNAGAAW; PAM sequence: AGAGAAT
actgcgtgttcttgtgaaag

SEQ ID NO: 9792 - DNA, 20 bp, Artificial Sequence
  Description of Artificial Sequence: Synthetic oligonucleotide
  Target: LAMA2; (-) strand; PAM type: NNAGAAW; PAM sequence: TGAGAAA
cctattaggtctctgtgagc

SEQ ID NO: 9793 - DNA, 20 bp, Artificial Sequence
  Description of Artificial Sequence: Synthetic oligonucleotide
  Target: LAMA2; (-) strand; PAM type: NNAGAAW; PAM sequence: TGAGAAA
gcaagtattcttcaggcaaa

SEQ ID NO: 9794 - DNA, 20 bp, Artificial Sequence
  Description of Artificial Sequence: Synthetic oligonucleotide
  Target: LAMA2; (-) strand; PAM type: NNAGAAW; PAM sequence: ATAGAAT
tcaaacacagaatgctacaa

SEQ ID NO: 9795 - DNA, 20 bp, Artificial Sequence
  Description of Artificial Sequence: Synthetic oligonucleotide
  Target: LAMA2; (-) strand; PAM type: NNAGAAW; PAM sequence: ACAGAAT
tggaaatactactatcaaac

SEQ ID NO: 9796 - DNA, 20 bp, Artificial Sequence
  Description of Artificial Sequence: Synthetic oligonucleotide
  Target: LAMA2; (-) strand; PAM type: NNAGAAW; PAM sequence: TCAGAAT
aacagaaatgtatatgatga

SEQ ID NO: 9797 - DNA, 20 bp, Artificial Sequence
  Description of Artificial Sequence: Synthetic oligonucleotide
  Target: LAMA2; (-) strand; PAM type: NNAGAAW; PAM sequence: ACAGAAA
ttatctctaatcctaatgta

SEQ ID NO: 9798 - DNA, 20 bp, Artificial Sequence
  Description of Artificial Sequence: Synthetic oligonucleotide
  Target: LAMA2; (-) strand; PAM type: NNAGAAW; PAM sequence: GAAGAAT
ggtcttaaaatcataaagaa

SEQ ID NO: 9799 - DNA, 20 bp, Artificial Sequence
  Description of Artificial Sequence: Synthetic oligonucleotide
  Target: LAMA2; (-) strand; PAM type: NNAGAAW; PAM sequence: CAAGAAA
gtctttatatagaaattcaa

SEQ ID NO: 9800 - DNA, 20 bp, Artificial Sequence
  Description of Artificial Sequence: Synthetic oligonucleotide
  Target: LAMA2; (-) strand; PAM type: NNAGAAW; PAM sequence: ATAGAAA
atcacgtagaatgtctttat

SEQ ID NO: 9801 - DNA, 20 bp, Artificial Sequence
  Description of Artificial Sequence: Synthetic oligonucleotide
  Target: LAMA2; (-) strand; PAM type: NNAGAAW; PAM sequence: GTAGAAT
catattgaacaactcatcac

SEQ ID NO: 9802 - DNA, 20 bp, Artificial Sequence
  Description of Artificial Sequence: Synthetic oligonucleotide
  Target: LAMA2; (-) strand; PAM type: NNAGAAW; PAM sequence: ATAGAAT
agggcaaaagtaggaacaac

SEQ ID NO: 9803 - DNA, 20 bp, Artificial Sequence
  Description of Artificial Sequence: Synthetic oligonucleotide
  Target: LAMA2; (-) strand; PAM type: NNAGAAW; PAM sequence: AGAGAAA
gacaaagtaaaataagtaac

SEQ ID NO: 9804 - DNA, 20 bp, Artificial Sequence
  Description of Artificial Sequence: Synthetic oligonucleotide
  Target: LAMA2; (-) strand; PAM type: NNAGAAW; PAM sequence: CAAGAAA
aagctgccacctttaggagt

SEQ ID NO: 9805 - DNA, 20 bp, Artificial Sequence
  Description of Artificial Sequence: Synthetic oligonucleotide
  Target: LAMA2; (-) strand; PAM type: NNAGAAW; PAM sequence: TGAGAAA
ttattgagtatcactgcagg

SEQ ID NO: 9806 - DNA, 20 bp, Artificial Sequence
  Description of Artificial Sequence: Synthetic oligonucleotide
  Target: LAMA2; (-) strand; PAM type: NNAGAAW; PAM sequence: CTAGAAA
ggaatcctgaaagggatgct

SEQ ID NO: 9807 - DNA, 20 bp, Artificial Sequence
  Description of Artificial Sequence: Synthetic oligonucleotide
  Target: LAMA2; (-) strand; PAM type: NNAGAAW; PAM sequence: GTAGAAA
atttatgtacaatgttctag

SEQ ID NO: 9808 - DNA, 20 bp, Artificial Sequence
  Description of Artificial Sequence: Synthetic oligonucleotide
  Target: LAMA2; (-) strand; PAM type: NNAGAAW; PAM sequence: GAAGAAA
atgtagtccaaaagaatagt

SEQ ID NO: 9809 - DNA, 20 bp, Artificial Sequence
  Description of Artificial Sequence: Synthetic oligonucleotide
  Target: LAMA2; (-) strand; PAM type: NNAGAAW; PAM sequence: AAAGAAT
gtctttaccaatgtagtcca

SEQ ID NO: 9810 - DNA, 20 bp, Artificial Sequence
  Description of Artificial Sequence: Synthetic oligonucleotide
  Target: LAMA2; (-) strand; PAM type: NNAGAAW; PAM sequence: AAAGAAA
tagaatttgaagacgtaaaa

SEQ ID NO: 9811 - DNA, 20 bp, Artificial Sequence
  Description of Artificial Sequence: Synthetic oligonucleotide
  Target: LAMA2; (-) strand; PAM type: NNAGAAW; PAM sequence: ATAGAAT
tgctctatttacaaatttat

SEQ ID NO: 9812 - DNA, 20 bp, Artificial Sequence
  Description of Artificial Sequence: Synthetic oligonucleotide
  Target: LAMA2; (-) strand; PAM type: NNAGAAW; PAM sequence: CAAGAAA
ctttacaaaaggtaaacatg

SEQ ID NO: 9813 - DNA, 20 bp, Artificial Sequence
  Description of Artificial Sequence: Synthetic oligonucleotide
  Target: LAMA2; (-) strand; PAM type: NNAGAAW; PAM sequence: GGAGAAA
cccaaatagaaaataatgga

SEQ ID NO: 9814 - DNA, 20 bp, Artificial Sequence
  Description of Artificial Sequence: Synthetic oligonucleotide
  Target: LAMA2; (-) strand; PAM type: NNAGAAW; PAM sequence: ATAGAAA
ccattcctttacatccccaa

SEQ ID NO: 9815 - DNA, 20 bp, Artificial Sequence
  Description of Artificial Sequence: Synthetic oligonucleotide
  Target: LAMA2; (-) strand; PAM type: NNAGAAW; PAM sequence: TTAGAAA
tgtgaatagtgcttgatagt

SEQ ID NO: 9816 - DNA, 20 bp, Artificial Sequence
  Description of Artificial Sequence: Synthetic oligonucleotide
  Target: LAMA2; (-) strand; PAM type: NNAGAAW; PAM sequence: CTAGAAA
taaagactgtaaaatacaag

SEQ ID NO: 9817 - DNA, 20 bp, Artificial Sequence
  Description of Artificial Sequence: Synthetic oligonucleotide
  Target: LAMA2; (-) strand; PAM type: NNAGAAW; PAM sequence: AAAGAAA
ttttgacaaccatggcttta

SEQ ID NO: 9818 - DNA, 20 bp, Artificial Sequence
  Description of Artificial Sequence: Synthetic oligonucleotide
  Target: LAMA2; (-) strand; PAM type: NNAGAAW; PAM sequence: TGAGAAA
tcattagcaatcctcattgt

SEQ ID NO: 9819 - DNA, 20 bp, Artificial Sequence
  Description of Artificial Sequence: Synthetic oligonucleotide
  Target: LAMA2; (-) strand; PAM type: NNAGAAW; PAM sequence: AAAGAAT
agaaaaacatcaaaagattg

SEQ ID NO: 9820 - DNA, 20 bp, Artificial Sequence
  Description of Artificial Sequence: Synthetic oligonucleotide
  Target: LAMA2; (-) strand; PAM type: NNAGAAW; PAM sequence: GCAGAAA
tgtagccctatgtggtgaca

SEQ ID NO: 9821 - DNA, 20 bp, Artificial Sequence
  Description of Artificial Sequence: Synthetic oligonucleotide
  Target: LAMA2; (-) strand; PAM type: NNAGAAW; PAM sequence: GAAGAAA
tccacaaagcctgacccagg

SEQ ID NO: 9822 - DNA, 20 bp, Artificial Sequence
  Description of Artificial Sequence: Synthetic oligonucleotide
  Target: LAMA2; (-) strand; PAM type: NNAGAAW; PAM sequence: TTAGAAT
aataacaactgaagccatgg

SEQ ID NO: 9823 - DNA, 20 bp, Artificial Sequence
  Description of Artificial Sequence: Synthetic oligonucleotide
  Target: LAMA2; (-) strand; PAM type: NNAGAAW; PAM sequence: CCAGAAA
atcaagaacacacaactaag

SEQ ID NO: 9824 - DNA, 20 bp, Artificial Sequence
  Description of Artificial Sequence: Synthetic oligonucleotide
  Target: LAMA2; (-) strand; PAM type: NNAGAAW; PAM sequence: AGAGAAT
gggcgatgaaactgaggtgc

SEQ ID NO: 9825 - DNA, 20 bp, Artificial Sequence
  Description of Artificial Sequence: Synthetic oligonucleotide
  Target: LAMA2; (-) strand; PAM type: NNAGAAW; PAM sequence: AAAGAAA
acaagtcagggaaacatact

SEQ ID NO: 9826 - DNA, 20 bp, Artificial Sequence
  Description of Artificial Sequence: Synthetic oligonucleotide
  Target: LAMA2; (-) strand; PAM type: NNAGAAW; PAM sequence: AGAGAAT
agatgtttggactatgtggg

SEQ ID NO: 9827 - DNA, 20 bp, Artificial Sequence
  Description of Artificial Sequence: Synthetic oligonucleotide
  Target: LAMA2; (-) strand; PAM type: NNAGAAW; PAM sequence: ATAGAAT
gattggctggggtgggcatg

SEQ ID NO: 9828 - DNA, 20 bp, Artificial Sequence
  Description of Artificial Sequence: Synthetic oligonucleotide
  Target: LAMA2; (-) strand; PAM type: NNAGAAW; PAM sequence: TGAGAAT
tagaatagtcttaaattgtt

SEQ ID NO: 9829 - DNA, 20 bp, Artificial Sequence
  Description of Artificial Sequence: Synthetic oligonucleotide
  Target: LAMA2; (-) strand; PAM type: NNAGAAW; PAM sequence: ATAGAAT
attgaatcatttttaaaggt

SEQ ID NO: 9830 - DNA, 20 bp, Artificial Sequence
  Description of Artificial Sequence: Synthetic oligonucleotide
  Target: LAMA2; (-) strand; PAM type: NNAGAAW; PAM sequence: AGAGAAT
gaaccattattaatgaaggg

SEQ ID NO: 9831 - DNA, 20 bp, Artificial Sequence
  Description of Artificial Sequence: Synthetic oligonucleotide
  Target: LAMA2; (-) strand; PAM type: NNAGAAW; PAM sequence: AAAGAAA
tgaaaacaatatagccaatt

SEQ ID NO: 9832 - DNA, 20 bp, Artificial Sequence
  Description of Artificial Sequence: Synthetic oligonucleotide
  Target: LAMA2; (-) strand; PAM type: NNAGAAW; PAM sequence: TGAGAAT
ttatggatgaaatatttacc

SEQ ID NO: 9833 - DNA, 20 bp, Artificial Sequence
  Description of Artificial Sequence: Synthetic oligonucleotide
  Target: LAMA2; (-) strand; PAM type: NNAGAAW; PAM sequence: TCAGAAT
tttttctatgccatgatata

SEQ ID NO: 9834 - DNA, 20 bp, Artificial Sequence
  Description of Artificial Sequence: Synthetic oligonucleotide
  Target: LAMA2; (-) strand; PAM type: NNAGAAW; PAM sequence: CCAGAAT
acaaataactggaaccagta

SEQ ID NO: 9835 - DNA, 20 bp, Artificial Sequence
  Description of Artificial Sequence: Synthetic oligonucleotide
  Target: LAMA2; (-) strand; PAM type: NNAGAAW; PAM sequence: AAAGAAA
attgaactaattcatctatt

SEQ ID NO: 9836 - DNA, 20 bp, Artificial Sequence
  Description of Artificial Sequence: Synthetic oligonucleotide
  Target: LAMA2; (-) strand; PAM type: NNAGAAW; PAM sequence: TTAGAAA
atagccaaagctatattatt

SEQ ID NO: 9837 - DNA, 20 bp, Artificial Sequence
  Description of Artificial Sequence: Synthetic oligonucleotide
  Target: LAMA2; (-) strand; PAM type: NNAGAAW; PAM sequence: TTAGAAT
gagaaaagtatccaaaactt

SEQ ID NO: 9838 - DNA, 20 bp, Artificial Sequence
  Description of Artificial Sequence: Synthetic oligonucleotide
  Target: LAMA2; (-) strand; PAM type: NNAGAAW; PAM sequence: AGAGAAA
tactttgtctggataatgtt

SEQ ID NO: 9839 - DNA, 20 bp, Artificial Sequence
  Description of Artificial Sequence: Synthetic oligonucleotide
  Target: LAMA2; (-) strand; PAM type: NNAGAAW; PAM sequence: CTAGAAT
aaaagaaaataactgcaaac

SEQ ID NO: 9840 - DNA, 20 bp, Artificial Sequence
  Description of Artificial Sequence: Synthetic oligonucleotide
  Target: LAMA2; (-) strand; PAM type: NNAGAAW; PAM sequence: AAAGAAA
gaaaacaataaaatgtgcca

SEQ ID NO: 9841 - DNA, 20 bp, Artificial Sequence
  Description of Artificial Sequence: Synthetic oligonucleotide
  Target: LAMA2; (-) strand; PAM type: NNAGAAW; PAM sequence: TCAGAAA
ctctacataagcaatggaaa

SEQ ID NO: 9842 - DNA, 20 bp, Artificial Sequence
  Description of Artificial Sequence: Synthetic oligonucleotide
  Target: LAMA2; (-) strand; PAM type: NNAGAAW; PAM sequence: AGAGAAA
aaaaaatatttaaataaatc

SEQ ID NO: 9843 - DNA, 20 bp, Artificial Sequence
  Description of Artificial Sequence: Synthetic oligonucleotide
  Target: LAMA2; (-) strand; PAM type: NNAGAAW; PAM sequence: AAAGAAA
tagtaaaactactgaagaac

SEQ ID NO: 9844 - DNA, 20 bp, Artificial Sequence
  Description of Artificial Sequence: Synthetic oligonucleotide
  Target: LAMA2; (-) strand; PAM type: NNAGAAW; PAM sequence: GTAGAAA
agacatcactttgcagatat

SEQ ID NO: 9845 - DNA, 20 bp, Artificial Sequence
  Description of Artificial Sequence: Synthetic oligonucleotide
  Target: LAMA2; (-) strand; PAM type: NNAGAAW; PAM sequence: TTAGAAT
aagttccaagtcatttttaa

SEQ ID NO: 9846 - DNA, 20 bp, Artificial Sequence
  Description of Artificial Sequence: Synthetic oligonucleotide
  Target: LAMA2; (-) strand; PAM type: NNAGAAW; PAM sequence: ACAGAAA
aaaatacctagaatgaagat

SEQ ID NO: 9847 - DNA, 20 bp, Artificial Sequence
  Description of Artificial Sequence: Synthetic oligonucleotide
  Target: LAMA2; (-) strand; PAM type: NNAGAAW; PAM sequence: CTAGAAT
agtaatccagaagaaaatac

SEQ ID NO: 9848 - DNA, 20 bp, Artificial Sequence
  Description of Artificial Sequence: Synthetic oligonucleotide
  Target: LAMA2; (-) strand; PAM type: NNAGAAW; PAM sequence: GAAGAAA
aatgaactagaagtaatcca

SEQ ID NO: 9849 - DNA, 20 bp, Artificial Sequence
  Description of Artificial Sequence: Synthetic oligonucleotide
  Target: LAMA2; (-) strand; PAM type: NNAGAAW; PAM sequence: AGAGAAT
caatatttacatagctgaga

SEQ ID NO: 9850 - DNA, 20 bp, Artificial Sequence
  Description of Artificial Sequence: Synthetic oligonucleotide
  Target: LAMA2; (-) strand; PAM type: NNAGAAW; PAM sequence: TAAGAAT
aactgaaaaatatatgaaat

SEQ ID NO: 9851 - DNA, 20 bp, Artificial Sequence
  Description of Artificial Sequence: Synthetic oligonucleotide
  Target: LAMA2; (-) strand; PAM type: NNAGAAW; PAM sequence: TTAGAAA
agaaaatgaaccagagaaat

SEQ ID NO: 9852 - DNA, 20 bp, Artificial Sequence
  Description of Artificial Sequence: Synthetic oligonucleotide
  Target: LAMA2; (-) strand; PAM type: NNAGAAW; PAM sequence: AGAGAAA
agaaaaaaagaaaatgaacc

SEQ ID NO: 9853 - DNA, 20 bp, Artificial Sequence
  Description of Artificial Sequence: Synthetic oligonucleotide
  Target: LAMA2; (-) strand; PAM type: NNAGAAW; PAM sequence: AAAGAAA
aaaaaaagaaagaaagaaaa

SEQ ID NO: 9854 - DNA, 20 bp, Artificial Sequence
  Description of Artificial Sequence: Synthetic oligonucleotide
  Target: LAMA2; (-) strand; PAM type: NNAGAAW; PAM sequence: AAAGAAA
aaaaaaaaaaaaaaagaaag

SEQ ID NO: 9855 - DNA, 20 bp, Artificial Sequence
  Description of Artificial Sequence: Synthetic oligonucleotide
  Target: LAMA2; (-) strand; PAM type: NNAGAAW; PAM sequence: AAAGAAA
ctcaaaaaaaaaaaaaaaag

SEQ ID NO: 9856 - DNA, 20 bp, Artificial Sequence
  Description of Artificial Sequence: Synthetic oligonucleotide
  Target: LAMA2; (-) strand; PAM type: NNAGAAW; PAM sequence: AAAGAAA
cggtctcaaaaaaaaaaaaa

SEQ ID NO: 9857 - DNA, 20 bp, Artificial Sequence
  Description of Artificial Sequence: Synthetic oligonucleotide
  Target: LAMA2; (-) strand; PAM type: NNAGAAW; PAM sequence: TGAGAAA
tataaaatttcaatgtaaaa

SEQ ID NO: 9858 - DNA, 20 bp, Artificial Sequence
  Description of Artificial Sequence: Synthetic oligonucleotide
  Target: LAMA2; (-) strand; PAM type: NNAGAAW; PAM sequence: TTAGAAT
aaaatagaatattgaaaatt

SEQ ID NO: 9859 - DNA, 20 bp, Artificial Sequence
  Description of Artificial Sequence: Synthetic oligonucleotide
  Target: LAMA2; (-) strand; PAM type: NNAGAAW; PAM sequence: ATAGAAT
tatgctcaaggagattaaaa

SEQ ID NO: 9860 - DNA, 20 bp, Artificial Sequence
  Description of Artificial Sequence: Synthetic oligonucleotide
  Target: LAMA2; (-) strand; PAM type: NNAGAAW; PAM sequence: TTAGAAT
atatccaaaaaggccatata

SEQ ID NO: 9861 - DNA, 20 bp, Artificial Sequence
  Description of Artificial Sequence: Synthetic oligonucleotide
  Target: LAMA2; (-) strand; PAM type: NNAGAAW; PAM sequence: ACAGAAA
aaaaagaatcagcagatgaa

SEQ ID NO: 9862 - DNA, 20 bp, Artificial Sequence
  Description of Artificial Sequence: Synthetic oligonucleotide
  Target: LAMA2; (-) strand; PAM type: NNAGAAW; PAM sequence: AAAGAAT
aagaatgtaagacagcataa

SEQ ID NO: 9863 - DNA, 20 bp, Artificial Sequence
  Description of Artificial Sequence: Synthetic oligonucleotide
  Target: LAMA2; (-) strand; PAM type: NNAGAAW; PAM sequence: CAAGAAT
tacaaagataatcaggcaca

SEQ ID NO: 9864 - DNA, 20 bp, Artificial Sequence
  Description of Artificial Sequence: Synthetic oligonucleotide
  Target: LAMA2; (-) strand; PAM type: NNAGAAW; PAM sequence: TCAGAAA
tccattgcctggcagtagca

SEQ ID NO: 9865 - DNA, 20 bp, Artificial Sequence
  Description of Artificial Sequence: Synthetic oligonucleotide
  Target: LAMA2; (-) strand; PAM type: NNAGAAW; PAM sequence: CCAGAAA
ctttgaatcatctgaatgtc

SEQ ID NO: 9866 - DNA, 20 bp, Artificial Sequence
  Description of Artificial Sequence: Synthetic oligonucleotide
  Target: LAMA2; (-) strand; PAM type: NNAGAAW; PAM sequence: AGAGAAA
tacctgaattggatcccaga

SEQ ID NO: 9867 - DNA, 20 bp, Artificial Sequence
  Description of Artificial Sequence: Synthetic oligonucleotide
  Target: LAMA2; (-) strand; PAM type: NNAGAAW; PAM sequence: TGAGAAA
ataaaaaatgattgatgcaa

SEQ ID NO: 9868 - DNA, 20 bp, Artificial Sequence
  Description of Artificial Sequence: Synthetic oligonucleotide
  Target: LAMA2; (-) strand; PAM type: NNAGAAW; PAM sequence: AAAGAAA
aagccccataaaccaataaa

SEQ ID NO: 9869 - DNA, 20 bp, Artificial Sequence
  Description of Artificial Sequence: Synthetic oligonucleotide
  Target: LAMA2; (-) strand; PAM type: NNAGAAW; PAM sequence: GAAGAAA
aggaatattttgaaggtctg

SEQ ID NO: 9870 - DNA, 20 bp, Artificial Sequence
  Description of Artificial Sequence: Synthetic oligonucleotide
  Target: LAMA2; (-) strand; PAM type: NNAGAAW; PAM sequence: AAAGAAA
agaacctgtttgtaaagaag

SEQ ID NO: 9871 - DNA, 20 bp, Artificial Sequence
  Description of Artificial Sequence: Synthetic oligonucleotide
  Target: LAMA2; (-) strand; PAM type: NNAGAAW; PAM sequence: GAAGAAA
aatgagaacctgtttgtaaa

SEQ ID NO: 9872 - DNA, 20 bp, Artificial Sequence
  Description of Artificial Sequence: Synthetic oligonucleotide
  Target: LAMA2; (-) strand; PAM type: NNAGAAW; PAM sequence: CAAGAAA
agtggatttggcattagtca

SEQ ID NO: 9873 - DNA, 20 bp, Artificial Sequence
  Description of Artificial Sequence: Synthetic oligonucleotide
  Target: LAMA2; (-) strand; PAM type: NNAGAAW; PAM sequence: TGAGAAA
aatatcctttaatagattga

SEQ ID NO: 9874 - DNA, 20 bp, Artificial Sequence
  Description of Artificial Sequence: Synthetic oligonucleotide
  Target: LAMA2; (-) strand; PAM type: NNAGAAW; PAM sequence: TCAGAAT
ccttacgattatctcatagc

SEQ ID NO: 9875 - DNA, 20 bp, Artificial Sequence
  Description of Artificial Sequence: Synthetic oligonucleotide
  Target: LAMA2; (-) strand; PAM type: NNAGAAW; PAM sequence: ATAGAAA
gccttctcttggcattgatg

SEQ ID NO: 9876 - DNA, 20 bp, Artificial Sequence
  Description of Artificial Sequence: Synthetic oligonucleotide
  Target: LAMA2; (-) strand; PAM type: NNAGAAW; PAM sequence: TAAGAAT
ttaagccaggaatacagaca

SEQ ID NO: 9877 - DNA, 20 bp, Artificial Sequence
  Description of Artificial Sequence: Synthetic oligonucleotide
  Target: LAMA2; (-) strand; PAM type: NNAGAAW; PAM sequence: TTAGAAT
ctttcttcagttggaagtag

SEQ ID NO: 9878 - DNA, 20 bp, Artificial Sequence
  Description of Artificial Sequence: Synthetic oligonucleotide
  Target: LAMA2; (-) strand; PAM type: NNAGAAW; PAM sequence: ACAGAAA
aaaacctatcacatttgttg

SEQ ID NO: 9879 - DNA, 20 bp, Artificial Sequence
  Description of Artificial Sequence: Synthetic oligonucleotide
  Target: LAMA2; (-) strand; PAM type: NNAGAAW; PAM sequence: CTAGAAA
gatctctaaagcagtgccat

SEQ ID NO: 9880 - DNA, 20 bp, Artificial Sequence
  Description of Artificial Sequence: Synthetic oligonucleotide
  Target: LAMA2; (-) strand; PAM type: NNAGAAW; PAM sequence: ACAGAAA
aaagggaaaagtctcataca

SEQ ID NO: 9881 - DNA, 20 bp, Artificial Sequence
  Description of Artificial Sequence: Synthetic oligonucleotide
  Target: LAMA2; (-) strand; PAM type: NNAGAAW; PAM sequence: AAAGAAA
taaaagcaataatgtgagtc

SEQ ID NO: 9882 - DNA, 20 bp, Artificial Sequence
  Description of Artificial Sequence: Synthetic oligonucleotide
  Target: LAMA2; (-) strand; PAM type: NNAGAAW; PAM sequence: GCAGAAT
caagcctgccatgtttcaaa

SEQ ID NO: 9883 - DNA, 20 bp, Artificial Sequence
  Description of Artificial Sequence: Synthetic oligonucleotide
  Target: LAMA2; (-) strand; PAM type: NNAGAAW; PAM sequence: GAAGAAA
atgtcagatgatgaaaagag

SEQ ID NO: 9884 - DNA, 20 bp, Artificial Sequence
  Description of Artificial Sequence: Synthetic oligonucleotide
  Target: LAMA2; (-) strand; PAM type: NNAGAAW; PAM sequence: GGAGAAT
cttaacaatgttatatcaaa

SEQ ID NO: 9885 - DNA, 20 bp, Artificial Sequence
  Description of Artificial Sequence: Synthetic oligonucleotide
  Target: LAMA2; (-) strand; PAM type: NNAGAAW; PAM sequence: TGAGAAA
ggaacaattgcaagggtaat

SEQ ID NO: 9886 - DNA, 20 bp, Artificial Sequence
  Description of Artificial Sequence: Synthetic oligonucleotide
  Target: LAMA2; (-) strand; PAM type: NNAGAAW; PAM sequence: AGAGAAA
gtctaaaaagaattattttt

SEQ ID NO: 9887 - DNA, 20 bp, Artificial Sequence
  Description of Artificial Sequence: Synthetic oligonucleotide
  Target: LAMA2; (-) strand; PAM type: NNAGAAW; PAM sequence: AAAGAAT
ttggccccacattggtctaa

SEQ ID NO: 9888 - DNA, 20 bp, Artificial Sequence
  Description of Artificial Sequence: Synthetic oligonucleotide
  Target: LAMA2; (-) strand; PAM type: NNAGAAW; PAM sequence: AAAGAAA
gagtctagtaactgatcaac

SEQ ID NO: 9889 - DNA, 20 bp, Artificial Sequence
  Description of Artificial Sequence: Synthetic oligonucleotide
  Target: LAMA2; (-) strand; PAM type: NNAGAAW; PAM sequence: TGAGAAT
caatgttagctactgaacct

SEQ ID NO: 9890 - DNA, 20 bp, Artificial Sequence
  Description of Artificial Sequence: Synthetic oligonucleotide
  Target: LAMA2; (-) strand; PAM type: NNAGAAW; PAM sequence: TGAGAAT
tttgtacctttctggtgctc

SEQ ID NO: 9891 - DNA, 20 bp, Artificial Sequence
  Description of Artificial Sequence: Synthetic oligonucleotide
  Target: LAMA2; (-) strand; PAM type: NNAGAAW; PAM sequence: AAAGAAT
attcatcaaagctaaaaggt

SEQ ID NO: 9892 - DNA, 20 bp, Artificial Sequence
  Description of Artificial Sequence: Synthetic oligonucleotide
  Target: LAMA2; (-) strand; PAM type: NNAGAAW; PAM sequence: TAAGAAA
aatgagcaagataaagaggt

SEQ ID NO: 9893 - DNA, 20 bp, Artificial Sequence
  Description of Artificial Sequence: Synthetic oligonucleotide
  Target: LAMA2; (-) strand; PAM type: NNAGAAW; PAM sequence: GCAGAAA
ttgccagaataaagcttgaa

SEQ ID NO: 9894 - DNA, 20 bp, Artificial Sequence
  Description of Artificial Sequence: Synthetic oligonucleotide
  Target: LAMA2; (-) strand; PAM type: NNAGAAW; PAM sequence: CCAGAAT
atataaatatacatcatttg

SEQ ID NO: 9895 - DNA, 20 bp, Artificial Sequence
  Description of Artificial Sequence: Synthetic oligonucleotide
  Target: LAMA2; (-) strand; PAM type: NNAGAAW; PAM sequence: AAAGAAA
aatatttaaaaaacaacaca

SEQ ID NO: 9896 - DNA, 20 bp, Artificial Sequence
  Description of Artificial Sequence: Synthetic oligonucleotide
  Target: LAMA2; (-) strand; PAM type: NNAGAAW; PAM sequence: CCAGAAA
caactgacatacattaaatt

SEQ ID NO: 9897 - DNA, 20 bp, Artificial Sequence
  Description of Artificial Sequence: Synthetic oligonucleotide
  Target: LAMA2; (-) strand; PAM type: NNAGAAW; PAM sequence: GAAGAAA
agttactattattgtcttgg

SEQ ID NO: 9898 - DNA, 20 bp, Artificial Sequence
  Description of Artificial Sequence: Synthetic oligonucleotide
  Target: LAMA2; (-) strand; PAM type: NNAGAAW; PAM sequence: TGAGAAA
gtgtttaaaaatgttcctga

SEQ ID NO: 9899 - DNA, 20 bp, Artificial Sequence
  Description of Artificial Sequence: Synthetic oligonucleotide
  Target: LAMA2; (-) strand; PAM type: NNAGAAW; PAM sequence: ACAGAAT
tcccagcctctgcccccaac

SEQ ID NO: 9900 - DNA, 20 bp, Artificial Sequence
  Description of Artificial Sequence: Synthetic oligonucleotide
  Target: LAMA2; (-) strand; PAM type: NNAGAAW; PAM sequence: ATAGAAA
acagcattatgttctctctt

SEQ ID NO: 9901 - DNA, 20 bp, Artificial Sequence
  Description of Artificial Sequence: Synthetic oligonucleotide
  Target: LAMA2; (-) strand; PAM type: NNAGAAW; PAM sequence: TCAGAAT
gatttatgtattaaggcatt

SEQ ID NO: 9902 - DNA, 20 bp, Artificial Sequence
  Description of Artificial Sequence: Synthetic oligonucleotide
  Target: LAMA2; (-) strand; PAM type: NNAGAAW; PAM sequence: GGAGAAA
gatataattacctatagttt

SEQ ID NO: 9903 - DNA, 20 bp, Artificial Sequence
  Description of Artificial Sequence: Synthetic oligonucleotide
  Target: LAMA2; (-) strand; PAM type: NNAGAAW; PAM sequence: GGAGAAT
cataaattttactataagat

SEQ ID NO: 9904 - DNA, 20 bp, Artificial Sequence
  Description of Artificial Sequence: Synthetic oligonucleotide
  Target: LAMA2; (-) strand; PAM type: NNAGAAW; PAM sequence: AAAGAAA
gaattagcttgagccaaata

SEQ ID NO: 9905 - DNA, 20 bp, Artificial Sequence
  Description of Artificial Sequence: Synthetic oligonucleotide
  Target: LAMA2; (-) strand; PAM type: NNAGAAW; PAM sequence: AAAGAAT
attaataataaaaataacag

SEQ ID NO: 9906 - DNA, 20 bp, Artificial Sequence
  Description of Artificial Sequence: Synthetic oligonucleotide
  Target: LAMA2; (-) strand; PAM type: NNAGAAW; PAM sequence: ACAGAAA
gtcaattaataataaaaata

SEQ ID NO: 9907 - DNA, 20 bp, Artificial Sequence
  Description of Artificial Sequence: Synthetic oligonucleotide
  Target: LAMA2; (-) strand; PAM type: NNAGAAW; PAM sequence: ATAGAAT
atgatgtcaattcaattcag

SEQ ID NO: 9908 - DNA, 20 bp, Artificial Sequence
  Description of Artificial Sequence: Synthetic oligonucleotide
  Target: LAMA2; (-) strand; PAM type: NNAGAAW; PAM sequence: GAAGAAA
gatcaaaactgacaagcttt

SEQ ID NO: 9909 - DNA, 20 bp, Artificial Sequence
  Description of Artificial Sequence: Synthetic oligonucleotide
  Target: LAMA2; (-) strand; PAM type: NNAGAAW; PAM sequence: TCAGAAA
aacagtttataattttcagt

SEQ ID NO: 9910 - DNA, 20 bp, Artificial Sequence
  Description of Artificial Sequence: Synthetic oligonucleotide
  Target: LAMA2; (-) strand; PAM type: NNAGAAW; PAM sequence: TCAGAAT
tttggtaatctcaatacact

SEQ ID NO: 9911 - DNA, 20 bp, Artificial Sequence
  Description of Artificial Sequence: Synthetic oligonucleotide
  Target: LAMA2; (-) strand; PAM type: NNAGAAW; PAM sequence: AGAGAAT
gttcttttctttctttatgt

SEQ ID NO: 9912 - DNA, 20 bp, Artificial Sequence
  Description of Artificial Sequence: Synthetic oligonucleotide
  Target: LAMA2; (-) strand; PAM type: NNAGAAW; PAM sequence: GAAGAAT
gctttggtgaggatcagatg

SEQ ID NO: 9913 - DNA, 20 bp, Artificial Sequence
  Description of Artificial Sequence: Synthetic oligonucleotide
  Target: LAMA2; (-) strand; PAM type: NNAGAAW; PAM sequence: TGAGAAT
cttcacctccatctgtaaaa

SEQ ID NO: 9914 - DNA, 20 bp, Artificial Sequence
  Description of Artificial Sequence: Synthetic oligonucleotide
  Target: LAMA2; (-) strand; PAM type: NNAGAAW; PAM sequence: TTAGAAA
gaccaacagtaaatacacat

SEQ ID NO: 9915 - DNA, 20 bp, Artificial Sequence
  Description of Artificial Sequence: Synthetic oligonucleotide
  Target: LAMA2; (-) strand; PAM type: NNAGAAW; PAM sequence: CTAGAAT
aaatagtacacatcctcagg

SEQ ID NO: 9916 - DNA, 20 bp, Artificial Sequence
  Description of Artificial Sequence: Synthetic oligonucleotide
  Target: LAMA2; (-) strand; PAM type: NNAGAAW; PAM sequence: GCAGAAT
tcttatgtactacccaggta

SEQ ID NO: 9917 - DNA, 20 bp, Artificial Sequence
  Description of Artificial Sequence: Synthetic oligonucleotide
  Target: LAMA2; (-) strand; PAM type: NNAGAAW; PAM sequence: TTAGAAT
aggatttttgttatccctga

SEQ ID NO: 9918 - DNA, 20 bp, Artificial Sequence
  Description of Artificial Sequence: Synthetic oligonucleotide
  Target: LAMA2; (-) strand; PAM type: NNAGAAW; PAM sequence: AAAGAAA
gctaaagaacaaatttacac

SEQ ID NO: 9919 - DNA, 20 bp, Artificial Sequence
  Description of Artificial Sequence: Synthetic oligonucleotide
  Target: LAMA2; (-) strand; PAM type: NNAGAAW; PAM sequence: AAAGAAA
caccatattactaatttggt

SEQ ID NO: 9920 - DNA, 20 bp, Artificial Sequence
  Description of Artificial Sequence: Synthetic oligonucleotide
  Target: LAMA2; (-) strand; PAM type: NNAGAAW; PAM sequence: TAAGAAT
ttttttcccttgacataatc

SEQ ID NO: 9921 - DNA, 20 bp, Artificial Sequence
  Description of Artificial Sequence: Synthetic oligonucleotide
  Target: LAMA2; (-) strand; PAM type: NNAGAAW; PAM sequence: AGAGAAA
taacaaattgaaataatgga

SEQ ID NO: 9922 - DNA, 20 bp, Artificial Sequence
  Description of Artificial Sequence: Synthetic oligonucleotide
  Target: LAMA2; (-) strand; PAM type: NNAGAAW; PAM sequence: CAAGAAA
acttactggctacatatacc

SEQ ID NO: 9923 - DNA, 20 bp, Artificial Sequence
  Description of Artificial Sequence: Synthetic oligonucleotide
  Target: LAMA2; (-) strand; PAM type: NNAGAAW; PAM sequence: GGAGAAA
gaaagatttacaaaaacact

SEQ ID NO: 9924 - DNA, 20 bp, Artificial Sequence
  Description of Artificial Sequence: Synthetic oligonucleotide
  Target: LAMA2; (-) strand; PAM type: NNAGAAW; PAM sequence: TTAGAAT
gattcatttatgacaagaac

SEQ ID NO: 9925 - DNA, 20 bp, Artificial Sequence
  Description of Artificial Sequence: Synthetic oligonucleotide
  Target: LAMA2; (-) strand; PAM type: NNAGAAW; PAM sequence: CAAGAAA
ttttcggctagccatactct

SEQ ID NO: 9926 - DNA, 20 bp, Artificial Sequence
  Description of Artificial Sequence: Synthetic oligonucleotide
  Target: LAMA2; (-) strand; PAM type: NNAGAAW; PAM sequence: CCAGAAT
ccccaaattctctttccaga

SEQ ID NO: 9927 - DNA, 20 bp, Artificial Sequence
  Description of Artificial Sequence: Synthetic oligonucleotide
  Target: LAMA2; (-) strand; PAM type: NNAGAAW; PAM sequence: TCAGAAT
agttgtagtgacagtatttt

SEQ ID NO: 9928 - DNA, 20 bp, Artificial Sequence
  Description of Artificial Sequence: Synthetic oligonucleotide
  Target: LAMA2; (-) strand; PAM type: NNAGAAW; PAM sequence: CAAGAAT
atcgtatcaatgggaactaa

SEQ ID NO: 9929 - DNA, 20 bp, Artificial Sequence
  Description of Artificial Sequence: Synthetic oligonucleotide
  Target: LAMA2; (-) strand; PAM type: NNAGAAW; PAM sequence: CAAGAAA
gtttatttgtattcctatct

SEQ ID NO: 9930 - DNA, 20 bp, Artificial Sequence
  Description of Artificial Sequence: Synthetic oligonucleotide
  Target: LAMA2; (-) strand; PAM type: NNAGAAW; PAM sequence: ACAGAAA
tttttttaaaaaaagcaaat

SEQ ID NO: 9931 - DNA, 20 bp, Artificial Sequence
  Description of Artificial Sequence: Synthetic oligonucleotide
  Target: LAMA2; (-) strand; PAM type: NNAGAAW; PAM sequence: TAAGAAA
ctttcaactacctaatcatc

SEQ ID NO: 9932 - DNA, 20 bp, Artificial Sequence
  Description of Artificial Sequence: Synthetic oligonucleotide
  Target: LAMA2; (-) strand; PAM type: NNAGAAW; PAM sequence: TCAGAAT
taagctagctagttcactaa

SEQ ID NO: 9933 - DNA, 20 bp, Artificial Sequence
  Description of Artificial Sequence: Synthetic oligonucleotide
  Target: LAMA2; (-) strand; PAM type: NNAGAAW; PAM sequence: CTAGAAT
gtggattttaaaatttaaat

SEQ ID NO: 9934 - DNA, 20 bp, Artificial Sequence
  Description of Artificial Sequence: Synthetic oligonucleotide
  Target: LAMA2; (-) strand; PAM type: NNAGAAW; PAM sequence: AGAGAAA
gctgaaaatttatttcaaaa

SEQ ID NO: 9935 - DNA, 20 bp, Artificial Sequence
  Description of Artificial Sequence: Synthetic oligonucleotide
  Target: LAMA2; (-) strand; PAM type: NNAGAAW; PAM sequence: AAAGAAA
aatccagaatacccgaggca

SEQ ID NO: 9936 - DNA, 20 bp, Artificial Sequence
  Description of Artificial Sequence: Synthetic oligonucleotide
  Target: LAMA2; (-) strand; PAM type: NNAGAAW; PAM sequence: CCAGAAT
agatgctacaaaatgataat

SEQ ID NO: 9937 - DNA, 20 bp, Artificial Sequence
  Description of Artificial Sequence: Synthetic oligonucleotide
  Target: LAMA2; (-) strand; PAM type: NNAGAAW; PAM sequence: AGAGAAA
ccatgggaaaagctggtagg

SEQ ID NO: 9938 - DNA, 20 bp, Artificial Sequence
  Description of Artificial Sequence: Synthetic oligonucleotide
  Target: LAMA2; (-) strand; PAM type: NNAGAAW; PAM sequence: GAAGAAA
gccctaggaggtcaggaaaa

SEQ ID NO: 9939 - DNA, 20 bp, Artificial Sequence
  Description of Artificial Sequence: Synthetic oligonucleotide
  Target: LAMA2; (-) strand; PAM type: NNAGAAW; PAM sequence: AAAGAAT
cactcaaagagcaagtttct

SEQ ID NO: 9940 - DNA, 20 bp, Artificial Sequence
  Description of Artificial Sequence: Synthetic oligonucleotide
  Target: LAMA2; (-) strand; PAM type: NNAGAAW; PAM sequence: AAAGAAA
cctgtgctacagaagctcag

SEQ ID NO: 9941 - DNA, 20 bp, Artificial Sequence
  Description of Artificial Sequence: Synthetic oligonucleotide
  Target: LAMA2; (-) strand; PAM type: NNAGAAW; PAM sequence: TCAGAAA
atagcctgtgctacagaagc

SEQ ID NO: 9942 - DNA, 20 bp, Artificial Sequence
  Description of Artificial Sequence: Synthetic oligonucleotide
  Target: LAMA2; (-) strand; PAM type: NNAGAAW; PAM sequence: CAAGAAA
attataaaagcaatcaactc

SEQ ID NO: 9943 - DNA, 20 bp, Artificial Sequence
  Description of Artificial Sequence: Synthetic oligonucleotide
  Target: LAMA2; (-) strand; PAM type: NNAGAAW; PAM sequence: TCAGAAT
tatattgaaaattactgttt

SEQ ID NO: 9944 - DNA, 20 bp, Artificial Sequence
  Description of Artificial Sequence: Synthetic oligonucleotide
  Target: LAMA2; (-) strand; PAM type: NNAGAAW; PAM sequence: TAAGAAA
taatttctttaaagtggtta

SEQ ID NO: 9945 - DNA, 20 bp, Artificial Sequence
  Description of Artificial Sequence: Synthetic oligonucleotide
  Target: LAMA2; (-) strand; PAM type: NNAGAAW; PAM sequence: TAAGAAA
agcaccaaccttgctatgga

SEQ ID NO: 9946 - DNA, 20 bp, Artificial Sequence
  Description of Artificial Sequence: Synthetic oligonucleotide
  Target: LAMA2; (-) strand; PAM type: NNAGAAW; PAM sequence: TGAGAAT
ggactgcattaaatttgctc

SEQ ID NO: 9947 - DNA, 20 bp, Artificial Sequence
  Description of Artificial Sequence: Synthetic oligonucleotide
  Target: LAMA2; (-) strand; PAM type: NNAGAAW; PAM sequence: GCAGAAA
atcttcatctttgttacact

SEQ ID NO: 9948 - DNA, 20 bp, Artificial Sequence
  Description of Artificial Sequence: Synthetic oligonucleotide
  Target: LAMA2; (-) strand; PAM type: NNAGAAW; PAM sequence: AGAGAAT
atcattgagtaaaaaattta

SEQ ID NO: 9949 - DNA, 20 bp, Artificial Sequence
  Description of Artificial Sequence: Synthetic oligonucleotide
  Target: LAMA2; (-) strand; PAM type: NNAGAAW; PAM sequence: ACAGAAT
agttagactatcccaaaagc

SEQ ID NO: 9950 - DNA, 20 bp, Artificial Sequence
  Description of Artificial Sequence: Synthetic oligonucleotide
  Target: LAMA2; (-) strand; PAM type: NNAGAAW; PAM sequence: TGAGAAT
cctgtcaagtaatttaactc

SEQ ID NO: 9951 - DNA, 20 bp, Artificial Sequence
  Description of Artificial Sequence: Synthetic oligonucleotide
  Target: LAMA2; (-) strand; PAM type: NNAGAAW; PAM sequence: CTAGAAA
attatcactcaaactgtatg

SEQ ID NO: 9952 - DNA, 20 bp, Artificial Sequence
  Description of Artificial Sequence: Synthetic oligonucleotide
  Target: LAMA2; (-) strand; PAM type: NNAGAAW; PAM sequence: TTAGAAT
agttacaagatgcaaggcat

SEQ ID NO: 9953 - DNA, 20 bp, Artificial Sequence
  Description of Artificial Sequence: Synthetic oligonucleotide
  Target: LAMA2; (-) strand; PAM type: NNAGAAW; PAM sequence: AAAGAAT
ctcctacataagatgagtct

SEQ ID NO: 9954 - DNA, 20 bp, Artificial Sequence
  Description of Artificial Sequence: Synthetic oligonucleotide
  Target: LAMA2; (-) strand; PAM type: NNAGAAW; PAM sequence: ATAGAAT
ggttacagagactacgagtg

SEQ ID NO: 9955 - DNA, 20 bp, Artificial Sequence
  Description of Artificial Sequence: Synthetic oligonucleotide
  Target: LAMA2; (-) strand; PAM type: NNAGAAW; PAM sequence: TAAGAAA
atcgtaaaccaactcacaga

SEQ ID NO: 9956 - DNA, 20 bp, Artificial Sequence
  Description of Artificial Sequence: Synthetic oligonucleotide
  Target: LAMA2; (-) strand; PAM type: NNAGAAW; PAM sequence: TTAGAAA
ttgcttataatcaagaaaag

SEQ ID NO: 9957 - DNA, 20 bp, Artificial Sequence
  Description of Artificial Sequence: Synthetic oligonucleotide
  Target: LAMA2; (-) strand; PAM type: NNAGAAW; PAM sequence: CAAGAAA
attacaacattgcttataat

SEQ ID NO: 9958 - DNA, 20 bp, Artificial Sequence
  Description of Artificial Sequence: Synthetic oligonucleotide
  Target: LAMA2; (-) strand; PAM type: NNAGAAW; PAM sequence: GGAGAAT
ctactcaggaggctgaggca

SEQ ID NO: 9959 - DNA, 20 bp, Artificial Sequence
  Description of Artificial Sequence: Synthetic oligonucleotide
  Target: LAMA2; (-) strand; PAM type: NNAGAAW; PAM sequence: CTAGAAA
ctcgcattagtatacacgtg

SEQ ID NO: 9960 - DNA, 20 bp, Artificial Sequence
  Description of Artificial Sequence: Synthetic oligonucleotide
  Target: LAMA2; (-) strand; PAM type: NNAGAAW; PAM sequence: TCAGAAA
tggatttttataaatttttt

SEQ ID NO: 9961 - DNA, 20 bp, Artificial Sequence
  Description of Artificial Sequence: Synthetic oligonucleotide
  Target: LAMA2; (-) strand; PAM type: NNAGAAW; PAM sequence: GTAGAAA
gaagagacatgtagaaagtc

SEQ ID NO: 9962 - DNA, 20 bp, Artificial Sequence
  Description of Artificial Sequence: Synthetic oligonucleotide
  Target: LAMA2; (-) strand; PAM type: NNAGAAW; PAM sequence: GTAGAAA
aacccaatgtgaagagacat

SEQ ID NO: 9963 - DNA, 20 bp, Artificial Sequence
  Description of Artificial Sequence: Synthetic oligonucleotide
  Target: LAMA2; (-) strand; PAM type: NNAGAAW; PAM sequence: TTAGAAA
gaatttctaaatctcccaat

SEQ ID NO: 9964 - DNA, 20 bp, Artificial Sequence
  Description of Artificial Sequence: Synthetic oligonucleotide
  Target: LAMA2; (-) strand; PAM type: NNAGAAW; PAM sequence: TTAGAAA
gaaaacctgtttataaggta

SEQ ID NO: 9965 - DNA, 20 bp, Artificial Sequence
  Description of Artificial Sequence: Synthetic oligonucleotide
  Target: LAMA2; (-) strand; PAM type: NNAGAAW; PAM sequence: TCAGAAA
atctttaataggtcaatgcc

SEQ ID NO: 9966 - DNA, 20 bp, Artificial Sequence
  Description of Artificial Sequence: Synthetic oligonucleotide
  Target: LAMA2; (-) strand; PAM type: NNAGAAW; PAM sequence: TAAGAAA
aaagttttgcttataagttt

SEQ ID NO: 9967 - DNA, 20 bp, Artificial Sequence
  Description of Artificial Sequence: Synthetic oligonucleotide
  Target: LAMA2; (-) strand; PAM type: NNAGAAW; PAM sequence: TTAGAAA
tattgattgcataaatatgg

SEQ ID NO: 9968 - DNA, 20 bp, Artificial Sequence
  Description of Artificial Sequence: Synthetic oligonucleotide
  Target: LAMA2; (-) strand; PAM type: NNAGAAW; PAM sequence: AAAGAAT
gatttccaaagtcatgaagc

SEQ ID NO: 9969 - DNA, 20 bp, Artificial Sequence
  Description of Artificial Sequence: Synthetic oligonucleotide
  Target: LAMA2; (-) strand; PAM type: NNAGAAW; PAM sequence: CTAGAAA
agaacttgctcaggaaccag

SEQ ID NO: 9970 - DNA, 20 bp, Artificial Sequence
  Description of Artificial Sequence: Synthetic oligonucleotide
  Target: LAMA2; (-) strand; PAM type: NNAGAAW; PAM sequence: CAAGAAA
ccaagatacgattattattt

SEQ ID NO: 9971 - DNA, 20 bp, Artificial Sequence
  Description of Artificial Sequence: Synthetic oligonucleotide
  Target: LAMA2; (-) strand; PAM type: NNAGAAW; PAM sequence: ATAGAAA
gctctacttcctgcagagag

SEQ ID NO: 9972 - DNA, 20 bp, Artificial Sequence
  Description of Artificial Sequence: Synthetic oligonucleotide
  Target: LAMA2; (-) strand; PAM type: NNAGAAW; PAM sequence: CCAGAAT
cagcatttctcatctgaatt

SEQ ID NO: 9973 - DNA, 20 bp, Artificial Sequence
  Description of Artificial Sequence: Synthetic oligonucleotide
  Target: LAMA2; (-) strand; PAM type: NNAGAAW; PAM sequence: AGAGAAT
attattttcacatccaacaa

SEQ ID NO: 9974 - DNA, 20 bp, Artificial Sequence
  Description of Artificial Sequence: Synthetic oligonucleotide
  Target: LAMA2; (-) strand; PAM type: NNAGAAW; PAM sequence: TTAGAAA
ttcttaggaagcaaatagaa

SEQ ID NO: 9975 - DNA, 20 bp, Artificial Sequence
  Description of Artificial Sequence: Synthetic oligonucleotide
  Target: LAMA2; (-) strand; PAM type: NNAGAAW; PAM sequence: ATAGAAT
ttcattttcttaggaagcaa

SEQ ID NO: 9976 - DNA, 20 bp, Artificial Sequence
  Description of Artificial Sequence: Synthetic oligonucleotide
  Target: LAMA2; (-) strand; PAM type: NNAGAAW; PAM sequence: GCAGAAT
attactgaaaacagcagcag

SEQ ID NO: 9977 - DNA, 20 bp, Artificial Sequence
  Description of Artificial Sequence: Synthetic oligonucleotide
  Target: LAMA2; (-) strand; PAM type: NNAGAAW; PAM sequence: AAAGAAA
tgtttttctggttctcaaaa

SEQ ID NO: 9978 - DNA, 20 bp, Artificial Sequence
  Description of Artificial Sequence: Synthetic oligonucleotide
  Target: LAMA2; (-) strand; PAM type: NNAGAAW; PAM sequence: CAAGAAA
ccattatgataagccagact

SEQ ID NO: 9979 - DNA, 20 bp, Artificial Sequence
  Description of Artificial Sequence: Synthetic oligonucleotide
  Target: LAMA2; (-) strand; PAM type: NNAGAAW; PAM sequence: TGAGAAA
accagtagaattgtacacat

SEQ ID NO: 9980 - DNA, 20 bp, Artificial Sequence
  Description of Artificial Sequence: Synthetic oligonucleotide
  Target: LAMA2; (-) strand; PAM type: NNAGAAW; PAM sequence: GTAGAAT
atattgtaaaagtcttacca

SEQ ID NO: 9981 - DNA, 20 bp, Artificial Sequence
  Description of Artificial Sequence: Synthetic oligonucleotide
  Target: LAMA2; (-) strand; PAM type: NNAGAAW; PAM sequence: AAAGAAT
agggcacaaaatctcagtta

SEQ ID NO: 9982 - DNA, 20 bp, Artificial Sequence
  Description of Artificial Sequence: Synthetic oligonucleotide
  Target: LAMA2; (-) strand; PAM type: NNAGAAW; PAM sequence: AAAGAAA
aaatactatttagctttaaa

SEQ ID NO: 9983 - DNA, 20 bp, Artificial Sequence
  Description of Artificial Sequence: Synthetic oligonucleotide
  Target: LAMA2; (-) strand; PAM type: NNAGAAW; PAM sequence: AAAGAAA
ccatcaacagatgaatggat

SEQ ID NO: 9984 - DNA, 20 bp, Artificial Sequence
  Description of Artificial Sequence: Synthetic oligonucleotide
  Target: LAMA2; (-) strand; PAM type: NNAGAAW; PAM sequence: GTAGAAT
gttttccaaaacaactaaaa

SEQ ID NO: 9985 - DNA, 20 bp, Artificial Sequence
  Description of Artificial Sequence: Synthetic oligonucleotide
  Target: LAMA2; (-) strand; PAM type: NNAGAAW; PAM sequence: ACAGAAT
ttggcgagaatatggaaaaa

SEQ ID NO: 9986 - DNA, 20 bp, Artificial Sequence
  Description of Artificial Sequence: Synthetic oligonucleotide
  Target: LAMA2; (-) strand; PAM type: NNAGAAW; PAM sequence: CGAGAAT
aagaagataacaaatgttgg

SEQ ID NO: 9987 - DNA, 20 bp, Artificial Sequence
  Description of Artificial Sequence: Synthetic oligonucleotide
  Target: LAMA2; (-) strand; PAM type: NNAGAAW; PAM sequence: TCAGAAT
gagatatcatctcacacctg

SEQ ID NO: 9988 - DNA, 20 bp, Artificial Sequence
  Description of Artificial Sequence: Synthetic oligonucleotide
  Target: LAMA2; (-) strand; PAM type: NNAGAAW; PAM sequence: GAAGAAA
gagttccatcaacttaagag

SEQ ID NO: 9989 - DNA, 20 bp, Artificial Sequence
  Description of Artificial Sequence: Synthetic oligonucleotide
  Target: LAMA2; (-) strand; PAM type: NNAGAAW; PAM sequence: GGAGAAA
aagagacaaactatgaatgt

SEQ ID NO: 9990 - DNA, 20 bp, Artificial Sequence
  Description of Artificial Sequence: Synthetic oligonucleotide
  Target: LAMA2; (-) strand; PAM type: NNAGAAW; PAM sequence: GGAGAAA
ttgctagaagaaaacacagg

SEQ ID NO: 9991 - DNA, 20 bp, Artificial Sequence
  Description of Artificial Sequence: Synthetic oligonucleotide
  Target: LAMA2; (-) strand; PAM type: NNAGAAW; PAM sequence: GAAGAAA
ccagcaactccaaattgcta

SEQ ID NO: 9992 - DNA, 20 bp, Artificial Sequence
  Description of Artificial Sequence: Synthetic oligonucleotide
  Target: LAMA2; (-) strand; PAM type: NNAGAAW; PAM sequence: GAAGAAT
aaactaggtatccacatgca

SEQ ID NO: 9993 - DNA, 20 bp, Artificial Sequence
  Description of Artificial Sequence: Synthetic oligonucleotide
  Target: LAMA2; (-) strand; PAM type: NNAGAAW; PAM sequence: TGAGAAA
aagatgctaagaatacacaa

SEQ ID NO: 9994 - DNA, 20 bp, Artificial Sequence
  Description of Artificial Sequence: Synthetic oligonucleotide
  Target: LAMA2; (-) strand; PAM type: NNAGAAW; PAM sequence: TAAGAAT
tttatttttgacaaagatgc

SEQ ID NO: 9995 - DNA, 20 bp, Artificial Sequence
  Description of Artificial Sequence: Synthetic oligonucleotide
  Target: LAMA2; (-) strand; PAM type: NNAGAAW; PAM sequence: CCAGAAA
ggtcaatgcagcataatagc

SEQ ID NO: 9996 - DNA, 20 bp, Artificial Sequence
  Description of Artificial Sequence: Synthetic oligonucleotide
  Target: LAMA2; (-) strand; PAM type: NNAGAAW; PAM sequence: AAAGAAA
aatagcatggtactggcaaa

SEQ ID NO: 9997 - DNA, 20 bp, Artificial Sequence
  Description of Artificial Sequence: Synthetic oligonucleotide
  Target: LAMA2; (-) strand; PAM type: NNAGAAW; PAM sequence: ATAGAAA
tttgatgtcatttttcagat

SEQ ID NO: 9998 - DNA, 20 bp, Artificial Sequence
  Description of Artificial Sequence: Synthetic oligonucleotide
  Target: LAMA2; (-) strand; PAM type: NNAGAAW; PAM sequence: GAAGAAT
tatcctgtgttcatggattg

SEQ ID NO: 9999 - DNA, 20 bp, Artificial Sequence
  Description of Artificial Sequence: Synthetic oligonucleotide
  Target: LAMA2; (-) strand; PAM type: NNAGAAW; PAM sequence: AAAGAAA
caaactgtaaaatgttgatg

SEQ ID NO: 10000 - DNA, 20 bp, Artificial Sequence
  Description of Artificial Sequence: Synthetic oligonucleotide
  Target: LAMA2; (-) strand; PAM type: NNAGAAW; PAM sequence: ACAGAAT
ttactatataaatgccattt

SEQ ID NO: 10001 - DNA, 20 bp, Artificial Sequence
  Description of Artificial Sequence: Synthetic oligonucleotide
  Target: LAMA2; (-) strand; PAM type: NNAGAAW; PAM sequence: TAAGAAA
gcagccaaggatagtttact

SEQ ID NO: 10002 - DNA, 20 bp, Artificial Sequence
  Description of Artificial Sequence: Synthetic oligonucleotide
  Target: LAMA2; (-) strand; PAM type: NNAGAAW; PAM sequence: AAAGAAA
ggaaatattaaacttttaag

SEQ ID NO: 10003 - DNA, 20 bp, Artificial Sequence
  Description of Artificial Sequence: Synthetic oligonucleotide
  Target: LAMA2; (-) strand; PAM type: NNAGAAW; PAM sequence: TAAGAAA
gctgggaaatattaaacttt

SEQ ID NO: 10004 - DNA, 20 bp, Artificial Sequence
  Description of Artificial Sequence: Synthetic oligonucleotide
  Target: LAMA2; (-) strand; PAM type: NNAGAAW; PAM sequence: CCAGAAT
ccacgtatttcctccatcac

SEQ ID NO: 10005 - DNA, 20 bp, Artificial Sequence
  Description of Artificial Sequence: Synthetic oligonucleotide
  Target: LAMA2; (-) strand; PAM type: NNAGAAW; PAM sequence: TGAGAAA
cttcctaacagtggtctatt

SEQ ID NO: 10006 - DNA, 20 bp, Artificial Sequence
  Description of Artificial Sequence: Synthetic oligonucleotide
  Target: LAMA2; (-) strand; PAM type: NNAGAAW; PAM sequence: AAAGAAA
gtgtggcagtcttttaagaa

SEQ ID NO: 10007 - DNA, 20 bp, Artificial Sequence
  Description of Artificial Sequence: Synthetic oligonucleotide
  Target: LAMA2; (-) strand; PAM type: NNAGAAW; PAM sequence: TAAGAAA
ggctaagtgtggcagtcttt

SEQ ID NO: 10008 - DNA, 20 bp, Artificial Sequence
  Description of Artificial Sequence: Synthetic oligonucleotide
  Target: LAMA2; (-) strand; PAM type: NNAGAAW; PAM sequence: CCAGAAT
gtccagtgaatatttattgc

SEQ ID NO: 10009 - DNA, 20 bp, Artificial Sequence
  Description of Artificial Sequence: Synthetic oligonucleotide
  Target: LAMA2; (-) strand; PAM type: NNAGAAW; PAM sequence: AAAGAAA
caaccgttctttcttagcaa

SEQ ID NO: 10010 - DNA, 20 bp, Artificial Sequence
  Description of Artificial Sequence: Synthetic oligonucleotide
  Target: LAMA2; (-) strand; PAM type: NNAGAAW; PAM sequence: GAAGAAT
atttgtaatatgctttccca

SEQ ID NO: 10011 - DNA, 20 bp, Artificial Sequence
  Description of Artificial Sequence: Synthetic oligonucleotide
  Target: LAMA2; (-) strand; PAM type: NNAGAAW; PAM sequence: ACAGAAT
atacatttgctgccaagttc

SEQ ID NO: 10012 - DNA, 20 bp, Artificial Sequence
  Description of Artificial Sequence: Synthetic oligonucleotide
  Target: LAMA2; (-) strand; PAM type: NNAGAAW; PAM sequence: AAAGAAT
acagcatgaatgaaaggtaa

SEQ ID NO: 10013 - DNA, 20 bp, Artificial Sequence
  Description of Artificial Sequence: Synthetic oligonucleotide
  Target: LAMA2; (-) strand; PAM type: NNAGAAW; PAM sequence: CAAGAAA
tattaagaaatattacaact

SEQ ID NO: 10014 - DNA, 20 bp, Artificial Sequence
  Description of Artificial Sequence: Synthetic oligonucleotide
  Target: LAMA2; (-) strand; PAM type: NNAGAAW; PAM sequence: TAAGAAA
ccatgcaggatagctaatat

SEQ ID NO: 10015 - DNA, 20 bp, Artificial Sequence
  Description of Artificial Sequence: Synthetic oligonucleotide
  Target: LAMA2; (-) strand; PAM type: NNAGAAW; PAM sequence: AAAGAAA
aacagatccctagttccttc

SEQ ID NO: 10016 - DNA, 20 bp, Artificial Sequence
  Description of Artificial Sequence: Synthetic oligonucleotide
  Target: LAMA2; (-) strand; PAM type: NNAGAAW; PAM sequence: TAAGAAA
atttaaaaatatcaaagttc

SEQ ID NO: 10017 - DNA, 20 bp, Artificial Sequence
  Description of Artificial Sequence: Synthetic oligonucleotide
  Target: LAMA2; (-) strand; PAM type: NNAGAAW; PAM sequence: GTAGAAT
ggttgtaggaagaggagatt

SEQ ID NO: 10018 - DNA, 20 bp, Artificial Sequence
  Description of Artificial Sequence: Synthetic oligonucleotide
  Target: LAMA2; (-) strand; PAM type: NNAGAAW; PAM sequence: GGAGAAT
ctactcaggaggctgaggtg

SEQ ID NO: 10019 - DNA, 20 bp, Artificial Sequence
  Description of Artificial Sequence: Synthetic oligonucleotide
  Target: LAMA2; (-) strand; PAM type: NNAGAAW; PAM sequence: GGAGAAT
aaggtcactgaacatcaata

SEQ ID NO: 10020 - DNA, 20 bp, Artificial Sequence
  Description of Artificial Sequence: Synthetic oligonucleotide
  Target: LAMA2; (-) strand; PAM type: NNAGAAW; PAM sequence: GGAGAAA
agaacaatatctagcacaca

SEQ ID NO: 10021 - DNA, 20 bp, Artificial Sequence
  Description of Artificial Sequence: Synthetic oligonucleotide
  Target: LAMA2; (-) strand; PAM type: NNAGAAW; PAM sequence: AAAGAAA
tagtgctgtttggtggatta

SEQ ID NO: 10022 - DNA, 20 bp, Artificial Sequence
  Description of Artificial Sequence: Synthetic oligonucleotide
  Target: LAMA2; (-) strand; PAM type: NNAGAAW; PAM sequence: TCAGAAA
agcctccactgatttaatgt

SEQ ID NO: 10023 - DNA, 20 bp, Artificial Sequence
  Description of Artificial Sequence: Synthetic oligonucleotide
  Target: LAMA2; (-) strand; PAM type: NNAGAAW; PAM sequence: AGAGAAA
ctctgactcaaaggttcttc

SEQ ID NO: 10024 - DNA, 20 bp, Artificial Sequence
  Description of Artificial Sequence: Synthetic oligonucleotide
  Target: LAMA2; (-) strand; PAM type: NNAGAAW; PAM sequence: AGAGAAA
aacctagacaggaacttaaa

SEQ ID NO: 10025 - DNA, 20 bp, Artificial Sequence
  Description of Artificial Sequence: Synthetic oligonucleotide
  Target: LAMA2; (-) strand; PAM type: NNAGAAW; PAM sequence: ATAGAAA
agctgctagagaaagttccg

SEQ ID NO: 10026 - DNA, 20 bp, Artificial Sequence
  Description of Artificial Sequence: Synthetic oligonucleotide
  Target: LAMA2; (-) strand; PAM type: NNAGAAW; PAM sequence: AGAGAAA
ccttaatgtggagagctgct

SEQ ID NO: 10027 - DNA, 20 bp, Artificial Sequence
  Description of Artificial Sequence: Synthetic oligonucleotide
  Target: LAMA2; (-) strand; PAM type: NNAGAAW; PAM sequence: GAAGAAA
acctcaaattatagggagat

SEQ ID NO: 10028 - DNA, 20 bp, Artificial Sequence
  Description of Artificial Sequence: Synthetic oligonucleotide
  Target: LAMA2; (-) strand; PAM type: NNAGAAW; PAM sequence: GAAGAAA
tttatggtaaattctacaaa

SEQ ID NO: 10029 - DNA, 20 bp, Artificial Sequence
  Description of Artificial Sequence: Synthetic oligonucleotide
  Target: LAMA2; (-) strand; PAM type: NNAGAAW; PAM sequence: TCAGAAA
attccaacctcattgctatt

SEQ ID NO: 10030 - DNA, 20 bp, Artificial Sequence
  Description of Artificial Sequence: Synthetic oligonucleotide
  Target: LAMA2; (-) strand; PAM type: NNAGAAW; PAM sequence: AGAGAAA
tagcttcagagcaagtcatt

SEQ ID NO: 10031 - DNA, 20 bp, Artificial Sequence
  Description of Artificial Sequence: Synthetic oligonucleotide
  Target: LAMA2; (-) strand; PAM type: NNAGAAW; PAM sequence: AAAGAAT
tataggaatacacagctagg

SEQ ID NO: 10032 - DNA, 20 bp, Artificial Sequence
  Description of Artificial Sequence: Synthetic oligonucleotide
  Target: LAMA2; (-) strand; PAM type: NNAGAAW; PAM sequence: ACAGAAT
aggtgggtgacctgtaatcc

SEQ ID NO: 10033 - DNA, 20 bp, Artificial Sequence
  Description of Artificial Sequence: Synthetic oligonucleotide
  Target: LAMA2; (-) strand; PAM type: NNAGAAW; PAM sequence: TTAGAAA
agtctctatgattctttttc

SEQ ID NO: 10034 - DNA, 20 bp, Artificial Sequence
  Description of Artificial Sequence: Synthetic oligonucleotide
  Target: LAMA2; (-) strand; PAM type: NNAGAAW; PAM sequence: TAAGAAA
tttaataaatttcagcataa

SEQ ID NO: 10035 - DNA, 20 bp, Artificial Sequence
  Description of Artificial Sequence: Synthetic oligonucleotide
  Target: LAMA2; (-) strand; PAM type: NNAGAAW; PAM sequence: TTAGAAT
tcttcttttctttaatttct

SEQ ID NO: 10036 - DNA, 20 bp, Artificial Sequence
  Description of Artificial Sequence: Synthetic oligonucleotide
  Target: LAMA2; (-) strand; PAM type: NNAGAAW; PAM sequence: CAAGAAA
acttacctcttccaagaata

SEQ ID NO: 10037 - DNA, 20 bp, Artificial Sequence
  Description of Artificial Sequence: Synthetic oligonucleotide
  Target: LAMA2; (-) strand; PAM type: NNAGAAW; PAM sequence: CAAGAAT
cttctttaacttacctcttc

SEQ ID NO: 10038 - DNA, 20 bp, Artificial Sequence
  Description of Artificial Sequence: Synthetic oligonucleotide
  Target: LAMA2; (-) strand; PAM type: NNAGAAW; PAM sequence: CTAGAAA
ttttttttttcctactgtca

SEQ ID NO: 10039 - DNA, 20 bp, Artificial Sequence
  Description of Artificial Sequence: Synthetic oligonucleotide
  Target: LAMA2; (-) strand; PAM type: NNAGAAW; PAM sequence: AAAGAAA
catttatatttttatcacaa

SEQ ID NO: 10040 - DNA, 20 bp, Artificial Sequence
  Description of Artificial Sequence: Synthetic oligonucleotide
  Target: LAMA2; (-) strand; PAM type: NNAGAAW; PAM sequence: TCAGAAA
aatactgctcatttgcatat

SEQ ID NO: 10041 - DNA, 20 bp, Artificial Sequence
  Description of Artificial Sequence: Synthetic oligonucleotide
  Target: LAMA2; (-) strand; PAM type: NNAGAAW; PAM sequence: CAAGAAT
cagactagacatttccttac

SEQ ID NO: 10042 - DNA, 20 bp, Artificial Sequence
  Description of Artificial Sequence: Synthetic oligonucleotide
  Target: LAMA2; (-) strand; PAM type: NNAGAAW; PAM sequence: AAAGAAT
gaaagctttcactgtaattt

SEQ ID NO: 10043 - DNA, 20 bp, Artificial Sequence
  Description of Artificial Sequence: Synthetic oligonucleotide
  Target: LAMA2; (-) strand; PAM type: NNAGAAW; PAM sequence: TCAGAAA
aataatcttaccatacctta

SEQ ID NO: 10044 - DNA, 20 bp, Artificial Sequence
  Description of Artificial Sequence: Synthetic oligonucleotide
  Target: LAMA2; (-) strand; PAM type: NNAGAAW; PAM sequence: GTAGAAA
ttgaagaagcgaggtgagct

SEQ ID NO: 10045 - DNA, 20 bp, Artificial Sequence
  Description of Artificial Sequence: Synthetic oligonucleotide
  Target: LAMA2; (-) strand; PAM type: NNAGAAW; PAM sequence: CAAGAAA
tattatttagggaataatga

SEQ ID NO: 10046 - DNA, 20 bp, Artificial Sequence
  Description of Artificial Sequence: Synthetic oligonucleotide
  Target: LAMA2; (-) strand; PAM type: NNAGAAW; PAM sequence: GGAGAAA
ctcaatatggcattatttgg

SEQ ID NO: 10047 - DNA, 20 bp, Artificial Sequence
  Description of Artificial Sequence: Synthetic oligonucleotide
  Target: LAMA2; (-) strand; PAM type: NNAGAAW; PAM sequence: AAAGAAT
aaggatgtacagatatggac

SEQ ID NO: 10048 - DNA, 20 bp, Artificial Sequence
  Description of Artificial Sequence: Synthetic oligonucleotide
  Target: LAMA2; (-) strand; PAM type: NNAGAAW; PAM sequence: TCAGAAA
tgaaagatcatgaataagta

SEQ ID NO: 10049 - DNA, 20 bp, Artificial Sequence
  Description of Artificial Sequence: Synthetic oligonucleotide
  Target: LAMA2; (-) strand; PAM type: NNAGAAW; PAM sequence: GGAGAAT
cttgagtgaatggatggatg

SEQ ID NO: 10050 - DNA, 20 bp, Artificial Sequence
  Description of Artificial Sequence: Synthetic oligonucleotide
  Target: LAMA2; (-) strand; PAM type: NNAGAAW; PAM sequence: TTAGAAT
gcctcaatggcatttttatt

SEQ ID NO: 10051 - DNA, 20 bp, Artificial Sequence
  Description of Artificial Sequence: Synthetic oligonucleotide
  Target: LAMA2; (-) strand; PAM type: NNAGAAW; PAM sequence: TCAGAAA
ataaagggggggaaacctta

SEQ ID NO: 10052 - DNA, 20 bp, Artificial Sequence
  Description of Artificial Sequence: Synthetic oligonucleotide
  Target: LAMA2; (-) strand; PAM type: NNAGAAW; PAM sequence: TGAGAAA
actgtcttgctgtgaggacc

SEQ ID NO: 10053 - DNA, 20 bp, Artificial Sequence
  Description of Artificial Sequence: Synthetic oligonucleotide
  Target: LAMA2; (-) strand; PAM type: NNAGAAW; PAM sequence: GAAGAAT
gaatcatgtttgtgccgtat

SEQ ID NO: 10054 - DNA, 20 bp, Artificial Sequence
  Description of Artificial Sequence: Synthetic oligonucleotide
  Target: LAMA2; (-) strand; PAM type: NNAGAAW; PAM sequence: AAAGAAA
gtccccaaaaatactacttg

SEQ ID NO: 10055 - DNA, 20 bp, Artificial Sequence
  Description of Artificial Sequence: Synthetic oligonucleotide
  Target: LAMA2; (-) strand; PAM type: NNAGAAW; PAM sequence: AAAGAAT
gaggttagagttaaatgtta

SEQ ID NO: 10056 - DNA, 20 bp, Artificial Sequence
  Description of Artificial Sequence: Synthetic oligonucleotide
  Target: LAMA2; (-) strand; PAM type: NNAGAAW; PAM sequence: TTAGAAT
caggtgagccagaaatgtgt

SEQ ID NO: 10057 - DNA, 20 bp, Artificial Sequence
  Description of Artificial Sequence: Synthetic oligonucleotide
  Target: LAMA2; (-) strand; PAM type: NNAGAAW; PAM sequence: CCAGAAA
tctggcacctagcaggtgag

SEQ ID NO: 10058 - DNA, 20 bp, Artificial Sequence
  Description of Artificial Sequence: Synthetic oligonucleotide
  Target: LAMA2; (-) strand; PAM type: NNAGAAW; PAM sequence: ATAGAAT
cctgggatgcttagtaagga

SEQ ID NO: 10059 - DNA, 20 bp, Artificial Sequence
  Description of Artificial Sequence: Synthetic oligonucleotide
  Target: LAMA2; (-) strand; PAM type: NNAGAAW; PAM sequence: AAAGAAT
gaaactaattctggtgtcac

SEQ ID NO: 10060 - DNA, 20 bp, Artificial Sequence
  Description of Artificial Sequence: Synthetic oligonucleotide
  Target: LAMA2; (-) strand; PAM type: NNAGAAW; PAM sequence: TGAGAAA
aaatacagcaaactctgaga

SEQ ID NO: 10061 - DNA, 20 bp, Artificial Sequence
  Description of Artificial Sequence: Synthetic oligonucleotide
  Target: LAMA2; (-) strand; PAM type: NNAGAAW; PAM sequence: AGAGAAA
aataaactacttgagtcacc

SEQ ID NO: 10062 - DNA, 20 bp, Artificial Sequence
  Description of Artificial Sequence: Synthetic oligonucleotide
  Target: LAMA2; (-) strand; PAM type: NNAGAAW; PAM sequence: AAAGAAA
tgaaccaaaccaaaattgtt

SEQ ID NO: 10063 - DNA, 20 bp, Artificial Sequence
  Description of Artificial Sequence: Synthetic oligonucleotide
  Target: LAMA2; (-) strand; PAM type: NNAGAAW; PAM sequence: AAAGAAT
gaattatctgcaaccataaa

SEQ ID NO: 10064 - DNA, 20 bp, Artificial Sequence
  Description of Artificial Sequence: Synthetic oligonucleotide
  Target: LAMA2; (-) strand; PAM type: NNAGAAW; PAM sequence: TTAGAAA
ttgagcagtaactatcaaaa

SEQ ID NO: 10065 - DNA, 20 bp, Artificial Sequence
  Description of Artificial Sequence: Synthetic oligonucleotide
  Target: LAMA2; (-) strand; PAM type: NNAGAAW; PAM sequence: CAAGAAA
ctgtaaaatgatacaaattt

SEQ ID NO: 10066 - DNA, 20 bp, Artificial Sequence
  Description of Artificial Sequence: Synthetic oligonucleotide
  Target: LAMA2; (-) strand; PAM type: NNAGAAW; PAM sequence: AAAGAAA
atgagggccctattcaaaga

SEQ ID NO: 10067 - DNA, 20 bp, Artificial Sequence
  Description of Artificial Sequence: Synthetic oligonucleotide
  Target: LAMA2; (-) strand; PAM type: NNAGAAW; PAM sequence: AAAGAAA
aatatatgagggccctattc

SEQ ID NO: 10068 - DNA, 20 bp, Artificial Sequence
  Description of Artificial Sequence: Synthetic oligonucleotide
  Target: LAMA2; (-) strand; PAM type: NNAGAAW; PAM sequence: AAAGAAA
aagaactcttgtaaatcaat

SEQ ID NO: 10069 - DNA, 20 bp, Artificial Sequence
  Description of Artificial Sequence: Synthetic oligonucleotide
  Target: LAMA2; (-) strand; PAM type: NNAGAAW; PAM sequence: GAAGAAT
caagagcaaagaattctgat

SEQ ID NO: 10070 - DNA, 20 bp, Artificial Sequence
  Description of Artificial Sequence: Synthetic oligonucleotide
  Target: LAMA2; (-) strand; PAM type: NNAGAAW; PAM sequence: AAAGAAT
cacagggacttctcaagagc

SEQ ID NO: 10071 - DNA, 20 bp, Artificial Sequence
  Description of Artificial Sequence: Synthetic oligonucleotide
  Target: LAMA2; (-) strand; PAM type: NNAGAAW; PAM sequence: TGAGAAA
tttctatgtgaaagaaaaat

SEQ ID NO: 10072 - DNA, 20 bp, Artificial Sequence
  Description of Artificial Sequence: Synthetic oligonucleotide
  Target: LAMA2; (-) strand; PAM type: NNAGAAW; PAM sequence: AAAGAAA
gtcagatcattttctatgtg

SEQ ID NO: 10073 - DNA, 20 bp, Artificial Sequence
  Description of Artificial Sequence: Synthetic oligonucleotide
  Target: LAMA2; (-) strand; PAM type: NNAGAAW; PAM sequence: AGAGAAA
attcagcacagttgacatca

SEQ ID NO: 10074 - DNA, 20 bp, Artificial Sequence
  Description of Artificial Sequence: Synthetic oligonucleotide
  Target: LAMA2; (-) strand; PAM type: NNAGAAW; PAM sequence: CAAGAAT
tcaagaagataaaaattcat

SEQ ID NO: 10075 - DNA, 20 bp, Artificial Sequence
  Description of Artificial Sequence: Synthetic oligonucleotide
  Target: LAMA2; (-) strand; PAM type: NNAGAAW; PAM sequence: CCAGAAA
atctggggtatggtgggaaa

SEQ ID NO: 10076 - DNA, 20 bp, Artificial Sequence
  Description of Artificial Sequence: Synthetic oligonucleotide
  Target: LAMA2; (-) strand; PAM type: NNAGAAW; PAM sequence: TAAGAAT
ttattgtgccctaaattact

SEQ ID NO: 10077 - DNA, 20 bp, Artificial Sequence
  Description of Artificial Sequence: Synthetic oligonucleotide
  Target: LAMA2; (-) strand; PAM type: NNAGAAW; PAM sequence: GAAGAAA
gtgattctcattttacaaaa

SEQ ID NO: 10078 - DNA, 20 bp, Artificial Sequence
  Description of Artificial Sequence: Synthetic oligonucleotide
  Target: LAMA2; (-) strand; PAM type: NNAGAAW; PAM sequence: GTAGAAT
aaaggaaaataaaacagtat

SEQ ID NO: 10079 - DNA, 20 bp, Artificial Sequence
  Description of Artificial Sequence: Synthetic oligonucleotide
  Target: LAMA2; (-) strand; PAM type: NNAGAAW; PAM sequence: CTAGAAT
cttaccttagtgggatcatt

SEQ ID NO: 10080 - DNA, 20 bp, Artificial Sequence
  Description of Artificial Sequence: Synthetic oligonucleotide
  Target: LAMA2; (-) strand; PAM type: NNAGAAW; PAM sequence: AAAGAAA
tgggaagttaagtaacgagg

SEQ ID NO: 10081 - DNA, 20 bp, Artificial Sequence
  Description of Artificial Sequence: Synthetic oligonucleotide
  Target: LAMA2; (-) strand; PAM type: NNAGAAW; PAM sequence: TTAGAAT
atttttaagtcccgccaaaa

SEQ ID NO: 10082 - DNA, 20 bp, Artificial Sequence
  Description of Artificial Sequence: Synthetic oligonucleotide
  Target: LAMA2; (-) strand; PAM type: NNAGAAW; PAM sequence: CAAGAAA
ttctctgatagacatactgt

SEQ ID NO: 10083 - DNA, 20 bp, Artificial Sequence
  Description of Artificial Sequence: Synthetic oligonucleotide
  Target: LAMA2; (-) strand; PAM type: NNAGAAW; PAM sequence: ATAGAAA
tctacctcctgcaagagatg

SEQ ID NO: 10084 - DNA, 20 bp, Artificial Sequence
  Description of Artificial Sequence: Synthetic oligonucleotide
  Target: LAMA2; (-) strand; PAM type: NNAGAAW; PAM sequence: TAAGAAT
acatatctgagttccttgac

SEQ ID NO: 10085 - DNA, 20 bp, Artificial Sequence
  Description of Artificial Sequence: Synthetic oligonucleotide
  Target: LAMA2; (-) strand; PAM type: NNAGAAW; PAM sequence: CTAGAAT
cacaaaaaaaacagatttag

SEQ ID NO: 10086 - DNA, 20 bp, Artificial Sequence
  Description of Artificial Sequence: Synthetic oligonucleotide
  Target: LAMA2; (-) strand; PAM type: NNAGAAW; PAM sequence: GAAGAAA
atattccttaaccatattaa

SEQ ID NO: 10087 - DNA, 20 bp, Artificial Sequence
  Description of Artificial Sequence: Synthetic oligonucleotide
  Target: LAMA2; (-) strand; PAM type: NNAGAAW; PAM sequence: GTAGAAA
aaagaaccaacaaaatctgg

SEQ ID NO: 10088 - DNA, 20 bp, Artificial Sequence
  Description of Artificial Sequence: Synthetic oligonucleotide
  Target: LAMA2; (-) strand; PAM type: NNAGAAW; PAM sequence: CAAGAAA
ttgttttacatagtttcttg

SEQ ID NO: 10089 - DNA, 20 bp, Artificial Sequence
  Description of Artificial Sequence: Synthetic oligonucleotide
  Target: LAMA2; (-) strand; PAM type: NNAGAAW; PAM sequence: TTAGAAA
atttaagctagttgggcatt

SEQ ID NO: 10090 - DNA, 20 bp, Artificial Sequence
  Description of Artificial Sequence: Synthetic oligonucleotide
  Target: LAMA2; (-) strand; PAM type: NNAGAAW; PAM sequence: AGAGAAA
tactgcaaaaagcaatccag

SEQ ID NO: 10091 - DNA, 20 bp, Artificial Sequence
  Description of Artificial Sequence: Synthetic oligonucleotide
  Target: LAMA2; (-) strand; PAM type: NNAGAAW; PAM sequence: AAAGAAA
ttttttgattagaaacttta

SEQ ID NO: 10092 - DNA, 20 bp, Artificial Sequence
  Description of Artificial Sequence: Synthetic oligonucleotide
  Target: LAMA2; (-) strand; PAM type: NNAGAAW; PAM sequence: TTAGAAA
catttgcattaattttttga

SEQ ID NO: 10093 - DNA, 20 bp, Artificial Sequence
  Description of Artificial Sequence: Synthetic oligonucleotide
  Target: LAMA2; (-) strand; PAM type: NNAGAAW; PAM sequence: TGAGAAA
gtcatttgcattacaatatt

SEQ ID NO: 10094 - DNA, 20 bp, Artificial Sequence
  Description of Artificial Sequence: Synthetic oligonucleotide
  Target: LAMA2; (-) strand; PAM type: NNAGAAW; PAM sequence: TCAGAAA
ataacattataatccaatca

SEQ ID NO: 10095 - DNA, 20 bp, Artificial Sequence
  Description of Artificial Sequence: Synthetic oligonucleotide
  Target: LAMA2; (-) strand; PAM type: NNAGAAW; PAM sequence: GCAGAAA
gaagaaagcacccataccag

SEQ ID NO: 10096 - DNA, 20 bp, Artificial Sequence
  Description of Artificial Sequence: Synthetic oligonucleotide
  Target: LAMA2; (-) strand; PAM type: NNAGAAW; PAM sequence: GAAGAAA
aaaatggaaaacaaaaaaaa

SEQ ID NO: 10097 - DNA, 20 bp, Artificial Sequence
  Description of Artificial Sequence: Synthetic oligonucleotide
  Target: LAMA2; (-) strand; PAM type: NNAGAAW; PAM sequence: GCAGAAA
agtaaagggatttttaaaat

SEQ ID NO: 10098 - DNA, 20 bp, Artificial Sequence
  Description of Artificial Sequence: Synthetic oligonucleotide
  Target: LAMA2; (-) strand; PAM type: NNAGAAW; PAM sequence: ATAGAAA
actgatcatctgtacacctg

SEQ ID NO: 10099 - DNA, 20 bp, Artificial Sequence
  Description of Artificial Sequence: Synthetic oligonucleotide
  Target: LAMA2; (-) strand; PAM type: NNAGAAW; PAM sequence: CCAGAAA
cctctaggggtgcaggtaaa

SEQ ID NO: 10100 - DNA, 20 bp, Artificial Sequence
  Description of Artificial Sequence: Synthetic oligonucleotide
  Target: LAMA2; (-) strand; PAM type: NNAGAAW; PAM sequence: GAAGAAA
aatcactgggtttaggctca

SEQ ID NO: 10101 - DNA, 20 bp, Artificial Sequence
  Description of Artificial Sequence: Synthetic oligonucleotide
  Target: LAMA2; (-) strand; PAM type: NNAGAAW; PAM sequence: GAAGAAA
tgtaaaactagccagcctgg

SEQ ID NO: 10102 - DNA, 20 bp, Artificial Sequence
  Description of Artificial Sequence: Synthetic oligonucleotide
  Target: LAMA2; (-) strand; PAM type: NNAGAAW; PAM sequence: AGAGAAA
ctaaaggtactatgaagaaa

SEQ ID NO: 10103 - DNA, 20 bp, Artificial Sequence
  Description of Artificial Sequence: Synthetic oligonucleotide
  Target: LAMA2; (-) strand; PAM type: NNAGAAW; PAM sequence: GAAGAAA
cctctctctaaaggtactat

SEQ ID NO: 10104 - DNA, 20 bp, Artificial Sequence
  Description of Artificial Sequence: Synthetic oligonucleotide
  Target: LAMA2; (-) strand; PAM type: NNAGAAW; PAM sequence: TTAGAAA
accttcacattcagttttag

SEQ ID NO: 10105 - DNA, 20 bp, Artificial Sequence
  Description of Artificial Sequence: Synthetic oligonucleotide
  Target: LAMA2; (-) strand; PAM type: NNAGAAW; PAM sequence: GAAGAAT
tggctttttttcttggaaag

SEQ ID NO: 10106 - DNA, 20 bp, Artificial Sequence
  Description of Artificial Sequence: Synthetic oligonucleotide
  Target: LAMA2; (-) strand; PAM type: NNAGAAW; PAM sequence: CCAGAAA
ttcttgggttgagaaaatct

SEQ ID NO: 10107 - DNA, 20 bp, Artificial Sequence
  Description of Artificial Sequence: Synthetic oligonucleotide
  Target: LAMA2; (-) strand; PAM type: NNAGAAW; PAM sequence: TGAGAAA
ttttaggtcttttcttgggt

SEQ ID NO: 10108 - DNA, 20 bp, Artificial Sequence
  Description of Artificial Sequence: Synthetic oligonucleotide
  Target: LAMA2; (-) strand; PAM type: NNAGAAW; PAM sequence: GGAGAAA
agttggttagacccatggat

SEQ ID NO: 10109 - DNA, 20 bp, Artificial Sequence
  Description of Artificial Sequence: Synthetic oligonucleotide
  Target: LAMA2; (-) strand; PAM type: NNAGAAW; PAM sequence: TAAGAAA
tattgcttaggaaataataa

SEQ ID NO: 10110 - DNA, 20 bp, Artificial Sequence
  Description of Artificial Sequence: Synthetic oligonucleotide
  Target: LAMA2; (-) strand; PAM type: NNAGAAW; PAM sequence: AAAGAAA
tatgcagaatctcaaactaa

SEQ ID NO: 10111 - DNA, 20 bp, Artificial Sequence
  Description of Artificial Sequence: Synthetic oligonucleotide
  Target: LAMA2; (-) strand; PAM type: NNAGAAW; PAM sequence: GCAGAAT
ggagagctaatagcatatat

SEQ ID NO: 10112 - DNA, 20 bp, Artificial Sequence
  Description of Artificial Sequence: Synthetic oligonucleotide
  Target: LAMA2; (-) strand; PAM type: NNAGAAW; PAM sequence: GCAGAAA
caaaagcaaatgaagtgagt

SEQ ID NO: 10113 - DNA, 20 bp, Artificial Sequence
  Description of Artificial Sequence: Synthetic oligonucleotide
  Target: LAMA2; (-) strand; PAM type: NNAGAAW; PAM sequence: AGAGAAA
actgatattctacaaacaga

SEQ ID NO: 10114 - DNA, 20 bp, Artificial Sequence
  Description of Artificial Sequence: Synthetic oligonucleotide
  Target: LAMA2; (-) strand; PAM type: NNAGAAW; PAM sequence: GTAGAAA
tttttgttttgtatttaaac

SEQ ID NO: 10115 - DNA, 20 bp, Artificial Sequence
  Description of Artificial Sequence: Synthetic oligonucleotide
  Target: LAMA2; (-) strand; PAM type: NNAGAAW; PAM sequence: AAAGAAA
ctcccctcttccctacaggg

SEQ ID NO: 10116 - DNA, 20 bp, Artificial Sequence
  Description of Artificial Sequence: Synthetic oligonucleotide
  Target: LAMA2; (-) strand; PAM type: NNAGAAW; PAM sequence: AAAGAAA
ggaatatgattcaacttgga

SEQ ID NO: 10117 - DNA, 20 bp, Artificial Sequence
  Description of Artificial Sequence: Synthetic oligonucleotide
  Target: LAMA2; (-) strand; PAM type: NNAGAAW; PAM sequence: TTAGAAT
ccaaattaaactcaaatgaa

SEQ ID NO: 10118 - DNA, 20 bp, Artificial Sequence
  Description of Artificial Sequence: Synthetic oligonucleotide
  Target: LAMA2; (-) strand; PAM type: NNAGAAW; PAM sequence: ACAGAAT
catcagcaacttactatttc

SEQ ID NO: 10119 - DNA, 20 bp, Artificial Sequence
  Description of Artificial Sequence: Synthetic oligonucleotide
  Target: LAMA2; (-) strand; PAM type: NNAGAAW; PAM sequence: CAAGAAT
cccgctctgtctgtaacctt

SEQ ID NO: 10120 - DNA, 20 bp, Artificial Sequence
  Description of Artificial Sequence: Synthetic oligonucleotide
  Target: LAMA2; (-) strand; PAM type: NNAGAAW; PAM sequence: TTAGAAT
tagacttattctcacactat

SEQ ID NO: 10121 - DNA, 20 bp, Artificial Sequence
  Description of Artificial Sequence: Synthetic oligonucleotide
  Target: LAMA2; (-) strand; PAM type: NNAGAAW; PAM sequence: TCAGAAA
caagaattccttttttttct

SEQ ID NO: 10122 - DNA, 20 bp, Artificial Sequence
  Description of Artificial Sequence: Synthetic oligonucleotide
  Target: LAMA2; (-) strand; PAM type: NNAGAAW; PAM sequence: CAAGAAT
tatatctttagggcaacata

SEQ ID NO: 10123 - DNA, 20 bp, Artificial Sequence
  Description of Artificial Sequence: Synthetic oligonucleotide
  Target: LAMA2; (-) strand; PAM type: NNAGAAW; PAM sequence: TTAGAAT
ccaacctgctgacatttgat

SEQ ID NO: 10124 - DNA, 20 bp, Artificial Sequence
  Description of Artificial Sequence: Synthetic oligonucleotide
  Target: LAMA2; (-) strand; PAM type: NNAGAAW; PAM sequence: ATAGAAA
gatatgtaagatctcttaat

SEQ ID NO: 10125 - DNA, 20 bp, Artificial Sequence
  Description of Artificial Sequence: Synthetic oligonucleotide
  Target: LAMA2; (-) strand; PAM type: NNAGAAW; PAM sequence: GAAGAAT
attcaaatatttgttgagta

SEQ ID NO: 10126 - DNA, 20 bp, Artificial Sequence
  Description of Artificial Sequence: Synthetic oligonucleotide
  Target: LAMA2; (-) strand; PAM type: NNAGAAW; PAM sequence: GCAGAAT
acatgttttgagaatgctta

SEQ ID NO: 10127 - DNA, 20 bp, Artificial Sequence
  Description of Artificial Sequence: Synthetic oligonucleotide
  Target: LAMA2; (-) strand; PAM type: NNAGAAW; PAM sequence: TGAGAAT
tacttgtctcatacatgttt

SEQ ID NO: 10128 - DNA, 20 bp, Artificial Sequence
  Description of Artificial Sequence: Synthetic oligonucleotide
  Target: LAMA2; (-) strand; PAM type: NNAGAAW; PAM sequence: TTAGAAA
tggagggaggcgctctaatg

SEQ ID NO: 10129 - DNA, 20 bp, Artificial Sequence
  Description of Artificial Sequence: Synthetic oligonucleotide
  Target: LAMA2; (-) strand; PAM type: NNAGAAW; PAM sequence: GAAGAAT
ggtaagactcttctaaatat

SEQ ID NO: 10130 - DNA, 20 bp, Artificial Sequence
  Description of Artificial Sequence: Synthetic oligonucleotide
  Target: LAMA2; (-) strand; PAM type: NNAGAAW; PAM sequence: CCAGAAA
gaagtgaaaaatcactttct

SEQ ID NO: 10131 - DNA, 20 bp, Artificial Sequence
  Description of Artificial Sequence: Synthetic oligonucleotide
  Target: LAMA2; (-) strand; PAM type: NNAGAAW; PAM sequence: GAAGAAT
gtctttttcatgttacatta

SEQ ID NO: 10132 - DNA, 20 bp, Artificial Sequence
  Description of Artificial Sequence: Synthetic oligonucleotide
  Target: LAMA2; (-) strand; PAM type: NNAGAAW; PAM sequence: CCAGAAT
gtctgcactgctaaagactg

SEQ ID NO: 10133 - DNA, 20 bp, Artificial Sequence
  Description of Artificial Sequence: Synthetic oligonucleotide
  Target: LAMA2; (-) strand; PAM type: NNAGAAW; PAM sequence: CTAGAAA
tattaacctatttttgtata

SEQ ID NO: 10134 - DNA, 20 bp, Artificial Sequence
  Description of Artificial Sequence: Synthetic oligonucleotide
  Target: LAMA2; (-) strand; PAM type: NNAGAAW; PAM sequence: AAAGAAA
ctgtattagagcctgtgggt

SEQ ID NO: 10135 - DNA, 20 bp, Artificial Sequence
  Description of Artificial Sequence: Synthetic oligonucleotide
  Target: LAMA2; (-) strand; PAM type: NNAGAAW; PAM sequence: ATAGAAT
taataaattcacacatttta

SEQ ID NO: 10136 - DNA, 20 bp, Artificial Sequence
  Description of Artificial Sequence: Synthetic oligonucleotide
  Target: LAMA2; (-) strand; PAM type: NNAGAAW; PAM sequence: CCAGAAA
gtacacacacacaaacatat

SEQ ID NO: 10137 - DNA, 20 bp, Artificial Sequence
  Description of Artificial Sequence: Synthetic oligonucleotide
  Target: LAMA2; (-) strand; PAM type: NNAGAAW; PAM sequence: AAAGAAA
caaaaaaataactctttatg

SEQ ID NO: 10138 - DNA, 20 bp, Artificial Sequence
  Description of Artificial Sequence: Synthetic oligonucleotide
  Target: LAMA2; (-) strand; PAM type: NNAGAAW; PAM sequence: AAAGAAA
ctactcagcaatttctttca

SEQ ID NO: 10139 - DNA, 20 bp, Artificial Sequence
  Description of Artificial Sequence: Synthetic oligonucleotide
  Target: LAMA2; (-) strand; PAM type: NNAGAAW; PAM sequence: AGAGAAA
aaattttgatatgttcgtgc

SEQ ID NO: 10140 - DNA, 20 bp, Artificial Sequence
  Description of Artificial Sequence: Synthetic oligonucleotide
  Target: LAMA2; (-) strand; PAM type: NNAGAAW; PAM sequence: GGAGAAT
gatcctaatttctatcaaca

SEQ ID NO: 10141 - DNA, 20 bp, Artificial Sequence
  Description of Artificial Sequence: Synthetic oligonucleotide
  Target: LAMA2; (-) strand; PAM type: NNAGAAW; PAM sequence: ATAGAAT
catcaaatattagagatgat

SEQ ID NO: 10142 - DNA, 20 bp, Artificial Sequence
  Description of Artificial Sequence: Synthetic oligonucleotide
  Target: LAMA2; (-) strand; PAM type: NNAGAAW; PAM sequence: CTAGAAA
aaaaatagataactgaggtt

SEQ ID NO: 10143 - DNA, 20 bp, Artificial Sequence
  Description of Artificial Sequence: Synthetic oligonucleotide
  Target: LAMA2; (-) strand; PAM type: NNAGAAW; PAM sequence: ATAGAAA
caagttgattctaaaattgt

SEQ ID NO: 10144 - DNA, 20 bp, Artificial Sequence
  Description of Artificial Sequence: Synthetic oligonucleotide
  Target: LAMA2; (-) strand; PAM type: NNAGAAW; PAM sequence: ATAGAAA
cactgacatgaataaagaag

SEQ ID NO: 10145 - DNA, 20 bp, Artificial Sequence
  Description of Artificial Sequence: Synthetic oligonucleotide
  Target: LAMA2; (-) strand; PAM type: NNAGAAW; PAM sequence: AAAGAAA
gaagttatttaaaaaaaaaa

SEQ ID NO: 10146 - DNA, 20 bp, Artificial Sequence
  Description of Artificial Sequence: Synthetic oligonucleotide
  Target: LAMA2; (-) strand; PAM type: NNAGAAW; PAM sequence: AGAGAAA
ttgccatgaaccatgcttac

SEQ ID NO: 10147 - DNA, 20 bp, Artificial Sequence
  Description of Artificial Sequence: Synthetic oligonucleotide
  Target: LAMA2; (-) strand; PAM type: NNAGAAW; PAM sequence: GAAGAAA
ctctgttgccatttgaatta

SEQ ID NO: 10148 - DNA, 20 bp, Artificial Sequence
  Description of Artificial Sequence: Synthetic oligonucleotide
  Target: LAMA2; (-) strand; PAM type: NNAGAAW; PAM sequence: GGAGAAA
taaatgagtgcagcagagtt

SEQ ID NO: 10149 - DNA, 20 bp, Artificial Sequence
  Description of Artificial Sequence: Synthetic oligonucleotide
  Target: LAMA2; (-) strand; PAM type: NNAGAAW; PAM sequence: GGAGAAA
ctgacggttaaaccatcgga

SEQ ID NO: 10150 - DNA, 20 bp, Artificial Sequence
  Description of Artificial Sequence: Synthetic oligonucleotide
  Target: LAMA2; (-) strand; PAM type: NNAGAAW; PAM sequence: TGAGAAT
agcccccagactcacagcgt

SEQ ID NO: 10151 - DNA, 20 bp, Artificial Sequence
  Description of Artificial Sequence: Synthetic oligonucleotide
  Target: LAMA2; (-) strand; PAM type: NNAGAAW; PAM sequence: TCAGAAT
gagcagttttgaagctaatg

SEQ ID NO: 10152 - DNA, 20 bp, Artificial Sequence
  Description of Artificial Sequence: Synthetic oligonucleotide
  Target: LAMA2; (-) strand; PAM type: NNAGAAW; PAM sequence: CAAGAAA
aagagcaaaaacatcctcat

SEQ ID NO: 10153 - DNA, 20 bp, Artificial Sequence
  Description of Artificial Sequence: Synthetic oligonucleotide
  Target: LAMA2; (-) strand; PAM type: NNAGAAW; PAM sequence: ACAGAAA
gtggtctgtgccacctgcac

SEQ ID NO: 10154 - DNA, 20 bp, Artificial Sequence
  Description of Artificial Sequence: Synthetic oligonucleotide
  Target: LAMA2; (-) strand; PAM type: NNAGAAW; PAM sequence: ACAGAAA
aagccagctggtttcgagaa

SEQ ID NO: 10155 - DNA, 20 bp, Artificial Sequence
  Description of Artificial Sequence: Synthetic oligonucleotide
  Target: LAMA2; (-) strand; PAM type: NNAGAAW; PAM sequence: CGAGAAA
ctgaagaagccagctggttt

SEQ ID NO: 10156 - DNA, 20 bp, Artificial Sequence
  Description of Artificial Sequence: Synthetic oligonucleotide
  Target: LAMA2; (-) strand; PAM type: NNAGAAW; PAM sequence: ATAGAAT
aagcccagctacgccggaca

SEQ ID NO: 10157 - DNA, 20 bp, Artificial Sequence
  Description of Artificial Sequence: Synthetic oligonucleotide
  Target: LAMA2; (-) strand; PAM type: NNAGAAW; PAM sequence: GGAGAAA
tcatagaagaagatgaccag

SEQ ID NO: 10158 - DNA, 20 bp, Artificial Sequence
  Description of Artificial Sequence: Synthetic oligonucleotide
  Target: LAMA2; (-) strand; PAM type: NNAGAAW; PAM sequence: TCAGAAA
cagactccgaccagaaaaag

SEQ ID NO: 10159 - DNA, 20 bp, Artificial Sequence
  Description of Artificial Sequence: Synthetic oligonucleotide
  Target: LAMA2; (-) strand; PAM type: NNAGAAW; PAM sequence: CCAGAAA
gggatgaaatcagactccga

SEQ ID NO: 10160 - DNA, 20 bp, Artificial Sequence
  Description of Artificial Sequence: Synthetic oligonucleotide
  Target: LAMA2; (-) strand; PAM type: NNAGAAW; PAM sequence: ACAGAAT
atcatttctcgtgttcaagg

SEQ ID NO: 10161 - DNA, 20 bp, Artificial Sequence
  Description of Artificial Sequence: Synthetic oligonucleotide
  Target: LAMA2; (-) strand; PAM type: NNAGAAW; PAM sequence: CAAGAAA
caagtgcttgcgatctttta

SEQ ID NO: 10162 - DNA, 20 bp, Artificial Sequence
  Description of Artificial Sequence: Synthetic oligonucleotide
  Target: LAMA2; (-) strand; PAM type: NNAGAAW; PAM sequence: TAAGAAA
gccacatcttggaggagtcg

SEQ ID NO: 10163 - DNA, 20 bp, Artificial Sequence
  Description of Artificial Sequence: Synthetic oligonucleotide
  Target: LAMA2; (-) strand; PAM type: NNAGAAW; PAM sequence: GGAGAAA
agcataggtcaaagctgttt

SEQ ID NO: 10164 - DNA, 20 bp, Artificial Sequence
  Description of Artificial Sequence: Synthetic oligonucleotide
  Target: LAMA2; (-) strand; PAM type: NNAGAAW; PAM sequence: AAAGAAA
ttaaaactactagaattaat

SEQ ID NO: 10165 - DNA, 20 bp, Artificial Sequence
  Description of Artificial Sequence: Synthetic oligonucleotide
  Target: LAMA2; (-) strand; PAM type: NNAGAAW; PAM sequence: CTAGAAT
aagcatgtagtttaaaacta

SEQ ID NO: 10166 - DNA, 20 bp, Artificial Sequence
  Description of Artificial Sequence: Synthetic oligonucleotide
  Target: LAMA2; (-) strand; PAM type: NNAGAAW; PAM sequence: GGAGAAA
gtccccgttaacagaataaa

SEQ ID NO: 10167 - DNA, 20 bp, Artificial Sequence
  Description of Artificial Sequence: Synthetic oligonucleotide
  Target: LAMA2; (-) strand; PAM type: NNAGAAW; PAM sequence: ACAGAAT
tgcataaattgtccccgtta

SEQ ID NO: 10168 - DNA, 20 bp, Artificial Sequence
  Description of Artificial Sequence: Synthetic oligonucleotide
  Target: LAMA2; (-) strand; PAM type: NNAGAAW; PAM sequence: TAAGAAA
aaaacctgacaaaaacatta

SEQ ID NO: 10169 - DNA, 20 bp, Artificial Sequence
  Description of Artificial Sequence: Synthetic oligonucleotide
  Target: LAMA2; (-) strand; PAM type: NNAGAAW; PAM sequence: TTAGAAA
aattttaatctgaagttact

SEQ ID NO: 10170 - DNA, 20 bp, Artificial Sequence
  Description of Artificial Sequence: Synthetic oligonucleotide
  Target: LAMA2; (-) strand; PAM type: NNAGAAW; PAM sequence: AGAGAAT
aattttatcaagcattttaa

SEQ ID NO: 10171 - DNA, 20 bp, Artificial Sequence
  Description of Artificial Sequence: Synthetic oligonucleotide
  Target: LAMA2; (-) strand; PAM type: NNAGAAW; PAM sequence: GAAGAAA
aaatagccaatacaatgcac

SEQ ID NO: 10172 - DNA, 20 bp, Artificial Sequence
  Description of Artificial Sequence: Synthetic oligonucleotide
  Target: LAMA2; (-) strand; PAM type: NNAGAAW; PAM sequence: GGAGAAA
aacataagtgatcaataaaa

SEQ ID NO: 10173 - DNA, 20 bp, Artificial Sequence
  Description of Artificial Sequence: Synthetic oligonucleotide
  Target: LAMA2; (-) strand; PAM type: NNAGAAW; PAM sequence: ACAGAAT
tgaataatataataaataga

SEQ ID NO: 10174 - DNA, 20 bp, Artificial Sequence
  Description of Artificial Sequence: Synthetic oligonucleotide
  Target: LAMA2; (-) strand; PAM type: NNAGAAW; PAM sequence: AAAGAAA
ttccaaattgataggtagaa

SEQ ID NO: 10175 - DNA, 20 bp, Artificial Sequence
  Description of Artificial Sequence: Synthetic oligonucleotide
  Target: LAMA2; (-) strand; PAM type: NNAGAAW; PAM sequence: GTAGAAA
ttaactttccaaattgatag

SEQ ID NO: 10176 - DNA, 20 bp, Artificial Sequence
  Description of Artificial Sequence: Synthetic oligonucleotide
  Target: LAMA2; (-) strand; PAM type: NNAGAAW; PAM sequence: GAAGAAA
taaaagtttatatgataaaa

SEQ ID NO: 10177 - DNA, 20 bp, Artificial Sequence
  Description of Artificial Sequence: Synthetic oligonucleotide
  Target: LAMA2; (-) strand; PAM type: NNAGAAW; PAM sequence: TGAGAAA
ataaagcattcctgaattca

SEQ ID NO: 10178 - DNA, 20 bp, Artificial Sequence
  Description of Artificial Sequence: Synthetic oligonucleotide
  Target: LAMA2; (-) strand; PAM type: NNAGAAW; PAM sequence: AGAGAAA
ttaacaaaaaataaatcaca

SEQ ID NO: 10179 - DNA, 20 bp, Artificial Sequence
  Description of Artificial Sequence: Synthetic oligonucleotide
  Target: LAMA2; (-) strand; PAM type: NNAGAAW; PAM sequence: GTAGAAA
tcagatcataaacatccagt

SEQ ID NO: 10180 - DNA, 20 bp, Artificial Sequence
  Description of Artificial Sequence: Synthetic oligonucleotide
  Target: LAMA2; (-) strand; PAM type: NNAGAAW; PAM sequence: AAAGAAA
aagaaatactgaaaaaaatg

SEQ ID NO: 10181 - DNA, 20 bp, Artificial Sequence
  Description of Artificial Sequence: Synthetic oligonucleotide
  Target: LAMA2; (-) strand; PAM type: NNAGAAW; PAM sequence: GAAGAAA
aacagtgcttcaaagaacag

SEQ ID NO: 10182 - DNA, 20 bp, Artificial Sequence
  Description of Artificial Sequence: Synthetic oligonucleotide
  Target: LAMA2; (-) strand; PAM type: NNAGAAW; PAM sequence: TCAGAAA
aggttgaaagttaaacaaaa

SEQ ID NO: 10183 - DNA, 20 bp, Artificial Sequence
  Description of Artificial Sequence: Synthetic oligonucleotide
  Target: LAMA2; (-) strand; PAM type: NNAGAAW; PAM sequence: TAAGAAA
tccatctattttactcttta

SEQ ID NO: 10184 - DNA, 20 bp, Artificial Sequence
  Description of Artificial Sequence: Synthetic oligonucleotide
  Target: LAMA2; (-) strand; PAM type: NNAGAAW; PAM sequence: GAAGAAT
cataaaagtagacagaaaag

SEQ ID NO: 10185 - DNA, 20 bp, Artificial Sequence
  Description of Artificial Sequence: Synthetic oligonucleotide
  Target: LAMA2; (-) strand; PAM type: NNAGAAW; PAM sequence: ACAGAAA
tttgtttaacataaaagtag

SEQ ID NO: 10186 - DNA, 20 bp, Artificial Sequence
  Description of Artificial Sequence: Synthetic oligonucleotide
  Target: LAMA2; (-) strand; PAM type: NNAGAAW; PAM sequence: ATAGAAA
ctaagtgaattaatgcaaga

SEQ ID NO: 10187 - DNA, 20 bp, Artificial Sequence
  Description of Artificial Sequence: Synthetic oligonucleotide
  Target: LAMA2; (-) strand; PAM type: NNAGAAW; PAM sequence: CAAGAAT
ttatcctaagtgaattaatg

SEQ ID NO: 10188 - DNA, 20 bp, Artificial Sequence
  Description of Artificial Sequence: Synthetic oligonucleotide
  Target: LAMA2; (-) strand; PAM type: NNAGAAW; PAM sequence: AAAGAAT
gaatactacacagccataaa

SEQ ID NO: 10189 - DNA, 20 bp, Artificial Sequence
  Description of Artificial Sequence: Synthetic oligonucleotide
  Target: LAMA2; (-) strand; PAM type: NNAGAAW; PAM sequence: AAAGAAA
ccatcattggtggactgaat

SEQ ID NO: 10190 - DNA, 20 bp, Artificial Sequence
  Description of Artificial Sequence: Synthetic oligonucleotide
  Target: LAMA2; (-) strand; PAM type: NNAGAAW; PAM sequence: AGAGAAA
acagatactggtgaggttgc

SEQ ID NO: 10191 - DNA, 20 bp, Artificial Sequence
  Description of Artificial Sequence: Synthetic oligonucleotide
  Target: LAMA2; (-) strand; PAM type: NNAGAAW; PAM sequence: TGAGAAA
attttcagataaagggaagt

SEQ ID NO: 10192 - DNA, 20 bp, Artificial Sequence
  Description of Artificial Sequence: Synthetic oligonucleotide
  Target: LAMA2; (-) strand; PAM type: NNAGAAW; PAM sequence: GAAGAAA
tctttaaagtgctaaacaaa

SEQ ID NO: 10193 - DNA, 20 bp, Artificial Sequence
  Description of Artificial Sequence: Synthetic oligonucleotide
  Target: LAMA2; (-) strand; PAM type: NNAGAAW; PAM sequence: CCAGAAA
gtcataaggatgaatgaaat

SEQ ID NO: 10194 - DNA, 20 bp, Artificial Sequence
  Description of Artificial Sequence: Synthetic oligonucleotide
  Target: LAMA2; (-) strand; PAM type: NNAGAAW; PAM sequence: AAAGAAA
aagatatatatatatagaac

SEQ ID NO: 10195 - DNA, 20 bp, Artificial Sequence
  Description of Artificial Sequence: Synthetic oligonucleotide
  Target: LAMA2; (-) strand; PAM type: NNAGAAW; PAM sequence: CTAGAAA
gcacacatgcagctggagtc

SEQ ID NO: 10196 - DNA, 20 bp, Artificial Sequence
  Description of Artificial Sequence: Synthetic oligonucleotide
  Target: LAMA2; (-) strand; PAM type: NNAGAAW; PAM sequence: AAAGAAA
atccaatctaaagaacggag

SEQ ID NO: 10197 - DNA, 20 bp, Artificial Sequence
  Description of Artificial Sequence: Synthetic oligonucleotide
  Target: LAMA2; (-) strand; PAM type: NNAGAAW; PAM sequence: GGAGAAA
aatgatccaatctaaagaac

SEQ ID NO: 10198 - DNA, 20 bp, Artificial Sequence
  Description of Artificial Sequence: Synthetic oligonucleotide
  Target: LAMA2; (-) strand; PAM type: NNAGAAW; PAM sequence: TGAGAAT
aaccactgtgcccggcctaa

SEQ ID NO: 10199 - DNA, 20 bp, Artificial Sequence
  Description of Artificial Sequence: Synthetic oligonucleotide
  Target: LAMA2; (-) strand; PAM type: NNAGAAW; PAM sequence: TGAGAAT
attgttaaaagtaaatataa

SEQ ID NO: 10200 - DNA, 20 bp, Artificial Sequence
  Description of Artificial Sequence: Synthetic oligonucleotide
  Target: LAMA2; (-) strand; PAM type: NNAGAAW; PAM sequence: CCAGAAA
ctgtaaggaacataagaact

SEQ ID NO: 10201 - DNA, 20 bp, Artificial Sequence
  Description of Artificial Sequence: Synthetic oligonucleotide
  Target: LAMA2; (-) strand; PAM type: NNAGAAW; PAM sequence: AGAGAAA
gtgaaggtatggagtatttc

SEQ ID NO: 10202 - DNA, 20 bp, Artificial Sequence
  Description of Artificial Sequence: Synthetic oligonucleotide
  Target: LAMA2; (-) strand; PAM type: NNAGAAW; PAM sequence: CGAGAAT
gtaagttctgtaaatatgtc

SEQ ID NO: 10203 - DNA, 20 bp, Artificial Sequence
  Description of Artificial Sequence: Synthetic oligonucleotide
  Target: LAMA2; (-) strand; PAM type: NNAGAAW; PAM sequence: AAAGAAA
tactgtattagatatacagg

SEQ ID NO: 10204 - DNA, 20 bp, Artificial Sequence
  Description of Artificial Sequence: Synthetic oligonucleotide
  Target: LAMA2; (-) strand; PAM type: NNAGAAW; PAM sequence: ATAGAAA
agtcccatcacaggtatcag

SEQ ID NO: 10205 - DNA, 20 bp, Artificial Sequence
  Description of Artificial Sequence: Synthetic oligonucleotide
  Target: LAMA2; (-) strand; PAM type: NNAGAAW; PAM sequence: CCAGAAA
aaaatattaaatggaaaact

SEQ ID NO: 10206 - DNA, 20 bp, Artificial Sequence
  Description of Artificial Sequence: Synthetic oligonucleotide
  Target: LAMA2; (-) strand; PAM type: NNAGAAW; PAM sequence: ACAGAAA
aaactcttcagaggaacata

SEQ ID NO: 10207 - DNA, 20 bp, Artificial Sequence
  Description of Artificial Sequence: Synthetic oligonucleotide
  Target: LAMA2; (-) strand; PAM type: NNAGAAW; PAM sequence: TTAGAAA
cagactttaagttaactaca

SEQ ID NO: 10208 - DNA, 20 bp, Artificial Sequence
  Description of Artificial Sequence: Synthetic oligonucleotide
  Target: LAMA2; (-) strand; PAM type: NNAGAAW; PAM sequence: AGAGAAT
tgctaccaaccataaagtaa

SEQ ID NO: 10209 - DNA, 20 bp, Artificial Sequence
  Description of Artificial Sequence: Synthetic oligonucleotide
  Target: LAMA2; (-) strand; PAM type: NNAGAAW; PAM sequence: ACAGAAT
ttatgaagttgggactgtgc

SEQ ID NO: 10210 - DNA, 20 bp, Artificial Sequence
  Description of Artificial Sequence: Synthetic oligonucleotide
  Target: LAMA2; (-) strand; PAM type: NNAGAAW; PAM sequence: CAAGAAA
aaaaaactaaattatttgcc

SEQ ID NO: 10211 - DNA, 20 bp, Artificial Sequence
  Description of Artificial Sequence: Synthetic oligonucleotide
  Target: LAMA2; (-) strand; PAM type: NNAGAAW; PAM sequence: ATAGAAT
cttacacaaaagtaaagata

SEQ ID NO: 10212 - DNA, 20 bp, Artificial Sequence
  Description of Artificial Sequence: Synthetic oligonucleotide
  Target: LAMA2; (-) strand; PAM type: NNAGAAW; PAM sequence: TAAGAAT
gcaaattattgagaaaacta

SEQ ID NO: 10213 - DNA, 20 bp, Artificial Sequence
  Description of Artificial Sequence: Synthetic oligonucleotide
  Target: LAMA2; (-) strand; PAM type: NNAGAAW; PAM sequence: TGAGAAA
aatacagagcagcaaattat

SEQ ID NO: 10214 - DNA, 20 bp, Artificial Sequence
  Description of Artificial Sequence: Synthetic oligonucleotide
  Target: LAMA2; (-) strand; PAM type: NNAGAAW; PAM sequence: ATAGAAA
aatgaatttaacgaagtgta

SEQ ID NO: 10215 - DNA, 20 bp, Artificial Sequence
  Description of Artificial Sequence: Synthetic oligonucleotide
  Target: LAMA2; (-) strand; PAM type: NNAGAAW; PAM sequence: AAAGAAT
cgctaatacactgatagatt

SEQ ID NO: 10216 - DNA, 20 bp, Artificial Sequence
  Description of Artificial Sequence: Synthetic oligonucleotide
  Target: LAMA2; (-) strand; PAM type: NNAGAAW; PAM sequence: TAAGAAA
caggtaacaagaattgtacc

SEQ ID NO: 10217 - DNA, 20 bp, Artificial Sequence
  Description of Artificial Sequence: Synthetic oligonucleotide
  Target: LAMA2; (-) strand; PAM type: NNAGAAW; PAM sequence: CAAGAAT
tttataaagaaagcaggtaa

SEQ ID NO: 10218 - DNA, 20 bp, Artificial Sequence
  Description of Artificial Sequence: Synthetic oligonucleotide
  Target: LAMA2; (-) strand; PAM type: NNAGAAW; PAM sequence: AAAGAAA
tgataatcctacagttttat

SEQ ID NO: 10219 - DNA, 20 bp, Artificial Sequence
  Description of Artificial Sequence: Synthetic oligonucleotide
  Target: LAMA2; (-) strand; PAM type: NNAGAAW; PAM sequence: AGAGAAA
tgatttacttgtaaacacaa

SEQ ID NO: 10220 - DNA, 20 bp, Artificial Sequence
  Description of Artificial Sequence: Synthetic oligonucleotide
  Target: LAMA2; (-) strand; PAM type: NNAGAAW; PAM sequence: ACAGAAA
aaatttttgtatgcattatg

SEQ ID NO: 10221 - DNA, 20 bp, Artificial Sequence
  Description of Artificial Sequence: Synthetic oligonucleotide
  Target: LAMA2; (-) strand; PAM type: NNAGAAW; PAM sequence: TCAGAAA
taaagttaagaggagcaata

SEQ ID NO: 10222 - DNA, 20 bp, Artificial Sequence
  Description of Artificial Sequence: Synthetic oligonucleotide
  Target: LAMA2; (-) strand; PAM type: NNAGAAW; PAM sequence: AGAGAAA
aggtgctgaagccagacttc

SEQ ID NO: 10223 - DNA, 20 bp, Artificial Sequence
  Description of Artificial Sequence: Synthetic oligonucleotide
  Target: LAMA2; (-) strand; PAM type: NNAGAAW; PAM sequence: TAAGAAT
ttattttatttctttactat

SEQ ID NO: 10224 - DNA, 20 bp, Artificial Sequence
  Description of Artificial Sequence: Synthetic oligonucleotide
  Target: LAMA2; (-) strand; PAM type: NNAGAAW; PAM sequence: TAAGAAA
ccaacaatgatagactggat

SEQ ID NO: 10225 - DNA, 20 bp, Artificial Sequence
  Description of Artificial Sequence: Synthetic oligonucleotide
  Target: LAMA2; (-) strand; PAM type: NNAGAAW; PAM sequence: GGAGAAA
acaggtgctggagaggatgt

SEQ ID NO: 10226 - DNA, 20 bp, Artificial Sequence
  Description of Artificial Sequence: Synthetic oligonucleotide
  Target: LAMA2; (-) strand; PAM type: NNAGAAW; PAM sequence: TTAGAAT
gagataccatctcacaccag

SEQ ID NO: 10227 - DNA, 20 bp, Artificial Sequence
  Description of Artificial Sequence: Synthetic oligonucleotide
  Target: LAMA2; (-) strand; PAM type: NNAGAAW; PAM sequence: AGAGAAA
gctcatcatcactggccatc

SEQ ID NO: 10228 - DNA, 20 bp, Artificial Sequence
  Description of Artificial Sequence: Synthetic oligonucleotide
  Target: LAMA2; (-) strand; PAM type: NNAGAAW; PAM sequence: CAAGAAA
aatgaactcaaacaaattta

SEQ ID NO: 10229 - DNA, 20 bp, Artificial Sequence
  Description of Artificial Sequence: Synthetic oligonucleotide
  Target: LAMA2; (-) strand; PAM type: NNAGAAW; PAM sequence: CCAGAAT
atctgacaaagggctaatat

SEQ ID NO: 10230 - DNA, 20 bp, Artificial Sequence
  Description of Artificial Sequence: Synthetic oligonucleotide
  Target: LAMA2; (-) strand; PAM type: NNAGAAW; PAM sequence: GGAGAAA
aacaggcaacctacaaaatg

SEQ ID NO: 10231 - DNA, 20 bp, Artificial Sequence
  Description of Artificial Sequence: Synthetic oligonucleotide
  Target: LAMA2; (-) strand; PAM type: NNAGAAW; PAM sequence: AAAGAAA
taaagagcttctgcacagca

SEQ ID NO: 10232 - DNA, 20 bp, Artificial Sequence
  Description of Artificial Sequence: Synthetic oligonucleotide
  Target: LAMA2; (-) strand; PAM type: NNAGAAW; PAM sequence: GAAGAAA
ctaaaaccataaaaacccta

SEQ ID NO: 10233 - DNA, 20 bp, Artificial Sequence
  Description of Artificial Sequence: Synthetic oligonucleotide
  Target: LAMA2; (-) strand; PAM type: NNAGAAW; PAM sequence: GTAGAAA
ggagaactggctagccatat

SEQ ID NO: 10234 - DNA, 20 bp, Artificial Sequence
  Description of Artificial Sequence: Synthetic oligonucleotide
  Target: LAMA2; (-) strand; PAM type: NNAGAAW; PAM sequence: TGAGAAA
tacctgatctttgacaaacc

SEQ ID NO: 10235 - DNA, 20 bp, Artificial Sequence
  Description of Artificial Sequence: Synthetic oligonucleotide
  Target: LAMA2; (-) strand; PAM type: NNAGAAW; PAM sequence: TCAGAAA
aatggaacagaacagagccc

SEQ ID NO: 10236 - DNA, 20 bp, Artificial Sequence
  Description of Artificial Sequence: Synthetic oligonucleotide
  Target: LAMA2; (-) strand; PAM type: NNAGAAW; PAM sequence: ACAGAAT
agctaccaatgcctttcttc

SEQ ID NO: 10237 - DNA, 20 bp, Artificial Sequence
  Description of Artificial Sequence: Synthetic oligonucleotide
  Target: LAMA2; (-) strand; PAM type: NNAGAAW; PAM sequence: GAAGAAT
cattccatgctcatgggtag

SEQ ID NO: 10238 - DNA, 20 bp, Artificial Sequence
  Description of Artificial Sequence: Synthetic oligonucleotide
  Target: LAMA2; (-) strand; PAM type: NNAGAAW; PAM sequence: AGAGAAT
cccattcacaattgcttcaa

SEQ ID NO: 10239 - DNA, 20 bp, Artificial Sequence
  Description of Artificial Sequence: Synthetic oligonucleotide
  Target: LAMA2; (-) strand; PAM type: NNAGAAW; PAM sequence: CTAGAAA
cagacgacatgattgtatat

SEQ ID NO: 10240 - DNA, 20 bp, Artificial Sequence
  Description of Artificial Sequence: Synthetic oligonucleotide
  Target: LAMA2; (-) strand; PAM type: NNAGAAW; PAM sequence: ACAGAAT
aaacccacagccagtatcat

SEQ ID NO: 10241 - DNA, 20 bp, Artificial Sequence
  Description of Artificial Sequence: Synthetic oligonucleotide
  Target: LAMA2; (-) strand; PAM type: NNAGAAW; PAM sequence: GCAGAAA
acatgattatctcaatagat

SEQ ID NO: 10242 - DNA, 20 bp, Artificial Sequence
  Description of Artificial Sequence: Synthetic oligonucleotide
  Target: LAMA2; (-) strand; PAM type: NNAGAAW; PAM sequence: AGAGAAT
ggcagagacacaaccaaaaa

SEQ ID NO: 10243 - DNA, 20 bp, Artificial Sequence
  Description of Artificial Sequence: Synthetic oligonucleotide
  Target: LAMA2; (-) strand; PAM type: NNAGAAW; PAM sequence: ATAGAAA
ttctgaaactattccaatca

SEQ ID NO: 10244 - DNA, 20 bp, Artificial Sequence
  Description of Artificial Sequence: Synthetic oligonucleotide
  Target: LAMA2; (-) strand; PAM type: NNAGAAW; PAM sequence: GAAGAAA
caaataaactagaaaatcta

SEQ ID NO: 10245 - DNA, 20 bp, Artificial Sequence
  Description of Artificial Sequence: Synthetic oligonucleotide
  Target: LAMA2; (-) strand; PAM type: NNAGAAW; PAM sequence: CTAGAAA
aacacctctatgcaaataaa

SEQ ID NO: 10246 - DNA, 20 bp, Artificial Sequence
  Description of Artificial Sequence: Synthetic oligonucleotide
  Target: LAMA2; (-) strand; PAM type: NNAGAAW; PAM sequence: AGAGAAT
cagaaatacaaactaaaatc

SEQ ID NO: 10247 - DNA, 20 bp, Artificial Sequence
  Description of Artificial Sequence: Synthetic oligonucleotide
  Target: LAMA2; (-) strand; PAM type: NNAGAAW; PAM sequence: ACAGAAA
gggatatcaccacggatccc

SEQ ID NO: 10248 - DNA, 20 bp, Artificial Sequence
  Description of Artificial Sequence: Synthetic oligonucleotide
  Target: LAMA2; (-) strand; PAM type: NNAGAAW; PAM sequence: GAAGAAT
ctaataaagaaaaaaagaga

SEQ ID NO: 10249 - DNA, 20 bp, Artificial Sequence
  Description of Artificial Sequence: Synthetic oligonucleotide
  Target: LAMA2; (-) strand; PAM type: NNAGAAW; PAM sequence: AAAGAAA
agaccgctagcaagactaat

SEQ ID NO: 10250 - DNA, 20 bp, Artificial Sequence
  Description of Artificial Sequence: Synthetic oligonucleotide
  Target: LAMA2; (-) strand; PAM type: NNAGAAW; PAM sequence: CAAGAAA
attcaaaagctagcagaagg

SEQ ID NO: 10251 - DNA, 20 bp, Artificial Sequence
  Description of Artificial Sequence: Synthetic oligonucleotide
  Target: LAMA2; (-) strand; PAM type: NNAGAAW; PAM sequence: CTAGAAA
taacatcacaattaaaagaa

SEQ ID NO: 10252 - DNA, 20 bp, Artificial Sequence
  Description of Artificial Sequence: Synthetic oligonucleotide
  Target: LAMA2; (-) strand; PAM type: NNAGAAW; PAM sequence: AGAGAAA
tatagcactaaatgcccaca

SEQ ID NO: 10253 - DNA, 20 bp, Artificial Sequence
  Description of Artificial Sequence: Synthetic oligonucleotide
  Target: LAMA2; (-) strand; PAM type: NNAGAAW; PAM sequence: CCAGAAT
gagaacaaagacacaacata

SEQ ID NO: 10254 - DNA, 20 bp, Artificial Sequence
  Description of Artificial Sequence: Synthetic oligonucleotide
  Target: LAMA2; (-) strand; PAM type: NNAGAAW; PAM sequence: GCAGAAA
gggtacataacgaaatgaag

SEQ ID NO: 10255 - DNA, 20 bp, Artificial Sequence
  Description of Artificial Sequence: Synthetic oligonucleotide
  Target: LAMA2; (-) strand; PAM type: NNAGAAW; PAM sequence: TAAGAAT
atcaaactagaactcaggat

SEQ ID NO: 10256 - DNA, 20 bp, Artificial Sequence
  Description of Artificial Sequence: Synthetic oligonucleotide
  Target: LAMA2; (-) strand; PAM type: NNAGAAW; PAM sequence: ACAGAAA
tcctcagcaaatgtaaaaga

SEQ ID NO: 10257 - DNA, 20 bp, Artificial Sequence
  Description of Artificial Sequence: Synthetic oligonucleotide
  Target: LAMA2; (-) strand; PAM type: NNAGAAW; PAM sequence: ACAGAAT
gaactctccaccccaaatca

SEQ ID NO: 10258 - DNA, 20 bp, Artificial Sequence
  Description of Artificial Sequence: Synthetic oligonucleotide
  Target: LAMA2; (-) strand; PAM type: NNAGAAW; PAM sequence: ACAGAAA
acattagacagatcaacgag

SEQ ID NO: 10259 - DNA, 20 bp, Artificial Sequence
  Description of Artificial Sequence: Synthetic oligonucleotide
  Target: LAMA2; (-) strand; PAM type: NNAGAAW; PAM sequence: GAAGAAA
gtaaagaccatcgatgctag

SEQ ID NO: 10260 - DNA, 20 bp, Artificial Sequence
  Description of Artificial Sequence: Synthetic oligonucleotide
  Target: LAMA2; (-) strand; PAM type: NNAGAAW; PAM sequence: GGAGAAA
aactaagcttcataagcgaa

SEQ ID NO: 10261 - DNA, 20 bp, Artificial Sequence
  Description of Artificial Sequence: Synthetic oligonucleotide
  Target: LAMA2; (-) strand; PAM type: NNAGAAW; PAM sequence: CCAGAAT
taaagaaaagaattttcaac

SEQ ID NO: 10262 - DNA, 20 bp, Artificial Sequence
  Description of Artificial Sequence: Synthetic oligonucleotide
  Target: LAMA2; (-) strand; PAM type: NNAGAAW; PAM sequence: AAAGAAT
atattcaacattcttaaaga

SEQ ID NO: 10263 - DNA, 20 bp, Artificial Sequence
  Description of Artificial Sequence: Synthetic oligonucleotide
  Target: LAMA2; (-) strand; PAM type: NNAGAAW; PAM sequence: AAAGAAA
ggccaatattcaacattctt

SEQ ID NO: 10264 - DNA, 20 bp, Artificial Sequence
  Description of Artificial Sequence: Synthetic oligonucleotide
  Target: LAMA2; (-) strand; PAM type: NNAGAAW; PAM sequence: GCAGAAA
gactaacagcagatcgctcg

SEQ ID NO: 10265 - DNA, 20 bp, Artificial Sequence
  Description of Artificial Sequence: Synthetic oligonucleotide
  Target: LAMA2; (-) strand; PAM type: NNAGAAW; PAM sequence: AGAGAAA
aaaatgttaagggcagccag

SEQ ID NO: 10266 - DNA, 20 bp, Artificial Sequence
  Description of Artificial Sequence: Synthetic oligonucleotide
  Target: LAMA2; (-) strand; PAM type: NNAGAAW; PAM sequence: GGAGAAT
ggtgtacctgaaagtgatgg

SEQ ID NO: 10267 - DNA, 20 bp, Artificial Sequence
  Description of Artificial Sequence: Synthetic oligonucleotide
  Target: LAMA2; (-) strand; PAM type: NNAGAAW; PAM sequence: CAAGAAA
aaagaaatgagcaaagcctc

SEQ ID NO: 10268 - DNA, 20 bp, Artificial Sequence
  Description of Artificial Sequence: Synthetic oligonucleotide
  Target: LAMA2; (-) strand; PAM type: NNAGAAW; PAM sequence: AAAGAAA
gtttagagaaaaaagaataa

SEQ ID NO: 10269 - DNA, 20 bp, Artificial Sequence
  Description of Artificial Sequence: Synthetic oligonucleotide
  Target: LAMA2; (-) strand; PAM type: NNAGAAW; PAM sequence: AAAGAAT
agaagggaagtttagagaaa

SEQ ID NO: 10270 - DNA, 20 bp, Artificial Sequence
  Description of Artificial Sequence: Synthetic oligonucleotide
  Target: LAMA2; (-) strand; PAM type: NNAGAAW; PAM sequence: AGAGAAA
tgaagtgagaagggaagttt

SEQ ID NO: 10271 - DNA, 20 bp, Artificial Sequence
  Description of Artificial Sequence: Synthetic oligonucleotide
  Target: LAMA2; (-) strand; PAM type: NNAGAAW; PAM sequence: GAAGAAA
ggagccgatgcgatcaactg

SEQ ID NO: 10272 - DNA, 20 bp, Artificial Sequence
  Description of Artificial Sequence: Synthetic oligonucleotide
  Target: LAMA2; (-) strand; PAM type: NNAGAAW; PAM sequence: GAAGAAT
ccaaggctcgagaactacgt

SEQ ID NO: 10273 - DNA, 20 bp, Artificial Sequence
  Description of Artificial Sequence: Synthetic oligonucleotide
  Target: LAMA2; (-) strand; PAM type: NNAGAAW; PAM sequence: CTAGAAT
aaatgtagaagaatgtataa

SEQ ID NO: 10274 - DNA, 20 bp, Artificial Sequence
  Description of Artificial Sequence: Synthetic oligonucleotide
  Target: LAMA2; (-) strand; PAM type: NNAGAAW; PAM sequence: GAAGAAT
aaaactttgaaaaaaatgta

SEQ ID NO: 10275 - DNA, 20 bp, Artificial Sequence
  Description of Artificial Sequence: Synthetic oligonucleotide
  Target: LAMA2; (-) strand; PAM type: NNAGAAW; PAM sequence: ACAGAAA
aaagatggggaaaaaacaga

SEQ ID NO: 10276 - DNA, 20 bp, Artificial Sequence
  Description of Artificial Sequence: Synthetic oligonucleotide
  Target: LAMA2; (-) strand; PAM type: NNAGAAW; PAM sequence: ACAGAAA
gttagaaggaaaactaacaa

SEQ ID NO: 10277 - DNA, 20 bp, Artificial Sequence
  Description of Artificial Sequence: Synthetic oligonucleotide
  Target: LAMA2; (-) strand; PAM type: NNAGAAW; PAM sequence: ACAGAAA
gggagttccctttccgagtc

SEQ ID NO: 10278 - DNA, 20 bp, Artificial Sequence
  Description of Artificial Sequence: Synthetic oligonucleotide
  Target: LAMA2; (-) strand; PAM type: NNAGAAW; PAM sequence: TAAGAAT
aatggtgataaaagtactga

SEQ ID NO: 10279 - DNA, 20 bp, Artificial Sequence
  Description of Artificial Sequence: Synthetic oligonucleotide
  Target: LAMA2; (-) strand; PAM type: NNAGAAW; PAM sequence: GAAGAAA
aacatgataaagatatcgta

SEQ ID NO: 10280 - DNA, 20 bp, Artificial Sequence
  Description of Artificial Sequence: Synthetic oligonucleotide
  Target: LAMA2; (-) strand; PAM type: NNAGAAW; PAM sequence: AGAGAAA
tcttatatagtaggacctca

SEQ ID NO: 10281 - DNA, 20 bp, Artificial Sequence
  Description of Artificial Sequence: Synthetic oligonucleotide
  Target: LAMA2; (-) strand; PAM type: NNAGAAW; PAM sequence: GAAGAAT
gacagacactgacaagtggt

SEQ ID NO: 10282 - DNA, 20 bp, Artificial Sequence
  Description of Artificial Sequence: Synthetic oligonucleotide
  Target: LAMA2; (-) strand; PAM type: NNAGAAW; PAM sequence: GAAGAAA
aaactaaaagaaaaatcaga

SEQ ID NO: 10283 - DNA, 20 bp, Artificial Sequence
  Description of Artificial Sequence: Synthetic oligonucleotide
  Target: LAMA2; (-) strand; PAM type: NNAGAAW; PAM sequence: AAAGAAA
aaagaaaatgaagaaaacta

SEQ ID NO: 10284 - DNA, 20 bp, Artificial Sequence
  Description of Artificial Sequence: Synthetic oligonucleotide
  Target: LAMA2; (-) strand; PAM type: NNAGAAW; PAM sequence: GAAGAAA
tccttctactaaaagaaaat

SEQ ID NO: 10285 - DNA, 20 bp, Artificial Sequence
  Description of Artificial Sequence: Synthetic oligonucleotide
  Target: LAMA2; (-) strand; PAM type: NNAGAAW; PAM sequence: AAAGAAA
gagaaaacttccttctacta

SEQ ID NO: 10286 - DNA, 20 bp, Artificial Sequence
  Description of Artificial Sequence: Synthetic oligonucleotide
  Target: LAMA2; (-) strand; PAM type: NNAGAAW; PAM sequence: GGAGAAA
tgctcttacaaatctacaag

SEQ ID NO: 10287 - DNA, 20 bp, Artificial Sequence
  Description of Artificial Sequence: Synthetic oligonucleotide
  Target: LAMA2; (-) strand; PAM type: NNAGAAW; PAM sequence: CTAGAAA
aaatttttgaagtttgtgca

SEQ ID NO: 10288 - DNA, 20 bp, Artificial Sequence
  Description of Artificial Sequence: Synthetic oligonucleotide
  Target: LAMA2; (-) strand; PAM type: NNAGAAW; PAM sequence: AAAGAAT
ttggtatcattattataagt

SEQ ID NO: 10289 - DNA, 20 bp, Artificial Sequence
  Description of Artificial Sequence: Synthetic oligonucleotide
  Target: LAMA2; (-) strand; PAM type: NNAGAAW; PAM sequence: TAAGAAA
ttctaggattataaagcatg

SEQ ID NO: 10290 - DNA, 20 bp, Artificial Sequence
  Description of Artificial Sequence: Synthetic oligonucleotide
  Target: LAMA2; (-) strand; PAM type: NNAGAAW; PAM sequence: GAAGAAA
taaaatgaaatcatacaaat

SEQ ID NO: 10291 - DNA, 20 bp, Artificial Sequence
  Description of Artificial Sequence: Synthetic oligonucleotide
  Target: LAMA2; (-) strand; PAM type: NNAGAAW; PAM sequence: AGAGAAA
ccatatgaataagagttaga

SEQ ID NO: 10292 - DNA, 20 bp, Artificial Sequence
  Description of Artificial Sequence: Synthetic oligonucleotide
  Target: LAMA2; (-) strand; PAM type: NNAGAAW; PAM sequence: TAAGAAA
acacacacacttacgaaaca

SEQ ID NO: 10293 - DNA, 20 bp, Artificial Sequence
  Description of Artificial Sequence: Synthetic oligonucleotide
  Target: LAMA2; (-) strand; PAM type: NNAGAAW; PAM sequence: TAAGAAA
aggcttctgaaagaataaac

SEQ ID NO: 10294 - DNA, 20 bp, Artificial Sequence
  Description of Artificial Sequence: Synthetic oligonucleotide
  Target: LAMA2; (-) strand; PAM type: NNAGAAW; PAM sequence: AAAGAAT
atgtaaattcaaggcttctg

SEQ ID NO: 10295 - DNA, 20 bp, Artificial Sequence
  Description of Artificial Sequence: Synthetic oligonucleotide
  Target: LAMA2; (-) strand; PAM type: NNAGAAW; PAM sequence: CTAGAAA
agaaactacaaaattgactt

SEQ ID NO: 10296 - DNA, 20 bp, Artificial Sequence
  Description of Artificial Sequence: Synthetic oligonucleotide
  Target: LAMA2; (-) strand; PAM type: NNAGAAW; PAM sequence: TGAGAAA
ataaagaaaccccttggaga

SEQ ID NO: 10297 - DNA, 20 bp, Artificial Sequence
  Description of Artificial Sequence: Synthetic oligonucleotide
  Target: LAMA2; (-) strand; PAM type: NNAGAAW; PAM sequence: AAAGAAA
tcgttgcgctggcaagaaat

SEQ ID NO: 10298 - DNA, 20 bp, Artificial Sequence
  Description of Artificial Sequence: Synthetic oligonucleotide
  Target: LAMA2; (-) strand; PAM type: NNAGAAW; PAM sequence: CAAGAAA
taacagaatcgttgcgctgg

SEQ ID NO: 10299 - DNA, 20 bp, Artificial Sequence
  Description of Artificial Sequence: Synthetic oligonucleotide
  Target: LAMA2; (-) strand; PAM type: NNAGAAW; PAM sequence: ACAGAAT
cgaaagacagatggcagata

SEQ ID NO: 10300 - DNA, 20 bp, Artificial Sequence
  Description of Artificial Sequence: Synthetic oligonucleotide
  Target: LAMA2; (-) strand; PAM type: NNAGAAW; PAM sequence: GTAGAAA
gatacagaataaaattaaac

SEQ ID NO: 10301 - DNA, 20 bp, Artificial Sequence
  Description of Artificial Sequence: Synthetic oligonucleotide
  Target: LAMA2; (-) strand; PAM type: NNAGAAW; PAM sequence: ACAGAAT
tgttcagaacagttgaagat

SEQ ID NO: 10302 - DNA, 20 bp, Artificial Sequence
  Description of Artificial Sequence: Synthetic oligonucleotide
  Target: LAMA2; (-) strand; PAM type: NNAGAAW; PAM sequence: CCAGAAA
tatttctgatgttaaaattt

SEQ ID NO: 10303 - DNA, 20 bp, Artificial Sequence
  Description of Artificial Sequence: Synthetic oligonucleotide
  Target: LAMA2; (-) strand; PAM type: NNAGAAW; PAM sequence: GGAGAAA
agatgaggtaactaaggcat

SEQ ID NO: 10304 - DNA, 20 bp, Artificial Sequence
  Description of Artificial Sequence: Synthetic oligonucleotide
  Target: LAMA2; (-) strand; PAM type: NNAGAAW; PAM sequence: AAAGAAA
gaagtaaagagatttgaaaa

SEQ ID NO: 10305 - DNA, 20 bp, Artificial Sequence
  Description of Artificial Sequence: Synthetic oligonucleotide
  Target: LAMA2; (-) strand; PAM type: NNAGAAW; PAM sequence: AGAGAAA
aattcatttaagtataaaaa

SEQ ID NO: 10306 - DNA, 20 bp, Artificial Sequence
  Description of Artificial Sequence: Synthetic oligonucleotide
  Target: LAMA2; (-) strand; PAM type: NNAGAAW; PAM sequence: GTAGAAT
aaaaataaatagctatctag

SEQ ID NO: 10307 - DNA, 20 bp, Artificial Sequence
  Description of Artificial Sequence: Synthetic oligonucleotide
  Target: LAMA2; (-) strand; PAM type: NNAGAAW; PAM sequence: AGAGAAA
tttaataactcttgggttaa

SEQ ID NO: 10308 - DNA, 20 bp, Artificial Sequence
  Description of Artificial Sequence: Synthetic oligonucleotide
  Target: LAMA2; (-) strand; PAM type: NNAGAAW; PAM sequence: AGAGAAT
tctgaatatcaaacatgatg

SEQ ID NO: 10309 - DNA, 20 bp, Artificial Sequence
  Description of Artificial Sequence: Synthetic oligonucleotide
  Target: LAMA2; (-) strand; PAM type: NNAGAAW; PAM sequence: GCAGAAA
aaaaatactcaattatcaaa

SEQ ID NO: 10310 - DNA, 20 bp, Artificial Sequence
  Description of Artificial Sequence: Synthetic oligonucleotide
  Target: LAMA2; (-) strand; PAM type: NNAGAAW; PAM sequence: ACAGAAA
tacagatgaagtaagaaaaa

SEQ ID NO: 10311 - DNA, 20 bp, Artificial Sequence
  Description of Artificial Sequence: Synthetic oligonucleotide
  Target: LAMA2; (-) strand; PAM type: NNAGAAW; PAM sequence: TAAGAAA
ttaagtatttacagatgaag

SEQ ID NO: 10312 - DNA, 20 bp, Artificial Sequence
  Description of Artificial Sequence: Synthetic oligonucleotide
  Target: LAMA2; (-) strand; PAM type: NNAGAAW; PAM sequence: AAAGAAA
gtgtcaagaaagcgtatgga

SEQ ID NO: 10313 - DNA, 20 bp, Artificial Sequence
  Description of Artificial Sequence: Synthetic oligonucleotide
  Target: LAMA2; (-) strand; PAM type: NNAGAAW; PAM sequence: CAAGAAA
aaaagaaaatgaatgtgtgt

SEQ ID NO: 10314 - DNA, 20 bp, Artificial Sequence
  Description of Artificial Sequence: Synthetic oligonucleotide
  Target: LAMA2; (-) strand; PAM type: NNAGAAW; PAM sequence: AAAGAAA
caaataaaatattacaagta

SEQ ID NO: 10315 - DNA, 20 bp, Artificial Sequence
  Description of Artificial Sequence: Synthetic oligonucleotide
  Target: LAMA2; (-) strand; PAM type: NNAGAAW; PAM sequence: TCAGAAA
gcagaatgacagaattagtg

SEQ ID NO: 10316 - DNA, 20 bp, Artificial Sequence
  Description of Artificial Sequence: Synthetic oligonucleotide
  Target: LAMA2; (-) strand; PAM type: NNAGAAW; PAM sequence: ACAGAAT
agaaagcaaaaagcagaatg

SEQ ID NO: 10317 - DNA, 20 bp, Artificial Sequence
  Description of Artificial Sequence: Synthetic oligonucleotide
  Target: LAMA2; (-) strand; PAM type: NNAGAAW; PAM sequence: GCAGAAT
ttagggagagaaagcaaaaa

SEQ ID NO: 10318 - DNA, 20 bp, Artificial Sequence
  Description of Artificial Sequence: Synthetic oligonucleotide
  Target: LAMA2; (-) strand; PAM type: NNAGAAW; PAM sequence: AGAGAAA
aaggcaaggaaacattaggg

SEQ ID NO: 10319 - DNA, 20 bp, Artificial Sequence
  Description of Artificial Sequence: Synthetic oligonucleotide
  Target: LAMA2; (-) strand; PAM type: NNAGAAW; PAM sequence: GAAGAAA
tatatatagtccatcagaaa

SEQ ID NO: 10320 - DNA, 20 bp, Artificial Sequence
  Description of Artificial Sequence: Synthetic oligonucleotide
  Target: LAMA2; (-) strand; PAM type: NNAGAAW; PAM sequence: TCAGAAA
tcagtaatatatatagtcca

SEQ ID NO: 10321 - DNA, 20 bp, Artificial Sequence
  Description of Artificial Sequence: Synthetic oligonucleotide
  Target: LAMA2; (-) strand; PAM type: NNAGAAW; PAM sequence: GGAGAAA
ctaacagaccttcaaaatct

SEQ ID NO: 10322 - DNA, 20 bp, Artificial Sequence
  Description of Artificial Sequence: Synthetic oligonucleotide
  Target: LAMA2; (-) strand; PAM type: NNAGAAW; PAM sequence: ATAGAAA
ttcatgtctttgattaaaaa

SEQ ID NO: 10323 - DNA, 20 bp, Artificial Sequence
  Description of Artificial Sequence: Synthetic oligonucleotide
  Target: LAMA2; (-) strand; PAM type: NNAGAAW; PAM sequence: ACAGAAA
taaatttacttttttaacat

SEQ ID NO: 10324 - DNA, 20 bp, Artificial Sequence
  Description of Artificial Sequence: Synthetic oligonucleotide
  Target: LAMA2; (-) strand; PAM type: NNAGAAW; PAM sequence: AAAGAAA
atgccactggcagtattact

SEQ ID NO: 10325 - DNA, 20 bp, Artificial Sequence
  Description of Artificial Sequence: Synthetic oligonucleotide
  Target: LAMA2; (-) strand; PAM type: NNAGAAW; PAM sequence: GAAGAAT
tgctgatgatgctacattga

SEQ ID NO: 10326 - DNA, 20 bp, Artificial Sequence
  Description of Artificial Sequence: Synthetic oligonucleotide
  Target: LAMA2; (-) strand; PAM type: NNAGAAW; PAM sequence: GGAGAAA
ctatagaaaacaatgaccaa

SEQ ID NO: 10327 - DNA, 20 bp, Artificial Sequence
  Description of Artificial Sequence: Synthetic oligonucleotide
  Target: LAMA2; (-) strand; PAM type: NNAGAAW; PAM sequence: ATAGAAA
gcatctaccaaactatggct

SEQ ID NO: 10328 - DNA, 20 bp, Artificial Sequence
  Description of Artificial Sequence: Synthetic oligonucleotide
  Target: LAMA2; (-) strand; PAM type: NNAGAAW; PAM sequence: CAAGAAA
agaaatattaaaaatgtaaa

SEQ ID NO: 10329 - DNA, 20 bp, Artificial Sequence
  Description of Artificial Sequence: Synthetic oligonucleotide
  Target: LAMA2; (-) strand; PAM type: NNAGAAW; PAM sequence: ATAGAAA
atagcatcttctaagtgtca

SEQ ID NO: 10330 - DNA, 20 bp, Artificial Sequence
  Description of Artificial Sequence: Synthetic oligonucleotide
  Target: LAMA2; (-) strand; PAM type: NNAGAAW; PAM sequence: AAAGAAA
gattttttatatatatcaat

SEQ ID NO: 10331 - DNA, 20 bp, Artificial Sequence
  Description of Artificial Sequence: Synthetic oligonucleotide
  Target: LAMA2; (-) strand; PAM type: NNAGAAW; PAM sequence: AAAGAAA
aggatccaggtgccaaacct

SEQ ID NO: 10332 - DNA, 20 bp, Artificial Sequence
  Description of Artificial Sequence: Synthetic oligonucleotide
  Target: LAMA2; (-) strand; PAM type: NNAGAAW; PAM sequence: CAAGAAA
aaggaaatcaacagagaagc

SEQ ID NO: 10333 - DNA, 20 bp, Artificial Sequence
  Description of Artificial Sequence: Synthetic oligonucleotide
  Target: LAMA2; (-) strand; PAM type: NNAGAAW; PAM sequence: GTAGAAT
aacctggtgggtcaccacac

SEQ ID NO: 10334 - DNA, 20 bp, Artificial Sequence
  Description of Artificial Sequence: Synthetic oligonucleotide
  Target: LAMA2; (-) strand; PAM type: NNAGAAW; PAM sequence: ACAGAAT
aattcagaataaaacccttg

SEQ ID NO: 10335 - DNA, 20 bp, Artificial Sequence
  Description of Artificial Sequence: Synthetic oligonucleotide
  Target: LAMA2; (-) strand; PAM type: NNAGAAW; PAM sequence: TCAGAAT
ttagaagattatttaaaaat

SEQ ID NO: 10336 - DNA, 20 bp, Artificial Sequence
  Description of Artificial Sequence: Synthetic oligonucleotide
  Target: LAMA2; (-) strand; PAM type: NNAGAAW; PAM sequence: ACAGAAA
ttgtacttttttataattga

SEQ ID NO: 10337 - DNA, 20 bp, Artificial Sequence
  Description of Artificial Sequence: Synthetic oligonucleotide
  Target: LAMA2; (-) strand; PAM type: NNAGAAW; PAM sequence: GAAGAAA
catttctaaaagtaatcttg

SEQ ID NO: 10338 - DNA, 20 bp, Artificial Sequence
  Description of Artificial Sequence: Synthetic oligonucleotide
  Target: LAMA2; (-) strand; PAM type: NNAGAAW; PAM sequence: TCAGAAT
tgtagttatacaccgtctgg

SEQ ID NO: 10339 - DNA, 20 bp, Artificial Sequence
  Description of Artificial Sequence: Synthetic oligonucleotide
  Target: LAMA2; (-) strand; PAM type: NNAGAAW; PAM sequence: AAAGAAT
tatggtatgctaactttttc

SEQ ID NO: 10340 - DNA, 20 bp, Artificial Sequence
  Description of Artificial Sequence: Synthetic oligonucleotide
  Target: LAMA2; (-) strand; PAM type: NNAGAAW; PAM sequence: AAAGAAA
gtccctctttaattgaaaat

SEQ ID NO: 10341 - DNA, 20 bp, Artificial Sequence
  Description of Artificial Sequence: Synthetic oligonucleotide
  Target: LAMA2; (-) strand; PAM type: NNAGAAW; PAM sequence: TTAGAAA
ttggaatgaaatgtaataga

SEQ ID NO: 10342 - DNA, 20 bp, Artificial Sequence
  Description of Artificial Sequence: Synthetic oligonucleotide
  Target: LAMA2; (-) strand; PAM type: NNAGAAW; PAM sequence: AGAGAAT
atttctgtggagttttgaaa

SEQ ID NO: 10343 - DNA, 20 bp, Artificial Sequence
  Description of Artificial Sequence: Synthetic oligonucleotide
  Target: LAMA2; (-) strand; PAM type: NNAGAAW; PAM sequence: CTAGAAA
cctgtttgattttatatatt

SEQ ID NO: 10344 - DNA, 20 bp, Artificial Sequence
  Description of Artificial Sequence: Synthetic oligonucleotide
  Target: LAMA2; (-) strand; PAM type: NNAGAAW; PAM sequence: GTAGAAA
ccactgtatgagtggtaggt

SEQ ID NO: 10345 - DNA, 20 bp, Artificial Sequence
  Description of Artificial Sequence: Synthetic oligonucleotide
  Target: LAMA2; (-) strand; PAM type: NNAGAAW; PAM sequence: AAAGAAA
cctttctcgctatatttacc

SEQ ID NO: 10346 - DNA, 20 bp, Artificial Sequence
  Description of Artificial Sequence: Synthetic oligonucleotide
  Target: LAMA2; (-) strand; PAM type: NNAGAAW; PAM sequence: GTAGAAA
tctatttaagatatcacatg

SEQ ID NO: 10347 - DNA, 20 bp, Artificial Sequence
  Description of Artificial Sequence: Synthetic oligonucleotide
  Target: LAMA2; (-) strand; PAM type: NNAGAAW; PAM sequence: ATAGAAA
atttaaagttactaacttgg

SEQ ID NO: 10348 - DNA, 20 bp, Artificial Sequence
  Description of Artificial Sequence: Synthetic oligonucleotide
  Target: LAMA2; (-) strand; PAM type: NNAGAAW; PAM sequence: AGAGAAT
aactcatatgttatagtata

SEQ ID NO: 10349 - DNA, 20 bp, Artificial Sequence
  Description of Artificial Sequence: Synthetic oligonucleotide
  Target: LAMA2; (-) strand; PAM type: NNAGAAW; PAM sequence: GAAGAAT
ctgcctctgtaggcttgcag

SEQ ID NO: 10350 - DNA, 20 bp, Artificial Sequence
  Description of Artificial Sequence: Synthetic oligonucleotide
  Target: LAMA2; (-) strand; PAM type: NNAGAAW; PAM sequence: AGAGAAA
ttacccacccagagccccta

SEQ ID NO: 10351 - DNA, 20 bp, Artificial Sequence
  Description of Artificial Sequence: Synthetic oligonucleotide
  Target: LAMA2; (-) strand; PAM type: NNAGAAW; PAM sequence: GGAGAAT
aagaatgccagcacataagg

SEQ ID NO: 10352 - DNA, 20 bp, Artificial Sequence
  Description of Artificial Sequence: Synthetic oligonucleotide
  Target: LAMA2; (-) strand; PAM type: NNAGAAW; PAM sequence: GAAGAAT
tatcatttccttgacttgtt

SEQ ID NO: 10353 - DNA, 20 bp, Artificial Sequence
  Description of Artificial Sequence: Synthetic oligonucleotide
  Target: LAMA2; (-) strand; PAM type: NNAGAAW; PAM sequence: TAAGAAT
tatttttatgatttatgtga

SEQ ID NO: 10354 - DNA, 20 bp, Artificial Sequence
  Description of Artificial Sequence: Synthetic oligonucleotide
  Target: LAMA2; (-) strand; PAM type: NNAGAAW; PAM sequence: ATAGAAA
tatttgcttgtcactgacat

SEQ ID NO: 10355 - DNA, 20 bp, Artificial Sequence
  Description of Artificial Sequence: Synthetic oligonucleotide
  Target: LAMA2; (-) strand; PAM type: NNAGAAW; PAM sequence: TTAGAAT
atcctcagctgtctcctcat

SEQ ID NO: 10356 - DNA, 20 bp, Artificial Sequence
  Description of Artificial Sequence: Synthetic oligonucleotide
  Target: LAMA2; (-) strand; PAM type: NNAGAAW; PAM sequence: ATAGAAA
ggtactaattaactctatta

SEQ ID NO: 10357 - DNA, 20 bp, Artificial Sequence
  Description of Artificial Sequence: Synthetic oligonucleotide
  Target: LAMA2; (-) strand; PAM type: NNAGAAW; PAM sequence: TTAGAAA
tcaattaaagaaattttaaa

SEQ ID NO: 10358 - DNA, 20 bp, Artificial Sequence
  Description of Artificial Sequence: Synthetic oligonucleotide
  Target: LAMA2; (-) strand; PAM type: NNAGAAW; PAM sequence: AAAGAAA
attcttttttacattcaatt

SEQ ID NO: 10359 - DNA, 20 bp, Artificial Sequence
  Description of Artificial Sequence: Synthetic oligonucleotide
  Target: LAMA2; (-) strand; PAM type: NNAGAAW; PAM sequence: AGAGAAA
ttcattaacatcattgttga

SEQ ID NO: 10360 - DNA, 20 bp, Artificial Sequence
  Description of Artificial Sequence: Synthetic oligonucleotide
  Target: LAMA2; (-) strand; PAM type: NNAGAAW; PAM sequence: AGAGAAA
cttgcctcttgtaattcgtg

SEQ ID NO: 10361 - DNA, 20 bp, Artificial Sequence
  Description of Artificial Sequence: Synthetic oligonucleotide
  Target: LAMA2; (-) strand; PAM type: NNAGAAW; PAM sequence: CAAGAAA
ctacaaacaactaagagact

SEQ ID NO: 10362 - DNA, 20 bp, Artificial Sequence
  Description of Artificial Sequence: Synthetic oligonucleotide
  Target: LAMA2; (-) strand; PAM type: NNAGAAW; PAM sequence: CAAGAAA
gggctagaaatgaggtatcc

SEQ ID NO: 10363 - DNA, 20 bp, Artificial Sequence
  Description of Artificial Sequence: Synthetic oligonucleotide
  Target: LAMA2; (-) strand; PAM type: NNAGAAW; PAM sequence: CTAGAAA
ggctaagcaaaggaataggg

SEQ ID NO: 10364 - DNA, 20 bp, Artificial Sequence
  Description of Artificial Sequence: Synthetic oligonucleotide
  Target: LAMA2; (-) strand; PAM type: NNAGAAW; PAM sequence: TGAGAAA
ggatgcaggggcagctttcc

SEQ ID NO: 10365 - DNA, 20 bp, Artificial Sequence
  Description of Artificial Sequence: Synthetic oligonucleotide
  Target: LAMA2; (-) strand; PAM type: NNAGAAW; PAM sequence: TGAGAAT
tttgaaaagtgattatgcca

SEQ ID NO: 10366 - DNA, 20 bp, Artificial Sequence
  Description of Artificial Sequence: Synthetic oligonucleotide
  Target: LAMA2; (-) strand; PAM type: NNAGAAW; PAM sequence: AAAGAAA
cattatgagatcataaaaga

SEQ ID NO: 10367 - DNA, 20 bp, Artificial Sequence
  Description of Artificial Sequence: Synthetic oligonucleotide
  Target: LAMA2; (-) strand; PAM type: NNAGAAW; PAM sequence: AAAGAAA
ttactcattatgagatcata

SEQ ID NO: 10368 - DNA, 20 bp, Artificial Sequence
  Description of Artificial Sequence: Synthetic oligonucleotide
  Target: LAMA2; (-) strand; PAM type: NNAGAAW; PAM sequence: ACAGAAT
agaggtaagatagacataaa

SEQ ID NO: 10369 - DNA, 20 bp, Artificial Sequence
  Description of Artificial Sequence: Synthetic oligonucleotide
  Target: LAMA2; (-) strand; PAM type: NNAGAAW; PAM sequence: AAAGAAA
tcttcttattgtgcaatggt

SEQ ID NO: 10370 - DNA, 20 bp, Artificial Sequence
  Description of Artificial Sequence: Synthetic oligonucleotide
  Target: LAMA2; (-) strand; PAM type: NNAGAAW; PAM sequence: ACAGAAT
accatttcatagattataaa

SEQ ID NO: 10371 - DNA, 20 bp, Artificial Sequence
  Description of Artificial Sequence: Synthetic oligonucleotide
  Target: LAMA2; (-) strand; PAM type: NNAGAAW; PAM sequence: GCAGAAA
ataattatacctactgagag

SEQ ID NO: 10372 - DNA, 20 bp, Artificial Sequence
  Description of Artificial Sequence: Synthetic oligonucleotide
  Target: LAMA2; (-) strand; PAM type: NNAGAAW; PAM sequence: ACAGAAA
aatcctttcagggaaaaaga

SEQ ID NO: 10373 - DNA, 20 bp, Artificial Sequence
  Description of Artificial Sequence: Synthetic oligonucleotide
  Target: LAMA2; (-) strand; PAM type: NNAGAAW; PAM sequence: GCAGAAT
gttcttaacacactgactta

SEQ ID NO: 10374 - DNA, 20 bp, Artificial Sequence
  Description of Artificial Sequence: Synthetic oligonucleotide
  Target: LAMA2; (-) strand; PAM type: NNAGAAW; PAM sequence: AGAGAAA
cagtgagaaactatggcaat

SEQ ID NO: 10375 - DNA, 20 bp, Artificial Sequence
  Description of Artificial Sequence: Synthetic oligonucleotide
  Target: LAMA2; (-) strand; PAM type: NNAGAAW; PAM sequence: TGAGAAA
acgatgaaaataggcttcag

SEQ ID NO: 10376 - DNA, 20 bp, Artificial Sequence
  Description of Artificial Sequence: Synthetic oligonucleotide
  Target: LAMA2; (-) strand; PAM type: NNAGAAW; PAM sequence: GGAGAAA
cctcagtacagtttttctct

SEQ ID NO: 10377 - DNA, 20 bp, Artificial Sequence
  Description of Artificial Sequence: Synthetic oligonucleotide
  Target: LAMA2; (-) strand; PAM type: NNAGAAW; PAM sequence: TTAGAAA
cctttaaaaacaaagttgaa

SEQ ID NO: 10378 - DNA, 20 bp, Artificial Sequence
  Description of Artificial Sequence: Synthetic oligonucleotide
  Target: LAMA2; (-) strand; PAM type: NNAGAAW; PAM sequence: GAAGAAA
accaattttcattcttttag

SEQ ID NO: 10379 - DNA, 20 bp, Artificial Sequence
  Description of Artificial Sequence: Synthetic oligonucleotide
  Target: LAMA2; (-) strand; PAM type: NNAGAAW; PAM sequence: CTAGAAA
gaacgctacagacttccact

SEQ ID NO: 10380 - DNA, 20 bp, Artificial Sequence
  Description of Artificial Sequence: Synthetic oligonucleotide
  Target: LAMA2; (-) strand; PAM type: NNAGAAW; PAM sequence: TGAGAAT
gcagtgtcctcttccagatg

SEQ ID NO: 10381 - DNA, 20 bp, Artificial Sequence
  Description of Artificial Sequence: Synthetic oligonucleotide
  Target: LAMA2; (-) strand; PAM type: NNAGAAW; PAM sequence: ACAGAAA
gccccgaagaaaaaaataag

SEQ ID NO: 10382 - DNA, 20 bp, Artificial Sequence
  Description of Artificial Sequence: Synthetic oligonucleotide
  Target: LAMA2; (-) strand; PAM type: NNAGAAW; PAM sequence: GAAGAAA
accagtgtccactatgcccc

SEQ ID NO: 10383 - DNA, 20 bp, Artificial Sequence
  Description of Artificial Sequence: Synthetic oligonucleotide
  Target: LAMA2; (-) strand; PAM type: NNAGAAW; PAM sequence: GAAGAAA
gataattatattacaaggtg

SEQ ID NO: 10384 - DNA, 20 bp, Artificial Sequence
  Description of Artificial Sequence: Synthetic oligonucleotide
  Target: LAMA2; (-) strand; PAM type: NNAGAAW; PAM sequence: GGAGAAA
ccttagcacagtttctactt

SEQ ID NO: 10385 - DNA, 20 bp, Artificial Sequence
  Description of Artificial Sequence: Synthetic oligonucleotide
  Target: LAMA2; (-) strand; PAM type: NNAGAAW; PAM sequence: AAAGAAA
aaaatgtgagacattggcat

SEQ ID NO: 10386 - DNA, 20 bp, Artificial Sequence
  Description of Artificial Sequence: Synthetic oligonucleotide
  Target: LAMA2; (-) strand; PAM type: NNAGAAW; PAM sequence: TCAGAAA
tgagatccagggccctgccc

SEQ ID NO: 10387 - DNA, 20 bp, Artificial Sequence
  Description of Artificial Sequence: Synthetic oligonucleotide
  Target: LAMA2; (-) strand; PAM type: NNAGAAW; PAM sequence: TCAGAAA
tgcaggttgagcatccctaa

SEQ ID NO: 10388 - DNA, 20 bp, Artificial Sequence
  Description of Artificial Sequence: Synthetic oligonucleotide
  Target: LAMA2; (-) strand; PAM type: NNAGAAW; PAM sequence: CAAGAAT
gttagcaaagacattgggaa

SEQ ID NO: 10389 - DNA, 20 bp, Artificial Sequence
  Description of Artificial Sequence: Synthetic oligonucleotide
  Target: LAMA2; (-) strand; PAM type: NNAGAAW; PAM sequence: ATAGAAT
aattcaacttgtggacatag

SEQ ID NO: 10390 - DNA, 20 bp, Artificial Sequence
  Description of Artificial Sequence: Synthetic oligonucleotide
  Target: LAMA2; (-) strand; PAM type: NNAGAAW; PAM sequence: TGAGAAA
tggaatatggtaagtgcatc

SEQ ID NO: 10391 - DNA, 20 bp, Artificial Sequence
  Description of Artificial Sequence: Synthetic oligonucleotide
  Target: LAMA2; (-) strand; PAM type: NNAGAAW; PAM sequence: TTAGAAA
attcagactaagttcaacaa

SEQ ID NO: 10392 - DNA, 20 bp, Artificial Sequence
  Description of Artificial Sequence: Synthetic oligonucleotide
  Target: LAMA2; (-) strand; PAM type: NNAGAAW; PAM sequence: CAAGAAA
tcttcaaaagagtataaagg

SEQ ID NO: 10393 - DNA, 20 bp, Artificial Sequence
  Description of Artificial Sequence: Synthetic oligonucleotide
  Target: LAMA2; (-) strand; PAM type: NNAGAAW; PAM sequence: AGAGAAT
agcagtcctccttatatcca

SEQ ID NO: 10394 - DNA, 20 bp, Artificial Sequence
  Description of Artificial Sequence: Synthetic oligonucleotide
  Target: LAMA2; (-) strand; PAM type: NNAGAAW; PAM sequence: TAAGAAT
aagaagtaaggagaaaaatt

SEQ ID NO: 10395 - DNA, 20 bp, Artificial Sequence
  Description of Artificial Sequence: Synthetic oligonucleotide
  Target: LAMA2; (-) strand; PAM type: NNAGAAW; PAM sequence: GGAGAAA
aaaatagcatgaagaagtaa

SEQ ID NO: 10396 - DNA, 20 bp, Artificial Sequence
  Description of Artificial Sequence: Synthetic oligonucleotide
  Target: LAMA2; (-) strand; PAM type: NNAGAAW; PAM sequence: AGAGAAA
ataaggaaaatcagaagaga

SEQ ID NO: 10397 - DNA, 20 bp, Artificial Sequence
  Description of Artificial Sequence: Synthetic oligonucleotide
  Target: LAMA2; (-) strand; PAM type: NNAGAAW; PAM sequence: TGAGAAA
gtcttactaactttatagtc

SEQ ID NO: 10398 - DNA, 20 bp, Artificial Sequence
  Description of Artificial Sequence: Synthetic oligonucleotide
  Target: LAMA2; (-) strand; PAM type: NNAGAAW; PAM sequence: GTAGAAA
ctaccataatctattcagag

SEQ ID NO: 10399 - DNA, 20 bp, Artificial Sequence
  Description of Artificial Sequence: Synthetic oligonucleotide
  Target: LAMA2; (-) strand; PAM type: NNAGAAW; PAM sequence: GTAGAAA
tggggtaaagatcagataaa

SEQ ID NO: 10400 - DNA, 20 bp, Artificial Sequence
  Description of Artificial Sequence: Synthetic oligonucleotide
  Target: LAMA2; (-) strand; PAM type: NNAGAAW; PAM sequence: AGAGAAA
agcataggaatttgacaggt

SEQ ID NO: 10401 - DNA, 20 bp, Artificial Sequence
  Description of Artificial Sequence: Synthetic oligonucleotide
  Target: LAMA2; (-) strand; PAM type: NNAGAAW; PAM sequence: TGAGAAA
atcctttctaattacactgg

SEQ ID NO: 10402 - DNA, 20 bp, Artificial Sequence
  Description of Artificial Sequence: Synthetic oligonucleotide
  Target: LAMA2; (-) strand; PAM type: NNAGAAW; PAM sequence: ACAGAAA
catctgtttgaaacccctga

SEQ ID NO: 10403 - DNA, 20 bp, Artificial Sequence
  Description of Artificial Sequence: Synthetic oligonucleotide
  Target: LAMA2; (-) strand; PAM type: NNAGAAW; PAM sequence: TCAGAAA
ctttatgtagaagttcacta

SEQ ID NO: 10404 - DNA, 20 bp, Artificial Sequence
  Description of Artificial Sequence: Synthetic oligonucleotide
  Target: LAMA2; (-) strand; PAM type: NNAGAAW; PAM sequence: GAAGAAA
aaaaatacacaacagcattt

SEQ ID NO: 10405 - DNA, 20 bp, Artificial Sequence
  Description of Artificial Sequence: Synthetic oligonucleotide
  Target: LAMA2; (-) strand; PAM type: NNAGAAW; PAM sequence: TAAGAAA
aagactatgtctacctattc

SEQ ID NO: 10406 - DNA, 20 bp, Artificial Sequence
  Description of Artificial Sequence: Synthetic oligonucleotide
  Target: LAMA2; (-) strand; PAM type: NNAGAAW; PAM sequence: TCAGAAT
taataatttttcaaaccaac

SEQ ID NO: 10407 - DNA, 20 bp, Artificial Sequence
  Description of Artificial Sequence: Synthetic oligonucleotide
  Target: LAMA2; (-) strand; PAM type: NNAGAAW; PAM sequence: AAAGAAA
taaacacatttacgttaaag

SEQ ID NO: 10408 - DNA, 20 bp, Artificial Sequence
  Description of Artificial Sequence: Synthetic oligonucleotide
  Target: LAMA2; (-) strand; PAM type: NNAGAAW; PAM sequence: AAAGAAA
aaggtaaacacatttacgtt

SEQ ID NO: 10409 - DNA, 20 bp, Artificial Sequence
  Description of Artificial Sequence: Synthetic oligonucleotide
  Target: LAMA2; (-) strand; PAM type: NNAGAAW; PAM sequence: TTAGAAA
gggtagtgtaggcagtgaag

SEQ ID NO: 10410 - DNA, 20 bp, Artificial Sequence
  Description of Artificial Sequence: Synthetic oligonucleotide
  Target: LAMA2; (-) strand; PAM type: NNAGAAW; PAM sequence: AGAGAAA
gacttaaaagcactgcaggc

SEQ ID NO: 10411 - DNA, 20 bp, Artificial Sequence
  Description of Artificial Sequence: Synthetic oligonucleotide
  Target: LAMA2; (-) strand; PAM type: NNAGAAW; PAM sequence: ATAGAAA
ttcccttagttaaatgagaa

SEQ ID NO: 10412 - DNA, 20 bp, Artificial Sequence
  Description of Artificial Sequence: Synthetic oligonucleotide
  Target: LAMA2; (-) strand; PAM type: NNAGAAW; PAM sequence: TGAGAAA
ctgcaattcccttagttaaa

SEQ ID NO: 10413 - DNA, 20 bp, Artificial Sequence
  Description of Artificial Sequence: Synthetic oligonucleotide
  Target: LAMA2; (-) strand; PAM type: NNAGAAW; PAM sequence: GCAGAAT
catgttgtgggtgatgggaa

SEQ ID NO: 10414 - DNA, 20 bp, Artificial Sequence
  Description of Artificial Sequence: Synthetic oligonucleotide
  Target: LAMA2; (-) strand; PAM type: NNAGAAW; PAM sequence: CCAGAAA
ctacagcctagatccctggc

SEQ ID NO: 10415 - DNA, 20 bp, Artificial Sequence
  Description of Artificial Sequence: Synthetic oligonucleotide
  Target: LAMA2; (-) strand; PAM type: NNAGAAW; PAM sequence: AAAGAAA
tgtaatgcagagggaaaaag

SEQ ID NO: 10416 - DNA, 20 bp, Artificial Sequence
  Description of Artificial Sequence: Synthetic oligonucleotide
  Target: LAMA2; (-) strand; PAM type: NNAGAAW; PAM sequence: AAAGAAA
tatttgtaatgcagagggaa

SEQ ID NO: 10417 - DNA, 20 bp, Artificial Sequence
  Description of Artificial Sequence: Synthetic oligonucleotide
  Target: LAMA2; (-) strand; PAM type: NNAGAAW; PAM sequence: ATAGAAA
caaataccactttcttaaaa

SEQ ID NO: 10418 - DNA, 20 bp, Artificial Sequence
  Description of Artificial Sequence: Synthetic oligonucleotide
  Target: LAMA2; (-) strand; PAM type: NNAGAAW; PAM sequence: TTAGAAA
aaaaaccaaaccacaaacat

SEQ ID NO: 10419 - DNA, 20 bp, Artificial Sequence
  Description of Artificial Sequence: Synthetic oligonucleotide
  Target: LAMA2; (-) strand; PAM type: NNAGAAW; PAM sequence: AGAGAAA
ccactcatatcttgtatctt

SEQ ID NO: 10420 - DNA, 20 bp, Artificial Sequence
  Description of Artificial Sequence: Synthetic oligonucleotide
  Target: LAMA2; (-) strand; PAM type: NNAGAAW; PAM sequence: GCAGAAT
ctcacgatcagtcagttaaa

SEQ ID NO: 10421 - DNA, 20 bp, Artificial Sequence
  Description of Artificial Sequence: Synthetic oligonucleotide
  Target: LAMA2; (-) strand; PAM type: NNAGAAW; PAM sequence: AAAGAAT
tttgattttgtctttcttta

SEQ ID NO: 10422 - DNA, 20 bp, Artificial Sequence
  Description of Artificial Sequence: Synthetic oligonucleotide
  Target: LAMA2; (-) strand; PAM type: NNAGAAW; PAM sequence: GAAGAAA
ttaaggtcttgtgcaacatg

SEQ ID NO: 10423 - DNA, 20 bp, Artificial Sequence
  Description of Artificial Sequence: Synthetic oligonucleotide
  Target: LAMA2; (-) strand; PAM type: NNAGAAW; PAM sequence: CCAGAAA
gtatcccaccacagacaact

SEQ ID NO: 10424 - DNA, 20 bp, Artificial Sequence
  Description of Artificial Sequence: Synthetic oligonucleotide
  Target: LAMA2; (-) strand; PAM type: NNAGAAW; PAM sequence: TGAGAAA
tgaaatgaaatagaaaccga

SEQ ID NO: 10425 - DNA, 20 bp, Artificial Sequence
  Description of Artificial Sequence: Synthetic oligonucleotide
  Target: LAMA2; (-) strand; PAM type: NNAGAAW; PAM sequence: ATAGAAA
agtatcagttttgaaatgaa

SEQ ID NO: 10426 - DNA, 20 bp, Artificial Sequence
  Description of Artificial Sequence: Synthetic oligonucleotide
  Target: LAMA2; (-) strand; PAM type: NNAGAAW; PAM sequence: ACAGAAA
ctagatagaagtaatccaca

SEQ ID NO: 10427 - DNA, 20 bp, Artificial Sequence
  Description of Artificial Sequence: Synthetic oligonucleotide
  Target: LAMA2; (-) strand; PAM type: NNAGAAW; PAM sequence: CAAGAAA
ttcaatactcacatgtcatg

SEQ ID NO: 10428 - DNA, 20 bp, Artificial Sequence
  Description of Artificial Sequence: Synthetic oligonucleotide
  Target: LAMA2; (-) strand; PAM type: NNAGAAW; PAM sequence: TAAGAAA
attcagagttctgttaaata

SEQ ID NO: 10429 - DNA, 20 bp, Artificial Sequence
  Description of Artificial Sequence: Synthetic oligonucleotide
  Target: LAMA2; (-) strand; PAM type: NNAGAAW; PAM sequence: ATAGAAT
ggaataccagagtttcctaa

SEQ ID NO: 10430 - DNA, 20 bp, Artificial Sequence
  Description of Artificial Sequence: Synthetic oligonucleotide
  Target: LAMA2; (-) strand; PAM type: NNAGAAW; PAM sequence: GTAGAAA
ttttttggcaattttaagca

SEQ ID NO: 10431 - DNA, 20 bp, Artificial Sequence
  Description of Artificial Sequence: Synthetic oligonucleotide
  Target: LAMA2; (-) strand; PAM type: NNAGAAW; PAM sequence: TAAGAAA
aattaagtgttgccatcata

SEQ ID NO: 10432 - DNA, 20 bp, Artificial Sequence
  Description of Artificial Sequence: Synthetic oligonucleotide
  Target: LAMA2; (-) strand; PAM type: NNAGAAW; PAM sequence: AAAGAAT
gaaaggatggaaaatctggt

SEQ ID NO: 10433 - DNA, 20 bp, Artificial Sequence
  Description of Artificial Sequence: Synthetic oligonucleotide
  Target: LAMA2; (-) strand; PAM type: NNAGAAW; PAM sequence: GAAGAAA
aaaaaatgcatatgaccaaa

SEQ ID NO: 10434 - DNA, 20 bp, Artificial Sequence
  Description of Artificial Sequence: Synthetic oligonucleotide
  Target: LAMA2; (-) strand; PAM type: NNAGAAW; PAM sequence: ACAGAAA
gtcagtttgattgtcagcca

SEQ ID NO: 10435 - DNA, 20 bp, Artificial Sequence
  Description of Artificial Sequence: Synthetic oligonucleotide
  Target: LAMA2; (-) strand; PAM type: NNAGAAW; PAM sequence: TAAGAAA
aagagcttcactgtgggtta

SEQ ID NO: 10436 - DNA, 20 bp, Artificial Sequence
  Description of Artificial Sequence: Synthetic oligonucleotide
  Target: LAMA2; (-) strand; PAM type: NNAGAAW; PAM sequence: TTAGAAA
aagaatttagcctcaactat

SEQ ID NO: 10437 - DNA, 20 bp, Artificial Sequence
  Description of Artificial Sequence: Synthetic oligonucleotide
  Target: LAMA2; (-) strand; PAM type: NNAGAAW; PAM sequence: AAAGAAT
ttcgaacagcaattactggt

SEQ ID NO: 10438 - DNA, 20 bp, Artificial Sequence
  Description of Artificial Sequence: Synthetic oligonucleotide
  Target: LAMA2; (-) strand; PAM type: NNAGAAW; PAM sequence: AAAGAAT
ttgggattaggctcctaaaa

SEQ ID NO: 10439 - DNA, 20 bp, Artificial Sequence
  Description of Artificial Sequence: Synthetic oligonucleotide
  Target: LAMA2; (-) strand; PAM type: NNAGAAW; PAM sequence: ATAGAAA
agactgtgggaatttcaaaa

SEQ ID NO: 10440 - DNA, 20 bp, Artificial Sequence
  Description of Artificial Sequence: Synthetic oligonucleotide
  Target: LAMA2; (-) strand; PAM type: NNAGAAW; PAM sequence: AGAGAAT
ccagaactttacagatgcaa

SEQ ID NO: 10441 - DNA, 20 bp, Artificial Sequence
  Description of Artificial Sequence: Synthetic oligonucleotide
  Target: LAMA2; (-) strand; PAM type: NNAGAAW; PAM sequence: AGAGAAT
taatttaataatattcagag

SEQ ID NO: 10442 - DNA, 20 bp, Artificial Sequence
  Description of Artificial Sequence: Synthetic oligonucleotide
  Target: LAMA2; (-) strand; PAM type: NNAGAAW; PAM sequence: GTAGAAA
cagaaagatagcataatgct

SEQ ID NO: 10443 - DNA, 20 bp, Artificial Sequence
  Description of Artificial Sequence: Synthetic oligonucleotide
  Target: LAMA2; (-) strand; PAM type: NNAGAAW; PAM sequence: ACAGAAA
aaggcttctctaagctagaa

SEQ ID NO: 10444 - DNA, 20 bp, Artificial Sequence
  Description of Artificial Sequence: Synthetic oligonucleotide
  Target: LAMA2; (-) strand; PAM type: NNAGAAW; PAM sequence: CTAGAAA
aatttaaaggcttctctaag

SEQ ID NO: 10445 - DNA, 20 bp, Artificial Sequence
  Description of Artificial Sequence: Synthetic oligonucleotide
  Target: LAMA2; (-) strand; PAM type: NNAGAAW; PAM sequence: GTAGAAT
tttaatttgagatccgtgaa

SEQ ID NO: 10446 - DNA, 20 bp, Artificial Sequence
  Description of Artificial Sequence: Synthetic oligonucleotide
  Target: LAMA2; (-) strand; PAM type: NNAGAAW; PAM sequence: ACAGAAT
taattattttgtaaagcaag

SEQ ID NO: 10447 - DNA, 20 bp, Artificial Sequence
  Description of Artificial Sequence: Synthetic oligonucleotide
  Target: LAMA2; (-) strand; PAM type: NNAGAAW; PAM sequence: TTAGAAT
ggtccgttcagtcaggggtc

SEQ ID NO: 10448 - DNA, 20 bp, Artificial Sequence
  Description of Artificial Sequence: Synthetic oligonucleotide
  Target: LAMA2; (-) strand; PAM type: NNAGAAW; PAM sequence: TTAGAAT
tatgctataccagagtgagg

SEQ ID NO: 10449 - DNA, 20 bp, Artificial Sequence
  Description of Artificial Sequence: Synthetic oligonucleotide
  Target: LAMA2; (-) strand; PAM type: NNAGAAW; PAM sequence: TCAGAAT
gacagctttgcaaggtcatt

SEQ ID NO: 10450 - DNA, 20 bp, Artificial Sequence
  Description of Artificial Sequence: Synthetic oligonucleotide
  Target: LAMA2; (-) strand; PAM type: NNAGAAW; PAM sequence: ATAGAAT
gtaagggaaggagattctct

SEQ ID NO: 10451 - DNA, 20 bp, Artificial Sequence
  Description of Artificial Sequence: Synthetic oligonucleotide
  Target: LAMA2; (-) strand; PAM type: NNAGAAW; PAM sequence: CCAGAAA
cttaaaaggtatctgactct

SEQ ID NO: 10452 - DNA, 20 bp, Artificial Sequence
  Description of Artificial Sequence: Synthetic oligonucleotide
  Target: LAMA2; (-) strand; PAM type: NNAGAAW; PAM sequence: CCAGAAA
aagttacacattggttcggc

SEQ ID NO: 10453 - DNA, 20 bp, Artificial Sequence
  Description of Artificial Sequence: Synthetic oligonucleotide
  Target: LAMA2; (-) strand; PAM type: NNAGAAW; PAM sequence: TGAGAAT
gacacagccttaggaggtcc

SEQ ID NO: 10454 - DNA, 20 bp, Artificial Sequence
  Description of Artificial Sequence: Synthetic oligonucleotide
  Target: LAMA2; (-) strand; PAM type: NNAGAAW; PAM sequence: TCAGAAA
aatttgtaaaccaaaaagta

SEQ ID NO: 10455 - DNA, 20 bp, Artificial Sequence
  Description of Artificial Sequence: Synthetic oligonucleotide
  Target: LAMA2; (-) strand; PAM type: NNAGAAW; PAM sequence: AGAGAAT
tttaattaggaaaaacgtca

SEQ ID NO: 10456 - DNA, 20 bp, Artificial Sequence
  Description of Artificial Sequence: Synthetic oligonucleotide
  Target: LAMA2; (-) strand; PAM type: NNAGAAW; PAM sequence: GCAGAAT
ttaggtgacatgcgttttgt

SEQ ID NO: 10457 - DNA, 20 bp, Artificial Sequence
  Description of Artificial Sequence: Synthetic oligonucleotide
  Target: LAMA2; (-) strand; PAM type: NNAGAAW; PAM sequence: AGAGAAA
gtatattaacaaagataaaa

SEQ ID NO: 10458 - DNA, 20 bp, Artificial Sequence
  Description of Artificial Sequence: Synthetic oligonucleotide
  Target: LAMA2; (-) strand; PAM type: NNAGAAW; PAM sequence: GAAGAAT
tttcaaaatttttcagacat

SEQ ID NO: 10459 - DNA, 20 bp, Artificial Sequence
  Description of Artificial Sequence: Synthetic oligonucleotide
  Target: LAMA2; (-) strand; PAM type: NNAGAAW; PAM sequence: TGAGAAT
ttaagtgggagtcgttatag

SEQ ID NO: 10460 - DNA, 20 bp, Artificial Sequence
  Description of Artificial Sequence: Synthetic oligonucleotide
  Target: LAMA2; (-) strand; PAM type: NNAGAAW; PAM sequence: TAAGAAT
ctccttattgactcactgat

SEQ ID NO: 10461 - DNA, 20 bp, Artificial Sequence
  Description of Artificial Sequence: Synthetic oligonucleotide
  Target: LAMA2; (-) strand; PAM type: NNAGAAW; PAM sequence: AAAGAAA
ttgaaaagtgttgttgatat

SEQ ID NO: 10462 - DNA, 20 bp, Artificial Sequence
  Description of Artificial Sequence: Synthetic oligonucleotide
  Target: LAMA2; (-) strand; PAM type: NNAGAAW; PAM sequence: TTAGAAT
aaaagccccacttctttcct

SEQ ID NO: 10463 - DNA, 20 bp, Artificial Sequence
  Description of Artificial Sequence: Synthetic oligonucleotide
  Target: LAMA2; (-) strand; PAM type: NNAGAAW; PAM sequence: GCAGAAA
gtataatgtggagtaaggat

SEQ ID NO: 10464 - DNA, 20 bp, Artificial Sequence
  Description of Artificial Sequence: Synthetic oligonucleotide
  Target: LAMA2; (-) strand; PAM type: NNAGAAW; PAM sequence: GCAGAAA
ttattcaattatggtcagga

SEQ ID NO: 10465 - DNA, 20 bp, Artificial Sequence
  Description of Artificial Sequence: Synthetic oligonucleotide
  Target: LAMA2; (-) strand; PAM type: NNAGAAW; PAM sequence: CAAGAAA
ccatagcatatagggtctga

SEQ ID NO: 10466 - DNA, 20 bp, Artificial Sequence
  Description of Artificial Sequence: Synthetic oligonucleotide
  Target: LAMA2; (-) strand; PAM type: NNAGAAW; PAM sequence: AAAGAAT
ggaagacatttttgcctggt

SEQ ID NO: 10467 - DNA, 20 bp, Artificial Sequence
  Description of Artificial Sequence: Synthetic oligonucleotide
  Target: LAMA2; (-) strand; PAM type: NNAGAAW; PAM sequence: TGAGAAA
ttctttctttaagtttgaaa

SEQ ID NO: 10468 - DNA, 20 bp, Artificial Sequence
  Description of Artificial Sequence: Synthetic oligonucleotide
  Target: LAMA2; (-) strand; PAM type: NNAGAAW; PAM sequence: ACAGAAA
taagaagttactgaaaagct

SEQ ID NO: 10469 - DNA, 20 bp, Artificial Sequence
  Description of Artificial Sequence: Synthetic oligonucleotide
  Target: LAMA2; (-) strand; PAM type: NNAGAAW; PAM sequence: TTAGAAT
cagtaaacaaaatgccaggt

SEQ ID NO: 10470 - DNA, 20 bp, Artificial Sequence
  Description of Artificial Sequence: Synthetic oligonucleotide
  Target: LAMA2; (-) strand; PAM type: NNAGAAW; PAM sequence: AGAGAAT
caaaggtaaccacaaaaatg

SEQ ID NO: 10471 - DNA, 20 bp, Artificial Sequence
  Description of Artificial Sequence: Synthetic oligonucleotide
  Target: LAMA2; (-) strand; PAM type: NNAGAAW; PAM sequence: TGAGAAT
aagcctcattttgcagataa

SEQ ID NO: 10472 - DNA, 20 bp, Artificial Sequence
  Description of Artificial Sequence: Synthetic oligonucleotide
  Target: LAMA2; (-) strand; PAM type: NNAGAAW; PAM sequence: ACAGAAA
aattactgcagcatacaact

SEQ ID NO: 10473 - DNA, 20 bp, Artificial Sequence
  Description of Artificial Sequence: Synthetic oligonucleotide
  Target: LAMA2; (-) strand; PAM type: NNAGAAW; PAM sequence: ACAGAAT
taacttgccacattgtagcc

SEQ ID NO: 10474 - DNA, 20 bp, Artificial Sequence
  Description of Artificial Sequence: Synthetic oligonucleotide
  Target: LAMA2; (-) strand; PAM type: NNAGAAW; PAM sequence: ACAGAAA
tagactgggtggcttataca

SEQ ID NO: 10475 - DNA, 20 bp, Artificial Sequence
  Description of Artificial Sequence: Synthetic oligonucleotide
  Target: LAMA2; (-) strand; PAM type: NNAGAAW; PAM sequence: CAAGAAT
tttgttttatatatatataa

SEQ ID NO: 10476 - DNA, 20 bp, Artificial Sequence
  Description of Artificial Sequence: Synthetic oligonucleotide
  Target: LAMA2; (-) strand; PAM type: NNAGAAW; PAM sequence: ACAGAAT
gtatatatatatatatactt

SEQ ID NO: 10477 - DNA, 20 bp, Artificial Sequence
  Description of Artificial Sequence: Synthetic oligonucleotide
  Target: LAMA2; (-) strand; PAM type: NNAGAAW; PAM sequence: ATAGAAA
aatttttacaacagcttaga

SEQ ID NO: 10478 - DNA, 20 bp, Artificial Sequence
  Description of Artificial Sequence: Synthetic oligonucleotide
  Target: LAMA2; (-) strand; PAM type: NNAGAAW; PAM sequence: TTAGAAT
gcaataatttttacaacagc

SEQ ID NO: 10479 - DNA, 20 bp, Artificial Sequence
  Description of Artificial Sequence: Synthetic oligonucleotide
  Target: LAMA2; (-) strand; PAM type: NNAGAAW; PAM sequence: TAAGAAT
tcaacatgccctgctgaaaa

SEQ ID NO: 10480 - DNA, 20 bp, Artificial Sequence
  Description of Artificial Sequence: Synthetic oligonucleotide
  Target: LAMA2; (-) strand; PAM type: NNAGAAW; PAM sequence: TTAGAAA
gctaatatagagggagagct

SEQ ID NO: 10481 - DNA, 20 bp, Artificial Sequence
  Description of Artificial Sequence: Synthetic oligonucleotide
  Target: LAMA2; (-) strand; PAM type: NNAGAAW; PAM sequence: TCAGAAT
accttcaaaatccagttatt

SEQ ID NO: 10482 - DNA, 20 bp, Artificial Sequence
  Description of Artificial Sequence: Synthetic oligonucleotide
  Target: LAMA2; (-) strand; PAM type: NNAGAAW; PAM sequence: GAAGAAA
gtaaacaataaacaaaaagt

SEQ ID NO: 10483 - DNA, 20 bp, Artificial Sequence
  Description of Artificial Sequence: Synthetic oligonucleotide
  Target: LAMA2; (-) strand; PAM type: NNAGAAW; PAM sequence: TGAGAAA
tgagttattactcacaagaa

SEQ ID NO: 10484 - DNA, 20 bp, Artificial Sequence
  Description of Artificial Sequence: Synthetic oligonucleotide
  Target: LAMA2; (-) strand; PAM type: NNAGAAW; PAM sequence: CAAGAAT
aggagttgagttattactca

SEQ ID NO: 10485 - DNA, 20 bp, Artificial Sequence
  Description of Artificial Sequence: Synthetic oligonucleotide
  Target: LAMA2; (-) strand; PAM type: NNAGAAW; PAM sequence: AAAGAAT
aaaacttctctacaaagaaa

SEQ ID NO: 10486 - DNA, 20 bp, Artificial Sequence
  Description of Artificial Sequence: Synthetic oligonucleotide
  Target: LAMA2; (-) strand; PAM type: NNAGAAW; PAM sequence: AAAGAAA
tctctacaaaacttctctac

SEQ ID NO: 10487 - DNA, 20 bp, Artificial Sequence
  Description of Artificial Sequence: Synthetic oligonucleotide
  Target: LAMA2; (-) strand; PAM type: NNAGAAW; PAM sequence: AAAGAAT
ccaaatttcagtaactactt

SEQ ID NO: 10488 - DNA, 20 bp, Artificial Sequence
  Description of Artificial Sequence: Synthetic oligonucleotide
  Target: LAMA2; (-) strand; PAM type: NNAGAAW; PAM sequence: TAAGAAT
ctcaccttctgagacattac

SEQ ID NO: 10489 - DNA, 20 bp, Artificial Sequence
  Description of Artificial Sequence: Synthetic oligonucleotide
  Target: LAMA2; (-) strand; PAM type: NNAGAAW; PAM sequence: GCAGAAT
actattatataataaaccct

SEQ ID NO: 10490 - DNA, 20 bp, Artificial Sequence
  Description of Artificial Sequence: Synthetic oligonucleotide
  Target: LAMA2; (-) strand; PAM type: NNAGAAW; PAM sequence: CAAGAAA
agaatgctgtgagcaatctc

SEQ ID NO: 10491 - DNA, 20 bp, Artificial Sequence
  Description of Artificial Sequence: Synthetic oligonucleotide
  Target: LAMA2; (-) strand; PAM type: NNAGAAW; PAM sequence: TAAGAAT
aaaatgtccaccccctattt

SEQ ID NO: 10492 - DNA, 20 bp, Artificial Sequence
  Description of Artificial Sequence: Synthetic oligonucleotide
  Target: LAMA2; (-) strand; PAM type: NNAGAAW; PAM sequence: TAAGAAA
gtgctaaataatgctgggag

SEQ ID NO: 10493 - DNA, 20 bp, Artificial Sequence
  Description of Artificial Sequence: Synthetic oligonucleotide
  Target: LAMA2; (-) strand; PAM type: NNAGAAW; PAM sequence: TAAGAAA
attattttcattttatacat

SEQ ID NO: 10494 - DNA, 20 bp, Artificial Sequence
  Description of Artificial Sequence: Synthetic oligonucleotide
  Target: LAMA2; (-) strand; PAM type: NNAGAAW; PAM sequence: AAAGAAA
cagtcccagatgaaaactgg

SEQ ID NO: 10495 - DNA, 20 bp, Artificial Sequence
  Description of Artificial Sequence: Synthetic oligonucleotide
  Target: LAMA2; (-) strand; PAM type: NNAGAAW; PAM sequence: ACAGAAA
aagctcatgagctttgtaca

SEQ ID NO: 10496 - DNA, 20 bp, Artificial Sequence
  Description of Artificial Sequence: Synthetic oligonucleotide
  Target: LAMA2; (-) strand; PAM type: NNAGAAW; PAM sequence: TAAGAAA
gtacaggatagactattgga

SEQ ID NO: 10497 - DNA, 20 bp, Artificial Sequence
  Description of Artificial Sequence: Synthetic oligonucleotide
  Target: LAMA2; (-) strand; PAM type: NNAGAAW; PAM sequence: CTAGAAT
agaaagagctagaaactctt

SEQ ID NO: 10498 - DNA, 20 bp, Artificial Sequence
  Description of Artificial Sequence: Synthetic oligonucleotide
  Target: LAMA2; (-) strand; PAM type: NNAGAAW; PAM sequence: CTAGAAA
taacacatattcagaaagag

SEQ ID NO: 10499 - DNA, 20 bp, Artificial Sequence
  Description of Artificial Sequence: Synthetic oligonucleotide
  Target: LAMA2; (-) strand; PAM type: NNAGAAW; PAM sequence: TCAGAAA
gcgaaactgttaacacatat

SEQ ID NO: 10500 - DNA, 20 bp, Artificial Sequence
  Description of Artificial Sequence: Synthetic oligonucleotide
  Target: LAMA2; (-) strand; PAM type: NNAGAAW; PAM sequence: CCAGAAA
aactctgccatgtgctataa

SEQ ID NO: 10501 - DNA, 20 bp, Artificial Sequence
  Description of Artificial Sequence: Synthetic oligonucleotide
  Target: LAMA2; (-) strand; PAM type: NNAGAAW; PAM sequence: TAAGAAA
gttttttcctgtaatatagg

SEQ ID NO: 10502 - DNA, 20 bp, Artificial Sequence
  Description of Artificial Sequence: Synthetic oligonucleotide
  Target: LAMA2; (-) strand; PAM type: NNAGAAW; PAM sequence: GTAGAAA
tcagaggagggaggttggag

SEQ ID NO: 10503 - DNA, 20 bp, Artificial Sequence
  Description of Artificial Sequence: Synthetic oligonucleotide
  Target: LAMA2; (-) strand; PAM type: NNAGAAW; PAM sequence: CCAGAAT
gctgcaagggagttataagt

SEQ ID NO: 10504 - DNA, 20 bp, Artificial Sequence
  Description of Artificial Sequence: Synthetic oligonucleotide
  Target: LAMA2; (-) strand; PAM type: NNAGAAW; PAM sequence: GAAGAAA
gtactgaagggacattgtga

SEQ ID NO: 10505 - DNA, 20 bp, Artificial Sequence
  Description of Artificial Sequence: Synthetic oligonucleotide
  Target: LAMA2; (-) strand; PAM type: NNAGAAW; PAM sequence: AAAGAAA
attactcaggaaaatggtag

SEQ ID NO: 10506 - DNA, 20 bp, Artificial Sequence
  Description of Artificial Sequence: Synthetic oligonucleotide
  Target: LAMA2; (-) strand; PAM type: NNAGAAW; PAM sequence: GTAGAAA
ggtaattactcaggaaaatg

SEQ ID NO: 10507 - DNA, 20 bp, Artificial Sequence
  Description of Artificial Sequence: Synthetic oligonucleotide
  Target: LAMA2; (-) strand; PAM type: NNAGAAW; PAM sequence: ATAGAAT
ggtgattagaaacatttcct

SEQ ID NO: 10508 - DNA, 20 bp, Artificial Sequence
  Description of Artificial Sequence: Synthetic oligonucleotide
  Target: LAMA2; (-) strand; PAM type: NNAGAAW; PAM sequence: TTAGAAA
agagctgggggatagggtga

SEQ ID NO: 10509 - DNA, 20 bp, Artificial Sequence
  Description of Artificial Sequence: Synthetic oligonucleotide
  Target: LAMA2; (-) strand; PAM type: NNAGAAW; PAM sequence: TGAGAAA
accaggaatttgcagtttag

SEQ ID NO: 10510 - DNA, 20 bp, Artificial Sequence
  Description of Artificial Sequence: Synthetic oligonucleotide
  Target: LAMA2; (-) strand; PAM type: NNAGAAW; PAM sequence: ATAGAAT
ttctagaggttagaagaaga

SEQ ID NO: 10511 - DNA, 20 bp, Artificial Sequence
  Description of Artificial Sequence: Synthetic oligonucleotide
  Target: LAMA2; (-) strand; PAM type: NNAGAAW; PAM sequence: GAAGAAT
ctaggttctagaggttagaa

SEQ ID NO: 10512 - DNA, 20 bp, Artificial Sequence
  Description of Artificial Sequence: Synthetic oligonucleotide
  Target: LAMA2; (-) strand; PAM type: NNAGAAW; PAM sequence: AAAGAAT
catccctttattcactcaac

SEQ ID NO: 10513 - DNA, 20 bp, Artificial Sequence
  Description of Artificial Sequence: Synthetic oligonucleotide
  Target: LAMA2; (-) strand; PAM type: NNAGAAW; PAM sequence: ACAGAAA
ttctcttatcttttgtgtaa

SEQ ID NO: 10514 - DNA, 20 bp, Artificial Sequence
  Description of Artificial Sequence: Synthetic oligonucleotide
  Target: LAMA2; (-) strand; PAM type: NNAGAAW; PAM sequence: CCAGAAA
agatgaggccttaaatgatc

SEQ ID NO: 10515 - DNA, 20 bp, Artificial Sequence
  Description of Artificial Sequence: Synthetic oligonucleotide
  Target: LAMA2; (-) strand; PAM type: NNAGAAW; PAM sequence: AAAGAAT
cataaaatttgagggctgga

SEQ ID NO: 10516 - DNA, 20 bp, Artificial Sequence
  Description of Artificial Sequence: Synthetic oligonucleotide
  Target: LAMA2; (-) strand; PAM type: NNAGAAW; PAM sequence: ATAGAAA
attctttttttatgactctc

SEQ ID NO: 10517 - DNA, 20 bp, Artificial Sequence
  Description of Artificial Sequence: Synthetic oligonucleotide
  Target: LAMA2; (-) strand; PAM type: NNAGAAW; PAM sequence: CTAGAAA
ttgattttaacccaccttga

SEQ ID NO: 10518 - DNA, 20 bp, Artificial Sequence
  Description of Artificial Sequence: Synthetic oligonucleotide
  Target: LAMA2; (-) strand; PAM type: NNAGAAW; PAM sequence: AGAGAAT
aatgtgtatgcttctcttgc

SEQ ID NO: 10519 - DNA, 20 bp, Artificial Sequence
  Description of Artificial Sequence: Synthetic oligonucleotide
  Target: LAMA2; (-) strand; PAM type: NNAGAAW; PAM sequence: TTAGAAT
taataaacatttgaaatgct

SEQ ID NO: 10520 - DNA, 20 bp, Artificial Sequence
  Description of Artificial Sequence: Synthetic oligonucleotide
  Target: LAMA2; (-) strand; PAM type: NNAGAAW; PAM sequence: ACAGAAA
tgctcagggtatgcacagca

SEQ ID NO: 10521 - DNA, 20 bp, Artificial Sequence
  Description of Artificial Sequence: Synthetic oligonucleotide
  Target: LAMA2; (-) strand; PAM type: NNAGAAW; PAM sequence: TCAGAAA
ttatgagagtaatatgtcta

SEQ ID NO: 10522 - DNA, 20 bp, Artificial Sequence
  Description of Artificial Sequence: Synthetic oligonucleotide
  Target: LAMA2; (-) strand; PAM type: NNAGAAW; PAM sequence: GAAGAAA
aaaatcatggagacagcgaa

SEQ ID NO: 10523 - DNA, 20 bp, Artificial Sequence
  Description of Artificial Sequence: Synthetic oligonucleotide
  Target: LAMA2; (-) strand; PAM type: NNAGAAW; PAM sequence: CAAGAAA
aaagaaatgaattatcaagg

SEQ ID NO: 10524 - DNA, 20 bp, Artificial Sequence
  Description of Artificial Sequence: Synthetic oligonucleotide
  Target: LAMA2; (-) strand; PAM type: NNAGAAW; PAM sequence: AAAGAAA
aaaatagtattcagagctaa

SEQ ID NO: 10525 - DNA, 20 bp, Artificial Sequence
  Description of Artificial Sequence: Synthetic oligonucleotide
  Target: LAMA2; (-) strand; PAM type: NNAGAAW; PAM sequence: TGAGAAT
gaactcttgttcattgctgg

SEQ ID NO: 10526 - DNA, 20 bp, Artificial Sequence
  Description of Artificial Sequence: Synthetic oligonucleotide
  Target: LAMA2; (-) strand; PAM type: NNAGAAW; PAM sequence: GGAGAAA
tgaaatgctggtgagaatgt

SEQ ID NO: 10527 - DNA, 20 bp, Artificial Sequence
  Description of Artificial Sequence: Synthetic oligonucleotide
  Target: LAMA2; (-) strand; PAM type: NNAGAAW; PAM sequence: TGAGAAT
ttgacaatatgaaatgctgg

SEQ ID NO: 10528 - DNA, 20 bp, Artificial Sequence
  Description of Artificial Sequence: Synthetic oligonucleotide
  Target: LAMA2; (-) strand; PAM type: NNAGAAW; PAM sequence: TTAGAAT
gatataccactacatatcta

SEQ ID NO: 10529 - DNA, 20 bp, Artificial Sequence
  Description of Artificial Sequence: Synthetic oligonucleotide
  Target: LAMA2; (-) strand; PAM type: NNAGAAW; PAM sequence: AGAGAAT
gctcatcatcttacatcatt

SEQ ID NO: 10530 - DNA, 20 bp, Artificial Sequence
  Description of Artificial Sequence: Synthetic oligonucleotide
  Target: LAMA2; (-) strand; PAM type: NNAGAAW; PAM sequence: CAAGAAA
gaactcttaaatctcaacaa

SEQ ID NO: 10531 - DNA, 20 bp, Artificial Sequence
  Description of Artificial Sequence: Synthetic oligonucleotide
  Target: LAMA2; (-) strand; PAM type: NNAGAAW; PAM sequence: CAAGAAA
ataagagaaactaccatttg

SEQ ID NO: 10532 - DNA, 20 bp, Artificial Sequence
  Description of Artificial Sequence: Synthetic oligonucleotide
  Target: LAMA2; (-) strand; PAM type: NNAGAAW; PAM sequence: AGAGAAA
aagacactgtgaagagaata

SEQ ID NO: 10533 - DNA, 20 bp, Artificial Sequence
  Description of Artificial Sequence: Synthetic oligonucleotide
  Target: LAMA2; (-) strand; PAM type: NNAGAAW; PAM sequence: AGAGAAT
ctctgtgaaagacactgtga

SEQ ID NO: 10534 - DNA, 20 bp, Artificial Sequence
  Description of Artificial Sequence: Synthetic oligonucleotide
  Target: LAMA2; (-) strand; PAM type: NNAGAAW; PAM sequence: GAAGAAA
gactcttggaagataacata

SEQ ID NO: 10535 - DNA, 20 bp, Artificial Sequence
  Description of Artificial Sequence: Synthetic oligonucleotide
  Target: LAMA2; (-) strand; PAM type: NNAGAAW; PAM sequence: ACAGAAA
tcaggtattctgttatagca

SEQ ID NO: 10536 - DNA, 20 bp, Artificial Sequence
  Description of Artificial Sequence: Synthetic oligonucleotide
  Target: LAMA2; (-) strand; PAM type: NNAGAAW; PAM sequence: TTAGAAT
ggacatcatttgtgttatgg

SEQ ID NO: 10537 - DNA, 20 bp, Artificial Sequence
  Description of Artificial Sequence: Synthetic oligonucleotide
  Target: LAMA2; (-) strand; PAM type: NNAGAAW; PAM sequence: CTAGAAA
agtgttttcaacaaatggca

SEQ ID NO: 10538 - DNA, 20 bp, Artificial Sequence
  Description of Artificial Sequence: Synthetic oligonucleotide
  Target: LAMA2; (-) strand; PAM type: NNAGAAW; PAM sequence: GAAGAAA
aggagcaaagggaattcaat

SEQ ID NO: 10539 - DNA, 20 bp, Artificial Sequence
  Description of Artificial Sequence: Synthetic oligonucleotide
  Target: LAMA2; (-) strand; PAM type: NNAGAAW; PAM sequence: CCAGAAA
aatggaacagaatagccagc

SEQ ID NO: 10540 - DNA, 20 bp, Artificial Sequence
  Description of Artificial Sequence: Synthetic oligonucleotide
  Target: LAMA2; (-) strand; PAM type: NNAGAAW; PAM sequence: ACAGAAT
aagtcacttagatcaatgga

SEQ ID NO: 10541 - DNA, 20 bp, Artificial Sequence
  Description of Artificial Sequence: Synthetic oligonucleotide
  Target: LAMA2; (-) strand; PAM type: NNAGAAW; PAM sequence: TCAGAAA
tcaagacaatatagtactgg

SEQ ID NO: 10542 - DNA, 20 bp, Artificial Sequence
  Description of Artificial Sequence: Synthetic oligonucleotide
  Target: LAMA2; (-) strand; PAM type: NNAGAAW; PAM sequence: AAAGAAA
aaactccagtgaaagaaatc

SEQ ID NO: 10543 - DNA, 20 bp, Artificial Sequence
  Description of Artificial Sequence: Synthetic oligonucleotide
  Target: LAMA2; (-) strand; PAM type: NNAGAAW; PAM sequence: AAAGAAA
aaaactataaaactccagtg

SEQ ID NO: 10544 - DNA, 20 bp, Artificial Sequence
  Description of Artificial Sequence: Synthetic oligonucleotide
  Target: LAMA2; (-) strand; PAM type: NNAGAAW; PAM sequence: AAAGAAA
ttgctttcctatatattagc

SEQ ID NO: 10545 - DNA, 20 bp, Artificial Sequence
  Description of Artificial Sequence: Synthetic oligonucleotide
  Target: LAMA2; (-) strand; PAM type: NNAGAAW; PAM sequence: GAAGAAA
tcacttgattccatctgtct

SEQ ID NO: 10546 - DNA, 20 bp, Artificial Sequence
  Description of Artificial Sequence: Synthetic oligonucleotide
  Target: LAMA2; (-) strand; PAM type: NNAGAAW; PAM sequence: TGAGAAT
tatggttctcagaaggaaga

SEQ ID NO: 10547 - DNA, 20 bp, Artificial Sequence
  Description of Artificial Sequence: Synthetic oligonucleotide
  Target: LAMA2; (-) strand; PAM type: NNAGAAW; PAM sequence: TTAGAAT
tcagaagctttgatatagga

SEQ ID NO: 10548 - DNA, 20 bp, Artificial Sequence
  Description of Artificial Sequence: Synthetic oligonucleotide
  Target: LAMA2; (-) strand; PAM type: NNAGAAW; PAM sequence: TCAGAAA
atatctctctgcagcatcct

SEQ ID NO: 10549 - DNA, 20 bp, Artificial Sequence
  Description of Artificial Sequence: Synthetic oligonucleotide
  Target: LAMA2; (-) strand; PAM type: NNAGAAW; PAM sequence: TAAGAAA
aaatagatatgagctgggct

SEQ ID NO: 10550 - DNA, 20 bp, Artificial Sequence
  Description of Artificial Sequence: Synthetic oligonucleotide
  Target: LAMA2; (-) strand; PAM type: NNAGAAW; PAM sequence: TGAGAAA
tctatgatatcacacagcct

SEQ ID NO: 10551 - DNA, 20 bp, Artificial Sequence
  Description of Artificial Sequence: Synthetic oligonucleotide
  Target: LAMA2; (-) strand; PAM type: NNAGAAW; PAM sequence: GAAGAAA
agtgacaaaggatacaaggt

SEQ ID NO: 10552 - DNA, 20 bp, Artificial Sequence
  Description of Artificial Sequence: Synthetic oligonucleotide
  Target: LAMA2; (-) strand; PAM type: NNAGAAW; PAM sequence: AAAGAAT
gtctcatgagttattagatt

SEQ ID NO: 10553 - DNA, 20 bp, Artificial Sequence
  Description of Artificial Sequence: Synthetic oligonucleotide
  Target: LAMA2; (-) strand; PAM type: NNAGAAW; PAM sequence: TAAGAAT
tcaagggaaagcaagggggt

SEQ ID NO: 10554 - DNA, 20 bp, Artificial Sequence
  Description of Artificial Sequence: Synthetic oligonucleotide
  Target: LAMA2; (-) strand; PAM type: NNAGAAW; PAM sequence: GAAGAAA
tttttaaaaaccaaagaaga

SEQ ID NO: 10555 - DNA, 20 bp, Artificial Sequence
  Description of Artificial Sequence: Synthetic oligonucleotide
  Target: LAMA2; (-) strand; PAM type: NNAGAAW; PAM sequence: ACAGAAA
tgttaatactggatcagtac

SEQ ID NO: 10556 - DNA, 20 bp, Artificial Sequence
  Description of Artificial Sequence: Synthetic oligonucleotide
  Target: LAMA2; (-) strand; PAM type: NNAGAAW; PAM sequence: GCAGAAT
tctactgtggtgtttaatct

SEQ ID NO: 10557 - DNA, 20 bp, Artificial Sequence
  Description of Artificial Sequence: Synthetic oligonucleotide
  Target: LAMA2; (-) strand; PAM type: NNAGAAW; PAM sequence: CTAGAAT
tgattcattcattacatatt

SEQ ID NO: 10558 - DNA, 20 bp, Artificial Sequence
  Description of Artificial Sequence: Synthetic oligonucleotide
  Target: LAMA2; (-) strand; PAM type: NNAGAAW; PAM sequence: TAAGAAT
aaagatataataattttctt

SEQ ID NO: 10559 - DNA, 20 bp, Artificial Sequence
  Description of Artificial Sequence: Synthetic oligonucleotide
  Target: LAMA2; (-) strand; PAM type: NNAGAAW; PAM sequence: ATAGAAT
acaaaaatcatgcatcataa

SEQ ID NO: 10560 - DNA, 20 bp, Artificial Sequence
  Description of Artificial Sequence: Synthetic oligonucleotide
  Target: LAMA2; (-) strand; PAM type: NNAGAAW; PAM sequence: GAAGAAA
catgttgggacttatatatg

SEQ ID NO: 10561 - DNA, 20 bp, Artificial Sequence
  Description of Artificial Sequence: Synthetic oligonucleotide
  Target: LAMA2; (-) strand; PAM type: NNAGAAW; PAM sequence: ATAGAAA
ctaatagacatagactgatt

SEQ ID NO: 10562 - DNA, 20 bp, Artificial Sequence
  Description of Artificial Sequence: Synthetic oligonucleotide
  Target: LAMA2; (-) strand; PAM type: NNAGAAW; PAM sequence: AAAGAAA
aggagagtatataattgcta

SEQ ID NO: 10563 - DNA, 20 bp, Artificial Sequence
  Description of Artificial Sequence: Synthetic oligonucleotide
  Target: LAMA2; (-) strand; PAM type: NNAGAAW; PAM sequence: GGAGAAA
tattgaaagcactatttata

SEQ ID NO: 10564 - DNA, 20 bp, Artificial Sequence
  Description of Artificial Sequence: Synthetic oligonucleotide
  Target: LAMA2; (-) strand; PAM type: NNAGAAW; PAM sequence: AGAGAAA
taggaacagagtattccaaa

SEQ ID NO: 10565 - DNA, 20 bp, Artificial Sequence
  Description of Artificial Sequence: Synthetic oligonucleotide
  Target: LAMA2; (-) strand; PAM type: NNAGAAW; PAM sequence: TGAGAAA
ttatttttctcaaaggactt

SEQ ID NO: 10566 - DNA, 20 bp, Artificial Sequence
  Description of Artificial Sequence: Synthetic oligonucleotide
  Target: LAMA2; (-) strand; PAM type: NNAGAAW; PAM sequence: GAAGAAA
aagaaattaaaagtctagaa

SEQ ID NO: 10567 - DNA, 20 bp, Artificial Sequence
  Description of Artificial Sequence: Synthetic oligonucleotide
  Target: LAMA2; (-) strand; PAM type: NNAGAAW; PAM sequence: CAAGAAA
gtaaaatgcgttccttcctt

SEQ ID NO: 10568 - DNA, 20 bp, Artificial Sequence
  Description of Artificial Sequence: Synthetic oligonucleotide
  Target: LAMA2; (-) strand; PAM type: NNAGAAW; PAM sequence: TCAGAAT
atctaatttacattttcccc

SEQ ID NO: 10569 - DNA, 20 bp, Artificial Sequence
  Description of Artificial Sequence: Synthetic oligonucleotide
  Target: LAMA2; (-) strand; PAM type: NNAGAAW; PAM sequence: TGAGAAA
taatgaatgttactgaaaaa

SEQ ID NO: 10570 - DNA, 20 bp, Artificial Sequence
  Description of Artificial Sequence: Synthetic oligonucleotide
  Target: LAMA2; (-) strand; PAM type: NNAGAAW; PAM sequence: ACAGAAT
atagtcaattttcagaaagt

SEQ ID NO: 10571 - DNA, 20 bp, Artificial Sequence
  Description of Artificial Sequence: Synthetic oligonucleotide
  Target: LAMA2; (-) strand; PAM type: NNAGAAW; PAM sequence: TCAGAAA
ttctttattatagtcaattt

SEQ ID NO: 10572 - DNA, 20 bp, Artificial Sequence
  Description of Artificial Sequence: Synthetic oligonucleotide
  Target: LAMA2; (-) strand; PAM type: NNAGAAW; PAM sequence: ATAGAAA
tacttttttcaatataacat

SEQ ID NO: 10573 - DNA, 20 bp, Artificial Sequence
  Description of Artificial Sequence: Synthetic oligonucleotide
  Target: LAMA2; (-) strand; PAM type: NNAGAAW; PAM sequence: AAAGAAT
agatattctttaaggaataa

SEQ ID NO: 10574 - DNA, 20 bp, Artificial Sequence
  Description of Artificial Sequence: Synthetic oligonucleotide
  Target: LAMA2; (-) strand; PAM type: NNAGAAW; PAM sequence: AAAGAAA
aagtgtctgtcttatttttt

SEQ ID NO: 10575 - DNA, 20 bp, Artificial Sequence
  Description of Artificial Sequence: Synthetic oligonucleotide
  Target: LAMA2; (-) strand; PAM type: NNAGAAW; PAM sequence: TGAGAAT
ttgtccttgtgatagtttac

SEQ ID NO: 10576 - DNA, 20 bp, Artificial Sequence
  Description of Artificial Sequence: Synthetic oligonucleotide
  Target: LAMA2; (-) strand; PAM type: NNAGAAW; PAM sequence: ATAGAAA
gagctacaaatcatatactg

SEQ ID NO: 10577 - DNA, 20 bp, Artificial Sequence
  Description of Artificial Sequence: Synthetic oligonucleotide
  Target: LAMA2; (-) strand; PAM type: NNAGAAW; PAM sequence: GCAGAAA
atattttctagctatattat

SEQ ID NO: 10578 - DNA, 20 bp, Artificial Sequence
  Description of Artificial Sequence: Synthetic oligonucleotide
  Target: LAMA2; (-) strand; PAM type: NNAGAAW; PAM sequence: AAAGAAA
tccaaatgaaaaaaaaaaaa

SEQ ID NO: 10579 - DNA, 20 bp, Artificial Sequence
  Description of Artificial Sequence: Synthetic oligonucleotide
  Target: LAMA2; (-) strand; PAM type: NNAGAAW; PAM sequence: TAAGAAA
caatttatattagcactata

SEQ ID NO: 10580 - DNA, 20 bp, Artificial Sequence
  Description of Artificial Sequence: Synthetic oligonucleotide
  Target: LAMA2; (-) strand; PAM type: NNAGAAW; PAM sequence: CTAGAAA
atttcctttagtatatacat

SEQ ID NO: 10581 - DNA, 20 bp, Artificial Sequence
  Description of Artificial Sequence: Synthetic oligonucleotide
  Target: LAMA2; (-) strand; PAM type: NNAGAAW; PAM sequence: TAAGAAT
ctatgtaccaggcattattc

SEQ ID NO: 10582 - DNA, 20 bp, Artificial Sequence
  Description of Artificial Sequence: Synthetic oligonucleotide
  Target: LAMA2; (-) strand; PAM type: NNAGAAW; PAM sequence: CTAGAAA
ttgtagggacatggatgaag

SEQ ID NO: 10583 - DNA, 20 bp, Artificial Sequence
  Description of Artificial Sequence: Synthetic oligonucleotide
  Target: LAMA2; (-) strand; PAM type: NNAGAAW; PAM sequence: TAAGAAA
ccatcaatgatagactggat

SEQ ID NO: 10584 - DNA, 20 bp, Artificial Sequence
  Description of Artificial Sequence: Synthetic oligonucleotide
  Target: LAMA2; (-) strand; PAM type: NNAGAAW; PAM sequence: CTAGAAA
gattcctcaaggatctagaa

SEQ ID NO: 10585 - DNA, 20 bp, Artificial Sequence
  Description of Artificial Sequence: Synthetic oligonucleotide
  Target: LAMA2; (-) strand; PAM type: NNAGAAW; PAM sequence: GGAGAAA
acaggtgctggagaggatgt

SEQ ID NO: 10586 - DNA, 20 bp, Artificial Sequence
  Description of Artificial Sequence: Synthetic oligonucleotide
  Target: LAMA2; (-) strand; PAM type: NNAGAAW; PAM sequence: AGAGAAA
gctcatcatcactggccatc

SEQ ID NO: 10587 - DNA, 20 bp, Artificial Sequence
  Description of Artificial Sequence: Synthetic oligonucleotide
  Target: LAMA2; (-) strand; PAM type: NNAGAAW; PAM sequence: CAAGAAA
aaagaactcaaacaaactta

SEQ ID NO: 10588 - DNA, 20 bp, Artificial Sequence
  Description of Artificial Sequence: Synthetic oligonucleotide
  Target: LAMA2; (-) strand; PAM type: NNAGAAW; PAM sequence: CCAGAAT
atctgacaaagggctaatat

SEQ ID NO: 10589 - DNA, 20 bp, Artificial Sequence
  Description of Artificial Sequence: Synthetic oligonucleotide
  Target: LAMA2; (-) strand; PAM type: NNAGAAW; PAM sequence: ACAGAAT
tcagagtgaacaggcaacct

SEQ ID NO: 10590 - DNA, 20 bp, Artificial Sequence
  Description of Artificial Sequence: Synthetic oligonucleotide
  Target: LAMA2; (-) strand; PAM type: NNAGAAW; PAM sequence: AAAGAAA
taaagagcttctgcacagca

SEQ ID NO: 10591 - DNA, 20 bp, Artificial Sequence
  Description of Artificial Sequence: Synthetic oligonucleotide
  Target: LAMA2; (-) strand; PAM type: NNAGAAW; PAM sequence: GAAGAAA
ataaaaccataaaaacccta

SEQ ID NO: 10592 - DNA, 20 bp, Artificial Sequence
  Description of Artificial Sequence: Synthetic oligonucleotide
  Target: LAMA2; (-) strand; PAM type: NNAGAAW; PAM sequence: GTAGAAA
ggaaaactggctagccatat

SEQ ID NO: 10593 - DNA, 20 bp, Artificial Sequence
  Description of Artificial Sequence: Synthetic oligonucleotide
  Target: LAMA2; (-) strand; PAM type: NNAGAAW; PAM sequence: TCAGAAA
aatggaacagaatagagccc

SEQ ID NO: 10594 - DNA, 20 bp, Artificial Sequence
  Description of Artificial Sequence: Synthetic oligonucleotide
  Target: LAMA2; (-) strand; PAM type: NNAGAAW; PAM sequence: ACAGAAT
gagagatgtagatcaatgga

SEQ ID NO: 10595 - DNA, 20 bp, Artificial Sequence
  Description of Artificial Sequence: Synthetic oligonucleotide
  Target: LAMA2; (-) strand; PAM type: NNAGAAW; PAM sequence: ACAGAAT
agctaccagtgactttcttc

SEQ ID NO: 10596 - DNA, 20 bp, Artificial Sequence
  Description of Artificial Sequence: Synthetic oligonucleotide
  Target: LAMA2; (-) strand; PAM type: NNAGAAW; PAM sequence: GAAGAAT
cattccatgcttatggatag

SEQ ID NO: 10597 - DNA, 20 bp, Artificial Sequence
  Description of Artificial Sequence: Synthetic oligonucleotide
  Target: LAMA2; (-) strand; PAM type: NNAGAAW; PAM sequence: AGAGAAT
cctattcacaattgcttcaa

SEQ ID NO: 10598 - DNA, 20 bp, Artificial Sequence
  Description of Artificial Sequence: Synthetic oligonucleotide
  Target: LAMA2; (-) strand; PAM type: NNAGAAW; PAM sequence: GTAGAAA
tctcaggatacaaaatcaat

SEQ ID NO: 10599 - DNA, 20 bp, Artificial Sequence
  Description of Artificial Sequence: Synthetic oligonucleotide
  Target: LAMA2; (-) strand; PAM type: NNAGAAW; PAM sequence: TTAGAAA
cagatgacataattgtatat

SEQ ID NO: 10600 - DNA, 20 bp, Artificial Sequence
  Description of Artificial Sequence: Synthetic oligonucleotide
  Target: LAMA2; (-) strand; PAM type: NNAGAAW; PAM sequence: GGAGAAA
ctggccagggcaatcaggca

SEQ ID NO: 10601 - DNA, 20 bp, Artificial Sequence
  Description of Artificial Sequence: Synthetic oligonucleotide
  Target: LAMA2; (-) strand; PAM type: NNAGAAW; PAM sequence: GCAGAAA
acatgattatctcaataaat

SEQ ID NO: 10602 - DNA, 20 bp, Artificial Sequence
  Description of Artificial Sequence: Synthetic oligonucleotide
  Target: LAMA2; (-) strand; PAM type: NNAGAAW; PAM sequence: AGAGAAT
tggcagagacacaacaaaaa

SEQ ID NO: 10603 - DNA, 20 bp, Artificial Sequence
  Description of Artificial Sequence: Synthetic oligonucleotide
  Target: LAMA2; (-) strand; PAM type: NNAGAAW; PAM sequence: ATAGAAA
ttctgaaactattccaatca

SEQ ID NO: 10604 - DNA, 20 bp, Artificial Sequence
  Description of Artificial Sequence: Synthetic oligonucleotide
  Target: LAMA2; (-) strand; PAM type: NNAGAAW; PAM sequence: GAAGAAA
caaataaactagaaaatctt

SEQ ID NO: 10605 - DNA, 20 bp, Artificial Sequence
  Description of Artificial Sequence: Synthetic oligonucleotide
  Target: LAMA2; (-) strand; PAM type: NNAGAAW; PAM sequence: CTAGAAA
aacacctctatgcaaataaa

SEQ ID NO: 10606 - DNA, 20 bp, Artificial Sequence
  Description of Artificial Sequence: Synthetic oligonucleotide
  Target: LAMA2; (-) strand; PAM type: NNAGAAW; PAM sequence: AGAGAAT
cagaaatacaaactaccatc

SEQ ID NO: 10607 - DNA, 20 bp, Artificial Sequence
  Description of Artificial Sequence: Synthetic oligonucleotide
  Target: LAMA2; (-) strand; PAM type: NNAGAAW; PAM sequence: ACAGAAA
gggatatcaccaccgatccc

SEQ ID NO: 10608 - DNA, 20 bp, Artificial Sequence
  Description of Artificial Sequence: Synthetic oligonucleotide
  Target: LAMA2; (-) strand; PAM type: NNAGAAW; PAM sequence: GAAGAAT
ctaataaagaagaaaagaga

SEQ ID NO: 10609 - DNA, 20 bp, Artificial Sequence
  Description of Artificial Sequence: Synthetic oligonucleotide
  Target: LAMA2; (-) strand; PAM type: NNAGAAW; PAM sequence: GAAGAAA
ctgctagcaagactaataaa

SEQ ID NO: 10610 - DNA, 20 bp, Artificial Sequence
  Description of Artificial Sequence: Synthetic oligonucleotide
  Target: LAMA2; (-) strand; PAM type: NNAGAAW; PAM sequence: CAAGAAA
actcaaaagctagcagaagg

SEQ ID NO: 10611 - DNA, 20 bp, Artificial Sequence
  Description of Artificial Sequence: Synthetic oligonucleotide
  Target: LAMA2; (-) strand; PAM type: NNAGAAW; PAM sequence: AGAGAAA
tatagcactaaatgcccaca

SEQ ID NO: 10612 - DNA, 20 bp, Artificial Sequence
  Description of Artificial Sequence: Synthetic oligonucleotide
  Target: LAMA2; (-) strand; PAM type: NNAGAAW; PAM sequence: CCAGAAT
gagaacaaagatacaacata

SEQ ID NO: 10613 - DNA, 20 bp, Artificial Sequence
  Description of Artificial Sequence: Synthetic oligonucleotide
  Target: LAMA2; (-) strand; PAM type: NNAGAAW; PAM sequence: TAAGAAA
atcaaactagaactcaggat

SEQ ID NO: 10614 - DNA, 20 bp, Artificial Sequence
  Description of Artificial Sequence: Synthetic oligonucleotide
  Target: LAMA2; (-) strand; PAM type: NNAGAAW; PAM sequence: TCAGAAA
tcctcagcaaatgtaaaaga

SEQ ID NO: 10615 - DNA, 20 bp, Artificial Sequence
  Description of Artificial Sequence: Synthetic oligonucleotide
  Target: LAMA2; (-) strand; PAM type: NNAGAAW; PAM sequence: ACAGAAT
gaactctccaccccaaatca

SEQ ID NO: 10616 - DNA, 20 bp, Artificial Sequence
  Description of Artificial Sequence: Synthetic oligonucleotide
  Target: LAMA2; (-) strand; PAM type: NNAGAAW; PAM sequence: ACAGAAA
acattagacagatcaacgag

SEQ ID NO: 10617 - DNA, 20 bp, Artificial Sequence
  Description of Artificial Sequence: Synthetic oligonucleotide
  Target: LAMA2; (-) strand; PAM type: NNAGAAW; PAM sequence: ATAGAAA
gaggaagatctaccaaggaa

SEQ ID NO: 10618 - DNA, 20 bp, Artificial Sequence
  Description of Artificial Sequence: Synthetic oligonucleotide
  Target: LAMA2; (-) strand; PAM type: NNAGAAW; PAM sequence: GAAGAAA
gtaaagaccatcgatgctag

SEQ ID NO: 10619 - DNA, 20 bp, Artificial Sequence
  Description of Artificial Sequence: Synthetic oligonucleotide
  Target: LAMA2; (-) strand; PAM type: NNAGAAW; PAM sequence: GGAGAAA
aactaagcttcataagtgaa

SEQ ID NO: 10620 - DNA, 20 bp, Artificial Sequence
  Description of Artificial Sequence: Synthetic oligonucleotide
  Target: LAMA2; (-) strand; PAM type: NNAGAAW; PAM sequence: CCAGAAT
taaagaaaagaattttcaac

SEQ ID NO: 10621 - DNA, 20 bp, Artificial Sequence
  Description of Artificial Sequence: Synthetic oligonucleotide
  Target: LAMA2; (-) strand; PAM type: NNAGAAW; PAM sequence: AAAGAAT
atattcaacattcttaaaga

SEQ ID NO: 10622 - DNA, 20 bp, Artificial Sequence
  Description of Artificial Sequence: Synthetic oligonucleotide
  Target: LAMA2; (-) strand; PAM type: NNAGAAW; PAM sequence: AAAGAAA
ggccaatattcaacattctt

SEQ ID NO: 10623 - DNA, 20 bp, Artificial Sequence
  Description of Artificial Sequence: Synthetic oligonucleotide
  Target: LAMA2; (-) strand; PAM type: NNAGAAW; PAM sequence: GCAGAAA
gactaacagcagatcgctcg

SEQ ID NO: 10624 - DNA, 20 bp, Artificial Sequence
  Description of Artificial Sequence: Synthetic oligonucleotide
  Target: LAMA2; (-) strand; PAM type: NNAGAAW; PAM sequence: AGAGAAA
aaaatgttaagggcagccag

SEQ ID NO: 10625 - DNA, 20 bp, Artificial Sequence
  Description of Artificial Sequence: Synthetic oligonucleotide
  Target: LAMA2; (-) strand; PAM type: NNAGAAW; PAM sequence: AGAGAAT
cattcaaattcaggaaacac

SEQ ID NO: 10626 - DNA, 20 bp, Artificial Sequence
  Description of Artificial Sequence: Synthetic oligonucleotide
  Target: LAMA2; (-) strand; PAM type: NNAGAAW; PAM sequence: GGAGAAT
tgggtacatgaaagtggcgg

SEQ ID NO: 10627 - DNA, 20 bp, Artificial Sequence
  Description of Artificial Sequence: Synthetic oligonucleotide
  Target: LAMA2; (-) strand; PAM type: NNAGAAW; PAM sequence: CAAGAAA
aaggaaacgaacaaagcctc

SEQ ID NO: 10628 - DNA, 20 bp, Artificial Sequence
  Description of Artificial Sequence: Synthetic oligonucleotide
  Target: LAMA2; (-) strand; PAM type: NNAGAAW; PAM sequence: AGAGAAA
tgaagtgagaagagaagttt

SEQ ID NO: 10629 - DNA, 20 bp, Artificial Sequence
  Description of Artificial Sequence: Synthetic oligonucleotide
  Target: LAMA2; (-) strand; PAM type: NNAGAAW; PAM sequence: GAAGAAA
ggagctgattcgatcaactg

SEQ ID NO: 10630 - DNA, 20 bp, Artificial Sequence
  Description of Artificial Sequence: Synthetic oligonucleotide
  Target: LAMA2; (-) strand; PAM type: NNAGAAW; PAM sequence: CTAGAAT
aagataggacaaatggctac

SEQ ID NO: 10631 - DNA, 20 bp, Artificial Sequence
  Description of Artificial Sequence: Synthetic oligonucleotide
  Target: LAMA2; (-) strand; PAM type: NNAGAAW; PAM sequence: GGAGAAT
gcaatggaacaaagctggat

SEQ ID NO: 10632 - DNA, 20 bp, Artificial Sequence
  Description of Artificial Sequence: Synthetic oligonucleotide
  Target: LAMA2; (-) strand; PAM type: NNAGAAW; PAM sequence: ATAGAAA
gtaagaaggaaaactaacaa

SEQ ID NO: 10633 - DNA, 20 bp, Artificial Sequence
  Description of Artificial Sequence: Synthetic oligonucleotide
  Target: LAMA2; (-) strand; PAM type: NNAGAAW; PAM sequence: TGAGAAT
ccagcatggagtttgagatc

SEQ ID NO: 10634 - DNA, 20 bp, Artificial Sequence
  Description of Artificial Sequence: Synthetic oligonucleotide
  Target: LAMA2; (-) strand; PAM type: NNAGAAW; PAM sequence: GCAGAAA
acatagccgaacaaaagaca

SEQ ID NO: 10635 - DNA, 20 bp, Artificial Sequence
  Description of Artificial Sequence: Synthetic oligonucleotide
  Target: LAMA2; (-) strand; PAM type: NNAGAAW; PAM sequence: ACAGAAT
cagctcccagcatgagcgac

SEQ ID NO: 10636 - DNA, 20 bp, Artificial Sequence
  Description of Artificial Sequence: Synthetic oligonucleotide
  Target: LAMA2; (-) strand; PAM type: NNAGAAW; PAM sequence: TTAGAAA
acaatatattacaatctttt

SEQ ID NO: 10637 - DNA, 20 bp, Artificial Sequence
  Description of Artificial Sequence: Synthetic oligonucleotide
  Target: LAMA2; (-) strand; PAM type: NNAGAAW; PAM sequence: TGAGAAA
taaataagtaatttgaagta

SEQ ID NO: 10638 - DNA, 20 bp, Artificial Sequence
  Description of Artificial Sequence: Synthetic oligonucleotide
  Target: LAMA2; (-) strand; PAM type: NNAGAAW; PAM sequence: GGAGAAA
ggacagttagagccacagct

SEQ ID NO: 10639 - DNA, 20 bp, Artificial Sequence
  Description of Artificial Sequence: Synthetic oligonucleotide
  Target: LAMA2; (-) strand; PAM type: NNAGAAW; PAM sequence: AAAGAAT
atggattagctgagagcagt

SEQ ID NO: 10640 - DNA, 20 bp, Artificial Sequence
  Description of Artificial Sequence: Synthetic oligonucleotide
  Target: LAMA2; (-) strand; PAM type: NNAGAAW; PAM sequence: CTAGAAA
ttgtattcactgtttggaaa

SEQ ID NO: 10641 - DNA, 20 bp, Artificial Sequence
  Description of Artificial Sequence: Synthetic oligonucleotide
  Target: LAMA2; (-) strand; PAM type: NNAGAAW; PAM sequence: CTAGAAT
attaatattctctcttctaa

SEQ ID NO: 10642 - DNA, 20 bp, Artificial Sequence
  Description of Artificial Sequence: Synthetic oligonucleotide
  Target: LAMA2; (-) strand; PAM type: NNAGAAW; PAM sequence: CAAGAAA
ctgtgtttctcattgcattg

SEQ ID NO: 10643 - DNA, 20 bp, Artificial Sequence
  Description of Artificial Sequence: Synthetic oligonucleotide
  Target: LAMA2; (-) strand; PAM type: NNAGAAW; PAM sequence: CTAGAAA
tctatgcccttattttcttt

SEQ ID NO: 10644 - DNA, 20 bp, Artificial Sequence
  Description of Artificial Sequence: Synthetic oligonucleotide
  Target: LAMA2; (-) strand; PAM type: NNAGAAW; PAM sequence: TAAGAAT
ctcaattattttctattttc

SEQ ID NO: 10645 - DNA, 20 bp, Artificial Sequence
  Description of Artificial Sequence: Synthetic oligonucleotide
  Target: LAMA2; (-) strand; PAM type: NNAGAAW; PAM sequence: GAAGAAA
ctgctgagctggatacatct

SEQ ID NO: 10646 - DNA, 20 bp, Artificial Sequence
  Description of Artificial Sequence: Synthetic oligonucleotide
  Target: LAMA2; (-) strand; PAM type: NNAGAAW; PAM sequence: AAAGAAA
aggccttgtatagtcctata

SEQ ID NO: 10647 - DNA, 20 bp, Artificial Sequence
  Description of Artificial Sequence: Synthetic oligonucleotide
  Target: LAMA2; (-) strand; PAM type: NNAGAAW; PAM sequence: ATAGAAA
agccttgctttggggaacat

SEQ ID NO: 10648 - DNA, 20 bp, Artificial Sequence
  Description of Artificial Sequence: Synthetic oligonucleotide
  Target: LAMA2; (-) strand; PAM type: NNAGAAW; PAM sequence: TAAGAAA
catttcagttactatttgtc

SEQ ID NO: 10649 - DNA, 20 bp, Artificial Sequence
  Description of Artificial Sequence: Synthetic oligonucleotide
  Target: LAMA2; (-) strand; PAM type: NNAGAAW; PAM sequence: CCAGAAT
aatggaagggaagtgaacaa

SEQ ID NO: 10650 - DNA, 20 bp, Artificial Sequence
  Description of Artificial Sequence: Synthetic oligonucleotide
  Target: LAMA2; (-) strand; PAM type: NNAGAAW; PAM sequence: CTAGAAA
ggaataaagtgtgtgtatgc

SEQ ID NO: 10651 - DNA, 20 bp, Artificial Sequence
  Description of Artificial Sequence: Synthetic oligonucleotide
  Target: LAMA2; (-) strand; PAM type: NNAGAAW; PAM sequence: AAAGAAA
tattttaatcatcaatgtaa

SEQ ID NO: 10652 - DNA, 20 bp, Artificial Sequence
  Description of Artificial Sequence: Synthetic oligonucleotide
  Target: LAMA2; (-) strand; PAM type: NNAGAAW; PAM sequence: CAAGAAA
gatgataatattctgccaaa

SEQ ID NO: 10653 - DNA, 20 bp, Artificial Sequence
  Description of Artificial Sequence: Synthetic oligonucleotide
  Target: LAMA2; (-) strand; PAM type: NNAGAAW; PAM sequence: TTAGAAT
aggaagaagctgagatctcc

SEQ ID NO: 10654 - DNA, 20 bp, Artificial Sequence
  Description of Artificial Sequence: Synthetic oligonucleotide
  Target: LAMA2; (-) strand; PAM type: NNAGAAW; PAM sequence: TAAGAAT
cctggcagacactgctataa

SEQ ID NO: 10655 - DNA, 20 bp, Artificial Sequence
  Description of Artificial Sequence: Synthetic oligonucleotide
  Target: LAMA2; (-) strand; PAM type: NNAGAAW; PAM sequence: TCAGAAA
ataggatggccccacagtct

SEQ ID NO: 10656 - DNA, 20 bp, Artificial Sequence
  Description of Artificial Sequence: Synthetic oligonucleotide
  Target: LAMA2; (-) strand; PAM type: NNAGAAW; PAM sequence: GGAGAAA
atttgggggaaggtaaatat

SEQ ID NO: 10657 - DNA, 20 bp, Artificial Sequence
  Description of Artificial Sequence: Synthetic oligonucleotide
  Target: LAMA2; (-) strand; PAM type: NNAGAAW; PAM sequence: CCAGAAT
atacctgagggattcactag

SEQ ID NO: 10658 - DNA, 20 bp, Artificial Sequence
  Description of Artificial Sequence: Synthetic oligonucleotide
  Target: LAMA2; (-) strand; PAM type: NNAGAAW; PAM sequence: AAAGAAA
acatacaaatcagtcaatat

SEQ ID NO: 10659 - DNA, 20 bp, Artificial Sequence
  Description of Artificial Sequence: Synthetic oligonucleotide
  Target: LAMA2; (-) strand; PAM type: NNAGAAW; PAM sequence: CCAGAAA
gggactctccatctttaaag

SEQ ID NO: 10660 - DNA, 20 bp, Artificial Sequence
  Description of Artificial Sequence: Synthetic oligonucleotide
  Target: LAMA2; (-) strand; PAM type: NNAGAAW; PAM sequence: GCAGAAT
cttgttcattcaggttgttg

SEQ ID NO: 10661 - DNA, 20 bp, Artificial Sequence
  Description of Artificial Sequence: Synthetic oligonucleotide
  Target: LAMA2; (-) strand; PAM type: NNAGAAW; PAM sequence: GGAGAAT
tcctttctggtggctctaga

SEQ ID NO: 10662 - DNA, 20 bp, Artificial Sequence
  Description of Artificial Sequence: Synthetic oligonucleotide
  Target: LAMA2; (-) strand; PAM type: NNAGAAW; PAM sequence: TAAGAAT
ctctctaacacactttatta

SEQ ID NO: 10663 - DNA, 20 bp, Artificial Sequence
  Description of Artificial Sequence: Synthetic oligonucleotide
  Target: LAMA2; (-) strand; PAM type: NNAGAAW; PAM sequence: GAAGAAA
atacttcctttctgtttaaa

SEQ ID NO: 10664 - DNA, 20 bp, Artificial Sequence
  Description of Artificial Sequence: Synthetic oligonucleotide
  Target: LAMA2; (-) strand; PAM type: NNAGAAW; PAM sequence: TAAGAAT
agtctcatattggagtccag

SEQ ID NO: 10665 - DNA, 20 bp, Artificial Sequence
  Description of Artificial Sequence: Synthetic oligonucleotide
  Target: LAMA2; (-) strand; PAM type: NNAGAAW; PAM sequence: ATAGAAA
caggccttgcaaaccaatgg

SEQ ID NO: 10666 - DNA, 20 bp, Artificial Sequence
  Description of Artificial Sequence: Synthetic oligonucleotide
  Target: LAMA2; (-) strand; PAM type: NNAGAAW; PAM sequence: GAAGAAT
atataacaacaactagattg

SEQ ID NO: 10667 - DNA, 20 bp, Artificial Sequence
  Description of Artificial Sequence: Synthetic oligonucleotide
  Target: LAMA2; (-) strand; PAM type: NNAGAAW; PAM sequence: CAAGAAA
tgtgatataagtaaaaaact

SEQ ID NO: 10668 - DNA, 20 bp, Artificial Sequence
  Description of Artificial Sequence: Synthetic oligonucleotide
  Target: LAMA2; (-) strand; PAM type: NNAGAAW; PAM sequence: GAAGAAA
aagataacatgtatatggta

SEQ ID NO: 10669 - DNA, 20 bp, Artificial Sequence
  Description of Artificial Sequence: Synthetic oligonucleotide
  Target: LAMA2; (-) strand; PAM type: NNAGAAW; PAM sequence: CTAGAAT
acatttccatctaaaataaa

SEQ ID NO: 10670 - DNA, 20 bp, Artificial Sequence
  Description of Artificial Sequence: Synthetic oligonucleotide
  Target: LAMA2; (-) strand; PAM type: NNAGAAW; PAM sequence: TCAGAAA
aaaattatcttcttaacatt

SEQ ID NO: 10671 - DNA, 20 bp, Artificial Sequence
  Description of Artificial Sequence: Synthetic oligonucleotide
  Target: LAMA2; (-) strand; PAM type: NNAGAAW; PAM sequence: TTAGAAT
agtgtctttgagtcttcttg

SEQ ID NO: 10672 - DNA, 20 bp, Artificial Sequence
  Description of Artificial Sequence: Synthetic oligonucleotide
  Target: LAMA2; (-) strand; PAM type: NNAGAAW; PAM sequence: GCAGAAT
tttgaagaggtgctgaccat

SEQ ID NO: 10673 - DNA, 20 bp, Artificial Sequence
  Description of Artificial Sequence: Synthetic oligonucleotide
  Target: LAMA2; (-) strand; PAM type: NNAGAAW; PAM sequence: TAAGAAA
aactgttctttactattttc

SEQ ID NO: 10674 - DNA, 20 bp, Artificial Sequence
  Description of Artificial Sequence: Synthetic oligonucleotide
  Target: LAMA2; (-) strand; PAM type: NNAGAAW; PAM sequence: TGAGAAA
ataaagctgagcatttttta

SEQ ID NO: 10675 - DNA, 20 bp, Artificial Sequence
  Description of Artificial Sequence: Synthetic oligonucleotide
  Target: LAMA2; (-) strand; PAM type: NNAGAAW; PAM sequence: AAAGAAA
aggagaagaagaaagaagaa

SEQ ID NO: 10676 - DNA, 20 bp, Artificial Sequence
  Description of Artificial Sequence: Synthetic oligonucleotide
  Target: LAMA2; (-) strand; PAM type: NNAGAAW; PAM sequence: GAAGAAA
agaggaaggagaagaagaaa

SEQ ID NO: 10677 - DNA, 20 bp, Artificial Sequence
  Description of Artificial Sequence: Synthetic oligonucleotide
  Target: LAMA2; (-) strand; PAM type: NNAGAAW; PAM sequence: GAAGAAA
acccaaaagaggaaggagaa

SEQ ID NO: 10678 - DNA, 20 bp, Artificial Sequence
  Description of Artificial Sequence: Synthetic oligonucleotide
  Target: LAMA2; (-) strand; PAM type: NNAGAAW; PAM sequence: TTAGAAT
tatcttgagtagataaatca

SEQ ID NO: 10679 - DNA, 20 bp, Artificial Sequence
  Description of Artificial Sequence: Synthetic oligonucleotide
  Target: LAMA2; (-) strand; PAM type: NNAGAAW; PAM sequence: ACAGAAA
atgtctcagttgagtatctc

SEQ ID NO: 10680 - DNA, 20 bp, Artificial Sequence
  Description of Artificial Sequence: Synthetic oligonucleotide
  Target: LAMA2; (-) strand; PAM type: NNAGAAW; PAM sequence: ATAGAAT
aacaaaatgaaaaccaaaat

SEQ ID NO: 10681 - DNA, 20 bp, Artificial Sequence
  Description of Artificial Sequence: Synthetic oligonucleotide
  Target: LAMA2; (-) strand; PAM type: NNAGAAW; PAM sequence: GAAGAAA
ttttatagaagggtgacatt

SEQ ID NO: 10682 - DNA, 20 bp, Artificial Sequence
  Description of Artificial Sequence: Synthetic oligonucleotide
  Target: LAMA2; (-) strand; PAM type: NNAGAAW; PAM sequence: ATAGAAA
atctattaaaacatggaaga

SEQ ID NO: 10683 - DNA, 20 bp, Artificial Sequence
  Description of Artificial Sequence: Synthetic oligonucleotide
  Target: LAMA2; (-) strand; PAM type: NNAGAAW; PAM sequence: GAAGAAT
tattaatctattaaaacatg

SEQ ID NO: 10684 - DNA, 20 bp, Artificial Sequence
  Description of Artificial Sequence: Synthetic oligonucleotide
  Target: LAMA2; (-) strand; PAM type: NNAGAAW; PAM sequence: GAAGAAA
catatacttacacatataat

SEQ ID NO: 10685 - DNA, 20 bp, Artificial Sequence
  Description of Artificial Sequence: Synthetic oligonucleotide
  Target: LAMA2; (-) strand; PAM type: NNAGAAW; PAM sequence: TAAGAAT
ccacacacaaccttatgtgg

SEQ ID NO: 10686 - DNA, 20 bp, Artificial Sequence
  Description of Artificial Sequence: Synthetic oligonucleotide
  Target: LAMA2; (-) strand; PAM type: NNAGAAW; PAM sequence: ACAGAAA
caacaacaacaacaacaaca

SEQ ID NO: 10687 - DNA, 20 bp, Artificial Sequence
  Description of Artificial Sequence: Synthetic oligonucleotide
  Target: LAMA2; (-) strand; PAM type: NNAGAAW; PAM sequence: AGAGAAT
gctactcgggaggctgaggc

SEQ ID NO: 10688 - DNA, 20 bp, Artificial Sequence
  Description of Artificial Sequence: Synthetic oligonucleotide
  Target: LAMA2; (-) strand; PAM type: NNAGAAW; PAM sequence: TGAGAAA
cacagttataagggtgcatg

SEQ ID NO: 10689 - DNA, 20 bp, Artificial Sequence
  Description of Artificial Sequence: Synthetic oligonucleotide
  Target: LAMA2; (-) strand; PAM type: NNAGAAW; PAM sequence: TCAGAAT
attcttgggattcagtaagt

SEQ ID NO: 10690 - DNA, 20 bp, Artificial Sequence
  Description of Artificial Sequence: Synthetic oligonucleotide
  Target: LAMA2; (-) strand; PAM type: NNAGAAW; PAM sequence: ATAGAAT
tgttctatagtaacaggcag

SEQ ID NO: 10691 - DNA, 20 bp, Artificial Sequence
  Description of Artificial Sequence: Synthetic oligonucleotide
  Target: LAMA2; (-) strand; PAM type: NNAGAAW; PAM sequence: AAAGAAA
cctactttgaagggttttaa

SEQ ID NO: 10692 - DNA, 20 bp, Artificial Sequence
  Description of Artificial Sequence: Synthetic oligonucleotide
  Target: LAMA2; (-) strand; PAM type: NNAGAAW; PAM sequence: TAAGAAT
ataatgcaaaagtatatgtt

SEQ ID NO: 10693 - DNA, 20 bp, Artificial Sequence
  Description of Artificial Sequence: Synthetic oligonucleotide
  Target: LAMA2; (-) strand; PAM type: NNAGAAW; PAM sequence: TTAGAAT
gctaacattttcatggaact

SEQ ID NO: 10694 - DNA, 20 bp, Artificial Sequence
  Description of Artificial Sequence: Synthetic oligonucleotide
  Target: LAMA2; (-) strand; PAM type: NNAGAAW; PAM sequence: CTAGAAT
tgatgattcaattgaataat

SEQ ID NO: 10695 - DNA, 20 bp, Artificial Sequence
  Description of Artificial Sequence: Synthetic oligonucleotide
  Target: LAMA2; (-) strand; PAM type: NNAGAAW; PAM sequence: GGAGAAA
tacagcaatacatttcatta

SEQ ID NO: 10696 - DNA, 20 bp, Artificial Sequence
  Description of Artificial Sequence: Synthetic oligonucleotide
  Target: LAMA2; (-) strand; PAM type: NNAGAAW; PAM sequence: ATAGAAT
gaaatttctattgtagggta

SEQ ID NO: 10697 - DNA, 20 bp, Artificial Sequence
  Description of Artificial Sequence: Synthetic oligonucleotide
  Target: LAMA2; (-) strand; PAM type: NNAGAAW; PAM sequence: ATAGAAA
agatccacctgtctggggtg

SEQ ID NO: 10698 - DNA, 20 bp, Artificial Sequence
  Description of Artificial Sequence: Synthetic oligonucleotide
  Target: LAMA2; (-) strand; PAM type: NNAGAAW; PAM sequence: TAAGAAT
tccctccagaaaaccctgtg

SEQ ID NO: 10699 - DNA, 20 bp, Artificial Sequence
  Description of Artificial Sequence: Synthetic oligonucleotide
  Target: LAMA2; (-) strand; PAM type: NNAGAAW; PAM sequence: CCAGAAA
atcctattagttctgtccct

SEQ ID NO: 10700 - DNA, 20 bp, Artificial Sequence
  Description of Artificial Sequence: Synthetic oligonucleotide
  Target: LAMA2; (-) strand; PAM type: NNAGAAW; PAM sequence: CTAGAAT
ggcaggagaacgtggaaggt

SEQ ID NO: 10701 - DNA, 20 bp, Artificial Sequence
  Description of Artificial Sequence: Synthetic oligonucleotide
  Target: LAMA2; (-) strand; PAM type: NNAGAAW; PAM sequence: GGAGAAT
aacctgtatgagaaagcgtt

SEQ ID NO: 10702 - DNA, 20 bp, Artificial Sequence
  Description of Artificial Sequence: Synthetic oligonucleotide
  Target: LAMA2; (-) strand; PAM type: NNAGAAW; PAM sequence: TGAGAAA
gtggagaaatagaacctgta

SEQ ID NO: 10703 - DNA, 20 bp, Artificial Sequence
  Description of Artificial Sequence: Synthetic oligonucleotide
  Target: LAMA2; (-) strand; PAM type: NNAGAAW; PAM sequence: GGAGAAA
aaaatctcactgttcatagt

SEQ ID NO: 10704 - DNA, 20 bp, Artificial Sequence
  Description of Artificial Sequence: Synthetic oligonucleotide
  Target: LAMA2; (-) strand; PAM type: NNAGAAW; PAM sequence: CCAGAAA
ttgaaggcctatcaagtata

SEQ ID NO: 10705 - DNA, 20 bp, Artificial Sequence
  Description of Artificial Sequence: Synthetic oligonucleotide
  Target: LAMA2; (-) strand; PAM type: NNAGAAW; PAM sequence: GGAGAAA
aagtttgatctgcagttgaa

SEQ ID NO: 10706 - DNA, 20 bp, Artificial Sequence
  Description of Artificial Sequence: Synthetic oligonucleotide
  Target: LAMA2; (-) strand; PAM type: NNAGAAW; PAM sequence: TGAGAAA
agtttgctcttaggatgaaa

SEQ ID NO: 10707 - DNA, 20 bp, Artificial Sequence
  Description of Artificial Sequence: Synthetic oligonucleotide
  Target: LAMA2; (-) strand; PAM type: NNAGAAW; PAM sequence: GGAGAAT
atactaagtcacactccaga

SEQ ID NO: 10708 - DNA, 20 bp, Artificial Sequence
  Description of Artificial Sequence: Synthetic oligonucleotide
  Target: LAMA2; (-) strand; PAM type: NNAGAAW; PAM sequence: TAAGAAT
tggttgtgaattttagaaga

SEQ ID NO: 10709 - DNA, 20 bp, Artificial Sequence
  Description of Artificial Sequence: Synthetic oligonucleotide
  Target: LAMA2; (-) strand; PAM type: NNAGAAW; PAM sequence: GTAGAAA
ggtgattctttcttacagca

SEQ ID NO: 10710 - DNA, 20 bp, Artificial Sequence
  Description of Artificial Sequence: Synthetic oligonucleotide
  Target: LAMA2; (-) strand; PAM type: NNAGAAW; PAM sequence: CCAGAAA
aatagcagacaacgtatttc

SEQ ID NO: 10711 - DNA, 20 bp, Artificial Sequence
  Description of Artificial Sequence: Synthetic oligonucleotide
  Target: LAMA2; (-) strand; PAM type: NNAGAAW; PAM sequence: ATAGAAA
agggaggaacaatagaaagt

SEQ ID NO: 10712 - DNA, 20 bp, Artificial Sequence
  Description of Artificial Sequence: Synthetic oligonucleotide
  Target: LAMA2; (-) strand; PAM type: NNAGAAW; PAM sequence: ATAGAAA
ctgttgcaaagggaggaaca

SEQ ID NO: 10713 - DNA, 20 bp, Artificial Sequence
  Description of Artificial Sequence: Synthetic oligonucleotide
  Target: LAMA2; (-) strand; PAM type: NNAGAAW; PAM sequence: TGAGAAT
aatgcaattttctttttaaa

SEQ ID NO: 10714 - DNA, 20 bp, Artificial Sequence
  Description of Artificial Sequence: Synthetic oligonucleotide
  Target: LAMA2; (-) strand; PAM type: NNAGAAW; PAM sequence: AAAGAAA
aatagataacaaatgaataa

SEQ ID NO: 10715 - DNA, 20 bp, Artificial Sequence
  Description of Artificial Sequence: Synthetic oligonucleotide
  Target: LAMA2; (-) strand; PAM type: NNAGAAW; PAM sequence: AGAGAAA
tccaagttcctttaagctaa

SEQ ID NO: 10716 - DNA, 20 bp, Artificial Sequence
  Description of Artificial Sequence: Synthetic oligonucleotide
  Target: LAMA2; (-) strand; PAM type: NNAGAAW; PAM sequence: ACAGAAA
catcaatgctgattaaaata

SEQ ID NO: 10717 - DNA, 20 bp, Artificial Sequence
  Description of Artificial Sequence: Synthetic oligonucleotide
  Target: LAMA2; (-) strand; PAM type: NNAGAAW; PAM sequence: CAAGAAA
aattttttcaaggtctctgc

SEQ ID NO: 10718 - DNA, 20 bp, Artificial Sequence
  Description of Artificial Sequence: Synthetic oligonucleotide
  Target: LAMA2; (-) strand; PAM type: NNAGAAW; PAM sequence: TTAGAAA
catagaagaagatgatgtgc

SEQ ID NO: 10719 - DNA, 20 bp, Artificial Sequence
  Description of Artificial Sequence: Synthetic oligonucleotide
  Target: LAMA2; (-) strand; PAM type: NNAGAAW; PAM sequence: TAAGAAT
atttgaagagtttgatcagg

SEQ ID NO: 10720 - DNA, 20 bp, Artificial Sequence
  Description of Artificial Sequence: Synthetic oligonucleotide
  Target: LAMA2; (-) strand; PAM type: NNAGAAW; PAM sequence: ATAGAAT
tcagctataattcaaagtaa

SEQ ID NO: 10721 - DNA, 20 bp, Artificial Sequence
  Description of Artificial Sequence: Synthetic oligonucleotide
  Target: LAMA2; (-) strand; PAM type: NNAGAAW; PAM sequence: CTAGAAA
tcgaacagagacaacacatt

SEQ ID NO: 10722 - DNA, 20 bp, Artificial Sequence
  Description of Artificial Sequence: Synthetic oligonucleotide
  Target: LAMA2; (-) strand; PAM type: NNAGAAW; PAM sequence: ATAGAAA
agttacatcatccttaatgc

SEQ ID NO: 10723 - DNA, 20 bp, Artificial Sequence
  Description of Artificial Sequence: Synthetic oligonucleotide
  Target: LAMA2; (-) strand; PAM type: NNAGAAW; PAM sequence: GCAGAAT
attgtagaattagaaaacag

SEQ ID NO: 10724 - DNA, 20 bp, Artificial Sequence
  Description of Artificial Sequence: Synthetic oligonucleotide
  Target: LAMA2; (-) strand; PAM type: NNAGAAW; PAM sequence: TTAGAAA
taaacaagaggattgtagaa

SEQ ID NO: 10725 - DNA, 20 bp, Artificial Sequence
  Description of Artificial Sequence: Synthetic oligonucleotide
  Target: LAMA2; (-) strand; PAM type: NNAGAAW; PAM sequence: GTAGAAT
agaacataaacaagaggatt

SEQ ID NO: 10726 - DNA, 20 bp, Artificial Sequence
  Description of Artificial Sequence: Synthetic oligonucleotide
  Target: LAMA2; (-) strand; PAM type: NNAGAAW; PAM sequence: TTAGAAT
ctttaaaagctcgataatta

SEQ ID NO: 10727 - DNA, 20 bp, Artificial Sequence
  Description of Artificial Sequence: Synthetic oligonucleotide
  Target: LAMA2; (-) strand; PAM type: NNAGAAW; PAM sequence: ATAGAAA
ttgtagagctctcttttatc

SEQ ID NO: 10728 - DNA, 20 bp, Artificial Sequence
  Description of Artificial Sequence: Synthetic oligonucleotide
  Target: LAMA2; (-) strand; PAM type: NNAGAAW; PAM sequence: TGAGAAA
agggatacacaaaaatcaaa

SEQ ID NO: 10729 - DNA, 20 bp, Artificial Sequence
  Description of Artificial Sequence: Synthetic oligonucleotide
  Target: LAMA2; (-) strand; PAM type: NNAGAAW; PAM sequence: CAAGAAA
ttttttttccctctcaatct

SEQ ID NO: 10730 - DNA, 20 bp, Artificial Sequence
  Description of Artificial Sequence: Synthetic oligonucleotide
  Target: LAMA2; (-) strand; PAM type: NNAGAAW; PAM sequence: AAAGAAT
tcataaaactaagcttcata

SEQ ID NO: 10731 - DNA, 20 bp, Artificial Sequence
  Description of Artificial Sequence: Synthetic oligonucleotide
  Target: LAMA2; (-) strand; PAM type: NNAGAAW; PAM sequence: TAAGAAA
gttcttcagcttcaccccat

SEQ ID NO: 10732 - DNA, 20 bp, Artificial Sequence
  Description of Artificial Sequence: Synthetic oligonucleotide
  Target: LAMA2; (-) strand; PAM type: NNAGAAW; PAM sequence: AGAGAAA
tatatctcttttcaatacaa

SEQ ID NO: 10733 - DNA, 20 bp, Artificial Sequence
  Description of Artificial Sequence: Synthetic oligonucleotide
  Target: LAMA2; (-) strand; PAM type: NNAGAAW; PAM sequence: AGAGAAA
ctgtcattgttctcttggct

SEQ ID NO: 10734 - DNA, 20 bp, Artificial Sequence
  Description of Artificial Sequence: Synthetic oligonucleotide
  Target: LAMA2; (-) strand; PAM type: NNAGAAW; PAM sequence: AAAGAAA
atttgactagtaagaagact

SEQ ID NO: 10735 - DNA, 20 bp, Artificial Sequence
  Description of Artificial Sequence: Synthetic oligonucleotide
  Target: LAMA2; (-) strand; PAM type: NNAGAAW; PAM sequence: CCAGAAT
tttaaaaatgaattttcctg

SEQ ID NO: 10736 - DNA, 20 bp, Artificial Sequence
  Description of Artificial Sequence: Synthetic oligonucleotide
  Target: LAMA2; (-) strand; PAM type: NNAGAAW; PAM sequence: TGAGAAT
acgctatgaacattctgaac

SEQ ID NO: 10737 - DNA, 20 bp, Artificial Sequence
  Description of Artificial Sequence: Synthetic oligonucleotide
  Target: LAMA2; (-) strand; PAM type: NNAGAAW; PAM sequence: TAAGAAA
gttgtttggcactaactact

SEQ ID NO: 10738 - DNA, 20 bp, Artificial Sequence
  Description of Artificial Sequence: Synthetic oligonucleotide
  Target: LAMA2; (-) strand; PAM type: NNAGAAW; PAM sequence: TAAGAAA
aggccactttatatctttat

SEQ ID NO: 10739 - DNA, 20 bp, Artificial Sequence
  Description of Artificial Sequence: Synthetic oligonucleotide
  Target: LAMA2; (-) strand; PAM type: NNAGAAW; PAM sequence: TAAGAAT
agaacatgctatattccact

SEQ ID NO: 10740 - DNA, 20 bp, Artificial Sequence
  Description of Artificial Sequence: Synthetic oligonucleotide
  Target: LAMA2; (-) strand; PAM type: NNAGAAW; PAM sequence: TTAGAAT
gccctcgcttctgcactctc

SEQ ID NO: 10741 - DNA, 20 bp, Artificial Sequence
  Description of Artificial Sequence: Synthetic oligonucleotide
  Target: LAMA2; (-) strand; PAM type: NNAGAAW; PAM sequence: AAAGAAT
cctttcctcttgctttagat

SEQ ID NO: 10742 - DNA, 20 bp, Artificial Sequence
  Description of Artificial Sequence: Synthetic oligonucleotide
  Target: LAMA2; (-) strand; PAM type: NNAGAAW; PAM sequence: TGAGAAT
attattcagggaaaaagctt

SEQ ID NO: 10743 - DNA, 20 bp, Artificial Sequence
  Description of Artificial Sequence: Synthetic oligonucleotide
  Target: LAMA2; (-) strand; PAM type: NNAGAAW; PAM sequence: TTAGAAT
agttacccatttacacaata

SEQ ID NO: 10744 - DNA, 20 bp, Artificial Sequence
  Description of Artificial Sequence: Synthetic oligonucleotide
  Target: LAMA2; (-) strand; PAM type: NNAGAAW; PAM sequence: ATAGAAA
tataaaacatgaactaagga

SEQ ID NO: 10745 - DNA, 20 bp, Artificial Sequence
  Description of Artificial Sequence: Synthetic oligonucleotide
  Target: LAMA2; (-) strand; PAM type: NNAGAAW; PAM sequence: GCAGAAA
aaagaggaacaaataaatac

SEQ ID NO: 10746 - DNA, 20 bp, Artificial Sequence
  Description of Artificial Sequence: Synthetic oligonucleotide
  Target: LAMA2; (-) strand; PAM type: NNAGAAW; PAM sequence: TGAGAAT
caataaggttcctgctcctg

SEQ ID NO: 10747 - DNA, 20 bp, Artificial Sequence
  Description of Artificial Sequence: Synthetic oligonucleotide
  Target: LAMA2; (-) strand; PAM type: NNAGAAW; PAM sequence: GTAGAAA
ctgttacgactatagatgaa

SEQ ID NO: 10748 - DNA, 20 bp, Artificial Sequence
  Description of Artificial Sequence: Synthetic oligonucleotide
  Target: LAMA2; (-) strand; PAM type: NNAGAAW; PAM sequence: AAAGAAA
atatggcttctctaaaaagg

SEQ ID NO: 10749 - DNA, 20 bp, Artificial Sequence
  Description of Artificial Sequence: Synthetic oligonucleotide
  Target: LAMA2; (-) strand; PAM type: NNAGAAW; PAM sequence: GAAGAAT
acgtttgaaaggaggtttgg

SEQ ID NO: 10750 - DNA, 20 bp, Artificial Sequence
  Description of Artificial Sequence: Synthetic oligonucleotide
  Target: LAMA2; (-) strand; PAM type: NNAGAAW; PAM sequence: TTAGAAT
tcaaacaaggactgaactat

SEQ ID NO: 10751 - DNA, 20 bp, Artificial Sequence
  Description of Artificial Sequence: Synthetic oligonucleotide
  Target: LAMA2; (-) strand; PAM type: NNAGAAW; PAM sequence: GGAGAAA
aaaaggattctagaaaggca

SEQ ID NO: 10752 - DNA, 20 bp, Artificial Sequence
  Description of Artificial Sequence: Synthetic oligonucleotide
  Target: LAMA2; (-) strand; PAM type: NNAGAAW; PAM sequence: CTAGAAA
attttctcaataaaaggatt

SEQ ID NO: 10753 - DNA, 20 bp, Artificial Sequence
  Description of Artificial Sequence: Synthetic oligonucleotide
  Target: LAMA2; (-) strand; PAM type: NNAGAAW; PAM sequence: TGAGAAA
ctctgattcccctaatccac

SEQ ID NO: 10754 - DNA, 20 bp, Artificial Sequence
  Description of Artificial Sequence: Synthetic oligonucleotide
  Target: LAMA2; (-) strand; PAM type: NNAGAAW; PAM sequence: TCAGAAA
gctctataaggaacttaaat

SEQ ID NO: 10755 - DNA, 20 bp, Artificial Sequence
  Description of Artificial Sequence: Synthetic oligonucleotide
  Target: LAMA2; (-) strand; PAM type: NNAGAAW; PAM sequence: AGAGAAT
gattcctcttagtgttccac

SEQ ID NO: 10756 - DNA, 20 bp, Artificial Sequence
  Description of Artificial Sequence: Synthetic oligonucleotide
  Target: LAMA2; (-) strand; PAM type: NNAGAAW; PAM sequence: TCAGAAA
gacagtcaccttgtagaaat

SEQ ID NO: 10757 - DNA, 20 bp, Artificial Sequence
  Description of Artificial Sequence: Synthetic oligonucleotide
  Target: LAMA2; (-) strand; PAM type: NNAGAAW; PAM sequence: GTAGAAA
ctgacattgacagtcacctt

SEQ ID NO: 10758 - DNA, 20 bp, Artificial Sequence
  Description of Artificial Sequence: Synthetic oligonucleotide
  Target: LAMA2; (-) strand; PAM type: NNAGAAW; PAM sequence: AAAGAAA
gctgagaaatgttattggtc

SEQ ID NO: 10759 - DNA, 20 bp, Artificial Sequence
  Description of Artificial Sequence: Synthetic oligonucleotide
  Target: LAMA2; (-) strand; PAM type: NNAGAAW; PAM sequence: TGAGAAA
acatagcccatacactaagc

SEQ ID NO: 10760 - DNA, 20 bp, Artificial Sequence
  Description of Artificial Sequence: Synthetic oligonucleotide
  Target: LAMA2; (-) strand; PAM type: NNAGAAW; PAM sequence: CCAGAAA
ggagagttctaaccatctga

SEQ ID NO: 10761 - DNA, 20 bp, Artificial Sequence
  Description of Artificial Sequence: Synthetic oligonucleotide
  Target: LAMA2; (-) strand; PAM type: NNAGAAW; PAM sequence: GCAGAAA
tagggcagtatttgcaagac

SEQ ID NO: 10762 - DNA, 20 bp, Artificial Sequence
  Description of Artificial Sequence: Synthetic oligonucleotide
  Target: LAMA2; (-) strand; PAM type: NNAGAAW; PAM sequence: AGAGAAA
ataaaatctatctggaagca

SEQ ID NO: 10763 - DNA, 20 bp, Artificial Sequence
  Description of Artificial Sequence: Synthetic oligonucleotide
  Target: LAMA2; (-) strand; PAM type: NNAGAAW; PAM sequence: TAAGAAA
attggaaagaatggatatga

SEQ ID NO: 10764 - DNA, 20 bp, Artificial Sequence
  Description of Artificial Sequence: Synthetic oligonucleotide
  Target: LAMA2; (-) strand; PAM type: NNAGAAW; PAM sequence: AAAGAAT
gggaggagatacattattgg

SEQ ID NO: 10765 - DNA, 20 bp, Artificial Sequence
  Description of Artificial Sequence: Synthetic oligonucleotide
  Target: LAMA2; (-) strand; PAM type: NNAGAAW; PAM sequence: AAAGAAT
ggaaaatgtccattttgaga

SEQ ID NO: 10766 - DNA, 20 bp, Artificial Sequence
  Description of Artificial Sequence: Synthetic oligonucleotide
  Target: LAMA2; (-) strand; PAM type: NNAGAAW; PAM sequence: TGAGAAA
atactggaaaatgtccattt

SEQ ID NO: 10767 - DNA, 20 bp, Artificial Sequence
  Description of Artificial Sequence: Synthetic oligonucleotide
  Target: LAMA2; (-) strand; PAM type: NNAGAAW; PAM sequence: ACAGAAA
agagagagagaaagagagag

SEQ ID NO: 10768 - DNA, 20 bp, Artificial Sequence
  Description of Artificial Sequence: Synthetic oligonucleotide
  Target: LAMA2; (-) strand; PAM type: NNAGAAW; PAM sequence: AGAGAAA
aaagagagagacagagagag

SEQ ID NO: 10769 - DNA, 20 bp, Artificial Sequence
  Description of Artificial Sequence: Synthetic oligonucleotide
  Target: LAMA2; (-) strand; PAM type: NNAGAAW; PAM sequence: AGAGAAA
agagagagagagagagagag

SEQ ID NO: 10770 - DNA, 20 bp, Artificial Sequence
  Description of Artificial Sequence: Synthetic oligonucleotide
  Target: LAMA2; (-) strand; PAM type: NNAGAAW; PAM sequence: AAAGAAA
ggttgtgtagaacaataggg

SEQ ID NO: 10771 - DNA, 20 bp, Artificial Sequence
  Description of Artificial Sequence: Synthetic oligonucleotide
  Target: LAMA2; (-) strand; PAM type: NNAGAAW; PAM sequence: AAAGAAA
ttaccctaaagggggaaaaa

SEQ ID NO: 10772 - DNA, 20 bp, Artificial Sequence
  Description of Artificial Sequence: Synthetic oligonucleotide
  Target: LAMA2; (-) strand; PAM type: NNAGAAW; PAM sequence: TCAGAAA
aggtttaagagaaaaatctt

SEQ ID NO: 10773 - DNA, 20 bp, Artificial Sequence
  Description of Artificial Sequence: Synthetic oligonucleotide
  Target: LAMA2; (-) strand; PAM type: NNAGAAW; PAM sequence: AGAGAAA
tttaaaactgtaaaggttta

SEQ ID NO: 10774 - DNA, 20 bp, Artificial Sequence
  Description of Artificial Sequence: Synthetic oligonucleotide
  Target: LAMA2; (-) strand; PAM type: NNAGAAW; PAM sequence: AAAGAAT
cacatgttctgacaattgtg

SEQ ID NO: 10775 - DNA, 20 bp, Artificial Sequence
  Description of Artificial Sequence: Synthetic oligonucleotide
  Target: LAMA2; (-) strand; PAM type: NNAGAAW; PAM sequence: CCAGAAA
acaatctatatactattaag

SEQ ID NO: 10776 - DNA, 20 bp, Artificial Sequence
  Description of Artificial Sequence: Synthetic oligonucleotide
  Target: LAMA2; (-) strand; PAM type: NNAGAAW; PAM sequence: AAAGAAA
ctatatccactttacactga

SEQ ID NO: 10777 - DNA, 20 bp, Artificial Sequence
  Description of Artificial Sequence: Synthetic oligonucleotide
  Target: LAMA2; (-) strand; PAM type: NNAGAAW; PAM sequence: CAAGAAA
aaaaaagggggcggggagaa

SEQ ID NO: 10778 - DNA, 20 bp, Artificial Sequence
  Description of Artificial Sequence: Synthetic oligonucleotide
  Target: LAMA2; (-) strand; PAM type: NNAGAAW; PAM sequence: GTAGAAA
ttgtgttatttattattaga

SEQ ID NO: 10779 - DNA, 20 bp, Artificial Sequence
  Description of Artificial Sequence: Synthetic oligonucleotide
  Target: LAMA2; (-) strand; PAM type: NNAGAAW; PAM sequence: GAAGAAT
gcattttaacccagcttcta

SEQ ID NO: 10780 - DNA, 20 bp, Artificial Sequence
  Description of Artificial Sequence: Synthetic oligonucleotide
  Target: LAMA2; (-) strand; PAM type: NNAGAAW; PAM sequence: ACAGAAA
tgctttaggtaatgtaggtg

SEQ ID NO: 10781 - DNA, 20 bp, Artificial Sequence
  Description of Artificial Sequence: Synthetic oligonucleotide
  Target: LAMA2; (-) strand; PAM type: NNAGAAW; PAM sequence: ATAGAAA
tttgggatgaagtagataag

SEQ ID NO: 10782 - DNA, 20 bp, Artificial Sequence
  Description of Artificial Sequence: Synthetic oligonucleotide
  Target: LAMA2; (-) strand; PAM type: NNAGAAW; PAM sequence: GGAGAAA
tctaagtcttaatggtattt

SEQ ID NO: 10783 - DNA, 20 bp, Artificial Sequence
  Description of Artificial Sequence: Synthetic oligonucleotide
  Target: LAMA2; (-) strand; PAM type: NNAGAAW; PAM sequence: GAAGAAA
cttcctagtgaagacagcga

SEQ ID NO: 10784 - DNA, 20 bp, Artificial Sequence
  Description of Artificial Sequence: Synthetic oligonucleotide
  Target: LAMA2; (-) strand; PAM type: NNAGAAW; PAM sequence: GAAGAAT
tttctcttatattcttaaaa

SEQ ID NO: 10785 - DNA, 20 bp, Artificial Sequence
  Description of Artificial Sequence: Synthetic oligonucleotide
  Target: LAMA2; (-) strand; PAM type: NNAGAAW; PAM sequence: AGAGAAA
cacatctaccctccaggatt

SEQ ID NO: 10786 - DNA, 20 bp, Artificial Sequence
  Description of Artificial Sequence: Synthetic oligonucleotide
  Target: LAMA2; (-) strand; PAM type: NNAGAAW; PAM sequence: ACAGAAA
tccaaaatctcaatggctta

SEQ ID NO: 10787 - DNA, 20 bp, Artificial Sequence
  Description of Artificial Sequence: Synthetic oligonucleotide
  Target: LAMA2; (-) strand; PAM type: NNAGAAW; PAM sequence: GAAGAAT
gtctattcacatttacaaat

SEQ ID NO: 10788 - DNA, 20 bp, Artificial Sequence
  Description of Artificial Sequence: Synthetic oligonucleotide
  Target: LAMA2; (-) strand; PAM type: NNAGAAW; PAM sequence: CTAGAAT
ttgtatccttatagcctagc

SEQ ID NO: 10789 - DNA, 20 bp, Artificial Sequence
  Description of Artificial Sequence: Synthetic oligonucleotide
  Target: LAMA2; (-) strand; PAM type: NNAGAAW; PAM sequence: CAAGAAT
aagtgtattaaatgctaaca

SEQ ID NO: 10790 - DNA, 20 bp, Artificial Sequence
  Description of Artificial Sequence: Synthetic oligonucleotide
  Target: LAMA2; (-) strand; PAM type: NNAGAAW; PAM sequence: ACAGAAA
tcgagtaagagcagtaactg

SEQ ID NO: 10791 - DNA, 20 bp, Artificial Sequence
  Description of Artificial Sequence: Synthetic oligonucleotide
  Target: LAMA2; (-) strand; PAM type: NNAGAAW; PAM sequence: TCAGAAA
tgaataatattggaactatt

SEQ ID NO: 10792 - DNA, 20 bp, Artificial Sequence
  Description of Artificial Sequence: Synthetic oligonucleotide
  Target: LAMA2; (-) strand; PAM type: NNAGAAW; PAM sequence: ACAGAAA
tatttttatgccttgaaaat

SEQ ID NO: 10793 - DNA, 20 bp, Artificial Sequence
  Description of Artificial Sequence: Synthetic oligonucleotide
  Target: LAMA2; (-) strand; PAM type: NNAGAAW; PAM sequence: AAAGAAT
ttagagatgcatgagctatc

SEQ ID NO: 10794 - DNA, 20 bp, Artificial Sequence
  Description of Artificial Sequence: Synthetic oligonucleotide
  Target: LAMA2; (-) strand; PAM type: NNAGAAW; PAM sequence: TGAGAAA
tgtgtaaccattctgagcta

SEQ ID NO: 10795 - DNA, 20 bp, Artificial Sequence
  Description of Artificial Sequence: Synthetic oligonucleotide
  Target: LAMA2; (-) strand; PAM type: NNAGAAW; PAM sequence: TAAGAAA
gaatgagcagttgactactt

SEQ ID NO: 10796 - DNA, 20 bp, Artificial Sequence
  Description of Artificial Sequence: Synthetic oligonucleotide
  Target: LAMA2; (-) strand; PAM type: NNAGAAW; PAM sequence: GAAGAAT
gttctggaaatttcaaaata

SEQ ID NO: 10797 - DNA, 20 bp, Artificial Sequence
  Description of Artificial Sequence: Synthetic oligonucleotide
  Target: LAMA2; (-) strand; PAM type: NNAGAAW; PAM sequence: CAAGAAT
aactgtatctagatacagtc

SEQ ID NO: 10798 - DNA, 20 bp, Artificial Sequence
  Description of Artificial Sequence: Synthetic oligonucleotide
  Target: LAMA2; (-) strand; PAM type: NNAGAAW; PAM sequence: TCAGAAT
taattctgatccttttaatt

SEQ ID NO: 10799 - DNA, 20 bp, Artificial Sequence
  Description of Artificial Sequence: Synthetic oligonucleotide
  Target: LAMA2; (-) strand; PAM type: NNAGAAW; PAM sequence: TCAGAAA
cacatttcagatgaataaaa

SEQ ID NO: 10800 - DNA, 20 bp, Artificial Sequence
  Description of Artificial Sequence: Synthetic oligonucleotide
  Target: LAMA2; (-) strand; PAM type: NNAGAAW; PAM sequence: ACAGAAA
ttatgggctactccttgaga

SEQ ID NO: 10801 - DNA, 20 bp, Artificial Sequence
  Description of Artificial Sequence: Synthetic oligonucleotide
  Target: LAMA2; (-) strand; PAM type: NNAGAAW; PAM sequence: ACAGAAT
ttttggatatatatctagaa

SEQ ID NO: 10802 - DNA, 20 bp, Artificial Sequence
  Description of Artificial Sequence: Synthetic oligonucleotide
  Target: LAMA2; (-) strand; PAM type: NNAGAAW; PAM sequence: CTAGAAA
cagttcttttggatatatat

SEQ ID NO: 10803 - DNA, 20 bp, Artificial Sequence
  Description of Artificial Sequence: Synthetic oligonucleotide
  Target: LAMA2; (-) strand; PAM type: NNAGAAW; PAM sequence: CCAGAAT
ttatcagcccaaaagaaaac

SEQ ID NO: 10804 - DNA, 20 bp, Artificial Sequence
  Description of Artificial Sequence: Synthetic oligonucleotide
  Target: LAMA2; (-) strand; PAM type: NNAGAAW; PAM sequence: AAAGAAA
taagacattttatcagccca

SEQ ID NO: 10805 - DNA, 20 bp, Artificial Sequence
  Description of Artificial Sequence: Synthetic oligonucleotide
  Target: LAMA2; (-) strand; PAM type: NNAGAAW; PAM sequence: GCAGAAA
agctcatatatgatcaggaa

SEQ ID NO: 10806 - DNA, 20 bp, Artificial Sequence
  Description of Artificial Sequence: Synthetic oligonucleotide
  Target: LAMA2; (-) strand; PAM type: NNAGAAW; PAM sequence: TAAGAAA
gatatggcatcttgtaacca

SEQ ID NO: 10807 - DNA, 20 bp, Artificial Sequence
  Description of Artificial Sequence: Synthetic oligonucleotide
  Target: LAMA2; (-) strand; PAM type: NNAGAAW; PAM sequence: CAAGAAA
aaaattactacaaaacatta

SEQ ID NO: 10808 - DNA, 20 bp, Artificial Sequence
  Description of Artificial Sequence: Synthetic oligonucleotide
  Target: LAMA2; (-) strand; PAM type: NNAGAAW; PAM sequence: GAAGAAA
tttaccagccttgtggccta

SEQ ID NO: 10809 - DNA, 20 bp, Artificial Sequence
  Description of Artificial Sequence: Synthetic oligonucleotide
  Target: LAMA2; (-) strand; PAM type: NNAGAAW; PAM sequence: TAAGAAT
catcttaaaagcttaattat

SEQ ID NO: 10810 - DNA, 20 bp, Artificial Sequence
  Description of Artificial Sequence: Synthetic oligonucleotide
  Target: LAMA2; (-) strand; PAM type: NNAGAAW; PAM sequence: AGAGAAA
ttggcataactcattatttt

SEQ ID NO: 10811 - DNA, 20 bp, Artificial Sequence
  Description of Artificial Sequence: Synthetic oligonucleotide
  Target: LAMA2; (-) strand; PAM type: NNAGAAW; PAM sequence: TTAGAAT
aaagtgctcagttgactgac

SEQ ID NO: 10812 - DNA, 20 bp, Artificial Sequence
  Description of Artificial Sequence: Synthetic oligonucleotide
  Target: LAMA2; (-) strand; PAM type: NNAGAAW; PAM sequence: AAAGAAA
tagttaaagggtcttttaaa

SEQ ID NO: 10813 - DNA, 20 bp, Artificial Sequence
  Description of Artificial Sequence: Synthetic oligonucleotide
  Target: LAMA2; (-) strand; PAM type: NNAGAAW; PAM sequence: TGAGAAT
ctccaaatgctgaaaagata

SEQ ID NO: 10814 - DNA, 20 bp, Artificial Sequence
  Description of Artificial Sequence: Synthetic oligonucleotide
  Target: LAMA2; (-) strand; PAM type: NNAGAAW; PAM sequence: TGAGAAA
tataagccaattatgcatgc

SEQ ID NO: 10815 - DNA, 20 bp, Artificial Sequence
  Description of Artificial Sequence: Synthetic oligonucleotide
  Target: LAMA2; (-) strand; PAM type: NNAGAAW; PAM sequence: TTAGAAT
tagaaaaaaaacagctctta

SEQ ID NO: 10816 - DNA, 20 bp, Artificial Sequence
  Description of Artificial Sequence: Synthetic oligonucleotide
  Target: LAMA2; (-) strand; PAM type: NNAGAAW; PAM sequence: ATAGAAA
cattatttgtgtaattattg

SEQ ID NO: 10817 - DNA, 20 bp, Artificial Sequence
  Description of Artificial Sequence: Synthetic oligonucleotide
  Target: LAMA2; (-) strand; PAM type: NNAGAAW; PAM sequence: AGAGAAA
ttataggcaaaatatctcag

SEQ ID NO: 10818 - DNA, 20 bp, Artificial Sequence
  Description of Artificial Sequence: Synthetic oligonucleotide
  Target: LAMA2; (-) strand; PAM type: NNAGAAW; PAM sequence: ACAGAAA
agatcaaatatgtagcaaag

SEQ ID NO: 10819 - DNA, 20 bp, Artificial Sequence
  Description of Artificial Sequence: Synthetic oligonucleotide
  Target: LAMA2; (-) strand; PAM type: NNAGAAW; PAM sequence: AGAGAAA
taacattatgatgaaaatga

SEQ ID NO: 10820 - DNA, 20 bp, Artificial Sequence
  Description of Artificial Sequence: Synthetic oligonucleotide
  Target: LAMA2; (-) strand; PAM type: NNAGAAW; PAM sequence: AGAGAAA
tgatacagaattaaaaaatg

SEQ ID NO: 10821 - DNA, 20 bp, Artificial Sequence
  Description of Artificial Sequence: Synthetic oligonucleotide
  Target: LAMA2; (-) strand; PAM type: NNAGAAW; PAM sequence: ACAGAAT
aagtagaggaaaagtgtgat

SEQ ID NO: 10822 - DNA, 20 bp, Artificial Sequence
  Description of Artificial Sequence: Synthetic oligonucleotide
  Target: LAMA2; (-) strand; PAM type: NNAGAAW; PAM sequence: TTAGAAA
attgtgatttggttgtattc

SEQ ID NO: 10823 - DNA, 20 bp, Artificial Sequence
  Description of Artificial Sequence: Synthetic oligonucleotide
  Target: LAMA2; (-) strand; PAM type: NNAGAAW; PAM sequence: AAAGAAA
tcacaccagttttctgtgta

SEQ ID NO: 10824 - DNA, 20 bp, Artificial Sequence
  Description of Artificial Sequence: Synthetic oligonucleotide
  Target: LAMA2; (-) strand; PAM type: NNAGAAW; PAM sequence: AAAGAAA
ttccttaaaggcaccatttt

SEQ ID NO: 10825 - DNA, 20 bp, Artificial Sequence
  Description of Artificial Sequence: Synthetic oligonucleotide
  Target: LAMA2; (-) strand; PAM type: NNAGAAW; PAM sequence: CTAGAAA
agttatatctagttttattt

SEQ ID NO: 10826 - DNA, 20 bp, Artificial Sequence
  Description of Artificial Sequence: Synthetic oligonucleotide
  Target: LAMA2; (-) strand; PAM type: NNAGAAW; PAM sequence: GTAGAAT
aaacaagccttaaaacaaga

SEQ ID NO: 10827 - DNA, 20 bp, Artificial Sequence
  Description of Artificial Sequence: Synthetic oligonucleotide
  Target: LAMA2; (-) strand; PAM type: NNAGAAW; PAM sequence: TTAGAAT
attttatattcagtgggcac

SEQ ID NO: 10828 - DNA, 20 bp, Artificial Sequence
  Description of Artificial Sequence: Synthetic oligonucleotide
  Target: LAMA2; (-) strand; PAM type: NNAGAAW; PAM sequence: CTAGAAT
acagaatttatcaaacatat

SEQ ID NO: 10829 - DNA, 20 bp, Artificial Sequence
  Description of Artificial Sequence: Synthetic oligonucleotide
  Target: LAMA2; (-) strand; PAM type: NNAGAAW; PAM sequence: ACAGAAT
taatttatacaggtaaattt

SEQ ID NO: 10830 - DNA, 20 bp, Artificial Sequence
  Description of Artificial Sequence: Synthetic oligonucleotide
  Target: LAMA2; (-) strand; PAM type: NNAGAAW; PAM sequence: AGAGAAA
agaagaaatgaagaagtcag

SEQ ID NO: 10831 - DNA, 20 bp, Artificial Sequence
  Description of Artificial Sequence: Synthetic oligonucleotide
  Target: LAMA2; (-) strand; PAM type: NNAGAAW; PAM sequence: GAAGAAA
aaaatgaattttagagagta

SEQ ID NO: 10832 - DNA, 20 bp, Artificial Sequence
  Description of Artificial Sequence: Synthetic oligonucleotide
  Target: LAMA2; (-) strand; PAM type: NNAGAAW; PAM sequence: ACAGAAA
gaataatagtgaatttaggg

SEQ ID NO: 10833 - DNA, 20 bp, Artificial Sequence
  Description of Artificial Sequence: Synthetic oligonucleotide
  Target: LAMA2; (-) strand; PAM type: NNAGAAW; PAM sequence: CTAGAAT
ggatattagtgataacaagg

SEQ ID NO: 10834 - DNA, 20 bp, Artificial Sequence
  Description of Artificial Sequence: Synthetic oligonucleotide
  Target: LAMA2; (-) strand; PAM type: NNAGAAW; PAM sequence: AGAGAAT
atggccccaaatgaagtaaa

SEQ ID NO: 10835 - DNA, 20 bp, Artificial Sequence
  Description of Artificial Sequence: Synthetic oligonucleotide
  Target: LAMA2; (-) strand; PAM type: NNAGAAW; PAM sequence: TGAGAAA
cacaagaagtcaagtagaaa

SEQ ID NO: 10836 - DNA, 20 bp, Artificial Sequence
  Description of Artificial Sequence: Synthetic oligonucleotide
  Target: LAMA2; (-) strand; PAM type: NNAGAAW; PAM sequence: GTAGAAA
aacacttcacaagaagtcaa

SEQ ID NO: 10837 - DNA, 20 bp, Artificial Sequence
  Description of Artificial Sequence: Synthetic oligonucleotide
  Target: LAMA2; (-) strand; PAM type: NNAGAAW; PAM sequence: TAAGAAA
tgatgacagcactatgaaag

SEQ ID NO: 10838 - DNA, 20 bp, Artificial Sequence
  Description of Artificial Sequence: Synthetic oligonucleotide
  Target: LAMA2; (-) strand; PAM type: NNAGAAW; PAM sequence: GAAGAAA
attattttcatttcatggaa

SEQ ID NO: 10839 - DNA, 20 bp, Artificial Sequence
  Description of Artificial Sequence: Synthetic oligonucleotide
  Target: LAMA2; (-) strand; PAM type: NNAGAAW; PAM sequence: ATAGAAT
tcaccctgtttatttccttc

SEQ ID NO: 10840 - DNA, 20 bp, Artificial Sequence
  Description of Artificial Sequence: Synthetic oligonucleotide
  Target: LAMA2; (-) strand; PAM type: NNAGAAW; PAM sequence: TGAGAAT
tgtaatgatgttccatgcca

SEQ ID NO: 10841 - DNA, 20 bp, Artificial Sequence
  Description of Artificial Sequence: Synthetic oligonucleotide
  Target: LAMA2; (-) strand; PAM type: NNAGAAW; PAM sequence: ATAGAAT
gttctactatcaaaatatat

SEQ ID NO: 10842 - DNA, 20 bp, Artificial Sequence
  Description of Artificial Sequence: Synthetic oligonucleotide
  Target: LAMA2; (-) strand; PAM type: NNAGAAW; PAM sequence: AAAGAAA
aatgtggggtccttcctcct

SEQ ID NO: 10843 - DNA, 20 bp, Artificial Sequence
  Description of Artificial Sequence: Synthetic oligonucleotide
  Target: LAMA2; (-) strand; PAM type: NNAGAAW; PAM sequence: ACAGAAA
gtgattttaacttattactc

SEQ ID NO: 10844 - DNA, 20 bp, Artificial Sequence
  Description of Artificial Sequence: Synthetic oligonucleotide
  Target: LAMA2; (-) strand; PAM type: NNAGAAW; PAM sequence: TGAGAAA
ggggtagaaattaaggatgt

SEQ ID NO: 10845 - DNA, 20 bp, Artificial Sequence
  Description of Artificial Sequence: Synthetic oligonucleotide
  Target: LAMA2; (-) strand; PAM type: NNAGAAW; PAM sequence: GTAGAAA
agctacatattcataagggg

SEQ ID NO: 10846 - DNA, 20 bp, Artificial Sequence
  Description of Artificial Sequence: Synthetic oligonucleotide
  Target: LAMA2; (-) strand; PAM type: NNAGAAW; PAM sequence: ATAGAAT
ccactgaagtaataaaggat

SEQ ID NO: 10847 - DNA, 20 bp, Artificial Sequence
  Description of Artificial Sequence: Synthetic oligonucleotide
  Target: LAMA2; (-) strand; PAM type: NNAGAAW; PAM sequence: AGAGAAA
cagttgaaaaagaaaacaga

SEQ ID NO: 10848 - DNA, 20 bp, Artificial Sequence
  Description of Artificial Sequence: Synthetic oligonucleotide
  Target: LAMA2; (-) strand; PAM type: NNAGAAW; PAM sequence: AAAGAAA
gcccttcttttccagttgaa

SEQ ID NO: 10849 - DNA, 20 bp, Artificial Sequence
  Description of Artificial Sequence: Synthetic oligonucleotide
  Target: LAMA2; (-) strand; PAM type: NNAGAAW; PAM sequence: GAAGAAA
aaaatctttgacatgatttg

SEQ ID NO: 10850 - DNA, 20 bp, Artificial Sequence
  Description of Artificial Sequence: Synthetic oligonucleotide
  Target: LAMA2; (-) strand; PAM type: NNAGAAW; PAM sequence: CCAGAAA
tgcccttaacgtcatcattt

SEQ ID NO: 10851 - DNA, 20 bp, Artificial Sequence
  Description of Artificial Sequence: Synthetic oligonucleotide
  Target: LAMA2; (-) strand; PAM type: NNAGAAW; PAM sequence: GAAGAAA
aaagcacagacaggaaagta

SEQ ID NO: 10852 - DNA, 20 bp, Artificial Sequence
  Description of Artificial Sequence: Synthetic oligonucleotide
  Target: LAMA2; (-) strand; PAM type: NNAGAAW; PAM sequence: AAAGAAA
aattgaaatgtgacagtctc

SEQ ID NO: 10853 - DNA, 20 bp, Artificial Sequence
  Description of Artificial Sequence: Synthetic oligonucleotide
  Target: LAMA2; (-) strand; PAM type: NNAGAAW; PAM sequence: AAAGAAT
gtaaaataaagcagagatat

SEQ ID NO: 10854 - DNA, 20 bp, Artificial Sequence
  Description of Artificial Sequence: Synthetic oligonucleotide
  Target: LAMA2; (-) strand; PAM type: NNAGAAW; PAM sequence: ACAGAAA
tttgtgtttgttttctgata

SEQ ID NO: 10855 - DNA, 20 bp, Artificial Sequence
  Description of Artificial Sequence: Synthetic oligonucleotide
  Target: LAMA2; (-) strand; PAM type: NNAGAAW; PAM sequence: AGAGAAA
tgcctaggccaacaagactg

SEQ ID NO: 10856 - DNA, 20 bp, Artificial Sequence
  Description of Artificial Sequence: Synthetic oligonucleotide
  Target: LAMA2; (-) strand; PAM type: NNAGAAW; PAM sequence: GAAGAAA
gtacttttcatagatttatg

SEQ ID NO: 10857 - DNA, 20 bp, Artificial Sequence
  Description of Artificial Sequence: Synthetic oligonucleotide
  Target: LAMA2; (-) strand; PAM type: NNAGAAW; PAM sequence: GAAGAAA
tatgttttcattttcaacat

SEQ ID NO: 10858 - DNA, 20 bp, Artificial Sequence
  Description of Artificial Sequence: Synthetic oligonucleotide
  Target: LAMA2; (-) strand; PAM type: NNAGAAW; PAM sequence: TCAGAAT
ctaatgtgcccttgagttaa

SEQ ID NO: 10859 - DNA, 20 bp, Artificial Sequence
  Description of Artificial Sequence: Synthetic oligonucleotide
  Target: LAMA2; (-) strand; PAM type: NNAGAAW; PAM sequence: ACAGAAT
aacattaagaattacaggta

SEQ ID NO: 10860 - DNA, 20 bp, Artificial Sequence
  Description of Artificial Sequence: Synthetic oligonucleotide
  Target: LAMA2; (-) strand; PAM type: NNAGAAW; PAM sequence: TAAGAAT
gcaagagaaagatagaacat

SEQ ID NO: 10861 - DNA, 20 bp, Artificial Sequence
  Description of Artificial Sequence: Synthetic oligonucleotide
  Target: LAMA2; (-) strand; PAM type: NNAGAAW; PAM sequence: AGAGAAA
gaaatgggggaaaatgagca

SEQ ID NO: 10862 - DNA, 20 bp, Artificial Sequence
  Description of Artificial Sequence: Synthetic oligonucleotide
  Target: LAMA2; (-) strand; PAM type: NNAGAAW; PAM sequence: AGAGAAA
cccagaagcttttaagtaga

SEQ ID NO: 10863 - DNA, 20 bp, Artificial Sequence
  Description of Artificial Sequence: Synthetic oligonucleotide
  Target: LAMA2; (-) strand; PAM type: NNAGAAW; PAM sequence: AGAGAAA
aattaaacaaaatcttatat

SEQ ID NO: 10864 - DNA, 20 bp, Artificial Sequence
  Description of Artificial Sequence: Synthetic oligonucleotide
  Target: LAMA2; (-) strand; PAM type: NNAGAAW; PAM sequence: TTAGAAA
gttaaaaaaggcttctagtt

SEQ ID NO: 10865 - DNA, 20 bp, Artificial Sequence
  Description of Artificial Sequence: Synthetic oligonucleotide
  Target: LAMA2; (-) strand; PAM type: NNAGAAW; PAM sequence: GGAGAAA
ttagttatcaatacaatttt

SEQ ID NO: 10866 - DNA, 20 bp, Artificial Sequence
  Description of Artificial Sequence: Synthetic oligonucleotide
  Target: LAMA2; (-) strand; PAM type: NNAGAAW; PAM sequence: TAAGAAT
atgcagggtcagctgaacag

SEQ ID NO: 10867 - DNA, 20 bp, Artificial Sequence
  Description of Artificial Sequence: Synthetic oligonucleotide
  Target: LAMA2; (-) strand; PAM type: NNAGAAW; PAM sequence: CCAGAAA
aagtatttttgtagtggaaa

SEQ ID NO: 10868 - DNA, 20 bp, Artificial Sequence
  Description of Artificial Sequence: Synthetic oligonucleotide
  Target: LAMA2; (-) strand; PAM type: NNAGAAW; PAM sequence: GAAGAAT
agctaaactaagctattact

SEQ ID NO: 10869 - DNA, 20 bp, Artificial Sequence
  Description of Artificial Sequence: Synthetic oligonucleotide
  Target: LAMA2; (-) strand; PAM type: NNAGAAW; PAM sequence: GAAGAAA
tgcaaaacatggatccattt

SEQ ID NO: 10870 - DNA, 20 bp, Artificial Sequence
  Description of Artificial Sequence: Synthetic oligonucleotide
  Target: LAMA2; (-) strand; PAM type: NNAGAAW; PAM sequence: GGAGAAA
cttgactcataattaaacat

SEQ ID NO: 10871 - DNA, 20 bp, Artificial Sequence
  Description of Artificial Sequence: Synthetic oligonucleotide
  Target: LAMA2; (-) strand; PAM type: NNAGAAW; PAM sequence: ATAGAAA
aatgggaactgtggctaatc

SEQ ID NO: 10872 - DNA, 20 bp, Artificial Sequence
  Description of Artificial Sequence: Synthetic oligonucleotide
  Target: LAMA2; (-) strand; PAM type: NNAGAAW; PAM sequence: TAAGAAA
cattttttctttattttcct

SEQ ID NO: 10873 - DNA, 20 bp, Artificial Sequence
  Description of Artificial Sequence: Synthetic oligonucleotide
  Target: LAMA2; (-) strand; PAM type: NNAGAAW; PAM sequence: AGAGAAA
taaatggtcaattttacagc

SEQ ID NO: 10874 - DNA, 20 bp, Artificial Sequence
  Description of Artificial Sequence: Synthetic oligonucleotide
  Target: LAMA2; (-) strand; PAM type: NNAGAAW; PAM sequence: CAAGAAT
attagtctgctccctgccag

SEQ ID NO: 10875 - DNA, 20 bp, Artificial Sequence
  Description of Artificial Sequence: Synthetic oligonucleotide
  Target: LAMA2; (-) strand; PAM type: NNAGAAW; PAM sequence: AAAGAAA
gtgatccttacagttctgag

SEQ ID NO: 10876 - DNA, 20 bp, Artificial Sequence
  Description of Artificial Sequence: Synthetic oligonucleotide
  Target: LAMA2; (-) strand; PAM type: NNAGAAW; PAM sequence: TGAGAAA
ctgtgtgatccttacagttc

SEQ ID NO: 10877 - DNA, 20 bp, Artificial Sequence
  Description of Artificial Sequence: Synthetic oligonucleotide
  Target: LAMA2; (-) strand; PAM type: NNAGAAW; PAM sequence: ATAGAAA
gttcctttagtaggctcgcc

SEQ ID NO: 10878 - DNA, 20 bp, Artificial Sequence
  Description of Artificial Sequence: Synthetic oligonucleotide
  Target: LAMA2; (-) strand; PAM type: NNAGAAW; PAM sequence: GCAGAAA
ttgctatgaaaagtgtactt

SEQ ID NO: 10879 - DNA, 20 bp, Artificial Sequence
  Description of Artificial Sequence: Synthetic oligonucleotide
  Target: LAMA2; (-) strand; PAM type: NNAGAAW; PAM sequence: TTAGAAA
gctaaaaaaattacaaattc

SEQ ID NO: 10880 - DNA, 20 bp, Artificial Sequence
  Description of Artificial Sequence: Synthetic oligonucleotide
  Target: LAMA2; (-) strand; PAM type: NNAGAAW; PAM sequence: TTAGAAA
attctatttgagttctactc

SEQ ID NO: 10881 - DNA, 20 bp, Artificial Sequence
  Description of Artificial Sequence: Synthetic oligonucleotide
  Target: LAMA2; (-) strand; PAM type: NNAGAAW; PAM sequence: GTAGAAA
ttatgttctttggaattggt

SEQ ID NO: 10882 - DNA, 20 bp, Artificial Sequence
  Description of Artificial Sequence: Synthetic oligonucleotide
  Target: LAMA2; (-) strand; PAM type: NNAGAAW; PAM sequence: ATAGAAT
aatttttctaaaaagaaggg

SEQ ID NO: 10883 - DNA, 20 bp, Artificial Sequence
  Description of Artificial Sequence: Synthetic oligonucleotide
  Target: LAMA2; (-) strand; PAM type: NNAGAAW; PAM sequence: GGAGAAT
cctgtagtccagctgaggca

SEQ ID NO: 10884 - DNA, 20 bp, Artificial Sequence
  Description of Artificial Sequence: Synthetic oligonucleotide
  Target: LAMA2; (-) strand; PAM type: NNAGAAW; PAM sequence: TCAGAAA
ctcacctttaagagagttct

SEQ ID NO: 10885 - DNA, 20 bp, Artificial Sequence
  Description of Artificial Sequence: Synthetic oligonucleotide
  Target: LAMA2; (-) strand; PAM type: NNAGAAW; PAM sequence: TTAGAAT
gagaacatttaaacttaatg

SEQ ID NO: 10886 - DNA, 20 bp, Artificial Sequence
  Description of Artificial Sequence: Synthetic oligonucleotide
  Target: LAMA2; (-) strand; PAM type: NNAGAAW; PAM sequence: CTAGAAT
taccaaatacagtgtttggc

SEQ ID NO: 10887 - DNA, 20 bp, Artificial Sequence
  Description of Artificial Sequence: Synthetic oligonucleotide
  Target: LAMA2; (-) strand; PAM type: NNAGAAW; PAM sequence: CCAGAAT
ttaaaccaaagagtctggct

SEQ ID NO: 10888 - DNA, 20 bp, Artificial Sequence
  Description of Artificial Sequence: Synthetic oligonucleotide
  Target: LAMA2; (-) strand; PAM type: NNAGAAW; PAM sequence: TGAGAAT
caatagggtttgagcttcta

SEQ ID NO: 10889 - DNA, 20 bp, Artificial Sequence
  Description of Artificial Sequence: Synthetic oligonucleotide
  Target: LAMA2; (-) strand; PAM type: NNAGAAW; PAM sequence: AAAGAAT
ctctaacatccttggttgtt

SEQ ID NO: 10890 - DNA, 20 bp, Artificial Sequence
  Description of Artificial Sequence: Synthetic oligonucleotide
  Target: LAMA2; (-) strand; PAM type: NNAGAAW; PAM sequence: AGAGAAT
catgtaaatgaagatggtta

SEQ ID NO: 10891 - DNA, 20 bp, Artificial Sequence
  Description of Artificial Sequence: Synthetic oligonucleotide
  Target: LAMA2; (-) strand; PAM type: NNAGAAW; PAM sequence: TTAGAAT
atcaacgtaattataccaaa

SEQ ID NO: 10892 - DNA, 20 bp, Artificial Sequence
  Description of Artificial Sequence: Synthetic oligonucleotide
  Target: LAMA2; (-) strand; PAM type: NNAGAAW; PAM sequence: AAAGAAT
gtgaaaacattttgaaaatg

SEQ ID NO: 10893 - DNA, 20 bp, Artificial Sequence
  Description of Artificial Sequence: Synthetic oligonucleotide
  Target: LAMA2; (-) strand; PAM type: NNAGAAW; PAM sequence: TAAGAAA
atttatttagcaatattatc

SEQ ID NO: 10894 - DNA, 20 bp, Artificial Sequence
  Description of Artificial Sequence: Synthetic oligonucleotide
  Target: LAMA2; (-) strand; PAM type: NNAGAAW; PAM sequence: CTAGAAT
tgcctagttacaacctatag

SEQ ID NO: 10895 - DNA, 20 bp, Artificial Sequence
  Description of Artificial Sequence: Synthetic oligonucleotide
  Target: LAMA2; (-) strand; PAM type: NNAGAAW; PAM sequence: AAAGAAT
gctatgtgatgccagaaatt

SEQ ID NO: 10896 - DNA, 20 bp, Artificial Sequence
  Description of Artificial Sequence: Synthetic oligonucleotide
  Target: LAMA2; (-) strand; PAM type: NNAGAAW; PAM sequence: CCAGAAA
aacctataagctatgtgatg

SEQ ID NO: 10897 - DNA, 20 bp, Artificial Sequence
  Description of Artificial Sequence: Synthetic oligonucleotide
  Target: LAMA2; (-) strand; PAM type: NNAGAAW; PAM sequence: AGAGAAT
tagagcattctcaattttct

SEQ ID NO: 10898 - DNA, 20 bp, Artificial Sequence
  Description of Artificial Sequence: Synthetic oligonucleotide
  Target: LAMA2; (-) strand; PAM type: NNAGAAW; PAM sequence: AAAGAAT
aaggtatttagttaatagtt

SEQ ID NO: 10899 - DNA, 20 bp, Artificial Sequence
  Description of Artificial Sequence: Synthetic oligonucleotide
  Target: LAMA2; (-) strand; PAM type: NNAGAAW; PAM sequence: GGAGAAT
atctctcctacttattctca

SEQ ID NO: 10900 - DNA, 20 bp, Artificial Sequence
  Description of Artificial Sequence: Synthetic oligonucleotide
  Target: LAMA2; (-) strand; PAM type: NNAGAAW; PAM sequence: AAAGAAA
gactgagaggaagaggagaa

SEQ ID NO: 10901 - DNA, 20 bp, Artificial Sequence
  Description of Artificial Sequence: Synthetic oligonucleotide
  Target: LAMA2; (-) strand; PAM type: NNAGAAW; PAM sequence: GGAGAAA
ggcagggactgagaggaaga

SEQ ID NO: 10902 - DNA, 20 bp, Artificial Sequence
  Description of Artificial Sequence: Synthetic oligonucleotide
  Target: LAMA2; (-) strand; PAM type: NNAGAAW; PAM sequence: TGAGAAT
gaagctggagatgagggtaa

SEQ ID NO: 10903 - DNA, 20 bp, Artificial Sequence
  Description of Artificial Sequence: Synthetic oligonucleotide
  Target: LAMA2; (-) strand; PAM type: NNAGAAW; PAM sequence: AGAGAAA
ttgaacagttgggtaggata

SEQ ID NO: 10904 - DNA, 20 bp, Artificial Sequence
  Description of Artificial Sequence: Synthetic oligonucleotide
  Target: LAMA2; (-) strand; PAM type: NNAGAAW; PAM sequence: TTAGAAA
taaaacttccatcattaggg

SEQ ID NO: 10905 - DNA, 20 bp, Artificial Sequence
  Description of Artificial Sequence: Synthetic oligonucleotide
  Target: LAMA2; (-) strand; PAM type: NNAGAAW; PAM sequence: TGAGAAT
acacatattaagtcaatgtg

SEQ ID NO: 10906 - DNA, 20 bp, Artificial Sequence
  Description of Artificial Sequence: Synthetic oligonucleotide
  Target: LAMA2; (-) strand; PAM type: NNAGAAW; PAM sequence: TTAGAAT
agataaacttaagggtgtat

SEQ ID NO: 10907 - DNA, 20 bp, Artificial Sequence
  Description of Artificial Sequence: Synthetic oligonucleotide
  Target: LAMA2; (-) strand; PAM type: NNAGAAW; PAM sequence: AGAGAAA
taagaataaagcaaggttaa

SEQ ID NO: 10908 - DNA, 20 bp, Artificial Sequence
  Description of Artificial Sequence: Synthetic oligonucleotide
  Target: LAMA2; (-) strand; PAM type: NNAGAAW; PAM sequence: TAAGAAT
atctgtcaaaatatgtgcat

SEQ ID NO: 10909 - DNA, 20 bp, Artificial Sequence
  Description of Artificial Sequence: Synthetic oligonucleotide
  Target: LAMA2; (-) strand; PAM type: NNAGAAW; PAM sequence: AAAGAAT
aacaattaaccttgttctaa

SEQ ID NO: 10910 - DNA, 20 bp, Artificial Sequence
  Description of Artificial Sequence: Synthetic oligonucleotide
  Target: LAMA2; (-) strand; PAM type: NNAGAAW; PAM sequence: AGAGAAA
atgtatgtgaatgcatacat

SEQ ID NO: 10911 - DNA, 20 bp, Artificial Sequence
  Description of Artificial Sequence: Synthetic oligonucleotide
  Target: LAMA2; (-) strand; PAM type: NNAGAAW; PAM sequence: CAAGAAA
aaaccacgccacaggaaaca

SEQ ID NO: 10912 - DNA, 20 bp, Artificial Sequence
  Description of Artificial Sequence: Synthetic oligonucleotide
  Target: LAMA2; (-) strand; PAM type: NNAGAAW; PAM sequence: GCAGAAA
atttggctagctccacacca

SEQ ID NO: 10913 - DNA, 20 bp, Artificial Sequence
  Description of Artificial Sequence: Synthetic oligonucleotide
  Target: LAMA2; (-) strand; PAM type: NNAGAAW; PAM sequence: ACAGAAT
atgcacaataaaaaacatct

SEQ ID NO: 10914 - DNA, 20 bp, Artificial Sequence
  Description of Artificial Sequence: Synthetic oligonucleotide
  Target: LAMA2; (-) strand; PAM type: NNAGAAW; PAM sequence: TGAGAAA
caacaaaaataaaattagag

SEQ ID NO: 10915 - DNA, 20 bp, Artificial Sequence
  Description of Artificial Sequence: Synthetic oligonucleotide
  Target: LAMA2; (-) strand; PAM type: NNAGAAW; PAM sequence: TAAGAAT
ttgtcattgaaacctactgg

SEQ ID NO: 10916 - DNA, 20 bp, Artificial Sequence
  Description of Artificial Sequence: Synthetic oligonucleotide
  Target: LAMA2; (-) strand; PAM type: NNAGAAW; PAM sequence: GGAGAAT
ggtcatatacaaaatttcca

SEQ ID NO: 10917 - DNA, 20 bp, Artificial Sequence
  Description of Artificial Sequence: Synthetic oligonucleotide
  Target: LAMA2; (-) strand; PAM type: NNAGAAW; PAM sequence: TCAGAAT
tttgactagctccttacagt

SEQ ID NO: 10918 - DNA, 20 bp, Artificial Sequence
  Description of Artificial Sequence: Synthetic oligonucleotide
  Target: LAMA2; (-) strand; PAM type: NNAGAAW; PAM sequence: CGAGAAA
gacaaaaatcaacacttttt

SEQ ID NO: 10919 - DNA, 20 bp, Artificial Sequence
  Description of Artificial Sequence: Synthetic oligonucleotide
  Target: LAMA2; (-) strand; PAM type: NNAGAAW; PAM sequence: GTAGAAA
ggcccatttttgtattttta

SEQ ID NO: 10920 - DNA, 20 bp, Artificial Sequence
  Description of Artificial Sequence: Synthetic oligonucleotide
  Target: LAMA2; (-) strand; PAM type: NNAGAAW; PAM sequence: AAAGAAA
ctgtgggactacactgattg

SEQ ID NO: 10921 - DNA, 20 bp, Artificial Sequence
  Description of Artificial Sequence: Synthetic oligonucleotide
  Target: LAMA2; (-) strand; PAM type: NNAGAAW; PAM sequence: TGAGAAA
gtaactatctcatcatctac

SEQ ID NO: 10922 - DNA, 20 bp, Artificial Sequence
  Description of Artificial Sequence: Synthetic oligonucleotide
  Target: LAMA2; (-) strand; PAM type: NNAGAAW; PAM sequence: AAAGAAT
ccagcgtgtgcactgcgagt

SEQ ID NO: 10923 - DNA, 20 bp, Artificial Sequence
  Description of Artificial Sequence: Synthetic oligonucleotide
  Target: LAMA2; (-) strand; PAM type: NNAGAAW; PAM sequence: GGAGAAA
ctctgaatttgaagcagcct

SEQ ID NO: 10924 - DNA, 20 bp, Artificial Sequence
  Description of Artificial Sequence: Synthetic oligonucleotide
  Target: LAMA2; (-) strand; PAM type: NNAGAAW; PAM sequence: TTAGAAA
tggaaatgtatagctgcttt

SEQ ID NO: 10925 - DNA, 20 bp, Artificial Sequence
  Description of Artificial Sequence: Synthetic oligonucleotide
  Target: LAMA2; (-) strand; PAM type: NNAGAAW; PAM sequence: GTAGAAA
gcggttttataactcccaag

SEQ ID NO: 10926 - DNA, 20 bp, Artificial Sequence
  Description of Artificial Sequence: Synthetic oligonucleotide
  Target: LAMA2; (-) strand; PAM type: NNAGAAW; PAM sequence: TGAGAAA
catttgtttgacaagtgcgt

SEQ ID NO: 10927 - DNA, 20 bp, Artificial Sequence
  Description of Artificial Sequence: Synthetic oligonucleotide
  Target: LAMA2; (-) strand; PAM type: NNAGAAW; PAM sequence: GAAGAAT
atgctgaggctgaatatata

SEQ ID NO: 10928 - DNA, 20 bp, Artificial Sequence
  Description of Artificial Sequence: Synthetic oligonucleotide
  Target: LAMA2; (-) strand; PAM type: NNAGAAW; PAM sequence: GCAGAAA
aagatgacaggaaaagacgg

SEQ ID NO: 10929 - DNA, 20 bp, Artificial Sequence
  Description of Artificial Sequence: Synthetic oligonucleotide
  Target: LAMA2; (-) strand; PAM type: NNAGAAW; PAM sequence: TCAGAAA
ggttttaaattatagatggt

SEQ ID NO: 10930 - DNA, 20 bp, Artificial Sequence
  Description of Artificial Sequence: Synthetic oligonucleotide
  Target: LAMA2; (-) strand; PAM type: NNAGAAW; PAM sequence: AAAGAAA
caaccatcctcacttgcatt

SEQ ID NO: 10931 - DNA, 20 bp, Artificial Sequence
  Description of Artificial Sequence: Synthetic oligonucleotide
  Target: LAMA2; (-) strand; PAM type: NNAGAAW; PAM sequence: CAAGAAT
ctattcaaatggaattctcc

SEQ ID NO: 10932 - DNA, 20 bp, Artificial Sequence
  Description of Artificial Sequence: Synthetic oligonucleotide
  Target: LAMA2; (-) strand; PAM type: NNAGAAW; PAM sequence: CTAGAAA
aaccctaatctaaattctgg

SEQ ID NO: 10933 - DNA, 20 bp, Artificial Sequence
  Description of Artificial Sequence: Synthetic oligonucleotide
  Target: LAMA2; (-) strand; PAM type: NNAGAAW; PAM sequence: ACAGAAT
gctgatcacacaaatcactt

SEQ ID NO: 10934 - DNA, 20 bp, Artificial Sequence
  Description of Artificial Sequence: Synthetic oligonucleotide
  Target: LAMA2; (-) strand; PAM type: NNAGAAW; PAM sequence: ACAGAAT
cttcccaaactcatgtgatc

SEQ ID NO: 10935 - DNA, 20 bp, Artificial Sequence
  Description of Artificial Sequence: Synthetic oligonucleotide
  Target: LAMA2; (-) strand; PAM type: NNAGAAW; PAM sequence: ATAGAAA
atagagaaaggggtctcaaa

SEQ ID NO: 10936 - DNA, 20 bp, Artificial Sequence
  Description of Artificial Sequence: Synthetic oligonucleotide
  Target: LAMA2; (-) strand; PAM type: NNAGAAW; PAM sequence: AGAGAAA
acctcacagttcccacatat

SEQ ID NO: 10937 - DNA, 20 bp, Artificial Sequence
  Description of Artificial Sequence: Synthetic oligonucleotide
  Target: LAMA2; (-) strand; PAM type: NNAGAAW; PAM sequence: GAAGAAA
attctagctgggagagagga

SEQ ID NO: 10938 - DNA, 20 bp, Artificial Sequence
  Description of Artificial Sequence: Synthetic oligonucleotide
  Target: LAMA2; (-) strand; PAM type: NNAGAAW; PAM sequence: GCAGAAA
ggagaaaaagggataggtca

SEQ ID NO: 10939 - DNA, 20 bp, Artificial Sequence
  Description of Artificial Sequence: Synthetic oligonucleotide
  Target: LAMA2; (-) strand; PAM type: NNAGAAW; PAM sequence: GGAGAAA
ggaaaggtaattaggaggac

SEQ ID NO: 10940 - DNA, 20 bp, Artificial Sequence
  Description of Artificial Sequence: Synthetic oligonucleotide
  Target: LAMA2; (-) strand; PAM type: NNAGAAW; PAM sequence: TAAGAAT
ctgaatgattcctgtgcctc

SEQ ID NO: 10941 - DNA, 20 bp, Artificial Sequence
  Description of Artificial Sequence: Synthetic oligonucleotide
  Target: LAMA2; (-) strand; PAM type: NNAGAAW; PAM sequence: ATAGAAA
tgtagctcatcctttttcaa

SEQ ID NO: 10942 - DNA, 20 bp, Artificial Sequence
  Description of Artificial Sequence: Synthetic oligonucleotide
  Target: LAMA2; (-) strand; PAM type: NNAGAAW; PAM sequence: ACAGAAT
taactagtgttcaacttgtg

SEQ ID NO: 10943 - DNA, 20 bp, Artificial Sequence
  Description of Artificial Sequence: Synthetic oligonucleotide
  Target: LAMA2; (-) strand; PAM type: NNAGAAW; PAM sequence: CTAGAAT
cttgtccagatgataaaagt

SEQ ID NO: 10944 - DNA, 20 bp, Artificial Sequence
  Description of Artificial Sequence: Synthetic oligonucleotide
  Target: LAMA2; (-) strand; PAM type: NNAGAAW; PAM sequence: ATAGAAT
attaagtttcatgttgtcct

SEQ ID NO: 10945 - DNA, 20 bp, Artificial Sequence
  Description of Artificial Sequence: Synthetic oligonucleotide
  Target: LAMA2; (-) strand; PAM type: NNAGAAW; PAM sequence: GCAGAAA
attgtcctttctagacatat

SEQ ID NO: 10946 - DNA, 20 bp, Artificial Sequence
  Description of Artificial Sequence: Synthetic oligonucleotide
  Target: LAMA2; (-) strand; PAM type: NNAGAAW; PAM sequence: GAAGAAA
atggtgccttttacaagttg

SEQ ID NO: 10947 - DNA, 20 bp, Artificial Sequence
  Description of Artificial Sequence: Synthetic oligonucleotide
  Target: LAMA2; (-) strand; PAM type: NNAGAAW; PAM sequence: GGAGAAT
gtcttcacactacagtccat

SEQ ID NO: 10948 - DNA, 20 bp, Artificial Sequence
  Description of Artificial Sequence: Synthetic oligonucleotide
  Target: LAMA2; (-) strand; PAM type: NNAGAAW; PAM sequence: TTAGAAA
gcttaatctagccaagcaaa

SEQ ID NO: 10949 - DNA, 20 bp, Artificial Sequence
  Description of Artificial Sequence: Synthetic oligonucleotide
  Target: LAMA2; (-) strand; PAM type: NNAGAAW; PAM sequence: GAAGAAA
gtgcagacaagcaacaatga

SEQ ID NO: 10950 - DNA, 20 bp, Artificial Sequence
  Description of Artificial Sequence: Synthetic oligonucleotide
  Target: LAMA2; (-) strand; PAM type: NNAGAAW; PAM sequence: GTAGAAA
aggaagagagagagggagag

SEQ ID NO: 10951 - DNA, 20 bp, Artificial Sequence
  Description of Artificial Sequence: Synthetic oligonucleotide
  Target: LAMA2; (-) strand; PAM type: NNAGAAW; PAM sequence: CTAGAAA
tttatcgaatgaatgccttg

SEQ ID NO: 10952 - DNA, 20 bp, Artificial Sequence
  Description of Artificial Sequence: Synthetic oligonucleotide
  Target: LAMA2; (-) strand; PAM type: NNAGAAW; PAM sequence: GCAGAAT
ctctcattttcatatgcaag

SEQ ID NO: 10953 - DNA, 20 bp, Artificial Sequence
  Description of Artificial Sequence: Synthetic oligonucleotide
  Target: LAMA2; (-) strand; PAM type: NNAGAAW; PAM sequence: AGAGAAT
taaaaagtaatttgagggtc

SEQ ID NO: 10954 - DNA, 20 bp, Artificial Sequence
  Description of Artificial Sequence: Synthetic oligonucleotide
  Target: LAMA2; (-) strand; PAM type: NNAGAAW; PAM sequence: ATAGAAA
aaaatttgtgaatatacgtg

SEQ ID NO: 10955 - DNA, 20 bp, Artificial Sequence
  Description of Artificial Sequence: Synthetic oligonucleotide
  Target: LAMA2; (-) strand; PAM type: NNAGAAW; PAM sequence: ATAGAAT
aggaaaataactataattaa

SEQ ID NO: 10956 - DNA, 20 bp, Artificial Sequence
  Description of Artificial Sequence: Synthetic oligonucleotide
  Target: LAMA2; (-) strand; PAM type: NNAGAAW; PAM sequence: GAAGAAT
agttgtataaatactgctta

SEQ ID NO: 10957 - DNA, 20 bp, Artificial Sequence
  Description of Artificial Sequence: Synthetic oligonucleotide
  Target: LAMA2; (-) strand; PAM type: NNAGAAW; PAM sequence: CTAGAAA
cattgatgattctaagtttt

SEQ ID NO: 10958 - DNA, 20 bp, Artificial Sequence
  Description of Artificial Sequence: Synthetic oligonucleotide
  Target: LAMA2; (-) strand; PAM type: NNAGAAW; PAM sequence: AGAGAAA
cagatatgcagtcattattt

SEQ ID NO: 10959 - DNA, 20 bp, Artificial Sequence
  Description of Artificial Sequence: Synthetic oligonucleotide
  Target: LAMA2; (-) strand; PAM type: NNAGAAW; PAM sequence: GGAGAAT
aggggatcaaaaacaatgtg

SEQ ID NO: 10960 - DNA, 20 bp, Artificial Sequence
  Description of Artificial Sequence: Synthetic oligonucleotide
  Target: LAMA2; (-) strand; PAM type: NNAGAAW; PAM sequence: GGAGAAA
actaagccacatttgccaaa

SEQ ID NO: 10961 - DNA, 20 bp, Artificial Sequence
  Description of Artificial Sequence: Synthetic oligonucleotide
  Target: LAMA2; (-) strand; PAM type: NNAGAAW; PAM sequence: GCAGAAA
caacttactgctacaggtgt

SEQ ID NO: 10962 - DNA, 20 bp, Artificial Sequence
  Description of Artificial Sequence: Synthetic oligonucleotide
  Target: LAMA2; (-) strand; PAM type: NNAGAAW; PAM sequence: TGAGAAA
ggctttactaaagggaagtc

SEQ ID NO: 10963 - DNA, 20 bp, Artificial Sequence
  Description of Artificial Sequence: Synthetic oligonucleotide
  Target: LAMA2; (-) strand; PAM type: NNAGAAW; PAM sequence: CTAGAAA
aagagttcagaatttattaa

SEQ ID NO: 10964 - DNA, 20 bp, Artificial Sequence
  Description of Artificial Sequence: Synthetic oligonucleotide
  Target: LAMA2; (-) strand; PAM type: NNAGAAW; PAM sequence: TCAGAAT
ggaaattcagtaataagagt

SEQ ID NO: 10965 - DNA, 20 bp, Artificial Sequence
  Description of Artificial Sequence: Synthetic oligonucleotide
  Target: LAMA2; (-) strand; PAM type: NNAGAAW; PAM sequence: TAAGAAT
aaaatgagaccaaagcataa

SEQ ID NO: 10966 - DNA, 20 bp, Artificial Sequence
  Description of Artificial Sequence: Synthetic oligonucleotide
  Target: LAMA2; (-) strand; PAM type: NNAGAAW; PAM sequence: CAAGAAA
agccttctgcacacctaagg

SEQ ID NO: 10967 - DNA, 20 bp, Artificial Sequence
  Description of Artificial Sequence: Synthetic oligonucleotide
  Target: LAMA2; (-) strand; PAM type: NNAGAAW; PAM sequence: TTAGAAT
aaattatttaaagcaagtga

SEQ ID NO: 10968 - DNA, 20 bp, Artificial Sequence
  Description of Artificial Sequence: Synthetic oligonucleotide
  Target: LAMA2; (-) strand; PAM type: NNAGAAW; PAM sequence: GCAGAAA
ctactactgaaatatcatgg

SEQ ID NO: 10969 - DNA, 20 bp, Artificial Sequence
  Description of Artificial Sequence: Synthetic oligonucleotide
  Target: LAMA2; (-) strand; PAM type: NNAGAAW; PAM sequence: GCAGAAT
gcctgtgtgcgaaaatattg

SEQ ID NO: 10970 - DNA, 20 bp, Artificial Sequence
  Description of Artificial Sequence: Synthetic oligonucleotide
  Target: LAMA2; (-) strand; PAM type: NNAGAAW; PAM sequence: CTAGAAA
gaaaacactgaaagagcatt

SEQ ID NO: 10971 - DNA, 20 bp, Artificial Sequence
  Description of Artificial Sequence: Synthetic oligonucleotide
  Target: LAMA2; (-) strand; PAM type: NNAGAAW; PAM sequence: GGAGAAA
cagcaaaaaaggtaaagagg

SEQ ID NO: 10972 - DNA, 20 bp, Artificial Sequence
  Description of Artificial Sequence: Synthetic oligonucleotide
  Target: LAMA2; (-) strand; PAM type: NNAGAAW; PAM sequence: ACAGAAA
gagtctctcacataaatttg

SEQ ID NO: 10973 - DNA, 20 bp, Artificial Sequence
  Description of Artificial Sequence: Synthetic oligonucleotide
  Target: LAMA2; (-) strand; PAM type: NNAGAAW; PAM sequence: CCAGAAA
attaacagctgccagttggt

SEQ ID NO: 10974 - DNA, 20 bp, Artificial Sequence
  Description of Artificial Sequence: Synthetic oligonucleotide
  Target: LAMA2; (-) strand; PAM type: NNAGAAW; PAM sequence: GAAGAAT
ctagatgatctgtgggaaag

SEQ ID NO: 10975 - DNA, 20 bp, Artificial Sequence
  Description of Artificial Sequence: Synthetic oligonucleotide
  Target: LAMA2; (-) strand; PAM type: NNAGAAW; PAM sequence: CTAGAAA
tcttgctcaggagcacacag

SEQ ID NO: 10976 - DNA, 20 bp, Artificial Sequence
  Description of Artificial Sequence: Synthetic oligonucleotide
  Target: LAMA2; (-) strand; PAM type: NNAGAAW; PAM sequence: CTAGAAA
ttcatgactctctttgtaga

SEQ ID NO: 10977 - DNA, 20 bp, Artificial Sequence
  Description of Artificial Sequence: Synthetic oligonucleotide
  Target: LAMA2; (-) strand; PAM type: NNAGAAW; PAM sequence: ACAGAAA
tgccaaatcctttagtcccc

SEQ ID NO: 10978 - DNA, 20 bp, Artificial Sequence
  Description of Artificial Sequence: Synthetic oligonucleotide
  Target: LAMA2; (-) strand; PAM type: NNAGAAW; PAM sequence: TTAGAAT
agtaaatgactaacttagcc

SEQ ID NO: 10979 - DNA, 20 bp, Artificial Sequence
  Description of Artificial Sequence: Synthetic oligonucleotide
  Target: LAMA2; (-) strand; PAM type: NNAGAAW; PAM sequence: TGAGAAA
gatactagagtaagggccat

SEQ ID NO: 10980 - DNA, 20 bp, Artificial Sequence
  Description of Artificial Sequence: Synthetic oligonucleotide
  Target: LAMA2; (-) strand; PAM type: NNAGAAW; PAM sequence: TCAGAAT
tacatataattgcatttata

SEQ ID NO: 10981 - DNA, 20 bp, Artificial Sequence
  Description of Artificial Sequence: Synthetic oligonucleotide
  Target: LAMA2; (-) strand; PAM type: NNAGAAW; PAM sequence: ATAGAAT
cttaagtgaccttttcacaa

SEQ ID NO: 10982 - DNA, 20 bp, Artificial Sequence
  Description of Artificial Sequence: Synthetic oligonucleotide
  Target: LAMA2; (-) strand; PAM type: NNAGAAW; PAM sequence: TAAGAAT
gactatagcattataacatt

SEQ ID NO: 10983 - DNA, 20 bp, Artificial Sequence
  Description of Artificial Sequence: Synthetic oligonucleotide
  Target: LAMA2; (-) strand; PAM type: NNAGAAW; PAM sequence: CTAGAAA
attttaatgttactattaat

SEQ ID NO: 10984 - DNA, 20 bp, Artificial Sequence
  Description of Artificial Sequence: Synthetic oligonucleotide
  Target: LAMA2; (-) strand; PAM type: NNAGAAW; PAM sequence: ACAGAAT
atggacgcctaagttcagta

SEQ ID NO: 10985 - DNA, 20 bp, Artificial Sequence
  Description of Artificial Sequence: Synthetic oligonucleotide
  Target: LAMA2; (-) strand; PAM type: NNAGAAW; PAM sequence: AGAGAAA
gtttgactgtggcaaacctc

SEQ ID NO: 10986 - DNA, 20 bp, Artificial Sequence
  Description of Artificial Sequence: Synthetic oligonucleotide
  Target: LAMA2; (-) strand; PAM type: NNAGAAW; PAM sequence: GGAGAAA
aagccagtgaaaatctgtaa

SEQ ID NO: 10987 - DNA, 20 bp, Artificial Sequence
  Description of Artificial Sequence: Synthetic oligonucleotide
  Target: LAMA2; (-) strand; PAM type: NNAGAAW; PAM sequence: GTAGAAT
tgatcacagtcatttcaatt

SEQ ID NO: 10988 - DNA, 20 bp, Artificial Sequence
  Description of Artificial Sequence: Synthetic oligonucleotide
  Target: LAMA2; (-) strand; PAM type: NNAGAAW; PAM sequence: TCAGAAA
aaattcgcctgctatttgtt

SEQ ID NO: 10989 - DNA, 20 bp, Artificial Sequence
  Description of Artificial Sequence: Synthetic oligonucleotide
  Target: LAMA2; (-) strand; PAM type: NNAGAAW; PAM sequence: GGAGAAA
agtaaggccagtttgacatc

SEQ ID NO: 10990 - DNA, 20 bp, Artificial Sequence
  Description of Artificial Sequence: Synthetic oligonucleotide
  Target: LAMA2; (-) strand; PAM type: NNAGAAW; PAM sequence: ACAGAAT
ggatcgcagtcacatagcac

SEQ ID NO: 10991 - DNA, 20 bp, Artificial Sequence
  Description of Artificial Sequence: Synthetic oligonucleotide
  Target: LAMA2; (-) strand; PAM type: NNAGAAW; PAM sequence: TTAGAAA
tgagaaccacacttttgtaa

SEQ ID NO: 10992 - DNA, 20 bp, Artificial Sequence
  Description of Artificial Sequence: Synthetic oligonucleotide
  Target: LAMA2; (-) strand; PAM type: NNAGAAW; PAM sequence: CAAGAAA
aaaaatgtgtgataatgagc

SEQ ID NO: 10993 - DNA, 20 bp, Artificial Sequence
  Description of Artificial Sequence: Synthetic oligonucleotide
  Target: LAMA2; (-) strand; PAM type: NNAGAAW; PAM sequence: ACAGAAA
acagatgaagaagctgaatt

SEQ ID NO: 10994 - DNA, 20 bp, Artificial Sequence
  Description of Artificial Sequence: Synthetic oligonucleotide
  Target: LAMA2; (-) strand; PAM type: NNAGAAW; PAM sequence: CAAGAAT
gtatatcccattggcttggc

SEQ ID NO: 10995 - DNA, 20 bp, Artificial Sequence
  Description of Artificial Sequence: Synthetic oligonucleotide
  Target: LAMA2; (-) strand; PAM type: NNAGAAW; PAM sequence: TGAGAAA
cttcccagcctctagaatcg

SEQ ID NO: 10996 - DNA, 20 bp, Artificial Sequence
  Description of Artificial Sequence: Synthetic oligonucleotide
  Target: LAMA2; (-) strand; PAM type: NNAGAAW; PAM sequence: CTAGAAT
gatcttgtacttcccagcct

SEQ ID NO: 10997 - DNA, 20 bp, Artificial Sequence
  Description of Artificial Sequence: Synthetic oligonucleotide
  Target: LAMA2; (-) strand; PAM type: NNAGAAW; PAM sequence: AGAGAAA
cagtgggtaaatgactgtct

SEQ ID NO: 10998 - DNA, 20 bp, Artificial Sequence
  Description of Artificial Sequence: Synthetic oligonucleotide
  Target: LAMA2; (-) strand; PAM type: NNAGAAW; PAM sequence: TGAGAAT
tttgggaggtgattaggtca

SEQ ID NO: 10999 - DNA, 20 bp, Artificial Sequence
  Description of Artificial Sequence: Synthetic oligonucleotide
  Target: LAMA2; (-) strand; PAM type: NNAGAAW; PAM sequence: GTAGAAA
atgtcccccaaaattcatat

SEQ ID NO: 11000 - DNA, 20 bp, Artificial Sequence
  Description of Artificial Sequence: Synthetic oligonucleotide
  Target: LAMA2; (-) strand; PAM type: NNAGAAW; PAM sequence: ACAGAAA
ttgagtggtgaaactgaggc

SEQ ID NO: 11001 - DNA, 20 bp, Artificial Sequence
  Description of Artificial Sequence: Synthetic oligonucleotide
  Target: LAMA2; (-) strand; PAM type: NNAGAAW; PAM sequence: TGAGAAA
gagtggctatccagacccag

SEQ ID NO: 11002 - DNA, 20 bp, Artificial Sequence
  Description of Artificial Sequence: Synthetic oligonucleotide
  Target: LAMA2; (-) strand; PAM type: NNAGAAW; PAM sequence: AAAGAAA
aaaaatttgtttcaaaggct

SEQ ID NO: 11003 - DNA, 20 bp, Artificial Sequence
  Description of Artificial Sequence: Synthetic oligonucleotide
  Target: LAMA2; (-) strand; PAM type: NNAGAAW; PAM sequence: GAAGAAA
ttatgtaaggaaatatacaa

SEQ ID NO: 11004 - DNA, 20 bp, Artificial Sequence
  Description of Artificial Sequence: Synthetic oligonucleotide
  Target: LAMA2; (-) strand; PAM type: NNAGAAW; PAM sequence: TCAGAAA
actttgtattcatctttatt

SEQ ID NO: 11005 - DNA, 20 bp, Artificial Sequence
  Description of Artificial Sequence: Synthetic oligonucleotide
  Target: LAMA2; (-) strand; PAM type: NNAGAAW; PAM sequence: ATAGAAA
tattgaaaaatatctgagtc

SEQ ID NO: 11006 - DNA, 20 bp, Artificial Sequence
  Description of Artificial Sequence: Synthetic oligonucleotide
  Target: LAMA2; (-) strand; PAM type: NNAGAAW; PAM sequence: ACAGAAA
caccagacacacaaacagaa

SEQ ID NO: 11007 - DNA, 20 bp, Artificial Sequence
  Description of Artificial Sequence: Synthetic oligonucleotide
  Target: LAMA2; (-) strand; PAM type: NNAGAAW; PAM sequence: ACAGAAA
ccataccaccagacacacaa

SEQ ID NO: 11008 - DNA, 20 bp, Artificial Sequence
  Description of Artificial Sequence: Synthetic oligonucleotide
  Target: LAMA2; (-) strand; PAM type: NNAGAAW; PAM sequence: ATAGAAA
tgcttaggatatagcatgaa

SEQ ID NO: 11009 - DNA, 20 bp, Artificial Sequence
  Description of Artificial Sequence: Synthetic oligonucleotide
  Target: LAMA2; (-) strand; PAM type: NNAGAAW; PAM sequence: CAAGAAT
ccacattatgaaataatatg

SEQ ID NO: 11010 - DNA, 20 bp, Artificial Sequence
  Description of Artificial Sequence: Synthetic oligonucleotide
  Target: LAMA2; (-) strand; PAM type: NNAGAAW; PAM sequence: TCAGAAA
tacctggcttagagaaataa

SEQ ID NO: 11011 - DNA, 20 bp, Artificial Sequence
  Description of Artificial Sequence: Synthetic oligonucleotide
  Target: LAMA2; (-) strand; PAM type: NNAGAAW; PAM sequence: AGAGAAA
aaattttagatacctggctt

SEQ ID NO: 11012 - DNA, 20 bp, Artificial Sequence
  Description of Artificial Sequence: Synthetic oligonucleotide
  Target: LAMA2; (-) strand; PAM type: NNAGAAW; PAM sequence: AAAGAAA
atataatatcattattagta

SEQ ID NO: 11013 - DNA, 20 bp, Artificial Sequence
  Description of Artificial Sequence: Synthetic oligonucleotide
  Target: LAMA2; (-) strand; PAM type: NNAGAAW; PAM sequence: AAAGAAA
tcagattgtggtatatgatt

SEQ ID NO: 11014 - DNA, 20 bp, Artificial Sequence
  Description of Artificial Sequence: Synthetic oligonucleotide
  Target: LAMA2; (-) strand; PAM type: NNAGAAW; PAM sequence: TAAGAAT
atttttaaaatgaccgtagc

SEQ ID NO: 11015 - DNA, 20 bp, Artificial Sequence
  Description of Artificial Sequence: Synthetic oligonucleotide
  Target: LAMA2; (-) strand; PAM type: NNAGAAW; PAM sequence: AGAGAAA
acttaacgtgagccacccaa

SEQ ID NO: 11016 - DNA, 20 bp, Artificial Sequence
  Description of Artificial Sequence: Synthetic oligonucleotide
  Target: LAMA2; (-) strand; PAM type: NNAGAAW; PAM sequence: GCAGAAA
ggattaaaaaatcactccga

SEQ ID NO: 11017 - DNA, 20 bp, Artificial Sequence
  Description of Artificial Sequence: Synthetic oligonucleotide
  Target: LAMA2; (-) strand; PAM type: NNAGAAW; PAM sequence: TTAGAAA
atcaggcttaaaatgaaacg

SEQ ID NO: 11018 - DNA, 20 bp, Artificial Sequence
  Description of Artificial Sequence: Synthetic oligonucleotide
  Target: LAMA2; (-) strand; PAM type: NNAGAAW; PAM sequence: ATAGAAT
cctttttgccctaatatttg

SEQ ID NO: 11019 - DNA, 20 bp, Artificial Sequence
  Description of Artificial Sequence: Synthetic oligonucleotide
  Target: LAMA2; (-) strand; PAM type: NNAGAAW; PAM sequence: GCAGAAT
aaattttatcaaaattaact

SEQ ID NO: 11020 - DNA, 20 bp, Artificial Sequence
  Description of Artificial Sequence: Synthetic oligonucleotide
  Target: LAMA2; (-) strand; PAM type: NNAGAAW; PAM sequence: AGAGAAA
accttttctatgatatccaa

SEQ ID NO: 11021 - DNA, 20 bp, Artificial Sequence
  Description of Artificial Sequence: Synthetic oligonucleotide
  Target: LAMA2; (-) strand; PAM type: NNAGAAW; PAM sequence: AGAGAAA
cagcctggcaatggaagagg

SEQ ID NO: 11022 - DNA, 20 bp, Artificial Sequence
  Description of Artificial Sequence: Synthetic oligonucleotide
  Target: LAMA2; (-) strand; PAM type: NNAGAAW; PAM sequence: AAAGAAT
agtcgaatgacttagaccca

SEQ ID NO: 11023 - DNA, 20 bp, Artificial Sequence
  Description of Artificial Sequence: Synthetic oligonucleotide
  Target: LAMA2; (-) strand; PAM type: NNAGAAW; PAM sequence: CCAGAAA
aaactaagataagactggta

SEQ ID NO: 11024 - DNA, 20 bp, Artificial Sequence
  Description of Artificial Sequence: Synthetic oligonucleotide
  Target: LAMA2; (-) strand; PAM type: NNAGAAW; PAM sequence: TTAGAAA
actgcttgagggaatcatgg

SEQ ID NO: 11025 - DNA, 20 bp, Artificial Sequence
  Description of Artificial Sequence: Synthetic oligonucleotide
  Target: LAMA2; (-) strand; PAM type: NNAGAAW; PAM sequence: TAAGAAT
gaaggctgtggctggatgta

SEQ ID NO: 11026 - DNA, 20 bp, Artificial Sequence
  Description of Artificial Sequence: Synthetic oligonucleotide
  Target: LAMA2; (-) strand; PAM type: NNAGAAW; PAM sequence: GCAGAAT
ttcactctttactttcatct

SEQ ID NO: 11027 - DNA, 20 bp, Artificial Sequence
  Description of Artificial Sequence: Synthetic oligonucleotide
  Target: LAMA2; (-) strand; PAM type: NNAGAAW; PAM sequence: GGAGAAT
atccacatatctaaagtgct

SEQ ID NO: 11028 - DNA, 20 bp, Artificial Sequence
  Description of Artificial Sequence: Synthetic oligonucleotide
  Target: LAMA2; (-) strand; PAM type: NNAGAAW; PAM sequence: TTAGAAT
caattagaataacttatcaa

SEQ ID NO: 11029 - DNA, 20 bp, Artificial Sequence
  Description of Artificial Sequence: Synthetic oligonucleotide
  Target: LAMA2; (-) strand; PAM type: NNAGAAW; PAM sequence: TTAGAAT
catttagaataacttatcaa

SEQ ID NO: 11030 - DNA, 20 bp, Artificial Sequence
  Description of Artificial Sequence: Synthetic oligonucleotide
  Target: LAMA2; (-) strand; PAM type: NNAGAAW; PAM sequence: TTAGAAT
tacaattataaacttatcat

SEQ ID NO: 11031 - DNA, 20 bp, Artificial Sequence
  Description of Artificial Sequence: Synthetic oligonucleotide
  Target: LAMA2; (-) strand; PAM type: NNAGAAW; PAM sequence: CCAGAAT
ttctatggtgtttctttggg

SEQ ID NO: 11032 - DNA, 20 bp, Artificial Sequence
  Description of Artificial Sequence: Synthetic oligonucleotide
  Target: LAMA2; (-) strand; PAM type: NNAGAAW; PAM sequence: AAAGAAA
ggaatcataacactaaatag

SEQ ID NO: 11033 - DNA, 20 bp, Artificial Sequence
  Description of Artificial Sequence: Synthetic oligonucleotide
  Target: LAMA2; (-) strand; PAM type: NNAGAAW; PAM sequence: ATAGAAA
cagcggaatcataacactaa

SEQ ID NO: 11034 - DNA, 20 bp, Artificial Sequence
  Description of Artificial Sequence: Synthetic oligonucleotide
  Target: LAMA2; (-) strand; PAM type: NNAGAAW; PAM sequence: ATAGAAA
gtgcaaatcattacttgcaa

SEQ ID NO: 11035 - DNA, 20 bp, Artificial Sequence
  Description of Artificial Sequence: Synthetic oligonucleotide
  Target: LAMA2; (-) strand; PAM type: NNAGAAW; PAM sequence: GAAGAAA
ttagatgtgtccttcattaa

SEQ ID NO: 11036 - DNA, 20 bp, Artificial Sequence
  Description of Artificial Sequence: Synthetic oligonucleotide
  Target: LAMA2; (-) strand; PAM type: NNAGAAW; PAM sequence: TTAGAAA
acaccagctgtggaaggtgt

SEQ ID NO: 11037 - DNA, 20 bp, Artificial Sequence
  Description of Artificial Sequence: Synthetic oligonucleotide
  Target: LAMA2; (-) strand; PAM type: NNAGAAW; PAM sequence: TTAGAAT
atcattttcactgaatatat

SEQ ID NO: 11038 - DNA, 20 bp, Artificial Sequence
  Description of Artificial Sequence: Synthetic oligonucleotide
  Target: LAMA2; (-) strand; PAM type: NNAGAAW; PAM sequence: GAAGAAA
tcaaagaaatgtaagtgagg

SEQ ID NO: 11039 - DNA, 20 bp, Artificial Sequence
  Description of Artificial Sequence: Synthetic oligonucleotide
  Target: LAMA2; (-) strand; PAM type: NNAGAAW; PAM sequence: AAAGAAA
ctagtgcagcgtttcatgtc

SEQ ID NO: 11040 - DNA, 20 bp, Artificial Sequence
  Description of Artificial Sequence: Synthetic oligonucleotide
  Target: LAMA2; (-) strand; PAM type: NNAGAAW; PAM sequence: TAAGAAT
gcggcagttgacccagctac

SEQ ID NO: 11041 - DNA, 20 bp, Artificial Sequence
  Description of Artificial Sequence: Synthetic oligonucleotide
  Target: LAMA2; (-) strand; PAM type: NNAGAAW; PAM sequence: TGAGAAT
aagattgcaaaaataatgtt

SEQ ID NO: 11042 - DNA, 20 bp, Artificial Sequence
  Description of Artificial Sequence: Synthetic oligonucleotide
  Target: LAMA2; (-) strand; PAM type: NNAGAAW; PAM sequence: ACAGAAT
tatagttagaaacgcacaca

SEQ ID NO: 11043 - DNA, 20 bp, Artificial Sequence
  Description of Artificial Sequence: Synthetic oligonucleotide
  Target: LAMA2; (-) strand; PAM type: NNAGAAW; PAM sequence: TTAGAAA
tcggtacatcatgtatatag

SEQ ID NO: 11044 - DNA, 20 bp, Artificial Sequence
  Description of Artificial Sequence: Synthetic oligonucleotide
  Target: LAMA2; (-) strand; PAM type: NNAGAAW; PAM sequence: AAAGAAT
cctatgaagtttaagaaagg

SEQ ID NO: 11045 - DNA, 20 bp, Artificial Sequence
  Description of Artificial Sequence: Synthetic oligonucleotide
  Target: LAMA2; (-) strand; PAM type: NNAGAAW; PAM sequence: TAAGAAA
tttagctttcctatgaagtt

SEQ ID NO: 11046 - DNA, 20 bp, Artificial Sequence
  Description of Artificial Sequence: Synthetic oligonucleotide
  Target: LAMA2; (-) strand; PAM type: NNAGAAW; PAM sequence: TCAGAAA
atattatagtacaatgtatt

SEQ ID NO: 11047 - DNA, 20 bp, Artificial Sequence
  Description of Artificial Sequence: Synthetic oligonucleotide
  Target: LAMA2; (-) strand; PAM type: NNAGAAW; PAM sequence: ACAGAAT
agctcttttctggtattatt

SEQ ID NO: 11048 - DNA, 20 bp, Artificial Sequence
  Description of Artificial Sequence: Synthetic oligonucleotide
  Target: LAMA2; (-) strand; PAM type: NNAGAAW; PAM sequence: TCAGAAT
aatgttgttaaaatgactct

SEQ ID NO: 11049 - DNA, 20 bp, Artificial Sequence
  Description of Artificial Sequence: Synthetic oligonucleotide
  Target: LAMA2; (-) strand; PAM type: NNAGAAW; PAM sequence: GTAGAAA
gattctatttttcagaagtt

SEQ ID NO: 11050 - DNA, 20 bp, Artificial Sequence
  Description of Artificial Sequence: Synthetic oligonucleotide
  Target: LAMA2; (-) strand; PAM type: NNAGAAW; PAM sequence: AAAGAAA
ccaagtgaaggaagccaaac

SEQ ID NO: 11051 - DNA, 20 bp, Artificial Sequence
  Description of Artificial Sequence: Synthetic oligonucleotide
  Target: LAMA2; (-) strand; PAM type: NNAGAAW; PAM sequence: CTAGAAA
agcaaaattgtaaccccaaa

SEQ ID NO: 11052 - DNA, 20 bp, Artificial Sequence
  Description of Artificial Sequence: Synthetic oligonucleotide
  Target: LAMA2; (-) strand; PAM type: NNAGAAW; PAM sequence: AGAGAAA
gagtgttcttaagaaaaaaa

SEQ ID NO: 11053 - DNA, 20 bp, Artificial Sequence
  Description of Artificial Sequence: Synthetic oligonucleotide
  Target: LAMA2; (-) strand; PAM type: NNAGAAW; PAM sequence: TAAGAAA
gcaaagatgtggagtgttct

SEQ ID NO: 11054 - DNA, 20 bp, Artificial Sequence
  Description of Artificial Sequence: Synthetic oligonucleotide
  Target: LAMA2; (-) strand; PAM type: NNAGAAW; PAM sequence: TCAGAAT
acaagagaaatacacatgca

SEQ ID NO: 11055 - DNA, 20 bp, Artificial Sequence
  Description of Artificial Sequence: Synthetic oligonucleotide
  Target: LAMA2; (-) strand; PAM type: NNAGAAW; PAM sequence: AGAGAAA
gcattaaataaatgcaaaca

SEQ ID NO: 11056 - DNA, 20 bp, Artificial Sequence
  Description of Artificial Sequence: Synthetic oligonucleotide
  Target: LAMA2; (-) strand; PAM type: NNAGAAW; PAM sequence: ATAGAAA
aaggaaacaaacaactcaaa

SEQ ID NO: 11057 - DNA, 20 bp, Artificial Sequence
  Description of Artificial Sequence: Synthetic oligonucleotide
  Target: LAMA2; (-) strand; PAM type: NNAGAAW; PAM sequence: CCAGAAT
atacgttaaagaacatgtat

SEQ ID NO: 11058 - DNA, 20 bp, Artificial Sequence
  Description of Artificial Sequence: Synthetic oligonucleotide
  Target: LAMA2; (-) strand; PAM type: NNAGAAW; PAM sequence: GAAGAAA
cataaaaagtatggactata

SEQ ID NO: 11059 - DNA, 20 bp, Artificial Sequence
  Description of Artificial Sequence: Synthetic oligonucleotide
  Target: LAMA2; (-) strand; PAM type: NNAGAAW; PAM sequence: AGAGAAA
cttcttgaagaaaacatggg

SEQ ID NO: 11060 - DNA, 20 bp, Artificial Sequence
  Description of Artificial Sequence: Synthetic oligonucleotide
  Target: LAMA2; (-) strand; PAM type: NNAGAAW; PAM sequence: GAAGAAA
ctaaaactctaaaacttctt

SEQ ID NO: 11061 - DNA, 20 bp, Artificial Sequence
  Description of Artificial Sequence: Synthetic oligonucleotide
  Target: LAMA2; (-) strand; PAM type: NNAGAAW; PAM sequence: ATAGAAA
ctctgaccattacctgatat

SEQ ID NO: 11062 - DNA, 20 bp, Artificial Sequence
  Description of Artificial Sequence: Synthetic oligonucleotide
  Target: LAMA2; (-) strand; PAM type: NNAGAAW; PAM sequence: CCAGAAA
tcggtgaagcagaaaagagt

SEQ ID NO: 11063 - DNA, 20 bp, Artificial Sequence
  Description of Artificial Sequence: Synthetic oligonucleotide
  Target: LAMA2; (-) strand; PAM type: NNAGAAW; PAM sequence: GCAGAAA
cataagaatagatcggtgaa

SEQ ID NO: 11064 - DNA, 20 bp, Artificial Sequence
  Description of Artificial Sequence: Synthetic oligonucleotide
  Target: LAMA2; (-) strand; PAM type: NNAGAAW; PAM sequence: TAAGAAT
catattaactagtattaaca

SEQ ID NO: 11065 - DNA, 20 bp, Artificial Sequence
  Description of Artificial Sequence: Synthetic oligonucleotide
  Target: LAMA2; (-) strand; PAM type: NNAGAAW; PAM sequence: AAAGAAT
atcctagcaggctttttggt

SEQ ID NO: 11066 - DNA, 20 bp, Artificial Sequence
  Description of Artificial Sequence: Synthetic oligonucleotide
  Target: LAMA2; (-) strand; PAM type: NNAGAAW; PAM sequence: TGAGAAA
tcaaaaactacaaacatttc

SEQ ID NO: 11067 - DNA, 20 bp, Artificial Sequence
  Description of Artificial Sequence: Synthetic oligonucleotide
  Target: LAMA2; (-) strand; PAM type: NNAGAAW; PAM sequence: AAAGAAA
aatctcactaaatggaccaa

SEQ ID NO: 11068 - DNA, 20 bp, Artificial Sequence
  Description of Artificial Sequence: Synthetic oligonucleotide
  Target: LAMA2; (-) strand; PAM type: NNAGAAW; PAM sequence: CAAGAAA
gcagatgacatgattatcta

SEQ ID NO: 11069 - DNA, 20 bp, Artificial Sequence
  Description of Artificial Sequence: Synthetic oligonucleotide
  Target: LAMA2; (-) strand; PAM type: NNAGAAW; PAM sequence: TTAGAAA
tgccacagaagttacacaga

SEQ ID NO: 11070 - DNA, 20 bp, Artificial Sequence
  Description of Artificial Sequence: Synthetic oligonucleotide
  Target: LAMA2; (-) strand; PAM type: NNAGAAW; PAM sequence: CAAGAAA
aatagtttactacaatagga

SEQ ID NO: 11071 - DNA, 20 bp, Artificial Sequence
  Description of Artificial Sequence: Synthetic oligonucleotide
  Target: LAMA2; (-) strand; PAM type: NNAGAAW; PAM sequence: GCAGAAA
atatggtcatctcaatagat

SEQ ID NO: 11072 - DNA, 20 bp, Artificial Sequence
  Description of Artificial Sequence: Synthetic oligonucleotide
  Target: LAMA2; (-) strand; PAM type: NNAGAAW; PAM sequence: AAAGAAA
ctgtcatattaacagcttaa

SEQ ID NO: 11073 - DNA, 20 bp, Artificial Sequence
  Description of Artificial Sequence: Synthetic oligonucleotide
  Target: LAMA2; (-) strand; PAM type: NNAGAAW; PAM sequence: TAAGAAA
aaacgtagatccaaaatcat

SEQ ID NO: 11074 - DNA, 20 bp, Artificial Sequence
  Description of Artificial Sequence: Synthetic oligonucleotide
  Target: LAMA2; (-) strand; PAM type: NNAGAAW; PAM sequence: CAAGAAA
tcatcccgacgacaacgcta

SEQ ID NO: 11075 - DNA, 20 bp, Artificial Sequence
  Description of Artificial Sequence: Synthetic oligonucleotide
  Target: LAMA2; (-) strand; PAM type: NNAGAAW; PAM sequence: CTAGAAT
ttttttcttgattaaccttt

SEQ ID NO: 11076 - DNA, 20 bp, Artificial Sequence
  Description of Artificial Sequence: Synthetic oligonucleotide
  Target: LAMA2; (-) strand; PAM type: NNAGAAW; PAM sequence: AGAGAAA
acaaaaaaacttggaacaca

SEQ ID NO: 11077 - DNA, 20 bp, Artificial Sequence
  Description of Artificial Sequence: Synthetic oligonucleotide
  Target: LAMA2; (-) strand; PAM type: NNAGAAW; PAM sequence: GGAGAAT
ctactcaggaggctgaggca

SEQ ID NO: 11078 - DNA, 20 bp, Artificial Sequence
  Description of Artificial Sequence: Synthetic oligonucleotide
  Target: LAMA2; (-) strand; PAM type: NNAGAAW; PAM sequence: TAAGAAA
aatgatctaaggtttcacct

SEQ ID NO: 11079 - DNA, 20 bp, Artificial Sequence
  Description of Artificial Sequence: Synthetic oligonucleotide
  Target: LAMA2; (-) strand; PAM type: NNAGAAW; PAM sequence: AGAGAAA
atgtatcaaatgcccatatt

SEQ ID NO: 11080 - DNA, 20 bp, Artificial Sequence
  Description of Artificial Sequence: Synthetic oligonucleotide
  Target: LAMA2; (-) strand; PAM type: NNAGAAW; PAM sequence: TTAGAAA
cttgaaaattccccaaatat

SEQ ID NO: 11081 - DNA, 20 bp, Artificial Sequence
  Description of Artificial Sequence: Synthetic oligonucleotide
  Target: LAMA2; (-) strand; PAM type: NNAGAAW; PAM sequence: TTAGAAT
gattatgttctcagaacaat

SEQ ID NO: 11082 - DNA, 20 bp, Artificial Sequence
  Description of Artificial Sequence: Synthetic oligonucleotide
  Target: LAMA2; (-) strand; PAM type: NNAGAAW; PAM sequence: CCAGAAT
gaagttttcatccaacaact

SEQ ID NO: 11083 - DNA, 20 bp, Artificial Sequence
  Description of Artificial Sequence: Synthetic oligonucleotide
  Target: LAMA2; (-) strand; PAM type: NNAGAAW; PAM sequence: GAAGAAA
aaaacctgagagaagtgaaa

SEQ ID NO: 11084 - DNA, 20 bp, Artificial Sequence
  Description of Artificial Sequence: Synthetic oligonucleotide
  Target: LAMA2; (-) strand; PAM type: NNAGAAW; PAM sequence: TCAGAAA
ttgcaatagctatataaata

SEQ ID NO: 11085 - DNA, 20 bp, Artificial Sequence
  Description of Artificial Sequence: Synthetic oligonucleotide
  Target: LAMA2; (-) strand; PAM type: NNAGAAW; PAM sequence: AAAGAAA
taccacacaaacaccattaa

SEQ ID NO: 11086 - DNA, 20 bp, Artificial Sequence
  Description of Artificial Sequence: Synthetic oligonucleotide
  Target: LAMA2; (-) strand; PAM type: NNAGAAW; PAM sequence: TCAGAAT
caatggagtaagaccctgtc

SEQ ID NO: 11087 - DNA, 20 bp, Artificial Sequence
  Description of Artificial Sequence: Synthetic oligonucleotide
  Target: LAMA2; (-) strand; PAM type: NNAGAAW; PAM sequence: CCAGAAT
ggtggtatacacctgtaatc

SEQ ID NO: 11088 - DNA, 20 bp, Artificial Sequence
  Description of Artificial Sequence: Synthetic oligonucleotide
  Target: LAMA2; (-) strand; PAM type: NNAGAAW; PAM sequence: AAAGAAA
gtatattcctagacaaaacc

SEQ ID NO: 11089 - DNA, 20 bp, Artificial Sequence
  Description of Artificial Sequence: Synthetic oligonucleotide
  Target: LAMA2; (-) strand; PAM type: NNAGAAW; PAM sequence: GGAGAAA
cacaaggaaaaagagttata

SEQ ID NO: 11090 - DNA, 20 bp, Artificial Sequence
  Description of Artificial Sequence: Synthetic oligonucleotide
  Target: LAMA2; (-) strand; PAM type: NNAGAAW; PAM sequence: GAAGAAA
ttaggaagtagttaatggaa

SEQ ID NO: 11091 - DNA, 20 bp, Artificial Sequence
  Description of Artificial Sequence: Synthetic oligonucleotide
  Target: LAMA2; (-) strand; PAM type: NNAGAAW; PAM sequence: AAAGAAA
aataattattaaacacacaa

SEQ ID NO: 11092 - DNA, 20 bp, Artificial Sequence
  Description of Artificial Sequence: Synthetic oligonucleotide
  Target: LAMA2; (-) strand; PAM type: NNAGAAW; PAM sequence: TAAGAAT
tgatttccagaaagagacaa

SEQ ID NO: 11093 - DNA, 20 bp, Artificial Sequence
  Description of Artificial Sequence: Synthetic oligonucleotide
  Target: LAMA2; (-) strand; PAM type: NNAGAAW; PAM sequence: CCAGAAA
caacatacaaaaaatgattt

SEQ ID NO: 11094 - DNA, 20 bp, Artificial Sequence
  Description of Artificial Sequence: Synthetic oligonucleotide
  Target: LAMA2; (-) strand; PAM type: NNAGAAW; PAM sequence: TCAGAAA
acacttaacaatagaaacta

SEQ ID NO: 11095 - DNA, 20 bp, Artificial Sequence
  Description of Artificial Sequence: Synthetic oligonucleotide
  Target: LAMA2; (-) strand; PAM type: NNAGAAW; PAM sequence: ATAGAAA
gtgactttggacacttaaca

SEQ ID NO: 11096 - DNA, 20 bp, Artificial Sequence
  Description of Artificial Sequence: Synthetic oligonucleotide
  Target: LAMA2; (-) strand; PAM type: NNAGAAW; PAM sequence: AGAGAAA
tgaaaaaatgtgagtatagt

SEQ ID NO: 11097 - DNA, 20 bp, Artificial Sequence
  Description of Artificial Sequence: Synthetic oligonucleotide
  Target: LAMA2; (-) strand; PAM type: NNAGAAW; PAM sequence: CAAGAAT
gtttataaacattatatttt

SEQ ID NO: 11098 - DNA, 20 bp, Artificial Sequence
  Description of Artificial Sequence: Synthetic oligonucleotide
  Target: LAMA2; (-) strand; PAM type: NNAGAAW; PAM sequence: GGAGAAA
gaaaatatgactcagaaaca

SEQ ID NO: 11099 - DNA, 20 bp, Artificial Sequence
  Description of Artificial Sequence: Synthetic oligonucleotide
  Target: LAMA2; (-) strand; PAM type: NNAGAAW; PAM sequence: TCAGAAA
aagaatcaagaaaatatgac

SEQ ID NO: 11100 - DNA, 20 bp, Artificial Sequence
  Description of Artificial Sequence: Synthetic oligonucleotide
  Target: LAMA2; (-) strand; PAM type: NNAGAAW; PAM sequence: CAAGAAA
ttatcaggcatgtaaagaat

SEQ ID NO: 11101 - DNA, 20 bp, Artificial Sequence
  Description of Artificial Sequence: Synthetic oligonucleotide
  Target: LAMA2; (-) strand; PAM type: NNAGAAW; PAM sequence: AAAGAAT
ataaaaattatcaggcatgt

SEQ ID NO: 11102 - DNA, 20 bp, Artificial Sequence
  Description of Artificial Sequence: Synthetic oligonucleotide
  Target: LAMA2; (-) strand; PAM type: NNAGAAW; PAM sequence: AAAGAAA
cataaagttcaacattcttt

SEQ ID NO: 11103 - DNA, 20 bp, Artificial Sequence
  Description of Artificial Sequence: Synthetic oligonucleotide
  Target: LAMA2; (-) strand; PAM type: NNAGAAW; PAM sequence: AAAGAAT
aaactcaaaagcaagcttca

SEQ ID NO: 11104 - DNA, 20 bp, Artificial Sequence
  Description of Artificial Sequence: Synthetic oligonucleotide
  Target: LAMA2; (-) strand; PAM type: NNAGAAW; PAM sequence: AGAGAAA
tgcaaaaattcttacagccc

SEQ ID NO: 11105 - DNA, 20 bp, Artificial Sequence
  Description of Artificial Sequence: Synthetic oligonucleotide
  Target: LAMA2; (-) strand; PAM type: NNAGAAW; PAM sequence: ATAGAAA
ttcaaaaagaaagaagttag

SEQ ID NO: 11106 - DNA, 20 bp, Artificial Sequence
  Description of Artificial Sequence: Synthetic oligonucleotide
  Target: LAMA2; (-) strand; PAM type: NNAGAAW; PAM sequence: AAAGAAA
caaatagaatacgtgttcaa

SEQ ID NO: 11107 - DNA, 20 bp, Artificial Sequence
  Description of Artificial Sequence: Synthetic oligonucleotide
  Target: LAMA2; (-) strand; PAM type: NNAGAAW; PAM sequence: ATAGAAT
gctgaaacttatgatggcaa

SEQ ID NO: 11108 - DNA, 20 bp, Artificial Sequence
  Description of Artificial Sequence: Synthetic oligonucleotide
  Target: LAMA2; (-) strand; PAM type: NNAGAAW; PAM sequence: CAAGAAA
actaaaataaaaatacaaac

SEQ ID NO: 11109 - DNA, 20 bp, Artificial Sequence
  Description of Artificial Sequence: Synthetic oligonucleotide
  Target: LAMA2; (-) strand; PAM type: NNAGAAW; PAM sequence: GAAGAAT
tttgtgttgcattaggcact

SEQ ID NO: 11110 - DNA, 20 bp, Artificial Sequence
  Description of Artificial Sequence: Synthetic oligonucleotide
  Target: LAMA2; (-) strand; PAM type: NNAGAAW; PAM sequence: GAAGAAT
tcagacatctgaacttcctt

SEQ ID NO: 11111 - DNA, 20 bp, Artificial Sequence
  Description of Artificial Sequence: Synthetic oligonucleotide
  Target: LAMA2; (-) strand; PAM type: NNAGAAW; PAM sequence: ATAGAAA
acttaataatgctattgaca

SEQ ID NO: 11112 - DNA, 20 bp, Artificial Sequence
  Description of Artificial Sequence: Synthetic oligonucleotide
  Target: LAMA2; (-) strand; PAM type: NNAGAAW; PAM sequence: ATAGAAA
aaacatataactacgttttc

SEQ ID NO: 11113 - DNA, 20 bp, Artificial Sequence
  Description of Artificial Sequence: Synthetic oligonucleotide
  Target: LAMA2; (-) strand; PAM type: NNAGAAW; PAM sequence: CAAGAAT
ggtatttctttatagcaatg

SEQ ID NO: 11114 - DNA, 20 bp, Artificial Sequence
  Description of Artificial Sequence: Synthetic oligonucleotide
  Target: LAMA2; (-) strand; PAM type: NNAGAAW; PAM sequence: CCAGAAA
gaagcttcctgaggccttca

SEQ ID NO: 11115 - DNA, 20 bp, Artificial Sequence
  Description of Artificial Sequence: Synthetic oligonucleotide
  Target: LAMA2; (-) strand; PAM type: NNAGAAW; PAM sequence: AAAGAAA
agagaaattatccatgacac

SEQ ID NO: 11116 - DNA, 20 bp, Artificial Sequence
  Description of Artificial Sequence: Synthetic oligonucleotide
  Target: LAMA2; (-) strand; PAM type: NNAGAAW; PAM sequence: AGAGAAA
gtatgctcacaccttagcac

SEQ ID NO: 11117 - DNA, 20 bp, Artificial Sequence
  Description of Artificial Sequence: Synthetic oligonucleotide
  Target: LAMA2; (-) strand; PAM type: NNAGAAW; PAM sequence: AGAGAAT
ggtaatatttgtttagcaat

SEQ ID NO: 11118 - DNA, 20 bp, Artificial Sequence
  Description of Artificial Sequence: Synthetic oligonucleotide
  Target: LAMA2; (-) strand; PAM type: NNAGAAW; PAM sequence: GGAGAAT
tttattcaggaagttatagt

SEQ ID NO: 11119 - DNA, 20 bp, Artificial Sequence
  Description of Artificial Sequence: Synthetic oligonucleotide
  Target: LAMA2; (-) strand; PAM type: NNAGAAW; PAM sequence: ATAGAAA
taggccataatcgggtatta

SEQ ID NO: 11120 - DNA, 20 bp, Artificial Sequence
  Description of Artificial Sequence: Synthetic oligonucleotide
  Target: LAMA2; (-) strand; PAM type: NNAGAAW; PAM sequence: GTAGAAT
taacttaaagaacatcagat

SEQ ID NO: 11121 - DNA, 20 bp, Artificial Sequence
  Description of Artificial Sequence: Synthetic oligonucleotide
  Target: LAMA2; (-) strand; PAM type: NNAGAAW; PAM sequence: ATAGAAT
atggacaaagcttccaaggc

SEQ ID NO: 11122 - DNA, 20 bp, Artificial Sequence
  Description of Artificial Sequence: Synthetic oligonucleotide
  Target: LAMA2; (-) strand; PAM type: NNAGAAW; PAM sequence: GTAGAAA
tatctaattattgctaatca

SEQ ID NO: 11123 - DNA, 20 bp, Artificial Sequence
  Description of Artificial Sequence: Synthetic oligonucleotide
  Target: LAMA2; (-) strand; PAM type: NNAGAAW; PAM sequence: GGAGAAT
ctactcgggaggctgaggca

SEQ ID NO: 11124 - DNA, 20 bp, Artificial Sequence
  Description of Artificial Sequence: Synthetic oligonucleotide
  Target: LAMA2; (-) strand; PAM type: NNAGAAW; PAM sequence: AAAGAAT
acgggagcccagtggcccag

SEQ ID NO: 11125 - DNA, 20 bp, Artificial Sequence
  Description of Artificial Sequence: Synthetic oligonucleotide
  Target: LAMA2; (-) strand; PAM type: NNAGAAW; PAM sequence: CCAGAAA
tagcacgggagcccagtggc

SEQ ID NO: 11126 - DNA, 20 bp, Artificial Sequence
  Description of Artificial Sequence: Synthetic oligonucleotide
  Target: LAMA2; (-) strand; PAM type: NNAGAAW; PAM sequence: AAAGAAT
ggctctgtctaaaaaaaaaa

SEQ ID NO: 11127 - DNA, 20 bp, Artificial Sequence
  Description of Artificial Sequence: Synthetic oligonucleotide
  Target: LAMA2; (-) strand; PAM type: NNAGAAW; PAM sequence: GGAGAAT
ctactcctgaggctgaggca

SEQ ID NO: 11128 - DNA, 20 bp, Artificial Sequence
  Description of Artificial Sequence: Synthetic oligonucleotide
  Target: LAMA2; (-) strand; PAM type: NNAGAAW; PAM sequence: GCAGAAT
acatttctccgtatccggtg

SEQ ID NO: 11129 - DNA, 20 bp, Artificial Sequence
  Description of Artificial Sequence: Synthetic oligonucleotide
  Target: LAMA2; (-) strand; PAM type: NNAGAAW; PAM sequence: CTAGAAT
ttacataattcatatttttg

SEQ ID NO: 11130 - DNA, 20 bp, Artificial Sequence
  Description of Artificial Sequence: Synthetic oligonucleotide
  Target: LAMA2; (-) strand; PAM type: NNAGAAW; PAM sequence: ATAGAAT
aaatatgttagcataacatg

SEQ ID NO: 11131 - DNA, 20 bp, Artificial Sequence
  Description of Artificial Sequence: Synthetic oligonucleotide
  Target: LAMA2; (-) strand; PAM type: NNAGAAW; PAM sequence: AAAGAAA
cataatgctatgtgaattag

SEQ ID NO: 11132 - DNA, 20 bp, Artificial Sequence
  Description of Artificial Sequence: Synthetic oligonucleotide
  Target: LAMA2; (-) strand; PAM type: NNAGAAW; PAM sequence: TTAGAAA
aaaccataatgctatgtgaa

SEQ ID NO: 11133 - DNA, 20 bp, Artificial Sequence
  Description of Artificial Sequence: Synthetic oligonucleotide
  Target: LAMA2; (-) strand; PAM type: NNAGAAW; PAM sequence: CCAGAAA
ttatggaaatatatgatcgt

SEQ ID NO: 11134 - DNA, 20 bp, Artificial Sequence
  Description of Artificial Sequence: Synthetic oligonucleotide
  Target: LAMA2; (-) strand; PAM type: NNAGAAW; PAM sequence: AGAGAAT
cactctgtacattttgcacc

SEQ ID NO: 11135 - DNA, 20 bp, Artificial Sequence
  Description of Artificial Sequence: Synthetic oligonucleotide
  Target: LAMA2; (-) strand; PAM type: NNAGAAW; PAM sequence: ACAGAAT
gttaaaactgagcaatggaa

SEQ ID NO: 11136 - DNA, 20 bp, Artificial Sequence
  Description of Artificial Sequence: Synthetic oligonucleotide
  Target: LAMA2; (-) strand; PAM type: NNAGAAW; PAM sequence: CTAGAAA
gtttgggttgaaaataagct

SEQ ID NO: 11137 - DNA, 20 bp, Artificial Sequence
  Description of Artificial Sequence: Synthetic oligonucleotide
  Target: LAMA2; (-) strand; PAM type: NNAGAAW; PAM sequence: CTAGAAA
aaatagatcatctccaccaa

SEQ ID NO: 11138 - DNA, 20 bp, Artificial Sequence
  Description of Artificial Sequence: Synthetic oligonucleotide
  Target: LAMA2; (-) strand; PAM type: NNAGAAW; PAM sequence: GGAGAAA
gcgattgcagattaattttt

SEQ ID NO: 11139 - DNA, 20 bp, Artificial Sequence
  Description of Artificial Sequence: Synthetic oligonucleotide
  Target: LAMA2; (-) strand; PAM type: NNAGAAW; PAM sequence: GTAGAAA
attggccgaagcccttgatg

SEQ ID NO: 11140 - DNA, 20 bp, Artificial Sequence
  Description of Artificial Sequence: Synthetic oligonucleotide
  Target: LAMA2; (-) strand; PAM type: NNAGAAW; PAM sequence: TAAGAAT
atgatcataattgcgagata

SEQ ID NO: 11141 - DNA, 20 bp, Artificial Sequence
  Description of Artificial Sequence: Synthetic oligonucleotide
  Target: LAMA2; (-) strand; PAM type: NNAGAAW; PAM sequence: TAAGAAA
agtggtgctattgtaagctg

SEQ ID NO: 11142 - DNA, 20 bp, Artificial Sequence
  Description of Artificial Sequence: Synthetic oligonucleotide
  Target: LAMA2; (-) strand; PAM type: NNAGAAW; PAM sequence: TGAGAAT
agttaggggagaaatcaccc

SEQ ID NO: 11143 - DNA, 20 bp, Artificial Sequence
  Description of Artificial Sequence: Synthetic oligonucleotide
  Target: LAMA2; (-) strand; PAM type: NNAGAAW; PAM sequence: GGAGAAA
tttataacggcaaagttagg

SEQ ID NO: 11144 - DNA, 20 bp, Artificial Sequence
  Description of Artificial Sequence: Synthetic oligonucleotide
  Target: LAMA2; (-) strand; PAM type: NNAGAAW; PAM sequence: TAAGAAA
gaactacttttaagaacaaa

SEQ ID NO: 11145 - DNA, 20 bp, Artificial Sequence
  Description of Artificial Sequence: Synthetic oligonucleotide
  Target: LAMA2; (-) strand; PAM type: NNAGAAW; PAM sequence: GTAGAAA
aacacaaattgaatctaaat

SEQ ID NO: 11146 - DNA, 20 bp, Artificial Sequence
  Description of Artificial Sequence: Synthetic oligonucleotide
  Target: LAMA2; (-) strand; PAM type: NNAGAAW; PAM sequence: GTAGAAT
cagagcctcatctaccaggg

SEQ ID NO: 11147 - DNA, 20 bp, Artificial Sequence
  Description of Artificial Sequence: Synthetic oligonucleotide
  Target: LAMA2; (-) strand; PAM type: NNAGAAW; PAM sequence: GAAGAAT
atcaactgacaaaataaaaa

SEQ ID NO: 11148 - DNA, 20 bp, Artificial Sequence
  Description of Artificial Sequence: Synthetic oligonucleotide
  Target: LAMA2; (-) strand; PAM type: NNAGAAW; PAM sequence: AGAGAAA
atcacttgaggattatatgt

SEQ ID NO: 11149 - DNA, 20 bp, Artificial Sequence
  Description of Artificial Sequence: Synthetic oligonucleotide
  Target: LAMA2; (-) strand; PAM type: NNAGAAW; PAM sequence: AGAGAAA
cattctttctgttaacaaga

SEQ ID NO: 11150 - DNA, 20 bp, Artificial Sequence
  Description of Artificial Sequence: Synthetic oligonucleotide
  Target: LAMA2; (-) strand; PAM type: NNAGAAW; PAM sequence: TAAGAAT
atttccataagtagctttga

SEQ ID NO: 11151 - DNA, 20 bp, Artificial Sequence
  Description of Artificial Sequence: Synthetic oligonucleotide
  Target: LAMA2; (-) strand; PAM type: NNAGAAW; PAM sequence: TTAGAAT
ggcacactggggtgaacaga

SEQ ID NO: 11152 - DNA, 20 bp, Artificial Sequence
  Description of Artificial Sequence: Synthetic oligonucleotide
  Target: LAMA2; (-) strand; PAM type: NNAGAAW; PAM sequence: TCAGAAT
gtgatttttttcaaagtgat

SEQ ID NO: 11153 - DNA, 20 bp, Artificial Sequence
  Description of Artificial Sequence: Synthetic oligonucleotide
  Target: LAMA2; (-) strand; PAM type: NNAGAAW; PAM sequence: TAAGAAA
cagttggccaattttggtca

SEQ ID NO: 11154 - DNA, 20 bp, Artificial Sequence
  Description of Artificial Sequence: Synthetic oligonucleotide
  Target: LAMA2; (-) strand; PAM type: NNAGAAW; PAM sequence: AAAGAAT
ataaggtgaaccgtctactc

SEQ ID NO: 11155 - DNA, 20 bp, Artificial Sequence
  Description of Artificial Sequence: Synthetic oligonucleotide
  Target: LAMA2; (-) strand; PAM type: NNAGAAW; PAM sequence: AGAGAAA
gtaacagagactgacatgaa

SEQ ID NO: 11156 - DNA, 20 bp, Artificial Sequence
  Description of Artificial Sequence: Synthetic oligonucleotide
  Target: LAMA2; (-) strand; PAM type: NNAGAAW; PAM sequence: ATAGAAT
tatatcgattctatattctc

SEQ ID NO: 11157 - DNA, 20 bp, Artificial Sequence
  Description of Artificial Sequence: Synthetic oligonucleotide
  Target: LAMA2; (-) strand; PAM type: NNAGAAW; PAM sequence: TCAGAAA
actaaaagtctctacatcaa

SEQ ID NO: 11158 - DNA, 20 bp, Artificial Sequence
  Description of Artificial Sequence: Synthetic oligonucleotide
  Target: LAMA2; (-) strand; PAM type: NNAGAAW; PAM sequence: TGAGAAA
aaaataatctcctgttatag

SEQ ID NO: 11159 - DNA, 20 bp, Artificial Sequence
  Description of Artificial Sequence: Synthetic oligonucleotide
  Target: LAMA2; (-) strand; PAM type: NNAGAAW; PAM sequence: AAAGAAA
gaaattggtgtgagagaagc

SEQ ID NO: 11160 - DNA, 20 bp, Artificial Sequence
  Description of Artificial Sequence: Synthetic oligonucleotide
  Target: LAMA2; (-) strand; PAM type: NNAGAAW; PAM sequence: AAAGAAA
gtatgtaaaacagtgtgaca

SEQ ID NO: 11161 - DNA, 20 bp, Artificial Sequence
  Description of Artificial Sequence: Synthetic oligonucleotide
  Target: LAMA2; (-) strand; PAM type: NNAGAAW; PAM sequence: ACAGAAT
gtacaaagttcaaacctcaa

SEQ ID NO: 11162 - DNA, 20 bp, Artificial Sequence
  Description of Artificial Sequence: Synthetic oligonucleotide
  Target: LAMA2; (-) strand; PAM type: NNAGAAW; PAM sequence: AAAGAAA
ttataaaaggaaacaaaagc

SEQ ID NO: 11163 - DNA, 20 bp, Artificial Sequence
  Description of Artificial Sequence: Synthetic oligonucleotide
  Target: LAMA2; (-) strand; PAM type: NNAGAAW; PAM sequence: CAAGAAA
agcaaaccactccccttctg

SEQ ID NO: 11164 - DNA, 20 bp, Artificial Sequence
  Description of Artificial Sequence: Synthetic oligonucleotide
  Target: LAMA2; (-) strand; PAM type: NNAGAAW; PAM sequence: AAAGAAA
gaaatagtcattataattga

SEQ ID NO: 11165 - DNA, 20 bp, Artificial Sequence
  Description of Artificial Sequence: Synthetic oligonucleotide
  Target: LAMA2; (-) strand; PAM type: NNAGAAW; PAM sequence: CTAGAAA
caggaactttagaaaaccac

SEQ ID NO: 11166 - DNA, 20 bp, Artificial Sequence
  Description of Artificial Sequence: Synthetic oligonucleotide
  Target: LAMA2; (-) strand; PAM type: NNAGAAW; PAM sequence: TTAGAAA
tgaatgacctttcaggaact

SEQ ID NO: 11167 - DNA, 20 bp, Artificial Sequence
  Description of Artificial Sequence: Synthetic oligonucleotide
  Target: LAMA2; (-) strand; PAM type: NNAGAAW; PAM sequence: TAAGAAT
ttctctagctcactttatta

SEQ ID NO: 11168 - DNA, 20 bp, Artificial Sequence
  Description of Artificial Sequence: Synthetic oligonucleotide
  Target: LAMA2; (-) strand; PAM type: NNAGAAW; PAM sequence: GTAGAAA
agctaattattgtattttta

SEQ ID NO: 11169 - DNA, 20 bp, Artificial Sequence
  Description of Artificial Sequence: Synthetic oligonucleotide
  Target: LAMA2; (-) strand; PAM type: NNAGAAW; PAM sequence: CGAGAAT
ttcagaaatcctagaaacag

SEQ ID NO: 11170 - DNA, 20 bp, Artificial Sequence
  Description of Artificial Sequence: Synthetic oligonucleotide
  Target: LAMA2; (-) strand; PAM type: NNAGAAW; PAM sequence: CTAGAAA
ccattgagatttcagaaatc

SEQ ID NO: 11171 - DNA, 20 bp, Artificial Sequence
  Description of Artificial Sequence: Synthetic oligonucleotide
  Target: LAMA2; (-) strand; PAM type: NNAGAAW; PAM sequence: TCAGAAA
cagctacctccattgagatt

SEQ ID NO: 11172 - DNA, 20 bp, Artificial Sequence
  Description of Artificial Sequence: Synthetic oligonucleotide
  Target: LAMA2; (-) strand; PAM type: NNAGAAW; PAM sequence: CCAGAAT
agcttacctcacaggacagg

SEQ ID NO: 11173 - DNA, 20 bp, Artificial Sequence
  Description of Artificial Sequence: Synthetic oligonucleotide
  Target: LAMA2; (-) strand; PAM type: NNAGAAW; PAM sequence: TAAGAAT
gaagattaaataaaatagat

SEQ ID NO: 11174 - DNA, 20 bp, Artificial Sequence
  Description of Artificial Sequence: Synthetic oligonucleotide
  Target: LAMA2; (-) strand; PAM type: NNAGAAW; PAM sequence: CAAGAAA
ctaactcttcagaagtggtc

SEQ ID NO: 11175 - DNA, 20 bp, Artificial Sequence
  Description of Artificial Sequence: Synthetic oligonucleotide
  Target: LAMA2; (-) strand; PAM type: NNAGAAW; PAM sequence: AGAGAAT
gacaatcttgaaggcagaca

SEQ ID NO: 11176 - DNA, 20 bp, Artificial Sequence
  Description of Artificial Sequence: Synthetic oligonucleotide
  Target: LAMA2; (-) strand; PAM type: NNAGAAW; PAM sequence: TAAGAAA
caattatagaaattagatcc

SEQ ID NO: 11177 - DNA, 20 bp, Artificial Sequence
  Description of Artificial Sequence: Synthetic oligonucleotide
  Target: LAMA2; (-) strand; PAM type: NNAGAAW; PAM sequence: ATAGAAA
cctattaatatttcacaatt

SEQ ID NO: 11178 - DNA, 20 bp, Artificial Sequence
  Description of Artificial Sequence: Synthetic oligonucleotide
  Target: LAMA2; (-) strand; PAM type: NNAGAAW; PAM sequence: AAAGAAT
cagccagcctgactaatgag

SEQ ID NO: 11179 - DNA, 20 bp, Artificial Sequence
  Description of Artificial Sequence: Synthetic oligonucleotide
  Target: LAMA2; (-) strand; PAM type: NNAGAAW; PAM sequence: TGAGAAA
gcaccagccagcctgactaa

SEQ ID NO: 11180 - DNA, 20 bp, Artificial Sequence
  Description of Artificial Sequence: Synthetic oligonucleotide
  Target: LAMA2; (-) strand; PAM type: NNAGAAW; PAM sequence: CAAGAAA
tcatgatgccatgtccctct

SEQ ID NO: 11181 - DNA, 20 bp, Artificial Sequence
  Description of Artificial Sequence: Synthetic oligonucleotide
  Target: LAMA2; (-) strand; PAM type: NNAGAAW; PAM sequence: GTAGAAA
cagagaagtcacaggaaaga

SEQ ID NO: 11182 - DNA, 20 bp, Artificial Sequence
  Description of Artificial Sequence: Synthetic oligonucleotide
  Target: LAMA2; (-) strand; PAM type: NNAGAAW; PAM sequence: CTAGAAA
aaggaaattccatctcttgt

SEQ ID NO: 11183 - DNA, 20 bp, Artificial Sequence
  Description of Artificial Sequence: Synthetic oligonucleotide
  Target: LAMA2; (-) strand; PAM type: NNAGAAW; PAM sequence: AGAGAAT
caaaataatattgcagaatc

SEQ ID NO: 11184 - DNA, 20 bp, Artificial Sequence
  Description of Artificial Sequence: Synthetic oligonucleotide
  Target: LAMA2; (-) strand; PAM type: NNAGAAW; PAM sequence: GCAGAAT
ttctatagcaaaataatatt

SEQ ID NO: 11185 - DNA, 20 bp, Artificial Sequence
  Description of Artificial Sequence: Synthetic oligonucleotide
  Target: LAMA2; (-) strand; PAM type: NNAGAAW; PAM sequence: ACAGAAT
aaggtcaaccttgactactt

SEQ ID NO: 11186 - DNA, 20 bp, Artificial Sequence
  Description of Artificial Sequence: Synthetic oligonucleotide
  Target: LAMA2; (-) strand; PAM type: NNAGAAW; PAM sequence: GCAGAAA
cagtattatttcaaataaat

SEQ ID NO: 11187 - DNA, 20 bp, Artificial Sequence
  Description of Artificial Sequence: Synthetic oligonucleotide
  Target: LAMA2; (-) strand; PAM type: NNAGAAW; PAM sequence: CCAGAAT
aggtttttaacattttaaat

SEQ ID NO: 11188 - DNA, 20 bp, Artificial Sequence
  Description of Artificial Sequence: Synthetic oligonucleotide
  Target: LAMA2; (-) strand; PAM type: NNAGAAW; PAM sequence: GAAGAAA
aaaaagtctatcaatcatat

SEQ ID NO: 11189 - DNA, 20 bp, Artificial Sequence
  Description of Artificial Sequence: Synthetic oligonucleotide
  Target: LAMA2; (-) strand; PAM type: NNAGAAW; PAM sequence: CTAGAAT
gcctgtagatgcagatgtct

SEQ ID NO: 11190 - DNA, 20 bp, Artificial Sequence
  Description of Artificial Sequence: Synthetic oligonucleotide
  Target: LAMA2; (-) strand; PAM type: NNAGAAW; PAM sequence: CAAGAAA
aaactcaatggctccaacac

SEQ ID NO: 11191 - DNA, 20 bp, Artificial Sequence
  Description of Artificial Sequence: Synthetic oligonucleotide
  Target: LAMA2; (-) strand; PAM type: NNAGAAW; PAM sequence: TAAGAAT
ttaagaaagaaagtcataag

SEQ ID NO: 11192 - DNA, 20 bp, Artificial Sequence
  Description of Artificial Sequence: Synthetic oligonucleotide
  Target: LAMA2; (-) strand; PAM type: NNAGAAW; PAM sequence: AAAGAAA
gaatattttccatatttaag

SEQ ID NO: 11193 - DNA, 20 bp, Artificial Sequence
  Description of Artificial Sequence: Synthetic oligonucleotide
  Target: LAMA2; (-) strand; PAM type: NNAGAAW; PAM sequence: TAAGAAA
ggctgaatattttccatatt

SEQ ID NO: 11194 - DNA, 20 bp, Artificial Sequence
  Description of Artificial Sequence: Synthetic oligonucleotide
  Target: LAMA2; (-) strand; PAM type: NNAGAAW; PAM sequence: AGAGAAT
aatgtgggagggtagagagg

SEQ ID NO: 11195 - DNA, 20 bp, Artificial Sequence
  Description of Artificial Sequence: Synthetic oligonucleotide
  Target: LAMA2; (-) strand; PAM type: NNAGAAW; PAM sequence: AAAGAAA
ctggaacacaatggggaatt

SEQ ID NO: 11196 - DNA, 20 bp, Artificial Sequence
  Description of Artificial Sequence: Synthetic oligonucleotide
  Target: LAMA2; (-) strand; PAM type: NNAGAAW; PAM sequence: TGAGAAT
tgaactgagacaaaagtttg

SEQ ID NO: 11197 - DNA, 20 bp, Artificial Sequence
  Description of Artificial Sequence: Synthetic oligonucleotide
  Target: LAMA2; (-) strand; PAM type: NNAGAAW; PAM sequence: ACAGAAA
tgttttttttaaaaaaaaaa

SEQ ID NO: 11198 - DNA, 20 bp, Artificial Sequence
  Description of Artificial Sequence: Synthetic oligonucleotide
  Target: LAMA2; (-) strand; PAM type: NNAGAAW; PAM sequence: TTAGAAA
agtatttgacaacgcaaaga

SEQ ID NO: 11199 - DNA, 20 bp, Artificial Sequence
  Description of Artificial Sequence: Synthetic oligonucleotide
  Target: LAMA2; (-) strand; PAM type: NNAGAAW; PAM sequence: TTAGAAA
ccgagtttgttttaaaactc

SEQ ID NO: 11200 - DNA, 20 bp, Artificial Sequence
  Description of Artificial Sequence: Synthetic oligonucleotide
  Target: LAMA2; (-) strand; PAM type: NNAGAAW; PAM sequence: AAAGAAA
taaaataaatcttagaagaa

SEQ ID NO: 11201 - DNA, 20 bp, Artificial Sequence
  Description of Artificial Sequence: Synthetic oligonucleotide
  Target: LAMA2; (-) strand; PAM type: NNAGAAW; PAM sequence: GAAGAAA
aaagtttaaaataaatctta

SEQ ID NO: 11202 - DNA, 20 bp, Artificial Sequence
  Description of Artificial Sequence: Synthetic oligonucleotide
  Target: LAMA2; (-) strand; PAM type: NNAGAAW; PAM sequence: GAAGAAA
gaattagtttaagcataact

SEQ ID NO: 11203 - DNA, 20 bp, Artificial Sequence
  Description of Artificial Sequence: Synthetic oligonucleotide
  Target: LAMA2; (-) strand; PAM type: NNAGAAW; PAM sequence: GAAGAAT
aagtcctggaaatgatggtt

SEQ ID NO: 11204 - DNA, 20 bp, Artificial Sequence
  Description of Artificial Sequence: Synthetic oligonucleotide
  Target: LAMA2; (-) strand; PAM type: NNAGAAW; PAM sequence: TGAGAAT
tttgagcaagctgataaaac

SEQ ID NO: 11205 - DNA, 20 bp, Artificial Sequence
  Description of Artificial Sequence: Synthetic oligonucleotide
  Target: LAMA2; (-) strand; PAM type: NNAGAAW; PAM sequence: CCAGAAA
aaaagtgattgctgactaag

SEQ ID NO: 11206 - DNA, 20 bp, Artificial Sequence
  Description of Artificial Sequence: Synthetic oligonucleotide
  Target: LAMA2; (-) strand; PAM type: NNAGAAW; PAM sequence: AAAGAAA
aaatcttatgcccattgatg

SEQ ID NO: 11207 - DNA, 20 bp, Artificial Sequence
  Description of Artificial Sequence: Synthetic oligonucleotide
  Target: LAMA2; (-) strand; PAM type: NNAGAAW; PAM sequence: GTAGAAT
tattttaccaccttggttaa

SEQ ID NO: 11208 - DNA, 20 bp, Artificial Sequence
  Description of Artificial Sequence: Synthetic oligonucleotide
  Target: LAMA2; (-) strand; PAM type: NNAGAAW; PAM sequence: GGAGAAT
gtcagtttttcaaatcccat

SEQ ID NO: 11209 - DNA, 20 bp, Artificial Sequence
  Description of Artificial Sequence: Synthetic oligonucleotide
  Target: LAMA2; (-) strand; PAM type: NNAGAAW; PAM sequence: ACAGAAA
caataaaaatctgaaagcaa

SEQ ID NO: 11210 - DNA, 20 bp, Artificial Sequence
  Description of Artificial Sequence: Synthetic oligonucleotide
  Target: LAMA2; (-) strand; PAM type: NNAGAAW; PAM sequence: TAAGAAA
taatttaaagactataaaag

SEQ ID NO: 11211 - DNA, 20 bp, Artificial Sequence
  Description of Artificial Sequence: Synthetic oligonucleotide
  Target: LAMA2; (-) strand; PAM type: NNAGAAW; PAM sequence: TTAGAAA
agccaattaggacagcaaag

SEQ ID NO: 11212 - DNA, 20 bp, Artificial Sequence
  Description of Artificial Sequence: Synthetic oligonucleotide
  Target: LAMA2; (-) strand; PAM type: NNAGAAW; PAM sequence: AAAGAAA
aatcccggcaagcatgcctg

SEQ ID NO: 11213 - DNA, 20 bp, Artificial Sequence
  Description of Artificial Sequence: Synthetic oligonucleotide
  Target: LAMA2; (-) strand; PAM type: NNAGAAW; PAM sequence: GCAGAAT
ttttccttactttttaaaat

SEQ ID NO: 11214 - DNA, 20 bp, Artificial Sequence
  Description of Artificial Sequence: Synthetic oligonucleotide
  Target: LAMA2; (-) strand; PAM type: NNAGAAW; PAM sequence: TCAGAAA
gtttatttataagaaaataa

SEQ ID NO: 11215 - DNA, 20 bp, Artificial Sequence
  Description of Artificial Sequence: Synthetic oligonucleotide
  Target: LAMA2; (-) strand; PAM type: NNAGAAW; PAM sequence: TAAGAAA
ttttatagaaagtttattta

SEQ ID NO: 11216 - DNA, 20 bp, Artificial Sequence
  Description of Artificial Sequence: Synthetic oligonucleotide
  Target: LAMA2; (-) strand; PAM type: NNAGAAW; PAM sequence: ATAGAAA
ttctgtaatttccaaatttt

SEQ ID NO: 11217 - DNA, 20 bp, Artificial Sequence
  Description of Artificial Sequence: Synthetic oligonucleotide
  Target: LAMA2; (-) strand; PAM type: NNAGAAW; PAM sequence: GCAGAAA
gtagagagtgcagggtgcca

SEQ ID NO: 11218 - DNA, 20 bp, Artificial Sequence
  Description of Artificial Sequence: Synthetic oligonucleotide
  Target: LAMA2; (-) strand; PAM type: NNAGAAW; PAM sequence: GTAGAAT
catgagttccacaaggctca

SEQ ID NO: 11219 - DNA, 20 bp, Artificial Sequence
  Description of Artificial Sequence: Synthetic oligonucleotide
  Target: LAMA2; (-) strand; PAM type: NNAGAAW; PAM sequence: TGAGAAT
ctactcaggaggctgaggca

SEQ ID NO: 11220 - DNA, 20 bp, Artificial Sequence
  Description of Artificial Sequence: Synthetic oligonucleotide
  Target: LAMA2; (-) strand; PAM type: NNAGAAW; PAM sequence: AAAGAAA
tcaggggaatgaagggagtg

SEQ ID NO: 11221 - DNA, 20 bp, Artificial Sequence
  Description of Artificial Sequence: Synthetic oligonucleotide
  Target: LAMA2; (-) strand; PAM type: NNAGAAW; PAM sequence: TGAGAAT
caatagggtttgtgctccta

SEQ ID NO: 11222 - DNA, 20 bp, Artificial Sequence
  Description of Artificial Sequence: Synthetic oligonucleotide
  Target: LAMA2; (-) strand; PAM type: NNAGAAW; PAM sequence: ATAGAAT
attatacaactcaccataac

SEQ ID NO: 11223 - DNA, 20 bp, Artificial Sequence
  Description of Artificial Sequence: Synthetic oligonucleotide
  Target: LAMA2; (-) strand; PAM type: NNAGAAW; PAM sequence: TAAGAAT
ttcatggacattaaaatcac

SEQ ID NO: 11224 - DNA, 20 bp, Artificial Sequence
  Description of Artificial Sequence: Synthetic oligonucleotide
  Target: LAMA2; (-) strand; PAM type: NNAGAAW; PAM sequence: CAAGAAA
aaatggagaccagagaggca

SEQ ID NO: 11225 - DNA, 20 bp, Artificial Sequence
  Description of Artificial Sequence: Synthetic oligonucleotide
  Target: LAMA2; (-) strand; PAM type: NNAGAAW; PAM sequence: AGAGAAA
atttagaagaagtgaactag

SEQ ID NO: 11226 - DNA, 20 bp, Artificial Sequence
  Description of Artificial Sequence: Synthetic oligonucleotide
  Target: LAMA2; (-) strand; PAM type: NNAGAAW; PAM sequence: CAAGAAA
tgaaagcatgagataaggaa

SEQ ID NO: 11227 - DNA, 20 bp, Artificial Sequence
  Description of Artificial Sequence: Synthetic oligonucleotide
  Target: LAMA2; (-) strand; PAM type: NNAGAAW; PAM sequence: GGAGAAT
ctactcaggaggctgaggca

SEQ ID NO: 11228 - DNA, 20 bp, Artificial Sequence
  Description of Artificial Sequence: Synthetic oligonucleotide
  Target: LAMA2; (-) strand; PAM type: NNAGAAW; PAM sequence: AGAGAAA
tgtggaaaagaaaaaggatg

SEQ ID NO: 11229 - DNA, 20 bp, Artificial Sequence
  Description of Artificial Sequence: Synthetic oligonucleotide
  Target: LAMA2; (-) strand; PAM type: NNAGAAW; PAM sequence: AAAGAAA
taatcacctaggaatgtgga

SEQ ID NO: 11230 - DNA, 20 bp, Artificial Sequence
  Description of Artificial Sequence: Synthetic oligonucleotide
  Target: LAMA2; (-) strand; PAM type: NNAGAAW; PAM sequence: GCAGAAA
cataataattgggcacagat

SEQ ID NO: 11231 - DNA, 20 bp, Artificial Sequence
  Description of Artificial Sequence: Synthetic oligonucleotide
  Target: LAMA2; (-) strand; PAM type: NNAGAAW; PAM sequence: ATAGAAA
agaataattcatccaaagta

SEQ ID NO: 11232 - DNA, 20 bp, Artificial Sequence
  Description of Artificial Sequence: Synthetic oligonucleotide
  Target: LAMA2; (-) strand; PAM type: NNAGAAW; PAM sequence: CAAGAAT
gatgtgatcttttctggaaa

SEQ ID NO: 11233 - DNA, 20 bp, Artificial Sequence
  Description of Artificial Sequence: Synthetic oligonucleotide
  Target: LAMA2; (-) strand; PAM type: NNAGAAW; PAM sequence: GTAGAAT
tgtcatcaagcgggagaggg

SEQ ID NO: 11234 - DNA, 20 bp, Artificial Sequence
  Description of Artificial Sequence: Synthetic oligonucleotide
  Target: LAMA2; (-) strand; PAM type: NNAGAAW; PAM sequence: TTAGAAA
gagaagaatgaagtggttac

SEQ ID NO: 11235 - DNA, 20 bp, Artificial Sequence
  Description of Artificial Sequence: Synthetic oligonucleotide
  Target: LAMA2; (-) strand; PAM type: NNAGAAW; PAM sequence: GAAGAAT
ctctccattgtatggaagga

SEQ ID NO: 11236 - DNA, 20 bp, Artificial Sequence
  Description of Artificial Sequence: Synthetic oligonucleotide
  Target: LAMA2; (-) strand; PAM type: NNAGAAW; PAM sequence: AGAGAAA
attcaaaggagaatggatga

SEQ ID NO: 11237 - DNA, 20 bp, Artificial Sequence
  Description of Artificial Sequence: Synthetic oligonucleotide
  Target: LAMA2; (-) strand; PAM type: NNAGAAW; PAM sequence: GGAGAAT
cctgtttttagtaattcaaa

SEQ ID NO: 11238 - DNA, 20 bp, Artificial Sequence
  Description of Artificial Sequence: Synthetic oligonucleotide
  Target: LAMA2; (-) strand; PAM type: NNAGAAW; PAM sequence: GAAGAAT
aattgagcaaagggtttcaa

SEQ ID NO: 11239 - DNA, 20 bp, Artificial Sequence
  Description of Artificial Sequence: Synthetic oligonucleotide
  Target: LAMA2; (-) strand; PAM type: NNAGAAW; PAM sequence: CCAGAAT
actatggaatttgaacatct

SEQ ID NO: 11240 - DNA, 20 bp, Artificial Sequence
  Description of Artificial Sequence: Synthetic oligonucleotide
  Target: LAMA2; (-) strand; PAM type: NNAGAAW; PAM sequence: GAAGAAA
tatgtagatttcagagtaat

SEQ ID NO: 11241 - DNA, 20 bp, Artificial Sequence
  Description of Artificial Sequence: Synthetic oligonucleotide
  Target: LAMA2; (-) strand; PAM type: NNAGAAW; PAM sequence: AGAGAAA
ccatctgaatgaatgtagtt

SEQ ID NO: 11242 - DNA, 20 bp, Artificial Sequence
  Description of Artificial Sequence: Synthetic oligonucleotide
  Target: LAMA2; (-) strand; PAM type: NNAGAAW; PAM sequence: ACAGAAA
caatatcaaaatatctcagt

SEQ ID NO: 11243 - DNA, 20 bp, Artificial Sequence
  Description of Artificial Sequence: Synthetic oligonucleotide
  Target: LAMA2; (-) strand; PAM type: NNAGAAW; PAM sequence: GCAGAAA
tacagtggtaatacatatct

SEQ ID NO: 11244 - DNA, 20 bp, Artificial Sequence
  Description of Artificial Sequence: Synthetic oligonucleotide
  Target: LAMA2; (-) strand; PAM type: NNAGAAW; PAM sequence: AGAGAAA
atctagttaattagaagaga

SEQ ID NO: 11245 - DNA, 20 bp, Artificial Sequence
  Description of Artificial Sequence: Synthetic oligonucleotide
  Target: LAMA2; (-) strand; PAM type: NNAGAAW; PAM sequence: GAAGAAT
gtgcataaaagtgtcagctg

SEQ ID NO: 11246 - DNA, 20 bp, Artificial Sequence
  Description of Artificial Sequence: Synthetic oligonucleotide
  Target: LAMA2; (-) strand; PAM type: NNAGAAW; PAM sequence: TGAGAAA
acatagaaagaatttttata

SEQ ID NO: 11247 - DNA, 20 bp, Artificial Sequence
  Description of Artificial Sequence: Synthetic oligonucleotide
  Target: LAMA2; (-) strand; PAM type: NNAGAAW; PAM sequence: AAAGAAT
tgaaaatgtaagatacatag

SEQ ID NO: 11248 - DNA, 20 bp, Artificial Sequence
  Description of Artificial Sequence: Synthetic oligonucleotide
  Target: LAMA2; (-) strand; PAM type: NNAGAAW; PAM sequence: ATAGAAA
aaaatgaaaatgtaagatac

SEQ ID NO: 11249 - DNA, 20 bp, Artificial Sequence
  Description of Artificial Sequence: Synthetic oligonucleotide
  Target: LAMA2; (-) strand; PAM type: NNAGAAW; PAM sequence: ATAGAAA
atattaaaatcagtaataaa

SEQ ID NO: 11250 - DNA, 20 bp, Artificial Sequence
  Description of Artificial Sequence: Synthetic oligonucleotide
  Target: LAMA2; (-) strand; PAM type: NNAGAAW; PAM sequence: CAAGAAA
aagcagttttcgtaacatga

SEQ ID NO: 11251 - DNA, 20 bp, Artificial Sequence
  Description of Artificial Sequence: Synthetic oligonucleotide
  Target: LAMA2; (-) strand; PAM type: NNAGAAW; PAM sequence: ATAGAAA
atatctttaagaagctagga

SEQ ID NO: 11252 - DNA, 20 bp, Artificial Sequence
  Description of Artificial Sequence: Synthetic oligonucleotide
  Target: LAMA2; (-) strand; PAM type: NNAGAAW; PAM sequence: TAAGAAT
atatacatttaattcttgct

SEQ ID NO: 11253 - DNA, 20 bp, Artificial Sequence
  Description of Artificial Sequence: Synthetic oligonucleotide
  Target: LAMA2; (-) strand; PAM type: NNAGAAW; PAM sequence: TTAGAAT
ctcagaaaatagacatgctt

SEQ ID NO: 11254 - DNA, 20 bp, Artificial Sequence
  Description of Artificial Sequence: Synthetic oligonucleotide
  Target: LAMA2; (-) strand; PAM type: NNAGAAW; PAM sequence: TCAGAAA
ttacttcatctagggattcc

SEQ ID NO: 11255 - DNA, 20 bp, Artificial Sequence
  Description of Artificial Sequence: Synthetic oligonucleotide
  Target: LAMA2; (-) strand; PAM type: NNAGAAW; PAM sequence: AAAGAAA
caaaagttgtgagttccatg

SEQ ID NO: 11256 - DNA, 20 bp, Artificial Sequence
  Description of Artificial Sequence: Synthetic oligonucleotide
  Target: LAMA2; (-) strand; PAM type: NNAGAAW; PAM sequence: AGAGAAA
agagccatattgcacataaa

SEQ ID NO: 11257 - DNA, 20 bp, Artificial Sequence
  Description of Artificial Sequence: Synthetic oligonucleotide
  Target: LAMA2; (-) strand; PAM type: NNAGAAW; PAM sequence: GAAGAAA
attgttttcattatataaat

SEQ ID NO: 11258 - DNA, 20 bp, Artificial Sequence
  Description of Artificial Sequence: Synthetic oligonucleotide
  Target: LAMA2; (-) strand; PAM type: NNAGAAW; PAM sequence: TAAGAAA
tccgaaatggactgagacag

SEQ ID NO: 11259 - DNA, 20 bp, Artificial Sequence
  Description of Artificial Sequence: Synthetic oligonucleotide
  Target: LAMA2; (-) strand; PAM type: NNAGAAW; PAM sequence: AAAGAAA
gccttccaacacgtgaagac

SEQ ID NO: 11260 - DNA, 20 bp, Artificial Sequence
  Description of Artificial Sequence: Synthetic oligonucleotide
  Target: LAMA2; (-) strand; PAM type: NNAGAAW; PAM sequence: AAAGAAA
tcagggaaaggtgtgaagat

SEQ ID NO: 11261 - DNA, 20 bp, Artificial Sequence
  Description of Artificial Sequence: Synthetic oligonucleotide
  Target: LAMA2; (-) strand; PAM type: NNAGAAW; PAM sequence: GGAGAAA
cccatgtgaaaaaaaaaata

SEQ ID NO: 11262 - DNA, 20 bp, Artificial Sequence
  Description of Artificial Sequence: Synthetic oligonucleotide
  Target: LAMA2; (-) strand; PAM type: NNAGAAW; PAM sequence: TAAGAAT
ttattattttctttttaaaa

SEQ ID NO: 11263 - DNA, 20 bp, Artificial Sequence
  Description of Artificial Sequence: Synthetic oligonucleotide
  Target: LAMA2; (-) strand; PAM type: NNAGAAW; PAM sequence: TTAGAAA
acttgatattttactgggat

SEQ ID NO: 11264 - DNA, 20 bp, Artificial Sequence
  Description of Artificial Sequence: Synthetic oligonucleotide
  Target: LAMA2; (-) strand; PAM type: NNAGAAW; PAM sequence: TGAGAAA
aagtttattgtaacaataaa

SEQ ID NO: 11265 - DNA, 20 bp, Artificial Sequence
  Description of Artificial Sequence: Synthetic oligonucleotide
  Target: LAMA2; (-) strand; PAM type: NNAGAAW; PAM sequence: GAAGAAA
tcagttcatcaacaataaaa

SEQ ID NO: 11266 - DNA, 20 bp, Artificial Sequence
  Description of Artificial Sequence: Synthetic oligonucleotide
  Target: LAMA2; (-) strand; PAM type: NNAGAAW; PAM sequence: AGAGAAT
tctgttctttcccctaaact

SEQ ID NO: 11267 - DNA, 20 bp, Artificial Sequence
  Description of Artificial Sequence: Synthetic oligonucleotide
  Target: LAMA2; (-) strand; PAM type: NNAGAAW; PAM sequence: TAAGAAT
agggaaggtcctcaaatatc

SEQ ID NO: 11268 - DNA, 20 bp, Artificial Sequence
  Description of Artificial Sequence: Synthetic oligonucleotide
  Target: LAMA2; (-) strand; PAM type: NNAGAAW; PAM sequence: TGAGAAA
atagtatctcaggcctaagg

SEQ ID NO: 11269 - DNA, 20 bp, Artificial Sequence
  Description of Artificial Sequence: Synthetic oligonucleotide
  Target: LAMA2; (-) strand; PAM type: NNAGAAW; PAM sequence: TCAGAAT
agtatctcttcaataataca

SEQ ID NO: 11270 - DNA, 20 bp, Artificial Sequence
  Description of Artificial Sequence: Synthetic oligonucleotide
  Target: LAMA2; (-) strand; PAM type: NNAGAAW; PAM sequence: AGAGAAA
gtctacataatttcttcaac

SEQ ID NO: 11271 - DNA, 20 bp, Artificial Sequence
  Description of Artificial Sequence: Synthetic oligonucleotide
  Target: LAMA2; (-) strand; PAM type: NNAGAAW; PAM sequence: GCAGAAA
cccaaatttcaagtgtcatt

SEQ ID NO: 11272 - DNA, 20 bp, Artificial Sequence
  Description of Artificial Sequence: Synthetic oligonucleotide
  Target: LAMA2; (-) strand; PAM type: NNAGAAW; PAM sequence: TGAGAAA
attttaaatgtcactttctc

SEQ ID NO: 11273 - DNA, 20 bp, Artificial Sequence
  Description of Artificial Sequence: Synthetic oligonucleotide
  Target: LAMA2; (-) strand; PAM type: NNAGAAW; PAM sequence: TTAGAAT
gtcatattttatttggatta

SEQ ID NO: 11274 - DNA, 20 bp, Artificial Sequence
  Description of Artificial Sequence: Synthetic oligonucleotide
  Target: LAMA2; (-) strand; PAM type: NNAGAAW; PAM sequence: TAAGAAA
ccttaccctactttaagaga

SEQ ID NO: 11275 - DNA, 20 bp, Artificial Sequence
  Description of Artificial Sequence: Synthetic oligonucleotide
  Target: LAMA2; (-) strand; PAM type: NNAGAAW; PAM sequence: GAAGAAT
tgcttcatttagtcaatcaa

SEQ ID NO: 11276 - DNA, 20 bp, Artificial Sequence
  Description of Artificial Sequence: Synthetic oligonucleotide
  Target: LAMA2; (-) strand; PAM type: NNAGAAW; PAM sequence: TGAGAAA
aacaatatcgaaagaaaagt

SEQ ID NO: 11277 - DNA, 20 bp, Artificial Sequence
  Description of Artificial Sequence: Synthetic oligonucleotide
  Target: LAMA2; (-) strand; PAM type: NNAGAAW; PAM sequence: AAAGAAA
acatcttataaacaatatcg

SEQ ID NO: 11278 - DNA, 20 bp, Artificial Sequence
  Description of Artificial Sequence: Synthetic oligonucleotide
  Target: LAMA2; (-) strand; PAM type: NNAGAAW; PAM sequence: TGAGAAA
cgatccttgcatttgagagt

SEQ ID NO: 11279 - DNA, 20 bp, Artificial Sequence
  Description of Artificial Sequence: Synthetic oligonucleotide
  Target: LAMA2; (-) strand; PAM type: NNAGAAW; PAM sequence: CAAGAAT
acaaaaaataaacatggcag

SEQ ID NO: 11280 - DNA, 20 bp, Artificial Sequence
  Description of Artificial Sequence: Synthetic oligonucleotide
  Target: LAMA2; (-) strand; PAM type: NNAGAAW; PAM sequence: CTAGAAA
atgaaagaacatcctacctt

SEQ ID NO: 11281 - DNA, 20 bp, Artificial Sequence
  Description of Artificial Sequence: Synthetic oligonucleotide
  Target: LAMA2; (-) strand; PAM type: NNAGAAW; PAM sequence: GCAGAAT
caaattaaaattttcatgaa

SEQ ID NO: 11282 - DNA, 20 bp, Artificial Sequence
  Description of Artificial Sequence: Synthetic oligonucleotide
  Target: LAMA2; (-) strand; PAM type: NNAGAAW; PAM sequence: TCAGAAT
acaaagaaatgagaatagct

SEQ ID NO: 11283 - DNA, 20 bp, Artificial Sequence
  Description of Artificial Sequence: Synthetic oligonucleotide
  Target: LAMA2; (-) strand; PAM type: NNAGAAW; PAM sequence: TGAGAAT
aacacctttccacaaagaaa

SEQ ID NO: 11284 - DNA, 20 bp, Artificial Sequence
  Description of Artificial Sequence: Synthetic oligonucleotide
  Target: LAMA2; (-) strand; PAM type: NNAGAAW; PAM sequence: AAAGAAA
accctttaacacctttccac

SEQ ID NO: 11285 - DNA, 20 bp, Artificial Sequence
  Description of Artificial Sequence: Synthetic oligonucleotide
  Target: LAMA2; (-) strand; PAM type: NNAGAAW; PAM sequence: TTAGAAA
ggttttagctctatgagatg

SEQ ID NO: 11286 - DNA, 20 bp, Artificial Sequence
  Description of Artificial Sequence: Synthetic oligonucleotide
  Target: LAMA2; (-) strand; PAM type: NNAGAAW; PAM sequence: TGAGAAA
tttaaaggaactctttgatt

SEQ ID NO: 11287 - DNA, 20 bp, Artificial Sequence
  Description of Artificial Sequence: Synthetic oligonucleotide
  Target: LAMA2; (-) strand; PAM type: NNAGAAW; PAM sequence: TTAGAAT
tgtttttaatttagtgatag

SEQ ID NO: 11288 - DNA, 20 bp, Artificial Sequence
  Description of Artificial Sequence: Synthetic oligonucleotide
  Target: LAMA2; (-) strand; PAM type: NNAGAAW; PAM sequence: GAAGAAA
ctcaatcttacttgttactg

SEQ ID NO: 11289 - DNA, 20 bp, Artificial Sequence
  Description of Artificial Sequence: Synthetic oligonucleotide
  Target: LAMA2; (-) strand; PAM type: NNAGAAW; PAM sequence: TAAGAAA
gtaccaagctcagaccatct

SEQ ID NO: 11290 - DNA, 20 bp, Artificial Sequence
  Description of Artificial Sequence: Synthetic oligonucleotide
  Target: LAMA2; (-) strand; PAM type: NNAGAAW; PAM sequence: GCAGAAT
tcatcaatgtataaaccagt

SEQ ID NO: 11291 - DNA, 20 bp, Artificial Sequence
  Description of Artificial Sequence: Synthetic oligonucleotide
  Target: LAMA2; (-) strand; PAM type: NNAGAAW; PAM sequence: ACAGAAA
tgaagtctataaatcactta

SEQ ID NO: 11292 - DNA, 20 bp, Artificial Sequence
  Description of Artificial Sequence: Synthetic oligonucleotide
  Target: LAMA2; (-) strand; PAM type: NNAGAAW; PAM sequence: CCAGAAT
taacactcaagataaagtgt

SEQ ID NO: 11293 - DNA, 20 bp, Artificial Sequence
  Description of Artificial Sequence: Synthetic oligonucleotide
  Target: LAMA2; (-) strand; PAM type: NNAGAAW; PAM sequence: GAAGAAA
cacacaaagccgaagattaa

SEQ ID NO: 11294 - DNA, 20 bp, Artificial Sequence
  Description of Artificial Sequence: Synthetic oligonucleotide
  Target: LAMA2; (-) strand; PAM type: NNAGAAW; PAM sequence: TCAGAAT
atgatttacaggaaatgttt

SEQ ID NO: 11295 - DNA, 20 bp, Artificial Sequence
  Description of Artificial Sequence: Synthetic oligonucleotide
  Target: LAMA2; (-) strand; PAM type: NNAGAAW; PAM sequence: GGAGAAA
taaataaatcggggcatcaa

SEQ ID NO: 11296 - DNA, 20 bp, Artificial Sequence
  Description of Artificial Sequence: Synthetic oligonucleotide
  Target: LAMA2; (-) strand; PAM type: NNAGAAW; PAM sequence: ATAGAAA
ttgtagtgtttccttattac

SEQ ID NO: 11297 - DNA, 20 bp, Artificial Sequence
  Description of Artificial Sequence: Synthetic oligonucleotide
  Target: LAMA2; (-) strand; PAM type: NNAGAAW; PAM sequence: TCAGAAA
acctggacattggaactcct

SEQ ID NO: 11298 - DNA, 20 bp, Artificial Sequence
  Description of Artificial Sequence: Synthetic oligonucleotide
  Target: LAMA2; (-) strand; PAM type: NNAGAAW; PAM sequence: ATAGAAA
atgtagcccaggcatgttca

SEQ ID NO: 11299 - DNA, 20 bp, Artificial Sequence
  Description of Artificial Sequence: Synthetic oligonucleotide
  Target: LAMA2; (-) strand; PAM type: NNAGAAW; PAM sequence: TCAGAAT
cagcctcctccatctattcc

SEQ ID NO: 11300 - DNA, 20 bp, Artificial Sequence
  Description of Artificial Sequence: Synthetic oligonucleotide
  Target: LAMA2; (-) strand; PAM type: NNAGAAW; PAM sequence: ATAGAAT
aatgccaaacttggcattat

SEQ ID NO: 11301 - DNA, 20 bp, Artificial Sequence
  Description of Artificial Sequence: Synthetic oligonucleotide
  Target: LAMA2; (-) strand; PAM type: NNAGAAW; PAM sequence: CAAGAAA
taatgatgtctagataagtg

SEQ ID NO: 11302 - DNA, 20 bp, Artificial Sequence
  Description of Artificial Sequence: Synthetic oligonucleotide
  Target: LAMA2; (-) strand; PAM type: NNAGAAW; PAM sequence: AAAGAAT
tagtaaatgttcatctcctg

SEQ ID NO: 11303 - DNA, 20 bp, Artificial Sequence
  Description of Artificial Sequence: Synthetic oligonucleotide
  Target: LAMA2; (-) strand; PAM type: NNAGAAW; PAM sequence: AAAGAAT
aagacattatgtttaccttc

SEQ ID NO: 11304 - DNA, 20 bp, Artificial Sequence
  Description of Artificial Sequence: Synthetic oligonucleotide
  Target: LAMA2; (-) strand; PAM type: NNAGAAW; PAM sequence: AAAGAAA
taactttttcttgaataaag

SEQ ID NO: 11305 - DNA, 20 bp, Artificial Sequence
  Description of Artificial Sequence: Synthetic oligonucleotide
  Target: LAMA2; (-) strand; PAM type: NNAGAAW; PAM sequence: AAAGAAA
tcattaactttttcttgaat

SEQ ID NO: 11306 - DNA, 20 bp, Artificial Sequence
  Description of Artificial Sequence: Synthetic oligonucleotide
  Target: LAMA2; (-) strand; PAM type: NNAGAAW; PAM sequence: ACAGAAT
ctaattccaaactcccctca

SEQ ID NO: 11307 - DNA, 20 bp, Artificial Sequence
  Description of Artificial Sequence: Synthetic oligonucleotide
  Target: LAMA2; (-) strand; PAM type: NNAGAAW; PAM sequence: TCAGAAA
cattttgtctgcagggctac

SEQ ID NO: 11308 - DNA, 20 bp, Artificial Sequence
  Description of Artificial Sequence: Synthetic oligonucleotide
  Target: LAMA2; (-) strand; PAM type: NNAGAAW; PAM sequence: AGAGAAA
aacagattttagacatttca

SEQ ID NO: 11309 - DNA, 20 bp, Artificial Sequence
  Description of Artificial Sequence: Synthetic oligonucleotide
  Target: LAMA2; (-) strand; PAM type: NNAGAAW; PAM sequence: TAAGAAA
tcttatacatatatgggctc

SEQ ID NO: 11310 - DNA, 20 bp, Artificial Sequence
  Description of Artificial Sequence: Synthetic oligonucleotide
  Target: LAMA2; (-) strand; PAM type: NNAGAAW; PAM sequence: GCAGAAA
attaaaaacatgtatctgtg

SEQ ID NO: 11311 - DNA, 20 bp, Artificial Sequence
  Description of Artificial Sequence: Synthetic oligonucleotide
  Target: LAMA2; (-) strand; PAM type: NNAGAAW; PAM sequence: CTAGAAT
taatcaaaagaaaaatctga

SEQ ID NO: 11312 - DNA, 20 bp, Artificial Sequence
  Description of Artificial Sequence: Synthetic oligonucleotide
  Target: LAMA2; (-) strand; PAM type: NNAGAAW; PAM sequence: AAAGAAA
gtcctattgttcactaatca

SEQ ID NO: 11313 - DNA, 20 bp, Artificial Sequence
  Description of Artificial Sequence: Synthetic oligonucleotide
  Target: LAMA2; (-) strand; PAM type: NNAGAAW; PAM sequence: AAAGAAA
aggggctgaaactgaatcag

SEQ ID NO: 11314 - DNA, 20 bp, Artificial Sequence
  Description of Artificial Sequence: Synthetic oligonucleotide
  Target: LAMA2; (-) strand; PAM type: NNAGAAW; PAM sequence: TCAGAAA
caagaggggctgaaactgaa

SEQ ID NO: 11315 - DNA, 20 bp, Artificial Sequence
  Description of Artificial Sequence: Synthetic oligonucleotide
  Target: LAMA2; (-) strand; PAM type: NNAGAAW; PAM sequence: TAAGAAA
tattttccagtgcattaaaa

SEQ ID NO: 11316 - DNA, 20 bp, Artificial Sequence
  Description of Artificial Sequence: Synthetic oligonucleotide
  Target: LAMA2; (-) strand; PAM type: NNAGAAW; PAM sequence: AGAGAAA
atttcataagcaatatggta

SEQ ID NO: 11317 - DNA, 20 bp, Artificial Sequence
  Description of Artificial Sequence: Synthetic oligonucleotide
  Target: LAMA2; (-) strand; PAM type: NNAGAAW; PAM sequence: TGAGAAT
atttaccatttggattacac

SEQ ID NO: 11318 - DNA, 20 bp, Artificial Sequence
  Description of Artificial Sequence: Synthetic oligonucleotide
  Target: LAMA2; (-) strand; PAM type: NNAGAAW; PAM sequence: ACAGAAA
atatccaggatactgatctt

SEQ ID NO: 11319 - DNA, 20 bp, Artificial Sequence
  Description of Artificial Sequence: Synthetic oligonucleotide
  Target: LAMA2; (-) strand; PAM type: NNAGAAW; PAM sequence: AAAGAAA
tgggtgaagcaggacatgga

SEQ ID NO: 11320 - DNA, 20 bp, Artificial Sequence
  Description of Artificial Sequence: Synthetic oligonucleotide
  Target: LAMA2; (-) strand; PAM type: NNAGAAW; PAM sequence: GGAGAAT
ttaccatttaagtgttccta

SEQ ID NO: 11321 - DNA, 20 bp, Artificial Sequence
  Description of Artificial Sequence: Synthetic oligonucleotide
  Target: LAMA2; (-) strand; PAM type: NNAGAAW; PAM sequence: TTAGAAA
gttaccacatacggatttat

SEQ ID NO: 11322 - DNA, 20 bp, Artificial Sequence
  Description of Artificial Sequence: Synthetic oligonucleotide
  Target: LAMA2; (-) strand; PAM type: NNAGAAW; PAM sequence: GTAGAAA
tattctatacacatgctttt

SEQ ID NO: 11323 - DNA, 20 bp, Artificial Sequence
  Description of Artificial Sequence: Synthetic oligonucleotide
  Target: LAMA2; (-) strand; PAM type: NNAGAAW; PAM sequence: AGAGAAA
gctgaataaagcaatttttc

SEQ ID NO: 11324 - DNA, 20 bp, Artificial Sequence
  Description of Artificial Sequence: Synthetic oligonucleotide
  Target: LAMA2; (-) strand; PAM type: NNAGAAW; PAM sequence: CAAGAAA
ttctatattacagggatact

SEQ ID NO: 11325 - DNA, 20 bp, Artificial Sequence
  Description of Artificial Sequence: Synthetic oligonucleotide
  Target: LAMA2; (-) strand; PAM type: NNAGAAW; PAM sequence: GAAGAAA
ggttagaaaaggcaaaacat

SEQ ID NO: 11326 - DNA, 20 bp, Artificial Sequence
  Description of Artificial Sequence: Synthetic oligonucleotide
  Target: LAMA2; (-) strand; PAM type: NNAGAAW; PAM sequence: TTAGAAA
gttaattcaccctgtgctgg

SEQ ID NO: 11327 - DNA, 20 bp, Artificial Sequence
  Description of Artificial Sequence: Synthetic oligonucleotide
  Target: LAMA2; (-) strand; PAM type: NNAGAAW; PAM sequence: TTAGAAT
agtgtaaatataacaaacag

SEQ ID NO: 11328 - DNA, 20 bp, Artificial Sequence
  Description of Artificial Sequence: Synthetic oligonucleotide
  Target: LAMA2; (-) strand; PAM type: NNAGAAW; PAM sequence: AGAGAAT
actgatttggaaaagtagaa

SEQ ID NO: 11329 - DNA, 20 bp, Artificial Sequence
  Description of Artificial Sequence: Synthetic oligonucleotide
  Target: LAMA2; (-) strand; PAM type: NNAGAAW; PAM sequence: GTAGAAA
tataacactgatttggaaaa

SEQ ID NO: 11330 - DNA, 20 bp, Artificial Sequence
  Description of Artificial Sequence: Synthetic oligonucleotide
  Target: LAMA2; (-) strand; PAM type: NNAGAAW; PAM sequence: TCAGAAA
taattgagtgccatacagaa

SEQ ID NO: 11331 - DNA, 20 bp, Artificial Sequence
  Description of Artificial Sequence: Synthetic oligonucleotide
  Target: LAMA2; (-) strand; PAM type: NNAGAAW; PAM sequence: ACAGAAT
agttcttaattgagtgccat

SEQ ID NO: 11332 - DNA, 20 bp, Artificial Sequence
  Description of Artificial Sequence: Synthetic oligonucleotide
  Target: LAMA2; (-) strand; PAM type: NNAGAAW; PAM sequence: GAAGAAT
taatatcaggctactaatga

SEQ ID NO: 11333 - DNA, 20 bp, Artificial Sequence
  Description of Artificial Sequence: Synthetic oligonucleotide
  Target: LAMA2; (-) strand; PAM type: NNAGAAW; PAM sequence: AAAGAAA
aatcaagattatgccgtgaa

SEQ ID NO: 11334 - DNA, 20 bp, Artificial Sequence
  Description of Artificial Sequence: Synthetic oligonucleotide
  Target: LAMA2; (-) strand; PAM type: NNAGAAW; PAM sequence: GCAGAAT
gtggctccaggtcggcacgt

SEQ ID NO: 11335 - DNA, 20 bp, Artificial Sequence
  Description of Artificial Sequence: Synthetic oligonucleotide
  Target: LAMA2; (-) strand; PAM type: NNAGAAW; PAM sequence: AAAGAAT
aggtggatagatagtgtcag

SEQ ID NO: 11336 - DNA, 20 bp, Artificial Sequence
  Description of Artificial Sequence: Synthetic oligonucleotide
  Target: LAMA2; (-) strand; PAM type: NNAGAAW; PAM sequence: TCAGAAA
cagaaggtggatagatagtg

SEQ ID NO: 11337 - DNA, 20 bp, Artificial Sequence
  Description of Artificial Sequence: Synthetic oligonucleotide
  Target: LAMA2; (-) strand; PAM type: NNAGAAW; PAM sequence: AAAGAAA
gattttcataaaagctggga

SEQ ID NO: 11338 - DNA, 20 bp, Artificial Sequence
  Description of Artificial Sequence: Synthetic oligonucleotide
  Target: LAMA2; (-) strand; PAM type: NNAGAAW; PAM sequence: AGAGAAA
cttacgggttttgtagttca

SEQ ID NO: 11339 - DNA, 20 bp, Artificial Sequence
  Description of Artificial Sequence: Synthetic oligonucleotide
  Target: LAMA2; (-) strand; PAM type: NNAGAAW; PAM sequence: TAAGAAA
actagcgaatccagaatcag

SEQ ID NO: 11340 - DNA, 20 bp, Artificial Sequence
  Description of Artificial Sequence: Synthetic oligonucleotide
  Target: LAMA2; (-) strand; PAM type: NNAGAAW; PAM sequence: CCAGAAT
tcaatatggcactagcgaat

SEQ ID NO: 11341 - DNA, 20 bp, Artificial Sequence
  Description of Artificial Sequence: Synthetic oligonucleotide
  Target: LAMA2; (-) strand; PAM type: NNAGAAW; PAM sequence: CAAGAAT
atttgaatgtatgcaagatc

SEQ ID NO: 11342 - DNA, 20 bp, Artificial Sequence
  Description of Artificial Sequence: Synthetic oligonucleotide
  Target: LAMA2; (-) strand; PAM type: NNAGAAW; PAM sequence: AAAGAAT
aaaataaatttccttgagga

SEQ ID NO: 11343 - DNA, 20 bp, Artificial Sequence
  Description of Artificial Sequence: Synthetic oligonucleotide
  Target: LAMA2; (-) strand; PAM type: NNAGAAW; PAM sequence: CAAGAAA
actcaaacaatatgctaaaa

SEQ ID NO: 11344 - DNA, 20 bp, Artificial Sequence
  Description of Artificial Sequence: Synthetic oligonucleotide
  Target: LAMA2; (-) strand; PAM type: NNAGAAW; PAM sequence: AAAGAAA
attaaagatggttaaaatac

SEQ ID NO: 11345 - DNA, 20 bp, Artificial Sequence
  Description of Artificial Sequence: Synthetic oligonucleotide
  Target: LAMA2; (-) strand; PAM type: NNAGAAW; PAM sequence: GAAGAAT
aaatatatcattatacttgg

SEQ ID NO: 11346 - DNA, 20 bp, Artificial Sequence
  Description of Artificial Sequence: Synthetic oligonucleotide
  Target: LAMA2; (-) strand; PAM type: NNAGAAW; PAM sequence: TAAGAAT
aattcaaggactgtttacat

SEQ ID NO: 11347 - DNA, 20 bp, Artificial Sequence
  Description of Artificial Sequence: Synthetic oligonucleotide
  Target: LAMA2; (-) strand; PAM type: NNAGAAW; PAM sequence: AAAGAAA
cagaatgccaattctcttta

SEQ ID NO: 11348 - DNA, 20 bp, Artificial Sequence
  Description of Artificial Sequence: Synthetic oligonucleotide
  Target: LAMA2; (-) strand; PAM type: NNAGAAW; PAM sequence: GCAGAAT
aaagccattgttgttgatgg

SEQ ID NO: 11349 - DNA, 20 bp, Artificial Sequence
  Description of Artificial Sequence: Synthetic oligonucleotide
  Target: LAMA2; (-) strand; PAM type: NNAGAAW; PAM sequence: TTAGAAA
tcacatgggacaagtggaga

SEQ ID NO: 11350 - DNA, 20 bp, Artificial Sequence
  Description of Artificial Sequence: Synthetic oligonucleotide
  Target: LAMA2; (-) strand; PAM type: NNAGAAW; PAM sequence: TAAGAAT
tggggcaagaataaagcaaa

SEQ ID NO: 11351 - DNA, 20 bp, Artificial Sequence
  Description of Artificial Sequence: Synthetic oligonucleotide
  Target: LAMA2; (-) strand; PAM type: NNAGAAW; PAM sequence: CAAGAAT
aaatacatttccttgtgggg

SEQ ID NO: 11352 - DNA, 20 bp, Artificial Sequence
  Description of Artificial Sequence: Synthetic oligonucleotide
  Target: LAMA2; (-) strand; PAM type: NNAGAAW; PAM sequence: AAAGAAT
aaaaactgctattcttttaa

SEQ ID NO: 11353 - DNA, 20 bp, Artificial Sequence
  Description of Artificial Sequence: Synthetic oligonucleotide
  Target: LAMA2; (-) strand; PAM type: NNAGAAW; PAM sequence: AGAGAAA
gttagtttagtgaaaggtga

SEQ ID NO: 11354 - DNA, 20 bp, Artificial Sequence
  Description of Artificial Sequence: Synthetic oligonucleotide
  Target: LAMA2; (-) strand; PAM type: NNAGAAW; PAM sequence: AGAGAAA
acgggagaaattttagaaga

SEQ ID NO: 11355 - DNA, 20 bp, Artificial Sequence
  Description of Artificial Sequence: Synthetic oligonucleotide
  Target: LAMA2; (-) strand; PAM type: NNAGAAW; PAM sequence: GGAGAAA
tggcatatttttccataacg

SEQ ID NO: 11356 - DNA, 20 bp, Artificial Sequence
  Description of Artificial Sequence: Synthetic oligonucleotide
  Target: LAMA2; (-) strand; PAM type: NNAGAAW; PAM sequence: ATAGAAT
tcctgggaaaggccaagatc

SEQ ID NO: 11357 - DNA, 20 bp, Artificial Sequence
  Description of Artificial Sequence: Synthetic oligonucleotide
  Target: LAMA2; (-) strand; PAM type: NNAGAAW; PAM sequence: GTAGAAA
tttcaaaactaggagtagaa

SEQ ID NO: 11358 - DNA, 20 bp, Artificial Sequence
  Description of Artificial Sequence: Synthetic oligonucleotide
  Target: LAMA2; (-) strand; PAM type: NNAGAAW; PAM sequence: TCAGAAT
aaaggaaaattgagaataag

SEQ ID NO: 11359 - DNA, 20 bp, Artificial Sequence
  Description of Artificial Sequence: Synthetic oligonucleotide
  Target: LAMA2; (-) strand; PAM type: NNAGAAW; PAM sequence: TGAGAAT
aaatatattaaaaggaaaat

SEQ ID NO: 11360 - DNA, 20 bp, Artificial Sequence
  Description of Artificial Sequence: Synthetic oligonucleotide
  Target: LAMA2; (-) strand; PAM type: NNAGAAW; PAM sequence: ACAGAAA
cactaatttagcttaaggat

SEQ ID NO: 11361 - DNA, 20 bp, Artificial Sequence
  Description of Artificial Sequence: Synthetic oligonucleotide
  Target: LAMA2; (-) strand; PAM type: NNAGAAW; PAM sequence: GGAGAAA
tttacttattctaagcaata

SEQ ID NO: 11362 - DNA, 20 bp, Artificial Sequence
  Description of Artificial Sequence: Synthetic oligonucleotide
  Target: LAMA2; (-) strand; PAM type: NNAGAAW; PAM sequence: TGAGAAA
cagcagaattttatatactt

SEQ ID NO: 11363 - DNA, 20 bp, Artificial Sequence
  Description of Artificial Sequence: Synthetic oligonucleotide
  Target: LAMA2; (-) strand; PAM type: NNAGAAW; PAM sequence: GCAGAAT
tgttttgcctgatctcttca

SEQ ID NO: 11364 - DNA, 20 bp, Artificial Sequence
  Description of Artificial Sequence: Synthetic oligonucleotide
  Target: LAMA2; (-) strand; PAM type: NNAGAAW; PAM sequence: AGAGAAT
tgtgtggtaaaagggacttt

SEQ ID NO: 11365 - DNA, 20 bp, Artificial Sequence
  Description of Artificial Sequence: Synthetic oligonucleotide
  Target: LAMA2; (-) strand; PAM type: NNAGAAW; PAM sequence: CAAGAAT
gataaggaatgggaatgtta

SEQ ID NO: 11366 - DNA, 20 bp, Artificial Sequence
  Description of Artificial Sequence: Synthetic oligonucleotide
  Target: LAMA2; (-) strand; PAM type: NNAGAAW; PAM sequence: TGAGAAA
cggatctactgaaaagtcac

SEQ ID NO: 11367 - DNA, 20 bp, Artificial Sequence
  Description of Artificial Sequence: Synthetic oligonucleotide
  Target: LAMA2; (-) strand; PAM type: NNAGAAW; PAM sequence: TAAGAAA
tcagtagccagcatagaggt

SEQ ID NO: 11368 - DNA, 20 bp, Artificial Sequence
  Description of Artificial Sequence: Synthetic oligonucleotide
  Target: LAMA2; (-) strand; PAM type: NNAGAAW; PAM sequence: GTAGAAT
tatatttatttttaatcgag

SEQ ID NO: 11369 - DNA, 20 bp, Artificial Sequence
  Description of Artificial Sequence: Synthetic oligonucleotide
  Target: LAMA2; (-) strand; PAM type: NNAGAAW; PAM sequence: GCAGAAA
tagaggagtctcaatgatta

SEQ ID NO: 11370 - DNA, 20 bp, Artificial Sequence
  Description of Artificial Sequence: Synthetic oligonucleotide
  Target: LAMA2; (-) strand; PAM type: NNAGAAW; PAM sequence: TTAGAAA
gctgtcccaaataattcctt

SEQ ID NO: 11371 - DNA, 20 bp, Artificial Sequence
  Description of Artificial Sequence: Synthetic oligonucleotide
  Target: LAMA2; (-) strand; PAM type: NNAGAAW; PAM sequence: GAAGAAA
gatttgtattaacttatcaa

SEQ ID NO: 11372 - DNA, 20 bp, Artificial Sequence
  Description of Artificial Sequence: Synthetic oligonucleotide
  Target: LAMA2; (-) strand; PAM type: NNAGAAW; PAM sequence: ACAGAAA
tgtgttaatgatatgagttt

SEQ ID NO: 11373 - DNA, 20 bp, Artificial Sequence
  Description of Artificial Sequence: Synthetic oligonucleotide
  Target: LAMA2; (-) strand; PAM type: NNAGAAW; PAM sequence: TTAGAAT
ttattttaaataaatatatg

SEQ ID NO: 11374 - DNA, 20 bp, Artificial Sequence
  Description of Artificial Sequence: Synthetic oligonucleotide
  Target: LAMA2; (-) strand; PAM type: NNAGAAW; PAM sequence: GTAGAAA
aggcttatctcaggttgcaa

SEQ ID NO: 11375 - DNA, 20 bp, Artificial Sequence
  Description of Artificial Sequence: Synthetic oligonucleotide
  Target: LAMA2; (-) strand; PAM type: NNAGAAW; PAM sequence: TCAGAAT
ctgatgtttatcatcatttt

SEQ ID NO: 11376 - DNA, 20 bp, Artificial Sequence
  Description of Artificial Sequence: Synthetic oligonucleotide
  Target: LAMA2; (-) strand; PAM type: NNAGAAW; PAM sequence: ACAGAAA
aacatgacacagcttagact

SEQ ID NO: 11377 - DNA, 20 bp, Artificial Sequence
  Description of Artificial Sequence: Synthetic oligonucleotide
  Target: LAMA2; (-) strand; PAM type: NNAGAAW; PAM sequence: CAAGAAA
accaatgctaaggttgacaa

SEQ ID NO: 11378 - DNA, 20 bp, Artificial Sequence
  Description of Artificial Sequence: Synthetic oligonucleotide
  Target: LAMA2; (-) strand; PAM type: NNAGAAW; PAM sequence: CTAGAAT
ctaacaactaggaaaatcat

SEQ ID NO: 11379 - DNA, 20 bp, Artificial Sequence
  Description of Artificial Sequence: Synthetic oligonucleotide
  Target: LAMA2; (-) strand; PAM type: NNAGAAW; PAM sequence: GTAGAAA
acctcctgagccttgccaga

SEQ ID NO: 11380 - DNA, 20 bp, Artificial Sequence
  Description of Artificial Sequence: Synthetic oligonucleotide
  Target: LAMA2; (-) strand; PAM type: NNAGAAW; PAM sequence: ACAGAAA
ctgtctgttttgtggatgtc

SEQ ID NO: 11381 - DNA, 20 bp, Artificial Sequence
  Description of Artificial Sequence: Synthetic oligonucleotide
  Target: LAMA2; (-) strand; PAM type: NNAGAAW; PAM sequence: CTAGAAT
aacaatgatgataacaatgc

SEQ ID NO: 11382 - DNA, 20 bp, Artificial Sequence
  Description of Artificial Sequence: Synthetic oligonucleotide
  Target: LAMA2; (-) strand; PAM type: NNAGAAW; PAM sequence: TCAGAAA
aaactaaagaaaatatttca

SEQ ID NO: 11383 - DNA, 20 bp, Artificial Sequence
  Description of Artificial Sequence: Synthetic oligonucleotide
  Target: LAMA2; (-) strand; PAM type: NNAGAAW; PAM sequence: AAAGAAA
actgaaagtcagcctaaact

SEQ ID NO: 11384 - DNA, 20 bp, Artificial Sequence
  Description of Artificial Sequence: Synthetic oligonucleotide
  Target: LAMA2; (-) strand; PAM type: NNAGAAW; PAM sequence: CTAGAAT
ttttcagtgacttgaagaac

SEQ ID NO: 11385 - DNA, 20 bp, Artificial Sequence
  Description of Artificial Sequence: Synthetic oligonucleotide
  Target: LAMA2; (-) strand; PAM type: NNAGAAW; PAM sequence: GGAGAAA
atgtgaagggcttaaagaca

SEQ ID NO: 11386 - DNA, 20 bp, Artificial Sequence
  Description of Artificial Sequence: Synthetic oligonucleotide
  Target: LAMA2; (-) strand; PAM type: NNAGAAW; PAM sequence: TGAGAAA
tcatatcctcattttacaga

SEQ ID NO: 11387 - DNA, 20 bp, Artificial Sequence
  Description of Artificial Sequence: Synthetic oligonucleotide
  Target: LAMA2; (-) strand; PAM type: NNAGAAW; PAM sequence: AAAGAAA
cttccctttttccccttcaa

SEQ ID NO: 11388 - DNA, 20 bp, Artificial Sequence
  Description of Artificial Sequence: Synthetic oligonucleotide
  Target: LAMA2; (-) strand; PAM type: NNAGAAW; PAM sequence: CTAGAAT
ctgtaatatgctacggtgta

SEQ ID NO: 11389 - DNA, 20 bp, Artificial Sequence
  Description of Artificial Sequence: Synthetic oligonucleotide
  Target: LAMA2; (-) strand; PAM type: NNAGAAW; PAM sequence: CCAGAAT
atacaagaataaatcaggga

SEQ ID NO: 11390 - DNA, 20 bp, Artificial Sequence
  Description of Artificial Sequence: Synthetic oligonucleotide
  Target: LAMA2; (-) strand; PAM type: NNAGAAW; PAM sequence: CAAGAAT
ttctcagtttttacttcata

SEQ ID NO: 11391 - DNA, 20 bp, Artificial Sequence
  Description of Artificial Sequence: Synthetic oligonucleotide
  Target: LAMA2; (-) strand; PAM type: NNAGAAW; PAM sequence: CCAGAAA
atactccttactagatggtt

SEQ ID NO: 11392 - DNA, 20 bp, Artificial Sequence
  Description of Artificial Sequence: Synthetic oligonucleotide
  Target: LAMA2; (-) strand; PAM type: NNAGAAW; PAM sequence: GAAGAAT
ataattttattaggaattat

SEQ ID NO: 11393 - DNA, 20 bp, Artificial Sequence
  Description of Artificial Sequence: Synthetic oligonucleotide
  Target: LAMA2; (-) strand; PAM type: NNAGAAW; PAM sequence: ACAGAAT
tcagcccaaattgccaacct

SEQ ID NO: 11394 - DNA, 20 bp, Artificial Sequence
  Description of Artificial Sequence: Synthetic oligonucleotide
  Target: LAMA2; (-) strand; PAM type: NNAGAAW; PAM sequence: ACAGAAT
tttgcaacatactctgacca

SEQ ID NO: 11395 - DNA, 20 bp, Artificial Sequence
  Description of Artificial Sequence: Synthetic oligonucleotide
  Target: LAMA2; (-) strand; PAM type: NNAGAAW; PAM sequence: GAAGAAA
ggaaagggagagatggacgg

SEQ ID NO: 11396 - DNA, 20 bp, Artificial Sequence
  Description of Artificial Sequence: Synthetic oligonucleotide
  Target: LAMA2; (-) strand; PAM type: NNAGAAW; PAM sequence: CAAGAAT
ggcagagactgtccgatcaa

SEQ ID NO: 11397 - DNA, 20 bp, Artificial Sequence
  Description of Artificial Sequence: Synthetic oligonucleotide
  Target: LAMA2; (-) strand; PAM type: NNAGAAW; PAM sequence: ACAGAAA
ttaaaaacaatggtttagag

SEQ ID NO: 11398 - DNA, 20 bp, Artificial Sequence
  Description of Artificial Sequence: Synthetic oligonucleotide
  Target: LAMA2; (-) strand; PAM type: NNAGAAW; PAM sequence: GGAGAAT
tcacagatgtgtgaggaaca

SEQ ID NO: 11399 - DNA, 20 bp, Artificial Sequence
  Description of Artificial Sequence: Synthetic oligonucleotide
  Target: LAMA2; (-) strand; PAM type: NNAGAAW; PAM sequence: ATAGAAA
cttctgaatgtgagaacaag

SEQ ID NO: 11400 - DNA, 20 bp, Artificial Sequence
  Description of Artificial Sequence: Synthetic oligonucleotide
  Target: LAMA2; (-) strand; PAM type: NNAGAAW; PAM sequence: GAAGAAA
gaagaggttggggttggccg

SEQ ID NO: 11401 - DNA, 20 bp, Artificial Sequence
  Description of Artificial Sequence: Synthetic oligonucleotide
  Target: LAMA2; (-) strand; PAM type: NNAGAAW; PAM sequence: GTAGAAT
atagtgagaagatcagggag

SEQ ID NO: 11402 - DNA, 20 bp, Artificial Sequence
  Description of Artificial Sequence: Synthetic oligonucleotide
  Target: LAMA2; (-) strand; PAM type: NNAGAAW; PAM sequence: AGAGAAT
tatcaaaacactttggacaa

SEQ ID NO: 11403 - DNA, 20 bp, Artificial Sequence
  Description of Artificial Sequence: Synthetic oligonucleotide
  Target: LAMA2; (-) strand; PAM type: NNAGAAW; PAM sequence: CTAGAAT
ttgcttgctgtcttctctac

SEQ ID NO: 11404 - DNA, 20 bp, Artificial Sequence
  Description of Artificial Sequence: Synthetic oligonucleotide
  Target: LAMA2; (-) strand; PAM type: NNAGAAW; PAM sequence: ACAGAAT
ctctttccctcctcaccacc

SEQ ID NO: 11405 - DNA, 20 bp, Artificial Sequence
  Description of Artificial Sequence: Synthetic oligonucleotide
  Target: LAMA2; (-) strand; PAM type: NNAGAAW; PAM sequence: TTAGAAT
tcccacattatctctgcaca

SEQ ID NO: 11406 - DNA, 20 bp, Artificial Sequence
  Description of Artificial Sequence: Synthetic oligonucleotide
  Target: LAMA2; (-) strand; PAM type: NNAGAAW; PAM sequence: TCAGAAT
tctaccccagatctaggaaa

SEQ ID NO: 11407 - DNA, 20 bp, Artificial Sequence
  Description of Artificial Sequence: Synthetic oligonucleotide
  Target: LAMA2; (-) strand; PAM type: NNAGAAW; PAM sequence: TTAGAAA
tggcaccacctggaagctta

SEQ ID NO: 11408 - DNA, 20 bp, Artificial Sequence
  Description of Artificial Sequence: Synthetic oligonucleotide
  Target: LAMA2; (-) strand; PAM type: NNAGAAW; PAM sequence: TGAGAAT
ggtttctcttagtctctgac

SEQ ID NO: 11409 - DNA, 20 bp, Artificial Sequence
  Description of Artificial Sequence: Synthetic oligonucleotide
  Target: LAMA2; (-) strand; PAM type: NNAGAAW; PAM sequence: AGAGAAA
cttgtccacattaaacaatt

SEQ ID NO: 11410 - DNA, 20 bp, Artificial Sequence
  Description of Artificial Sequence: Synthetic oligonucleotide
  Target: LAMA2; (-) strand; PAM type: NNAGAAW; PAM sequence: CCAGAAT
atctcttactcttctcctag

SEQ ID NO: 11411 - DNA, 20 bp, Artificial Sequence
  Description of Artificial Sequence: Synthetic oligonucleotide
  Target: LAMA2; (-) strand; PAM type: NNAGAAW; PAM sequence: AGAGAAA
tcccctgagctgcttaatgg

SEQ ID NO: 11412 - DNA, 20 bp, Artificial Sequence
  Description of Artificial Sequence: Synthetic oligonucleotide
  Target: LAMA2; (-) strand; PAM type: NNAGAAW; PAM sequence: CAAGAAT
tggatcatgcccaaacttgg

SEQ ID NO: 11413 - DNA, 20 bp, Artificial Sequence
  Description of Artificial Sequence: Synthetic oligonucleotide
  Target: LAMA2; (-) strand; PAM type: NNAGAAW; PAM sequence: CGAGAAT
atacatagcatggaaaatac

SEQ ID NO: 11414 - DNA, 20 bp, Artificial Sequence
  Description of Artificial Sequence: Synthetic oligonucleotide
  Target: LAMA2; (-) strand; PAM type: NNAGAAW; PAM sequence: TTAGAAT
gtatcaatgctatatacatg

SEQ ID NO: 11415 - DNA, 20 bp, Artificial Sequence
  Description of Artificial Sequence: Synthetic oligonucleotide
  Target: LAMA2; (-) strand; PAM type: NNAGAAW; PAM sequence: GTAGAAT
ggtaggggccaggataggtg

SEQ ID NO: 11416 - DNA, 20 bp, Artificial Sequence
  Description of Artificial Sequence: Synthetic oligonucleotide
  Target: LAMA2; (-) strand; PAM type: NNAGAAW; PAM sequence: CAAGAAT
aactatattctttaagtagc

SEQ ID NO: 11417 - DNA, 20 bp, Artificial Sequence
  Description of Artificial Sequence: Synthetic oligonucleotide
  Target: LAMA2; (-) strand; PAM type: NNAGAAW; PAM sequence: CTAGAAA
agataaataattgctaaagg

SEQ ID NO: 11418 - DNA, 20 bp, Artificial Sequence
  Description of Artificial Sequence: Synthetic oligonucleotide
  Target: LAMA2; (-) strand; PAM type: NNAGAAW; PAM sequence: GGAGAAT
ctacccagaaggctgaggca

SEQ ID NO: 11419 - DNA, 20 bp, Artificial Sequence
  Description of Artificial Sequence: Synthetic oligonucleotide
  Target: LAMA2; (-) strand; PAM type: NNAGAAW; PAM sequence: GTAGAAT
tttagcttggtatctattga

SEQ ID NO: 11420 - DNA, 20 bp, Artificial Sequence
  Description of Artificial Sequence: Synthetic oligonucleotide
  Target: LAMA2; (-) strand; PAM type: NNAGAAW; PAM sequence: GGAGAAA
gtgctccattagattgcact

SEQ ID NO: 11421 - DNA, 20 bp, Artificial Sequence
  Description of Artificial Sequence: Synthetic oligonucleotide
  Target: LAMA2; (-) strand; PAM type: NNAGAAW; PAM sequence: ATAGAAT
ttgaagatttcctttaaggc

SEQ ID NO: 11422 - DNA, 20 bp, Artificial Sequence
  Description of Artificial Sequence: Synthetic oligonucleotide
  Target: LAMA2; (-) strand; PAM type: NNAGAAW; PAM sequence: GGAGAAA
ggaggagcaaatagatttgg

SEQ ID NO: 11423 - DNA, 20 bp, Artificial Sequence
  Description of Artificial Sequence: Synthetic oligonucleotide
  Target: LAMA2; (-) strand; PAM type: NNAGAAW; PAM sequence: TCAGAAT
ggaagatgaaactactcatc

SEQ ID NO: 11424 - DNA, 20 bp, Artificial Sequence
  Description of Artificial Sequence: Synthetic oligonucleotide
  Target: LAMA2; (-) strand; PAM type: NNAGAAW; PAM sequence: CAAGAAT
ctatgaaatattttatggtc

SEQ ID NO: 11425 - DNA, 20 bp, Artificial Sequence
  Description of Artificial Sequence: Synthetic oligonucleotide
  Target: LAMA2; (-) strand; PAM type: NNAGAAW; PAM sequence: AAAGAAT
aacatcccaggcagatgttc

SEQ ID NO: 11426 - DNA, 20 bp, Artificial Sequence
  Description of Artificial Sequence: Synthetic oligonucleotide
  Target: LAMA2; (-) strand; PAM type: NNAGAAW; PAM sequence: TAAGAAA
tgagtttgaaaaacactggt

SEQ ID NO: 11427 - DNA, 20 bp, Artificial Sequence
  Description of Artificial Sequence: Synthetic oligonucleotide
  Target: LAMA2; (-) strand; PAM type: NNAGAAW; PAM sequence: ATAGAAA
catgagactcttttccctta

SEQ ID NO: 11428 - DNA, 20 bp, Artificial Sequence
  Description of Artificial Sequence: Synthetic oligonucleotide
  Target: LAMA2; (-) strand; PAM type: NNAGAAW; PAM sequence: GGAGAAA
ggttcaaatgtggtaaggta

SEQ ID NO: 11429 - DNA, 20 bp, Artificial Sequence
  Description of Artificial Sequence: Synthetic oligonucleotide
  Target: LAMA2; (-) strand; PAM type: NNAGAAW; PAM sequence: ATAGAAT
aatgattatttttaaagcac

SEQ ID NO: 11430 - DNA, 20 bp, Artificial Sequence
  Description of Artificial Sequence: Synthetic oligonucleotide
  Target: LAMA2; (-) strand; PAM type: NNAGAAW; PAM sequence: ACAGAAA
tgtctacacttcaaattcca

SEQ ID NO: 11431 - DNA, 20 bp, Artificial Sequence
  Description of Artificial Sequence: Synthetic oligonucleotide
  Target: LAMA2; (-) strand; PAM type: NNAGAAW; PAM sequence: AAAGAAT
attaaagaatatatttccta

SEQ ID NO: 11432 - DNA, 20 bp, Artificial Sequence
  Description of Artificial Sequence: Synthetic oligonucleotide
  Target: LAMA2; (-) strand; PAM type: NNAGAAW; PAM sequence: AAAGAAT
taaaggttatggtcagaatt

SEQ ID NO: 11433 - DNA, 20 bp, Artificial Sequence
  Description of Artificial Sequence: Synthetic oligonucleotide
  Target: LAMA2; (-) strand; PAM type: NNAGAAW; PAM sequence: TCAGAAT
acttaccttaaaggttatgg

SEQ ID NO: 11434 - DNA, 20 bp, Artificial Sequence
  Description of Artificial Sequence: Synthetic oligonucleotide
  Target: LAMA2; (-) strand; PAM type: NNAGAAW; PAM sequence: TGAGAAT
tttgggaagtgattgagtca

SEQ ID NO: 11435 - DNA, 20 bp, Artificial Sequence
  Description of Artificial Sequence: Synthetic oligonucleotide
  Target: LAMA2; (-) strand; PAM type: NNAGAAW; PAM sequence: GCAGAAT
gtgtcctcacacggcagaag

SEQ ID NO: 11436 - DNA, 20 bp, Artificial Sequence
  Description of Artificial Sequence: Synthetic oligonucleotide
  Target: LAMA2; (-) strand; PAM type: NNAGAAW; PAM sequence: CTAGAAT
aaataaaaaatcaagaaaga

SEQ ID NO: 11437 - DNA, 20 bp, Artificial Sequence
  Description of Artificial Sequence: Synthetic oligonucleotide
  Target: LAMA2; (-) strand; PAM type: NNAGAAW; PAM sequence: CAAGAAA
agaagaacaaaataaaaaat

SEQ ID NO: 11438 - DNA, 20 bp, Artificial Sequence
  Description of Artificial Sequence: Synthetic oligonucleotide
  Target: LAMA2; (-) strand; PAM type: NNAGAAW; PAM sequence: AAAGAAA
tggggagcactgacatagtt

SEQ ID NO: 11439 - DNA, 20 bp, Artificial Sequence
  Description of Artificial Sequence: Synthetic oligonucleotide
  Target: LAMA2; (-) strand; PAM type: NNAGAAW; PAM sequence: ACAGAAT
ataggattcacaaaatactc

SEQ ID NO: 11440 - DNA, 20 bp, Artificial Sequence
  Description of Artificial Sequence: Synthetic oligonucleotide
  Target: LAMA2; (-) strand; PAM type: NNAGAAW; PAM sequence: ACAGAAA
ctgaaccagtgatgaatgaa

SEQ ID NO: 11441 - DNA, 20 bp, Artificial Sequence
  Description of Artificial Sequence: Synthetic oligonucleotide
  Target: LAMA2; (-) strand; PAM type: NNAGAAW; PAM sequence: TGAGAAA
taaaaattgcagtgacttat

SEQ ID NO: 11442 - DNA, 20 bp, Artificial Sequence
  Description of Artificial Sequence: Synthetic oligonucleotide
  Target: LAMA2; (-) strand; PAM type: NNAGAAW; PAM sequence: AAAGAAA
aacttagccttctcaccttc

SEQ ID NO: 11443 - DNA, 20 bp, Artificial Sequence
  Description of Artificial Sequence: Synthetic oligonucleotide
  Target: LAMA2; (-) strand; PAM type: NNAGAAW; PAM sequence: TCAGAAT
tttgaagcagaattagcaag

SEQ ID NO: 11444 - DNA, 20 bp, Artificial Sequence
  Description of Artificial Sequence: Synthetic oligonucleotide
  Target: LAMA2; (-) strand; PAM type: NNAGAAW; PAM sequence: GCAGAAT
tttctatgatttgatttgaa

SEQ ID NO: 11445 - DNA, 20 bp, Artificial Sequence
  Description of Artificial Sequence: Synthetic oligonucleotide
  Target: LAMA2; (-) strand; PAM type: NNAGAAW; PAM sequence: GTAGAAA
ctaaaccgacagcaggctat

SEQ ID NO: 11446 - DNA, 20 bp, Artificial Sequence
  Description of Artificial Sequence: Synthetic oligonucleotide
  Target: LAMA2; (-) strand; PAM type: NNAGAAW; PAM sequence: CAAGAAA
taatgtctacatacatttgg

SEQ ID NO: 11447 - DNA, 20 bp, Artificial Sequence
  Description of Artificial Sequence: Synthetic oligonucleotide
  Target: LAMA2; (-) strand; PAM type: NNAGAAW; PAM sequence: TTAGAAA
atttattctaccatgacctg

SEQ ID NO: 11448 - DNA, 20 bp, Artificial Sequence
  Description of Artificial Sequence: Synthetic oligonucleotide
  Target: LAMA2; (-) strand; PAM type: NNAGAAW; PAM sequence: CCAGAAT
ttctattattaaatatttct

SEQ ID NO: 11449 - DNA, 20 bp, Artificial Sequence
  Description of Artificial Sequence: Synthetic oligonucleotide
  Target: LAMA2; (-) strand; PAM type: NNAGAAW; PAM sequence: AAAGAAA
tgtctcaaaaaaaaaaaaaa

SEQ ID NO: 11450 - DNA, 20 bp, Artificial Sequence
  Description of Artificial Sequence: Synthetic oligonucleotide
  Target: LAMA2; (-) strand; PAM type: NNAGAAW; PAM sequence: ATAGAAT
taatgcatttttccaaaccc

SEQ ID NO: 11451 - DNA, 20 bp, Artificial Sequence
  Description of Artificial Sequence: Synthetic oligonucleotide
  Target: LAMA2; (-) strand; PAM type: NNAGAAW; PAM sequence: GGAGAAA
ataaagtcatgaaaaaatat

SEQ ID NO: 11452 - DNA, 20 bp, Artificial Sequence
  Description of Artificial Sequence: Synthetic oligonucleotide
  Target: LAMA2; (-) strand; PAM type: NNAGAAW; PAM sequence: AAAGAAA
gaaatattattcaacactac

SEQ ID NO: 11453 - DNA, 20 bp, Artificial Sequence
  Description of Artificial Sequence: Synthetic oligonucleotide
  Target: LAMA2; (-) strand; PAM type: NNAGAAW; PAM sequence: ATAGAAA
attgccggtgggaatgcaaa

SEQ ID NO: 11454 - DNA, 20 bp, Artificial Sequence
  Description of Artificial Sequence: Synthetic oligonucleotide
  Target: LAMA2; (-) strand; PAM type: NNAGAAW; PAM sequence: ACAGAAA
gctattgaggatgtggagca

SEQ ID NO: 11455 - DNA, 20 bp, Artificial Sequence
  Description of Artificial Sequence: Synthetic oligonucleotide
  Target: LAMA2; (-) strand; PAM type: NNAGAAW; PAM sequence: TTAGAAT
tgagataccatacacactta

SEQ ID NO: 11456 - DNA, 20 bp, Artificial Sequence
  Description of Artificial Sequence: Synthetic oligonucleotide
  Target: LAMA2; (-) strand; PAM type: NNAGAAW; PAM sequence: CAAGAAT
taaggaattgcaaactaaaa

SEQ ID NO: 11457 - DNA, 20 bp, Artificial Sequence
  Description of Artificial Sequence: Synthetic oligonucleotide
  Target: LAMA2; (-) strand; PAM type: NNAGAAW; PAM sequence: CAAGAAA
acaaaaaactctgaattcga

SEQ ID NO: 11458 - DNA, 20 bp, Artificial Sequence
  Description of Artificial Sequence: Synthetic oligonucleotide
  Target: LAMA2; (-) strand; PAM type: NNAGAAW; PAM sequence: GGAGAAA
caacaccaaaggctcaacaa

SEQ ID NO: 11459 - DNA, 20 bp, Artificial Sequence
  Description of Artificial Sequence: Synthetic oligonucleotide
  Target: LAMA2; (-) strand; PAM type: NNAGAAW; PAM sequence: GGAGAAA
cgctcctagaagatagcata

SEQ ID NO: 11460 - DNA, 20 bp, Artificial Sequence
  Description of Artificial Sequence: Synthetic oligonucleotide
  Target: LAMA2; (-) strand; PAM type: NNAGAAW; PAM sequence: TCAGAAA
tgtccaaactctcaaagtca

SEQ ID NO: 11461 - DNA, 20 bp, Artificial Sequence
  Description of Artificial Sequence: Synthetic oligonucleotide
  Target: LAMA2; (-) strand; PAM type: NNAGAAW; PAM sequence: TGAGAAA
tcataattccattctaatca

SEQ ID NO: 11462 - DNA, 20 bp, Artificial Sequence
  Description of Artificial Sequence: Synthetic oligonucleotide
  Target: LAMA2; (-) strand; PAM type: NNAGAAW; PAM sequence: GAAGAAT
ccttttatgttactgaatct

SEQ ID NO: 11463 - DNA, 20 bp, Artificial Sequence
  Description of Artificial Sequence: Synthetic oligonucleotide
  Target: LAMA2; (-) strand; PAM type: NNAGAAW; PAM sequence: AGAGAAT
cagcttgaccacagggaaag

SEQ ID NO: 11464 - DNA, 20 bp, Artificial Sequence
  Description of Artificial Sequence: Synthetic oligonucleotide
  Target: LAMA2; (-) strand; PAM type: NNAGAAW; PAM sequence: GGAGAAT
ctacttgggaggctgaagca

SEQ ID NO: 11465 - DNA, 20 bp, Artificial Sequence
  Description of Artificial Sequence: Synthetic oligonucleotide
  Target: LAMA2; (-) strand; PAM type: NNAGAAW; PAM sequence: AGAGAAA
gactggtgagccaaccaagc

SEQ ID NO: 11466 - DNA, 20 bp, Artificial Sequence
  Description of Artificial Sequence: Synthetic oligonucleotide
  Target: LAMA2; (-) strand; PAM type: NNAGAAW; PAM sequence: AAAGAAA
aaaaaattttggctctgaaa

SEQ ID NO: 11467 - DNA, 20 bp, Artificial Sequence
  Description of Artificial Sequence: Synthetic oligonucleotide
  Target: LAMA2; (-) strand; PAM type: NNAGAAW; PAM sequence: TGAGAAA
aaatccaggcagcagtggag

SEQ ID NO: 11468 - DNA, 20 bp, Artificial Sequence
  Description of Artificial Sequence: Synthetic oligonucleotide
  Target: LAMA2; (-) strand; PAM type: NNAGAAW; PAM sequence: AGAGAAA
aatgaaaggttggagaatta

SEQ ID NO: 11469 - DNA, 20 bp, Artificial Sequence
  Description of Artificial Sequence: Synthetic oligonucleotide
  Target: LAMA2; (-) strand; PAM type: NNAGAAW; PAM sequence: GGAGAAT
gagccttagaatgaaaggtt

SEQ ID NO: 11470 - DNA, 20 bp, Artificial Sequence
  Description of Artificial Sequence: Synthetic oligonucleotide
  Target: LAMA2; (-) strand; PAM type: NNAGAAW; PAM sequence: TTAGAAT
ggatgatgagaggaagagcc

SEQ ID NO: 11471 - DNA, 20 bp, Artificial Sequence
  Description of Artificial Sequence: Synthetic oligonucleotide
  Target: LAMA2; (-) strand; PAM type: NNAGAAW; PAM sequence: AAAGAAA
gtacatggcaattgaagacc

SEQ ID NO: 11472 - DNA, 20 bp, Artificial Sequence
  Description of Artificial Sequence: Synthetic oligonucleotide
  Target: LAMA2; (-) strand; PAM type: NNAGAAW; PAM sequence: TGAGAAT
aggcacataggaccaaagca

SEQ ID NO: 11473 - DNA, 20 bp, Artificial Sequence
  Description of Artificial Sequence: Synthetic oligonucleotide
  Target: LAMA2; (-) strand; PAM type: NNAGAAW; PAM sequence: GGAGAAA
acactgagatgttctacaca

SEQ ID NO: 11474 - DNA, 20 bp, Artificial Sequence
  Description of Artificial Sequence: Synthetic oligonucleotide
  Target: LAMA2; (-) strand; PAM type: NNAGAAW; PAM sequence: TTAGAAT
gacatgataggatctgcaat

SEQ ID NO: 11475 - DNA, 20 bp, Artificial Sequence
  Description of Artificial Sequence: Synthetic oligonucleotide
  Target: LAMA2; (-) strand; PAM type: NNAGAAW; PAM sequence: AGAGAAT
gccatagtacaatttaagga

SEQ ID NO: 11476 - DNA, 20 bp, Artificial Sequence
  Description of Artificial Sequence: Synthetic oligonucleotide
  Target: LAMA2; (-) strand; PAM type: NNAGAAW; PAM sequence: AAAGAAA
atgaggaagaaagaggcacc

SEQ ID NO: 11477 - DNA, 20 bp, Artificial Sequence
  Description of Artificial Sequence: Synthetic oligonucleotide
  Target: LAMA2; (-) strand; PAM type: NNAGAAW; PAM sequence: GAAGAAA
ataagcaggagcatcatgag

SEQ ID NO: 11478 - DNA, 20 bp, Artificial Sequence
  Description of Artificial Sequence: Synthetic oligonucleotide
  Target: LAMA2; (-) strand; PAM type: NNAGAAW; PAM sequence: GGAGAAT
gatgggagatgtggccaagg

SEQ ID NO: 11479 - DNA, 20 bp, Artificial Sequence
  Description of Artificial Sequence: Synthetic oligonucleotide
  Target: LAMA2; (-) strand; PAM type: NNAGAAW; PAM sequence: AAAGAAA
gattacctttaaggcaaaat

SEQ ID NO: 11480 - DNA, 20 bp, Artificial Sequence
  Description of Artificial Sequence: Synthetic oligonucleotide
  Target: LAMA2; (-) strand; PAM type: NNAGAAW; PAM sequence: ACAGAAA
tgaaaggtaaattggagtta

SEQ ID NO: 11481 - DNA, 20 bp, Artificial Sequence
  Description of Artificial Sequence: Synthetic oligonucleotide
  Target: LAMA2; (-) strand; PAM type: NNAGAAW; PAM sequence: TAAGAAA
caatattggtgatactgtgg

SEQ ID NO: 11482 - DNA, 20 bp, Artificial Sequence
  Description of Artificial Sequence: Synthetic oligonucleotide
  Target: LAMA2; (-) strand; PAM type: NNAGAAW; PAM sequence: ACAGAAT
ctacatagcattctcccctt

SEQ ID NO: 11483 - DNA, 20 bp, Artificial Sequence
  Description of Artificial Sequence: Synthetic oligonucleotide
  Target: LAMA2; (-) strand; PAM type: NNAGAAW; PAM sequence: GGAGAAA
tatcttttaaaaatataaaa

SEQ ID NO: 11484 - DNA, 20 bp, Artificial Sequence
  Description of Artificial Sequence: Synthetic oligonucleotide
  Target: LAMA2; (-) strand; PAM type: NNAGAAW; PAM sequence: CTAGAAT
ctgccttctttatgttaaaa

SEQ ID NO: 11485 - DNA, 20 bp, Artificial Sequence
  Description of Artificial Sequence: Synthetic oligonucleotide
  Target: LAMA2; (-) strand; PAM type: NNAGAAW; PAM sequence: CCAGAAA
attttgtgtttggctaacat

SEQ ID NO: 11486 - DNA, 20 bp, Artificial Sequence
  Description of Artificial Sequence: Synthetic oligonucleotide
  Target: LAMA2; (-) strand; PAM type: NNAGAAW; PAM sequence: TCAGAAT
cagtcaggctcatctgtacc

SEQ ID NO: 11487 - DNA, 20 bp, Artificial Sequence
  Description of Artificial Sequence: Synthetic oligonucleotide
  Target: LAMA2; (-) strand; PAM type: NNAGAAW; PAM sequence: TTAGAAA
atctccattagatagataga

SEQ ID NO: 11488 - DNA, 20 bp, Artificial Sequence
  Description of Artificial Sequence: Synthetic oligonucleotide
  Target: LAMA2; (-) strand; PAM type: NNAGAAW; PAM sequence: TGAGAAT
ccttcatagcaccatggatt

SEQ ID NO: 11489 - DNA, 20 bp, Artificial Sequence
  Description of Artificial Sequence: Synthetic oligonucleotide
  Target: LAMA2; (-) strand; PAM type: NNAGAAW; PAM sequence: CTAGAAT
ttgtatcccattgtctttac

SEQ ID NO: 11490 - DNA, 20 bp, Artificial Sequence
  Description of Artificial Sequence: Synthetic oligonucleotide
  Target: LAMA2; (-) strand; PAM type: NNAGAAW; PAM sequence: TAAGAAA
gaatcctacaaactccatga

SEQ ID NO: 11491 - DNA, 20 bp, Artificial Sequence
  Description of Artificial Sequence: Synthetic oligonucleotide
  Target: LAMA2; (-) strand; PAM type: NNAGAAW; PAM sequence: CAAGAAT
ttacttcaatactaaattgt

SEQ ID NO: 11492 - DNA, 20 bp, Artificial Sequence
  Description of Artificial Sequence: Synthetic oligonucleotide
  Target: LAMA2; (-) strand; PAM type: NNAGAAW; PAM sequence: ACAGAAA
ccactagtgtctcttatggt

SEQ ID NO: 11493 - DNA, 20 bp, Artificial Sequence
  Description of Artificial Sequence: Synthetic oligonucleotide
  Target: LAMA2; (-) strand; PAM type: NNAGAAW; PAM sequence: AAAGAAA
tctcaaaaaaaaagaaaaga

SEQ ID NO: 11494 - DNA, 20 bp, Artificial Sequence
  Description of Artificial Sequence: Synthetic oligonucleotide
  Target: LAMA2; (-) strand; PAM type: NNAGAAW; PAM sequence: AAAGAAA
ctctgtctcaaaaaaaaaga

SEQ ID NO: 11495 - DNA, 20 bp, Artificial Sequence
  Description of Artificial Sequence: Synthetic oligonucleotide
  Target: LAMA2; (-) strand; PAM type: NNAGAAW; PAM sequence: AAAGAAA
cgagcctctgtctcaaaaaa

SEQ ID NO: 11496 - DNA, 20 bp, Artificial Sequence
  Description of Artificial Sequence: Synthetic oligonucleotide
  Target: LAMA2; (-) strand; PAM type: NNAGAAW; PAM sequence: TAAGAAT
caaatgaaaggatgaaagga

SEQ ID NO: 11497 - DNA, 20 bp, Artificial Sequence
  Description of Artificial Sequence: Synthetic oligonucleotide
  Target: LAMA2; (-) strand; PAM type: NNAGAAW; PAM sequence: AGAGAAT
cttgcatactaggcatggcc

SEQ ID NO: 11498 - DNA, 20 bp, Artificial Sequence
  Description of Artificial Sequence: Synthetic oligonucleotide
  Target: LAMA2; (-) strand; PAM type: NNAGAAW; PAM sequence: CTAGAAT
gttggcagcatattaacact

SEQ ID NO: 11499 - DNA, 20 bp, Artificial Sequence
  Description of Artificial Sequence: Synthetic oligonucleotide
  Target: LAMA2; (-) strand; PAM type: NNAGAAW; PAM sequence: AGAGAAT
ctaactacagataatgaatt

SEQ ID NO: 11500 - DNA, 20 bp, Artificial Sequence
  Description of Artificial Sequence: Synthetic oligonucleotide
  Target: LAMA2; (-) strand; PAM type: NNAGAAW; PAM sequence: ACAGAAT
cagaaatatgcttgttaatc

SEQ ID NO: 11501 - DNA, 20 bp, Artificial Sequence
  Description of Artificial Sequence: Synthetic oligonucleotide
  Target: LAMA2; (-) strand; PAM type: NNAGAAW; PAM sequence: CCAGAAA
aacttttccatatgatagca

SEQ ID NO: 11502 - DNA, 20 bp, Artificial Sequence
  Description of Artificial Sequence: Synthetic oligonucleotide
  Target: LAMA2; (-) strand; PAM type: NNAGAAW; PAM sequence: GGAGAAT
gatgccaataaaatgttaag

SEQ ID NO: 11503 - DNA, 20 bp, Artificial Sequence
  Description of Artificial Sequence: Synthetic oligonucleotide
  Target: LAMA2; (-) strand; PAM type: NNAGAAW; PAM sequence: GGAGAAA
ttaattaaagaaacaaagag

SEQ ID NO: 11504 - DNA, 20 bp, Artificial Sequence
  Description of Artificial Sequence: Synthetic oligonucleotide
  Target: LAMA2; (-) strand; PAM type: NNAGAAW; PAM sequence: AAAGAAA
tttagatcaatacgttaatt

SEQ ID NO: 11505 - DNA, 20 bp, Artificial Sequence
  Description of Artificial Sequence: Synthetic oligonucleotide
  Target: LAMA2; (-) strand; PAM type: NNAGAAW; PAM sequence: GGAGAAA
ctttctgtgtttttctgttg

SEQ ID NO: 11506 - DNA, 20 bp, Artificial Sequence
  Description of Artificial Sequence: Synthetic oligonucleotide
  Target: LAMA2; (-) strand; PAM type: NNAGAAW; PAM sequence: AGAGAAA
tacagatgtcacttataaca

SEQ ID NO: 11507 - DNA, 20 bp, Artificial Sequence
  Description of Artificial Sequence: Synthetic oligonucleotide
  Target: LAMA2; (-) strand; PAM type: NNAGAAW; PAM sequence: CAAGAAT
taattataatagccatgtta

SEQ ID NO: 11508 - DNA, 20 bp, Artificial Sequence
  Description of Artificial Sequence: Synthetic oligonucleotide
  Target: LAMA2; (-) strand; PAM type: NNAGAAW; PAM sequence: GGAGAAA
cagtatttgaaaagccattt

SEQ ID NO: 11509 - DNA, 20 bp, Artificial Sequence
  Description of Artificial Sequence: Synthetic oligonucleotide
  Target: LAMA2; (-) strand; PAM type: NNAGAAW; PAM sequence: AGAGAAT
gatggcaagaactaactcct

SEQ ID NO: 11510 - DNA, 20 bp, Artificial Sequence
  Description of Artificial Sequence: Synthetic oligonucleotide
  Target: LAMA2; (-) strand; PAM type: NNAGAAW; PAM sequence: CAAGAAA
aaatgcataatattgcagag

SEQ ID NO: 11511 - DNA, 20 bp, Artificial Sequence
  Description of Artificial Sequence: Synthetic oligonucleotide
  Target: LAMA2; (-) strand; PAM type: NNAGAAW; PAM sequence: TCAGAAT
tgatgcctaagaattatcag

SEQ ID NO: 11512 - DNA, 20 bp, Artificial Sequence
  Description of Artificial Sequence: Synthetic oligonucleotide
  Target: LAMA2; (-) strand; PAM type: NNAGAAW; PAM sequence: TAAGAAT
tcttcttggccagtgatgcc

SEQ ID NO: 11513 - DNA, 20 bp, Artificial Sequence
  Description of Artificial Sequence: Synthetic oligonucleotide
  Target: LAMA2; (-) strand; PAM type: NNAGAAW; PAM sequence: GCAGAAA
aattaactgagatttttctg

SEQ ID NO: 11514 - DNA, 20 bp, Artificial Sequence
  Description of Artificial Sequence: Synthetic oligonucleotide
  Target: LAMA2; (-) strand; PAM type: NNAGAAW; PAM sequence: AAAGAAA
ggtgtttgaaatgtcaatgg

SEQ ID NO: 11515 - DNA, 20 bp, Artificial Sequence
  Description of Artificial Sequence: Synthetic oligonucleotide
  Target: LAMA2; (-) strand; PAM type: NNAGAAW; PAM sequence: TTAGAAA
cacatggcacttcacataaa

SEQ ID NO: 11516 - DNA, 20 bp, Artificial Sequence
  Description of Artificial Sequence: Synthetic oligonucleotide
  Target: LAMA2; (-) strand; PAM type: NNAGAAW; PAM sequence: AGAGAAA
cattattatagtttagagag

SEQ ID NO: 11517 - DNA, 20 bp, Artificial Sequence
  Description of Artificial Sequence: Synthetic oligonucleotide
  Target: LAMA2; (-) strand; PAM type: NNAGAAW; PAM sequence: TAAGAAT
attataaaattatagtgaga

SEQ ID NO: 11518 - DNA, 20 bp, Artificial Sequence
  Description of Artificial Sequence: Synthetic oligonucleotide
  Target: LAMA2; (-) strand; PAM type: NNAGAAW; PAM sequence: TGAGAAA
tagaaagtaatactctgatc

SEQ ID NO: 11519 - DNA, 20 bp, Artificial Sequence
  Description of Artificial Sequence: Synthetic oligonucleotide
  Target: LAMA2; (-) strand; PAM type: NNAGAAW; PAM sequence: ATAGAAA
gatgggtaaatttattaaga

SEQ ID NO: 11520 - DNA, 20 bp, Artificial Sequence
  Description of Artificial Sequence: Synthetic oligonucleotide
  Target: LAMA2; (-) strand; PAM type: NNAGAAW; PAM sequence: TAAGAAT
cctctgatgggtaaatttat

SEQ ID NO: 11521 - DNA, 20 bp, Artificial Sequence
  Description of Artificial Sequence: Synthetic oligonucleotide
  Target: LAMA2; (-) strand; PAM type: NNAGAAW; PAM sequence: ACAGAAA
attagggaaagaattagtag

SEQ ID NO: 11522 - DNA, 20 bp, Artificial Sequence
  Description of Artificial Sequence: Synthetic oligonucleotide
  Target: LAMA2; (-) strand; PAM type: NNAGAAW; PAM sequence: AAAGAAT
aaaagttgtataaattaggg

SEQ ID NO: 11523 - DNA, 20 bp, Artificial Sequence
  Description of Artificial Sequence: Synthetic oligonucleotide
  Target: LAMA2; (-) strand; PAM type: NNAGAAW; PAM sequence: TTAGAAA
tgctaggcaatatgattttc

SEQ ID NO: 11524 - DNA, 20 bp, Artificial Sequence
  Description of Artificial Sequence: Synthetic oligonucleotide
  Target: LAMA2; (-) strand; PAM type: NNAGAAW; PAM sequence: GGAGAAA
aaattttagatatgggtttt

SEQ ID NO: 11525 - DNA, 20 bp, Artificial Sequence
  Description of Artificial Sequence: Synthetic oligonucleotide
  Target: LAMA2; (-) strand; PAM type: NNAGAAW; PAM sequence: AAAGAAA
taaaaacatgagaataaaaa

SEQ ID NO: 11526 - DNA, 20 bp, Artificial Sequence
  Description of Artificial Sequence: Synthetic oligonucleotide
  Target: LAMA2; (-) strand; PAM type: NNAGAAW; PAM sequence: TGAGAAT
taaaaaggaaaataaaaaca

SEQ ID NO: 11527 - DNA, 20 bp, Artificial Sequence
  Description of Artificial Sequence: Synthetic oligonucleotide
  Target: LAMA2; (-) strand; PAM type: NNAGAAW; PAM sequence: GTAGAAT
actgtatatgtgtctttaga

SEQ ID NO: 11528 - DNA, 20 bp, Artificial Sequence
  Description of Artificial Sequence: Synthetic oligonucleotide
  Target: LAMA2; (-) strand; PAM type: NNAGAAW; PAM sequence: TAAGAAA
ttagcaaaatgatcatgtat

SEQ ID NO: 11529 - DNA, 20 bp, Artificial Sequence
  Description of Artificial Sequence: Synthetic oligonucleotide
  Target: LAMA2; (-) strand; PAM type: NNAGAAW; PAM sequence: AGAGAAA
gaaaaagaatgacaacagat

SEQ ID NO: 11530 - DNA, 20 bp, Artificial Sequence
  Description of Artificial Sequence: Synthetic oligonucleotide
  Target: LAMA2; (-) strand; PAM type: NNAGAAW; PAM sequence: AAAGAAT
cagagaagaatctggtggaa

SEQ ID NO: 11531 - DNA, 20 bp, Artificial Sequence
  Description of Artificial Sequence: Synthetic oligonucleotide
  Target: LAMA2; (-) strand; PAM type: NNAGAAW; PAM sequence: GAAGAAT
caaagctaaacttctgcaga

SEQ ID NO: 11532 - DNA, 20 bp, Artificial Sequence
  Description of Artificial Sequence: Synthetic oligonucleotide
  Target: LAMA2; (-) strand; PAM type: NNAGAAW; PAM sequence: TAAGAAA
cgtgtataaatcagctttca

SEQ ID NO: 11533 - DNA, 20 bp, Artificial Sequence
  Description of Artificial Sequence: Synthetic oligonucleotide
  Target: LAMA2; (-) strand; PAM type: NNAGAAW; PAM sequence: CAAGAAA
gctttctgcttcttagattt

SEQ ID NO: 11534 - DNA, 20 bp, Artificial Sequence
  Description of Artificial Sequence: Synthetic oligonucleotide
  Target: LAMA2; (-) strand; PAM type: NNAGAAW; PAM sequence: ACAGAAT
ggctgtgtctcaattttgtt

SEQ ID NO: 11535 - DNA, 20 bp, Artificial Sequence
  Description of Artificial Sequence: Synthetic oligonucleotide
  Target: LAMA2; (-) strand; PAM type: NNAGAAW; PAM sequence: AAAGAAT
gttataccttgacatatgcc

SEQ ID NO: 11536 - DNA, 20 bp, Artificial Sequence
  Description of Artificial Sequence: Synthetic oligonucleotide
  Target: LAMA2; (-) strand; PAM type: NNAGAAW; PAM sequence: GCAGAAA
agacagccatggtttaatta

SEQ ID NO: 11537 - DNA, 20 bp, Artificial Sequence
  Description of Artificial Sequence: Synthetic oligonucleotide
  Target: LAMA2; (-) strand; PAM type: NNAGAAW; PAM sequence: TGAGAAA
gacctctcagccttcacaaa

SEQ ID NO: 11538 - DNA, 20 bp, Artificial Sequence
  Description of Artificial Sequence: Synthetic oligonucleotide
  Target: LAMA2; (-) strand; PAM type: NNAGAAW; PAM sequence: CAAGAAT
aggagattaggtcataaggg

SEQ ID NO: 11539 - DNA, 20 bp, Artificial Sequence
  Description of Artificial Sequence: Synthetic oligonucleotide
  Target: LAMA2; (-) strand; PAM type: NNAGAAW; PAM sequence: AAAGAAT
gagaaacactgggatagtag

SEQ ID NO: 11540 - DNA, 20 bp, Artificial Sequence
  Description of Artificial Sequence: Synthetic oligonucleotide
  Target: LAMA2; (-) strand; PAM type: NNAGAAW; PAM sequence: GTAGAAA
gcttgagaaacactgggata

SEQ ID NO: 11541 - DNA, 20 bp, Artificial Sequence
  Description of Artificial Sequence: Synthetic oligonucleotide
  Target: LAMA2; (-) strand; PAM type: NNAGAAW; PAM sequence: TGAGAAA
ttctgatgtaccctagagct

SEQ ID NO: 11542 - DNA, 20 bp, Artificial Sequence
  Description of Artificial Sequence: Synthetic oligonucleotide
  Target: LAMA2; (-) strand; PAM type: NNAGAAW; PAM sequence: TCAGAAA
cctgccacaaacctacagac

SEQ ID NO: 11543 - DNA, 20 bp, Artificial Sequence
  Description of Artificial Sequence: Synthetic oligonucleotide
  Target: LAMA2; (-) strand; PAM type: NNAGAAW; PAM sequence: TTAGAAA
catcaccaccttggagccca

SEQ ID NO: 11544 - DNA, 20 bp, Artificial Sequence
  Description of Artificial Sequence: Synthetic oligonucleotide
  Target: LAMA2; (-) strand; PAM type: NNAGAAW; PAM sequence: CTAGAAT
aatattacctttgaaaactc

SEQ ID NO: 11545 - DNA, 20 bp, Artificial Sequence
  Description of Artificial Sequence: Synthetic oligonucleotide
  Target: LAMA2; (-) strand; PAM type: NNAGAAW; PAM sequence: AAAGAAT
gggcaggatttcatttgaga

SEQ ID NO: 11546 - DNA, 20 bp, Artificial Sequence
  Description of Artificial Sequence: Synthetic oligonucleotide
  Target: LAMA2; (-) strand; PAM type: NNAGAAW; PAM sequence: TGAGAAA
gttctgggcaggatttcatt

SEQ ID NO: 11547 - DNA, 20 bp, Artificial Sequence
  Description of Artificial Sequence: Synthetic oligonucleotide
  Target: LAMA2; (-) strand; PAM type: NNAGAAW; PAM sequence: GAAGAAA
tgttcattttttaaaggagt

SEQ ID NO: 11548 - DNA, 20 bp, Artificial Sequence
  Description of Artificial Sequence: Synthetic oligonucleotide
  Target: LAMA2; (-) strand; PAM type: NNAGAAW; PAM sequence: AAAGAAT
tttctaacctcaaaagaaag

SEQ ID NO: 11549 - DNA, 20 bp, Artificial Sequence
  Description of Artificial Sequence: Synthetic oligonucleotide
  Target: LAMA2; (-) strand; PAM type: NNAGAAW; PAM sequence: AAAGAAA
ggtgtttctaacctcaaaag

SEQ ID NO: 11550 - DNA, 20 bp, Artificial Sequence
  Description of Artificial Sequence: Synthetic oligonucleotide
  Target: LAMA2; (-) strand; PAM type: NNAGAAW; PAM sequence: AAAGAAA
gcatggtgtttctaacctca

SEQ ID NO: 11551 - DNA, 20 bp, Artificial Sequence
  Description of Artificial Sequence: Synthetic oligonucleotide
  Target: LAMA2; (-) strand; PAM type: NNAGAAW; PAM sequence: AAAGAAA
ctggaaatctcagtttgtca

SEQ ID NO: 11552 - DNA, 20 bp, Artificial Sequence
  Description of Artificial Sequence: Synthetic oligonucleotide
  Target: LAMA2; (-) strand; PAM type: NNAGAAW; PAM sequence: TTAGAAA
cttatacgtgtgataaaaat

SEQ ID NO: 11553 - DNA, 20 bp, Artificial Sequence
  Description of Artificial Sequence: Synthetic oligonucleotide
  Target: LAMA2; (-) strand; PAM type: NNAGAAW; PAM sequence: CCAGAAA
taattacagaaggagcagca

SEQ ID NO: 11554 - DNA, 20 bp, Artificial Sequence
  Description of Artificial Sequence: Synthetic oligonucleotide
  Target: LAMA2; (-) strand; PAM type: NNAGAAW; PAM sequence: TAAGAAA
agtgataattttcgagtcat

SEQ ID NO: 11555 - DNA, 20 bp, Artificial Sequence
  Description of Artificial Sequence: Synthetic oligonucleotide
  Target: LAMA2; (-) strand; PAM type: NNAGAAW; PAM sequence: ACAGAAT
tgtttgctcagaaactgtga

SEQ ID NO: 11556 - DNA, 20 bp, Artificial Sequence
  Description of Artificial Sequence: Synthetic oligonucleotide
  Target: LAMA2; (-) strand; PAM type: NNAGAAW; PAM sequence: TCAGAAA
atgaatattgttatgtttgc

SEQ ID NO: 11557 - DNA, 20 bp, Artificial Sequence
  Description of Artificial Sequence: Synthetic oligonucleotide
  Target: LAMA2; (-) strand; PAM type: NNAGAAW; PAM sequence: TAAGAAA
ataaaagcgaaacagatttt

SEQ ID NO: 11558 - DNA, 20 bp, Artificial Sequence
  Description of Artificial Sequence: Synthetic oligonucleotide
  Target: LAMA2; (-) strand; PAM type: NNAGAAW; PAM sequence: TAAGAAA
acatgaaaagaatgagaaaa

SEQ ID NO: 11559 - DNA, 20 bp, Artificial Sequence
  Description of Artificial Sequence: Synthetic oligonucleotide
  Target: LAMA2; (-) strand; PAM type: NNAGAAW; PAM sequence: TGAGAAA
agatgctaacatgaaaagaa

SEQ ID NO: 11560 - DNA, 20 bp, Artificial Sequence
  Description of Artificial Sequence: Synthetic oligonucleotide
  Target: LAMA2; (-) strand; PAM type: NNAGAAW; PAM sequence: AAAGAAT
acaaagagatgctaacatga

SEQ ID NO: 11561 - DNA, 20 bp, Artificial Sequence
  Description of Artificial Sequence: Synthetic oligonucleotide
  Target: LAMA2; (-) strand; PAM type: NNAGAAW; PAM sequence: ATAGAAA
atttgcatagaacacagcgc

SEQ ID NO: 11562 - DNA, 20 bp, Artificial Sequence
  Description of Artificial Sequence: Synthetic oligonucleotide
  Target: LAMA2; (-) strand; PAM type: NNAGAAW; PAM sequence: GGAGAAA
gttatctgtgtggaaaagga

SEQ ID NO: 11563 - DNA, 20 bp, Artificial Sequence
  Description of Artificial Sequence: Synthetic oligonucleotide
  Target: LAMA2; (-) strand; PAM type: NNAGAAW; PAM sequence: GAAGAAA
gaaagaaattggaaaaaaaa

SEQ ID NO: 11564 - DNA, 20 bp, Artificial Sequence
  Description of Artificial Sequence: Synthetic oligonucleotide
  Target: LAMA2; (-) strand; PAM type: NNAGAAW; PAM sequence: AAAGAAA
tttactatgttaagattaag

SEQ ID NO: 11565 - DNA, 20 bp, Artificial Sequence
  Description of Artificial Sequence: Synthetic oligonucleotide
  Target: LAMA2; (-) strand; PAM type: NNAGAAW; PAM sequence: TAAGAAA
ataatttactatgttaagat

SEQ ID NO: 11566 - DNA, 20 bp, Artificial Sequence
  Description of Artificial Sequence: Synthetic oligonucleotide
  Target: LAMA2; (-) strand; PAM type: NNAGAAW; PAM sequence: GGAGAAA
aaaggtaaatttgtctctgg

SEQ ID NO: 11567 - DNA, 20 bp, Artificial Sequence
  Description of Artificial Sequence: Synthetic oligonucleotide
  Target: LAMA2; (-) strand; PAM type: NNAGAAW; PAM sequence: ATAGAAA
actacttaatctaaaggaaa

SEQ ID NO: 11568 - DNA, 20 bp, Artificial Sequence
  Description of Artificial Sequence: Synthetic oligonucleotide
  Target: LAMA2; (-) strand; PAM type: NNAGAAW; PAM sequence: CCAGAAT
taagcctcttcaatattcta

SEQ ID NO: 11569 - DNA, 20 bp, Artificial Sequence
  Description of Artificial Sequence: Synthetic oligonucleotide
  Target: LAMA2; (-) strand; PAM type: NNAGAAW; PAM sequence: GAAGAAA
aattggttaggtgcatcagt

SEQ ID NO: 11570 - DNA, 20 bp, Artificial Sequence
  Description of Artificial Sequence: Synthetic oligonucleotide
  Target: LAMA2; (-) strand; PAM type: NNAGAAW; PAM sequence: AAAGAAA
tctggttttaaacatcacta

SEQ ID NO: 11571 - DNA, 20 bp, Artificial Sequence
  Description of Artificial Sequence: Synthetic oligonucleotide
  Target: LAMA2; (-) strand; PAM type: NNAGAAW; PAM sequence: CAAGAAT
caggtatttgtaggggtgcc

SEQ ID NO: 11572 - DNA, 20 bp, Artificial Sequence
  Description of Artificial Sequence: Synthetic oligonucleotide
  Target: LAMA2; (-) strand; PAM type: NNAGAAW; PAM sequence: TCAGAAT
gaaaatccaaacaggaccac

SEQ ID NO: 11573 - DNA, 20 bp, Artificial Sequence
  Description of Artificial Sequence: Synthetic oligonucleotide
  Target: LAMA2; (-) strand; PAM type: NNAGAAW; PAM sequence: TTAGAAT
agattagcccagggagagtg

SEQ ID NO: 11574 - DNA, 20 bp, Artificial Sequence
  Description of Artificial Sequence: Synthetic oligonucleotide
  Target: LAMA2; (-) strand; PAM type: NNAGAAW; PAM sequence: AAAGAAA
aggcttgataaaatttttaa

SEQ ID NO: 11575 - DNA, 20 bp, Artificial Sequence
  Description of Artificial Sequence: Synthetic oligonucleotide
  Target: LAMA2; (-) strand; PAM type: NNAGAAW; PAM sequence: CAAGAAT
ggtcatttagggatggggtc

SEQ ID NO: 11576 - DNA, 20 bp, Artificial Sequence
  Description of Artificial Sequence: Synthetic oligonucleotide
  Target: LAMA2; (-) strand; PAM type: NNAGAAW; PAM sequence: GGAGAAT
gaaagaaggcctatgtatag

SEQ ID NO: 11577 - DNA, 20 bp, Artificial Sequence
  Description of Artificial Sequence: Synthetic oligonucleotide
  Target: LAMA2; (-) strand; PAM type: NNAGAAW; PAM sequence: ACAGAAA
aaacttagagtatttaagaa

SEQ ID NO: 11578 - DNA, 20 bp, Artificial Sequence
  Description of Artificial Sequence: Synthetic oligonucleotide
  Target: LAMA2; (-) strand; PAM type: NNAGAAW; PAM sequence: TAAGAAA
gataggaaacttagagtatt

SEQ ID NO: 11579 - DNA, 20 bp, Artificial Sequence
  Description of Artificial Sequence: Synthetic oligonucleotide
  Target: LAMA2; (-) strand; PAM type: NNAGAAW; PAM sequence: ATAGAAA
aaaaacaaagagaggcacag

SEQ ID NO: 11580 - DNA, 20 bp, Artificial Sequence
  Description of Artificial Sequence: Synthetic oligonucleotide
  Target: LAMA2; (-) strand; PAM type: NNAGAAW; PAM sequence: AAAGAAA
ttaatgtataatatattctt

SEQ ID NO: 11581 - DNA, 20 bp, Artificial Sequence
  Description of Artificial Sequence: Synthetic oligonucleotide
  Target: LAMA2; (-) strand; PAM type: NNAGAAW; PAM sequence: CGAGAAA
gatgggttctagctttgaac

SEQ ID NO: 11582 - DNA, 20 bp, Artificial Sequence
  Description of Artificial Sequence: Synthetic oligonucleotide
  Target: LAMA2; (-) strand; PAM type: NNAGAAW; PAM sequence: TCAGAAA
gtgcttcttagcatactcaa

SEQ ID NO: 11583 - DNA, 20 bp, Artificial Sequence
  Description of Artificial Sequence: Synthetic oligonucleotide
  Target: LAMA2; (-) strand; PAM type: NNAGAAW; PAM sequence: TTAGAAT
gatttcaataaagtagtgag

SEQ ID NO: 11584 - DNA, 20 bp, Artificial Sequence
  Description of Artificial Sequence: Synthetic oligonucleotide
  Target: LAMA2; (-) strand; PAM type: NNAGAAW; PAM sequence: CAAGAAT
gtatagcatgtacagaaaca

SEQ ID NO: 11585 - DNA, 20 bp, Artificial Sequence
  Description of Artificial Sequence: Synthetic oligonucleotide
  Target: LAMA2; (-) strand; PAM type: NNAGAAW; PAM sequence: ACAGAAA
tgacttaaagtatagcatgt

SEQ ID NO: 11586 - DNA, 20 bp, Artificial Sequence
  Description of Artificial Sequence: Synthetic oligonucleotide
  Target: LAMA2; (-) strand; PAM type: NNAGAAW; PAM sequence: AAAGAAA
aagaaaagaaaagaaagaaa

SEQ ID NO: 11587 - DNA, 20 bp, Artificial Sequence
  Description of Artificial Sequence: Synthetic oligonucleotide
  Target: LAMA2; (-) strand; PAM type: NNAGAAW; PAM sequence: AAAGAAA
aaaaaaaaagaaaagaaaag

SEQ ID NO: 11588 - DNA, 20 bp, Artificial Sequence
  Description of Artificial Sequence: Synthetic oligonucleotide
  Target: LAMA2; (-) strand; PAM type: NNAGAAW; PAM sequence: AAAGAAA
aaaaaaaaaaaaagaaaaga

SEQ ID NO: 11589 - DNA, 20 bp, Artificial Sequence
  Description of Artificial Sequence: Synthetic oligonucleotide
  Target: LAMA2; (-) strand; PAM type: NNAGAAW; PAM sequence: AAAGAAA
aaaaaaaaaaaaaaaaaaga

SEQ ID NO: 11590 - DNA, 20 bp, Artificial Sequence
  Description of Artificial Sequence: Synthetic oligonucleotide
  Target: LAMA2; (-) strand; PAM type: NNAGAAW; PAM sequence: AAAGAAA
ctcaaaaaaaaaaaaaaaaa

SEQ ID NO: 11591 - DNA, 20 bp, Artificial Sequence
  Description of Artificial Sequence: Synthetic oligonucleotide
  Target: LAMA2; (-) strand; PAM type: NNAGAAW; PAM sequence: GGAGAAT
ctacttgggaggctgaggca

SEQ ID NO: 11592 - DNA, 20 bp, Artificial Sequence
  Description of Artificial Sequence: Synthetic oligonucleotide
  Target: LAMA2; (-) strand; PAM type: NNAGAAW; PAM sequence: GCAGAAA
agatacatgtacagggacta

SEQ ID NO: 11593 - DNA, 20 bp, Artificial Sequence
  Description of Artificial Sequence: Synthetic oligonucleotide
  Target: LAMA2; (-) strand; PAM type: NNAGAAW; PAM sequence: TCAGAAA
caaagattaggtaataaaaa

SEQ ID NO: 11594 - DNA, 20 bp, Artificial Sequence
  Description of Artificial Sequence: Synthetic oligonucleotide
  Target: LAMA2; (-) strand; PAM type: NNAGAAW; PAM sequence: GTAGAAA
gaattatattctacagagtg

SEQ ID NO: 11595 - DNA, 20 bp, Artificial Sequence
  Description of Artificial Sequence: Synthetic oligonucleotide
  Target: LAMA2; (-) strand; PAM type: NNAGAAW; PAM sequence: GAAGAAT
atagacattgtaaaattgga

SEQ ID NO: 11596 - DNA, 20 bp, Artificial Sequence
  Description of Artificial Sequence: Synthetic oligonucleotide
  Target: LAMA2; (-) strand; PAM type: NNAGAAW; PAM sequence: TCAGAAT
cattcctgggaactactgac

SEQ ID NO: 11597 - DNA, 20 bp, Artificial Sequence
  Description of Artificial Sequence: Synthetic oligonucleotide
  Target: LAMA2; (-) strand; PAM type: NNAGAAW; PAM sequence: TTAGAAA
cagcgtcacctggaagctca

SEQ ID NO: 11598 - DNA, 20 bp, Artificial Sequence
  Description of Artificial Sequence: Synthetic oligonucleotide
  Target: LAMA2; (-) strand; PAM type: NNAGAAW; PAM sequence: ATAGAAA
aaaatactatctcttctatt

SEQ ID NO: 11599 - DNA, 20 bp, Artificial Sequence
  Description of Artificial Sequence: Synthetic oligonucleotide
  Target: LAMA2; (-) strand; PAM type: NNAGAAW; PAM sequence: TAAGAAA
tttcccagcctccagaacca

SEQ ID NO: 11600 - DNA, 20 bp, Artificial Sequence
  Description of Artificial Sequence: Synthetic oligonucleotide
  Target: LAMA2; (-) strand; PAM type: NNAGAAW; PAM sequence: CCAGAAA
gtgaaaacggtgtctatgaa

SEQ ID NO: 11601 - DNA, 20 bp, Artificial Sequence
  Description of Artificial Sequence: Synthetic oligonucleotide
  Target: LAMA2; (-) strand; PAM type: NNAGAAW; PAM sequence: AGAGAAT
acctaatggactgtttcatg

SEQ ID NO: 11602 - DNA, 20 bp, Artificial Sequence
  Description of Artificial Sequence: Synthetic oligonucleotide
  Target: LAMA2; (-) strand; PAM type: NNAGAAW; PAM sequence: GAAGAAT
aatagagaaaccatcacatg

SEQ ID NO: 11603 - DNA, 20 bp, Artificial Sequence
  Description of Artificial Sequence: Synthetic oligonucleotide
  Target: LAMA2; (-) strand; PAM type: NNAGAAW; PAM sequence: AGAGAAA
gaaaatactttttaagaaat

SEQ ID NO: 11604 - DNA, 20 bp, Artificial Sequence
  Description of Artificial Sequence: Synthetic oligonucleotide
  Target: LAMA2; (-) strand; PAM type: NNAGAAW; PAM sequence: TAAGAAA
aacttagggaaaatactttt

SEQ ID NO: 11605 - DNA, 20 bp, Artificial Sequence
  Description of Artificial Sequence: Synthetic oligonucleotide
  Target: LAMA2; (-) strand; PAM type: NNAGAAW; PAM sequence: CTAGAAT
ttggtactacatattgaatt

SEQ ID NO: 11606 - DNA, 20 bp, Artificial Sequence
  Description of Artificial Sequence: Synthetic oligonucleotide
  Target: LAMA2; (-) strand; PAM type: NNAGAAW; PAM sequence: AAAGAAA
aaggaattaaaactactttt

SEQ ID NO: 11607 - DNA, 20 bp, Artificial Sequence
  Description of Artificial Sequence: Synthetic oligonucleotide
  Target: LAMA2; (-) strand; PAM type: NNAGAAW; PAM sequence: GAAGAAA
tgtgagaaagtcatccaagc

SEQ ID NO: 11608 - DNA, 20 bp, Artificial Sequence
  Description of Artificial Sequence: Synthetic oligonucleotide
  Target: LAMA2; (-) strand; PAM type: NNAGAAW; PAM sequence: TGAGAAA
gttatttcttcttctcattg

SEQ ID NO: 11609 - DNA, 20 bp, Artificial Sequence
  Description of Artificial Sequence: Synthetic oligonucleotide
  Target: LAMA2; (-) strand; PAM type: NNAGAAW; PAM sequence: TGAGAAA
catgttgaaatgtggctaga

SEQ ID NO: 11610 - DNA, 20 bp, Artificial Sequence
  Description of Artificial Sequence: Synthetic oligonucleotide
  Target: LAMA2; (-) strand; PAM type: NNAGAAW; PAM sequence: CAAGAAA
caaaaataattttatctcca

SEQ ID NO: 11611 - DNA, 20 bp, Artificial Sequence
  Description of Artificial Sequence: Synthetic oligonucleotide
  Target: LAMA2; (-) strand; PAM type: NNAGAAW; PAM sequence: GTAGAAT
aatagataggcatggtcaca

SEQ ID NO: 11612 - DNA, 20 bp, Artificial Sequence
  Description of Artificial Sequence: Synthetic oligonucleotide
  Target: LAMA2; (-) strand; PAM type: NNAGAAW; PAM sequence: CAAGAAA
tgtaagtgctgctctaggaa

SEQ ID NO: 11613 - DNA, 20 bp, Artificial Sequence
  Description of Artificial Sequence: Synthetic oligonucleotide
  Target: LAMA2; (-) strand; PAM type: NNAGAAW; PAM sequence: CAAGAAA
tttaagaaaccaacttagac

SEQ ID NO: 11614 - DNA, 20 bp, Artificial Sequence
  Description of Artificial Sequence: Synthetic oligonucleotide
  Target: LAMA2; (-) strand; PAM type: NNAGAAW; PAM sequence: TAAGAAA
atggaatagactaggaaatt

SEQ ID NO: 11615 - DNA, 20 bp, Artificial Sequence
  Description of Artificial Sequence: Synthetic oligonucleotide
  Target: LAMA2; (-) strand; PAM type: NNAGAAW; PAM sequence: AGAGAAT
actaacatagcaaaaagaat

SEQ ID NO: 11616 - DNA, 20 bp, Artificial Sequence
  Description of Artificial Sequence: Synthetic oligonucleotide
  Target: LAMA2; (-) strand; PAM type: NNAGAAW; PAM sequence: AAAGAAT
caaacttactaacatagcaa

SEQ ID NO: 11617 - DNA, 20 bp, Artificial Sequence
  Description of Artificial Sequence: Synthetic oligonucleotide
  Target: LAMA2; (-) strand; PAM type: NNAGAAW; PAM sequence: ACAGAAA
agctagtgtgttcataatta

SEQ ID NO: 11618 - DNA, 20 bp, Artificial Sequence
  Description of Artificial Sequence: Synthetic oligonucleotide
  Target: LAMA2; (-) strand; PAM type: NNAGAAW; PAM sequence: ACAGAAA
cctcctaattaagcctatcc

SEQ ID NO: 11619 - DNA, 20 bp, Artificial Sequence
  Description of Artificial Sequence: Synthetic oligonucleotide
  Target: LAMA2; (-) strand; PAM type: NNAGAAW; PAM sequence: ACAGAAA
actgtgctttttaataaaga

SEQ ID NO: 11620 - DNA, 20 bp, Artificial Sequence
  Description of Artificial Sequence: Synthetic oligonucleotide
  Target: LAMA2; (-) strand; PAM type: NNAGAAW; PAM sequence: ACAGAAT
acatgaaactgaaatttgaa

SEQ ID NO: 11621 - DNA, 20 bp, Artificial Sequence
  Description of Artificial Sequence: Synthetic oligonucleotide
  Target: LAMA2; (-) strand; PAM type: NNAGAAW; PAM sequence: TTAGAAA
aataaattgttttgattcca

SEQ ID NO: 11622 - DNA, 20 bp, Artificial Sequence
  Description of Artificial Sequence: Synthetic oligonucleotide
  Target: LAMA2; (-) strand; PAM type: NNAGAAW; PAM sequence: GGAGAAA
gaataagctgctattttaca

SEQ ID NO: 11623 - DNA, 20 bp, Artificial Sequence
  Description of Artificial Sequence: Synthetic oligonucleotide
  Target: LAMA2; (-) strand; PAM type: NNAGAAW; PAM sequence: CTAGAAT
gacctttgtaataatcccag

SEQ ID NO: 11624 - DNA, 20 bp, Artificial Sequence
  Description of Artificial Sequence: Synthetic oligonucleotide
  Target: LAMA2; (-) strand; PAM type: NNAGAAW; PAM sequence: CGAGAAT
ctgctataattatagcatac

SEQ ID NO: 11625 - DNA, 20 bp, Artificial Sequence
  Description of Artificial Sequence: Synthetic oligonucleotide
  Target: LAMA2; (-) strand; PAM type: NNAGAAW; PAM sequence: TGAGAAA
taacagtggtagtgggtgac

SEQ ID NO: 11626 - DNA, 20 bp, Artificial Sequence
  Description of Artificial Sequence: Synthetic oligonucleotide
  Target: LAMA2; (-) strand; PAM type: NNAGAAW; PAM sequence: AAAGAAA
tttttgcccaacactgaagc

SEQ ID NO: 11627 - DNA, 20 bp, Artificial Sequence
  Description of Artificial Sequence: Synthetic oligonucleotide
  Target: LAMA2; (-) strand; PAM type: NNAGAAW; PAM sequence: CTAGAAA
tctctaatatcccctaaatc

SEQ ID NO: 11628 - DNA, 20 bp, Artificial Sequence
  Description of Artificial Sequence: Synthetic oligonucleotide
  Target: LAMA2; (-) strand; PAM type: NNAGAAW; PAM sequence: ATAGAAT
aaaaacagtacaaattgctc

SEQ ID NO: 11629 - DNA, 20 bp, Artificial Sequence
  Description of Artificial Sequence: Synthetic oligonucleotide
  Target: LAMA2; (-) strand; PAM type: NNAGAAW; PAM sequence: AGAGAAA
gcattagtagggctcactca

SEQ ID NO: 11630 - DNA, 20 bp, Artificial Sequence
  Description of Artificial Sequence: Synthetic oligonucleotide
  Target: LAMA2; (-) strand; PAM type: NNAGAAW; PAM sequence: ATAGAAA
ttctgaaaggataactgaac

SEQ ID NO: 11631 - DNA, 20 bp, Artificial Sequence
  Description of Artificial Sequence: Synthetic oligonucleotide
  Target: LAMA2; (-) strand; PAM type: NNAGAAW; PAM sequence: ATAGAAA
ttgaaattagggtctttaaa

SEQ ID NO: 11632 - DNA, 20 bp, Artificial Sequence
  Description of Artificial Sequence: Synthetic oligonucleotide
  Target: LAMA2; (-) strand; PAM type: NNAGAAW; PAM sequence: CAAGAAA
ctccttatcataaaatgtta

SEQ ID NO: 11633 - DNA, 20 bp, Artificial Sequence
  Description of Artificial Sequence: Synthetic oligonucleotide
  Target: LAMA2; (-) strand; PAM type: NNAGAAW; PAM sequence: AAAGAAA
aacatttcattctgatattt

SEQ ID NO: 11634 - DNA, 20 bp, Artificial Sequence
  Description of Artificial Sequence: Synthetic oligonucleotide
  Target: LAMA2; (-) strand; PAM type: NNAGAAW; PAM sequence: ATAGAAA
actttcctcacccgacacca

SEQ ID NO: 11635 - DNA, 20 bp, Artificial Sequence
  Description of Artificial Sequence: Synthetic oligonucleotide
  Target: LAMA2; (-) strand; PAM type: NNAGAAW; PAM sequence: TGAGAAA
taggatcaaagcaactaaga

SEQ ID NO: 11636 - DNA, 20 bp, Artificial Sequence
  Description of Artificial Sequence: Synthetic oligonucleotide
  Target: LAMA2; (-) strand; PAM type: NNAGAAW; PAM sequence: GAAGAAA
ggctagaataaaagcaggca

SEQ ID NO: 11637 - DNA, 20 bp, Artificial Sequence
  Description of Artificial Sequence: Synthetic oligonucleotide
  Target: LAMA2; (-) strand; PAM type: NNAGAAW; PAM sequence: CTAGAAT
ctaataagctgccagtgtgg

SEQ ID NO: 11638 - DNA, 20 bp, Artificial Sequence
  Description of Artificial Sequence: Synthetic oligonucleotide
  Target: LAMA2; (-) strand; PAM type: NNAGAAW; PAM sequence: TAAGAAT
atatttcctccttattctgt

SEQ ID NO: 11639 - DNA, 20 bp, Artificial Sequence
  Description of Artificial Sequence: Synthetic oligonucleotide
  Target: LAMA2; (-) strand; PAM type: NNAGAAW; PAM sequence: GCAGAAA
ctacaaccacgtggccagtt

SEQ ID NO: 11640 - DNA, 20 bp, Artificial Sequence
  Description of Artificial Sequence: Synthetic oligonucleotide
  Target: LAMA2; (-) strand; PAM type: NNAGAAW; PAM sequence: CCAGAAT
tacaaatggcacaggtcctt

SEQ ID NO: 11641 - DNA, 20 bp, Artificial Sequence
  Description of Artificial Sequence: Synthetic oligonucleotide
  Target: LAMA2; (-) strand; PAM type: NNAGAAW; PAM sequence: CCAGAAT
gtgttggctgggtaattgac

SEQ ID NO: 11642 - DNA, 20 bp, Artificial Sequence
  Description of Artificial Sequence: Synthetic oligonucleotide
  Target: LAMA2; (-) strand; PAM type: NNAGAAW; PAM sequence: GAAGAAT
agacatcttagttccagagg

SEQ ID NO: 11643 - DNA, 20 bp, Artificial Sequence
  Description of Artificial Sequence: Synthetic oligonucleotide
  Target: LAMA2; (-) strand; PAM type: NNAGAAW; PAM sequence: CCAGAAT
atagccagtgttcacgtgtc

SEQ ID NO: 11644 - DNA, 20 bp, Artificial Sequence
  Description of Artificial Sequence: Synthetic oligonucleotide
  Target: LAMA2; (-) strand; PAM type: NNAGAAW; PAM sequence: ATAGAAT
atcctgaagcaggtggattg

SEQ ID NO: 11645 - DNA, 20 bp, Artificial Sequence
  Description of Artificial Sequence: Synthetic oligonucleotide
  Target: LAMA2; (-) strand; PAM type: NNAGAAW; PAM sequence: CCAGAAT
agagtaccatccgtgaactc

SEQ ID NO: 11646 - DNA, 20 bp, Artificial Sequence
  Description of Artificial Sequence: Synthetic oligonucleotide
  Target: LAMA2; (-) strand; PAM type: NNAGAAW; PAM sequence: GCAGAAA
gagtgcccaatttgccagca

SEQ ID NO: 11647 - DNA, 20 bp, Artificial Sequence
  Description of Artificial Sequence: Synthetic oligonucleotide
  Target: LAMA2; (-) strand; PAM type: NNAGAAW; PAM sequence: GAAGAAA
ggttgtgcacttgcttggaa

SEQ ID NO: 11648 - DNA, 20 bp, Artificial Sequence
  Description of Artificial Sequence: Synthetic oligonucleotide
  Target: LAMA2; (-) strand; PAM type: NNAGAAW; PAM sequence: GCAGAAT
aagggaagtcttcccagggg

SEQ ID NO: 11649 - DNA, 20 bp, Artificial Sequence
  Description of Artificial Sequence: Synthetic oligonucleotide
  Target: LAMA2; (-) strand; PAM type: NNAGAAW; PAM sequence: GTAGAAA
tggcctgttactgggctttg

SEQ ID NO: 11650 - DNA, 20 bp, Artificial Sequence
  Description of Artificial Sequence: Synthetic oligonucleotide
  Target: LAMA2; (-) strand; PAM type: NNAGAAW; PAM sequence: ATAGAAA
cattccaaggagtcaacgtc

SEQ ID NO: 11651 - DNA, 20 bp, Artificial Sequence
  Description of Artificial Sequence: Synthetic oligonucleotide
  Target: LAMA2; (-) strand; PAM type: NNAGAAW; PAM sequence: GAAGAAT
tgataattttccattatctt

SEQ ID NO: 11652 - DNA, 20 bp, Artificial Sequence
  Description of Artificial Sequence: Synthetic oligonucleotide
  Target: LAMA2; (-) strand; PAM type: NNAGAAW; PAM sequence: GGAGAAA
ttccactgacttagagaaag

SEQ ID NO: 11653 - DNA, 20 bp, Artificial Sequence
  Description of Artificial Sequence: Synthetic oligonucleotide
  Target: LAMA2; (-) strand; PAM type: NNAGAAW; PAM sequence: AGAGAAA
ctagactattccactgactt

SEQ ID NO: 11654 - DNA, 20 bp, Artificial Sequence
  Description of Artificial Sequence: Synthetic oligonucleotide
  Target: LAMA2; (-) strand; PAM type: NNAGAAW; PAM sequence: GAAGAAA
caaggtgaagaagaggaaca

SEQ ID NO: 11655 - DNA, 20 bp, Artificial Sequence
  Description of Artificial Sequence: Synthetic oligonucleotide
  Target: LAMA2; (-) strand; PAM type: NNAGAAW; PAM sequence: AGAGAAA
agtaagagagacagagacag

SEQ ID NO: 11656 - DNA, 20 bp, Artificial Sequence
  Description of Artificial Sequence: Synthetic oligonucleotide
  Target: LAMA2; (-) strand; PAM type: NNAGAAW; PAM sequence: TGAGAAA
gaagatctaactaaacaaat

SEQ ID NO: 11657 - DNA, 20 bp, Artificial Sequence
  Description of Artificial Sequence: Synthetic oligonucleotide
  Target: LAMA2; (-) strand; PAM type: NNAGAAW; PAM sequence: AAAGAAA
ggctgaatagaacaaaaagc

SEQ ID NO: 11658 - DNA, 20 bp, Artificial Sequence
  Description of Artificial Sequence: Synthetic oligonucleotide
  Target: LAMA2; (-) strand; PAM type: NNAGAAW; PAM sequence: GGAGAAT
aagtaagagaacttgaattt

SEQ ID NO: 11659 - DNA, 20 bp, Artificial Sequence
  Description of Artificial Sequence: Synthetic oligonucleotide
  Target: LAMA2; (-) strand; PAM type: NNAGAAW; PAM sequence: CAAGAAA
ttttttagaatgatggttcc

SEQ ID NO: 11660 - DNA, 20 bp, Artificial Sequence
  Description of Artificial Sequence: Synthetic oligonucleotide
  Target: LAMA2; (-) strand; PAM type: NNAGAAW; PAM sequence: TTAGAAT
aaaggcctggtcaacatttt

SEQ ID NO: 11661 - DNA, 20 bp, Artificial Sequence
  Description of Artificial Sequence: Synthetic oligonucleotide
  Target: LAMA2; (-) strand; PAM type: NNAGAAW; PAM sequence: TAAGAAA
ttatttttcctagaaatgcc

SEQ ID NO: 11662 - DNA, 20 bp, Artificial Sequence
  Description of Artificial Sequence: Synthetic oligonucleotide
  Target: LAMA2; (-) strand; PAM type: NNAGAAW; PAM sequence: CTAGAAA
tgtattttatattatttttc

SEQ ID NO: 11663 - DNA, 20 bp, Artificial Sequence
  Description of Artificial Sequence: Synthetic oligonucleotide
  Target: LAMA2; (-) strand; PAM type: NNAGAAW; PAM sequence: TGAGAAA
tcccactatcattttttcta

SEQ ID NO: 11664 - DNA, 20 bp, Artificial Sequence
  Description of Artificial Sequence: Synthetic oligonucleotide
  Target: LAMA2; (-) strand; PAM type: NNAGAAW; PAM sequence: TAAGAAT
ataagagaagttgacatatt

SEQ ID NO: 11665 - DNA, 20 bp, Artificial Sequence
  Description of Artificial Sequence: Synthetic oligonucleotide
  Target: LAMA2; (-) strand; PAM type: NNAGAAW; PAM sequence: CAAGAAA
ttagacacctaaccccattg

SEQ ID NO: 11666 - DNA, 20 bp, Artificial Sequence
  Description of Artificial Sequence: Synthetic oligonucleotide
  Target: LAMA2; (-) strand; PAM type: NNAGAAW; PAM sequence: CAAGAAT
ttgctttcctccccagaatt

SEQ ID NO: 11667 - DNA, 20 bp, Artificial Sequence
  Description of Artificial Sequence: Synthetic oligonucleotide
  Target: LAMA2; (-) strand; PAM type: NNAGAAW; PAM sequence: CCAGAAT
ttagctttttgctttcctcc

SEQ ID NO: 11668 - DNA, 20 bp, Artificial Sequence
  Description of Artificial Sequence: Synthetic oligonucleotide
  Target: LAMA2; (-) strand; PAM type: NNAGAAW; PAM sequence: GAAGAAA
tactgaggtcccctgaagaa

SEQ ID NO: 11669 - DNA, 20 bp, Artificial Sequence
  Description of Artificial Sequence: Synthetic oligonucleotide
  Target: LAMA2; (-) strand; PAM type: NNAGAAW; PAM sequence: GAAGAAT
ccaacagtcagaggccttaa

SEQ ID NO: 11670 - DNA, 20 bp, Artificial Sequence
  Description of Artificial Sequence: Synthetic oligonucleotide
  Target: LAMA2; (-) strand; PAM type: NNAGAAW; PAM sequence: CCAGAAT
tttctctttttttgtctttt

SEQ ID NO: 11671 - DNA, 20 bp, Artificial Sequence
  Description of Artificial Sequence: Synthetic oligonucleotide
  Target: LAMA2; (-) strand; PAM type: NNAGAAW; PAM sequence: GTAGAAT
tacttcatcgaatggggcat

SEQ ID NO: 11672 - DNA, 20 bp, Artificial Sequence
  Description of Artificial Sequence: Synthetic oligonucleotide
  Target: LAMA2; (-) strand; PAM type: NNAGAAW; PAM sequence: GCAGAAA
tacttttttaaacatcttga

SEQ ID NO: 11673 - DNA, 20 bp, Artificial Sequence
  Description of Artificial Sequence: Synthetic oligonucleotide
  Target: LAMA2; (-) strand; PAM type: NNAGAAW; PAM sequence: TAAGAAT
gtttatttgctagtttattc

SEQ ID NO: 11674 - DNA, 20 bp, Artificial Sequence
  Description of Artificial Sequence: Synthetic oligonucleotide
  Target: LAMA2; (-) strand; PAM type: NNAGAAW; PAM sequence: TTAGAAA
aggaaataagatagatacga

SEQ ID NO: 11675 - DNA, 20 bp, Artificial Sequence
  Description of Artificial Sequence: Synthetic oligonucleotide
  Target: LAMA2; (-) strand; PAM type: NNAGAAW; PAM sequence: AAAGAAA
catcatgaatttagaaaaag

SEQ ID NO: 11676 - DNA, 20 bp, Artificial Sequence
  Description of Artificial Sequence: Synthetic oligonucleotide
  Target: LAMA2; (-) strand; PAM type: NNAGAAW; PAM sequence: AAAGAAA
tatgcatcatgaatttagaa

SEQ ID NO: 11677 - DNA, 20 bp, Artificial Sequence
  Description of Artificial Sequence: Synthetic oligonucleotide
  Target: LAMA2; (-) strand; PAM type: NNAGAAW; PAM sequence: TTAGAAA
aacatgtatgcatcatgaat

SEQ ID NO: 11678 - DNA, 20 bp, Artificial Sequence
  Description of Artificial Sequence: Synthetic oligonucleotide
  Target: LAMA2; (-) strand; PAM type: NNAGAAW; PAM sequence: AAAGAAA
tatcagcctctgatcattta

SEQ ID NO: 11679 - DNA, 20 bp, Artificial Sequence
  Description of Artificial Sequence: Synthetic oligonucleotide
  Target: LAMA2; (-) strand; PAM type: NNAGAAW; PAM sequence: AGAGAAA
tggagctgtgagcttagttg

SEQ ID NO: 11680 - DNA, 20 bp, Artificial Sequence
  Description of Artificial Sequence: Synthetic oligonucleotide
  Target: LAMA2; (-) strand; PAM type: NNAGAAW; PAM sequence: GAAGAAT
tactaagagatgtagtaaaa

SEQ ID NO: 11681 - DNA, 20 bp, Artificial Sequence
  Description of Artificial Sequence: Synthetic oligonucleotide
  Target: LAMA2; (-) strand; PAM type: NNAGAAW; PAM sequence: GAAGAAT
cagtatattaggttaaaaat

SEQ ID NO: 11682 - DNA, 20 bp, Artificial Sequence
  Description of Artificial Sequence: Synthetic oligonucleotide
  Target: LAMA2; (-) strand; PAM type: NNAGAAW; PAM sequence: GAAGAAT
ggaaaaaaggaagctaaagg

SEQ ID NO: 11683 - DNA, 20 bp, Artificial Sequence
  Description of Artificial Sequence: Synthetic oligonucleotide
  Target: LAMA2; (-) strand; PAM type: NNAGAAW; PAM sequence: AGAGAAT
tcagaaagaacaggtaaggt

SEQ ID NO: 11684 - DNA, 20 bp, Artificial Sequence
  Description of Artificial Sequence: Synthetic oligonucleotide
  Target: LAMA2; (-) strand; PAM type: NNAGAAW; PAM sequence: TCAGAAA
aatttggagaaggccaggcc

SEQ ID NO: 11685 - DNA, 20 bp, Artificial Sequence
  Description of Artificial Sequence: Synthetic oligonucleotide
  Target: LAMA2; (-) strand; PAM type: NNAGAAW; PAM sequence: ATAGAAA
gggtatatgccagcaaggag

SEQ ID NO: 11686 - DNA, 20 bp, Artificial Sequence
  Description of Artificial Sequence: Synthetic oligonucleotide
  Target: LAMA2; (-) strand; PAM type: NNAGAAW; PAM sequence: AAAGAAA
agaaagtgtataatttcagc

SEQ ID NO: 11687 - DNA, 20 bp, Artificial Sequence
  Description of Artificial Sequence: Synthetic oligonucleotide
  Target: LAMA2; (-) strand; PAM type: NNAGAAW; PAM sequence: AAAGAAA
aaaaaaaaaaaaaaaaaaag

SEQ ID NO: 11688 - DNA, 20 bp, Artificial Sequence
  Description of Artificial Sequence: Synthetic oligonucleotide
  Target: LAMA2; (-) strand; PAM type: NNAGAAW; PAM sequence: AAAGAAA
tcaaaaaaaaaaaaaaaaaa

SEQ ID NO: 11689 - DNA, 20 bp, Artificial Sequence
  Description of Artificial Sequence: Synthetic oligonucleotide
  Target: LAMA2; (-) strand; PAM type: NNAGAAW; PAM sequence: GGAGAAT
ctacttgggaggctgaggca

SEQ ID NO: 11690 - DNA, 20 bp, Artificial Sequence
  Description of Artificial Sequence: Synthetic oligonucleotide
  Target: LAMA2; (-) strand; PAM type: NNAGAAW; PAM sequence: AAAGAAA
ggagtaaaaagaagttgatc

SEQ ID NO: 11691 - DNA, 20 bp, Artificial Sequence
  Description of Artificial Sequence: Synthetic oligonucleotide
  Target: LAMA2; (-) strand; PAM type: NNAGAAW; PAM sequence: TGAGAAT
ttaatttaaaatttgaattc

SEQ ID NO: 11692 - DNA, 20 bp, Artificial Sequence
  Description of Artificial Sequence: Synthetic oligonucleotide
  Target: LAMA2; (-) strand; PAM type: NNAGAAW; PAM sequence: TCAGAAA
gtaagaaaacaaacagctct

SEQ ID NO: 11693 - DNA, 20 bp, Artificial Sequence
  Description of Artificial Sequence: Synthetic oligonucleotide
  Target: LAMA2; (-) strand; PAM type: NNAGAAW; PAM sequence: TAAGAAA
ggagaaagcaaaatatacag

SEQ ID NO: 11694 - DNA, 20 bp, Artificial Sequence
  Description of Artificial Sequence: Synthetic oligonucleotide
  Target: LAMA2; (-) strand; PAM type: NNAGAAW; PAM sequence: GGAGAAA
cccaagcatatctttcccat

SEQ ID NO: 11695 - DNA, 20 bp, Artificial Sequence
  Description of Artificial Sequence: Synthetic oligonucleotide
  Target: LAMA2; (-) strand; PAM type: NNAGAAW; PAM sequence: GAAGAAA
cacagaggtttccagctggt

SEQ ID NO: 11696 - DNA, 20 bp, Artificial Sequence
  Description of Artificial Sequence: Synthetic oligonucleotide
  Target: LAMA2; (-) strand; PAM type: NNAGAAW; PAM sequence: TGAGAAA
attctaaagactttcttttc

SEQ ID NO: 11697 - DNA, 20 bp, Artificial Sequence
  Description of Artificial Sequence: Synthetic oligonucleotide
  Target: LAMA2; (-) strand; PAM type: NNAGAAW; PAM sequence: TCAGAAT
gccattcctgatttctagca

SEQ ID NO: 11698 - DNA, 20 bp, Artificial Sequence
  Description of Artificial Sequence: Synthetic oligonucleotide
  Target: LAMA2; (-) strand; PAM type: NNAGAAW; PAM sequence: AAAGAAA
tgatctcaaactaaacaggg

SEQ ID NO: 11699 - DNA, 20 bp, Artificial Sequence
  Description of Artificial Sequence: Synthetic oligonucleotide
  Target: LAMA2; (-) strand; PAM type: NNAGAAW; PAM sequence: ACAGAAA
agattttaagtgttctcaac

SEQ ID NO: 11700 - DNA, 20 bp, Artificial Sequence
  Description of Artificial Sequence: Synthetic oligonucleotide
  Target: LAMA2; (-) strand; PAM type: NNAGAAW; PAM sequence: GAAGAAA
accaagagcattattgtctt

SEQ ID NO: 11701 - DNA, 20 bp, Artificial Sequence
  Description of Artificial Sequence: Synthetic oligonucleotide
  Target: LAMA2; (-) strand; PAM type: NNAGAAW; PAM sequence: GTAGAAA
cttgattattctacctacgg

SEQ ID NO: 11702 - DNA, 20 bp, Artificial Sequence
  Description of Artificial Sequence: Synthetic oligonucleotide
  Target: LAMA2; (-) strand; PAM type: NNAGAAW; PAM sequence: CCAGAAT
attttccctctagttaatgt

SEQ ID NO: 11703 - DNA, 20 bp, Artificial Sequence
  Description of Artificial Sequence: Synthetic oligonucleotide
  Target: LAMA2; (-) strand; PAM type: NNAGAAW; PAM sequence: CAAGAAA
ataatgagtaaaaaatgagt

SEQ ID NO: 11704 - DNA, 20 bp, Artificial Sequence
  Description of Artificial Sequence: Synthetic oligonucleotide
  Target: LAMA2; (-) strand; PAM type: NNAGAAW; PAM sequence: TAAGAAA
aatcatacacaattttaaaa

SEQ ID NO: 11705 - DNA, 20 bp, Artificial Sequence
  Description of Artificial Sequence: Synthetic oligonucleotide
  Target: LAMA2; (-) strand; PAM type: NNAGAAW; PAM sequence: GTAGAAA
tatataaatatcacccattt

SEQ ID NO: 11706 - DNA, 20 bp, Artificial Sequence
  Description of Artificial Sequence: Synthetic oligonucleotide
  Target: LAMA2; (-) strand; PAM type: NNAGAAW; PAM sequence: TGAGAAT
acattttaaaaatatatttt

SEQ ID NO: 11707 - DNA, 20 bp, Artificial Sequence
  Description of Artificial Sequence: Synthetic oligonucleotide
  Target: LAMA2; (-) strand; PAM type: NNAGAAW; PAM sequence: TCAGAAT
tataataatgatgtaaattc

SEQ ID NO: 11708 - DNA, 20 bp, Artificial Sequence
  Description of Artificial Sequence: Synthetic oligonucleotide
  Target: LAMA2; (-) strand; PAM type: NNAGAAW; PAM sequence: GAAGAAA
tttatgtaaagtgagtaaca

SEQ ID NO: 11709 - DNA, 20 bp, Artificial Sequence
  Description of Artificial Sequence: Synthetic oligonucleotide
  Target: LAMA2; (-) strand; PAM type: NNAGAAW; PAM sequence: AAAGAAA
aaattaaaaatattttcaat

SEQ ID NO: 11710 - DNA, 20 bp, Artificial Sequence
  Description of Artificial Sequence: Synthetic oligonucleotide
  Target: LAMA2; (-) strand; PAM type: NNAGAAW; PAM sequence: ACAGAAA
aatcattaccataatggaac

SEQ ID NO: 11711 - DNA, 20 bp, Artificial Sequence
  Description of Artificial Sequence: Synthetic oligonucleotide
  Target: LAMA2; (-) strand; PAM type: NNAGAAW; PAM sequence: TAAGAAA
tttattagttaataattgtt

SEQ ID NO: 11712 - DNA, 20 bp, Artificial Sequence
  Description of Artificial Sequence: Synthetic oligonucleotide
  Target: LAMA2; (-) strand; PAM type: NNAGAAW; PAM sequence: AGAGAAT
aatagtataggccagagaaa

SEQ ID NO: 11713 - DNA, 20 bp, Artificial Sequence
  Description of Artificial Sequence: Synthetic oligonucleotide
  Target: LAMA2; (-) strand; PAM type: NNAGAAW; PAM sequence: AGAGAAA
ttattgtaatagtataggcc

SEQ ID NO: 11714 - DNA, 20 bp, Artificial Sequence
  Description of Artificial Sequence: Synthetic oligonucleotide
  Target: LAMA2; (-) strand; PAM type: NNAGAAW; PAM sequence: GTAGAAA
acaggaatgtagaagatata

SEQ ID NO: 11715 - DNA, 20 bp, Artificial Sequence
  Description of Artificial Sequence: Synthetic oligonucleotide
  Target: LAMA2; (-) strand; PAM type: NNAGAAW; PAM sequence: CCAGAAA
actggctcttgcaccttcat

SEQ ID NO: 11716 - DNA, 20 bp, Artificial Sequence
  Description of Artificial Sequence: Synthetic oligonucleotide
  Target: LAMA2; (-) strand; PAM type: NNAGAAW; PAM sequence: AAAGAAT
tttggtagtttgtgattttc

SEQ ID NO: 11717 - DNA, 20 bp, Artificial Sequence
  Description of Artificial Sequence: Synthetic oligonucleotide
  Target: LAMA2; (-) strand; PAM type: NNAGAAW; PAM sequence: GTAGAAT
atcagagtaatactggcctc

SEQ ID NO: 11718 - DNA, 20 bp, Artificial Sequence
  Description of Artificial Sequence: Synthetic oligonucleotide
  Target: LAMA2; (-) strand; PAM type: NNAGAAW; PAM sequence: GTAGAAT
atggatattcaattcctcta

SEQ ID NO: 11719 - DNA, 20 bp, Artificial Sequence
  Description of Artificial Sequence: Synthetic oligonucleotide
  Target: LAMA2; (-) strand; PAM type: NNAGAAW; PAM sequence: TAAGAAT
tatgcttttggtggtgtatc

SEQ ID NO: 11720 - DNA, 20 bp, Artificial Sequence
  Description of Artificial Sequence: Synthetic oligonucleotide
  Target: LAMA2; (-) strand; PAM type: NNAGAAW; PAM sequence: TAAGAAA
gtaatttatgtttacgtttt

SEQ ID NO: 11721 - DNA, 20 bp, Artificial Sequence
  Description of Artificial Sequence: Synthetic oligonucleotide
  Target: LAMA2; (-) strand; PAM type: NNAGAAW; PAM sequence: GCAGAAT
cttggagtaaatacacagaa

SEQ ID NO: 11722 - DNA, 20 bp, Artificial Sequence
  Description of Artificial Sequence: Synthetic oligonucleotide
  Target: LAMA2; (-) strand; PAM type: NNAGAAW; PAM sequence: ATAGAAT
tcactgtaggtttgcatttc

SEQ ID NO: 11723 - DNA, 20 bp, Artificial Sequence
  Description of Artificial Sequence: Synthetic oligonucleotide
  Target: LAMA2; (-) strand; PAM type: NNAGAAW; PAM sequence: AGAGAAT
accattaccacaaccatggt

SEQ ID NO: 11724 - DNA, 20 bp, Artificial Sequence
  Description of Artificial Sequence: Synthetic oligonucleotide
  Target: LAMA2; (-) strand; PAM type: NNAGAAW; PAM sequence: AGAGAAA
aaataaatggaattggtaag

SEQ ID NO: 11725 - DNA, 20 bp, Artificial Sequence
  Description of Artificial Sequence: Synthetic oligonucleotide
  Target: LAMA2; (-) strand; PAM type: NNAGAAW; PAM sequence: AAAGAAA
aaaagtaaaaagaatttaaa

SEQ ID NO: 11726 - DNA, 20 bp, Artificial Sequence
  Description of Artificial Sequence: Synthetic oligonucleotide
  Target: LAMA2; (-) strand; PAM type: NNAGAAW; PAM sequence: AAAGAAT
caaaaattaaaaaaaagtaa

SEQ ID NO: 11727 - DNA, 20 bp, Artificial Sequence
  Description of Artificial Sequence: Synthetic oligonucleotide
  Target: LAMA2; (-) strand; PAM type: NNAGAAW; PAM sequence: AGAGAAA
gtgggaggagggagagaaac

SEQ ID NO: 11728 - DNA, 20 bp, Artificial Sequence
  Description of Artificial Sequence: Synthetic oligonucleotide
  Target: LAMA2; (-) strand; PAM type: NNAGAAW; PAM sequence: AGAGAAA
ggtagctagtgggaggaggg

SEQ ID NO: 11729 - DNA, 20 bp, Artificial Sequence
  Description of Artificial Sequence: Synthetic oligonucleotide
  Target: LAMA2; (-) strand; PAM type: NNAGAAW; PAM sequence: ACAGAAA
cttagcaaactaatgcagga

SEQ ID NO: 11730 - DNA, 20 bp, Artificial Sequence
  Description of Artificial Sequence: Synthetic oligonucleotide
  Target: LAMA2; (-) strand; PAM type: NNAGAAW; PAM sequence: TAAGAAA
aaaggttgatttgctgagca

SEQ ID NO: 11731 - DNA, 20 bp, Artificial Sequence
  Description of Artificial Sequence: Synthetic oligonucleotide
  Target: LAMA2; (-) strand; PAM type: NNAGAAW; PAM sequence: AGAGAAA
gaggcacaggattaaagtgg

SEQ ID NO: 11732 - DNA, 20 bp, Artificial Sequence
  Description of Artificial Sequence: Synthetic oligonucleotide
  Target: LAMA2; (-) strand; PAM type: NNAGAAW; PAM sequence: TAAGAAT
ggagtgtgaatacctttttg

SEQ ID NO: 11733 - DNA, 20 bp, Artificial Sequence
  Description of Artificial Sequence: Synthetic oligonucleotide
  Target: LAMA2; (-) strand; PAM type: NNAGAAW; PAM sequence: AAAGAAA
ctagatgaaactagacaaaa

SEQ ID NO: 11734 - DNA, 20 bp, Artificial Sequence
  Description of Artificial Sequence: Synthetic oligonucleotide
  Target: LAMA2; (-) strand; PAM type: NNAGAAW; PAM sequence: AGAGAAA
tccgacaatgagcaaagaga

SEQ ID NO: 11735 - DNA, 20 bp, Artificial Sequence
  Description of Artificial Sequence: Synthetic oligonucleotide
  Target: LAMA2; (-) strand; PAM type: NNAGAAW; PAM sequence: AAAGAAT
agagacaggaaattacaatg

SEQ ID NO: 11736 - DNA, 20 bp, Artificial Sequence
  Description of Artificial Sequence: Synthetic oligonucleotide
  Target: LAMA2; (-) strand; PAM type: NNAGAAW; PAM sequence: CCAGAAA
caaccttggcaaattattct

SEQ ID NO: 11737 - DNA, 20 bp, Artificial Sequence
  Description of Artificial Sequence: Synthetic oligonucleotide
  Target: LAMA2; (-) strand; PAM type: NNAGAAW; PAM sequence: CTAGAAA
cacattatttgaacattaaa

SEQ ID NO: 11738 - DNA, 20 bp, Artificial Sequence
  Description of Artificial Sequence: Synthetic oligonucleotide
  Target: LAMA2; (-) strand; PAM type: NNAGAAW; PAM sequence: ATAGAAT
aaaaaggtgacacaaagtta

SEQ ID NO: 11739 - DNA, 20 bp, Artificial Sequence
  Description of Artificial Sequence: Synthetic oligonucleotide
  Target: LAMA2; (-) strand; PAM type: NNAGAAW; PAM sequence: TGAGAAA
gtatctcccaagtgctgaaa

SEQ ID NO: 11740 - DNA, 20 bp, Artificial Sequence
  Description of Artificial Sequence: Synthetic oligonucleotide
  Target: LAMA2; (-) strand; PAM type: NNAGAAW; PAM sequence: GGAGAAA
tggcattccacagaggaaaa

SEQ ID NO: 11741 - DNA, 20 bp, Artificial Sequence
  Description of Artificial Sequence: Synthetic oligonucleotide
  Target: LAMA2; (-) strand; PAM type: NNAGAAW; PAM sequence: AGAGAAA
tcaatgtttagggagtaggc

SEQ ID NO: 11742 - DNA, 20 bp, Artificial Sequence
  Description of Artificial Sequence: Synthetic oligonucleotide
  Target: LAMA2; (-) strand; PAM type: NNAGAAW; PAM sequence: ATAGAAT
aagagctctgggctgcagat

SEQ ID NO: 11743 - DNA, 20 bp, Artificial Sequence
  Description of Artificial Sequence: Synthetic oligonucleotide
  Target: LAMA2; (-) strand; PAM type: NNAGAAW; PAM sequence: ATAGAAT
aatgtcatacatctaaaacc

SEQ ID NO: 11744 - DNA, 20 bp, Artificial Sequence
  Description of Artificial Sequence: Synthetic oligonucleotide
  Target: LAMA2; (-) strand; PAM type: NNAGAAW; PAM sequence: ACAGAAA
cgaggacctgttgcctgtgg

SEQ ID NO: 11745 - DNA, 20 bp, Artificial Sequence
  Description of Artificial Sequence: Synthetic oligonucleotide
  Target: LAMA2; (-) strand; PAM type: NNAGAAW; PAM sequence: TAAGAAT
tgctaacttcttggcttcgt

SEQ ID NO: 11746 - DNA, 20 bp, Artificial Sequence
  Description of Artificial Sequence: Synthetic oligonucleotide
  Target: LAMA2; (-) strand; PAM type: NNAGAAW; PAM sequence: ATAGAAT
ttacattctccaatagtgtg

SEQ ID NO: 11747 - DNA, 20 bp, Artificial Sequence
  Description of Artificial Sequence: Synthetic oligonucleotide
  Target: LAMA2; (-) strand; PAM type: NNAGAAW; PAM sequence: AAAGAAA
atcatcacaaaaatcatgct

SEQ ID NO: 11748 - DNA, 20 bp, Artificial Sequence
  Description of Artificial Sequence: Synthetic oligonucleotide
  Target: LAMA2; (-) strand; PAM type: NNAGAAW; PAM sequence: ATAGAAT
ttacttgcattaaatagatt

SEQ ID NO: 11749 - DNA, 20 bp, Artificial Sequence
  Description of Artificial Sequence: Synthetic oligonucleotide
  Target: LAMA2; (-) strand; PAM type: NNAGAAW; PAM sequence: TGAGAAA
acaacattttgtaaaactag

SEQ ID NO: 11750 - DNA, 20 bp, Artificial Sequence
  Description of Artificial Sequence: Synthetic oligonucleotide
  Target: LAMA2; (-) strand; PAM type: NNAGAAW; PAM sequence: ATAGAAA
gatataggtgaagtgatgct

SEQ ID NO: 11751 - DNA, 20 bp, Artificial Sequence
  Description of Artificial Sequence: Synthetic oligonucleotide
  Target: LAMA2; (-) strand; PAM type: NNAGAAW; PAM sequence: CTAGAAT
tgcctcggcctccctaagca

SEQ ID NO: 11752 - DNA, 20 bp, Artificial Sequence
  Description of Artificial Sequence: Synthetic oligonucleotide
  Target: LAMA2; (-) strand; PAM type: NNAGAAW; PAM sequence: AAAGAAA
agcgagacttcatctcagaa

SEQ ID NO: 11753 - DNA, 20 bp, Artificial Sequence
  Description of Artificial Sequence: Synthetic oligonucleotide
  Target: LAMA2; (-) strand; PAM type: NNAGAAW; PAM sequence: TCAGAAA
tgacagagcgagacttcatc

SEQ ID NO: 11754 - DNA, 20 bp, Artificial Sequence
  Description of Artificial Sequence: Synthetic oligonucleotide
  Target: LAMA2; (-) strand; PAM type: NNAGAAW; PAM sequence: CAAGAAA
cctgaatcagaaataaaata

SEQ ID NO: 11755 - DNA, 20 bp, Artificial Sequence
  Description of Artificial Sequence: Synthetic oligonucleotide
  Target: LAMA2; (-) strand; PAM type: NNAGAAW; PAM sequence: TCAGAAA
tgtgcattttgattcctgaa

SEQ ID NO: 11756 - DNA, 20 bp, Artificial Sequence
  Description of Artificial Sequence: Synthetic oligonucleotide
  Target: LAMA2; (-) strand; PAM type: NNAGAAW; PAM sequence: AGAGAAA
ggtagggaatgaaactgaag

SEQ ID NO: 11757 - DNA, 20 bp, Artificial Sequence
  Description of Artificial Sequence: Synthetic oligonucleotide
  Target: LAMA2; (-) strand; PAM type: NNAGAAW; PAM sequence: ACAGAAA
ggtagggagacagatatgag

SEQ ID NO: 11758 - DNA, 20 bp, Artificial Sequence
  Description of Artificial Sequence: Synthetic oligonucleotide
  Target: LAMA2; (-) strand; PAM type: NNAGAAW; PAM sequence: GAAGAAA
aggatggggcattccaaggg

SEQ ID NO: 11759 - DNA, 20 bp, Artificial Sequence
  Description of Artificial Sequence: Synthetic oligonucleotide
  Target: LAMA2; (-) strand; PAM type: NNAGAAW; PAM sequence: GAAGAAA
aactaaatcctgaaggtctg

SEQ ID NO: 11760 - DNA, 20 bp, Artificial Sequence
  Description of Artificial Sequence: Synthetic oligonucleotide
  Target: LAMA2; (-) strand; PAM type: NNAGAAW; PAM sequence: TGAGAAA
gtggtggtttgacaagccta

SEQ ID NO: 11761 - DNA, 20 bp, Artificial Sequence
  Description of Artificial Sequence: Synthetic oligonucleotide
  Target: LAMA2; (-) strand; PAM type: NNAGAAW; PAM sequence: CTAGAAA
gctagtcactattatgcata

SEQ ID NO: 11762 - DNA, 20 bp, Artificial Sequence
  Description of Artificial Sequence: Synthetic oligonucleotide
  Target: LAMA2; (-) strand; PAM type: NNAGAAW; PAM sequence: GAAGAAT
tcacctgtaatacacagcct

SEQ ID NO: 11763 - DNA, 20 bp, Artificial Sequence
  Description of Artificial Sequence: Synthetic oligonucleotide
  Target: LAMA2; (-) strand; PAM type: NNAGAAW; PAM sequence: GCAGAAT
taataagaggtacctgctga

SEQ ID NO: 11764 - DNA, 20 bp, Artificial Sequence
  Description of Artificial Sequence: Synthetic oligonucleotide
  Target: LAMA2; (-) strand; PAM type: NNAGAAW; PAM sequence: CAAGAAA
agagaaatgtcataatgtag

SEQ ID NO: 11765 - DNA, 20 bp, Artificial Sequence
  Description of Artificial Sequence: Synthetic oligonucleotide
  Target: LAMA2; (-) strand; PAM type: NNAGAAW; PAM sequence: AGAGAAA
tccgtaattggccacaaatc

SEQ ID NO: 11766 - DNA, 20 bp, Artificial Sequence
  Description of Artificial Sequence: Synthetic oligonucleotide
  Target: LAMA2; (-) strand; PAM type: NNAGAAW; PAM sequence: AGAGAAA
taactccaggcaccatagag

SEQ ID NO: 11767 - DNA, 20 bp, Artificial Sequence
  Description of Artificial Sequence: Synthetic oligonucleotide
  Target: LAMA2; (-) strand; PAM type: NNAGAAW; PAM sequence: TTAGAAA
gaattgaaccaagcaacaaa

SEQ ID NO: 11768 - DNA, 20 bp, Artificial Sequence
  Description of Artificial Sequence: Synthetic oligonucleotide
  Target: LAMA2; (-) strand; PAM type: NNAGAAW; PAM sequence: TGAGAAA
cttgcctcgtacacattcca

SEQ ID NO: 11769 - DNA, 20 bp, Artificial Sequence
  Description of Artificial Sequence: Synthetic oligonucleotide
  Target: LAMA2; (-) strand; PAM type: NNAGAAW; PAM sequence: TCAGAAT
agtgtattacatccatgatc

SEQ ID NO: 11770 - DNA, 20 bp, Artificial Sequence
  Description of Artificial Sequence: Synthetic oligonucleotide
  Target: LAMA2; (-) strand; PAM type: NNAGAAW; PAM sequence: ACAGAAT
ttaaaatataaaataataac

SEQ ID NO: 11771 - DNA, 20 bp, Artificial Sequence
  Description of Artificial Sequence: Synthetic oligonucleotide
  Target: LAMA2; (-) strand; PAM type: NNAGAAW; PAM sequence: ATAGAAT
acttacttgcaaaaaacgcc

SEQ ID NO: 11772 - DNA, 20 bp, Artificial Sequence
  Description of Artificial Sequence: Synthetic oligonucleotide
  Target: LAMA2; (-) strand; PAM type: NNAGAAW; PAM sequence: CAAGAAA
gcttgttttcttttgcccag

SEQ ID NO: 11773 - DNA, 20 bp, Artificial Sequence
  Description of Artificial Sequence: Synthetic oligonucleotide
  Target: LAMA2; (-) strand; PAM type: NNAGAAW; PAM sequence: TAAGAAA
accctcttctgatctgaaag

SEQ ID NO: 11774 - DNA, 20 bp, Artificial Sequence
  Description of Artificial Sequence: Synthetic oligonucleotide
  Target: LAMA2; (-) strand; PAM type: NNAGAAW; PAM sequence: GGAGAAA
ttcacagggagtcaggttat

SEQ ID NO: 11775 - DNA, 20 bp, Artificial Sequence
  Description of Artificial Sequence: Synthetic oligonucleotide
  Target: LAMA2; (-) strand; PAM type: NNAGAAW; PAM sequence: TTAGAAA
acacccaatctttgtacttc

SEQ ID NO: 11776 - DNA, 20 bp, Artificial Sequence
  Description of Artificial Sequence: Synthetic oligonucleotide
  Target: LAMA2; (-) strand; PAM type: NNAGAAW; PAM sequence: GAAGAAT
aagaagagcacccgagtgag

SEQ ID NO: 11777 - DNA, 20 bp, Artificial Sequence
  Description of Artificial Sequence: Synthetic oligonucleotide
  Target: LAMA2; (-) strand; PAM type: NNAGAAW; PAM sequence: AAAGAAT
gggcacaaataaatgccctg

SEQ ID NO: 11778 - DNA, 20 bp, Artificial Sequence
  Description of Artificial Sequence: Synthetic oligonucleotide
  Target: LAMA2; (-) strand; PAM type: NNAGAAW; PAM sequence: TGAGAAA
gaaataaactgggagatgta

SEQ ID NO: 11779 - DNA, 20 bp, Artificial Sequence
  Description of Artificial Sequence: Synthetic oligonucleotide
  Target: LAMA2; (-) strand; PAM type: NNAGAAW; PAM sequence: TGAGAAA
cttccttcatgtgactgata

SEQ ID NO: 11780 - DNA, 20 bp, Artificial Sequence
  Description of Artificial Sequence: Synthetic oligonucleotide
  Target: LAMA2; (-) strand; PAM type: NNAGAAW; PAM sequence: AAAGAAA
cctttttacatatggcaaat

SEQ ID NO: 11781 - DNA, 20 bp, Artificial Sequence
  Description of Artificial Sequence: Synthetic oligonucleotide
  Target: LAMA2; (-) strand; PAM type: NNAGAAW; PAM sequence: CCAGAAT
atggcacaagatagatatat

SEQ ID NO: 11782 - DNA, 20 bp, Artificial Sequence
  Description of Artificial Sequence: Synthetic oligonucleotide
  Target: LAMA2; (-) strand; PAM type: NNAGAAW; PAM sequence: CTAGAAT
tagagtagaagaaaaatgtg

SEQ ID NO: 11783 - DNA, 20 bp, Artificial Sequence
  Description of Artificial Sequence: Synthetic oligonucleotide
  Target: LAMA2; (-) strand; PAM type: NNAGAAW; PAM sequence: GAAGAAA
catctcctcctcatagagta

SEQ ID NO: 11784 - DNA, 20 bp, Artificial Sequence
  Description of Artificial Sequence: Synthetic oligonucleotide
  Target: LAMA2; (-) strand; PAM type: NNAGAAW; PAM sequence: GGAGAAT
tttttttacttgtgatttct

SEQ ID NO: 11785 - DNA, 20 bp, Artificial Sequence
  Description of Artificial Sequence: Synthetic oligonucleotide
  Target: LAMA2; (-) strand; PAM type: NNAGAAW; PAM sequence: AAAGAAA
catagaattatcgatagtta

SEQ ID NO: 11786 - DNA, 20 bp, Artificial Sequence
  Description of Artificial Sequence: Synthetic oligonucleotide
  Target: LAMA2; (-) strand; PAM type: NNAGAAW; PAM sequence: ATAGAAT
attgtaacaagggtgaagac

SEQ ID NO: 11787 - DNA, 20 bp, Artificial Sequence
  Description of Artificial Sequence: Synthetic oligonucleotide
  Target: LAMA2; (-) strand; PAM type: NNAGAAW; PAM sequence: TAAGAAA
agtgtatccataactaaaag

SEQ ID NO: 11788 - DNA, 20 bp, Artificial Sequence
  Description of Artificial Sequence: Synthetic oligonucleotide
  Target: LAMA2; (-) strand; PAM type: NNAGAAW; PAM sequence: CTAGAAA
aaaataatagcgaggaaaac

SEQ ID NO: 11789 - DNA, 20 bp, Artificial Sequence
  Description of Artificial Sequence: Synthetic oligonucleotide
  Target: LAMA2; (-) strand; PAM type: NNAGAAW; PAM sequence: GAAGAAT
atgagtagaagctattcaga

SEQ ID NO: 11790 - DNA, 20 bp, Artificial Sequence
  Description of Artificial Sequence: Synthetic oligonucleotide
  Target: LAMA2; (-) strand; PAM type: NNAGAAW; PAM sequence: ATAGAAT
aacattttgtagctttggtg

SEQ ID NO: 11791 - DNA, 20 bp, Artificial Sequence
  Description of Artificial Sequence: Synthetic oligonucleotide
  Target: LAMA2; (-) strand; PAM type: NNAGAAW; PAM sequence: GAAGAAT
attattcagaagactgacct

SEQ ID NO: 11792 - DNA, 20 bp, Artificial Sequence
  Description of Artificial Sequence: Synthetic oligonucleotide
  Target: LAMA2; (-) strand; PAM type: NNAGAAW; PAM sequence: TGAGAAA
agcaagatattcatgtatgg

SEQ ID NO: 11793 - DNA, 20 bp, Artificial Sequence
  Description of Artificial Sequence: Synthetic oligonucleotide
  Target: LAMA2; (-) strand; PAM type: NNAGAAW; PAM sequence: GTAGAAA
acacttaagaaaatggaact

SEQ ID NO: 11794 - DNA, 20 bp, Artificial Sequence
  Description of Artificial Sequence: Synthetic oligonucleotide
  Target: LAMA2; (-) strand; PAM type: NNAGAAW; PAM sequence: TAAGAAA
gcttgaaagtcttcaacact

SEQ ID NO: 11795 - DNA, 20 bp, Artificial Sequence
  Description of Artificial Sequence: Synthetic oligonucleotide
  Target: LAMA2; (-) strand; PAM type: NNAGAAW; PAM sequence: TGAGAAT
tgatatctatacaaattctt

SEQ ID NO: 11796 - DNA, 20 bp, Artificial Sequence
  Description of Artificial Sequence: Synthetic oligonucleotide
  Target: LAMA2; (-) strand; PAM type: NNAGAAW; PAM sequence: GAAGAAT
ctttgttggcctgcatctgt

SEQ ID NO: 11797 - DNA, 20 bp, Artificial Sequence
  Description of Artificial Sequence: Synthetic oligonucleotide
  Target: LAMA2; (-) strand; PAM type: NNAGAAW; PAM sequence: AAAGAAT
ggtgggagagaatacgcccc

SEQ ID NO: 11798 - DNA, 20 bp, Artificial Sequence
  Description of Artificial Sequence: Synthetic oligonucleotide
  Target: LAMA2; (-) strand; PAM type: NNAGAAW; PAM sequence: AGAGAAT
acccagagaaggcaggtggg

SEQ ID NO: 11799 - DNA, 20 bp, Artificial Sequence
  Description of Artificial Sequence: Synthetic oligonucleotide
  Target: LAMA2; (-) strand; PAM type: NNAGAAW; PAM sequence: GAAGAAT
acttaaaccacctaactggg

SEQ ID NO: 11800 - DNA, 20 bp, Artificial Sequence
  Description of Artificial Sequence: Synthetic oligonucleotide
  Target: LAMA2; (-) strand; PAM type: NNAGAAW; PAM sequence: GTAGAAA
tttacagtaattaatagtgg

SEQ ID NO: 11801 - DNA, 20 bp, Artificial Sequence
  Description of Artificial Sequence: Synthetic oligonucleotide
  Target: LAMA2; (-) strand; PAM type: NNAGAAW; PAM sequence: ATAGAAA
ttggtttggcaattctactg

SEQ ID NO: 11802 - DNA, 20 bp, Artificial Sequence
  Description of Artificial Sequence: Synthetic oligonucleotide
  Target: LAMA2; (-) strand; PAM type: NNAGAAW; PAM sequence: TTAGAAT
agagcaagttaataagttta

SEQ ID NO: 11803 - DNA, 20 bp, Artificial Sequence
  Description of Artificial Sequence: Synthetic oligonucleotide
  Target: LAMA2; (-) strand; PAM type: NNAGAAW; PAM sequence: TAAGAAT
taaggataatgaggaaaata

SEQ ID NO: 11804 - DNA, 20 bp, Artificial Sequence
  Description of Artificial Sequence: Synthetic oligonucleotide
  Target: LAMA2; (-) strand; PAM type: NNAGAAW; PAM sequence: GTAGAAT
ccaagttgtaattattcaga

SEQ ID NO: 11805 - DNA, 20 bp, Artificial Sequence
  Description of Artificial Sequence: Synthetic oligonucleotide
  Target: LAMA2; (-) strand; PAM type: NNAGAAW; PAM sequence: ACAGAAA
taaagaaattggtcacagtt

SEQ ID NO: 11806 - DNA, 20 bp, Artificial Sequence
  Description of Artificial Sequence: Synthetic oligonucleotide
  Target: LAMA2; (-) strand; PAM type: NNAGAAW; PAM sequence: AAAGAAA
attttctcctttgttgtctt

SEQ ID NO: 11807 - DNA, 20 bp, Artificial Sequence
  Description of Artificial Sequence: Synthetic oligonucleotide
  Target: LAMA2; (-) strand; PAM type: NNAGAAW; PAM sequence: CAAGAAA
gaggaccactgagaaaggac

SEQ ID NO: 11808 - DNA, 20 bp, Artificial Sequence
  Description of Artificial Sequence: Synthetic oligonucleotide
  Target: LAMA2; (-) strand; PAM type: NNAGAAW; PAM sequence: TGAGAAA
ccccaagtgaggaggaccac

SEQ ID NO: 11809 - DNA, 20 bp, Artificial Sequence
  Description of Artificial Sequence: Synthetic oligonucleotide
  Target: LAMA2; (-) strand; PAM type: NNAGAAW; PAM sequence: ACAGAAA
taattgtttaaattagctcc

SEQ ID NO: 11810 - DNA, 20 bp, Artificial Sequence
  Description of Artificial Sequence: Synthetic oligonucleotide
  Target: LAMA2; (-) strand; PAM type: NNAGAAW; PAM sequence: TTAGAAA
tccaatctgttgatataagt

SEQ ID NO: 11811 - DNA, 20 bp, Artificial Sequence
  Description of Artificial Sequence: Synthetic oligonucleotide
  Target: LAMA2; (-) strand; PAM type: NNAGAAW; PAM sequence: AAAGAAA
aatttgaaatcattaagggg

SEQ ID NO: 11812 - DNA, 20 bp, Artificial Sequence
  Description of Artificial Sequence: Synthetic oligonucleotide
  Target: LAMA2; (-) strand; PAM type: NNAGAAW; PAM sequence: AAAGAAA
ataatagtcatttttctcat

SEQ ID NO: 11813 - DNA, 20 bp, Artificial Sequence
  Description of Artificial Sequence: Synthetic oligonucleotide
  Target: LAMA2; (-) strand; PAM type: NNAGAAW; PAM sequence: AAAGAAA
tttggacaaaaatacacatt

SEQ ID NO: 11814 - DNA, 20 bp, Artificial Sequence
  Description of Artificial Sequence: Synthetic oligonucleotide
  Target: LAMA2; (-) strand; PAM type: NNAGAAW; PAM sequence: GCAGAAT
atctcagatatgattgttta

SEQ ID NO: 11815 - DNA, 20 bp, Artificial Sequence
  Description of Artificial Sequence: Synthetic oligonucleotide
  Target: LAMA2; (-) strand; PAM type: NNAGAAW; PAM sequence: AAAGAAT
cctatagagaagaaacctcc

SEQ ID NO: 11816 - DNA, 20 bp, Artificial Sequence
  Description of Artificial Sequence: Synthetic oligonucleotide
  Target: LAMA2; (-) strand; PAM type: NNAGAAW; PAM sequence: GAAGAAA
atttgatatcttcctataga

SEQ ID NO: 11817 - DNA, 20 bp, Artificial Sequence
  Description of Artificial Sequence: Synthetic oligonucleotide
  Target: LAMA2; (-) strand; PAM type: NNAGAAW; PAM sequence: CAAGAAA
aatataaaattaattaaaag

SEQ ID NO: 11818 - DNA, 20 bp, Artificial Sequence
  Description of Artificial Sequence: Synthetic oligonucleotide
  Target: LAMA2; (-) strand; PAM type: NNAGAAW; PAM sequence: TTAGAAA
ataatagtaccagaataatc

SEQ ID NO: 11819 - DNA, 20 bp, Artificial Sequence
  Description of Artificial Sequence: Synthetic oligonucleotide
  Target: LAMA2; (-) strand; PAM type: NNAGAAW; PAM sequence: CCAGAAT
ctaatttccagataatagta

SEQ ID NO: 11820 - DNA, 20 bp, Artificial Sequence
  Description of Artificial Sequence: Synthetic oligonucleotide
  Target: LAMA2; (-) strand; PAM type: NNAGAAW; PAM sequence: TAAGAAA
cacaaagaagaattcatgag

SEQ ID NO: 11821 - DNA, 20 bp, Artificial Sequence
  Description of Artificial Sequence: Synthetic oligonucleotide
  Target: LAMA2; (-) strand; PAM type: NNAGAAW; PAM sequence: GAAGAAT
tagtttctcattctcacaaa

SEQ ID NO: 11822 - DNA, 20 bp, Artificial Sequence
  Description of Artificial Sequence: Synthetic oligonucleotide
  Target: LAMA2; (-) strand; PAM type: NNAGAAW; PAM sequence: CAAGAAT
ataaaagggacttgagtatt

SEQ ID NO: 11823 - DNA, 20 bp, Artificial Sequence
  Description of Artificial Sequence: Synthetic oligonucleotide
  Target: LAMA2; (-) strand; PAM type: NNAGAAW; PAM sequence: TAAGAAT
atttcataaacaatacactg

SEQ ID NO: 11824 - DNA, 20 bp, Artificial Sequence
  Description of Artificial Sequence: Synthetic oligonucleotide
  Target: LAMA2; (-) strand; PAM type: NNAGAAW; PAM sequence: AGAGAAT
agaaattgaattttatcaag

SEQ ID NO: 11825 - DNA, 20 bp, Artificial Sequence
  Description of Artificial Sequence: Synthetic oligonucleotide
  Target: LAMA2; (-) strand; PAM type: NNAGAAW; PAM sequence: AAAGAAA
ttttgaaagttggaatagtt

SEQ ID NO: 11826 - DNA, 20 bp, Artificial Sequence
  Description of Artificial Sequence: Synthetic oligonucleotide
  Target: LAMA2; (-) strand; PAM type: NNAGAAW; PAM sequence: GTAGAAA
atttccagcagttctaatag

SEQ ID NO: 11827 - DNA, 20 bp, Artificial Sequence
  Description of Artificial Sequence: Synthetic oligonucleotide
  Target: LAMA2; (-) strand; PAM type: NNAGAAW; PAM sequence: AGAGAAA
acgtattttcattttaggat

SEQ ID NO: 11828 - DNA, 20 bp, Artificial Sequence
  Description of Artificial Sequence: Synthetic oligonucleotide
  Target: LAMA2; (-) strand; PAM type: NNAGAAW; PAM sequence: TGAGAAT
gctgaatgttaggcacacct

SEQ ID NO: 11829 - DNA, 20 bp, Artificial Sequence
  Description of Artificial Sequence: Synthetic oligonucleotide
  Target: LAMA2; (-) strand; PAM type: NNAGAAW; PAM sequence: CCAGAAA
aaatgctttatttttatttc

SEQ ID NO: 11830 - DNA, 20 bp, Artificial Sequence
  Description of Artificial Sequence: Synthetic oligonucleotide
  Target: LAMA2; (-) strand; PAM type: NNAGAAW; PAM sequence: TTAGAAA
ataagagatgtgaatagtct

SEQ ID NO: 11831 - DNA, 20 bp, Artificial Sequence
  Description of Artificial Sequence: Synthetic oligonucleotide
  Target: LAMA2; (-) strand; PAM type: NNAGAAW; PAM sequence: ATAGAAT
cagttgagaatcaatctaaa

SEQ ID NO: 11832 - DNA, 20 bp, Artificial Sequence
  Description of Artificial Sequence: Synthetic oligonucleotide
  Target: LAMA2; (-) strand; PAM type: NNAGAAW; PAM sequence: TGAGAAT
gacaaaaggccactaccagt

SEQ ID NO: 11833 - DNA, 20 bp, Artificial Sequence
  Description of Artificial Sequence: Synthetic oligonucleotide
  Target: LAMA2; (-) strand; PAM type: NNAGAAW; PAM sequence: ATAGAAA
tatttctatgttttagtaag

SEQ ID NO: 11834 - DNA, 20 bp, Artificial Sequence
  Description of Artificial Sequence: Synthetic oligonucleotide
  Target: LAMA2; (-) strand; PAM type: NNAGAAW; PAM sequence: AAAGAAT
cattaatactgtaacagtgg

SEQ ID NO: 11835 - DNA, 20 bp, Artificial Sequence
  Description of Artificial Sequence: Synthetic oligonucleotide
  Target: LAMA2; (-) strand; PAM type: NNAGAAW; PAM sequence: AGAGAAA
cataatctagttaattctat

SEQ ID NO: 11836 - DNA, 20 bp, Artificial Sequence
  Description of Artificial Sequence: Synthetic oligonucleotide
  Target: LAMA2; (-) strand; PAM type: NNAGAAW; PAM sequence: TCAGAAA
gttggggtgaatttgtgtta

SEQ ID NO: 11837 - DNA, 20 bp, Artificial Sequence
  Description of Artificial Sequence: Synthetic oligonucleotide
  Target: LAMA2; (-) strand; PAM type: NNAGAAW; PAM sequence: TGAGAAT
aaatataattctacagaagt

SEQ ID NO: 11838 - DNA, 20 bp, Artificial Sequence
  Description of Artificial Sequence: Synthetic oligonucleotide
  Target: LAMA2; (-) strand; PAM type: NNAGAAW; PAM sequence: TTAGAAT
aagtcagcaaagttgattgt

SEQ ID NO: 11839 - DNA, 20 bp, Artificial Sequence
  Description of Artificial Sequence: Synthetic oligonucleotide
  Target: LAMA2; (-) strand; PAM type: NNAGAAW; PAM sequence: TGAGAAA
atgatttagatttagattaa

SEQ ID NO: 11840 - DNA, 20 bp, Artificial Sequence
  Description of Artificial Sequence: Synthetic oligonucleotide
  Target: LAMA2; (-) strand; PAM type: NNAGAAW; PAM sequence: ATAGAAA
ctgaaatgcatgttatctgg

SEQ ID NO: 11841 - DNA, 20 bp, Artificial Sequence
  Description of Artificial Sequence: Synthetic oligonucleotide
  Target: LAMA2; (-) strand; PAM type: NNAGAAW; PAM sequence: GAAGAAT
gtgcagttcaatttcatttt

SEQ ID NO: 11842 - DNA, 20 bp, Artificial Sequence
  Description of Artificial Sequence: Synthetic oligonucleotide
  Target: LAMA2; (-) strand; PAM type: NNAGAAW; PAM sequence: ACAGAAT
cagccaaaaagttaaccttt

SEQ ID NO: 11843 - DNA, 20 bp, Artificial Sequence
  Description of Artificial Sequence: Synthetic oligonucleotide
  Target: LAMA2; (-) strand; PAM type: NNAGAAW; PAM sequence: AGAGAAT
taaaaattagcattgaaggt

SEQ ID NO: 11844 - DNA, 20 bp, Artificial Sequence
  Description of Artificial Sequence: Synthetic oligonucleotide
  Target: LAMA2; (-) strand; PAM type: NNAGAAW; PAM sequence: TTAGAAT
acacacgtgcacacacagaa

SEQ ID NO: 11845 - DNA, 20 bp, Artificial Sequence
  Description of Artificial Sequence: Synthetic oligonucleotide
  Target: LAMA2; (-) strand; PAM type: NNAGAAW; PAM sequence: ACAGAAT
gcatgcacacacgtgcacac

SEQ ID NO: 11846 - DNA, 20 bp, Artificial Sequence
  Description of Artificial Sequence: Synthetic oligonucleotide
  Target: LAMA2; (-) strand; PAM type: NNAGAAW; PAM sequence: ACAGAAT
actgacgataaaaagaactt

SEQ ID NO: 11847 - DNA, 20 bp, Artificial Sequence
  Description of Artificial Sequence: Synthetic oligonucleotide
  Target: LAMA2; (-) strand; PAM type: NNAGAAW; PAM sequence: CCAGAAT
gcaaatagtaatagaatata

SEQ ID NO: 11848 - DNA, 20 bp, Artificial Sequence
  Description of Artificial Sequence: Synthetic oligonucleotide
  Target: LAMA2; (-) strand; PAM type: NNAGAAW; PAM sequence: ATAGAAT
attattctatgcaaatagta

SEQ ID NO: 11849 - DNA, 20 bp, Artificial Sequence
  Description of Artificial Sequence: Synthetic oligonucleotide
  Target: LAMA2; (-) strand; PAM type: NNAGAAW; PAM sequence: AAAGAAT
attgttgtttataccagaca

SEQ ID NO: 11850 - DNA, 20 bp, Artificial Sequence
  Description of Artificial Sequence: Synthetic oligonucleotide
  Target: LAMA2; (-) strand; PAM type: NNAGAAW; PAM sequence: CTAGAAA
gctcattagcatgctacctt

SEQ ID NO: 11851 - DNA, 20 bp, Artificial Sequence
  Description of Artificial Sequence: Synthetic oligonucleotide
  Target: LAMA2; (-) strand; PAM type: NNAGAAW; PAM sequence: CAAGAAA
tcaagcctttcttgttcaaa

SEQ ID NO: 11852 - DNA, 20 bp, Artificial Sequence
  Description of Artificial Sequence: Synthetic oligonucleotide
  Target: LAMA2; (-) strand; PAM type: NNAGAAW; PAM sequence: ACAGAAT
gttccaaagttgttcaaaaa

SEQ ID NO: 11853 - DNA, 20 bp, Artificial Sequence
  Description of Artificial Sequence: Synthetic oligonucleotide
  Target: LAMA2; (-) strand; PAM type: NNAGAAW; PAM sequence: TAAGAAA
aaaaatataaactgatgaac

SEQ ID NO: 11854 - DNA, 20 bp, Artificial Sequence
  Description of Artificial Sequence: Synthetic oligonucleotide
  Target: LAMA2; (-) strand; PAM type: NNAGAAW; PAM sequence: AAAGAAT
tagatgtgaataaggaggaa

SEQ ID NO: 11855 - DNA, 20 bp, Artificial Sequence
  Description of Artificial Sequence: Synthetic oligonucleotide
  Target: LAMA2; (-) strand; PAM type: NNAGAAW; PAM sequence: TCAGAAT
gtttaagtcattccctcttc

SEQ ID NO: 11856 - DNA, 20 bp, Artificial Sequence
  Description of Artificial Sequence: Synthetic oligonucleotide
  Target: LAMA2; (-) strand; PAM type: NNAGAAW; PAM sequence: TCAGAAA
ttctccacttgatgactaag

SEQ ID NO: 11857 - DNA, 20 bp, Artificial Sequence
  Description of Artificial Sequence: Synthetic oligonucleotide
  Target: LAMA2; (-) strand; PAM type: NNAGAAW; PAM sequence: GAAGAAA
cactcagaaatctttacaat

SEQ ID NO: 11858 - DNA, 20 bp, Artificial Sequence
  Description of Artificial Sequence: Synthetic oligonucleotide
  Target: LAMA2; (-) strand; PAM type: NNAGAAW; PAM sequence: TCAGAAA
tgtgaggaggggaaaagcac

SEQ ID NO: 11859 - DNA, 20 bp, Artificial Sequence
  Description of Artificial Sequence: Synthetic oligonucleotide
  Target: LAMA2; (-) strand; PAM type: NNAGAAW; PAM sequence: TCAGAAA
cagatatccatatttacaaa

SEQ ID NO: 11860 - DNA, 20 bp, Artificial Sequence
  Description of Artificial Sequence: Synthetic oligonucleotide
  Target: LAMA2; (-) strand; PAM type: NNAGAAW; PAM sequence: AGAGAAA
atttcagaatcaacaaaccc

SEQ ID NO: 11861 - DNA, 20 bp, Artificial Sequence
  Description of Artificial Sequence: Synthetic oligonucleotide
  Target: LAMA2; (-) strand; PAM type: NNAGAAW; PAM sequence: TCAGAAT
ggagtatcagccactcaatt

SEQ ID NO: 11862 - DNA, 20 bp, Artificial Sequence
  Description of Artificial Sequence: Synthetic oligonucleotide
  Target: LAMA2; (-) strand; PAM type: NNAGAAW; PAM sequence: AAAGAAA
agatccttagtaagacatct

SEQ ID NO: 11863 - DNA, 20 bp, Artificial Sequence
  Description of Artificial Sequence: Synthetic oligonucleotide
  Target: LAMA2; (-) strand; PAM type: NNAGAAW; PAM sequence: TTAGAAT
tctgaaattcaaacatcctt

SEQ ID NO: 11864 - DNA, 20 bp, Artificial Sequence
  Description of Artificial Sequence: Synthetic oligonucleotide
  Target: LAMA2; (-) strand; PAM type: NNAGAAW; PAM sequence: AAAGAAA
tatgtcactcttgtaagagg

SEQ ID NO: 11865 - DNA, 20 bp, Artificial Sequence
  Description of Artificial Sequence: Synthetic oligonucleotide
  Target: LAMA2; (-) strand; PAM type: NNAGAAW; PAM sequence: GAAGAAA
atcaaaatactgtatctcta

SEQ ID NO: 11866 - DNA, 20 bp, Artificial Sequence
  Description of Artificial Sequence: Synthetic oligonucleotide
  Target: LAMA2; (-) strand; PAM type: NNAGAAW; PAM sequence: GAAGAAA
atcaaaatactatatctcta

SEQ ID NO: 11867 - DNA, 20 bp, Artificial Sequence
  Description of Artificial Sequence: Synthetic oligonucleotide
  Target: LAMA2; (-) strand; PAM type: NNAGAAW; PAM sequence: GAAGAAA
atcaaaatactgtatctcta

SEQ ID NO: 11868 - DNA, 20 bp, Artificial Sequence
  Description of Artificial Sequence: Synthetic oligonucleotide
  Target: LAMA2; (-) strand; PAM type: NNAGAAW; PAM sequence: TCAGAAA
ttctggttttgaatatactc

SEQ ID NO: 11869 - DNA, 20 bp, Artificial Sequence
  Description of Artificial Sequence: Synthetic oligonucleotide
  Target: LAMA2; (-) strand; PAM type: NNAGAAW; PAM sequence: ATAGAAA
cccagctctcacacattcat

SEQ ID NO: 11870 - DNA, 20 bp, Artificial Sequence
  Description of Artificial Sequence: Synthetic oligonucleotide
  Target: LAMA2; (-) strand; PAM type: NNAGAAW; PAM sequence: TGAGAAT
cttcccagtctccagaactg

SEQ ID NO: 11871 - DNA, 20 bp, Artificial Sequence
  Description of Artificial Sequence: Synthetic oligonucleotide
  Target: LAMA2; (-) strand; PAM type: NNAGAAW; PAM sequence: ATAGAAT
ggttacaaccaatctattgt

SEQ ID NO: 11872 - DNA, 20 bp, Artificial Sequence
  Description of Artificial Sequence: Synthetic oligonucleotide
  Target: LAMA2; (-) strand; PAM type: NNAGAAW; PAM sequence: GGAGAAT
ctactcaggaggctgaggca

SEQ ID NO: 11873 - DNA, 20 bp, Artificial Sequence
  Description of Artificial Sequence: Synthetic oligonucleotide
  Target: LAMA2; (-) strand; PAM type: NNAGAAW; PAM sequence: ACAGAAT
taatatgtgatcatttggtc

SEQ ID NO: 11874 - DNA, 20 bp, Artificial Sequence
  Description of Artificial Sequence: Synthetic oligonucleotide
  Target: LAMA2; (-) strand; PAM type: NNAGAAW; PAM sequence: GGAGAAT
ctactcaggaggctgagtca

SEQ ID NO: 11875 - DNA, 20 bp, Artificial Sequence
  Description of Artificial Sequence: Synthetic oligonucleotide
  Target: LAMA2; (-) strand; PAM type: NNAGAAW; PAM sequence: CAAGAAA
cataagaggatcaaagtgaa

SEQ ID NO: 11876 - DNA, 20 bp, Artificial Sequence
  Description of Artificial Sequence: Synthetic oligonucleotide
  Target: LAMA2; (-) strand; PAM type: NNAGAAW; PAM sequence: TGAGAAA
atcagagaagaccttggcat

SEQ ID NO: 11877 - DNA, 20 bp, Artificial Sequence
  Description of Artificial Sequence: Synthetic oligonucleotide
  Target: LAMA2; (-) strand; PAM type: NNAGAAW; PAM sequence: AGAGAAA
gagataaaaagagagaagca

SEQ ID NO: 11878 - DNA, 20 bp, Artificial Sequence
  Description of Artificial Sequence: Synthetic oligonucleotide
  Target: LAMA2; (-) strand; PAM type: NNAGAAW; PAM sequence: AGAGAAA
aagaggacactgtgttctgg

SEQ ID NO: 11879 - DNA, 20 bp, Artificial Sequence
  Description of Artificial Sequence: Synthetic oligonucleotide
  Target: LAMA2; (-) strand; PAM type: NNAGAAW; PAM sequence: CTAGAAA
cagactcccaacaagatagc

SEQ ID NO: 11880 - DNA, 20 bp, Artificial Sequence
  Description of Artificial Sequence: Synthetic oligonucleotide
  Target: LAMA2; (-) strand; PAM type: NNAGAAW; PAM sequence: GAAGAAA
tcatgtaatttgcacatttg

SEQ ID NO: 11881 - DNA, 20 bp, Artificial Sequence
  Description of Artificial Sequence: Synthetic oligonucleotide
  Target: LAMA2; (-) strand; PAM type: NNAGAAW; PAM sequence: AGAGAAT
aaatagttgcttggactcag

SEQ ID NO: 11882 - DNA, 20 bp, Artificial Sequence
  Description of Artificial Sequence: Synthetic oligonucleotide
  Target: LAMA2; (-) strand; PAM type: NNAGAAW; PAM sequence: TCAGAAT
ttctactcagaacatacatt

SEQ ID NO: 11883 - DNA, 20 bp, Artificial Sequence
  Description of Artificial Sequence: Synthetic oligonucleotide
  Target: LAMA2; (-) strand; PAM type: NNAGAAW; PAM sequence: GAAGAAT
tctagatgttctaacaataa

SEQ ID NO: 11884 - DNA, 20 bp, Artificial Sequence
  Description of Artificial Sequence: Synthetic oligonucleotide
  Target: LAMA2; (-) strand; PAM type: NNAGAAW; PAM sequence: TAAGAAA
ggttttggtatcacttaaac

SEQ ID NO: 11885 - DNA, 20 bp, Artificial Sequence
  Description of Artificial Sequence: Synthetic oligonucleotide
  Target: LAMA2; (-) strand; PAM type: NNAGAAW; PAM sequence: TGAGAAT
gtgattttacatggagctaa

SEQ ID NO: 11886 - DNA, 20 bp, Artificial Sequence
  Description of Artificial Sequence: Synthetic oligonucleotide
  Target: LAMA2; (-) strand; PAM type: NNAGAAW; PAM sequence: CTAGAAT
cacagaagagcagttttcca

SEQ ID NO: 11887 - DNA, 20 bp, Artificial Sequence
  Description of Artificial Sequence: Synthetic oligonucleotide
  Target: LAMA2; (-) strand; PAM type: NNAGAAW; PAM sequence: TCAGAAA
aagaaccaagagtaaatctc

SEQ ID NO: 11888 - DNA, 20 bp, Artificial Sequence
  Description of Artificial Sequence: Synthetic oligonucleotide
  Target: LAMA2; (-) strand; PAM type: NNAGAAW; PAM sequence: TCAGAAT
ttctaacttaatttgactct

SEQ ID NO: 11889 - DNA, 20 bp, Artificial Sequence
  Description of Artificial Sequence: Synthetic oligonucleotide
  Target: LAMA2; (-) strand; PAM type: NNAGAAW; PAM sequence: ACAGAAA
ggatctgaaagtataattta

SEQ ID NO: 11890 - DNA, 20 bp, Artificial Sequence
  Description of Artificial Sequence: Synthetic oligonucleotide
  Target: LAMA2; (-) strand; PAM type: NNAGAAW; PAM sequence: GAAGAAA
aaagtcaaatagttcaaatg

SEQ ID NO: 11891 - DNA, 20 bp, Artificial Sequence
  Description of Artificial Sequence: Synthetic oligonucleotide
  Target: LAMA2; (-) strand; PAM type: NNAGAAW; PAM sequence: CCAGAAT
attttatttcccaaattgac

SEQ ID NO: 11892 - DNA, 20 bp, Artificial Sequence
  Description of Artificial Sequence: Synthetic oligonucleotide
  Target: LAMA2; (-) strand; PAM type: NNAGAAW; PAM sequence: TCAGAAT
ataaaaacaaatatttaaat

SEQ ID NO: 11893 - DNA, 20 bp, Artificial Sequence
  Description of Artificial Sequence: Synthetic oligonucleotide
  Target: LAMA2; (-) strand; PAM type: NNAGAAW; PAM sequence: AGAGAAA
ccagaaagtcaatctagttc

SEQ ID NO: 11894 - DNA, 20 bp, Artificial Sequence
  Description of Artificial Sequence: Synthetic oligonucleotide
  Target: LAMA2; (-) strand; PAM type: NNAGAAW; PAM sequence: CCAGAAA
gcctttacgcatttctatag

SEQ ID NO: 11895 - DNA, 20 bp, Artificial Sequence
  Description of Artificial Sequence: Synthetic oligonucleotide
  Target: LAMA2; (-) strand; PAM type: NNAGAAW; PAM sequence: TCAGAAA
ccagacacaagatgaagggg

SEQ ID NO: 11896 - DNA, 20 bp, Artificial Sequence
  Description of Artificial Sequence: Synthetic oligonucleotide
  Target: LAMA2; (-) strand; PAM type: NNAGAAW; PAM sequence: TAAGAAT
atgctttggcttgtattgca

SEQ ID NO: 11897 - DNA, 20 bp, Artificial Sequence
  Description of Artificial Sequence: Synthetic oligonucleotide
  Target: LAMA2; (-) strand; PAM type: NNAGAAW; PAM sequence: TAAGAAT
ggtggacctggtatgttaca

SEQ ID NO: 11898 - DNA, 20 bp, Artificial Sequence
  Description of Artificial Sequence: Synthetic oligonucleotide
  Target: LAMA2; (-) strand; PAM type: NNAGAAW; PAM sequence: ATAGAAT
attgcattaaagctccaaag

SEQ ID NO: 11899 - DNA, 20 bp, Artificial Sequence
  Description of Artificial Sequence: Synthetic oligonucleotide
  Target: LAMA2; (-) strand; PAM type: NNAGAAW; PAM sequence: AGAGAAA
tgagaattgggaaaacaaga

SEQ ID NO: 11900 - DNA, 20 bp, Artificial Sequence
  Description of Artificial Sequence: Synthetic oligonucleotide
  Target: LAMA2; (-) strand; PAM type: NNAGAAW; PAM sequence: TGAGAAT
ctttgggtttaacagggagt

SEQ ID NO: 11901 - DNA, 20 bp, Artificial Sequence
  Description of Artificial Sequence: Synthetic oligonucleotide
  Target: LAMA2; (-) strand; PAM type: NNAGAAW; PAM sequence: ACAGAAT
aataaggttcaccttcttta

SEQ ID NO: 11902 - DNA, 20 bp, Artificial Sequence
  Description of Artificial Sequence: Synthetic oligonucleotide
  Target: LAMA2; (-) strand; PAM type: NNAGAAW; PAM sequence: AAAGAAT
aagtgaaatacatggtaaca

SEQ ID NO: 11903 - DNA, 20 bp, Artificial Sequence
  Description of Artificial Sequence: Synthetic oligonucleotide
  Target: LAMA2; (-) strand; PAM type: NNAGAAW; PAM sequence: ACAGAAT
ttcatttttaaattcaatta

SEQ ID NO: 11904 - DNA, 20 bp, Artificial Sequence
  Description of Artificial Sequence: Synthetic oligonucleotide
  Target: LAMA2; (-) strand; PAM type: NNAGAAW; PAM sequence: CTAGAAT
agtttgttgaagtagtcttc

SEQ ID NO: 11905 - DNA, 20 bp, Artificial Sequence
  Description of Artificial Sequence: Synthetic oligonucleotide
  Target: LAMA2; (-) strand; PAM type: NNAGAAW; PAM sequence: AGAGAAA
gacttgtttttaagaattta

SEQ ID NO: 11906 - DNA, 20 bp, Artificial Sequence
  Description of Artificial Sequence: Synthetic oligonucleotide
  Target: LAMA2; (-) strand; PAM type: NNAGAAW; PAM sequence: TAAGAAT
aaaatgcggagacttgtttt

SEQ ID NO: 11907 - DNA, 20 bp, Artificial Sequence
  Description of Artificial Sequence: Synthetic oligonucleotide
  Target: LAMA2; (-) strand; PAM type: NNAGAAW; PAM sequence: ACAGAAA
gaagtgaaggggaggaacat

SEQ ID NO: 11908 - DNA, 20 bp, Artificial Sequence
  Description of Artificial Sequence: Synthetic oligonucleotide
  Target: LAMA2; (-) strand; PAM type: NNAGAAW; PAM sequence: ACAGAAA
tgggtccatccagggctctc

SEQ ID NO: 11909 - DNA, 20 bp, Artificial Sequence
  Description of Artificial Sequence: Synthetic oligonucleotide
  Target: LAMA2; (-) strand; PAM type: NNAGAAW; PAM sequence: CTAGAAT
cattgcatttgcatccacat

SEQ ID NO: 11910 - DNA, 20 bp, Artificial Sequence
  Description of Artificial Sequence: Synthetic oligonucleotide
  Target: LAMA2; (-) strand; PAM type: NNAGAAW; PAM sequence: GAAGAAA
ttccaggttgaatcgtcaaa

SEQ ID NO: 11911 - DNA, 20 bp, Artificial Sequence
  Description of Artificial Sequence: Synthetic oligonucleotide
  Target: LAMA2; (-) strand; PAM type: NNAGAAW; PAM sequence: CAAGAAT
tgctcttgaggcaactaaaa

SEQ ID NO: 11912 - DNA, 20 bp, Artificial Sequence
  Description of Artificial Sequence: Synthetic oligonucleotide
  Target: LAMA2; (-) strand; PAM type: NNAGAAW; PAM sequence: TAAGAAT
atattaagtgcatcatccta

SEQ ID NO: 11913 - DNA, 20 bp, Artificial Sequence
  Description of Artificial Sequence: Synthetic oligonucleotide
  Target: LAMA2; (-) strand; PAM type: NNAGAAW; PAM sequence: TAAGAAA
tatacatttatatgaagttc

SEQ ID NO: 11914 - DNA, 20 bp, Artificial Sequence
  Description of Artificial Sequence: Synthetic oligonucleotide
  Target: LAMA2; (-) strand; PAM type: NNAGAAW; PAM sequence: AGAGAAA
tatttatctatctgtgaagg

SEQ ID NO: 11915 - DNA, 20 bp, Artificial Sequence
  Description of Artificial Sequence: Synthetic oligonucleotide
  Target: LAMA2; (-) strand; PAM type: NNAGAAW; PAM sequence: TAAGAAT
ttagcatataggaagagtta

SEQ ID NO: 11916 - DNA, 20 bp, Artificial Sequence
  Description of Artificial Sequence: Synthetic oligonucleotide
  Target: LAMA2; (-) strand; PAM type: NNAGAAW; PAM sequence: TGAGAAA
cttcttagcttcaagaattg

SEQ ID NO: 11917 - DNA, 20 bp, Artificial Sequence
  Description of Artificial Sequence: Synthetic oligonucleotide
  Target: LAMA2; (-) strand; PAM type: NNAGAAW; PAM sequence: CAAGAAT
gatctcagacttcttagctt

SEQ ID NO: 11918 - DNA, 20 bp, Artificial Sequence
  Description of Artificial Sequence: Synthetic oligonucleotide
  Target: LAMA2; (-) strand; PAM type: NNAGAAW; PAM sequence: TGAGAAT
cagattccttaactacagaa

SEQ ID NO: 11919 - DNA, 20 bp, Artificial Sequence
  Description of Artificial Sequence: Synthetic oligonucleotide
  Target: LAMA2; (-) strand; PAM type: NNAGAAW; PAM sequence: ACAGAAT
cttcttcagattccttaact

SEQ ID NO: 11920 - DNA, 20 bp, Artificial Sequence
  Description of Artificial Sequence: Synthetic oligonucleotide
  Target: LAMA2; (-) strand; PAM type: NNAGAAW; PAM sequence: ATAGAAT
tctttctttttctgagactg

SEQ ID NO: 11921 - DNA, 20 bp, Artificial Sequence
  Description of Artificial Sequence: Synthetic oligonucleotide
  Target: LAMA2; (-) strand; PAM type: NNAGAAW; PAM sequence: ATAGAAA
accatgtattgcacagccgc

SEQ ID NO: 11922 - DNA, 20 bp, Artificial Sequence
  Description of Artificial Sequence: Synthetic oligonucleotide
  Target: LAMA2; (-) strand; PAM type: NNAGAAW; PAM sequence: TAAGAAA
tttggtttttagaacacaca

SEQ ID NO: 11923 - DNA, 20 bp, Artificial Sequence
  Description of Artificial Sequence: Synthetic oligonucleotide
  Target: LAMA2; (-) strand; PAM type: NNAGAAW; PAM sequence: TCAGAAT
attgcctaattccaactttc

SEQ ID NO: 11924 - DNA, 20 bp, Artificial Sequence
  Description of Artificial Sequence: Synthetic oligonucleotide
  Target: LAMA2; (-) strand; PAM type: NNAGAAW; PAM sequence: AGAGAAT
tgatacacaatcatgaagaa

SEQ ID NO: 11925 - DNA, 20 bp, Artificial Sequence
  Description of Artificial Sequence: Synthetic oligonucleotide
  Target: LAMA2; (-) strand; PAM type: NNAGAAW; PAM sequence: GAAGAAA
taggcttgatacacaatcat

SEQ ID NO: 11926 - DNA, 20 bp, Artificial Sequence
  Description of Artificial Sequence: Synthetic oligonucleotide
  Target: LAMA2; (-) strand; PAM type: NNAGAAW; PAM sequence: AGAGAAT
cacagggcctggagtcaaat

SEQ ID NO: 11927 - DNA, 20 bp, Artificial Sequence
  Description of Artificial Sequence: Synthetic oligonucleotide
  Target: LAMA2; (-) strand; PAM type: NNAGAAW; PAM sequence: AAAGAAA
gatttcgagttcaagggaat

SEQ ID NO: 11928 - DNA, 20 bp, Artificial Sequence
  Description of Artificial Sequence: Synthetic oligonucleotide
  Target: LAMA2; (-) strand; PAM type: NNAGAAW; PAM sequence: GAAGAAA
agctttttcccctgagatca

SEQ ID NO: 11929 - DNA, 20 bp, Artificial Sequence
  Description of Artificial Sequence: Synthetic oligonucleotide
  Target: LAMA2; (-) strand; PAM type: NNAGAAW; PAM sequence: TGAGAAT
tctgtaatgtggaatttttg

SEQ ID NO: 11930 - DNA, 20 bp, Artificial Sequence
  Description of Artificial Sequence: Synthetic oligonucleotide
  Target: LAMA2; (-) strand; PAM type: NNAGAAW; PAM sequence: GCAGAAA
atccatgagagttattatca

SEQ ID NO: 11931 - DNA, 20 bp, Artificial Sequence
  Description of Artificial Sequence: Synthetic oligonucleotide
  Target: LAMA2; (-) strand; PAM type: NNAGAAW; PAM sequence: CTAGAAT
gaaagaaataccgttatttg

SEQ ID NO: 11932 - DNA, 20 bp, Artificial Sequence
  Description of Artificial Sequence: Synthetic oligonucleotide
  Target: LAMA2; (-) strand; PAM type: NNAGAAW; PAM sequence: AAAGAAA
acagcatcagccttctgcag

SEQ ID NO: 11933 - DNA, 20 bp, Artificial Sequence
  Description of Artificial Sequence: Synthetic oligonucleotide
  Target: LAMA2; (-) strand; PAM type: NNAGAAW; PAM sequence: GCAGAAA
acgtacagcatcagccttct

SEQ ID NO: 11934 - DNA, 20 bp, Artificial Sequence
  Description of Artificial Sequence: Synthetic oligonucleotide
  Target: LAMA2; (-) strand; PAM type: NNAGAAW; PAM sequence: ATAGAAT
tccacatcatccacatgata

SEQ ID NO: 11935 - DNA, 20 bp, Artificial Sequence
  Description of Artificial Sequence: Synthetic oligonucleotide
  Target: LAMA2; (-) strand; PAM type: NNAGAAW; PAM sequence: GCAGAAT
tgttctccttctctcttgaa

SEQ ID NO: 11936 - DNA, 20 bp, Artificial Sequence
  Description of Artificial Sequence: Synthetic oligonucleotide
  Target: LAMA2; (-) strand; PAM type: NNAGAAW; PAM sequence: TGAGAAA
gggctctaagatttttatgc

SEQ ID NO: 11937 - DNA, 20 bp, Artificial Sequence
  Description of Artificial Sequence: Synthetic oligonucleotide
  Target: LAMA2; (-) strand; PAM type: NNAGAAW; PAM sequence: CTAGAAA
actttgctaggatttgggtc

SEQ ID NO: 11938 - DNA, 20 bp, Artificial Sequence
  Description of Artificial Sequence: Synthetic oligonucleotide
  Target: LAMA2; (-) strand; PAM type: NNAGAAW; PAM sequence: AAAGAAA
gaaactctagagatgtagag

SEQ ID NO: 11939 - DNA, 20 bp, Artificial Sequence
  Description of Artificial Sequence: Synthetic oligonucleotide
  Target: LAMA2; (-) strand; PAM type: NNAGAAW; PAM sequence: AGAGAAA
ctatgaaactctagagatgt

SEQ ID NO: 11940 - DNA, 20 bp, Artificial Sequence
  Description of Artificial Sequence: Synthetic oligonucleotide
  Target: LAMA2; (-) strand; PAM type: NNAGAAW; PAM sequence: AAAGAAA
tgacaagtccatgatgtcaa

SEQ ID NO: 11941 - DNA, 20 bp, Artificial Sequence
  Description of Artificial Sequence: Synthetic oligonucleotide
  Target: LAMA2; (-) strand; PAM type: NNAGAAW; PAM sequence: AAAGAAT
tcactgtctttcatgtattg

SEQ ID NO: 11942 - DNA, 20 bp, Artificial Sequence
  Description of Artificial Sequence: Synthetic oligonucleotide
  Target: LAMA2; (-) strand; PAM type: NNAGAAW; PAM sequence: GCAGAAT
ttggtgttggtttgtgagta

SEQ ID NO: 11943 - DNA, 20 bp, Artificial Sequence
  Description of Artificial Sequence: Synthetic oligonucleotide
  Target: LAMA2; (-) strand; PAM type: NNAGAAW; PAM sequence: AAAGAAA
atcctacttagaagtttacc

SEQ ID NO: 11944 - DNA, 20 bp, Artificial Sequence
  Description of Artificial Sequence: Synthetic oligonucleotide
  Target: LAMA2; (-) strand; PAM type: NNAGAAW; PAM sequence: GCAGAAT
tgttgaagtgcaaaatcttt

SEQ ID NO: 11945 - DNA, 20 bp, Artificial Sequence
  Description of Artificial Sequence: Synthetic oligonucleotide
  Target: LAMA2; (-) strand; PAM type: NNAGAAW; PAM sequence: TTAGAAT
gctcttactggtttcaggaa

SEQ ID NO: 11946 - DNA, 20 bp, Artificial Sequence
  Description of Artificial Sequence: Synthetic oligonucleotide
  Target: LAMA2; (-) strand; PAM type: NNAGAAW; PAM sequence: GTAGAAA
gattcagctaccgttatagg

SEQ ID NO: 11947 - DNA, 20 bp, Artificial Sequence
  Description of Artificial Sequence: Synthetic oligonucleotide
  Target: LAMA2; (-) strand; PAM type: NNAGAAW; PAM sequence: TAAGAAA
tagtttgatgacaaggggta

SEQ ID NO: 11948 - DNA, 20 bp, Artificial Sequence
  Description of Artificial Sequence: Synthetic oligonucleotide
  Target: LAMA2; (-) strand; PAM type: NNAGAAW; PAM sequence: TGAGAAA
taatgtgaattttagaagca

SEQ ID NO: 11949 - DNA, 20 bp, Artificial Sequence
  Description of Artificial Sequence: Synthetic oligonucleotide
  Target: LAMA2; (-) strand; PAM type: NNAGAAW; PAM sequence: ATAGAAT
ctataatatttcgacataga

SEQ ID NO: 11950 - DNA, 20 bp, Artificial Sequence
  Description of Artificial Sequence: Synthetic oligonucleotide
  Target: LAMA2; (-) strand; PAM type: NNAGAAW; PAM sequence: ATAGAAT
acactctataatatttcgac

SEQ ID NO: 11951 - DNA, 20 bp, Artificial Sequence
  Description of Artificial Sequence: Synthetic oligonucleotide
  Target: LAMA2; (-) strand; PAM type: NNAGAAW; PAM sequence: TGAGAAA
ttgaattggtgactatggga

SEQ ID NO: 11952 - DNA, 20 bp, Artificial Sequence
  Description of Artificial Sequence: Synthetic oligonucleotide
  Target: LAMA2; (-) strand; PAM type: NNAGAAW; PAM sequence: GGAGAAA
taattcattagaaaacacta

SEQ ID NO: 11953 - DNA, 20 bp, Artificial Sequence
  Description of Artificial Sequence: Synthetic oligonucleotide
  Target: LAMA2; (-) strand; PAM type: NNAGAAW; PAM sequence: TTAGAAA
cccccagttcatttaattca

SEQ ID NO: 11954 - DNA, 20 bp, Artificial Sequence
  Description of Artificial Sequence: Synthetic oligonucleotide
  Target: LAMA2; (-) strand; PAM type: NNAGAAW; PAM sequence: AGAGAAT
agtatagcaaattgcctcac

SEQ ID NO: 11955 - DNA, 20 bp, Artificial Sequence
  Description of Artificial Sequence: Synthetic oligonucleotide
  Target: LAMA2; (-) strand; PAM type: NNAGAAW; PAM sequence: CTAGAAT
tacaatacagtacttggatc

SEQ ID NO: 11956 - DNA, 20 bp, Artificial Sequence
  Description of Artificial Sequence: Synthetic oligonucleotide
  Target: LAMA2; (-) strand; PAM type: NNAGAAW; PAM sequence: CTAGAAT
ggtttcttctgtctccttca

SEQ ID NO: 11957 - DNA, 20 bp, Artificial Sequence
  Description of Artificial Sequence: Synthetic oligonucleotide
  Target: LAMA2; (-) strand; PAM type: NNAGAAW; PAM sequence: TGAGAAT
ggcggggtttctggatgggc

SEQ ID NO: 11958 - DNA, 20 bp, Artificial Sequence
  Description of Artificial Sequence: Synthetic oligonucleotide
  Target: LAMA2; (-) strand; PAM type: NNAGAAW; PAM sequence: CTAGAAT
ccatctctactgccaccgtg

SEQ ID NO: 11959 - DNA, 20 bp, Artificial Sequence
  Description of Artificial Sequence: Synthetic oligonucleotide
  Target: LAMA2; (-) strand; PAM type: NNAGAAW; PAM sequence: GAAGAAA
gatacatcagaagagcactc

SEQ ID NO: 11960 - DNA, 20 bp, Artificial Sequence
  Description of Artificial Sequence: Synthetic oligonucleotide
  Target: LAMA2; (-) strand; PAM type: NNAGAAW; PAM sequence: TTAGAAA
agacaatcatcccaggcttt

SEQ ID NO: 11961 - DNA, 20 bp, Artificial Sequence
  Description of Artificial Sequence: Synthetic oligonucleotide
  Target: LAMA2; (-) strand; PAM type: NNAGAAW; PAM sequence: AAAGAAT
gaccagaaaaaaatgaggcc

SEQ ID NO: 11962 - DNA, 20 bp, Artificial Sequence
  Description of Artificial Sequence: Synthetic oligonucleotide
  Target: LAMA2; (-) strand; PAM type: NNAGAAW; PAM sequence: CCAGAAA
aattcagtaagaaatactga

SEQ ID NO: 11963 - DNA, 20 bp, Artificial Sequence
  Description of Artificial Sequence: Synthetic oligonucleotide
  Target: LAMA2; (-) strand; PAM type: NNAGAAW; PAM sequence: TAAGAAA
tgttcccagaaagaattcag

SEQ ID NO: 11964 - DNA, 20 bp, Artificial Sequence
  Description of Artificial Sequence: Synthetic oligonucleotide
  Target: LAMA2; (-) strand; PAM type: NNAGAAW; PAM sequence: AAAGAAT
accaaaaggtatgttcccag

SEQ ID NO: 11965 - DNA, 20 bp, Artificial Sequence
  Description of Artificial Sequence: Synthetic oligonucleotide
  Target: LAMA2; (-) strand; PAM type: NNAGAAW; PAM sequence: CCAGAAA
gtgaaccaaaaggtatgttc

SEQ ID NO: 11966 - DNA, 20 bp, Artificial Sequence
  Description of Artificial Sequence: Synthetic oligonucleotide
  Target: LAMA2; (-) strand; PAM type: NNAGAAW; PAM sequence: ATAGAAT
tgcagaaatccattttgaaa

SEQ ID NO: 11967 - DNA, 20 bp, Artificial Sequence
  Description of Artificial Sequence: Synthetic oligonucleotide
  Target: LAMA2; (-) strand; PAM type: NNAGAAW; PAM sequence: GCAGAAA
gctgaatatgtcactctgtt

SEQ ID NO: 11968 - DNA, 20 bp, Artificial Sequence
  Description of Artificial Sequence: Synthetic oligonucleotide
  Target: LAMA2; (-) strand; PAM type: NNAGAAW; PAM sequence: AAAGAAA
aaattaagctctcagtttca

SEQ ID NO: 11969 - DNA, 20 bp, Artificial Sequence
  Description of Artificial Sequence: Synthetic oligonucleotide
  Target: LAMA2; (-) strand; PAM type: NNAGAAW; PAM sequence: AAAGAAA
atcttgacaaaatagggaga

SEQ ID NO: 11970 - DNA, 20 bp, Artificial Sequence
  Description of Artificial Sequence: Synthetic oligonucleotide
  Target: LAMA2; (-) strand; PAM type: NNAGAAW; PAM sequence: GGAGAAA
gaaacatcttgacaaaatag

SEQ ID NO: 11971 - DNA, 20 bp, Artificial Sequence
  Description of Artificial Sequence: Synthetic oligonucleotide
  Target: LAMA2; (-) strand; PAM type: NNAGAAW; PAM sequence: TCAGAAT
aaaaagcaatagcactacac

SEQ ID NO: 11972 - DNA, 20 bp, Artificial Sequence
  Description of Artificial Sequence: Synthetic oligonucleotide
  Target: LAMA2; (-) strand; PAM type: NNAGAAW; PAM sequence: ACAGAAT
tattggtaatgccatactac

SEQ ID NO: 11973 - DNA, 20 bp, Artificial Sequence
  Description of Artificial Sequence: Synthetic oligonucleotide
  Target: LAMA2; (-) strand; PAM type: NNAGAAW; PAM sequence: GCAGAAA
ctggcagatatgtattaaat

SEQ ID NO: 11974 - DNA, 20 bp, Artificial Sequence
  Description of Artificial Sequence: Synthetic oligonucleotide
  Target: LAMA2; (-) strand; PAM type: NNAGAAW; PAM sequence: AAAGAAT
atgcagcagcactccaaaat

SEQ ID NO: 11975 - DNA, 20 bp, Artificial Sequence
  Description of Artificial Sequence: Synthetic oligonucleotide
  Target: LAMA2; (-) strand; PAM type: NNAGAAW; PAM sequence: AAAGAAA
atggaaggatttctctgatt

SEQ ID NO: 11976 - DNA, 20 bp, Artificial Sequence
  Description of Artificial Sequence: Synthetic oligonucleotide
  Target: LAMA2; (-) strand; PAM type: NNAGAAW; PAM sequence: GCAGAAT
cattccccaaagtgtgttca

SEQ ID NO: 11977 - DNA, 20 bp, Artificial Sequence
  Description of Artificial Sequence: Synthetic oligonucleotide
  Target: LAMA2; (-) strand; PAM type: NNAGAAW; PAM sequence: AAAGAAA
catatctccaaactgctgct

SEQ ID NO: 11978 - DNA, 20 bp, Artificial Sequence
  Description of Artificial Sequence: Synthetic oligonucleotide
  Target: LAMA2; (-) strand; PAM type: NNAGAAW; PAM sequence: ATAGAAT
ttgtttatttgttttaatgg

SEQ ID NO: 11979 - DNA, 20 bp, Artificial Sequence
  Description of Artificial Sequence: Synthetic oligonucleotide
  Target: LAMA2; (-) strand; PAM type: NNAGAAW; PAM sequence: CCAGAAA
caaagggattgaactagaaa

SEQ ID NO: 11980 - DNA, 20 bp, Artificial Sequence
  Description of Artificial Sequence: Synthetic oligonucleotide
  Target: LAMA2; (-) strand; PAM type: NNAGAAW; PAM sequence: CTAGAAA
actgtgtcaaagggattgaa

SEQ ID NO: 11981 - DNA, 20 bp, Artificial Sequence
  Description of Artificial Sequence: Synthetic oligonucleotide
  Target: LAMA2; (-) strand; PAM type: NNAGAAW; PAM sequence: TCAGAAA
ggtgcatttgacaggagtat

SEQ ID NO: 11982 - DNA, 20 bp, Artificial Sequence
  Description of Artificial Sequence: Synthetic oligonucleotide
  Target: LAMA2; (-) strand; PAM type: NNAGAAW; PAM sequence: TGAGAAT
attaatacccaaaataaaag

SEQ ID NO: 11983 - DNA, 20 bp, Artificial Sequence
  Description of Artificial Sequence: Synthetic oligonucleotide
  Target: LAMA2; (-) strand; PAM type: NNAGAAW; PAM sequence: GGAGAAT
gagatacaatagagaagtaa

SEQ ID NO: 11984 - DNA, 20 bp, Artificial Sequence
  Description of Artificial Sequence: Synthetic oligonucleotide
  Target: LAMA2; (-) strand; PAM type: NNAGAAW; PAM sequence: TAAGAAT
tagaagttcccagtctaatt

SEQ ID NO: 11985 - DNA, 20 bp, Artificial Sequence
  Description of Artificial Sequence: Synthetic oligonucleotide
  Target: LAMA2; (-) strand; PAM type: NNAGAAW; PAM sequence: AGAGAAT
ggtgagacaccagagataat

SEQ ID NO: 11986 - DNA, 20 bp, Artificial Sequence
  Description of Artificial Sequence: Synthetic oligonucleotide
  Target: LAMA2; (-) strand; PAM type: NNAGAAW; PAM sequence: TGAGAAA
aaaatttcacctgtttaact

SEQ ID NO: 11987 - DNA, 20 bp, Artificial Sequence
  Description of Artificial Sequence: Synthetic oligonucleotide
  Target: LAMA2; (-) strand; PAM type: NNAGAAW; PAM sequence: AGAGAAA
taaaatactttaaaagtatt

SEQ ID NO: 11988 - DNA, 20 bp, Artificial Sequence
  Description of Artificial Sequence: Synthetic oligonucleotide
  Target: LAMA2; (-) strand; PAM type: NNAGAAW; PAM sequence: TAAGAAA
tagatgtatatttagtcttt

SEQ ID NO: 11989 - DNA, 20 bp, Artificial Sequence
  Description of Artificial Sequence: Synthetic oligonucleotide
  Target: LAMA2; (-) strand; PAM type: NNAGAAW; PAM sequence: TGAGAAT
cagtgctcttgccaactagt

SEQ ID NO: 11990 - DNA, 20 bp, Artificial Sequence
  Description of Artificial Sequence: Synthetic oligonucleotide
  Target: LAMA2; (-) strand; PAM type: NNAGAAW; PAM sequence: CAAGAAA
ctgtggttctgtaactgact

SEQ ID NO: 11991 - DNA, 20 bp, Artificial Sequence
  Description of Artificial Sequence: Synthetic oligonucleotide
  Target: LAMA2; (-) strand; PAM type: NNAGAAW; PAM sequence: TAAGAAA
atagacacagagtagggact

SEQ ID NO: 11992 - DNA, 20 bp, Artificial Sequence
  Description of Artificial Sequence: Synthetic oligonucleotide
  Target: LAMA2; (-) strand; PAM type: NNAGAAW; PAM sequence: ATAGAAA
ctatttcttttctttacaaa

SEQ ID NO: 11993 - DNA, 20 bp, Artificial Sequence
  Description of Artificial Sequence: Synthetic oligonucleotide
  Target: LAMA2; (-) strand; PAM type: NNAGAAW; PAM sequence: TAAGAAA
tgcatttttagaaatcattc

SEQ ID NO: 11994 - DNA, 20 bp, Artificial Sequence
  Description of Artificial Sequence: Synthetic oligonucleotide
  Target: LAMA2; (-) strand; PAM type: NNAGAAW; PAM sequence: TTAGAAA
atgaatgaatatatgcattt

SEQ ID NO: 11995 - DNA, 20 bp, Artificial Sequence
  Description of Artificial Sequence: Synthetic oligonucleotide
  Target: LAMA2; (-) strand; PAM type: NNAGAAW; PAM sequence: AAAGAAA
cttgactggactgggggcta

SEQ ID NO: 11996 - DNA, 20 bp, Artificial Sequence
  Description of Artificial Sequence: Synthetic oligonucleotide
  Target: LAMA2; (-) strand; PAM type: NNAGAAW; PAM sequence: AAAGAAT
acaaacaagaaaaataccta

SEQ ID NO: 11997 - DNA, 20 bp, Artificial Sequence
  Description of Artificial Sequence: Synthetic oligonucleotide
  Target: LAMA2; (-) strand; PAM type: NNAGAAW; PAM sequence: CAAGAAA
cagacttttgtaaaaacaaa

SEQ ID NO: 11998 - DNA, 20 bp, Artificial Sequence
  Description of Artificial Sequence: Synthetic oligonucleotide
  Target: LAMA2; (-) strand; PAM type: NNAGAAW; PAM sequence: AGAGAAA
cagtgttctttggaaaacag

SEQ ID NO: 11999 - DNA, 20 bp, Artificial Sequence
  Description of Artificial Sequence: Synthetic oligonucleotide
  Target: LAMA2; (-) strand; PAM type: NNAGAAW; PAM sequence: TCAGAAT
ttcactcaactcatcatctt

SEQ ID NO: 12000 - DNA, 20 bp, Artificial Sequence
  Description of Artificial Sequence: Synthetic oligonucleotide
  Target: LAMA2; (-) strand; PAM type: NNAGAAW; PAM sequence: TTAGAAA
ctctgttcaaactgcattgt

SEQ ID NO: 12001 - DNA, 20 bp, Artificial Sequence
  Description of Artificial Sequence: Synthetic oligonucleotide
  Target: LAMA2; (-) strand; PAM type: NNAGAAW; PAM sequence: TCAGAAA
aatgtgatgaagataagaat

SEQ ID NO: 12002 - DNA, 20 bp, Artificial Sequence
  Description of Artificial Sequence: Synthetic oligonucleotide
  Target: LAMA2; (-) strand; PAM type: NNAGAAW; PAM sequence: TAAGAAT
tatttttaatgtgatgaaga

SEQ ID NO: 12003 - DNA, 20 bp, Artificial Sequence
  Description of Artificial Sequence: Synthetic oligonucleotide
  Target: LAMA2; (-) strand; PAM type: NNAGAAW; PAM sequence: TTAGAAA
attaggaatcagataattaa

SEQ ID NO: 12004 - DNA, 20 bp, Artificial Sequence
  Description of Artificial Sequence: Synthetic oligonucleotide
  Target: LAMA2; (-) strand; PAM type: NNAGAAW; PAM sequence: TTAGAAA
tctataatctagataagtag

SEQ ID NO: 12005 - DNA, 20 bp, Artificial Sequence
  Description of Artificial Sequence: Synthetic oligonucleotide
  Target: LAMA2; (-) strand; PAM type: NNAGAAW; PAM sequence: ACAGAAA
tatttagcaatttaataatt

SEQ ID NO: 12006 - DNA, 20 bp, Artificial Sequence
  Description of Artificial Sequence: Synthetic oligonucleotide
  Target: LAMA2; (-) strand; PAM type: NNAGAAW; PAM sequence: CGAGAAT
aagacaaatttggtttaatt

SEQ ID NO: 12007 - DNA, 20 bp, Artificial Sequence
  Description of Artificial Sequence: Synthetic oligonucleotide
  Target: LAMA2; (-) strand; PAM type: NNAGAAW; PAM sequence: AAAGAAA
atatattggctgtaaaggag

SEQ ID NO: 12008 - DNA, 20 bp, Artificial Sequence
  Description of Artificial Sequence: Synthetic oligonucleotide
  Target: LAMA2; (-) strand; PAM type: NNAGAAW; PAM sequence: GGAGAAA
attgatatattggctgtaaa

SEQ ID NO: 12009 - DNA, 20 bp, Artificial Sequence
  Description of Artificial Sequence: Synthetic oligonucleotide
  Target: LAMA2; (-) strand; PAM type: NNAGAAW; PAM sequence: GTAGAAA
acataatctgtctttttgga

SEQ ID NO: 12010 - DNA, 20 bp, Artificial Sequence
  Description of Artificial Sequence: Synthetic oligonucleotide
  Target: LAMA2; (-) strand; PAM type: NNAGAAW; PAM sequence: TTAGAAA
actgaactttcactgctcgt

SEQ ID NO: 12011 - DNA, 20 bp, Artificial Sequence
  Description of Artificial Sequence: Synthetic oligonucleotide
  Target: LAMA2; (-) strand; PAM type: NNAGAAW; PAM sequence: ATAGAAT
cagcctgcacactagctgtc

SEQ ID NO: 12012 - DNA, 20 bp, Artificial Sequence
  Description of Artificial Sequence: Synthetic oligonucleotide
  Target: LAMA2; (-) strand; PAM type: NNAGAAW; PAM sequence: GAAGAAA
tatgagtttagatttgggga

SEQ ID NO: 12013 - DNA, 20 bp, Artificial Sequence
  Description of Artificial Sequence: Synthetic oligonucleotide
  Target: LAMA2; (-) strand; PAM type: NNAGAAW; PAM sequence: CTAGAAT
tatgataattaaaatcatca

SEQ ID NO: 12014 - DNA, 20 bp, Artificial Sequence
  Description of Artificial Sequence: Synthetic oligonucleotide
  Target: LAMA2; (-) strand; PAM type: NNAGAAW; PAM sequence: ATAGAAT
ttcagattttaacagatttt

SEQ ID NO: 12015 - DNA, 20 bp, Artificial Sequence
  Description of Artificial Sequence: Synthetic oligonucleotide
  Target: LAMA2; (-) strand; PAM type: NNAGAAW; PAM sequence: TTAGAAT
tacccttgacggcagtgaaa

SEQ ID NO: 12016 - DNA, 20 bp, Artificial Sequence
  Description of Artificial Sequence: Synthetic oligonucleotide
  Target: LAMA2; (-) strand; PAM type: NNAGAAW; PAM sequence: AAAGAAA
ttcacagggatctacaaagg

SEQ ID NO: 12017 - DNA, 20 bp, Artificial Sequence
  Description of Artificial Sequence: Synthetic oligonucleotide
  Target: LAMA2; (-) strand; PAM type: NNAGAAW; PAM sequence: ACAGAAT
ggggcagcaggagaactctc

SEQ ID NO: 12018 - DNA, 20 bp, Artificial Sequence
  Description of Artificial Sequence: Synthetic oligonucleotide
  Target: LAMA2; (-) strand; PAM type: NNAGAAW; PAM sequence: GCAGAAT
caactgatggtgggtaagca

SEQ ID NO: 12019 - DNA, 20 bp, Artificial Sequence
  Description of Artificial Sequence: Synthetic oligonucleotide
  Target: LAMA2; (-) strand; PAM type: NNAGAAW; PAM sequence: CCAGAAA
tcccagaactagactgtgta

SEQ ID NO: 12020 - DNA, 20 bp, Artificial Sequence
  Description of Artificial Sequence: Synthetic oligonucleotide
  Target: LAMA2; (-) strand; PAM type: NNAGAAW; PAM sequence: TAAGAAT
agcttttatgctaatgctag

SEQ ID NO: 12021 - DNA, 20 bp, Artificial Sequence
  Description of Artificial Sequence: Synthetic oligonucleotide
  Target: LAMA2; (-) strand; PAM type: NNAGAAW; PAM sequence: CCAGAAA
tcggctttattatcttcttt

SEQ ID NO: 12022 - DNA, 20 bp, Artificial Sequence
  Description of Artificial Sequence: Synthetic oligonucleotide
  Target: LAMA2; (-) strand; PAM type: NNAGAAW; PAM sequence: CCAGAAT
caaacctacacagtgccatc

SEQ ID NO: 12023 - DNA, 20 bp, Artificial Sequence
  Description of Artificial Sequence: Synthetic oligonucleotide
  Target: LAMA2; (-) strand; PAM type: NNAGAAW; PAM sequence: TGAGAAT
gaacatgcccaactgtaggg

SEQ ID NO: 12024 - DNA, 20 bp, Artificial Sequence
  Description of Artificial Sequence: Synthetic oligonucleotide
  Target: LAMA2; (-) strand; PAM type: NNAGAAW; PAM sequence: TGAGAAA
tgaaatgtagcttgtctcaa

SEQ ID NO: 12025 - DNA, 20 bp, Artificial Sequence
  Description of Artificial Sequence: Synthetic oligonucleotide
  Target: LAMA2; (-) strand; PAM type: NNAGAAW; PAM sequence: TCAGAAT
tgctcaacaaacaaaggcta

SEQ ID NO: 12026 - DNA, 20 bp, Artificial Sequence
  Description of Artificial Sequence: Synthetic oligonucleotide
  Target: LAMA2; (-) strand; PAM type: NNAGAAW; PAM sequence: CAAGAAA
cttttaagtaaaacaaagtc

SEQ ID NO: 12027 - DNA, 20 bp, Artificial Sequence
  Description of Artificial Sequence: Synthetic oligonucleotide
  Target: LAMA2; (-) strand; PAM type: NNAGAAW; PAM sequence: TTAGAAA
ttaaaaaccttgctcaaaag

SEQ ID NO: 12028 - DNA, 20 bp, Artificial Sequence
  Description of Artificial Sequence: Synthetic oligonucleotide
  Target: LAMA2; (-) strand; PAM type: NNAGAAW; PAM sequence: GTAGAAA
atcgtttaagagtaggatca

SEQ ID NO: 12029 - DNA, 20 bp, Artificial Sequence
  Description of Artificial Sequence: Synthetic oligonucleotide
  Target: LAMA2; (-) strand; PAM type: NNAGAAW; PAM sequence: AGAGAAT
attttttatcatggtaattt

SEQ ID NO: 12030 - DNA, 20 bp, Artificial Sequence
  Description of Artificial Sequence: Synthetic oligonucleotide
  Target: LAMA2; (-) strand; PAM type: NNAGAAW; PAM sequence: ACAGAAA
tgttggaaaaaaagagaaaa

SEQ ID NO: 12031 - DNA, 20 bp, Artificial Sequence
  Description of Artificial Sequence: Synthetic oligonucleotide
  Target: LAMA2; (-) strand; PAM type: NNAGAAW; PAM sequence: AGAGAAA
aaaagtagtgttggaaaaaa

SEQ ID NO: 12032 - DNA, 20 bp, Artificial Sequence
  Description of Artificial Sequence: Synthetic oligonucleotide
  Target: LAMA2; (-) strand; PAM type: NNAGAAW; PAM sequence: CCAGAAA
ttgtgtaaacttcaatggtt

SEQ ID NO: 12033 - DNA, 20 bp, Artificial Sequence
  Description of Artificial Sequence: Synthetic oligonucleotide
  Target: LAMA2; (-) strand; PAM type: NNAGAAW; PAM sequence: GAAGAAA
catatgggtcagtgtcaact

SEQ ID NO: 12034 - DNA, 20 bp, Artificial Sequence
  Description of Artificial Sequence: Synthetic oligonucleotide
  Target: LAMA2; (-) strand; PAM type: NNAGAAW; PAM sequence: TGAGAAT
ataggataattaaaaatgta

SEQ ID NO: 12035 - DNA, 20 bp, Artificial Sequence
  Description of Artificial Sequence: Synthetic oligonucleotide
  Target: LAMA2; (-) strand; PAM type: NNAGAAW; PAM sequence: AAAGAAT
gattttgtaggagtaaaagc

SEQ ID NO: 12036 - DNA, 20 bp, Artificial Sequence
  Description of Artificial Sequence: Synthetic oligonucleotide
  Target: LAMA2; (-) strand; PAM type: NNAGAAW; PAM sequence: GGAGAAA
atgtaaataaggtgcaaaag

SEQ ID NO: 12037 - DNA, 20 bp, Artificial Sequence
  Description of Artificial Sequence: Synthetic oligonucleotide
  Target: LAMA2; (-) strand; PAM type: NNAGAAW; PAM sequence: GTAGAAA
ttaaaacagttacatttcaa

SEQ ID NO: 12038 - DNA, 20 bp, Artificial Sequence
  Description of Artificial Sequence: Synthetic oligonucleotide
  Target: LAMA2; (-) strand; PAM type: NNAGAAW; PAM sequence: TCAGAAT
ctgagcagtttttgttaaaa

SEQ ID NO: 12039 - DNA, 20 bp, Artificial Sequence
  Description of Artificial Sequence: Synthetic oligonucleotide
  Target: LAMA2; (-) strand; PAM type: NNAGAAW; PAM sequence: GAAGAAA
tggaaagtttaagagcagtt

SEQ ID NO: 12040 - DNA, 20 bp, Artificial Sequence
  Description of Artificial Sequence: Synthetic oligonucleotide
  Target: LAMA2; (-) strand; PAM type: NNAGAAW; PAM sequence: TTAGAAA
ttatgaaatacatcataggt

SEQ ID NO: 12041 - DNA, 20 bp, Artificial Sequence
  Description of Artificial Sequence: Synthetic oligonucleotide
  Target: LAMA2; (-) strand; PAM type: NNAGAAW; PAM sequence: TTAGAAA
gaaaagaagagtagaaacca

SEQ ID NO: 12042 - DNA, 20 bp, Artificial Sequence
  Description of Artificial Sequence: Synthetic oligonucleotide
  Target: LAMA2; (-) strand; PAM type: NNAGAAW; PAM sequence: GTAGAAA
gtgagtaaaggaaaagaaga

SEQ ID NO: 12043 - DNA, 20 bp, Artificial Sequence
  Description of Artificial Sequence: Synthetic oligonucleotide
  Target: LAMA2; (-) strand; PAM type: NNAGAAW; PAM sequence: AAAGAAT
tggtgtccctccacttccca

SEQ ID NO: 12044 - DNA, 20 bp, Artificial Sequence
  Description of Artificial Sequence: Synthetic oligonucleotide
  Target: LAMA2; (-) strand; PAM type: NNAGAAW; PAM sequence: GCAGAAA
ccttgctagccaagatgaga

SEQ ID NO: 12045 - DNA, 20 bp, Artificial Sequence
  Description of Artificial Sequence: Synthetic oligonucleotide
  Target: LAMA2; (-) strand; PAM type: NNAGAAW; PAM sequence: GTAGAAA
aggagtcggacttggagaca

SEQ ID NO: 12046 - DNA, 20 bp, Artificial Sequence
  Description of Artificial Sequence: Synthetic oligonucleotide
  Target: LAMA2; (-) strand; PAM type: NNAGAAW; PAM sequence: AGAGAAA
aatttttaaacattttttgt

SEQ ID NO: 12047 - DNA, 20 bp, Artificial Sequence
  Description of Artificial Sequence: Synthetic oligonucleotide
  Target: LAMA2; (-) strand; PAM type: NNAGAAW; PAM sequence: ACAGAAT
cagttgagggattgctttta

SEQ ID NO: 12048 - DNA, 20 bp, Artificial Sequence
  Description of Artificial Sequence: Synthetic oligonucleotide
  Target: LAMA2; (-) strand; PAM type: NNAGAAW; PAM sequence: AAAGAAT
aaaatgtgattgaagatatt

SEQ ID NO: 12049 - DNA, 20 bp, Artificial Sequence
  Description of Artificial Sequence: Synthetic oligonucleotide
  Target: LAMA2; (-) strand; PAM type: NNAGAAW; PAM sequence: TGAGAAA
attcctatgaaccctttcat

SEQ ID NO: 12050 - DNA, 20 bp, Artificial Sequence
  Description of Artificial Sequence: Synthetic oligonucleotide
  Target: LAMA2; (-) strand; PAM type: NNAGAAW; PAM sequence: TTAGAAA
ttgtgtgggctttgtatttt

SEQ ID NO: 12051 - DNA, 20 bp, Artificial Sequence
  Description of Artificial Sequence: Synthetic oligonucleotide
  Target: LAMA2; (-) strand; PAM type: NNAGAAW; PAM sequence: TGAGAAA
aatttattgactataatcat

SEQ ID NO: 12052 - DNA, 20 bp, Artificial Sequence
  Description of Artificial Sequence: Synthetic oligonucleotide
  Target: LAMA2; (-) strand; PAM type: NNAGAAW; PAM sequence: GGAGAAA
gaatctacatatcattttgg

SEQ ID NO: 12053 - DNA, 20 bp, Artificial Sequence
  Description of Artificial Sequence: Synthetic oligonucleotide
  Target: LAMA2; (-) strand; PAM type: NNAGAAW; PAM sequence: ACAGAAA
agaataagctgtcatgattc

SEQ ID NO: 12054 - DNA, 20 bp, Artificial Sequence
  Description of Artificial Sequence: Synthetic oligonucleotide
  Target: LAMA2; (-) strand; PAM type: NNAGAAW; PAM sequence: TTAGAAT
tttcatctttgatataaatt

SEQ ID NO: 12055 - DNA, 20 bp, Artificial Sequence
  Description of Artificial Sequence: Synthetic oligonucleotide
  Target: LAMA2; (-) strand; PAM type: NNAGAAW; PAM sequence: AAAGAAA
attttttggtttgatatgaa

SEQ ID NO: 12056 - DNA, 20 bp, Artificial Sequence
  Description of Artificial Sequence: Synthetic oligonucleotide
  Target: LAMA2; (-) strand; PAM type: NNAGAAW; PAM sequence: TAAGAAT
aatcctggtatattttcttc

SEQ ID NO: 12057 - DNA, 20 bp, Artificial Sequence
  Description of Artificial Sequence: Synthetic oligonucleotide
  Target: LAMA2; (-) strand; PAM type: NNAGAAW; PAM sequence: TTAGAAA
aattgttttccaaagtgact

SEQ ID NO: 12058 - DNA, 20 bp, Artificial Sequence
  Description of Artificial Sequence: Synthetic oligonucleotide
  Target: LAMA2; (-) strand; PAM type: NNAGAAW; PAM sequence: AAAGAAT
tctagtttctctgctattat

SEQ ID NO: 12059 - DNA, 20 bp, Artificial Sequence
  Description of Artificial Sequence: Synthetic oligonucleotide
  Target: LAMA2; (-) strand; PAM type: NNAGAAW; PAM sequence: TGAGAAA
gttgtttagtgctacttgta

SEQ ID NO: 12060 - DNA, 20 bp, Artificial Sequence
  Description of Artificial Sequence: Synthetic oligonucleotide
  Target: LAMA2; (-) strand; PAM type: NNAGAAW; PAM sequence: TCAGAAA
tgtaaatctaccaccaaatt

SEQ ID NO: 12061 - DNA, 20 bp, Artificial Sequence
  Description of Artificial Sequence: Synthetic oligonucleotide
  Target: LAMA2; (-) strand; PAM type: NNAGAAW; PAM sequence: TAAGAAA
ttagtgcttattatgtgtag

SEQ ID NO: 12062 - DNA, 20 bp, Artificial Sequence
  Description of Artificial Sequence: Synthetic oligonucleotide
  Target: LAMA2; (-) strand; PAM type: NNAGAAW; PAM sequence: TGAGAAA
ctagcttatcatttgcaata

SEQ ID NO: 12063 - DNA, 20 bp, Artificial Sequence
  Description of Artificial Sequence: Synthetic oligonucleotide
  Target: LAMA2; (-) strand; PAM type: NNAGAAW; PAM sequence: TCAGAAT
tcctttagtggaaatctatt

SEQ ID NO: 12064 - DNA, 20 bp, Artificial Sequence
  Description of Artificial Sequence: Synthetic oligonucleotide
  Target: LAMA2; (-) strand; PAM type: NNAGAAW; PAM sequence: GGAGAAA
catttcttttatcttgaaga

SEQ ID NO: 12065 - DNA, 20 bp, Artificial Sequence
  Description of Artificial Sequence: Synthetic oligonucleotide
  Target: LAMA2; (-) strand; PAM type: NNAGAAW; PAM sequence: GCAGAAA
tgccatatcaaacccattta

SEQ ID NO: 12066 - DNA, 20 bp, Artificial Sequence
  Description of Artificial Sequence: Synthetic oligonucleotide
  Target: LAMA2; (-) strand; PAM type: NNAGAAW; PAM sequence: TTAGAAA
atgtaacctgcctcccacat

SEQ ID NO: 12067 - DNA, 20 bp, Artificial Sequence
  Description of Artificial Sequence: Synthetic oligonucleotide
  Target: LAMA2; (-) strand; PAM type: NNAGAAW; PAM sequence: GTAGAAT
tcaatttgttctctgagctg

SEQ ID NO: 12068 - DNA, 20 bp, Artificial Sequence
  Description of Artificial Sequence: Synthetic oligonucleotide
  Target: LAMA2; (-) strand; PAM type: NNAGAAW; PAM sequence: TGAGAAT
acaagtggacagctagcttc

SEQ ID NO: 12069 - DNA, 20 bp, Artificial Sequence
  Description of Artificial Sequence: Synthetic oligonucleotide
  Target: LAMA2; (-) strand; PAM type: NNAGAAW; PAM sequence: TGAGAAA
gtctgctctgagatcttacc

SEQ ID NO: 12070 - DNA, 20 bp, Artificial Sequence
  Description of Artificial Sequence: Synthetic oligonucleotide
  Target: LAMA2; (-) strand; PAM type: NNAGAAW; PAM sequence: TCAGAAA
gatttttcttatttatagct

SEQ ID NO: 12071 - DNA, 20 bp, Artificial Sequence
  Description of Artificial Sequence: Synthetic oligonucleotide
  Target: LAMA2; (-) strand; PAM type: NNAGAAW; PAM sequence: ATAGAAA
tgctttggaacctgaatgag

SEQ ID NO: 12072 - DNA, 20 bp, Artificial Sequence
  Description of Artificial Sequence: Synthetic oligonucleotide
  Target: LAMA2; (-) strand; PAM type: NNAGAAW; PAM sequence: TCAGAAA
cctcccttgattctgttccc

SEQ ID NO: 12073 - DNA, 20 bp, Artificial Sequence
  Description of Artificial Sequence: Synthetic oligonucleotide
  Target: LAMA2; (-) strand; PAM type: NNAGAAW; PAM sequence: AAAGAAA
ataaagtattgcagcattct

SEQ ID NO: 12074 - DNA, 20 bp, Artificial Sequence
  Description of Artificial Sequence: Synthetic oligonucleotide
  Target: LAMA2; (-) strand; PAM type: NNAGAAW; PAM sequence: TAAGAAA
tttgttgtttacttagaagg

SEQ ID NO: 12075 - DNA, 20 bp, Artificial Sequence
  Description of Artificial Sequence: Synthetic oligonucleotide
  Target: LAMA2; (-) strand; PAM type: NNAGAAW; PAM sequence: CCAGAAT
gtgtaatgcatttgggaatt

SEQ ID NO: 12076 - DNA, 20 bp, Artificial Sequence
  Description of Artificial Sequence: Synthetic oligonucleotide
  Target: LAMA2; (-) strand; PAM type: NNAGAAW; PAM sequence: ATAGAAT
tatgtgacacaaatcatgcc

SEQ ID NO: 12077 - DNA, 20 bp, Artificial Sequence
  Description of Artificial Sequence: Synthetic oligonucleotide
  Target: LAMA2; (-) strand; PAM type: NNAGAAW; PAM sequence: TAAGAAT
tttatggtcacacaaaaatg

SEQ ID NO: 12078 - DNA, 20 bp, Artificial Sequence
  Description of Artificial Sequence: Synthetic oligonucleotide
  Target: LAMA2; (-) strand; PAM type: NNAGAAW; PAM sequence: AAAGAAA
ttttgtccaggattttagga

SEQ ID NO: 12079 - DNA, 20 bp, Artificial Sequence
  Description of Artificial Sequence: Synthetic oligonucleotide
  Target: LAMA2; (-) strand; PAM type: NNAGAAW; PAM sequence: AGAGAAT
gatgaaggggtggaagggag

SEQ ID NO: 12080 - DNA, 20 bp, Artificial Sequence
  Description of Artificial Sequence: Synthetic oligonucleotide
  Target: LAMA2; (-) strand; PAM type: NNAGAAW; PAM sequence: CAAGAAA
ggcagaggtcactggagtgc

SEQ ID NO: 12081 - DNA, 20 bp, Artificial Sequence
  Description of Artificial Sequence: Synthetic oligonucleotide
  Target: LAMA2; (-) strand; PAM type: NNAGAAW; PAM sequence: GAAGAAA
gtgtgaagaaagctttccca

SEQ ID NO: 12082 - DNA, 20 bp, Artificial Sequence
  Description of Artificial Sequence: Synthetic oligonucleotide
  Target: LAMA2; (-) strand; PAM type: NNAGAAW; PAM sequence: GAAGAAA
gcctatttctgtacctgtgt

SEQ ID NO: 12083 - DNA, 20 bp, Artificial Sequence
  Description of Artificial Sequence: Synthetic oligonucleotide
  Target: LAMA2; (-) strand; PAM type: NNAGAAW; PAM sequence: AAAGAAA
aacatactttggatgttaag

SEQ ID NO: 12084 - DNA, 20 bp, Artificial Sequence
  Description of Artificial Sequence: Synthetic oligonucleotide
  Target: LAMA2; (-) strand; PAM type: NNAGAAW; PAM sequence: TAAGAAA
tttgaacatactttggatgt

SEQ ID NO: 12085 - DNA, 20 bp, Artificial Sequence
  Description of Artificial Sequence: Synthetic oligonucleotide
  Target: LAMA2; (-) strand; PAM type: NNAGAAW; PAM sequence: ATAGAAT
gtttgtaatttacataataa

SEQ ID NO: 12086 - DNA, 20 bp, Artificial Sequence
  Description of Artificial Sequence: Synthetic oligonucleotide
  Target: LAMA2; (-) strand; PAM type: NNAGAAW; PAM sequence: AGAGAAA
atacgtggaagaagatatta

SEQ ID NO: 12087 - DNA, 20 bp, Artificial Sequence
  Description of Artificial Sequence: Synthetic oligonucleotide
  Target: LAMA2; (-) strand; PAM type: NNAGAAW; PAM sequence: CTAGAAA
attacttaaaaagggcattg

SEQ ID NO: 12088 - DNA, 20 bp, Artificial Sequence
  Description of Artificial Sequence: Synthetic oligonucleotide
  Target: LAMA2; (-) strand; PAM type: NNAGAAW; PAM sequence: GGAGAAT
ccaattcacagggtggtgat

SEQ ID NO: 12089 - DNA, 20 bp, Artificial Sequence
  Description of Artificial Sequence: Synthetic oligonucleotide
  Target: LAMA2; (-) strand; PAM type: NNAGAAW; PAM sequence: TTAGAAT
gagtaaatctctgttcttga

SEQ ID NO: 12090 - DNA, 20 bp, Artificial Sequence
  Description of Artificial Sequence: Synthetic oligonucleotide
  Target: LAMA2; (-) strand; PAM type: NNAGAAW; PAM sequence: TCAGAAA
ggtttcctgagacgagaatt

SEQ ID NO: 12091 - DNA, 20 bp, Artificial Sequence
  Description of Artificial Sequence: Synthetic oligonucleotide
  Target: LAMA2; (-) strand; PAM type: NNAGAAW; PAM sequence: CGAGAAT
gtgtcggtggtttcctgaga

SEQ ID NO: 12092 - DNA, 20 bp, Artificial Sequence
  Description of Artificial Sequence: Synthetic oligonucleotide
  Target: LAMA2; (-) strand; PAM type: NNAGAAW; PAM sequence: AGAGAAA
ccggtaaaatttagtttcaa

SEQ ID NO: 12093 - DNA, 20 bp, Artificial Sequence
  Description of Artificial Sequence: Synthetic oligonucleotide
  Target: LAMA2; (-) strand; PAM type: NNAGAAW; PAM sequence: AGAGAAA
agtaagataattcaaaagta

SEQ ID NO: 12094 - DNA, 20 bp, Artificial Sequence
  Description of Artificial Sequence: Synthetic oligonucleotide
  Target: LAMA2; (-) strand; PAM type: NNAGAAW; PAM sequence: AGAGAAA
aaaacttacttcatatctgg

SEQ ID NO: 12095 - DNA, 20 bp, Artificial Sequence
  Description of Artificial Sequence: Synthetic oligonucleotide
  Target: LAMA2; (-) strand; PAM type: NNAGAAW; PAM sequence: CAAGAAT
caatccttggatccctgggc

SEQ ID NO: 12096 - DNA, 20 bp, Artificial Sequence
  Description of Artificial Sequence: Synthetic oligonucleotide
  Target: LAMA2; (-) strand; PAM type: NNAGAAW; PAM sequence: AAAGAAT
acacttaaagcaccttttat

SEQ ID NO: 12097 - DNA, 20 bp, Artificial Sequence
  Description of Artificial Sequence: Synthetic oligonucleotide
  Target: LAMA2; (-) strand; PAM type: NNAGAAW; PAM sequence: CAAGAAA
tgcattgggacccctaatag

SEQ ID NO: 12098 - DNA, 20 bp, Artificial Sequence
  Description of Artificial Sequence: Synthetic oligonucleotide
  Target: LAMA2; (-) strand; PAM type: NNAGAAW; PAM sequence: ATAGAAT
ttgcaaagtccatggggcta

SEQ ID NO: 12099 - DNA, 20 bp, Artificial Sequence
  Description of Artificial Sequence: Synthetic oligonucleotide
  Target: LAMA2; (-) strand; PAM type: NNAGAAW; PAM sequence: TTAGAAA
ctcagaatactgggtaaaaa

SEQ ID NO: 12100 - DNA, 20 bp, Artificial Sequence
  Description of Artificial Sequence: Synthetic oligonucleotide
  Target: LAMA2; (-) strand; PAM type: NNAGAAW; PAM sequence: TCAGAAT
aatcttccttctgaaatgac

SEQ ID NO: 12101 - DNA, 20 bp, Artificial Sequence
  Description of Artificial Sequence: Synthetic oligonucleotide
  Target: LAMA2; (-) strand; PAM type: NNAGAAW; PAM sequence: TAAGAAT
taagtcattcaatgaagatg

SEQ ID NO: 12102 - DNA, 20 bp, Artificial Sequence
  Description of Artificial Sequence: Synthetic oligonucleotide
  Target: LAMA2; (-) strand; PAM type: NNAGAAW; PAM sequence: CTAGAAA
cgtgagccaccgcgcctggc

SEQ ID NO: 12103 - DNA, 20 bp, Artificial Sequence
  Description of Artificial Sequence: Synthetic oligonucleotide
  Target: LAMA2; (-) strand; PAM type: NNAGAAW; PAM sequence: TGAGAAA
ttagtacttggatgggaaac

SEQ ID NO: 12104 - DNA, 20 bp, Artificial Sequence
  Description of Artificial Sequence: Synthetic oligonucleotide
  Target: LAMA2; (-) strand; PAM type: NNAGAAW; PAM sequence: ACAGAAA
ctcatttgacagatgaggaa

SEQ ID NO: 12105 - DNA, 20 bp, Artificial Sequence
  Description of Artificial Sequence: Synthetic oligonucleotide
  Target: LAMA2; (-) strand; PAM type: NNAGAAW; PAM sequence: TGAGAAT
tatattttacagagccgtta

SEQ ID NO: 12106 - DNA, 20 bp, Artificial Sequence
  Description of Artificial Sequence: Synthetic oligonucleotide
  Target: LAMA2; (-) strand; PAM type: NNAGAAW; PAM sequence: GTAGAAA
tcttattaactcgactaaaa

SEQ ID NO: 12107 - DNA, 20 bp, Artificial Sequence
  Description of Artificial Sequence: Synthetic oligonucleotide
  Target: LAMA2; (-) strand; PAM type: NNAGAAW; PAM sequence: CTAGAAT
agactttggagtctgactcg

SEQ ID NO: 12108 - DNA, 20 bp, Artificial Sequence
  Description of Artificial Sequence: Synthetic oligonucleotide
  Target: LAMA2; (-) strand; PAM type: NNAGAAW; PAM sequence: GTAGAAT
cctaccatggtctattaaaa

SEQ ID NO: 12109 - DNA, 20 bp, Artificial Sequence
  Description of Artificial Sequence: Synthetic oligonucleotide
  Target: LAMA2; (-) strand; PAM type: NNAGAAW; PAM sequence: TAAGAAT
tcctaactacttatctattt

SEQ ID NO: 12110 - DNA, 20 bp, Artificial Sequence
  Description of Artificial Sequence: Synthetic oligonucleotide
  Target: LAMA2; (-) strand; PAM type: NNAGAAW; PAM sequence: GAAGAAA
gtaaattggcatagcctgtg

SEQ ID NO: 12111 - DNA, 20 bp, Artificial Sequence
  Description of Artificial Sequence: Synthetic oligonucleotide
  Target: LAMA2; (-) strand; PAM type: NNAGAAW; PAM sequence: TAAGAAT
catctttgttgtattggtga

SEQ ID NO: 12112 - DNA, 20 bp, Artificial Sequence
  Description of Artificial Sequence: Synthetic oligonucleotide
  Target: LAMA2; (-) strand; PAM type: NNAGAAW; PAM sequence: AGAGAAT
tccatcgtggacactaagga

SEQ ID NO: 12113 - DNA, 20 bp, Artificial Sequence
  Description of Artificial Sequence: Synthetic oligonucleotide
  Target: LAMA2; (-) strand; PAM type: NNAGAAW; PAM sequence: TGAGAAA
tgaaaacatgtttatgagtc

SEQ ID NO: 12114 - DNA, 20 bp, Artificial Sequence
  Description of Artificial Sequence: Synthetic oligonucleotide
  Target: LAMA2; (-) strand; PAM type: NNAGAAW; PAM sequence: CTAGAAA
agaaattaggctgttttctc

SEQ ID NO: 12115 - DNA, 20 bp, Artificial Sequence
  Description of Artificial Sequence: Synthetic oligonucleotide
  Target: LAMA2; (-) strand; PAM type: NNAGAAW; PAM sequence: TTAGAAA
tataattttaagttagtcat

SEQ ID NO: 12116 - DNA, 20 bp, Artificial Sequence
  Description of Artificial Sequence: Synthetic oligonucleotide
  Target: LAMA2; (-) strand; PAM type: NNAGAAW; PAM sequence: ATAGAAA
taaatgtaatgtgtttgcct

SEQ ID NO: 12117 - DNA, 20 bp, Artificial Sequence
  Description of Artificial Sequence: Synthetic oligonucleotide
  Target: LAMA2; (-) strand; PAM type: NNAGAAW; PAM sequence: AAAGAAT
aattagaaatgagataatac

SEQ ID NO: 12118 - DNA, 20 bp, Artificial Sequence
  Description of Artificial Sequence: Synthetic oligonucleotide
  Target: LAMA2; (-) strand; PAM type: NNAGAAW; PAM sequence: TTAGAAA
gatcatggaggggatagtaa

SEQ ID NO: 12119 - DNA, 20 bp, Artificial Sequence
  Description of Artificial Sequence: Synthetic oligonucleotide
  Target: LAMA2; (-) strand; PAM type: NNAGAAW; PAM sequence: TAAGAAT
tgaagggaatatttcaaatt

SEQ ID NO: 12120 - DNA, 20 bp, Artificial Sequence
  Description of Artificial Sequence: Synthetic oligonucleotide
  Target: LAMA2; (-) strand; PAM type: NNAGAAW; PAM sequence: ATAGAAA
aaacattcttaggtgcatta

SEQ ID NO: 12121 - DNA, 20 bp, Artificial Sequence
  Description of Artificial Sequence: Synthetic oligonucleotide
  Target: LAMA2; (-) strand; PAM type: NNAGAAW; PAM sequence: TTAGAAA
aatgcagtttgtgtaagtac

SEQ ID NO: 12122 - DNA, 20 bp, Artificial Sequence
  Description of Artificial Sequence: Synthetic oligonucleotide
  Target: LAMA2; (-) strand; PAM type: NNAGAAW; PAM sequence: ACAGAAA
aagtgtgatctctaaatacc

SEQ ID NO: 12123 - DNA, 20 bp, Artificial Sequence
  Description of Artificial Sequence: Synthetic oligonucleotide
  Target: LAMA2; (-) strand; PAM type: NNAGAAW; PAM sequence: TGAGAAA
atgggcaagtatctttattt

SEQ ID NO: 12124 - DNA, 20 bp, Artificial Sequence
  Description of Artificial Sequence: Synthetic oligonucleotide
  Target: LAMA2; (-) strand; PAM type: NNAGAAW; PAM sequence: GGAGAAT
ctactcgggaggctgaagca

SEQ ID NO: 12125 - DNA, 20 bp, Artificial Sequence
  Description of Artificial Sequence: Synthetic oligonucleotide
  Target: LAMA2; (-) strand; PAM type: NNAGAAW; PAM sequence: GGAGAAA
gagaccagcctgaccaacat

SEQ ID NO: 12126 - DNA, 20 bp, Artificial Sequence
  Description of Artificial Sequence: Synthetic oligonucleotide
  Target: LAMA2; (-) strand; PAM type: NNAGAAW; PAM sequence: TAAGAAA
ctacacacacaaaaagaaca

SEQ ID NO: 12127 - DNA, 20 bp, Artificial Sequence
  Description of Artificial Sequence: Synthetic oligonucleotide
  Target: LAMA2; (-) strand; PAM type: NNAGAAW; PAM sequence: GCAGAAA
ataaaagtgggagggctatg

SEQ ID NO: 12128 - DNA, 20 bp, Artificial Sequence
  Description of Artificial Sequence: Synthetic oligonucleotide
  Target: LAMA2; (-) strand; PAM type: NNAGAAW; PAM sequence: CCAGAAT
tagaagggacaagtaacctg

SEQ ID NO: 12129 - DNA, 20 bp, Artificial Sequence
  Description of Artificial Sequence: Synthetic oligonucleotide
  Target: LAMA2; (-) strand; PAM type: NNAGAAW; PAM sequence: AAAGAAT
aagttaaagttaaactaaca

SEQ ID NO: 12130 - DNA, 20 bp, Artificial Sequence
  Description of Artificial Sequence: Synthetic oligonucleotide
  Target: LAMA2; (-) strand; PAM type: NNAGAAW; PAM sequence: AAAGAAA
ctaactagaataattaagtt

SEQ ID NO: 12131 - DNA, 20 bp, Artificial Sequence
  Description of Artificial Sequence: Synthetic oligonucleotide
  Target: LAMA2; (-) strand; PAM type: NNAGAAW; PAM sequence: CTAGAAT
aatgtgaaaagttaaactaa

SEQ ID NO: 12132 - DNA, 20 bp, Artificial Sequence
  Description of Artificial Sequence: Synthetic oligonucleotide
  Target: LAMA2; (-) strand; PAM type: NNAGAAW; PAM sequence: AAAGAAT
cagagcaagaaaaaaaaaat

SEQ ID NO: 12133 - DNA, 20 bp, Artificial Sequence
  Description of Artificial Sequence: Synthetic oligonucleotide
  Target: LAMA2; (-) strand; PAM type: NNAGAAW; PAM sequence: CAAGAAA
caccagcctgggtgacagag

SEQ ID NO: 12134 - DNA, 20 bp, Artificial Sequence
  Description of Artificial Sequence: Synthetic oligonucleotide
  Target: LAMA2; (-) strand; PAM type: NNAGAAW; PAM sequence: TGAGAAT
aagaagaaaaagaagggcac

SEQ ID NO: 12135 - DNA, 20 bp, Artificial Sequence
  Description of Artificial Sequence: Synthetic oligonucleotide
  Target: LAMA2; (-) strand; PAM type: NNAGAAW; PAM sequence: GAAGAAA
ttgggtgtgatgggtgtaaa

SEQ ID NO: 12136 - DNA, 20 bp, Artificial Sequence
  Description of Artificial Sequence: Synthetic oligonucleotide
  Target: LAMA2; (-) strand; PAM type: NNAGAAW; PAM sequence: AAAGAAT
tctctagctctcgatgggct

SEQ ID NO: 12137 - DNA, 20 bp, Artificial Sequence
  Description of Artificial Sequence: Synthetic oligonucleotide
  Target: LAMA2; (-) strand; PAM type: NNAGAAW; PAM sequence: GTAGAAA
aatatccacaaatagaacat

SEQ ID NO: 12138 - DNA, 20 bp, Artificial Sequence
  Description of Artificial Sequence: Synthetic oligonucleotide
  Target: LAMA2; (-) strand; PAM type: NNAGAAW; PAM sequence: AAAGAAT
tcttcaataaaattcaagta

SEQ ID NO: 12139 - DNA, 20 bp, Artificial Sequence
  Description of Artificial Sequence: Synthetic oligonucleotide
  Target: LAMA2; (-) strand; PAM type: NNAGAAW; PAM sequence: TGAGAAA
gccctactcaagatgtttat

SEQ ID NO: 12140 - DNA, 20 bp, Artificial Sequence
  Description of Artificial Sequence: Synthetic oligonucleotide
  Target: LAMA2; (-) strand; PAM type: NNAGAAW; PAM sequence: ATAGAAA
gcaccaaacaatgaatcatc

SEQ ID NO: 12141 - DNA, 20 bp, Artificial Sequence
  Description of Artificial Sequence: Synthetic oligonucleotide
  Target: LAMA2; (-) strand; PAM type: NNAGAAW; PAM sequence: TCAGAAT
gtcactcatttaacttcagg

SEQ ID NO: 12142 - DNA, 20 bp, Artificial Sequence
  Description of Artificial Sequence: Synthetic oligonucleotide
  Target: LAMA2; (-) strand; PAM type: NNAGAAW; PAM sequence: CTAGAAA
tgtggggactttttaaagta

SEQ ID NO: 12143 - DNA, 20 bp, Artificial Sequence
  Description of Artificial Sequence: Synthetic oligonucleotide
  Target: LAMA2; (-) strand; PAM type: NNAGAAW; PAM sequence: AAAGAAT
ggtaattttaaggaactttt

SEQ ID NO: 12144 - DNA, 20 bp, Artificial Sequence
  Description of Artificial Sequence: Synthetic oligonucleotide
  Target: LAMA2; (-) strand; PAM type: NNAGAAW; PAM sequence: AGAGAAA
taagctaagaaaaaagggta

SEQ ID NO: 12145 - DNA, 20 bp, Artificial Sequence
  Description of Artificial Sequence: Synthetic oligonucleotide
  Target: LAMA2; (-) strand; PAM type: NNAGAAW; PAM sequence: TAAGAAA
cttgccactgaaatctaagc

SEQ ID NO: 12146 - DNA, 20 bp, Artificial Sequence
  Description of Artificial Sequence: Synthetic oligonucleotide
  Target: LAMA2; (-) strand; PAM type: NNAGAAW; PAM sequence: TCAGAAA
gaaactgccctgtgctttgc

SEQ ID NO: 12147 - DNA, 20 bp, Artificial Sequence
  Description of Artificial Sequence: Synthetic oligonucleotide
  Target: LAMA2; (-) strand; PAM type: NNAGAAW; PAM sequence: ATAGAAA
gggggaacaagtgagatgga

SEQ ID NO: 12148 - DNA, 20 bp, Artificial Sequence
  Description of Artificial Sequence: Synthetic oligonucleotide
  Target: LAMA2; (-) strand; PAM type: NNAGAAW; PAM sequence: AAAGAAA
agagcaagaacctgtctcaa

SEQ ID NO: 12149 - DNA, 20 bp, Artificial Sequence
  Description of Artificial Sequence: Synthetic oligonucleotide
  Target: LAMA2; (-) strand; PAM type: NNAGAAW; PAM sequence: GGAGAAT
ctactcgggaggccaaggca

SEQ ID NO: 12150 - DNA, 20 bp, Artificial Sequence
  Description of Artificial Sequence: Synthetic oligonucleotide
  Target: LAMA2; (-) strand; PAM type: NNAGAAW; PAM sequence: TAAGAAT
ggactttgtcaaagttcttt

SEQ ID NO: 12151 - DNA, 20 bp, Artificial Sequence
  Description of Artificial Sequence: Synthetic oligonucleotide
  Target: LAMA2; (-) strand; PAM type: NNAGAAW; PAM sequence: CCAGAAA
ttttagaaaaaaacctttga

SEQ ID NO: 12152 - DNA, 20 bp, Artificial Sequence
  Description of Artificial Sequence: Synthetic oligonucleotide
  Target: LAMA2; (-) strand; PAM type: NNAGAAW; PAM sequence: TTAGAAA
aaggcactggtcaagccatt

SEQ ID NO: 12153 - DNA, 20 bp, Artificial Sequence
  Description of Artificial Sequence: Synthetic oligonucleotide
  Target: LAMA2; (-) strand; PAM type: NNAGAAW; PAM sequence: TAAGAAA
agctctgaaaattgagggat

SEQ ID NO: 12154 - DNA, 20 bp, Artificial Sequence
  Description of Artificial Sequence: Synthetic oligonucleotide
  Target: LAMA2; (-) strand; PAM type: NNAGAAW; PAM sequence: GCAGAAT
ctgctgtgagtccactgggg

SEQ ID NO: 12155 - DNA, 20 bp, Artificial Sequence
  Description of Artificial Sequence: Synthetic oligonucleotide
  Target: LAMA2; (-) strand; PAM type: NNAGAAW; PAM sequence: TCAGAAA
cacgcagcttgcagtcttcc

SEQ ID NO: 12156 - DNA, 20 bp, Artificial Sequence
  Description of Artificial Sequence: Synthetic oligonucleotide
  Target: LAMA2; (-) strand; PAM type: NNAGAAW; PAM sequence: ATAGAAT
agtcatgaatacttctatta

SEQ ID NO: 12157 - DNA, 20 bp, Artificial Sequence
  Description of Artificial Sequence: Synthetic oligonucleotide
  Target: LAMA2; (-) strand; PAM type: NNAGAAW; PAM sequence: TGAGAAA
ctcttagaacatgcagtaca

SEQ ID NO: 12158 - DNA, 20 bp, Artificial Sequence
  Description of Artificial Sequence: Synthetic oligonucleotide
  Target: LAMA2; (-) strand; PAM type: NNAGAAW; PAM sequence: TGAGAAA
taaaaatttatgtatatttc

SEQ ID NO: 12159 - DNA, 20 bp, Artificial Sequence
  Description of Artificial Sequence: Synthetic oligonucleotide
  Target: LAMA2; (-) strand; PAM type: NNAGAAW; PAM sequence: TAAGAAT
tacatattagcgtaattctt

SEQ ID NO: 12160 - DNA, 20 bp, Artificial Sequence
  Description of Artificial Sequence: Synthetic oligonucleotide
  Target: LAMA2; (-) strand; PAM type: NNAGAAW; PAM sequence: AGAGAAA
gaccctgtaaaatacccagg

SEQ ID NO: 12161 - DNA, 20 bp, Artificial Sequence
  Description of Artificial Sequence: Synthetic oligonucleotide
  Target: LAMA2; (-) strand; PAM type: NNAGAAW; PAM sequence: AAAGAAA
tctattgtactcagtgaata

SEQ ID NO: 12162 - DNA, 20 bp, Artificial Sequence
  Description of Artificial Sequence: Synthetic oligonucleotide
  Target: LAMA2; (-) strand; PAM type: NNAGAAW; PAM sequence: ACAGAAA
acaaaagcatgcaaagtcaa

SEQ ID NO: 12163 - DNA, 20 bp, Artificial Sequence
  Description of Artificial Sequence: Synthetic oligonucleotide
  Target: LAMA2; (-) strand; PAM type: NNAGAAW; PAM sequence: GGAGAAT
ggcaaaatatactggcacca

SEQ ID NO: 12164 - DNA, 20 bp, Artificial Sequence
  Description of Artificial Sequence: Synthetic oligonucleotide
  Target: LAMA2; (-) strand; PAM type: NNAGAAW; PAM sequence: TCAGAAT
aaaaatgctataatataatc

SEQ ID NO: 12165 - DNA, 20 bp, Artificial Sequence
  Description of Artificial Sequence: Synthetic oligonucleotide
  Target: LAMA2; (-) strand; PAM type: NNAGAAW; PAM sequence: ATAGAAA
ttggcaaatactatttcata

SEQ ID NO: 12166 - DNA, 20 bp, Artificial Sequence
  Description of Artificial Sequence: Synthetic oligonucleotide
  Target: LAMA2; (-) strand; PAM type: NNAGAAW; PAM sequence: GTAGAAA
gttgttccaaataactgtca

SEQ ID NO: 12167 - DNA, 20 bp, Artificial Sequence
  Description of Artificial Sequence: Synthetic oligonucleotide
  Target: LAMA2; (-) strand; PAM type: NNAGAAW; PAM sequence: CTAGAAT
ttttaaggttctttggcttt

SEQ ID NO: 12168 - DNA, 20 bp, Artificial Sequence
  Description of Artificial Sequence: Synthetic oligonucleotide
  Target: LAMA2; (-) strand; PAM type: NNAGAAW; PAM sequence: ACAGAAT
ggagtgaattatcttctgag

SEQ ID NO: 12169 - DNA, 20 bp, Artificial Sequence
  Description of Artificial Sequence: Synthetic oligonucleotide
  Target: LAMA2; (-) strand; PAM type: NNAGAAW; PAM sequence: AAAGAAA
ggcccttcttgtgcagaatt

SEQ ID NO: 12170 - DNA, 20 bp, Artificial Sequence
  Description of Artificial Sequence: Synthetic oligonucleotide
  Target: LAMA2; (-) strand; PAM type: NNAGAAW; PAM sequence: GCAGAAT
gcctaacaggcccttcttgt

SEQ ID NO: 12171 - DNA, 20 bp, Artificial Sequence
  Description of Artificial Sequence: Synthetic oligonucleotide
  Target: LAMA2; (-) strand; PAM type: NNAGAAW; PAM sequence: AAAGAAT
ttccatgactactatcacca

SEQ ID NO: 12172 - DNA, 20 bp, Artificial Sequence
  Description of Artificial Sequence: Synthetic oligonucleotide
  Target: LAMA2; (-) strand; PAM type: NNAGAAW; PAM sequence: ACAGAAT
gggaaagttaaacccatttt

SEQ ID NO: 12173 - DNA, 20 bp, Artificial Sequence
  Description of Artificial Sequence: Synthetic oligonucleotide
  Target: LAMA2; (-) strand; PAM type: NNAGAAW; PAM sequence: CAAGAAA
aaggactctaacgatgttac

SEQ ID NO: 12174 - DNA, 20 bp, Artificial Sequence
  Description of Artificial Sequence: Synthetic oligonucleotide
  Target: LAMA2; (-) strand; PAM type: NNAGAAW; PAM sequence: AAAGAAA
tcattatcttaatctacaaa

SEQ ID NO: 12175 - DNA, 20 bp, Artificial Sequence
  Description of Artificial Sequence: Synthetic oligonucleotide
  Target: LAMA2; (-) strand; PAM type: NNAGAAW; PAM sequence: AAAGAAT
gttggaagccccatctacat

SEQ ID NO: 12176 - DNA, 20 bp, Artificial Sequence
  Description of Artificial Sequence: Synthetic oligonucleotide
  Target: LAMA2; (-) strand; PAM type: NNAGAAW; PAM sequence: GAAGAAA
ccatatatttaagtaataaa

SEQ ID NO: 12177 - DNA, 20 bp, Artificial Sequence
  Description of Artificial Sequence: Synthetic oligonucleotide
  Target: LAMA2; (-) strand; PAM type: NNAGAAW; PAM sequence: TCAGAAA
acaaacccttctgtccctta

SEQ ID NO: 12178 - DNA, 20 bp, Artificial Sequence
  Description of Artificial Sequence: Synthetic oligonucleotide
  Target: LAMA2; (-) strand; PAM type: NNAGAAW; PAM sequence: GGAGAAT
ctactagggaggctgaggca

SEQ ID NO: 12179 - DNA, 20 bp, Artificial Sequence
  Description of Artificial Sequence: Synthetic oligonucleotide
  Target: LAMA2; (-) strand; PAM type: NNAGAAW; PAM sequence: AGAGAAA
tcattaccctgttttgcaaa

SEQ ID NO: 12180 - DNA, 20 bp, Artificial Sequence
  Description of Artificial Sequence: Synthetic oligonucleotide
  Target: LAMA2; (-) strand; PAM type: NNAGAAW; PAM sequence: ATAGAAA
tcatgtgttctaatttgagt

SEQ ID NO: 12181 - DNA, 20 bp, Artificial Sequence
  Description of Artificial Sequence: Synthetic oligonucleotide
  Target: LAMA2; (-) strand; PAM type: NNAGAAW; PAM sequence: TGAGAAT
ccacaagagaagccaaatac

SEQ ID NO: 12182 - DNA, 20 bp, Artificial Sequence
  Description of Artificial Sequence: Synthetic oligonucleotide
  Target: LAMA2; (-) strand; PAM type: NNAGAAW; PAM sequence: AAAGAAA
aagcatatccaatacctatg

SEQ ID NO: 12183 - DNA, 20 bp, Artificial Sequence
  Description of Artificial Sequence: Synthetic oligonucleotide
  Target: LAMA2; (-) strand; PAM type: NNAGAAW; PAM sequence: TTAGAAA
ccattatattttatctgttt

SEQ ID NO: 12184 - DNA, 20 bp, Artificial Sequence
  Description of Artificial Sequence: Synthetic oligonucleotide
  Target: LAMA2; (-) strand; PAM type: NNAGAAW; PAM sequence: TAAGAAA
gaaagcagcagaccctcccc

SEQ ID NO: 12185 - DNA, 20 bp, Artificial Sequence
  Description of Artificial Sequence: Synthetic oligonucleotide
  Target: LAMA2; (-) strand; PAM type: NNAGAAW; PAM sequence: GCAGAAA
ccaggcctcctggcatggat

SEQ ID NO: 12186 - DNA, 20 bp, Artificial Sequence
  Description of Artificial Sequence: Synthetic oligonucleotide
  Target: LAMA2; (-) strand; PAM type: NNAGAAW; PAM sequence: GTAGAAT
tagcagaactttgcctttat

SEQ ID NO: 12187 - DNA, 20 bp, Artificial Sequence
  Description of Artificial Sequence: Synthetic oligonucleotide
  Target: LAMA2; (-) strand; PAM type: NNAGAAW; PAM sequence: GAAGAAA
tcacctaaacattcagatca

SEQ ID NO: 12188 - DNA, 20 bp, Artificial Sequence
  Description of Artificial Sequence: Synthetic oligonucleotide
  Target: LAMA2; (-) strand; PAM type: NNAGAAW; PAM sequence: GTAGAAA
tcatctccagaaactggaag

SEQ ID NO: 12189 - DNA, 20 bp, Artificial Sequence
  Description of Artificial Sequence: Synthetic oligonucleotide
  Target: LAMA2; (-) strand; PAM type: NNAGAAW; PAM sequence: CCAGAAA
aaaaaaatcatatctcatct

SEQ ID NO: 12190 - DNA, 20 bp, Artificial Sequence
  Description of Artificial Sequence: Synthetic oligonucleotide
  Target: LAMA2; (-) strand; PAM type: NNAGAAW; PAM sequence: GAAGAAA
atacagccttgcagggaatt

SEQ ID NO: 12191 - DNA, 20 bp, Artificial Sequence
  Description of Artificial Sequence: Synthetic oligonucleotide
  Target: LAMA2; (-) strand; PAM type: NNAGAAW; PAM sequence: CAAGAAA
ccagtcattgtcactatcaa

SEQ ID NO: 12192 - DNA, 20 bp, Artificial Sequence
  Description of Artificial Sequence: Synthetic oligonucleotide
  Target: LAMA2; (-) strand; PAM type: NNAGAAW; PAM sequence: GGAGAAA
atgttcattagaaacggagt

SEQ ID NO: 12193 - DNA, 20 bp, Artificial Sequence
  Description of Artificial Sequence: Synthetic oligonucleotide
  Target: LAMA2; (-) strand; PAM type: NNAGAAW; PAM sequence: TTAGAAA
aaccatactggaaatgttca

SEQ ID NO: 12194 - DNA, 20 bp, Artificial Sequence
  Description of Artificial Sequence: Synthetic oligonucleotide
  Target: LAMA2; (-) strand; PAM type: NNAGAAW; PAM sequence: ATAGAAA
aattcaactcatggagatag

SEQ ID NO: 12195 - DNA, 20 bp, Artificial Sequence
  Description of Artificial Sequence: Synthetic oligonucleotide
  Target: LAMA2; (-) strand; PAM type: NNAGAAW; PAM sequence: AAAGAAT
ggatatgaataagccataaa

SEQ ID NO: 12196 - DNA, 20 bp, Artificial Sequence
  Description of Artificial Sequence: Synthetic oligonucleotide
  Target: LAMA2; (-) strand; PAM type: NNAGAAW; PAM sequence: AAAGAAA
ccatcagcagatgaacggat

SEQ ID NO: 12197 - DNA, 20 bp, Artificial Sequence
  Description of Artificial Sequence: Synthetic oligonucleotide
  Target: LAMA2; (-) strand; PAM type: NNAGAAW; PAM sequence: AAAGAAT
cactcttagatatataccca

SEQ ID NO: 12198 - DNA, 20 bp, Artificial Sequence
  Description of Artificial Sequence: Synthetic oligonucleotide
  Target: LAMA2; (-) strand; PAM type: NNAGAAW; PAM sequence: GGAGAAA
acaaatgctgacgaggatgt

SEQ ID NO: 12199 - DNA, 20 bp, Artificial Sequence
  Description of Artificial Sequence: Synthetic oligonucleotide
  Target: LAMA2; (-) strand; PAM type: NNAGAAW; PAM sequence: AGAGAAA
gctcaacatcactgatcatc

SEQ ID NO: 12200 - DNA, 20 bp, Artificial Sequence
  Description of Artificial Sequence: Synthetic oligonucleotide
  Target: LAMA2; (-) strand; PAM type: NNAGAAW; PAM sequence: CCAGAAT
atctgagaagggattaataa

SEQ ID NO: 12201 - DNA, 20 bp, Artificial Sequence
  Description of Artificial Sequence: Synthetic oligonucleotide
  Target: LAMA2; (-) strand; PAM type: NNAGAAW; PAM sequence: ACAGAAT
acaaagtgaagtgacaaccc

SEQ ID NO: 12202 - DNA, 20 bp, Artificial Sequence
  Description of Artificial Sequence: Synthetic oligonucleotide
  Target: LAMA2; (-) strand; PAM type: NNAGAAW; PAM sequence: GAAGAAT
aaactggatattcatatgcg

SEQ ID NO: 12203 - DNA, 20 bp, Artificial Sequence
  Description of Artificial Sequence: Synthetic oligonucleotide
  Target: LAMA2; (-) strand; PAM type: NNAGAAW; PAM sequence: CCAGAAA
agtggaacaggatagagaag

SEQ ID NO: 12204 - DNA, 20 bp, Artificial Sequence
  Description of Artificial Sequence: Synthetic oligonucleotide
  Target: LAMA2; (-) strand; PAM type: NNAGAAW; PAM sequence: GAAGAAT
atgcaaaaggaacaaaattg

SEQ ID NO: 12205 - DNA, 20 bp, Artificial Sequence
  Description of Artificial Sequence: Synthetic oligonucleotide
  Target: LAMA2; (-) strand; PAM type: NNAGAAW; PAM sequence: CCAGAAT
tcctaaaattcatatgaaac

SEQ ID NO: 12206 - DNA, 20 bp, Artificial Sequence
  Description of Artificial Sequence: Synthetic oligonucleotide
  Target: LAMA2; (-) strand; PAM type: NNAGAAW; PAM sequence: ATAGAAA
caatgagattcttcacagaa

SEQ ID NO: 12207 - DNA, 20 bp, Artificial Sequence
  Description of Artificial Sequence: Synthetic oligonucleotide
  Target: LAMA2; (-) strand; PAM type: NNAGAAW; PAM sequence: ACAGAAA
aaataccaatgagattcttc

SEQ ID NO: 12208 - DNA, 20 bp, Artificial Sequence
  Description of Artificial Sequence: Synthetic oligonucleotide
  Target: LAMA2; (-) strand; PAM type: NNAGAAW; PAM sequence: GAAGAAT
tattccatgttaatggattg

SEQ ID NO: 12209 - DNA, 20 bp, Artificial Sequence
  Description of Artificial Sequence: Synthetic oligonucleotide
  Target: LAMA2; (-) strand; PAM type: NNAGAAW; PAM sequence: CAAGAAA
aaaactataaaacaatgatg

SEQ ID NO: 12210 - DNA, 20 bp, Artificial Sequence
  Description of Artificial Sequence: Synthetic oligonucleotide
  Target: LAMA2; (-) strand; PAM type: NNAGAAW; PAM sequence: ATAGAAA
tgattgtttgctgttggcat

SEQ ID NO: 12211 - DNA, 20 bp, Artificial Sequence
  Description of Artificial Sequence: Synthetic oligonucleotide
  Target: LAMA2; (-) strand; PAM type: NNAGAAW; PAM sequence: ATAGAAA
cagttgataatatattcttg

SEQ ID NO: 12212 - DNA, 20 bp, Artificial Sequence
  Description of Artificial Sequence: Synthetic oligonucleotide
  Target: LAMA2; (-) strand; PAM type: NNAGAAW; PAM sequence: GCAGAAA
tgccagccatctgtgaattt

SEQ ID NO: 12213 - DNA, 20 bp, Artificial Sequence
  Description of Artificial Sequence: Synthetic oligonucleotide
  Target: LAMA2; (-) strand; PAM type: NNAGAAW; PAM sequence: AGAGAAT
cttgtcataaaatttgacta

SEQ ID NO: 12214 - DNA, 20 bp, Artificial Sequence
  Description of Artificial Sequence: Synthetic oligonucleotide
  Target: LAMA2; (-) strand; PAM type: NNAGAAW; PAM sequence: CCAGAAT
attttctggttttgtttgat

SEQ ID NO: 12215 - DNA, 20 bp, Artificial Sequence
  Description of Artificial Sequence: Synthetic oligonucleotide
  Target: LAMA2; (-) strand; PAM type: NNAGAAW; PAM sequence: TTAGAAA
tcaggggatggcaagggaca

SEQ ID NO: 12216 - DNA, 20 bp, Artificial Sequence
  Description of Artificial Sequence: Synthetic oligonucleotide
  Target: LAMA2; (-) strand; PAM type: NNAGAAW; PAM sequence: ACAGAAA
gaattgctctgcaaaataaa

SEQ ID NO: 12217 - DNA, 20 bp, Artificial Sequence
  Description of Artificial Sequence: Synthetic oligonucleotide
  Target: LAMA2; (-) strand; PAM type: NNAGAAW; PAM sequence: CAAGAAA
caagtcttctatttattagg

SEQ ID NO: 12218 - DNA, 20 bp, Artificial Sequence
  Description of Artificial Sequence: Synthetic oligonucleotide
  Target: LAMA2; (-) strand; PAM type: NNAGAAW; PAM sequence: AGAGAAA
caccaactgaactgagtatc

SEQ ID NO: 12219 - DNA, 20 bp, Artificial Sequence
  Description of Artificial Sequence: Synthetic oligonucleotide
  Target: LAMA2; (-) strand; PAM type: NNAGAAW; PAM sequence: AGAGAAA
cacacattttattaataaag

SEQ ID NO: 12220 - DNA, 20 bp, Artificial Sequence
  Description of Artificial Sequence: Synthetic oligonucleotide
  Target: LAMA2; (-) strand; PAM type: NNAGAAW; PAM sequence: AAAGAAA
tagaagtctctctgttgggt

SEQ ID NO: 12221 - DNA, 20 bp, Artificial Sequence
  Description of Artificial Sequence: Synthetic oligonucleotide
  Target: LAMA2; (-) strand; PAM type: NNAGAAW; PAM sequence: AAAGAAT
atacacactgagattgactt

SEQ ID NO: 12222 - DNA, 20 bp, Artificial Sequence
  Description of Artificial Sequence: Synthetic oligonucleotide
  Target: LAMA2; (-) strand; PAM type: NNAGAAW; PAM sequence: TTAGAAT
tttctgggctaccttccctt

SEQ ID NO: 12223 - DNA, 20 bp, Artificial Sequence
  Description of Artificial Sequence: Synthetic oligonucleotide
  Target: LAMA2; (-) strand; PAM type: NNAGAAW; PAM sequence: TCAGAAA
tcaacaatatcatgaagaaa

SEQ ID NO: 12224 - DNA, 20 bp, Artificial Sequence
  Description of Artificial Sequence: Synthetic oligonucleotide
  Target: LAMA2; (-) strand; PAM type: NNAGAAW; PAM sequence: GAAGAAA
ctacacatcaacaatatcat

SEQ ID NO: 12225 - DNA, 20 bp, Artificial Sequence
  Description of Artificial Sequence: Synthetic oligonucleotide
  Target: LAMA2; (-) strand; PAM type: NNAGAAW; PAM sequence: AAAGAAT
caatttagctttctcccaac

SEQ ID NO: 12226 - DNA, 20 bp, Artificial Sequence
  Description of Artificial Sequence: Synthetic oligonucleotide
  Target: LAMA2; (-) strand; PAM type: NNAGAAW; PAM sequence: GGAGAAT
agactgtgtgttccttaaga

SEQ ID NO: 12227 - DNA, 20 bp, Artificial Sequence
  Description of Artificial Sequence: Synthetic oligonucleotide
  Target: LAMA2; (-) strand; PAM type: NNAGAAW; PAM sequence: TGAGAAA
ggatgcttttttaaacaaat

SEQ ID NO: 12228 - DNA, 20 bp, Artificial Sequence
  Description of Artificial Sequence: Synthetic oligonucleotide
  Target: LAMA2; (-) strand; PAM type: NNAGAAW; PAM sequence: TTAGAAT
tgcagggctgaaagaggtgt

SEQ ID NO: 12229 - DNA, 20 bp, Artificial Sequence
  Description of Artificial Sequence: Synthetic oligonucleotide
  Target: LAMA2; (-) strand; PAM type: NNAGAAW; PAM sequence: ATAGAAA
gattcctatttaataaccaa

SEQ ID NO: 12230 - DNA, 20 bp, Artificial Sequence
  Description of Artificial Sequence: Synthetic oligonucleotide
  Target: LAMA2; (-) strand; PAM type: NNAGAAW; PAM sequence: CAAGAAA
gagcagaaagaggaagaaag

SEQ ID NO: 12231 - DNA, 20 bp, Artificial Sequence
  Description of Artificial Sequence: Synthetic oligonucleotide
  Target: LAMA2; (-) strand; PAM type: NNAGAAW; PAM sequence: GAAGAAA
tgaaaattgagcagaaagag

SEQ ID NO: 12232 - DNA, 20 bp, Artificial Sequence
  Description of Artificial Sequence: Synthetic oligonucleotide
  Target: LAMA2; (-) strand; PAM type: NNAGAAW; PAM sequence: GCAGAAA
gaggacagtttgaaaattga

SEQ ID NO: 12233 - DNA, 20 bp, Artificial Sequence
  Description of Artificial Sequence: Synthetic oligonucleotide
  Target: LAMA2; (-) strand; PAM type: NNAGAAW; PAM sequence: TGAGAAA
tgcatgtaaaaggagcttgg

SEQ ID NO: 12234 - DNA, 20 bp, Artificial Sequence
  Description of Artificial Sequence: Synthetic oligonucleotide
  Target: LAMA2; (-) strand; PAM type: NNAGAAW; PAM sequence: GAAGAAA
gaaaagaaatgaagtcttaa

SEQ ID NO: 12235 - DNA, 20 bp, Artificial Sequence
  Description of Artificial Sequence: Synthetic oligonucleotide
  Target: LAMA2; (-) strand; PAM type: NNAGAAW; PAM sequence: AAAGAAA
acattcgacaaggtaaaaga

SEQ ID NO: 12236 - DNA, 20 bp, Artificial Sequence
  Description of Artificial Sequence: Synthetic oligonucleotide
  Target: LAMA2; (-) strand; PAM type: NNAGAAW; PAM sequence: AAAGAAA
gcaagacattcgacaaggta

SEQ ID NO: 12237 - DNA, 20 bp, Artificial Sequence
  Description of Artificial Sequence: Synthetic oligonucleotide
  Target: LAMA2; (-) strand; PAM type: NNAGAAW; PAM sequence: GAAGAAA
agaattcttttgaagctggt

SEQ ID NO: 12238 - DNA, 20 bp, Artificial Sequence
  Description of Artificial Sequence: Synthetic oligonucleotide
  Target: LAMA2; (-) strand; PAM type: NNAGAAW; PAM sequence: ACAGAAT
agcccctgaaatttgagatg

SEQ ID NO: 12239 - DNA, 20 bp, Artificial Sequence
  Description of Artificial Sequence: Synthetic oligonucleotide
  Target: LAMA2; (-) strand; PAM type: NNAGAAW; PAM sequence: TGAGAAA
actagaagttctggtctaaa

SEQ ID NO: 12240 - DNA, 20 bp, Artificial Sequence
  Description of Artificial Sequence: Synthetic oligonucleotide
  Target: LAMA2; (-) strand; PAM type: NNAGAAW; PAM sequence: TTAGAAT
aaattctacctcacgtcttt

SEQ ID NO: 12241 - DNA, 20 bp, Artificial Sequence
  Description of Artificial Sequence: Synthetic oligonucleotide
  Target: LAMA2; (-) strand; PAM type: NNAGAAW; PAM sequence: CAAGAAA
aaaaatttgaggccaggtga

SEQ ID NO: 12242 - DNA, 20 bp, Artificial Sequence
  Description of Artificial Sequence: Synthetic oligonucleotide
  Target: LAMA2; (-) strand; PAM type: NNAGAAW; PAM sequence: TCAGAAA
agctggtaataattctgctt

SEQ ID NO: 12243 - DNA, 20 bp, Artificial Sequence
  Description of Artificial Sequence: Synthetic oligonucleotide
  Target: LAMA2; (-) strand; PAM type: NNAGAAW; PAM sequence: CCAGAAT
gtctctaggaaagacatcag

SEQ ID NO: 12244 - DNA, 20 bp, Artificial Sequence
  Description of Artificial Sequence: Synthetic oligonucleotide
  Target: LAMA2; (-) strand; PAM type: NNAGAAW; PAM sequence: AAAGAAA
aaccagtaacataagagagc

SEQ ID NO: 12245 - DNA, 20 bp, Artificial Sequence
  Description of Artificial Sequence: Synthetic oligonucleotide
  Target: LAMA2; (-) strand; PAM type: NNAGAAW; PAM sequence: TCAGAAA
gtatattaattttaaaaaaa

SEQ ID NO: 12246 - DNA, 20 bp, Artificial Sequence
  Description of Artificial Sequence: Synthetic oligonucleotide
  Target: LAMA2; (-) strand; PAM type: NNAGAAW; PAM sequence: GTAGAAT
taagtaggttggatattcat

SEQ ID NO: 12247 - DNA, 20 bp, Artificial Sequence
  Description of Artificial Sequence: Synthetic oligonucleotide
  Target: LAMA2; (-) strand; PAM type: NNAGAAW; PAM sequence: CTAGAAT
gttataacatatgaaaacat

SEQ ID NO: 12248 - DNA, 20 bp, Artificial Sequence
  Description of Artificial Sequence: Synthetic oligonucleotide
  Target: LAMA2; (-) strand; PAM type: NNAGAAW; PAM sequence: AAAGAAA
ttactaatagaattgtagag

SEQ ID NO: 12249 - DNA, 20 bp, Artificial Sequence
  Description of Artificial Sequence: Synthetic oligonucleotide
  Target: LAMA2; (-) strand; PAM type: NNAGAAW; PAM sequence: AGAGAAA
agccttactaatagaattgt

SEQ ID NO: 12250 - DNA, 20 bp, Artificial Sequence
  Description of Artificial Sequence: Synthetic oligonucleotide
  Target: LAMA2; (-) strand; PAM type: NNAGAAW; PAM sequence: ATAGAAT
ttttgtttttagccttacta

SEQ ID NO: 12251 - DNA, 20 bp, Artificial Sequence
  Description of Artificial Sequence: Synthetic oligonucleotide
  Target: LAMA2; (-) strand; PAM type: NNAGAAW; PAM sequence: AAAGAAT
ttagcaccatctgaatacag

SEQ ID NO: 12252 - DNA, 20 bp, Artificial Sequence
  Description of Artificial Sequence: Synthetic oligonucleotide
  Target: LAMA2; (-) strand; PAM type: NNAGAAW; PAM sequence: ACAGAAA
tgaattagcaccatctgaat

SEQ ID NO: 12253 - DNA, 20 bp, Artificial Sequence
  Description of Artificial Sequence: Synthetic oligonucleotide
  Target: LAMA2; (-) strand; PAM type: NNAGAAW; PAM sequence: TGAGAAA
tttaatattatttatagact

SEQ ID NO: 12254 - DNA, 20 bp, Artificial Sequence
  Description of Artificial Sequence: Synthetic oligonucleotide
  Target: LAMA2; (-) strand; PAM type: NNAGAAW; PAM sequence: TTAGAAT
cacacaaaacaggcaattat

SEQ ID NO: 12255 - DNA, 20 bp, Artificial Sequence
  Description of Artificial Sequence: Synthetic oligonucleotide
  Target: LAMA2; (-) strand; PAM type: NNAGAAW; PAM sequence: AAAGAAA
atacatggtaaaggatgata

SEQ ID NO: 12256 - DNA, 20 bp, Artificial Sequence
  Description of Artificial Sequence: Synthetic oligonucleotide
  Target: LAMA2; (-) strand; PAM type: NNAGAAW; PAM sequence: TAAGAAA
gcccataaatcattatcaaa

SEQ ID NO: 12257 - DNA, 20 bp, Artificial Sequence
  Description of Artificial Sequence: Synthetic oligonucleotide
  Target: LAMA2; (-) strand; PAM type: NNAGAAW; PAM sequence: ATAGAAA
gaacaaaacacagaacgttt

SEQ ID NO: 12258 - DNA, 20 bp, Artificial Sequence
  Description of Artificial Sequence: Synthetic oligonucleotide
  Target: LAMA2; (-) strand; PAM type: NNAGAAW; PAM sequence: GGAGAAA
ttgttgctaaaatttccata

SEQ ID NO: 12259 - DNA, 20 bp, Artificial Sequence
  Description of Artificial Sequence: Synthetic oligonucleotide
  Target: LAMA2; (-) strand; PAM type: NNAGAAW; PAM sequence: GTAGAAT
taagcttgagaattgcttct

SEQ ID NO: 12260 - DNA, 20 bp, Artificial Sequence
  Description of Artificial Sequence: Synthetic oligonucleotide
  Target: LAMA2; (-) strand; PAM type: NNAGAAW; PAM sequence: TGAGAAT
taaaaacactgagctaagct

SEQ ID NO: 12261 - DNA, 20 bp, Artificial Sequence
  Description of Artificial Sequence: Synthetic oligonucleotide
  Target: LAMA2; (-) strand; PAM type: NNAGAAW; PAM sequence: TCAGAAT
tggctatgtcctagacaaaa

SEQ ID NO: 12262 - DNA, 20 bp, Artificial Sequence
  Description of Artificial Sequence: Synthetic oligonucleotide
  Target: LAMA2; (-) strand; PAM type: NNAGAAW; PAM sequence: TAAGAAT
gaattgcctgggaatgtttt

SEQ ID NO: 12263 - DNA, 20 bp, Artificial Sequence
  Description of Artificial Sequence: Synthetic oligonucleotide
  Target: LAMA2; (-) strand; PAM type: NNAGAAW; PAM sequence: TTAGAAT
ggttcatccttgacaacaca

SEQ ID NO: 12264 - DNA, 20 bp, Artificial Sequence
  Description of Artificial Sequence: Synthetic oligonucleotide
  Target: LAMA2; (-) strand; PAM type: NNAGAAW; PAM sequence: TGAGAAT
ttgtccttgtgatagtttac

SEQ ID NO: 12265 - DNA, 20 bp, Artificial Sequence
  Description of Artificial Sequence: Synthetic oligonucleotide
  Target: LAMA2; (-) strand; PAM type: NNAGAAW; PAM sequence: TTAGAAT
atggaggataatgtttcttt

SEQ ID NO: 12266 - DNA, 20 bp, Artificial Sequence
  Description of Artificial Sequence: Synthetic oligonucleotide
  Target: LAMA2; (-) strand; PAM type: NNAGAAW; PAM sequence: GTAGAAT
ttgccaagacaaagctaata

SEQ ID NO: 12267 - DNA, 20 bp, Artificial Sequence
  Description of Artificial Sequence: Synthetic oligonucleotide
  Target: LAMA2; (-) strand; PAM type: NNAGAAW; PAM sequence: AAAGAAA
ctttctgtgcaggactcaag

SEQ ID NO: 12268 - DNA, 20 bp, Artificial Sequence
  Description of Artificial Sequence: Synthetic oligonucleotide
  Target: LAMA2; (-) strand; PAM type: NNAGAAW; PAM sequence: CAAGAAA
atatctttctgtgcaggact

SEQ ID NO: 12269 - DNA, 20 bp, Artificial Sequence
  Description of Artificial Sequence: Synthetic oligonucleotide
  Target: LAMA2; (-) strand; PAM type: NNAGAAW; PAM sequence: TGAGAAT
tttaaacatctagctagact

SEQ ID NO: 12270 - DNA, 20 bp, Artificial Sequence
  Description of Artificial Sequence: Synthetic oligonucleotide
  Target: LAMA2; (-) strand; PAM type: NNAGAAW; PAM sequence: GAAGAAA
attaattaaaaaatactaga

SEQ ID NO: 12271 - DNA, 20 bp, Artificial Sequence
  Description of Artificial Sequence: Synthetic oligonucleotide
  Target: LAMA2; (-) strand; PAM type: NNAGAAW; PAM sequence: TCAGAAA
aactaatttgatttttgagg

SEQ ID NO: 12272 - DNA, 20 bp, Artificial Sequence
  Description of Artificial Sequence: Synthetic oligonucleotide
  Target: LAMA2; (+) strand; PAM type: NNAGAAW; PAM sequence: TTAGAAT
tcaaaactataaggcactgc

SEQ ID NO: 12273 - DNA, 20 bp, Artificial Sequence
  Description of Artificial Sequence: Synthetic oligonucleotide
  Target: LAMA2; (+) strand; PAM type: NNAGAAW; PAM sequence: GTAGAAA
tccctactctccttttttgg

SEQ ID NO: 12274 - DNA, 20 bp, Artificial Sequence
  Description of Artificial Sequence: Synthetic oligonucleotide
  Target: LAMA2; (+) strand; PAM type: NNAGAAW; PAM sequence: TAAGAAA
tatttaaaattatatggact

SEQ ID NO: 12275 - DNA, 20 bp, Artificial Sequence
  Description of Artificial Sequence: Synthetic oligonucleotide
  Target: LAMA2; (+) strand; PAM type: NNAGAAW; PAM sequence: TGAGAAT
aaaccttcacatgtgaaata

SEQ ID NO: 12276 - DNA, 20 bp, Artificial Sequence
  Description of Artificial Sequence: Synthetic oligonucleotide
  Target: LAMA2; (+) strand; PAM type: NNAGAAW; PAM sequence: AAAGAAA
aaatattttttcagtgctaa

SEQ ID NO: 12277 - DNA, 20 bp, Artificial Sequence
  Description of Artificial Sequence: Synthetic oligonucleotide
  Target: LAMA2; (+) strand; PAM type: NNAGAAW; PAM sequence: AAAGAAA
taaatgcatattactaagtg

SEQ ID NO: 12278 - DNA, 20 bp, Artificial Sequence
  Description of Artificial Sequence: Synthetic oligonucleotide
  Target: LAMA2; (+) strand; PAM type: NNAGAAW; PAM sequence: AAAGAAA
gaatggatatctacatggaa

SEQ ID NO: 12279 - DNA, 20 bp, Artificial Sequence
  Description of Artificial Sequence: Synthetic oligonucleotide
  Target: LAMA2; (+) strand; PAM type: NNAGAAW; PAM sequence: CTAGAAA
aagctaagactataaaatct

SEQ ID NO: 12280 - DNA, 20 bp, Artificial Sequence
  Description of Artificial Sequence: Synthetic oligonucleotide
  Target: LAMA2; (+) strand; PAM type: NNAGAAW; PAM sequence: TCAGAAT
atttaataaattgtatttaa

SEQ ID NO: 12281 - DNA, 20 bp, Artificial Sequence
  Description of Artificial Sequence: Synthetic oligonucleotide
  Target: LAMA2; (+) strand; PAM type: NNAGAAW; PAM sequence: CTAGAAT
acttgacaaaggtcttttct

SEQ ID NO: 12282 - DNA, 20 bp, Artificial Sequence
  Description of Artificial Sequence: Synthetic oligonucleotide
  Target: LAMA2; (+) strand; PAM type: NNAGAAW; PAM sequence: GAAGAAT
aaaatgagcaaagatttcaa

SEQ ID NO: 12283 - DNA, 20 bp, Artificial Sequence
  Description of Artificial Sequence: Synthetic oligonucleotide
  Target: LAMA2; (+) strand; PAM type: NNAGAAW; PAM sequence: CTAGAAT
gaggtatcaccacacaagca

SEQ ID NO: 12284 - DNA, 20 bp, Artificial Sequence
  Description of Artificial Sequence: Synthetic oligonucleotide
  Target: LAMA2; (+) strand; PAM type: NNAGAAW; PAM sequence: AGAGAAA
tcctaagacttgataggaat

SEQ ID NO: 12285 - DNA, 20 bp, Artificial Sequence
  Description of Artificial Sequence: Synthetic oligonucleotide
  Target: LAMA2; (+) strand; PAM type: NNAGAAW; PAM sequence: ATAGAAT
ttgtgatatatccatacgat

SEQ ID NO: 12286 - DNA, 20 bp, Artificial Sequence
  Description of Artificial Sequence: Synthetic oligonucleotide
  Target: LAMA2; (+) strand; PAM type: NNAGAAW; PAM sequence: TTAGAAT
atatagaatgatagatacta

SEQ ID NO: 12287 - DNA, 20 bp, Artificial Sequence
  Description of Artificial Sequence: Synthetic oligonucleotide
  Target: LAMA2; (+) strand; PAM type: NNAGAAW; PAM sequence: ATAGAAT
tgatagatactattagaatg

SEQ ID NO: 12288 - DNA, 20 bp, Artificial Sequence
  Description of Artificial Sequence: Synthetic oligonucleotide
  Target: LAMA2; (+) strand; PAM type: NNAGAAW; PAM sequence: TGAGAAT
tattgtatttacatgaaata

SEQ ID NO: 12289 - DNA, 20 bp, Artificial Sequence
  Description of Artificial Sequence: Synthetic oligonucleotide
  Target: LAMA2; (+) strand; PAM type: NNAGAAW; PAM sequence: TCAGAAA
gggggatttattgcaaaagg

SEQ ID NO: 12290 - DNA, 20 bp, Artificial Sequence
  Description of Artificial Sequence: Synthetic oligonucleotide
  Target: LAMA2; (+) strand; PAM type: NNAGAAW; PAM sequence: AAAGAAA
gatttattgcaaaaggtcag

SEQ ID NO: 12291 - DNA, 20 bp, Artificial Sequence
  Description of Artificial Sequence: Synthetic oligonucleotide
  Target: LAMA2; (+) strand; PAM type: NNAGAAW; PAM sequence: ATAGAAA
aaagaaaactttttgagatt

SEQ ID NO: 12292 - DNA, 20 bp, Artificial Sequence
  Description of Artificial Sequence: Synthetic oligonucleotide
  Target: LAMA2; (+) strand; PAM type: NNAGAAW; PAM sequence: TAAGAAT
tttaatttgggttaaatatt

SEQ ID NO: 12293 - DNA, 20 bp, Artificial Sequence
  Description of Artificial Sequence: Synthetic oligonucleotide
  Target: LAMA2; (+) strand; PAM type: NNAGAAW; PAM sequence: GCAGAAA
ctcaggtaactgcagtaact

SEQ ID NO: 12294 - DNA, 20 bp, Artificial Sequence
  Description of Artificial Sequence: Synthetic oligonucleotide
  Target: LAMA2; (+) strand; PAM type: NNAGAAW; PAM sequence: TGAGAAT
ttgagtaaaaataatcattc

SEQ ID NO: 12295 - DNA, 20 bp, Artificial Sequence
  Description of Artificial Sequence: Synthetic oligonucleotide
  Target: LAMA2; (+) strand; PAM type: NNAGAAW; PAM sequence: AAAGAAT
taaaagacatgaataatatt

SEQ ID NO: 12296 - DNA, 20 bp, Artificial Sequence
  Description of Artificial Sequence: Synthetic oligonucleotide
  Target: LAMA2; (+) strand; PAM type: NNAGAAW; PAM sequence: AAAGAAA
atactctcttaattttactg

SEQ ID NO: 12297 - DNA, 20 bp, Artificial Sequence
  Description of Artificial Sequence: Synthetic oligonucleotide
  Target: LAMA2; (+) strand; PAM type: NNAGAAW; PAM sequence: AAAGAAA
caatacatcttaactataaa

SEQ ID NO: 12298 - DNA, 20 bp, Artificial Sequence
  Description of Artificial Sequence: Synthetic oligonucleotide
  Target: LAMA2; (+) strand; PAM type: NNAGAAW; PAM sequence: CTAGAAA
atgtatatagtagatgcatc

SEQ ID NO: 12299 - DNA, 20 bp, Artificial Sequence
  Description of Artificial Sequence: Synthetic oligonucleotide
  Target: LAMA2; (+) strand; PAM type: NNAGAAW; PAM sequence: GGAGAAA
tagttctgttgagttaaaga

SEQ ID NO: 12300 - DNA, 20 bp, Artificial Sequence
  Description of Artificial Sequence: Synthetic oligonucleotide
  Target: LAMA2; (+) strand; PAM type: NNAGAAW; PAM sequence: GGAGAAA
tgagttaaagaggagaaaga

SEQ ID NO: 12301 - DNA, 20 bp, Artificial Sequence
  Description of Artificial Sequence: Synthetic oligonucleotide
  Target: LAMA2; (+) strand; PAM type: NNAGAAW; PAM sequence: CCAGAAA
ttcctagctgtttgcatttc

SEQ ID NO: 12302 - DNA, 20 bp, Artificial Sequence
  Description of Artificial Sequence: Synthetic oligonucleotide
  Target: LAMA2; (+) strand; PAM type: NNAGAAW; PAM sequence: AAAGAAT
actttttccaattggaaaaa

SEQ ID NO: 12303 - DNA, 20 bp, Artificial Sequence
  Description of Artificial Sequence: Synthetic oligonucleotide
  Target: LAMA2; (+) strand; PAM type: NNAGAAW; PAM sequence: AGAGAAA
caaatcagagcccatcctgc

SEQ ID NO: 12304 - DNA, 20 bp, Artificial Sequence
  Description of Artificial Sequence: Synthetic oligonucleotide
  Target: LAMA2; (+) strand; PAM type: NNAGAAW; PAM sequence: AAAGAAA
cctgtatcaaagtaaaaaaa

SEQ ID NO: 12305 - DNA, 20 bp, Artificial Sequence
  Description of Artificial Sequence: Synthetic oligonucleotide
  Target: LAMA2; (+) strand; PAM type: NNAGAAW; PAM sequence: GGAGAAA
ttaataatgttaggcagctg

SEQ ID NO: 12306 - DNA, 20 bp, Artificial Sequence
  Description of Artificial Sequence: Synthetic oligonucleotide
  Target: LAMA2; (+) strand; PAM type: NNAGAAW; PAM sequence: GCAGAAA
ttatgtccacttggaatggg

SEQ ID NO: 12307 - DNA, 20 bp, Artificial Sequence
  Description of Artificial Sequence: Synthetic oligonucleotide
  Target: LAMA2; (+) strand; PAM type: NNAGAAW; PAM sequence: TAAGAAT
aggatcaagtaaattgttgc

SEQ ID NO: 12308 - DNA, 20 bp, Artificial Sequence
  Description of Artificial Sequence: Synthetic oligonucleotide
  Target: LAMA2; (+) strand; PAM type: NNAGAAW; PAM sequence: TAAGAAT
ataattcgataccactttat

SEQ ID NO: 12309 - DNA, 20 bp, Artificial Sequence
  Description of Artificial Sequence: Synthetic oligonucleotide
  Target: LAMA2; (+) strand; PAM type: NNAGAAW; PAM sequence: TTAGAAA
ttttagatgttgcagttgag

SEQ ID NO: 12310 - DNA, 20 bp, Artificial Sequence
  Description of Artificial Sequence: Synthetic oligonucleotide
  Target: LAMA2; (+) strand; PAM type: NNAGAAW; PAM sequence: CAAGAAT
tatgaatagcattgattcag

SEQ ID NO: 12311 - DNA, 20 bp, Artificial Sequence
  Description of Artificial Sequence: Synthetic oligonucleotide
  Target: LAMA2; (+) strand; PAM type: NNAGAAW; PAM sequence: ATAGAAT
ctatatttaaaattgacgaa

SEQ ID NO: 12312 - DNA, 20 bp, Artificial Sequence
  Description of Artificial Sequence: Synthetic oligonucleotide
  Target: LAMA2; (+) strand; PAM type: NNAGAAW; PAM sequence: AAAGAAT
ctgattgaaaaatagttcac

SEQ ID NO: 12313 - DNA, 20 bp, Artificial Sequence
  Description of Artificial Sequence: Synthetic oligonucleotide
  Target: LAMA2; (+) strand; PAM type: NNAGAAW; PAM sequence: TCAGAAA
taagctggttactaacaagt

SEQ ID NO: 12314 - DNA, 20 bp, Artificial Sequence
  Description of Artificial Sequence: Synthetic oligonucleotide
  Target: LAMA2; (+) strand; PAM type: NNAGAAW; PAM sequence: AGAGAAA
gaatgaatatgaagacagga

SEQ ID NO: 12315 - DNA, 20 bp, Artificial Sequence
  Description of Artificial Sequence: Synthetic oligonucleotide
  Target: LAMA2; (+) strand; PAM type: NNAGAAW; PAM sequence: GCAGAAT
gtagatgcagagaagggaga

SEQ ID NO: 12316 - DNA, 20 bp, Artificial Sequence
  Description of Artificial Sequence: Synthetic oligonucleotide
  Target: LAMA2; (+) strand; PAM type: NNAGAAW; PAM sequence: GGAGAAA
aggtttgaattttataatat

SEQ ID NO: 12317 - DNA, 20 bp, Artificial Sequence
  Description of Artificial Sequence: Synthetic oligonucleotide
  Target: LAMA2; (+) strand; PAM type: NNAGAAW; PAM sequence: TCAGAAA
cccatgccattttgagttgt

SEQ ID NO: 12318 - DNA, 20 bp, Artificial Sequence
  Description of Artificial Sequence: Synthetic oligonucleotide
  Target: LAMA2; (+) strand; PAM type: NNAGAAW; PAM sequence: CAAGAAA
tttctgaattcttaaaatgt

SEQ ID NO: 12319 - DNA, 20 bp, Artificial Sequence
  Description of Artificial Sequence: Synthetic oligonucleotide
  Target: LAMA2; (+) strand; PAM type: NNAGAAW; PAM sequence: CAAGAAT
caatcctcacacatttttgg

SEQ ID NO: 12320 - DNA, 20 bp, Artificial Sequence
  Description of Artificial Sequence: Synthetic oligonucleotide
  Target: LAMA2; (+) strand; PAM type: NNAGAAW; PAM sequence: CAAGAAT
acatcttgtgttataacacg

SEQ ID NO: 12321 - DNA, 20 bp, Artificial Sequence
  Description of Artificial Sequence: Synthetic oligonucleotide
  Target: LAMA2; (+) strand; PAM type: NNAGAAW; PAM sequence: TGAGAAA
agaatactttataaattacc

SEQ ID NO: 12322 - DNA, 20 bp, Artificial Sequence
  Description of Artificial Sequence: Synthetic oligonucleotide
  Target: LAMA2; (+) strand; PAM type: NNAGAAW; PAM sequence: ATAGAAT
cactgaatattatagatgtg

SEQ ID NO: 12323 - DNA, 20 bp, Artificial Sequence
  Description of Artificial Sequence: Synthetic oligonucleotide
  Target: LAMA2; (+) strand; PAM type: NNAGAAW; PAM sequence: GGAGAAT
ctactcaggaggctgaggca

SEQ ID NO: 12324 - DNA, 20 bp, Artificial Sequence
  Description of Artificial Sequence: Synthetic oligonucleotide
  Target: LAMA2; (+) strand; PAM type: NNAGAAW; PAM sequence: CTAGAAA
agtagggccttatttagcat

SEQ ID NO: 12325 - DNA, 20 bp, Artificial Sequence
  Description of Artificial Sequence: Synthetic oligonucleotide
  Target: LAMA2; (+) strand; PAM type: NNAGAAW; PAM sequence: GAAGAAA
aaccatgtgaaaaagatcag

SEQ ID NO: 12326 - DNA, 20 bp, Artificial Sequence
  Description of Artificial Sequence: Synthetic oligonucleotide
  Target: LAMA2; (+) strand; PAM type: NNAGAAW; PAM sequence: TGAGAAA
agaagctccgtttcagtaaa

SEQ ID NO: 12327 - DNA, 20 bp, Artificial Sequence
  Description of Artificial Sequence: Synthetic oligonucleotide
  Target: LAMA2; (+) strand; PAM type: NNAGAAW; PAM sequence: AGAGAAA
gagaaaacaagacagagttt

SEQ ID NO: 12328 - DNA, 20 bp, Artificial Sequence
  Description of Artificial Sequence: Synthetic oligonucleotide
  Target: LAMA2; (+) strand; PAM type: NNAGAAW; PAM sequence: ATAGAAA
gcttagtatataccaagcag

SEQ ID NO: 12329 - DNA, 20 bp, Artificial Sequence
  Description of Artificial Sequence: Synthetic oligonucleotide
  Target: LAMA2; (+) strand; PAM type: NNAGAAW; PAM sequence: GGAGAAA
gcatggtgagaaggctcaga

SEQ ID NO: 12330 - DNA, 20 bp, Artificial Sequence
  Description of Artificial Sequence: Synthetic oligonucleotide
  Target: LAMA2; (+) strand; PAM type: NNAGAAW; PAM sequence: ATAGAAT
actagaccaacagtccaagc

SEQ ID NO: 12331 - DNA, 20 bp, Artificial Sequence
  Description of Artificial Sequence: Synthetic oligonucleotide
  Target: LAMA2; (+) strand; PAM type: NNAGAAW; PAM sequence: TCAGAAA
attcaaaatatatcagtacc

SEQ ID NO: 12332 - DNA, 20 bp, Artificial Sequence
  Description of Artificial Sequence: Synthetic oligonucleotide
  Target: LAMA2; (+) strand; PAM type: NNAGAAW; PAM sequence: TTAGAAA
aaaattttgctccagtgtag

SEQ ID NO: 12333 - DNA, 20 bp, Artificial Sequence
  Description of Artificial Sequence: Synthetic oligonucleotide
  Target: LAMA2; (+) strand; PAM type: NNAGAAW; PAM sequence: TCAGAAA
aaatgctacctgttttacat

SEQ ID NO: 12334 - DNA, 20 bp, Artificial Sequence
  Description of Artificial Sequence: Synthetic oligonucleotide
  Target: LAMA2; (+) strand; PAM type: NNAGAAW; PAM sequence: TAAGAAT
ttccatttttgttactgttt

SEQ ID NO: 12335 - DNA, 20 bp, Artificial Sequence
  Description of Artificial Sequence: Synthetic oligonucleotide
  Target: LAMA2; (+) strand; PAM type: NNAGAAW; PAM sequence: TTAGAAT
caaaaattccaatgcttatt

SEQ ID NO: 12336 - DNA, 20 bp, Artificial Sequence
  Description of Artificial Sequence: Synthetic oligonucleotide
  Target: LAMA2; (+) strand; PAM type: NNAGAAW; PAM sequence: TTAGAAA
ttccaatgcttattttagaa

SEQ ID NO: 12337 - DNA, 20 bp, Artificial Sequence
  Description of Artificial Sequence: Synthetic oligonucleotide
  Target: LAMA2; (+) strand; PAM type: NNAGAAW; PAM sequence: TAAGAAA
gattactggacactaggcta

SEQ ID NO: 12338 - DNA, 20 bp, Artificial Sequence
  Description of Artificial Sequence: Synthetic oligonucleotide
  Target: LAMA2; (+) strand; PAM type: NNAGAAW; PAM sequence: CTAGAAA
acagaagttacttcagcaag

SEQ ID NO: 12339 - DNA, 20 bp, Artificial Sequence
  Description of Artificial Sequence: Synthetic oligonucleotide
  Target: LAMA2; (+) strand; PAM type: NNAGAAW; PAM sequence: TAAGAAT
atactgtataatgaaccctt

SEQ ID NO: 12340 - DNA, 20 bp, Artificial Sequence
  Description of Artificial Sequence: Synthetic oligonucleotide
  Target: LAMA2; (+) strand; PAM type: NNAGAAW; PAM sequence: TAAGAAT
aagaaccaaacagatatacc

SEQ ID NO: 12341 - DNA, 20 bp, Artificial Sequence
  Description of Artificial Sequence: Synthetic oligonucleotide
  Target: LAMA2; (+) strand; PAM type: NNAGAAW; PAM sequence: TAAGAAA
tgtttatcaaaatctttgaa

SEQ ID NO: 12342 - DNA, 20 bp, Artificial Sequence
  Description of Artificial Sequence: Synthetic oligonucleotide
  Target: LAMA2; (+) strand; PAM type: NNAGAAW; PAM sequence: CTAGAAA
aaaatctaaaaattgaattt

SEQ ID NO: 12343 - DNA, 20 bp, Artificial Sequence
  Description of Artificial Sequence: Synthetic oligonucleotide
  Target: LAMA2; (+) strand; PAM type: NNAGAAW; PAM sequence: AAAGAAT
ttgacaaatgattatggacc

SEQ ID NO: 12344 - DNA, 20 bp, Artificial Sequence
  Description of Artificial Sequence: Synthetic oligonucleotide
  Target: LAMA2; (+) strand; PAM type: NNAGAAW; PAM sequence: GAAGAAA
ttagaaggtcctattctata

SEQ ID NO: 12345 - DNA, 20 bp, Artificial Sequence
  Description of Artificial Sequence: Synthetic oligonucleotide
  Target: LAMA2; (+) strand; PAM type: NNAGAAW; PAM sequence: AGAGAAT
gatgaggctgaaagtttgaa

SEQ ID NO: 12346 - DNA, 20 bp, Artificial Sequence
  Description of Artificial Sequence: Synthetic oligonucleotide
  Target: LAMA2; (+) strand; PAM type: NNAGAAW; PAM sequence: AAAGAAA
aacatgacattctctggctg

SEQ ID NO: 12347 - DNA, 20 bp, Artificial Sequence
  Description of Artificial Sequence: Synthetic oligonucleotide
  Target: LAMA2; (+) strand; PAM type: NNAGAAW; PAM sequence: TTAGAAT
cacaagtatttgaattctaa

SEQ ID NO: 12348 - DNA, 20 bp, Artificial Sequence
  Description of Artificial Sequence: Synthetic oligonucleotide
  Target: LAMA2; (+) strand; PAM type: NNAGAAW; PAM sequence: GTAGAAA
tctttggaggtaactgaatc

SEQ ID NO: 12349 - DNA, 20 bp, Artificial Sequence
  Description of Artificial Sequence: Synthetic oligonucleotide
  Target: LAMA2; (+) strand; PAM type: NNAGAAW; PAM sequence: GAAGAAA
caagtcagtaacagagataa

SEQ ID NO: 12350 - DNA, 20 bp, Artificial Sequence
  Description of Artificial Sequence: Synthetic oligonucleotide
  Target: LAMA2; (+) strand; PAM type: NNAGAAW; PAM sequence: GCAGAAA
gtggaaagtctaattggatt

SEQ ID NO: 12351 - DNA, 20 bp, Artificial Sequence
  Description of Artificial Sequence: Synthetic oligonucleotide
  Target: LAMA2; (+) strand; PAM type: NNAGAAW; PAM sequence: TCAGAAA
acaaaaccaaaaaacctact

SEQ ID NO: 12352 - DNA, 20 bp, Artificial Sequence
  Description of Artificial Sequence: Synthetic oligonucleotide
  Target: LAMA2; (+) strand; PAM type: NNAGAAW; PAM sequence: AGAGAAA
tagtactctaacaaatctct

SEQ ID NO: 12353 - DNA, 20 bp, Artificial Sequence
  Description of Artificial Sequence: Synthetic oligonucleotide
  Target: LAMA2; (+) strand; PAM type: NNAGAAW; PAM sequence: TTAGAAA
cattttttcattctgataca

SEQ ID NO: 12354 - DNA, 20 bp, Artificial Sequence
  Description of Artificial Sequence: Synthetic oligonucleotide
  Target: LAMA2; (+) strand; PAM type: NNAGAAW; PAM sequence: GAAGAAA
atatacatactactgcataa

SEQ ID NO: 12355 - DNA, 20 bp, Artificial Sequence
  Description of Artificial Sequence: Synthetic oligonucleotide
  Target: LAMA2; (+) strand; PAM type: NNAGAAW; PAM sequence: TAAGAAA
ttattttggtttaagcatat

SEQ ID NO: 12356 - DNA, 20 bp, Artificial Sequence
  Description of Artificial Sequence: Synthetic oligonucleotide
  Target: LAMA2; (+) strand; PAM type: NNAGAAW; PAM sequence: AAAGAAT
cggatctatcttacacctgg

SEQ ID NO: 12357 - DNA, 20 bp, Artificial Sequence
  Description of Artificial Sequence: Synthetic oligonucleotide
  Target: LAMA2; (+) strand; PAM type: NNAGAAW; PAM sequence: CCAGAAA
ttttatgactattgatctca

SEQ ID NO: 12358 - DNA, 20 bp, Artificial Sequence
  Description of Artificial Sequence: Synthetic oligonucleotide
  Target: LAMA2; (+) strand; PAM type: NNAGAAW; PAM sequence: TCAGAAT
caatggtagagacaaatttt

SEQ ID NO: 12359 - DNA, 20 bp, Artificial Sequence
  Description of Artificial Sequence: Synthetic oligonucleotide
  Target: LAMA2; (+) strand; PAM type: NNAGAAW; PAM sequence: TAAGAAA
atagttactttattcattct

SEQ ID NO: 12360 - DNA, 20 bp, Artificial Sequence
  Description of Artificial Sequence: Synthetic oligonucleotide
  Target: LAMA2; (+) strand; PAM type: NNAGAAW; PAM sequence: TCAGAAA
tatgaaggtaaattttgcaa

SEQ ID NO: 12361 - DNA, 20 bp, Artificial Sequence
  Description of Artificial Sequence: Synthetic oligonucleotide
  Target: LAMA2; (+) strand; PAM type: NNAGAAW; PAM sequence: GAAGAAA
taccatttctttttaagggg

SEQ ID NO: 12362 - DNA, 20 bp, Artificial Sequence
  Description of Artificial Sequence: Synthetic oligonucleotide
  Target: LAMA2; (+) strand; PAM type: NNAGAAW; PAM sequence: CCAGAAA
ctttttaagggggaagaaat

SEQ ID NO: 12363 - DNA, 20 bp, Artificial Sequence
  Description of Artificial Sequence: Synthetic oligonucleotide
  Target: LAMA2; (+) strand; PAM type: NNAGAAW; PAM sequence: ATAGAAA
aaaaccagccagacatacat

SEQ ID NO: 12364 - DNA, 20 bp, Artificial Sequence
  Description of Artificial Sequence: Synthetic oligonucleotide
  Target: LAMA2; (+) strand; PAM type: NNAGAAW; PAM sequence: GGAGAAT
gtactctggaggctgaggca

SEQ ID NO: 12365 - DNA, 20 bp, Artificial Sequence
  Description of Artificial Sequence: Synthetic oligonucleotide
  Target: LAMA2; (+) strand; PAM type: NNAGAAW; PAM sequence: ATAGAAA
aggggtcctttgttcttttc

SEQ ID NO: 12366 - DNA, 20 bp, Artificial Sequence
  Description of Artificial Sequence: Synthetic oligonucleotide
  Target: LAMA2; (+) strand; PAM type: NNAGAAW; PAM sequence: AAAGAAT
gtcctttgttcttttcatag

SEQ ID NO: 12367 - DNA, 20 bp, Artificial Sequence
  Description of Artificial Sequence: Synthetic oligonucleotide
  Target: LAMA2; (+) strand; PAM type: NNAGAAW; PAM sequence: TGAGAAA
tggtgctactggagtgatgc

SEQ ID NO: 12368 - DNA, 20 bp, Artificial Sequence
  Description of Artificial Sequence: Synthetic oligonucleotide
  Target: LAMA2; (+) strand; PAM type: NNAGAAW; PAM sequence: TTAGAAA
aacattattctaaatgtttt

SEQ ID NO: 12369 - DNA, 20 bp, Artificial Sequence
  Description of Artificial Sequence: Synthetic oligonucleotide
  Target: LAMA2; (+) strand; PAM type: NNAGAAW; PAM sequence: TTAGAAA
atgttttttagaaacatttt

SEQ ID NO: 12370 - DNA, 20 bp, Artificial Sequence
  Description of Artificial Sequence: Synthetic oligonucleotide
  Target: LAMA2; (+) strand; PAM type: NNAGAAW; PAM sequence: CCAGAAT
ttttagaaaacatcattcac

SEQ ID NO: 12371 - DNA, 20 bp, Artificial Sequence
  Description of Artificial Sequence: Synthetic oligonucleotide
  Target: LAMA2; (+) strand; PAM type: NNAGAAW; PAM sequence: TGAGAAA
aagttttcagatctgctcgg

SEQ ID NO: 12372 - DNA, 20 bp, Artificial Sequence
  Description of Artificial Sequence: Synthetic oligonucleotide
  Target: LAMA2; (+) strand; PAM type: NNAGAAW; PAM sequence: AGAGAAA
tattaatctcatttaacaga

SEQ ID NO: 12373 - DNA, 20 bp, Artificial Sequence
  Description of Artificial Sequence: Synthetic oligonucleotide
  Target: LAMA2; (+) strand; PAM type: NNAGAAW; PAM sequence: CTAGAAT
tataagagtttgtagcactc

SEQ ID NO: 12374 - DNA, 20 bp, Artificial Sequence
  Description of Artificial Sequence: Synthetic oligonucleotide
  Target: LAMA2; (+) strand; PAM type: NNAGAAW; PAM sequence: TAAGAAT
agaattgttaacttaattgg

SEQ ID NO: 12375 - DNA, 20 bp, Artificial Sequence
  Description of Artificial Sequence: Synthetic oligonucleotide
  Target: LAMA2; (+) strand; PAM type: NNAGAAW; PAM sequence: AGAGAAT
cttatggtaactcccagagt

SEQ ID NO: 12376 - DNA, 20 bp, Artificial Sequence
  Description of Artificial Sequence: Synthetic oligonucleotide
  Target: LAMA2; (+) strand; PAM type: NNAGAAW; PAM sequence: AGAGAAT
cctgatcatcctcaccttta

SEQ ID NO: 12377 - DNA, 20 bp, Artificial Sequence
  Description of Artificial Sequence: Synthetic oligonucleotide
  Target: LAMA2; (+) strand; PAM type: NNAGAAW; PAM sequence: CTAGAAA
ggagctttaacttaaaagat

SEQ ID NO: 12378 - DNA, 20 bp, Artificial Sequence
  Description of Artificial Sequence: Synthetic oligonucleotide
  Target: LAMA2; (+) strand; PAM type: NNAGAAW; PAM sequence: TCAGAAA
tcccatcagcttttcccaac

SEQ ID NO: 12379 - DNA, 20 bp, Artificial Sequence
  Description of Artificial Sequence: Synthetic oligonucleotide
  Target: LAMA2; (+) strand; PAM type: NNAGAAW; PAM sequence: TAAGAAT
ctttcaatgcatttctatta

SEQ ID NO: 12380 - DNA, 20 bp, Artificial Sequence
  Description of Artificial Sequence: Synthetic oligonucleotide
  Target: LAMA2; (+) strand; PAM type: NNAGAAW; PAM sequence: TTAGAAA
tagataatagataaaatatt

SEQ ID NO: 12381 - DNA, 20 bp, Artificial Sequence
  Description of Artificial Sequence: Synthetic oligonucleotide
  Target: LAMA2; (+) strand; PAM type: NNAGAAW; PAM sequence: TGAGAAT
ggatggaaggtctttttgga

SEQ ID NO: 12382 - DNA, 20 bp, Artificial Sequence
  Description of Artificial Sequence: Synthetic oligonucleotide
  Target: LAMA2; (+) strand; PAM type: NNAGAAW; PAM sequence: TTAGAAT
ccagcaaaatggtgaaatac

SEQ ID NO: 12383 - DNA, 20 bp, Artificial Sequence
  Description of Artificial Sequence: Synthetic oligonucleotide
  Target: LAMA2; (+) strand; PAM type: NNAGAAW; PAM sequence: CAAGAAA
ttaatcaaacatctggaggt

SEQ ID NO: 12384 - DNA, 20 bp, Artificial Sequence
  Description of Artificial Sequence: Synthetic oligonucleotide
  Target: LAMA2; (+) strand; PAM type: NNAGAAW; PAM sequence: TAAGAAT
ctatattcttctccttactt

SEQ ID NO: 12385 - DNA, 20 bp, Artificial Sequence
  Description of Artificial Sequence: Synthetic oligonucleotide
  Target: LAMA2; (+) strand; PAM type: NNAGAAW; PAM sequence: AGAGAAA
ttattatatgagtgaatttg

SEQ ID NO: 12386 - DNA, 20 bp, Artificial Sequence
  Description of Artificial Sequence: Synthetic oligonucleotide
  Target: LAMA2; (+) strand; PAM type: NNAGAAW; PAM sequence: CAAGAAA
gaatttgagagaaaggggga

SEQ ID NO: 12387 - DNA, 20 bp, Artificial Sequence
  Description of Artificial Sequence: Synthetic oligonucleotide
  Target: LAMA2; (+) strand; PAM type: NNAGAAW; PAM sequence: ATAGAAA
gtcacagtaaagattgaatg

SEQ ID NO: 12388 - DNA, 20 bp, Artificial Sequence
  Description of Artificial Sequence: Synthetic oligonucleotide
  Target: LAMA2; (+) strand; PAM type: NNAGAAW; PAM sequence: ATAGAAA
aaagattgaatgatagaaaa

SEQ ID NO: 12389 - DNA, 20 bp, Artificial Sequence
  Description of Artificial Sequence: Synthetic oligonucleotide
  Target: LAMA2; (+) strand; PAM type: NNAGAAW; PAM sequence: ATAGAAA
gttacaatttctactcaacg

SEQ ID NO: 12390 - DNA, 20 bp, Artificial Sequence
  Description of Artificial Sequence: Synthetic oligonucleotide
  Target: LAMA2; (+) strand; PAM type: NNAGAAW; PAM sequence: AGAGAAT
acgatagaaaaaagaactaa

SEQ ID NO: 12391 - DNA, 20 bp, Artificial Sequence
  Description of Artificial Sequence: Synthetic oligonucleotide
  Target: LAMA2; (+) strand; PAM type: NNAGAAW; PAM sequence: AAAGAAA
agagaatttaccaggacatg

SEQ ID NO: 12392 - DNA, 20 bp, Artificial Sequence
  Description of Artificial Sequence: Synthetic oligonucleotide
  Target: LAMA2; (+) strand; PAM type: NNAGAAW; PAM sequence: TAAGAAA
ttcaaattagctttcacctt

SEQ ID NO: 12393 - DNA, 20 bp, Artificial Sequence
  Description of Artificial Sequence: Synthetic oligonucleotide
  Target: LAMA2; (+) strand; PAM type: NNAGAAW; PAM sequence: TTAGAAA
ccaaaatgcatgtctgggat

SEQ ID NO: 12394 - DNA, 20 bp, Artificial Sequence
  Description of Artificial Sequence: Synthetic oligonucleotide
  Target: LAMA2; (+) strand; PAM type: NNAGAAW; PAM sequence: TAAGAAA
ttaagctaagtcattcattt

SEQ ID NO: 12395 - DNA, 20 bp, Artificial Sequence
  Description of Artificial Sequence: Synthetic oligonucleotide
  Target: LAMA2; (+) strand; PAM type: NNAGAAW; PAM sequence: ATAGAAA
taaaaggttagtgaagaggc

SEQ ID NO: 12396 - DNA, 20 bp, Artificial Sequence
  Description of Artificial Sequence: Synthetic oligonucleotide
  Target: LAMA2; (+) strand; PAM type: NNAGAAW; PAM sequence: ATAGAAA
gtatttgattttatctctcc

SEQ ID NO: 12397 - DNA, 20 bp, Artificial Sequence
  Description of Artificial Sequence: Synthetic oligonucleotide
  Target: LAMA2; (+) strand; PAM type: NNAGAAW; PAM sequence: ACAGAAA
ttatattagctaatcactaa

SEQ ID NO: 12398 - DNA, 20 bp, Artificial Sequence
  Description of Artificial Sequence: Synthetic oligonucleotide
  Target: LAMA2; (+) strand; PAM type: NNAGAAW; PAM sequence: GGAGAAT
atattaattctcaagtctta

SEQ ID NO: 12399 - DNA, 20 bp, Artificial Sequence
  Description of Artificial Sequence: Synthetic oligonucleotide
  Target: LAMA2; (+) strand; PAM type: NNAGAAW; PAM sequence: GAAGAAT
tttactgtttcttgattcat

SEQ ID NO: 12400 - DNA, 20 bp, Artificial Sequence
  Description of Artificial Sequence: Synthetic oligonucleotide
  Target: LAMA2; (+) strand; PAM type: NNAGAAW; PAM sequence: AGAGAAT
tgagccagaccatatcacta

SEQ ID NO: 12401 - DNA, 20 bp, Artificial Sequence
  Description of Artificial Sequence: Synthetic oligonucleotide
  Target: LAMA2; (+) strand; PAM type: NNAGAAW; PAM sequence: ACAGAAT
ctaagagaataaaaatggac

SEQ ID NO: 12402 - DNA, 20 bp, Artificial Sequence
  Description of Artificial Sequence: Synthetic oligonucleotide
  Target: LAMA2; (+) strand; PAM type: NNAGAAW; PAM sequence: AGAGAAT
ccatgacctagtgagttctt

SEQ ID NO: 12403 - DNA, 20 bp, Artificial Sequence
  Description of Artificial Sequence: Synthetic oligonucleotide
  Target: LAMA2; (+) strand; PAM type: NNAGAAW; PAM sequence: GAAGAAA
tcccaactggtataataaaa

SEQ ID NO: 12404 - DNA, 20 bp, Artificial Sequence
  Description of Artificial Sequence: Synthetic oligonucleotide
  Target: LAMA2; (+) strand; PAM type: NNAGAAW; PAM sequence: CAAGAAA
atataaacacataatcgaag

SEQ ID NO: 12405 - DNA, 20 bp, Artificial Sequence
  Description of Artificial Sequence: Synthetic oligonucleotide
  Target: LAMA2; (+) strand; PAM type: NNAGAAW; PAM sequence: TGAGAAA
cataatcgaagcaagaaaaa

SEQ ID NO: 12406 - DNA, 20 bp, Artificial Sequence
  Description of Artificial Sequence: Synthetic oligonucleotide
  Target: LAMA2; (+) strand; PAM type: NNAGAAW; PAM sequence: GAAGAAT
aatcaaatatataatatgat

SEQ ID NO: 12407 - DNA, 20 bp, Artificial Sequence
  Description of Artificial Sequence: Synthetic oligonucleotide
  Target: LAMA2; (+) strand; PAM type: NNAGAAW; PAM sequence: GAAGAAA
gactcagcaatgaggacttg

SEQ ID NO: 12408 - DNA, 20 bp, Artificial Sequence
  Description of Artificial Sequence: Synthetic oligonucleotide
  Target: LAMA2; (+) strand; PAM type: NNAGAAW; PAM sequence: AAAGAAA
ccaatgttttcttgattgta

SEQ ID NO: 12409 - DNA, 20 bp, Artificial Sequence
  Description of Artificial Sequence: Synthetic oligonucleotide
  Target: LAMA2; (+) strand; PAM type: NNAGAAW; PAM sequence: TTAGAAT
taaatatgaccagtcacaac

SEQ ID NO: 12410 - DNA, 20 bp, Artificial Sequence
  Description of Artificial Sequence: Synthetic oligonucleotide
  Target: LAMA2; (+) strand; PAM type: NNAGAAW; PAM sequence: CCAGAAT
gactccacaataagtgggtt

SEQ ID NO: 12411 - DNA, 20 bp, Artificial Sequence
  Description of Artificial Sequence: Synthetic oligonucleotide
  Target: LAMA2; (+) strand; PAM type: NNAGAAW; PAM sequence: GTAGAAT
tccagaatcgttgacattta

SEQ ID NO: 12412 - DNA, 20 bp, Artificial Sequence
  Description of Artificial Sequence: Synthetic oligonucleotide
  Target: LAMA2; (+) strand; PAM type: NNAGAAW; PAM sequence: AAAGAAA
tgtgctttcaattctgtttt

SEQ ID NO: 12413 - DNA, 20 bp, Artificial Sequence
  Description of Artificial Sequence: Synthetic oligonucleotide
  Target: LAMA2; (+) strand; PAM type: NNAGAAW; PAM sequence: ACAGAAA
gggtgtcctgttcattactt

SEQ ID NO: 12414 - DNA, 20 bp, Artificial Sequence
  Description of Artificial Sequence: Synthetic oligonucleotide
  Target: LAMA2; (+) strand; PAM type: NNAGAAW; PAM sequence: AGAGAAT
attctacaataatgtgattc

SEQ ID NO: 12415 - DNA, 20 bp, Artificial Sequence
  Description of Artificial Sequence: Synthetic oligonucleotide
  Target: LAMA2; (+) strand; PAM type: NNAGAAW; PAM sequence: ATAGAAA
ctttgtctctatctccctag

SEQ ID NO: 12416 - DNA, 20 bp, Artificial Sequence
  Description of Artificial Sequence: Synthetic oligonucleotide
  Target: LAMA2; (+) strand; PAM type: NNAGAAW; PAM sequence: CCAGAAT
acatgttctgcatctgaagg

SEQ ID NO: 12417 - DNA, 20 bp, Artificial Sequence
  Description of Artificial Sequence: Synthetic oligonucleotide
  Target: LAMA2; (+) strand; PAM type: NNAGAAW; PAM sequence: ACAGAAT
ttgtgtatgtgtgggagata

SEQ ID NO: 12418 - DNA, 20 bp, Artificial Sequence
  Description of Artificial Sequence: Synthetic oligonucleotide
  Target: LAMA2; (+) strand; PAM type: NNAGAAW; PAM sequence: GGAGAAA
atgtgccaattttaatcaat

SEQ ID NO: 12419 - DNA, 20 bp, Artificial Sequence
  Description of Artificial Sequence: Synthetic oligonucleotide
  Target: LAMA2; (+) strand; PAM type: NNAGAAW; PAM sequence: CTAGAAA
ttatatgatggtataaagtt

SEQ ID NO: 12420 - DNA, 20 bp, Artificial Sequence
  Description of Artificial Sequence: Synthetic oligonucleotide
  Target: LAMA2; (+) strand; PAM type: NNAGAAW; PAM sequence: TGAGAAT
ttattcttgtgatagtttgc

SEQ ID NO: 12421 - DNA, 20 bp, Artificial Sequence
  Description of Artificial Sequence: Synthetic oligonucleotide
  Target: LAMA2; (+) strand; PAM type: NNAGAAW; PAM sequence: GAAGAAA
gtagttttttccaattctgt

SEQ ID NO: 12422 - DNA, 20 bp, Artificial Sequence
  Description of Artificial Sequence: Synthetic oligonucleotide
  Target: LAMA2; (+) strand; PAM type: NNAGAAW; PAM sequence: TAAGAAT
gtttgtctgttgttggtgta

SEQ ID NO: 12423 - DNA, 20 bp, Artificial Sequence
  Description of Artificial Sequence: Synthetic oligonucleotide
  Target: LAMA2; (+) strand; PAM type: NNAGAAW; PAM sequence: TCAGAAT
gtctctgcctggctttggta

SEQ ID NO: 12424 - DNA, 20 bp, Artificial Sequence
  Description of Artificial Sequence: Synthetic oligonucleotide
  Target: LAMA2; (+) strand; PAM type: NNAGAAW; PAM sequence: GTAGAAT
agttcctccttgtacctctg

SEQ ID NO: 12425 - DNA, 20 bp, Artificial Sequence
  Description of Artificial Sequence: Synthetic oligonucleotide
  Target: LAMA2; (+) strand; PAM type: NNAGAAW; PAM sequence: TAAGAAT
gggttgaaaattcttttctt

SEQ ID NO: 12426 - DNA, 20 bp, Artificial Sequence
  Description of Artificial Sequence: Synthetic oligonucleotide
  Target: LAMA2; (+) strand; PAM type: NNAGAAW; PAM sequence: GCAGAAA
ccggtacctcagatggaaaa

SEQ ID NO: 12427 - DNA, 20 bp, Artificial Sequence
  Description of Artificial Sequence: Synthetic oligonucleotide
  Target: LAMA2; (+) strand; PAM type: NNAGAAW; PAM sequence: TAAGAAA
aaataaagtttttttacaca

SEQ ID NO: 12428 - DNA, 20 bp, Artificial Sequence
  Description of Artificial Sequence: Synthetic oligonucleotide
  Target: LAMA2; (+) strand; PAM type: NNAGAAW; PAM sequence: TTAGAAT
tctgattagtttcatctgtc

SEQ ID NO: 12429 - DNA, 20 bp, Artificial Sequence
  Description of Artificial Sequence: Synthetic oligonucleotide
  Target: LAMA2; (+) strand; PAM type: NNAGAAW; PAM sequence: GAAGAAA
gtaaggcagtgatacaaaag

SEQ ID NO: 12430 - DNA, 20 bp, Artificial Sequence
  Description of Artificial Sequence: Synthetic oligonucleotide
  Target: LAMA2; (+) strand; PAM type: NNAGAAW; PAM sequence: AAAGAAA
gcagtgatacaaaaggaaga

SEQ ID NO: 12431 - DNA, 20 bp, Artificial Sequence
  Description of Artificial Sequence: Synthetic oligonucleotide
  Target: LAMA2; (+) strand; PAM type: NNAGAAW; PAM sequence: TAAGAAT
atcccaatttattcattaaa

SEQ ID NO: 12432 - DNA, 20 bp, Artificial Sequence
  Description of Artificial Sequence: Synthetic oligonucleotide
  Target: LAMA2; (+) strand; PAM type: NNAGAAW; PAM sequence: TAAGAAA
gctgaatgtggaaagggctt

SEQ ID NO: 12433 - DNA, 20 bp, Artificial Sequence
  Description of Artificial Sequence: Synthetic oligonucleotide
  Target: LAMA2; (+) strand; PAM type: NNAGAAW; PAM sequence: GTAGAAA
tgtttttacattctggggaa

SEQ ID NO: 12434 - DNA, 20 bp, Artificial Sequence
  Description of Artificial Sequence: Synthetic oligonucleotide
  Target: LAMA2; (+) strand; PAM type: NNAGAAW; PAM sequence: AGAGAAT
tggactgagttttgaacaga

SEQ ID NO: 12435 - DNA, 20 bp, Artificial Sequence
  Description of Artificial Sequence: Synthetic oligonucleotide
  Target: LAMA2; (+) strand; PAM type: NNAGAAW; PAM sequence: CCAGAAA
gggctgtggagcatgggcga

SEQ ID NO: 12436 - DNA, 20 bp, Artificial Sequence
  Description of Artificial Sequence: Synthetic oligonucleotide
  Target: LAMA2; (+) strand; PAM type: NNAGAAW; PAM sequence: AAAGAAA
aagtttagatttgctttaat

SEQ ID NO: 12437 - DNA, 20 bp, Artificial Sequence
  Description of Artificial Sequence: Synthetic oligonucleotide
  Target: LAMA2; (+) strand; PAM type: NNAGAAW; PAM sequence: AGAGAAA
aaaaatgttactttgtgatg

SEQ ID NO: 12438 - DNA, 20 bp, Artificial Sequence
  Description of Artificial Sequence: Synthetic oligonucleotide
  Target: LAMA2; (+) strand; PAM type: NNAGAAW; PAM sequence: TGAGAAA
attgatgagtctagatgctg

SEQ ID NO: 12439 - DNA, 20 bp, Artificial Sequence
  Description of Artificial Sequence: Synthetic oligonucleotide
  Target: LAMA2; (+) strand; PAM type: NNAGAAW; PAM sequence: GGAGAAT
gtggaattacctcagcacat

SEQ ID NO: 12440 - DNA, 20 bp, Artificial Sequence
  Description of Artificial Sequence: Synthetic oligonucleotide
  Target: LAMA2; (+) strand; PAM type: NNAGAAW; PAM sequence: AAAGAAA
tgaggtttgtgtgcaaggga

SEQ ID NO: 12441 - DNA, 20 bp, Artificial Sequence
  Description of Artificial Sequence: Synthetic oligonucleotide
  Target: LAMA2; (+) strand; PAM type: NNAGAAW; PAM sequence: TTAGAAA
atggcaaacccaggcaaaaa

SEQ ID NO: 12442 - DNA, 20 bp, Artificial Sequence
  Description of Artificial Sequence: Synthetic oligonucleotide
  Target: LAMA2; (+) strand; PAM type: NNAGAAW; PAM sequence: AGAGAAA
agaaaaataaaaaggattgt

SEQ ID NO: 12443 - DNA, 20 bp, Artificial Sequence
  Description of Artificial Sequence: Synthetic oligonucleotide
  Target: LAMA2; (+) strand; PAM type: NNAGAAW; PAM sequence: ACAGAAA
ttttttcctcaaggttatta

SEQ ID NO: 12444 - DNA, 20 bp, Artificial Sequence
  Description of Artificial Sequence: Synthetic oligonucleotide
  Target: LAMA2; (+) strand; PAM type: NNAGAAW; PAM sequence: CTAGAAA
ccataaataattttgaaaat

SEQ ID NO: 12445 - DNA, 20 bp, Artificial Sequence
  Description of Artificial Sequence: Synthetic oligonucleotide
  Target: LAMA2; (+) strand; PAM type: NNAGAAW; PAM sequence: AAAGAAA
aaataattttgaaaatctag

SEQ ID NO: 12446 - DNA, 20 bp, Artificial Sequence
  Description of Artificial Sequence: Synthetic oligonucleotide
  Target: LAMA2; (+) strand; PAM type: NNAGAAW; PAM sequence: TTAGAAA
ggtgaatgtaattttgcact

SEQ ID NO: 12447 - DNA, 20 bp, Artificial Sequence
  Description of Artificial Sequence: Synthetic oligonucleotide
  Target: LAMA2; (+) strand; PAM type: NNAGAAW; PAM sequence: TAAGAAA
caaaatgtaaagtgagcaac

SEQ ID NO: 12448 - DNA, 20 bp, Artificial Sequence
  Description of Artificial Sequence: Synthetic oligonucleotide
  Target: LAMA2; (+) strand; PAM type: NNAGAAW; PAM sequence: GTAGAAT
aaaatgtgttcttaaattca

SEQ ID NO: 12449 - DNA, 20 bp, Artificial Sequence
  Description of Artificial Sequence: Synthetic oligonucleotide
  Target: LAMA2; (+) strand; PAM type: NNAGAAW; PAM sequence: GCAGAAA
cagacattgacataaacaag

SEQ ID NO: 12450 - DNA, 20 bp, Artificial Sequence
  Description of Artificial Sequence: Synthetic oligonucleotide
  Target: LAMA2; (+) strand; PAM type: NNAGAAW; PAM sequence: TGAGAAT
ctatttggcaaattgggata

SEQ ID NO: 12451 - DNA, 20 bp, Artificial Sequence
  Description of Artificial Sequence: Synthetic oligonucleotide
  Target: LAMA2; (+) strand; PAM type: NNAGAAW; PAM sequence: TTAGAAT
tcaatgattgcttttttaag

SEQ ID NO: 12452 - DNA, 20 bp, Artificial Sequence
  Description of Artificial Sequence: Synthetic oligonucleotide
  Target: LAMA2; (+) strand; PAM type: NNAGAAW; PAM sequence: ACAGAAT
aaaaaaaaaaaaaactaatt

SEQ ID NO: 12453 - DNA, 20 bp, Artificial Sequence
  Description of Artificial Sequence: Synthetic oligonucleotide
  Target: LAMA2; (+) strand; PAM type: NNAGAAW; PAM sequence: TTAGAAA
ttactatgtacttactacaa

SEQ ID NO: 12454 - DNA, 20 bp, Artificial Sequence
  Description of Artificial Sequence: Synthetic oligonucleotide
  Target: LAMA2; (+) strand; PAM type: NNAGAAW; PAM sequence: GGAGAAA
tatgacctattaacctcaat

SEQ ID NO: 12455 - DNA, 20 bp, Artificial Sequence
  Description of Artificial Sequence: Synthetic oligonucleotide
  Target: LAMA2; (+) strand; PAM type: NNAGAAW; PAM sequence: TAAGAAT
ttactgaatgtgtataatta

SEQ ID NO: 12456 - DNA, 20 bp, Artificial Sequence
  Description of Artificial Sequence: Synthetic oligonucleotide
  Target: LAMA2; (+) strand; PAM type: NNAGAAW; PAM sequence: TAAGAAA
gtgagtgaaagatttagaag

SEQ ID NO: 12457 - DNA, 20 bp, Artificial Sequence
  Description of Artificial Sequence: Synthetic oligonucleotide
  Target: LAMA2; (+) strand; PAM type: NNAGAAW; PAM sequence: TTAGAAT
ctaaatcatctcaagtgaaa

SEQ ID NO: 12458 - DNA, 20 bp, Artificial Sequence
  Description of Artificial Sequence: Synthetic oligonucleotide
  Target: LAMA2; (+) strand; PAM type: NNAGAAW; PAM sequence: AAAGAAA
agtgaaattagaattaatat

SEQ ID NO: 12459 - DNA, 20 bp, Artificial Sequence
  Description of Artificial Sequence: Synthetic oligonucleotide
  Target: LAMA2; (+) strand; PAM type: NNAGAAW; PAM sequence: CTAGAAA
tatcctcccgtaaacactat

SEQ ID NO: 12460 - DNA, 20 bp, Artificial Sequence
  Description of Artificial Sequence: Synthetic oligonucleotide
  Target: LAMA2; (+) strand; PAM type: NNAGAAW; PAM sequence: TGAGAAT
ttttcttctatttctctctt

SEQ ID NO: 12461 - DNA, 20 bp, Artificial Sequence
  Description of Artificial Sequence: Synthetic oligonucleotide
  Target: LAMA2; (+) strand; PAM type: NNAGAAW; PAM sequence: CTAGAAA
aggccaccatcatctcacaa

SEQ ID NO: 12462 - DNA, 20 bp, Artificial Sequence
  Description of Artificial Sequence: Synthetic oligonucleotide
  Target: LAMA2; (+) strand; PAM type: NNAGAAW; PAM sequence: TGAGAAA
ctgctcttgactttttatgt

SEQ ID NO: 12463 - DNA, 20 bp, Artificial Sequence
  Description of Artificial Sequence: Synthetic oligonucleotide
  Target: LAMA2; (+) strand; PAM type: NNAGAAW; PAM sequence: GAAGAAA
tgaagcactatagcaaggga

SEQ ID NO: 12464 - DNA, 20 bp, Artificial Sequence
  Description of Artificial Sequence: Synthetic oligonucleotide
  Target: LAMA2; (+) strand; PAM type: NNAGAAW; PAM sequence: AAAGAAA
cactatagcaagggagaaga

SEQ ID NO: 12465 - DNA, 20 bp, Artificial Sequence
  Description of Artificial Sequence: Synthetic oligonucleotide
  Target: LAMA2; (+) strand; PAM type: NNAGAAW; PAM sequence: CCAGAAA
gagaagaaaagaaagagaga

SEQ ID NO: 12466 - DNA, 20 bp, Artificial Sequence
  Description of Artificial Sequence: Synthetic oligonucleotide
  Target: LAMA2; (+) strand; PAM type: NNAGAAW; PAM sequence: CAAGAAA
aagggctgattattgaatat

SEQ ID NO: 12467 - DNA, 20 bp, Artificial Sequence
  Description of Artificial Sequence: Synthetic oligonucleotide
  Target: LAMA2; (+) strand; PAM type: NNAGAAW; PAM sequence: ATAGAAA
gaatatcaagaaaggaacac

SEQ ID NO: 12468 - DNA, 20 bp, Artificial Sequence
  Description of Artificial Sequence: Synthetic oligonucleotide
  Target: LAMA2; (+) strand; PAM type: NNAGAAW; PAM sequence: AAAGAAA
ggttgaattgcatccttcaa

SEQ ID NO: 12469 - DNA, 20 bp, Artificial Sequence
  Description of Artificial Sequence: Synthetic oligonucleotide
  Target: LAMA2; (+) strand; PAM type: NNAGAAW; PAM sequence: ACAGAAA
catagaagaggggaggagat

SEQ ID NO: 12470 - DNA, 20 bp, Artificial Sequence
  Description of Artificial Sequence: Synthetic oligonucleotide
  Target: LAMA2; (+) strand; PAM type: NNAGAAW; PAM sequence: GGAGAAA
gaggagatacagaaatacag

SEQ ID NO: 12471 - DNA, 20 bp, Artificial Sequence
  Description of Artificial Sequence: Synthetic oligonucleotide
  Target: LAMA2; (+) strand; PAM type: NNAGAAW; PAM sequence: TGAGAAT
gttcaattcccacctatgag

SEQ ID NO: 12472 - DNA, 20 bp, Artificial Sequence
  Description of Artificial Sequence: Synthetic oligonucleotide
  Target: LAMA2; (+) strand; PAM type: NNAGAAW; PAM sequence: TGAGAAT
ttgtccttgtgatagtttac

SEQ ID NO: 12473 - DNA, 20 bp, Artificial Sequence
  Description of Artificial Sequence: Synthetic oligonucleotide
  Target: LAMA2; (+) strand; PAM type: NNAGAAW; PAM sequence: GAAGAAA
gtagttttttccaactctgt

SEQ ID NO: 12474 - DNA, 20 bp, Artificial Sequence
  Description of Artificial Sequence: Synthetic oligonucleotide
  Target: LAMA2; (+) strand; PAM type: NNAGAAW; PAM sequence: TTAGAAT
aagttggattcctaggtatt

SEQ ID NO: 12475 - DNA, 20 bp, Artificial Sequence
  Description of Artificial Sequence: Synthetic oligonucleotide
  Target: LAMA2; (+) strand; PAM type: NNAGAAW; PAM sequence: CTAGAAA
ggtcatttattatggcagtc

SEQ ID NO: 12476 - DNA, 20 bp, Artificial Sequence
  Description of Artificial Sequence: Synthetic oligonucleotide
  Target: LAMA2; (+) strand; PAM type: NNAGAAW; PAM sequence: ACAGAAA
gtatatccaatatatttaat

SEQ ID NO: 12477 - DNA, 20 bp, Artificial Sequence
  Description of Artificial Sequence: Synthetic oligonucleotide
  Target: LAMA2; (+) strand; PAM type: NNAGAAW; PAM sequence: GTAGAAT
aaaggatgaagatatagata

SEQ ID NO: 12478 - DNA, 20 bp, Artificial Sequence
  Description of Artificial Sequence: Synthetic oligonucleotide
  Target: LAMA2; (+) strand; PAM type: NNAGAAW; PAM sequence: TAAGAAT
tgctccacatttttacaatc

SEQ ID NO: 12479 - DNA, 20 bp, Artificial Sequence
  Description of Artificial Sequence: Synthetic oligonucleotide
  Target: LAMA2; (+) strand; PAM type: NNAGAAW; PAM sequence: CAAGAAT
gctgagaagtgtagggaaca

SEQ ID NO: 12480 - DNA, 20 bp, Artificial Sequence
  Description of Artificial Sequence: Synthetic oligonucleotide
  Target: LAMA2; (+) strand; PAM type: NNAGAAW; PAM sequence: GAAGAAA
tctgcttacatataatggca

SEQ ID NO: 12481 - DNA, 20 bp, Artificial Sequence
  Description of Artificial Sequence: Synthetic oligonucleotide
  Target: LAMA2; (+) strand; PAM type: NNAGAAW; PAM sequence: GGAGAAA
accattcaactgctcataaa

SEQ ID NO: 12482 - DNA, 20 bp, Artificial Sequence
  Description of Artificial Sequence: Synthetic oligonucleotide
  Target: LAMA2; (+) strand; PAM type: NNAGAAW; PAM sequence: GGAGAAA
gaggaagagaaggaagagga

SEQ ID NO: 12483 - DNA, 20 bp, Artificial Sequence
  Description of Artificial Sequence: Synthetic oligonucleotide
  Target: LAMA2; (+) strand; PAM type: NNAGAAW; PAM sequence: CAAGAAA
taaattatcagttaataatt

SEQ ID NO: 12484 - DNA, 20 bp, Artificial Sequence
  Description of Artificial Sequence: Synthetic oligonucleotide
  Target: LAMA2; (+) strand; PAM type: NNAGAAW; PAM sequence: AGAGAAT
attacgtcttcttttagaga

SEQ ID NO: 12485 - DNA, 20 bp, Artificial Sequence
  Description of Artificial Sequence: Synthetic oligonucleotide
  Target: LAMA2; (+) strand; PAM type: NNAGAAW; PAM sequence: CCAGAAA
tagagaagagaattatttaa

SEQ ID NO: 12486 - DNA, 20 bp, Artificial Sequence
  Description of Artificial Sequence: Synthetic oligonucleotide
  Target: LAMA2; (+) strand; PAM type: NNAGAAW; PAM sequence: ACAGAAT
ataacatcaacaagcctttt

SEQ ID NO: 12487 - DNA, 20 bp, Artificial Sequence
  Description of Artificial Sequence: Synthetic oligonucleotide
  Target: LAMA2; (+) strand; PAM type: NNAGAAW; PAM sequence: GTAGAAA
cataattttaaaaatggaag

SEQ ID NO: 12488 - DNA, 20 bp, Artificial Sequence
  Description of Artificial Sequence: Synthetic oligonucleotide
  Target: LAMA2; (+) strand; PAM type: NNAGAAW; PAM sequence: ATAGAAT
gggtcctcaaaacattacaa

SEQ ID NO: 12489 - DNA, 20 bp, Artificial Sequence
  Description of Artificial Sequence: Synthetic oligonucleotide
  Target: LAMA2; (+) strand; PAM type: NNAGAAW; PAM sequence: GGAGAAA
tttacaatggccaaaaggtg

SEQ ID NO: 12490 - DNA, 20 bp, Artificial Sequence
  Description of Artificial Sequence: Synthetic oligonucleotide
  Target: LAMA2; (+) strand; PAM type: NNAGAAW; PAM sequence: TCAGAAT
attctacttacctagagtag

SEQ ID NO: 12491 - DNA, 20 bp, Artificial Sequence
  Description of Artificial Sequence: Synthetic oligonucleotide
  Target: LAMA2; (+) strand; PAM type: NNAGAAW; PAM sequence: ACAGAAA
gagtagtcagaatcatagag

SEQ ID NO: 12492 - DNA, 20 bp, Artificial Sequence
  Description of Artificial Sequence: Synthetic oligonucleotide
  Target: LAMA2; (+) strand; PAM type: NNAGAAW; PAM sequence: AGAGAAA
tcactcccagtgctctatac

SEQ ID NO: 12493 - DNA, 20 bp, Artificial Sequence
  Description of Artificial Sequence: Synthetic oligonucleotide
  Target: LAMA2; (+) strand; PAM type: NNAGAAW; PAM sequence: TGAGAAA
acaatgtctcagtcttgcca

SEQ ID NO: 12494 - DNA, 20 bp, Artificial Sequence
  Description of Artificial Sequence: Synthetic oligonucleotide
  Target: LAMA2; (+) strand; PAM type: NNAGAAW; PAM sequence: TGAGAAT
ctattctcatgaaatattca

SEQ ID NO: 12495 - DNA, 20 bp, Artificial Sequence
  Description of Artificial Sequence: Synthetic oligonucleotide
  Target: LAMA2; (+) strand; PAM type: NNAGAAW; PAM sequence: CCAGAAT
ctttggcaacatataaaaat

SEQ ID NO: 12496 - DNA, 20 bp, Artificial Sequence
  Description of Artificial Sequence: Synthetic oligonucleotide
  Target: LAMA2; (+) strand; PAM type: NNAGAAW; PAM sequence: AGAGAAT
tctgctaacaaagatgaaat

SEQ ID NO: 12497 - DNA, 20 bp, Artificial Sequence
  Description of Artificial Sequence: Synthetic oligonucleotide
  Target: LAMA2; (+) strand; PAM type: NNAGAAW; PAM sequence: TGAGAAT
tctggtggattctaaaggac

SEQ ID NO: 12498 - DNA, 20 bp, Artificial Sequence
  Description of Artificial Sequence: Synthetic oligonucleotide
  Target: LAMA2; (+) strand; PAM type: NNAGAAW; PAM sequence: GGAGAAT
ataacaaatgcacttaaatt

SEQ ID NO: 12499 - DNA, 20 bp, Artificial Sequence
  Description of Artificial Sequence: Synthetic oligonucleotide
  Target: LAMA2; (+) strand; PAM type: NNAGAAW; PAM sequence: CAAGAAA
ttgacctattaaatggactt

SEQ ID NO: 12500 - DNA, 20 bp, Artificial Sequence
  Description of Artificial Sequence: Synthetic oligonucleotide
  Target: LAMA2; (+) strand; PAM type: NNAGAAW; PAM sequence: ATAGAAA
gtcacaattaattattatta

SEQ ID NO: 12501 - DNA, 20 bp, Artificial Sequence
  Description of Artificial Sequence: Synthetic oligonucleotide
  Target: LAMA2; (+) strand; PAM type: NNAGAAW; PAM sequence: TCAGAAT
accatttgcttataggtctt

SEQ ID NO: 12502 - DNA, 20 bp, Artificial Sequence
  Description of Artificial Sequence: Synthetic oligonucleotide
  Target: LAMA2; (+) strand; PAM type: NNAGAAW; PAM sequence: TTAGAAT
tctcagactgttatttgctg

SEQ ID NO: 12503 - DNA, 20 bp, Artificial Sequence
  Description of Artificial Sequence: Synthetic oligonucleotide
  Target: LAMA2; (+) strand; PAM type: NNAGAAW; PAM sequence: TCAGAAA
ttggatttagtttaatttat

SEQ ID NO: 12504 - DNA, 20 bp, Artificial Sequence
  Description of Artificial Sequence: Synthetic oligonucleotide
  Target: LAMA2; (+) strand; PAM type: NNAGAAW; PAM sequence: TTAGAAT
atcatagtcttaaatcatac

SEQ ID NO: 12505 - DNA, 20 bp, Artificial Sequence
  Description of Artificial Sequence: Synthetic oligonucleotide
  Target: LAMA2; (+) strand; PAM type: NNAGAAW; PAM sequence: ATAGAAT
cccttctccttattcttacg

SEQ ID NO: 12506 - DNA, 20 bp, Artificial Sequence
  Description of Artificial Sequence: Synthetic oligonucleotide
  Target: LAMA2; (+) strand; PAM type: NNAGAAW; PAM sequence: CCAGAAA
gaattcctattggggctgtg

SEQ ID NO: 12507 - DNA, 20 bp, Artificial Sequence
  Description of Artificial Sequence: Synthetic oligonucleotide
  Target: LAMA2; (+) strand; PAM type: NNAGAAW; PAM sequence: TCAGAAT
tcagtgaatagtaatgctca

SEQ ID NO: 12508 - DNA, 20 bp, Artificial Sequence
  Description of Artificial Sequence: Synthetic oligonucleotide
  Target: LAMA2; (+) strand; PAM type: NNAGAAW; PAM sequence: AGAGAAT
tgagtaaagtggactttgtg

SEQ ID NO: 12509 - DNA, 20 bp, Artificial Sequence
  Description of Artificial Sequence: Synthetic oligonucleotide
  Target: LAMA2; (+) strand; PAM type: NNAGAAW; PAM sequence: CCAGAAT
atagtggctaatgtggtcat

SEQ ID NO: 12510 - DNA, 20 bp, Artificial Sequence
  Description of Artificial Sequence: Synthetic oligonucleotide
  Target: LAMA2; (+) strand; PAM type: NNAGAAW; PAM sequence: AGAGAAT
aagactggggtgagacctcg

SEQ ID NO: 12511 - DNA, 20 bp, Artificial Sequence
  Description of Artificial Sequence: Synthetic oligonucleotide
  Target: LAMA2; (+) strand; PAM type: NNAGAAW; PAM sequence: AGAGAAA
tcgattctgcttgtacctgt

SEQ ID NO: 12512 - DNA, 20 bp, Artificial Sequence
  Description of Artificial Sequence: Synthetic oligonucleotide
  Target: LAMA2; (+) strand; PAM type: NNAGAAW; PAM sequence: CAAGAAA
tttgtcactgaagccaacgc

SEQ ID NO: 12513 - DNA, 20 bp, Artificial Sequence
  Description of Artificial Sequence: Synthetic oligonucleotide
  Target: LAMA2; (+) strand; PAM type: NNAGAAW; PAM sequence: GTAGAAT
ttccagatggatgcctgagt

SEQ ID NO: 12514 - DNA, 20 bp, Artificial Sequence
  Description of Artificial Sequence: Synthetic oligonucleotide
  Target: LAMA2; (+) strand; PAM type: NNAGAAW; PAM sequence: CAAGAAA
aaatgtacacggagcaggag

SEQ ID NO: 12515 - DNA, 20 bp, Artificial Sequence
  Description of Artificial Sequence: Synthetic oligonucleotide
  Target: LAMA2; (+) strand; PAM type: NNAGAAW; PAM sequence: CAAGAAA
tctctgcaaaaaaaaaggga

SEQ ID NO: 12516 - DNA, 20 bp, Artificial Sequence
  Description of Artificial Sequence: Synthetic oligonucleotide
  Target: LAMA2; (+) strand; PAM type: NNAGAAW; PAM sequence: AAAGAAT
caccttcctcccaaaggaac

SEQ ID NO: 12517 - DNA, 20 bp, Artificial Sequence
  Description of Artificial Sequence: Synthetic oligonucleotide
  Target: LAMA2; (+) strand; PAM type: NNAGAAW; PAM sequence: AAAGAAA
attcataaattcttcaaaca

SEQ ID NO: 12518 - DNA, 20 bp, Artificial Sequence
  Description of Artificial Sequence: Synthetic oligonucleotide
  Target: LAMA2; (+) strand; PAM type: NNAGAAW; PAM sequence: TCAGAAA
taaaactaccgtttttttct

SEQ ID NO: 12519 - DNA, 20 bp, Artificial Sequence
  Description of Artificial Sequence: Synthetic oligonucleotide
  Target: LAMA2; (+) strand; PAM type: NNAGAAW; PAM sequence: TGAGAAA
agttaaaaaacataaatatc

SEQ ID NO: 12520 - DNA, 20 bp, Artificial Sequence
  Description of Artificial Sequence: Synthetic oligonucleotide
  Target: LAMA2; (+) strand; PAM type: NNAGAAW; PAM sequence: TGAGAAA
taaatatctgagaaatgaac

SEQ ID NO: 12521 - DNA, 20 bp, Artificial Sequence
  Description of Artificial Sequence: Synthetic oligonucleotide
  Target: LAMA2; (+) strand; PAM type: NNAGAAW; PAM sequence: GGAGAAA
tgagaaatgaactgagaaaa

SEQ ID NO: 12522 - DNA, 20 bp, Artificial Sequence
  Description of Artificial Sequence: Synthetic oligonucleotide
  Target: LAMA2; (+) strand; PAM type: NNAGAAW; PAM sequence: GGAGAAT
tacaggacatgaatggtaca

SEQ ID NO: 12523 - DNA, 20 bp, Artificial Sequence
  Description of Artificial Sequence: Synthetic oligonucleotide
  Target: LAMA2; (+) strand; PAM type: NNAGAAW; PAM sequence: ACAGAAT
aaacaaataaaaattacatt

SEQ ID NO: 12524 - DNA, 20 bp, Artificial Sequence
  Description of Artificial Sequence: Synthetic oligonucleotide
  Target: LAMA2; (+) strand; PAM type: NNAGAAW; PAM sequence: GGAGAAT
ctatgtctcctctgttgtga

SEQ ID NO: 12525 - DNA, 20 bp, Artificial Sequence
  Description of Artificial Sequence: Synthetic oligonucleotide
  Target: LAMA2; (+) strand; PAM type: NNAGAAW; PAM sequence: TAAGAAA
attgactgcacttttgctaa

SEQ ID NO: 12526 - DNA, 20 bp, Artificial Sequence
  Description of Artificial Sequence: Synthetic oligonucleotide
  Target: LAMA2; (+) strand; PAM type: NNAGAAW; PAM sequence: TCAGAAT
actagtgacgcattagagcc

SEQ ID NO: 12527 - DNA, 20 bp, Artificial Sequence
  Description of Artificial Sequence: Synthetic oligonucleotide
  Target: LAMA2; (+) strand; PAM type: NNAGAAW; PAM sequence: ACAGAAT
agaccttaaactgttaccaa

SEQ ID NO: 12528 - DNA, 20 bp, Artificial Sequence
  Description of Artificial Sequence: Synthetic oligonucleotide
  Target: LAMA2; (+) strand; PAM type: NNAGAAW; PAM sequence: GGAGAAA
actgtacaccctaaaaaaaa

SEQ ID NO: 12529 - DNA, 20 bp, Artificial Sequence
  Description of Artificial Sequence: Synthetic oligonucleotide
  Target: LAMA2; (+) strand; PAM type: NNAGAAW; PAM sequence: CTAGAAA
tcaccttttaaaatatatag

SEQ ID NO: 12530 - DNA, 20 bp, Artificial Sequence
  Description of Artificial Sequence: Synthetic oligonucleotide
  Target: LAMA2; (+) strand; PAM type: NNAGAAW; PAM sequence: GAAGAAT
tagtactattttcatttttg

SEQ ID NO: 12531 - DNA, 20 bp, Artificial Sequence
  Description of Artificial Sequence: Synthetic oligonucleotide
  Target: LAMA2; (+) strand; PAM type: NNAGAAW; PAM sequence: ACAGAAA
agttcttccaattcatgaac

SEQ ID NO: 12532 - DNA, 20 bp, Artificial Sequence
  Description of Artificial Sequence: Synthetic oligonucleotide
  Target: LAMA2; (+) strand; PAM type: NNAGAAW; PAM sequence: TGAGAAT
ctgtccttgtgatattttgc

SEQ ID NO: 12533 - DNA, 20 bp, Artificial Sequence
  Description of Artificial Sequence: Synthetic oligonucleotide
  Target: LAMA2; (+) strand; PAM type: NNAGAAW; PAM sequence: TCAGAAA
cccttatcttattcctaatc

SEQ ID NO: 12534 - DNA, 20 bp, Artificial Sequence
  Description of Artificial Sequence: Synthetic oligonucleotide
  Target: LAMA2; (+) strand; PAM type: NNAGAAW; PAM sequence: CTAGAAA
tgtgatacagtttggatacc

SEQ ID NO: 12535 - DNA, 20 bp, Artificial Sequence
  Description of Artificial Sequence: Synthetic oligonucleotide
  Target: LAMA2; (+) strand; PAM type: NNAGAAW; PAM sequence: TGAGAAT
aaagtgaaacaaagcataag

SEQ ID NO: 12536 - DNA, 20 bp, Artificial Sequence
  Description of Artificial Sequence: Synthetic oligonucleotide
  Target: LAMA2; (+) strand; PAM type: NNAGAAW; PAM sequence: GTAGAAA
aagatgaaatgaaatagtca

SEQ ID NO: 12537 - DNA, 20 bp, Artificial Sequence
  Description of Artificial Sequence: Synthetic oligonucleotide
  Target: LAMA2; (+) strand; PAM type: NNAGAAW; PAM sequence: TTAGAAT
aaatagtcagtagaaagtag

SEQ ID NO: 12538 - DNA, 20 bp, Artificial Sequence
  Description of Artificial Sequence: Synthetic oligonucleotide
  Target: LAMA2; (+) strand; PAM type: NNAGAAW; PAM sequence: TCAGAAA
ttgtagacatcagtttgtaa

SEQ ID NO: 12539 - DNA, 20 bp, Artificial Sequence
  Description of Artificial Sequence: Synthetic oligonucleotide
  Target: LAMA2; (+) strand; PAM type: NNAGAAW; PAM sequence: AAAGAAT
ccaacatttaagagtgacca

SEQ ID NO: 12540 - DNA, 20 bp, Artificial Sequence
  Description of Artificial Sequence: Synthetic oligonucleotide
  Target: LAMA2; (+) strand; PAM type: NNAGAAW; PAM sequence: ATAGAAT
aatggaagccagcaaaaggg

SEQ ID NO: 12541 - DNA, 20 bp, Artificial Sequence
  Description of Artificial Sequence: Synthetic oligonucleotide
  Target: LAMA2; (+) strand; PAM type: NNAGAAW; PAM sequence: ACAGAAA
cacagatatttttaaaggag

SEQ ID NO: 12542 - DNA, 20 bp, Artificial Sequence
  Description of Artificial Sequence: Synthetic oligonucleotide
  Target: LAMA2; (+) strand; PAM type: NNAGAAW; PAM sequence: TAAGAAA
attagcttaagctaattatc

SEQ ID NO: 12543 - DNA, 20 bp, Artificial Sequence
  Description of Artificial Sequence: Synthetic oligonucleotide
  Target: LAMA2; (+) strand; PAM type: NNAGAAW; PAM sequence: CAAGAAT
taagctaattatctaagaaa

SEQ ID NO: 12544 - DNA, 20 bp, Artificial Sequence
  Description of Artificial Sequence: Synthetic oligonucleotide
  Target: LAMA2; (+) strand; PAM type: NNAGAAW; PAM sequence: CTAGAAA
gtaagccccaccattgcctt

SEQ ID NO: 12545 - DNA, 20 bp, Artificial Sequence
  Description of Artificial Sequence: Synthetic oligonucleotide
  Target: LAMA2; (+) strand; PAM type: NNAGAAW; PAM sequence: CCAGAAT
atctgatcccttcacggcat

SEQ ID NO: 12546 - DNA, 20 bp, Artificial Sequence
  Description of Artificial Sequence: Synthetic oligonucleotide
  Target: LAMA2; (+) strand; PAM type: NNAGAAW; PAM sequence: AGAGAAT
ggaaggaataaatattagtg

SEQ ID NO: 12547 - DNA, 20 bp, Artificial Sequence
  Description of Artificial Sequence: Synthetic oligonucleotide
  Target: LAMA2; (+) strand; PAM type: NNAGAAW; PAM sequence: AGAGAAT
catttctagagaccagggtg

SEQ ID NO: 12548 - DNA, 20 bp, Artificial Sequence
  Description of Artificial Sequence: Synthetic oligonucleotide
  Target: LAMA2; (+) strand; PAM type: NNAGAAW; PAM sequence: AAAGAAA
aataccttgtctctacaaaa

SEQ ID NO: 12549 - DNA, 20 bp, Artificial Sequence
  Description of Artificial Sequence: Synthetic oligonucleotide
  Target: LAMA2; (+) strand; PAM type: NNAGAAW; PAM sequence: TAAGAAA
ccccccaaaatttttttaaa

SEQ ID NO: 12550 - DNA, 20 bp, Artificial Sequence
  Description of Artificial Sequence: Synthetic oligonucleotide
  Target: LAMA2; (+) strand; PAM type: NNAGAAW; PAM sequence: GCAGAAT
aaataagaaagttttaataa

SEQ ID NO: 12551 - DNA, 20 bp, Artificial Sequence
  Description of Artificial Sequence: Synthetic oligonucleotide
  Target: LAMA2; (+) strand; PAM type: NNAGAAW; PAM sequence: GTAGAAT
tgctggggaaatagaagtaa

SEQ ID NO: 12552 - DNA, 20 bp, Artificial Sequence
  Description of Artificial Sequence: Synthetic oligonucleotide
  Target: LAMA2; (+) strand; PAM type: NNAGAAW; PAM sequence: TCAGAAA
taaaatacaattttcaaggt

SEQ ID NO: 12553 - DNA, 20 bp, Artificial Sequence
  Description of Artificial Sequence: Synthetic oligonucleotide
  Target: LAMA2; (+) strand; PAM type: NNAGAAW; PAM sequence: TGAGAAA
ggagatggtaaatatataag

SEQ ID NO: 12554 - DNA, 20 bp, Artificial Sequence
  Description of Artificial Sequence: Synthetic oligonucleotide
  Target: LAMA2; (+) strand; PAM type: NNAGAAW; PAM sequence: TCAGAAA
gcaatctcattaaaacaagc

SEQ ID NO: 12555 - DNA, 20 bp, Artificial Sequence
  Description of Artificial Sequence: Synthetic oligonucleotide
  Target: LAMA2; (+) strand; PAM type: NNAGAAW; PAM sequence: GGAGAAA
tcttttattgagttctttta

SEQ ID NO: 12556 - DNA, 20 bp, Artificial Sequence
  Description of Artificial Sequence: Synthetic oligonucleotide
  Target: LAMA2; (+) strand; PAM type: NNAGAAW; PAM sequence: ACAGAAA
tcgtcttcccattgaagact

SEQ ID NO: 12557 - DNA, 20 bp, Artificial Sequence
  Description of Artificial Sequence: Synthetic oligonucleotide
  Target: LAMA2; (+) strand; PAM type: NNAGAAW; PAM sequence: CCAGAAA
caaaaaaagatggacagaag

SEQ ID NO: 12558 - DNA, 20 bp, Artificial Sequence
  Description of Artificial Sequence: Synthetic oligonucleotide
  Target: LAMA2; (+) strand; PAM type: NNAGAAW; PAM sequence: GTAGAAT
ttcttctagttgatgcttct

SEQ ID NO: 12559 - DNA, 20 bp, Artificial Sequence
  Description of Artificial Sequence: Synthetic oligonucleotide
  Target: LAMA2; (+) strand; PAM type: NNAGAAW; PAM sequence: TGAGAAA
aataaaaaaaaaagtttagc

SEQ ID NO: 12560 - DNA, 20 bp, Artificial Sequence
  Description of Artificial Sequence: Synthetic oligonucleotide
  Target: LAMA2; (+) strand; PAM type: NNAGAAW; PAM sequence: AGAGAAA
tttccgtttgctaacttatc

SEQ ID NO: 12561 - DNA, 20 bp, Artificial Sequence
  Description of Artificial Sequence: Synthetic oligonucleotide
  Target: LAMA2; (+) strand; PAM type: NNAGAAW; PAM sequence: AAAGAAA
actagtggaaataatatcaa

SEQ ID NO: 12562 - DNA, 20 bp, Artificial Sequence
  Description of Artificial Sequence: Synthetic oligonucleotide
  Target: LAMA2; (+) strand; PAM type: NNAGAAW; PAM sequence: CAAGAAA
tgctacccatggataatgta

SEQ ID NO: 12563 - DNA, 20 bp, Artificial Sequence
  Description of Artificial Sequence: Synthetic oligonucleotide
  Target: LAMA2; (+) strand; PAM type: NNAGAAW; PAM sequence: CAAGAAA
tttggcacagatgaagaaga

SEQ ID NO: 12564 - DNA, 20 bp, Artificial Sequence
  Description of Artificial Sequence: Synthetic oligonucleotide
  Target: LAMA2; (+) strand; PAM type: NNAGAAW; PAM sequence: TGAGAAT
caagaaaaatgtctgctttg

SEQ ID NO: 12565 - DNA, 20 bp, Artificial Sequence
  Description of Artificial Sequence: Synthetic oligonucleotide
  Target: LAMA2; (+) strand; PAM type: NNAGAAW; PAM sequence: ACAGAAA
aatcttagggggcttagtgg

SEQ ID NO: 12566 - DNA, 20 bp, Artificial Sequence
  Description of Artificial Sequence: Synthetic oligonucleotide
  Target: LAMA2; (+) strand; PAM type: NNAGAAW; PAM sequence: AAAGAAT
atgaatagacatggtttctc

SEQ ID NO: 12567 - DNA, 20 bp, Artificial Sequence
  Description of Artificial Sequence: Synthetic oligonucleotide
  Target: LAMA2; (+) strand; PAM type: NNAGAAW; PAM sequence: TAAGAAA
tgcaaaatgctcatctaaaa

SEQ ID NO: 12568 - DNA, 20 bp, Artificial Sequence
  Description of Artificial Sequence: Synthetic oligonucleotide
  Target: LAMA2; (+) strand; PAM type: NNAGAAW; PAM sequence: ATAGAAA
gtgccagacttcagagggat

SEQ ID NO: 12569 - DNA, 20 bp, Artificial Sequence
  Description of Artificial Sequence: Synthetic oligonucleotide
  Target: LAMA2; (+) strand; PAM type: NNAGAAW; PAM sequence: AAAGAAA
ctaaagactggataatttct

SEQ ID NO: 12570 - DNA, 20 bp, Artificial Sequence
  Description of Artificial Sequence: Synthetic oligonucleotide
  Target: LAMA2; (+) strand; PAM type: NNAGAAW; PAM sequence: GTAGAAA
aaacctcgtctctgctaaaa

SEQ ID NO: 12571 - DNA, 20 bp, Artificial Sequence
  Description of Artificial Sequence: Synthetic oligonucleotide
  Target: LAMA2; (+) strand; PAM type: NNAGAAW; PAM sequence: GAAGAAA
aagtagaaaaaaaaaaaaaa

SEQ ID NO: 12572 - DNA, 20 bp, Artificial Sequence
  Description of Artificial Sequence: Synthetic oligonucleotide
  Target: LAMA2; (+) strand; PAM type: NNAGAAW; PAM sequence: AAAGAAA
agaaaaaaaaaaaaaagaag

SEQ ID NO: 12573 - DNA, 20 bp, Artificial Sequence
  Description of Artificial Sequence: Synthetic oligonucleotide
  Target: LAMA2; (+) strand; PAM type: NNAGAAW; PAM sequence: AAAGAAA
aaaaaaaaaaaagaagaaag

SEQ ID NO: 12574 - DNA, 20 bp, Artificial Sequence
  Description of Artificial Sequence: Synthetic oligonucleotide
  Target: LAMA2; (+) strand; PAM type: NNAGAAW; PAM sequence: TGAGAAA
ggatggtgctaaaccactta

SEQ ID NO: 12575 - DNA, 20 bp, Artificial Sequence
  Description of Artificial Sequence: Synthetic oligonucleotide
  Target: LAMA2; (+) strand; PAM type: NNAGAAW; PAM sequence: GGAGAAA
acacatcctatatcactttt

SEQ ID NO: 12576 - DNA, 20 bp, Artificial Sequence
  Description of Artificial Sequence: Synthetic oligonucleotide
  Target: LAMA2; (+) strand; PAM type: NNAGAAW; PAM sequence: TGAGAAA
accagttgttttcaaatatc

SEQ ID NO: 12577 - DNA, 20 bp, Artificial Sequence
  Description of Artificial Sequence: Synthetic oligonucleotide
  Target: LAMA2; (+) strand; PAM type: NNAGAAW; PAM sequence: ACAGAAT
taaataccagattaattttc

SEQ ID NO: 12578 - DNA, 20 bp, Artificial Sequence
  Description of Artificial Sequence: Synthetic oligonucleotide
  Target: LAMA2; (+) strand; PAM type: NNAGAAW; PAM sequence: CAAGAAA
agcactggattgataatcag

SEQ ID NO: 12579 - DNA, 20 bp, Artificial Sequence
  Description of Artificial Sequence: Synthetic oligonucleotide
  Target: LAMA2; (+) strand; PAM type: NNAGAAW; PAM sequence: AAAGAAA
aaccaaatacaaaagattaa

SEQ ID NO: 12580 - DNA, 20 bp, Artificial Sequence
  Description of Artificial Sequence: Synthetic oligonucleotide
  Target: LAMA2; (+) strand; PAM type: NNAGAAW; PAM sequence: AGAGAAA
gcccctgcccagcatcacag

SEQ ID NO: 12581 - DNA, 20 bp, Artificial Sequence
  Description of Artificial Sequence: Synthetic oligonucleotide
  Target: LAMA2; (+) strand; PAM type: NNAGAAW; PAM sequence: ATAGAAT
ccaggggtgaggatacaaag

SEQ ID NO: 12582 - DNA, 20 bp, Artificial Sequence
  Description of Artificial Sequence: Synthetic oligonucleotide
  Target: LAMA2; (+) strand; PAM type: NNAGAAW; PAM sequence: GAAGAAA
agaactttttagtacaatgt

SEQ ID NO: 12583 - DNA, 20 bp, Artificial Sequence
  Description of Artificial Sequence: Synthetic oligonucleotide
  Target: LAMA2; (+) strand; PAM type: NNAGAAW; PAM sequence: AAAGAAA
ctttttagtacaatgtgaag

SEQ ID NO: 12584 - DNA, 20 bp, Artificial Sequence
  Description of Artificial Sequence: Synthetic oligonucleotide
  Target: LAMA2; (+) strand; PAM type: NNAGAAW; PAM sequence: AAAGAAA
caatgtgaagaaagaaacat

SEQ ID NO: 12585 - DNA, 20 bp, Artificial Sequence
  Description of Artificial Sequence: Synthetic oligonucleotide
  Target: LAMA2; (+) strand; PAM type: NNAGAAW; PAM sequence: GCAGAAA
taagtatcattataatatga

SEQ ID NO: 12586 - DNA, 20 bp, Artificial Sequence
  Description of Artificial Sequence: Synthetic oligonucleotide
  Target: LAMA2; (+) strand; PAM type: NNAGAAW; PAM sequence: GCAGAAA
tcagcaaggtttttagggaa

SEQ ID NO: 12587 - DNA, 20 bp, Artificial Sequence
  Description of Artificial Sequence: Synthetic oligonucleotide
  Target: LAMA2; (+) strand; PAM type: NNAGAAW; PAM sequence: ACAGAAT
tcagatttgaaatataggtg

SEQ ID NO: 12588 - DNA, 20 bp, Artificial Sequence
  Description of Artificial Sequence: Synthetic oligonucleotide
  Target: LAMA2; (+) strand; PAM type: NNAGAAW; PAM sequence: GGAGAAA
gacagaattagccttaagga

SEQ ID NO: 12589 - DNA, 20 bp, Artificial Sequence
  Description of Artificial Sequence: Synthetic oligonucleotide
  Target: LAMA2; (+) strand; PAM type: NNAGAAW; PAM sequence: AAAGAAA
gaattagccttaaggaggag

SEQ ID NO: 12590 - DNA, 20 bp, Artificial Sequence
  Description of Artificial Sequence: Synthetic oligonucleotide
  Target: LAMA2; (+) strand; PAM type: NNAGAAW; PAM sequence: TAAGAAA
gaaaagatcttttgagacta

SEQ ID NO: 12591 - DNA, 20 bp, Artificial Sequence
  Description of Artificial Sequence: Synthetic oligonucleotide
  Target: LAMA2; (+) strand; PAM type: NNAGAAW; PAM sequence: CTAGAAA
gcctaaattcttgctatgaa

SEQ ID NO: 12592 - DNA, 20 bp, Artificial Sequence
  Description of Artificial Sequence: Synthetic oligonucleotide
  Target: LAMA2; (+) strand; PAM type: NNAGAAW; PAM sequence: CTAGAAA
tggtcttggggaggttaagg

SEQ ID NO: 12593 - DNA, 20 bp, Artificial Sequence
  Description of Artificial Sequence: Synthetic oligonucleotide
  Target: LAMA2; (+) strand; PAM type: NNAGAAW; PAM sequence: TCAGAAA
tgaacagatttgaggcaggg

SEQ ID NO: 12594 - DNA, 20 bp, Artificial Sequence
  Description of Artificial Sequence: Synthetic oligonucleotide
  Target: LAMA2; (+) strand; PAM type: NNAGAAW; PAM sequence: AAAGAAA
ccatgagatctggttgttta

SEQ ID NO: 12595 - DNA, 20 bp, Artificial Sequence
  Description of Artificial Sequence: Synthetic oligonucleotide
  Target: LAMA2; (+) strand; PAM type: NNAGAAW; PAM sequence: CCAGAAT
gaagcttcctgaggccctca

SEQ ID NO: 12596 - DNA, 20 bp, Artificial Sequence
  Description of Artificial Sequence: Synthetic oligonucleotide
  Target: LAMA2; (+) strand; PAM type: NNAGAAW; PAM sequence: TTAGAAA
taagtctaattttaatatca

SEQ ID NO: 12597 - DNA, 20 bp, Artificial Sequence
  Description of Artificial Sequence: Synthetic oligonucleotide
  Target: LAMA2; (+) strand; PAM type: NNAGAAW; PAM sequence: TCAGAAA
tgaattaaccctatcgaagg

SEQ ID NO: 12598 - DNA, 20 bp, Artificial Sequence
  Description of Artificial Sequence: Synthetic oligonucleotide
  Target: LAMA2; (+) strand; PAM type: NNAGAAW; PAM sequence: AAAGAAA
agataacttaagggggaaaa

SEQ ID NO: 12599 - DNA, 20 bp, Artificial Sequence
  Description of Artificial Sequence: Synthetic oligonucleotide
  Target: LAMA2; (+) strand; PAM type: NNAGAAW; PAM sequence: AAAGAAA
aaaatgtggaaatgtttgaa

SEQ ID NO: 12600 - DNA, 20 bp, Artificial Sequence
  Description of Artificial Sequence: Synthetic oligonucleotide
  Target: LAMA2; (+) strand; PAM type: NNAGAAW; PAM sequence: GAAGAAT
gaaggataggggaaaataga

SEQ ID NO: 12601 - DNA, 20 bp, Artificial Sequence
  Description of Artificial Sequence: Synthetic oligonucleotide
  Target: LAMA2; (+) strand; PAM type: NNAGAAW; PAM sequence: AGAGAAA
gaaaatagagaagaatagag

SEQ ID NO: 12602 - DNA, 20 bp, Artificial Sequence
  Description of Artificial Sequence: Synthetic oligonucleotide
  Target: LAMA2; (+) strand; PAM type: NNAGAAW; PAM sequence: GAAGAAA
agaagaatagagagagaaag

SEQ ID NO: 12603 - DNA, 20 bp, Artificial Sequence
  Description of Artificial Sequence: Synthetic oligonucleotide
  Target: LAMA2; (+) strand; PAM type: NNAGAAW; PAM sequence: AAAGAAA
gaatagagagagaaaggaag

SEQ ID NO: 12604 - DNA, 20 bp, Artificial Sequence
  Description of Artificial Sequence: Synthetic oligonucleotide
  Target: LAMA2; (+) strand; PAM type: NNAGAAW; PAM sequence: GGAGAAT
ggaggagagaagggaaggaa

SEQ ID NO: 12605 - DNA, 20 bp, Artificial Sequence
  Description of Artificial Sequence: Synthetic oligonucleotide
  Target: LAMA2; (+) strand; PAM type: NNAGAAW; PAM sequence: GAAGAAA
aacatgaaacaaaatgaaaa

SEQ ID NO: 12606 - DNA, 20 bp, Artificial Sequence
  Description of Artificial Sequence: Synthetic oligonucleotide
  Target: LAMA2; (+) strand; PAM type: NNAGAAW; PAM sequence: TGAGAAT
tgaaacttttttgatatact

SEQ ID NO: 12607 - DNA, 20 bp, Artificial Sequence
  Description of Artificial Sequence: Synthetic oligonucleotide
  Target: LAMA2; (+) strand; PAM type: NNAGAAW; PAM sequence: GGAGAAT
aatatatgtaaatactatgt

SEQ ID NO: 12608 - DNA, 20 bp, Artificial Sequence
  Description of Artificial Sequence: Synthetic oligonucleotide
  Target: LAMA2; (+) strand; PAM type: NNAGAAW; PAM sequence: GCAGAAA
gcatctttttgaaacagagg

SEQ ID NO: 12609 - DNA, 20 bp, Artificial Sequence
  Description of Artificial Sequence: Synthetic oligonucleotide
  Target: LAMA2; (+) strand; PAM type: NNAGAAW; PAM sequence: GGAGAAT
atgtgagcttgttccatact

SEQ ID NO: 12610 - DNA, 20 bp, Artificial Sequence
  Description of Artificial Sequence: Synthetic oligonucleotide
  Target: LAMA2; (+) strand; PAM type: NNAGAAW; PAM sequence: AGAGAAA
tactggagaatggggcactc

SEQ ID NO: 12611 - DNA, 20 bp, Artificial Sequence
  Description of Artificial Sequence: Synthetic oligonucleotide
  Target: LAMA2; (+) strand; PAM type: NNAGAAW; PAM sequence: CAAGAAA
ggtaaagggcactgattgtt

SEQ ID NO: 12612 - DNA, 20 bp, Artificial Sequence
  Description of Artificial Sequence: Synthetic oligonucleotide
  Target: LAMA2; (+) strand; PAM type: NNAGAAW; PAM sequence: TAAGAAA
aaatatttcatttgtaagca

SEQ ID NO: 12613 - DNA, 20 bp, Artificial Sequence
  Description of Artificial Sequence: Synthetic oligonucleotide
  Target: LAMA2; (+) strand; PAM type: NNAGAAW; PAM sequence: GTAGAAT
caaactccaagttaatgact

SEQ ID NO: 12614 - DNA, 20 bp, Artificial Sequence
  Description of Artificial Sequence: Synthetic oligonucleotide
  Target: LAMA2; (+) strand; PAM type: NNAGAAW; PAM sequence: ACAGAAA
agtatgtaactcagcatgtc

SEQ ID NO: 12615 - DNA, 20 bp, Artificial Sequence
  Description of Artificial Sequence: Synthetic oligonucleotide
  Target: LAMA2; (+) strand; PAM type: NNAGAAW; PAM sequence: AGAGAAA
catggggagaccctgcctct

SEQ ID NO: 12616 - DNA, 20 bp, Artificial Sequence
  Description of Artificial Sequence: Synthetic oligonucleotide
  Target: LAMA2; (+) strand; PAM type: NNAGAAW; PAM sequence: GGAGAAT
atactcgagaggctgaggtg

SEQ ID NO: 12617 - DNA, 20 bp, Artificial Sequence
  Description of Artificial Sequence: Synthetic oligonucleotide
  Target: LAMA2; (+) strand; PAM type: NNAGAAW; PAM sequence: AAAGAAA
agcaagaccctgtcttgaaa

SEQ ID NO: 12618 - DNA, 20 bp, Artificial Sequence
  Description of Artificial Sequence: Synthetic oligonucleotide
  Target: LAMA2; (+) strand; PAM type: NNAGAAW; PAM sequence: AAAGAAA
acatatttttctgaattaaa

SEQ ID NO: 12619 - DNA, 20 bp, Artificial Sequence
  Description of Artificial Sequence: Synthetic oligonucleotide
  Target: LAMA2; (+) strand; PAM type: NNAGAAW; PAM sequence: CAAGAAT
gtaatctggatgttagctaa

SEQ ID NO: 12620 - DNA, 20 bp, Artificial Sequence
  Description of Artificial Sequence: Synthetic oligonucleotide
  Target: LAMA2; (+) strand; PAM type: NNAGAAW; PAM sequence: AAAGAAT
ttccatacgttatcaacagc

SEQ ID NO: 12621 - DNA, 20 bp, Artificial Sequence
  Description of Artificial Sequence: Synthetic oligonucleotide
  Target: LAMA2; (+) strand; PAM type: NNAGAAW; PAM sequence: TAAGAAA
tttggagcagctaccataaa

SEQ ID NO: 12622 - DNA, 20 bp, Artificial Sequence
  Description of Artificial Sequence: Synthetic oligonucleotide
  Target: LAMA2; (+) strand; PAM type: NNAGAAW; PAM sequence: TAAGAAA
ccctcaaggatctagtttgt

SEQ ID NO: 12623 - DNA, 20 bp, Artificial Sequence
  Description of Artificial Sequence: Synthetic oligonucleotide
  Target: LAMA2; (+) strand; PAM type: NNAGAAW; PAM sequence: TCAGAAA
aaaaattaaagcttgattgt

SEQ ID NO: 12624 - DNA, 20 bp, Artificial Sequence
  Description of Artificial Sequence: Synthetic oligonucleotide
  Target: LAMA2; (+) strand; PAM type: NNAGAAW; PAM sequence: CTAGAAT
cctagatattttacttattc

SEQ ID NO: 12625 - DNA, 20 bp, Artificial Sequence
  Description of Artificial Sequence: Synthetic oligonucleotide
  Target: LAMA2; (+) strand; PAM type: NNAGAAW; PAM sequence: ATAGAAT
ttacttattcctagaatttt

SEQ ID NO: 12626 - DNA, 20 bp, Artificial Sequence
  Description of Artificial Sequence: Synthetic oligonucleotide
  Target: LAMA2; (+) strand; PAM type: NNAGAAW; PAM sequence: ATAGAAA
ttagccttcagttgcaggtg

SEQ ID NO: 12627 - DNA, 20 bp, Artificial Sequence
  Description of Artificial Sequence: Synthetic oligonucleotide
  Target: LAMA2; (+) strand; PAM type: NNAGAAW; PAM sequence: GAAGAAA
cagtagatacagtctttaag

SEQ ID NO: 12628 - DNA, 20 bp, Artificial Sequence
  Description of Artificial Sequence: Synthetic oligonucleotide
  Target: LAMA2; (+) strand; PAM type: NNAGAAW; PAM sequence: AGAGAAA
ttgtgtgagaggcaaagaga

SEQ ID NO: 12629 - DNA, 20 bp, Artificial Sequence
  Description of Artificial Sequence: Synthetic oligonucleotide
  Target: LAMA2; (+) strand; PAM type: NNAGAAW; PAM sequence: AAAGAAT
agaggcaaagagaagagaaa

SEQ ID NO: 12630 - DNA, 20 bp, Artificial Sequence
  Description of Artificial Sequence: Synthetic oligonucleotide
  Target: LAMA2; (+) strand; PAM type: NNAGAAW; PAM sequence: AAAGAAA
aatttttggtgtgcggttta

SEQ ID NO: 12631 - DNA, 20 bp, Artificial Sequence
  Description of Artificial Sequence: Synthetic oligonucleotide
  Target: LAMA2; (+) strand; PAM type: NNAGAAW; PAM sequence: CCAGAAA
gtttgaaagtagacttgagt

SEQ ID NO: 12632 - DNA, 20 bp, Artificial Sequence
  Description of Artificial Sequence: Synthetic oligonucleotide
  Target: LAMA2; (+) strand; PAM type: NNAGAAW; PAM sequence: GAAGAAA
aaaaatatagcatgcatgtg

SEQ ID NO: 12633 - DNA, 20 bp, Artificial Sequence
  Description of Artificial Sequence: Synthetic oligonucleotide
  Target: LAMA2; (+) strand; PAM type: NNAGAAW; PAM sequence: AAAGAAA
attagaagaacacatctttc

SEQ ID NO: 12634 - DNA, 20 bp, Artificial Sequence
  Description of Artificial Sequence: Synthetic oligonucleotide
  Target: LAMA2; (+) strand; PAM type: NNAGAAW; PAM sequence: TTAGAAT
tgaaggtatgaatatttaaa

SEQ ID NO: 12635 - DNA, 20 bp, Artificial Sequence
  Description of Artificial Sequence: Synthetic oligonucleotide
  Target: LAMA2; (+) strand; PAM type: NNAGAAW; PAM sequence: GAAGAAA
tttatactatattatgtcag

SEQ ID NO: 12636 - DNA, 20 bp, Artificial Sequence
  Description of Artificial Sequence: Synthetic oligonucleotide
  Target: LAMA2; (+) strand; PAM type: NNAGAAW; PAM sequence: GAAGAAT
ctttctttggtatgtcagaa

SEQ ID NO: 12637 - DNA, 20 bp, Artificial Sequence
  Description of Artificial Sequence: Synthetic oligonucleotide
  Target: LAMA2; (+) strand; PAM type: NNAGAAW; PAM sequence: TAAGAAT
gtgagcaaaaaaaaaaataa

SEQ ID NO: 12638 - DNA, 20 bp, Artificial Sequence
  Description of Artificial Sequence: Synthetic oligonucleotide
  Target: LAMA2; (+) strand; PAM type: NNAGAAW; PAM sequence: TGAGAAT
tatgtaaaagaactcaaaac

SEQ ID NO: 12639 - DNA, 20 bp, Artificial Sequence
  Description of Artificial Sequence: Synthetic oligonucleotide
  Target: LAMA2; (+) strand; PAM type: NNAGAAW; PAM sequence: ATAGAAT
aactgagaatatttttaaaa

SEQ ID NO: 12640 - DNA, 20 bp, Artificial Sequence
  Description of Artificial Sequence: Synthetic oligonucleotide
  Target: LAMA2; (+) strand; PAM type: NNAGAAW; PAM sequence: ATAGAAA
taaaaatagaataaaatgtc

SEQ ID NO: 12641 - DNA, 20 bp, Artificial Sequence
  Description of Artificial Sequence: Synthetic oligonucleotide
  Target: LAMA2; (+) strand; PAM type: NNAGAAW; PAM sequence: GAAGAAA
aaaaaatgttccttgagcaa

SEQ ID NO: 12642 - DNA, 20 bp, Artificial Sequence
  Description of Artificial Sequence: Synthetic oligonucleotide
  Target: LAMA2; (+) strand; PAM type: NNAGAAW; PAM sequence: GTAGAAT
taaaggaagcatatgatact

SEQ ID NO: 12643 - DNA, 20 bp, Artificial Sequence
  Description of Artificial Sequence: Synthetic oligonucleotide
  Target: LAMA2; (+) strand; PAM type: NNAGAAW; PAM sequence: AAAGAAA
aaatgatagtcttgttagtg

SEQ ID NO: 12644 - DNA, 20 bp, Artificial Sequence
  Description of Artificial Sequence: Synthetic oligonucleotide
  Target: LAMA2; (+) strand; PAM type: NNAGAAW; PAM sequence: ATAGAAT
aagttacatgatatgacagc

SEQ ID NO: 12645 - DNA, 20 bp, Artificial Sequence
  Description of Artificial Sequence: Synthetic oligonucleotide
  Target: LAMA2; (+) strand; PAM type: NNAGAAW; PAM sequence: GAAGAAA
tgactgagcttgtgtggagt

SEQ ID NO: 12646 - DNA, 20 bp, Artificial Sequence
  Description of Artificial Sequence: Synthetic oligonucleotide
  Target: LAMA2; (+) strand; PAM type: NNAGAAW; PAM sequence: CAAGAAA
tctgtgtttcactatggtac

SEQ ID NO: 12647 - DNA, 20 bp, Artificial Sequence
  Description of Artificial Sequence: Synthetic oligonucleotide
  Target: LAMA2; (+) strand; PAM type: NNAGAAW; PAM sequence: AAAGAAA
taccaagaaatttgccaggg

SEQ ID NO: 12648 - DNA, 20 bp, Artificial Sequence
  Description of Artificial Sequence: Synthetic oligonucleotide
  Target: LAMA2; (+) strand; PAM type: NNAGAAW; PAM sequence: TAAGAAT
ttctgtcaatattatcaaat

SEQ ID NO: 12649 - DNA, 20 bp, Artificial Sequence
  Description of Artificial Sequence: Synthetic oligonucleotide
  Target: LAMA2; (+) strand; PAM type: NNAGAAW; PAM sequence: GGAGAAA
ctttttttagggggggaagg

SEQ ID NO: 12650 - DNA, 20 bp, Artificial Sequence
  Description of Artificial Sequence: Synthetic oligonucleotide
  Target: LAMA2; (+) strand; PAM type: NNAGAAW; PAM sequence: GTAGAAT
ggggaaggggagaaacagat

SEQ ID NO: 12651 - DNA, 20 bp, Artificial Sequence
  Description of Artificial Sequence: Synthetic oligonucleotide
  Target: LAMA2; (+) strand; PAM type: NNAGAAW; PAM sequence: GCAGAAA
aatctggaaaattcatagaa

SEQ ID NO: 12652 - DNA, 20 bp, Artificial Sequence
  Description of Artificial Sequence: Synthetic oligonucleotide
  Target: LAMA2; (+) strand; PAM type: NNAGAAW; PAM sequence: GAAGAAA
catggtgtttattatattat

SEQ ID NO: 12653 - DNA, 20 bp, Artificial Sequence
  Description of Artificial Sequence: Synthetic oligonucleotide
  Target: LAMA2; (+) strand; PAM type: NNAGAAW; PAM sequence: ACAGAAA
ctttcgaagagtcaaataat

SEQ ID NO: 12654 - DNA, 20 bp, Artificial Sequence
  Description of Artificial Sequence: Synthetic oligonucleotide
  Target: LAMA2; (+) strand; PAM type: NNAGAAW; PAM sequence: ACAGAAT
attttaaactacactttctg

SEQ ID NO: 12655 - DNA, 20 bp, Artificial Sequence
  Description of Artificial Sequence: Synthetic oligonucleotide
  Target: LAMA2; (+) strand; PAM type: NNAGAAW; PAM sequence: TAAGAAA
tattatttgtgtttcattgt

SEQ ID NO: 12656 - DNA, 20 bp, Artificial Sequence
  Description of Artificial Sequence: Synthetic oligonucleotide
  Target: LAMA2; (+) strand; PAM type: NNAGAAW; PAM sequence: TTAGAAA
cccacatttttgtagcttcc

SEQ ID NO: 12657 - DNA, 20 bp, Artificial Sequence
  Description of Artificial Sequence: Synthetic oligonucleotide
  Target: LAMA2; (+) strand; PAM type: NNAGAAW; PAM sequence: GAAGAAA
gtagcttccttagaaagagt

SEQ ID NO: 12658 - DNA, 20 bp, Artificial Sequence
  Description of Artificial Sequence: Synthetic oligonucleotide
  Target: LAMA2; (+) strand; PAM type: NNAGAAW; PAM sequence: CTAGAAT
cttttagatatcagctggct

SEQ ID NO: 12659 - DNA, 20 bp, Artificial Sequence
  Description of Artificial Sequence: Synthetic oligonucleotide
  Target: LAMA2; (+) strand; PAM type: NNAGAAW; PAM sequence: GTAGAAA
agctggctctagaattctag

SEQ ID NO: 12660 - DNA, 20 bp, Artificial Sequence
  Description of Artificial Sequence: Synthetic oligonucleotide
  Target: LAMA2; (+) strand; PAM type: NNAGAAW; PAM sequence: TCAGAAT
taggtagaaagcatctcttc

SEQ ID NO: 12661 - DNA, 20 bp, Artificial Sequence
  Description of Artificial Sequence: Synthetic oligonucleotide
  Target: LAMA2; (+) strand; PAM type: NNAGAAW; PAM sequence: TTAGAAA
tggctaactctcttttcttc

SEQ ID NO: 12662 - DNA, 20 bp, Artificial Sequence
  Description of Artificial Sequence: Synthetic oligonucleotide
  Target: LAMA2; (+) strand; PAM type: NNAGAAW; PAM sequence: CTAGAAA
ctagatgtatgcctaaacac

SEQ ID NO: 12663 - DNA, 20 bp, Artificial Sequence
  Description of Artificial Sequence: Synthetic oligonucleotide
  Target: LAMA2; (+) strand; PAM type: NNAGAAW; PAM sequence: TTAGAAA
agaaaagtgcctggcgcatg

SEQ ID NO: 12664 - DNA, 20 bp, Artificial Sequence
  Description of Artificial Sequence: Synthetic oligonucleotide
  Target: LAMA2; (+) strand; PAM type: NNAGAAW; PAM sequence: TTAGAAA
tgcctggcgcatgttagaaa

SEQ ID NO: 12665 - DNA, 20 bp, Artificial Sequence
  Description of Artificial Sequence: Synthetic oligonucleotide
  Target: LAMA2; (+) strand; PAM type: NNAGAAW; PAM sequence: CGAGAAT
catatgttttgctagttctc

SEQ ID NO: 12666 - DNA, 20 bp, Artificial Sequence
  Description of Artificial Sequence: Synthetic oligonucleotide
  Target: LAMA2; (+) strand; PAM type: NNAGAAW; PAM sequence: TGAGAAT
aacggagtatgagctaagga

SEQ ID NO: 12667 - DNA, 20 bp, Artificial Sequence
  Description of Artificial Sequence: Synthetic oligonucleotide
  Target: LAMA2; (+) strand; PAM type: NNAGAAW; PAM sequence: AGAGAAT
ctttcttattaaatttccct

SEQ ID NO: 12668 - DNA, 20 bp, Artificial Sequence
  Description of Artificial Sequence: Synthetic oligonucleotide
  Target: LAMA2; (+) strand; PAM type: NNAGAAW; PAM sequence: GGAGAAA
gacaggaagcatccagcaag

SEQ ID NO: 12669 - DNA, 20 bp, Artificial Sequence
  Description of Artificial Sequence: Synthetic oligonucleotide
  Target: LAMA2; (+) strand; PAM type: NNAGAAW; PAM sequence: CAAGAAT
gacacttgtattaaccatca

SEQ ID NO: 12670 - DNA, 20 bp, Artificial Sequence
  Description of Artificial Sequence: Synthetic oligonucleotide
  Target: LAMA2; (+) strand; PAM type: NNAGAAW; PAM sequence: ACAGAAT
tatttcaatgtgaagaacaa

SEQ ID NO: 12671 - DNA, 20 bp, Artificial Sequence
  Description of Artificial Sequence: Synthetic oligonucleotide
  Target: LAMA2; (+) strand; PAM type: NNAGAAW; PAM sequence: GTAGAAT
ttctttagctaaagacagag

SEQ ID NO: 12672 - DNA, 20 bp, Artificial Sequence
  Description of Artificial Sequence: Synthetic oligonucleotide
  Target: LAMA2; (+) strand; PAM type: NNAGAAW; PAM sequence: ACAGAAT
ctatttctcttcatttgaaa

SEQ ID NO: 12673 - DNA, 20 bp, Artificial Sequence
  Description of Artificial Sequence: Synthetic oligonucleotide
  Target: LAMA2; (+) strand; PAM type: NNAGAAW; PAM sequence: GAAGAAT
aagacatgattatattggga

SEQ ID NO: 12674 - DNA, 20 bp, Artificial Sequence
  Description of Artificial Sequence: Synthetic oligonucleotide
  Target: LAMA2; (+) strand; PAM type: NNAGAAW; PAM sequence: GTAGAAA
ttactactgtgaaaatgtat

SEQ ID NO: 12675 - DNA, 20 bp, Artificial Sequence
  Description of Artificial Sequence: Synthetic oligonucleotide
  Target: LAMA2; (+) strand; PAM type: NNAGAAW; PAM sequence: TGAGAAA
atgctatctgggtgaagcac

SEQ ID NO: 12676 - DNA, 20 bp, Artificial Sequence
  Description of Artificial Sequence: Synthetic oligonucleotide
  Target: LAMA2; (+) strand; PAM type: NNAGAAW; PAM sequence: GAAGAAT
tagtctaaattatagtacat

SEQ ID NO: 12677 - DNA, 20 bp, Artificial Sequence
  Description of Artificial Sequence: Synthetic oligonucleotide
  Target: LAMA2; (+) strand; PAM type: NNAGAAW; PAM sequence: TAAGAAA
ttttctttgaaggtaagttg

SEQ ID NO: 12678 - DNA, 20 bp, Artificial Sequence
  Description of Artificial Sequence: Synthetic oligonucleotide
  Target: LAMA2; (+) strand; PAM type: NNAGAAW; PAM sequence: AGAGAAA
ttgaaggtaagttgtaagaa

SEQ ID NO: 12679 - DNA, 20 bp, Artificial Sequence
  Description of Artificial Sequence: Synthetic oligonucleotide
  Target: LAMA2; (+) strand; PAM type: NNAGAAW; PAM sequence: GCAGAAT
aaatcattaaagcctggagt

SEQ ID NO: 12680 - DNA, 20 bp, Artificial Sequence
  Description of Artificial Sequence: Synthetic oligonucleotide
  Target: LAMA2; (+) strand; PAM type: NNAGAAW; PAM sequence: ACAGAAT
tccaatttcattcataatgg

SEQ ID NO: 12681 - DNA, 20 bp, Artificial Sequence
  Description of Artificial Sequence: Synthetic oligonucleotide
  Target: LAMA2; (+) strand; PAM type: NNAGAAW; PAM sequence: AAAGAAT
agcacactggaacaaatatt

SEQ ID NO: 12682 - DNA, 20 bp, Artificial Sequence
  Description of Artificial Sequence: Synthetic oligonucleotide
  Target: LAMA2; (+) strand; PAM type: NNAGAAW; PAM sequence: GAAGAAA
tcatctttatttaagcttag

SEQ ID NO: 12683 - DNA, 20 bp, Artificial Sequence
  Description of Artificial Sequence: Synthetic oligonucleotide
  Target: LAMA2; (+) strand; PAM type: NNAGAAW; PAM sequence: ATAGAAA
atttaagcttaggaagaaaa

SEQ ID NO: 12684 - DNA, 20 bp, Artificial Sequence
  Description of Artificial Sequence: Synthetic oligonucleotide
  Target: LAMA2; (+) strand; PAM type: NNAGAAW; PAM sequence: ACAGAAT
taaacctgtaacataaaagt

SEQ ID NO: 12685 - DNA, 20 bp, Artificial Sequence
  Description of Artificial Sequence: Synthetic oligonucleotide
  Target: LAMA2; (+) strand; PAM type: NNAGAAW; PAM sequence: TTAGAAA
tttaaatactaatgtgtatt

SEQ ID NO: 12686 - DNA, 20 bp, Artificial Sequence
  Description of Artificial Sequence: Synthetic oligonucleotide
  Target: LAMA2; (+) strand; PAM type: NNAGAAW; PAM sequence: ACAGAAA
cacagataaacttatcagga

SEQ ID NO: 12687 - DNA, 20 bp, Artificial Sequence
  Description of Artificial Sequence: Synthetic oligonucleotide
  Target: LAMA2; (+) strand; PAM type: NNAGAAW; PAM sequence: TAAGAAA
taaaataacaaaataaaaaa

SEQ ID NO: 12688 - DNA, 20 bp, Artificial Sequence
  Description of Artificial Sequence: Synthetic oligonucleotide
  Target: LAMA2; (+) strand; PAM type: NNAGAAW; PAM sequence: AAAGAAA
aaggacaaagactggaaata

SEQ ID NO: 12689 - DNA, 20 bp, Artificial Sequence
  Description of Artificial Sequence: Synthetic oligonucleotide
  Target: LAMA2; (+) strand; PAM type: NNAGAAW; PAM sequence: AGAGAAT
attttcttgggtaaggcctc

SEQ ID NO: 12690 - DNA, 20 bp, Artificial Sequence
  Description of Artificial Sequence: Synthetic oligonucleotide
  Target: LAMA2; (+) strand; PAM type: NNAGAAW; PAM sequence: TAAGAAA
gagaatgttccagctgttct

SEQ ID NO: 12691 - DNA, 20 bp, Artificial Sequence
  Description of Artificial Sequence: Synthetic oligonucleotide
  Target: LAMA2; (+) strand; PAM type: NNAGAAW; PAM sequence: TGAGAAA
actgaaaaattcttattatt

SEQ ID NO: 12692 - DNA, 20 bp, Artificial Sequence
  Description of Artificial Sequence: Synthetic oligonucleotide
  Target: LAMA2; (+) strand; PAM type: NNAGAAW; PAM sequence: TTAGAAA
tcctttttaaactgaagtaa

SEQ ID NO: 12693 - DNA, 20 bp, Artificial Sequence
  Description of Artificial Sequence: Synthetic oligonucleotide
  Target: LAMA2; (+) strand; PAM type: NNAGAAW; PAM sequence: AAAGAAA
gaaaaagcaggtcaatgtgc

SEQ ID NO: 12694 - DNA, 20 bp, Artificial Sequence
  Description of Artificial Sequence: Synthetic oligonucleotide
  Target: LAMA2; (+) strand; PAM type: NNAGAAW; PAM sequence: TTAGAAA
cacaaactttacgcaaattg

SEQ ID NO: 12695 - DNA, 20 bp, Artificial Sequence
  Description of Artificial Sequence: Synthetic oligonucleotide
  Target: LAMA2; (+) strand; PAM type: NNAGAAW; PAM sequence: AGAGAAA
aaaatcaaatactgacttaa

SEQ ID NO: 12696 - DNA, 20 bp, Artificial Sequence
  Description of Artificial Sequence: Synthetic oligonucleotide
  Target: LAMA2; (+) strand; PAM type: NNAGAAW; PAM sequence: AAAGAAA
tgaaataagttctaaaagga

SEQ ID NO: 12697 - DNA, 20 bp, Artificial Sequence
  Description of Artificial Sequence: Synthetic oligonucleotide
  Target: LAMA2; (+) strand; PAM type: NNAGAAW; PAM sequence: AAAGAAA
ttctaaaaggaaaagaaaac

SEQ ID NO: 12698 - DNA, 20 bp, Artificial Sequence
  Description of Artificial Sequence: Synthetic oligonucleotide
  Target: LAMA2; (+) strand; PAM type: NNAGAAW; PAM sequence: AAAGAAA
aatgtcttttacaaggcact

SEQ ID NO: 12699 - DNA, 20 bp, Artificial Sequence
  Description of Artificial Sequence: Synthetic oligonucleotide
  Target: LAMA2; (+) strand; PAM type: NNAGAAW; PAM sequence: AAAGAAT
tgcatgggttcctaggagga

SEQ ID NO: 12700 - DNA, 20 bp, Artificial Sequence
  Description of Artificial Sequence: Synthetic oligonucleotide
  Target: LAMA2; (+) strand; PAM type: NNAGAAW; PAM sequence: GGAGAAA
tttagaggggataggaagaa

SEQ ID NO: 12701 - DNA, 20 bp, Artificial Sequence
  Description of Artificial Sequence: Synthetic oligonucleotide
  Target: LAMA2; (+) strand; PAM type: NNAGAAW; PAM sequence: AAAGAAA
gaaaaagccaatgaataagg

SEQ ID NO: 12702 - DNA, 20 bp, Artificial Sequence
  Description of Artificial Sequence: Synthetic oligonucleotide
  Target: LAMA2; (+) strand; PAM type: NNAGAAW; PAM sequence: GAAGAAA
tcatataatgctaaggatgg

SEQ ID NO: 12703 - DNA, 20 bp, Artificial Sequence
  Description of Artificial Sequence: Synthetic oligonucleotide
  Target: LAMA2; (+) strand; PAM type: NNAGAAW; PAM sequence: CAAGAAA
gagttaattgaaggggtagt

SEQ ID NO: 12704 - DNA, 20 bp, Artificial Sequence
  Description of Artificial Sequence: Synthetic oligonucleotide
  Target: LAMA2; (+) strand; PAM type: NNAGAAW; PAM sequence: AGAGAAA
tcagctctggagatgcttgt

SEQ ID NO: 12705 - DNA, 20 bp, Artificial Sequence
  Description of Artificial Sequence: Synthetic oligonucleotide
  Target: LAMA2; (+) strand; PAM type: NNAGAAW; PAM sequence: ACAGAAA
tagcttctcatgtttgagga

SEQ ID NO: 12706 - DNA, 20 bp, Artificial Sequence
  Description of Artificial Sequence: Synthetic oligonucleotide
  Target: LAMA2; (+) strand; PAM type: NNAGAAW; PAM sequence: TGAGAAA
gtgtcactctgcctactctc

SEQ ID NO: 12707 - DNA, 20 bp, Artificial Sequence
  Description of Artificial Sequence: Synthetic oligonucleotide
  Target: LAMA2; (+) strand; PAM type: NNAGAAW; PAM sequence: TGAGAAT
catgaattcctgcagctctc

SEQ ID NO: 12708 - DNA, 20 bp, Artificial Sequence
  Description of Artificial Sequence: Synthetic oligonucleotide
  Target: LAMA2; (+) strand; PAM type: NNAGAAW; PAM sequence: ATAGAAA
gataacaacaaaaatctata

SEQ ID NO: 12709 - DNA, 20 bp, Artificial Sequence
  Description of Artificial Sequence: Synthetic oligonucleotide
  Target: LAMA2; (+) strand; PAM type: NNAGAAW; PAM sequence: ACAGAAT
acaaaaatctataatagaaa

SEQ ID NO: 12710 - DNA, 20 bp, Artificial Sequence
  Description of Artificial Sequence: Synthetic oligonucleotide
  Target: LAMA2; (+) strand; PAM type: NNAGAAW; PAM sequence: TCAGAAT
cagtggaaataatttttatt

SEQ ID NO: 12711 - DNA, 20 bp, Artificial Sequence
  Description of Artificial Sequence: Synthetic oligonucleotide
  Target: LAMA2; (+) strand; PAM type: NNAGAAW; PAM sequence: AAAGAAT
tgtttaatcaataattcctg

SEQ ID NO: 12712 - DNA, 20 bp, Artificial Sequence
  Description of Artificial Sequence: Synthetic oligonucleotide
  Target: LAMA2; (+) strand; PAM type: NNAGAAW; PAM sequence: GCAGAAA
tctgaattcaaagcataaag

SEQ ID NO: 12713 - DNA, 20 bp, Artificial Sequence
  Description of Artificial Sequence: Synthetic oligonucleotide
  Target: LAMA2; (+) strand; PAM type: NNAGAAW; PAM sequence: TAAGAAT
agatataaacatattttaat

SEQ ID NO: 12714 - DNA, 20 bp, Artificial Sequence
  Description of Artificial Sequence: Synthetic oligonucleotide
  Target: LAMA2; (+) strand; PAM type: NNAGAAW; PAM sequence: ATAGAAA
aaataaatttgcattacaaa

SEQ ID NO: 12715 - DNA, 20 bp, Artificial Sequence
  Description of Artificial Sequence: Synthetic oligonucleotide
  Target: LAMA2; (+) strand; PAM type: NNAGAAW; PAM sequence: ATAGAAT
agtgtgttttatgatttgtg

SEQ ID NO: 12716 - DNA, 20 bp, Artificial Sequence
  Description of Artificial Sequence: Synthetic oligonucleotide
  Target: LAMA2; (+) strand; PAM type: NNAGAAW; PAM sequence: TAAGAAT
gacatgagttcaattctaat

SEQ ID NO: 12717 - DNA, 20 bp, Artificial Sequence
  Description of Artificial Sequence: Synthetic oligonucleotide
  Target: LAMA2; (+) strand; PAM type: NNAGAAW; PAM sequence: TGAGAAT
agttcaattctaattaagaa

SEQ ID NO: 12718 - DNA, 20 bp, Artificial Sequence
  Description of Artificial Sequence: Synthetic oligonucleotide
  Target: LAMA2; (+) strand; PAM type: NNAGAAW; PAM sequence: TAAGAAA
ctggtagccataggggaaga

SEQ ID NO: 12719 - DNA, 20 bp, Artificial Sequence
  Description of Artificial Sequence: Synthetic oligonucleotide
  Target: LAMA2; (+) strand; PAM type: NNAGAAW; PAM sequence: TTAGAAA
atgccagtctctcacttgat

SEQ ID NO: 12720 - DNA, 20 bp, Artificial Sequence
  Description of Artificial Sequence: Synthetic oligonucleotide
  Target: LAMA2; (+) strand; PAM type: NNAGAAW; PAM sequence: AAAGAAA
gaaagacctagtgaagactg

SEQ ID NO: 12721 - DNA, 20 bp, Artificial Sequence
  Description of Artificial Sequence: Synthetic oligonucleotide
  Target: LAMA2; (+) strand; PAM type: NNAGAAW; PAM sequence: CAAGAAA
tcaagtaggatacctgccct

SEQ ID NO: 12722 - DNA, 20 bp, Artificial Sequence
  Description of Artificial Sequence: Synthetic oligonucleotide
  Target: LAMA2; (+) strand; PAM type: NNAGAAW; PAM sequence: GCAGAAA
gataagagatgagtactttc

SEQ ID NO: 12723 - DNA, 20 bp, Artificial Sequence
  Description of Artificial Sequence: Synthetic oligonucleotide
  Target: LAMA2; (+) strand; PAM type: NNAGAAW; PAM sequence: GGAGAAT
ggtgaatgtgggaatatgga

SEQ ID NO: 12724 - DNA, 20 bp, Artificial Sequence
  Description of Artificial Sequence: Synthetic oligonucleotide
  Target: LAMA2; (+) strand; PAM type: NNAGAAW; PAM sequence: CTAGAAA
gagtgatcaaagagtgcatt

SEQ ID NO: 12725 - DNA, 20 bp, Artificial Sequence
  Description of Artificial Sequence: Synthetic oligonucleotide
  Target: LAMA2; (+) strand; PAM type: NNAGAAW; PAM sequence: AGAGAAA
atgcattggtattaaataag

SEQ ID NO: 12726 - DNA, 20 bp, Artificial Sequence
  Description of Artificial Sequence: Synthetic oligonucleotide
  Target: LAMA2; (+) strand; PAM type: NNAGAAW; PAM sequence: TAAGAAA
agaagatatctatgagatgg

SEQ ID NO: 12727 - DNA, 20 bp, Artificial Sequence
  Description of Artificial Sequence: Synthetic oligonucleotide
  Target: LAMA2; (+) strand; PAM type: NNAGAAW; PAM sequence: GGAGAAA
gaaaagctgaaaaaggtagg

SEQ ID NO: 12728 - DNA, 20 bp, Artificial Sequence
  Description of Artificial Sequence: Synthetic oligonucleotide
  Target: LAMA2; (+) strand; PAM type: NNAGAAW; PAM sequence: ACAGAAA
tctggagggaaaattgcacc

SEQ ID NO: 12729 - DNA, 20 bp, Artificial Sequence
  Description of Artificial Sequence: Synthetic oligonucleotide
  Target: LAMA2; (+) strand; PAM type: NNAGAAW; PAM sequence: ATAGAAT
ggaatatacatgctaggtgc

SEQ ID NO: 12730 - DNA, 20 bp, Artificial Sequence
  Description of Artificial Sequence: Synthetic oligonucleotide
  Target: LAMA2; (+) strand; PAM type: NNAGAAW; PAM sequence: CAAGAAT
attcattaatgcatatttgt

SEQ ID NO: 12731 - DNA, 20 bp, Artificial Sequence
  Description of Artificial Sequence: Synthetic oligonucleotide
  Target: LAMA2; (+) strand; PAM type: NNAGAAW; PAM sequence: ACAGAAA
tatgacagagttgaaaatgt

SEQ ID NO: 12732 - DNA, 20 bp, Artificial Sequence
  Description of Artificial Sequence: Synthetic oligonucleotide
  Target: LAMA2; (+) strand; PAM type: NNAGAAW; PAM sequence: TGAGAAT
cgagtttcttcttgggaatt

SEQ ID NO: 12733 - DNA, 20 bp, Artificial Sequence
  Description of Artificial Sequence: Synthetic oligonucleotide
  Target: LAMA2; (+) strand; PAM type: NNAGAAW; PAM sequence: GAAGAAT
gaaggcatttcagattacca

SEQ ID NO: 12734 - DNA, 20 bp, Artificial Sequence
  Description of Artificial Sequence: Synthetic oligonucleotide
  Target: LAMA2; (+) strand; PAM type: NNAGAAW; PAM sequence: ACAGAAT
gaaaagagttgcttgaaatc

SEQ ID NO: 12735 - DNA, 20 bp, Artificial Sequence
  Description of Artificial Sequence: Synthetic oligonucleotide
  Target: LAMA2; (+) strand; PAM type: NNAGAAW; PAM sequence: TGAGAAA
agacatgcctccatgactcg

SEQ ID NO: 12736 - DNA, 20 bp, Artificial Sequence
  Description of Artificial Sequence: Synthetic oligonucleotide
  Target: LAMA2; (+) strand; PAM type: NNAGAAW; PAM sequence: GCAGAAA
aatgctattaggaccatatg

SEQ ID NO: 12737 - DNA, 20 bp, Artificial Sequence
  Description of Artificial Sequence: Synthetic oligonucleotide
  Target: LAMA2; (+) strand; PAM type: NNAGAAW; PAM sequence: ACAGAAT
gaccatatggcagaaaaaca

SEQ ID NO: 12738 - DNA, 20 bp, Artificial Sequence
  Description of Artificial Sequence: Synthetic oligonucleotide
  Target: LAMA2; (+) strand; PAM type: NNAGAAW; PAM sequence: GGAGAAT
gagatttttaaagatgagca

SEQ ID NO: 12739 - DNA, 20 bp, Artificial Sequence
  Description of Artificial Sequence: Synthetic oligonucleotide
  Target: LAMA2; (+) strand; PAM type: NNAGAAW; PAM sequence: TGAGAAA
cttgggaggagggccctaaa

SEQ ID NO: 12740 - DNA, 20 bp, Artificial Sequence
  Description of Artificial Sequence: Synthetic oligonucleotide
  Target: LAMA2; (+) strand; PAM type: NNAGAAW; PAM sequence: AAAGAAA
atgacctatttcaggaactg

SEQ ID NO: 12741 - DNA, 20 bp, Artificial Sequence
  Description of Artificial Sequence: Synthetic oligonucleotide
  Target: LAMA2; (+) strand; PAM type: NNAGAAW; PAM sequence: TGAGAAT
gtatttctttattagcagca

SEQ ID NO: 12742 - DNA, 20 bp, Artificial Sequence
  Description of Artificial Sequence: Synthetic oligonucleotide
  Target: LAMA2; (+) strand; PAM type: NNAGAAW; PAM sequence: AGAGAAA
ctgatttggttaaaggaagc

SEQ ID NO: 12743 - DNA, 20 bp, Artificial Sequence
  Description of Artificial Sequence: Synthetic oligonucleotide
  Target: LAMA2; (+) strand; PAM type: NNAGAAW; PAM sequence: CAAGAAT
agatacatctggagaggaaa

SEQ ID NO: 12744 - DNA, 20 bp, Artificial Sequence
  Description of Artificial Sequence: Synthetic oligonucleotide
  Target: LAMA2; (+) strand; PAM type: NNAGAAW; PAM sequence: GAAGAAT
ttaaatttttctctttgaga

SEQ ID NO: 12745 - DNA, 20 bp, Artificial Sequence
  Description of Artificial Sequence: Synthetic oligonucleotide
  Target: LAMA2; (+) strand; PAM type: NNAGAAW; PAM sequence: TAAGAAA
tgagagaagaatcatgacaa

SEQ ID NO: 12746 - DNA, 20 bp, Artificial Sequence
  Description of Artificial Sequence: Synthetic oligonucleotide
  Target: LAMA2; (+) strand; PAM type: NNAGAAW; PAM sequence: TGAGAAA
gtgaatactgttgacattcc

SEQ ID NO: 12747 - DNA, 20 bp, Artificial Sequence
  Description of Artificial Sequence: Synthetic oligonucleotide
  Target: LAMA2; (+) strand; PAM type: NNAGAAW; PAM sequence: TAAGAAA
cataaatatcatacgaatcc

SEQ ID NO: 12748 - DNA, 20 bp, Artificial Sequence
  Description of Artificial Sequence: Synthetic oligonucleotide
  Target: LAMA2; (+) strand; PAM type: NNAGAAW; PAM sequence: ACAGAAA
agactactgtgtgctagtaa

SEQ ID NO: 12749 - DNA, 20 bp, Artificial Sequence
  Description of Artificial Sequence: Synthetic oligonucleotide
  Target: LAMA2; (+) strand; PAM type: NNAGAAW; PAM sequence: AGAGAAA
ctttcagcctctgatggttc

SEQ ID NO: 12750 - DNA, 20 bp, Artificial Sequence
  Description of Artificial Sequence: Synthetic oligonucleotide
  Target: LAMA2; (+) strand; PAM type: NNAGAAW; PAM sequence: GCAGAAT
ctccctaggttggagccatt

SEQ ID NO: 12751 - DNA, 20 bp, Artificial Sequence
  Description of Artificial Sequence: Synthetic oligonucleotide
  Target: LAMA2; (+) strand; PAM type: NNAGAAW; PAM sequence: AGAGAAA
atgagttgtccttcttttaa

SEQ ID NO: 12752 - DNA, 20 bp, Artificial Sequence
  Description of Artificial Sequence: Synthetic oligonucleotide
  Target: LAMA2; (+) strand; PAM type: NNAGAAW; PAM sequence: ATAGAAT
tacggagttgtaaacctgca

SEQ ID NO: 12753 - DNA, 20 bp, Artificial Sequence
  Description of Artificial Sequence: Synthetic oligonucleotide
  Target: LAMA2; (+) strand; PAM type: NNAGAAW; PAM sequence: CAAGAAT
aatattaaggctgtgtaggc

SEQ ID NO: 12754 - DNA, 20 bp, Artificial Sequence
  Description of Artificial Sequence: Synthetic oligonucleotide
  Target: LAMA2; (+) strand; PAM type: NNAGAAW; PAM sequence: TCAGAAA
ccaagaatctagttatcctt

SEQ ID NO: 12755 - DNA, 20 bp, Artificial Sequence
  Description of Artificial Sequence: Synthetic oligonucleotide
  Target: LAMA2; (+) strand; PAM type: NNAGAAW; PAM sequence: TGAGAAA
atggcaagtatcatttgact

SEQ ID NO: 12756 - DNA, 20 bp, Artificial Sequence
  Description of Artificial Sequence: Synthetic oligonucleotide
  Target: LAMA2; (+) strand; PAM type: NNAGAAW; PAM sequence: TAAGAAA
tcatttgacttgagaaaaga

SEQ ID NO: 12757 - DNA, 20 bp, Artificial Sequence
  Description of Artificial Sequence: Synthetic oligonucleotide
  Target: LAMA2; (+) strand; PAM type: NNAGAAW; PAM sequence: GAAGAAT
ctctgaggaagtgactcttg

SEQ ID NO: 12758 - DNA, 20 bp, Artificial Sequence
  Description of Artificial Sequence: Synthetic oligonucleotide
  Target: LAMA2; (+) strand; PAM type: NNAGAAW; PAM sequence: TGAGAAA
attcgggtaagacagaaggt

SEQ ID NO: 12759 - DNA, 20 bp, Artificial Sequence
  Description of Artificial Sequence: Synthetic oligonucleotide
  Target: LAMA2; (+) strand; PAM type: NNAGAAW; PAM sequence: TAAGAAT
caaggatttaaagattactt

SEQ ID NO: 12760 - DNA, 20 bp, Artificial Sequence
  Description of Artificial Sequence: Synthetic oligonucleotide
  Target: LAMA2; (+) strand; PAM type: NNAGAAW; PAM sequence: ACAGAAA
gtttccataaagctttattt

SEQ ID NO: 12761 - DNA, 20 bp, Artificial Sequence
  Description of Artificial Sequence: Synthetic oligonucleotide
  Target: LAMA2; (+) strand; PAM type: NNAGAAW; PAM sequence: GAAGAAA
cctttgaagtaatgtcacaa

SEQ ID NO: 12762 - DNA, 20 bp, Artificial Sequence
  Description of Artificial Sequence: Synthetic oligonucleotide
  Target: LAMA2; (+) strand; PAM type: NNAGAAW; PAM sequence: TAAGAAA
gtactagaggaaaggagtgc

SEQ ID NO: 12763 - DNA, 20 bp, Artificial Sequence
  Description of Artificial Sequence: Synthetic oligonucleotide
  Target: LAMA2; (+) strand; PAM type: NNAGAAW; PAM sequence: TCAGAAA
gctaatttctttgagtaatc

SEQ ID NO: 12764 - DNA, 20 bp, Artificial Sequence
  Description of Artificial Sequence: Synthetic oligonucleotide
  Target: LAMA2; (+) strand; PAM type: NNAGAAW; PAM sequence: TGAGAAA
ctcagtgtagctggtggcca

SEQ ID NO: 12765 - DNA, 20 bp, Artificial Sequence
  Description of Artificial Sequence: Synthetic oligonucleotide
  Target: LAMA2; (+) strand; PAM type: NNAGAAW; PAM sequence: AGAGAAA
tcaaatattagaacaatgca

SEQ ID NO: 12766 - DNA, 20 bp, Artificial Sequence
  Description of Artificial Sequence: Synthetic oligonucleotide
  Target: LAMA2; (+) strand; PAM type: NNAGAAW; PAM sequence: TTAGAAT
actaacacttggtgtgcatt

SEQ ID NO: 12767 - DNA, 20 bp, Artificial Sequence
  Description of Artificial Sequence: Synthetic oligonucleotide
  Target: LAMA2; (+) strand; PAM type: NNAGAAW; PAM sequence: TTAGAAA
tagtgaactgcatgtccatt

SEQ ID NO: 12768 - DNA, 20 bp, Artificial Sequence
  Description of Artificial Sequence: Synthetic oligonucleotide
  Target: LAMA2; (+) strand; PAM type: NNAGAAW; PAM sequence: TTAGAAA
taattgatgtaagatagtat

SEQ ID NO: 12769 - DNA, 20 bp, Artificial Sequence
  Description of Artificial Sequence: Synthetic oligonucleotide
  Target: LAMA2; (+) strand; PAM type: NNAGAAW; PAM sequence: TCAGAAA
taatcatctagatgcctaag

SEQ ID NO: 12770 - DNA, 20 bp, Artificial Sequence
  Description of Artificial Sequence: Synthetic oligonucleotide
  Target: LAMA2; (+) strand; PAM type: NNAGAAW; PAM sequence: AAAGAAA
agagccagagcctgtctcaa

SEQ ID NO: 12771 - DNA, 20 bp, Artificial Sequence
  Description of Artificial Sequence: Synthetic oligonucleotide
  Target: LAMA2; (+) strand; PAM type: NNAGAAW; PAM sequence: TGAGAAA
ctttattagcttttttatac

SEQ ID NO: 12772 - DNA, 20 bp, Artificial Sequence
  Description of Artificial Sequence: Synthetic oligonucleotide
  Target: LAMA2; (+) strand; PAM type: NNAGAAW; PAM sequence: AAAGAAA
gaaaattttaaaatacagga

SEQ ID NO: 12773 - DNA, 20 bp, Artificial Sequence
  Description of Artificial Sequence: Synthetic oligonucleotide
  Target: LAMA2; (+) strand; PAM type: NNAGAAW; PAM sequence: ATAGAAA
tatacccacattcctaactc

SEQ ID NO: 12774 - DNA, 20 bp, Artificial Sequence
  Description of Artificial Sequence: Synthetic oligonucleotide
  Target: LAMA2; (+) strand; PAM type: NNAGAAW; PAM sequence: AGAGAAA
tcatgttttcttttcttact

SEQ ID NO: 12775 - DNA, 20 bp, Artificial Sequence
  Description of Artificial Sequence: Synthetic oligonucleotide
  Target: LAMA2; (+) strand; PAM type: NNAGAAW; PAM sequence: AAAGAAA
gttttcttttcttactagag

SEQ ID NO: 12776 - DNA, 20 bp, Artificial Sequence
  Description of Artificial Sequence: Synthetic oligonucleotide
  Target: LAMA2; (+) strand; PAM type: NNAGAAW; PAM sequence: TTAGAAA
gtgtttgcgtttttccaatt

SEQ ID NO: 12777 - DNA, 20 bp, Artificial Sequence
  Description of Artificial Sequence: Synthetic oligonucleotide
  Target: LAMA2; (+) strand; PAM type: NNAGAAW; PAM sequence: GTAGAAT
ttgagtgaatatgccaatag

SEQ ID NO: 12778 - DNA, 20 bp, Artificial Sequence
  Description of Artificial Sequence: Synthetic oligonucleotide
  Target: LAMA2; (+) strand; PAM type: NNAGAAW; PAM sequence: TGAGAAT
ttgtccttgtgatagtttac

SEQ ID NO: 12779 - DNA, 20 bp, Artificial Sequence
  Description of Artificial Sequence: Synthetic oligonucleotide
  Target: LAMA2; (+) strand; PAM type: NNAGAAW; PAM sequence: AGAGAAT
tagtaaattcatgtttttcc

SEQ ID NO: 12780 - DNA, 20 bp, Artificial Sequence
  Description of Artificial Sequence: Synthetic oligonucleotide
  Target: LAMA2; (+) strand; PAM type: NNAGAAW; PAM sequence: CAAGAAT
gcagtgtgattagtatagtg

SEQ ID NO: 12781 - DNA, 20 bp, Artificial Sequence
  Description of Artificial Sequence: Synthetic oligonucleotide
  Target: LAMA2; (+) strand; PAM type: NNAGAAW; PAM sequence: ATAGAAA
ttggattttgtcttctagtg

SEQ ID NO: 12782 - DNA, 20 bp, Artificial Sequence
  Description of Artificial Sequence: Synthetic oligonucleotide
  Target: LAMA2; (+) strand; PAM type: NNAGAAW; PAM sequence: CAAGAAT
gctgctttagagctgaattt

SEQ ID NO: 12783 - DNA, 20 bp, Artificial Sequence
  Description of Artificial Sequence: Synthetic oligonucleotide
  Target: LAMA2; (+) strand; PAM type: NNAGAAW; PAM sequence: TTAGAAA
atttgaagcagtaaagtgat

SEQ ID NO: 12784 - DNA, 20 bp, Artificial Sequence
  Description of Artificial Sequence: Synthetic oligonucleotide
  Target: LAMA2; (+) strand; PAM type: NNAGAAW; PAM sequence: CAAGAAA
aactatttcaatggaccaga

SEQ ID NO: 12785 - DNA, 20 bp, Artificial Sequence
  Description of Artificial Sequence: Synthetic oligonucleotide
  Target: LAMA2; (+) strand; PAM type: NNAGAAW; PAM sequence: GGAGAAA
ggctgcagttgccatttatt

SEQ ID NO: 12786 - DNA, 20 bp, Artificial Sequence
  Description of Artificial Sequence: Synthetic oligonucleotide
  Target: LAMA2; (+) strand; PAM type: NNAGAAW; PAM sequence: AAAGAAA
ttgtggacacttctggaaaa

SEQ ID NO: 12787 - DNA, 20 bp, Artificial Sequence
  Description of Artificial Sequence: Synthetic oligonucleotide
  Target: LAMA2; (+) strand; PAM type: NNAGAAW; PAM sequence: GCAGAAT
agtcgtgtcttaccaatttt

SEQ ID NO: 12788 - DNA, 20 bp, Artificial Sequence
  Description of Artificial Sequence: Synthetic oligonucleotide
  Target: LAMA2; (+) strand; PAM type: NNAGAAW; PAM sequence: GAAGAAA
tactaagacatttttctatg

SEQ ID NO: 12789 - DNA, 20 bp, Artificial Sequence
  Description of Artificial Sequence: Synthetic oligonucleotide
  Target: LAMA2; (+) strand; PAM type: NNAGAAW; PAM sequence: TGAGAAT
acaaggttcttttgtagaga

SEQ ID NO: 12790 - DNA, 20 bp, Artificial Sequence
  Description of Artificial Sequence: Synthetic oligonucleotide
  Target: LAMA2; (+) strand; PAM type: NNAGAAW; PAM sequence: GAAGAAA
aatgtggaatgggtctctct

SEQ ID NO: 12791 - DNA, 20 bp, Artificial Sequence
  Description of Artificial Sequence: Synthetic oligonucleotide
  Target: LAMA2; (+) strand; PAM type: NNAGAAW; PAM sequence: AAAGAAA
tggttgcttgtgcatattgg

SEQ ID NO: 12792 - DNA, 20 bp, Artificial Sequence
  Description of Artificial Sequence: Synthetic oligonucleotide
  Target: LAMA2; (+) strand; PAM type: NNAGAAW; PAM sequence: CCAGAAA
aattttttatacctttaaat

SEQ ID NO: 12793 - DNA, 20 bp, Artificial Sequence
  Description of Artificial Sequence: Synthetic oligonucleotide
  Target: LAMA2; (+) strand; PAM type: NNAGAAW; PAM sequence: CAAGAAA
acctttaaatccagaaatgt

SEQ ID NO: 12794 - DNA, 20 bp, Artificial Sequence
  Description of Artificial Sequence: Synthetic oligonucleotide
  Target: LAMA2; (+) strand; PAM type: NNAGAAW; PAM sequence: AAAGAAA
tgacacacaagaacaaaaca

SEQ ID NO: 12795 - DNA, 20 bp, Artificial Sequence
  Description of Artificial Sequence: Synthetic oligonucleotide
  Target: LAMA2; (+) strand; PAM type: NNAGAAW; PAM sequence: TTAGAAT
taagtatgcatatctaaaag

SEQ ID NO: 12796 - DNA, 20 bp, Artificial Sequence
  Description of Artificial Sequence: Synthetic oligonucleotide
  Target: LAMA2; (+) strand; PAM type: NNAGAAW; PAM sequence: CTAGAAT
attcttttactatatattgg

SEQ ID NO: 12797 - DNA, 20 bp, Artificial Sequence
  Description of Artificial Sequence: Synthetic oligonucleotide
  Target: LAMA2; (+) strand; PAM type: NNAGAAW; PAM sequence: AAAGAAA
tattggctagaattttatgt

SEQ ID NO: 12798 - DNA, 20 bp, Artificial Sequence
  Description of Artificial Sequence: Synthetic oligonucleotide
  Target: LAMA2; (+) strand; PAM type: NNAGAAW; PAM sequence: GTAGAAT
tgactcttatttacctacag

SEQ ID NO: 12799 - DNA, 20 bp, Artificial Sequence
  Description of Artificial Sequence: Synthetic oligonucleotide
  Target: LAMA2; (+) strand; PAM type: NNAGAAW; PAM sequence: TTAGAAA
ttctttttatttcccagttt

SEQ ID NO: 12800 - DNA, 20 bp, Artificial Sequence
  Description of Artificial Sequence: Synthetic oligonucleotide
  Target: LAMA2; (+) strand; PAM type: NNAGAAW; PAM sequence: TTAGAAA
gcatatttcctgtcctggtt

SEQ ID NO: 12801 - DNA, 20 bp, Artificial Sequence
  Description of Artificial Sequence: Synthetic oligonucleotide
  Target: LAMA2; (+) strand; PAM type: NNAGAAW; PAM sequence: AGAGAAA
gggaaatatatatttcaaat

SEQ ID NO: 12802 - DNA, 20 bp, Artificial Sequence
  Description of Artificial Sequence: Synthetic oligonucleotide
  Target: LAMA2; (+) strand; PAM type: NNAGAAW; PAM sequence: ATAGAAA
tatatcatttcataataata

SEQ ID NO: 12803 - DNA, 20 bp, Artificial Sequence
  Description of Artificial Sequence: Synthetic oligonucleotide
  Target: LAMA2; (+) strand; PAM type: NNAGAAW; PAM sequence: TTAGAAA
tagggttatctttccatttg

SEQ ID NO: 12804 - DNA, 20 bp, Artificial Sequence
  Description of Artificial Sequence: Synthetic oligonucleotide
  Target: LAMA2; (+) strand; PAM type: NNAGAAW; PAM sequence: TAAGAAT
gtttgtttaaacagtccgct

SEQ ID NO: 12805 - DNA, 20 bp, Artificial Sequence
  Description of Artificial Sequence: Synthetic oligonucleotide
  Target: LAMA2; (+) strand; PAM type: NNAGAAW; PAM sequence: TGAGAAT
ccaatcctaagatcagcatg

SEQ ID NO: 12806 - DNA, 20 bp, Artificial Sequence
  Description of Artificial Sequence: Synthetic oligonucleotide
  Target: LAMA2; (+) strand; PAM type: NNAGAAW; PAM sequence: AGAGAAA
gtctggtagttgattggggc

SEQ ID NO: 12807 - DNA, 20 bp, Artificial Sequence
  Description of Artificial Sequence: Synthetic oligonucleotide
  Target: LAMA2; (+) strand; PAM type: NNAGAAW; PAM sequence: TGAGAAA
gttgattggggcagagaaaa

SEQ ID NO: 12808 - DNA, 20 bp, Artificial Sequence
  Description of Artificial Sequence: Synthetic oligonucleotide
  Target: LAMA2; (+) strand; PAM type: NNAGAAW; PAM sequence: GAAGAAA
aaatgagaaaaacttagtat

SEQ ID NO: 12809 - DNA, 20 bp, Artificial Sequence
  Description of Artificial Sequence: Synthetic oligonucleotide
  Target: LAMA2; (+) strand; PAM type: NNAGAAW; PAM sequence: ACAGAAT
tgacatccatgaaacatatg

SEQ ID NO: 12810 - DNA, 20 bp, Artificial Sequence
  Description of Artificial Sequence: Synthetic oligonucleotide
  Target: LAMA2; (+) strand; PAM type: NNAGAAW; PAM sequence: TAAGAAT
tgccaaaccaacacatgggg

SEQ ID NO: 12811 - DNA, 20 bp, Artificial Sequence
  Description of Artificial Sequence: Synthetic oligonucleotide
  Target: LAMA2; (+) strand; PAM type: NNAGAAW; PAM sequence: AGAGAAA
agttttaaaaatcatgatgg

SEQ ID NO: 12812 - DNA, 20 bp, Artificial Sequence
  Description of Artificial Sequence: Synthetic oligonucleotide
  Target: LAMA2; (+) strand; PAM type: NNAGAAW; PAM sequence: TTAGAAA
ttaaaactgaagcatttaat

SEQ ID NO: 12813 - DNA, 20 bp, Artificial Sequence
  Description of Artificial Sequence: Synthetic oligonucleotide
  Target: LAMA2; (+) strand; PAM type: NNAGAAW; PAM sequence: ACAGAAT
aagttaaatggaaaaacagg

SEQ ID NO: 12814 - DNA, 20 bp, Artificial Sequence
  Description of Artificial Sequence: Synthetic oligonucleotide
  Target: LAMA2; (+) strand; PAM type: NNAGAAW; PAM sequence: CAAGAAA
ataactaatacatattaagt

SEQ ID NO: 12815 - DNA, 20 bp, Artificial Sequence
  Description of Artificial Sequence: Synthetic oligonucleotide
  Target: LAMA2; (+) strand; PAM type: NNAGAAW; PAM sequence: CAAGAAA
agtaaaggattatttgtctt

SEQ ID NO: 12816 - DNA, 20 bp, Artificial Sequence
  Description of Artificial Sequence: Synthetic oligonucleotide
  Target: LAMA2; (+) strand; PAM type: NNAGAAW; PAM sequence: AAAGAAT
tcttcaagaaaacatcctgt

SEQ ID NO: 12817 - DNA, 20 bp, Artificial Sequence
  Description of Artificial Sequence: Synthetic oligonucleotide
  Target: LAMA2; (+) strand; PAM type: NNAGAAW; PAM sequence: AAAGAAT
tatagatgtaaaatgcttaa

SEQ ID NO: 12818 - DNA, 20 bp, Artificial Sequence
  Description of Artificial Sequence: Synthetic oligonucleotide
  Target: LAMA2; (+) strand; PAM type: NNAGAAW; PAM sequence: AAAGAAT
ctaacaatacaatttatagt

SEQ ID NO: 12819 - DNA, 20 bp, Artificial Sequence
  Description of Artificial Sequence: Synthetic oligonucleotide
  Target: LAMA2; (+) strand; PAM type: NNAGAAW; PAM sequence: TGAGAAA
tttatagtaaagaatatgta

SEQ ID NO: 12820 - DNA, 20 bp, Artificial Sequence
  Description of Artificial Sequence: Synthetic oligonucleotide
  Target: LAMA2; (+) strand; PAM type: NNAGAAW; PAM sequence: TCAGAAA
aaacatttgttcttagaagt

SEQ ID NO: 12821 - DNA, 20 bp, Artificial Sequence
  Description of Artificial Sequence: Synthetic oligonucleotide
  Target: LAMA2; (+) strand; PAM type: NNAGAAW; PAM sequence: ATAGAAT
atcaaatatataatatgaag

SEQ ID NO: 12822 - DNA, 20 bp, Artificial Sequence
  Description of Artificial Sequence: Synthetic oligonucleotide
  Target: LAMA2; (+) strand; PAM type: NNAGAAW; PAM sequence: GGAGAAA
taatgtagagaagttaaaga

SEQ ID NO: 12823 - DNA, 20 bp, Artificial Sequence
  Description of Artificial Sequence: Synthetic oligonucleotide
  Target: LAMA2; (+) strand; PAM type: NNAGAAW; PAM sequence: ATAGAAT
aatgtataaaacatcaattt

SEQ ID NO: 12824 - DNA, 20 bp, Artificial Sequence
  Description of Artificial Sequence: Synthetic oligonucleotide
  Target: LAMA2; (+) strand; PAM type: NNAGAAW; PAM sequence: CTAGAAA
tacattttctagctggggga

SEQ ID NO: 12825 - DNA, 20 bp, Artificial Sequence
  Description of Artificial Sequence: Synthetic oligonucleotide
  Target: LAMA2; (+) strand; PAM type: NNAGAAW; PAM sequence: TAAGAAT
gataatttgctgaatagaac

SEQ ID NO: 12826 - DNA, 20 bp, Artificial Sequence
  Description of Artificial Sequence: Synthetic oligonucleotide
  Target: LAMA2; (+) strand; PAM type: NNAGAAW; PAM sequence: ATAGAAA
gggacacaaacattcataac

SEQ ID NO: 12827 - DNA, 20 bp, Artificial Sequence
  Description of Artificial Sequence: Synthetic oligonucleotide
  Target: LAMA2; (+) strand; PAM type: NNAGAAW; PAM sequence: ACAGAAA
atgaccactattaaaaccaa

SEQ ID NO: 12828 - DNA, 20 bp, Artificial Sequence
  Description of Artificial Sequence: Synthetic oligonucleotide
  Target: LAMA2; (+) strand; PAM type: NNAGAAW; PAM sequence: ACAGAAA
ggtcctcggcctatgctatt

SEQ ID NO: 12829 - DNA, 20 bp, Artificial Sequence
  Description of Artificial Sequence: Synthetic oligonucleotide
  Target: LAMA2; (+) strand; PAM type: NNAGAAW; PAM sequence: AAAGAAT
ctcggcctatgctattacag

SEQ ID NO: 12830 - DNA, 20 bp, Artificial Sequence
  Description of Artificial Sequence: Synthetic oligonucleotide
  Target: LAMA2; (+) strand; PAM type: NNAGAAW; PAM sequence: TAAGAAT
aaagaaccgctctacagagc

SEQ ID NO: 12831 - DNA, 20 bp, Artificial Sequence
  Description of Artificial Sequence: Synthetic oligonucleotide
  Target: LAMA2; (+) strand; PAM type: NNAGAAW; PAM sequence: TGAGAAT
tttttactaatttttttccg

SEQ ID NO: 12832 - DNA, 20 bp, Artificial Sequence
  Description of Artificial Sequence: Synthetic oligonucleotide
  Target: LAMA2; (+) strand; PAM type: NNAGAAW; PAM sequence: ATAGAAT
actaatttttttccgtgaga

SEQ ID NO: 12833 - DNA, 20 bp, Artificial Sequence
  Description of Artificial Sequence: Synthetic oligonucleotide
  Target: LAMA2; (+) strand; PAM type: NNAGAAW; PAM sequence: GCAGAAA
cgattcaatctattatggaa

SEQ ID NO: 12834 - DNA, 20 bp, Artificial Sequence
  Description of Artificial Sequence: Synthetic oligonucleotide
  Target: LAMA2; (+) strand; PAM type: NNAGAAW; PAM sequence: TTAGAAT
acattgcataaaaacttgtt

SEQ ID NO: 12835 - DNA, 20 bp, Artificial Sequence
  Description of Artificial Sequence: Synthetic oligonucleotide
  Target: LAMA2; (+) strand; PAM type: NNAGAAW; PAM sequence: AAAGAAA
gaagtgaaaagcattatttt

SEQ ID NO: 12836 - DNA, 20 bp, Artificial Sequence
  Description of Artificial Sequence: Synthetic oligonucleotide
  Target: LAMA2; (+) strand; PAM type: NNAGAAW; PAM sequence: TGAGAAT
tattctaggacaaaataaaa

SEQ ID NO: 12837 - DNA, 20 bp, Artificial Sequence
  Description of Artificial Sequence: Synthetic oligonucleotide
  Target: LAMA2; (+) strand; PAM type: NNAGAAW; PAM sequence: ATAGAAT
taggacaaaataaaatgaga

SEQ ID NO: 12838 - DNA, 20 bp, Artificial Sequence
  Description of Artificial Sequence: Synthetic oligonucleotide
  Target: LAMA2; (+) strand; PAM type: NNAGAAW; PAM sequence: CAAGAAT
gtgatctcaagactatccct

SEQ ID NO: 12839 - DNA, 20 bp, Artificial Sequence
  Description of Artificial Sequence: Synthetic oligonucleotide
  Target: LAMA2; (+) strand; PAM type: NNAGAAW; PAM sequence: GGAGAAA
agatgtagtctcacattaag

SEQ ID NO: 12840 - DNA, 20 bp, Artificial Sequence
  Description of Artificial Sequence: Synthetic oligonucleotide
  Target: LAMA2; (+) strand; PAM type: NNAGAAW; PAM sequence: CTAGAAA
ttaagggagaaatctgcaaa

SEQ ID NO: 12841 - DNA, 20 bp, Artificial Sequence
  Description of Artificial Sequence: Synthetic oligonucleotide
  Target: LAMA2; (+) strand; PAM type: NNAGAAW; PAM sequence: AGAGAAA
ccttgaatctactgatatga

SEQ ID NO: 12842 - DNA, 20 bp, Artificial Sequence
  Description of Artificial Sequence: Synthetic oligonucleotide
  Target: LAMA2; (+) strand; PAM type: NNAGAAW; PAM sequence: AAAGAAA
gttatctacagggctatcca

SEQ ID NO: 12843 - DNA, 20 bp, Artificial Sequence
  Description of Artificial Sequence: Synthetic oligonucleotide
  Target: LAMA2; (+) strand; PAM type: NNAGAAW; PAM sequence: AAAGAAA
cattctgactaaaaagctca

SEQ ID NO: 12844 - DNA, 20 bp, Artificial Sequence
  Description of Artificial Sequence: Synthetic oligonucleotide
  Target: LAMA2; (+) strand; PAM type: NNAGAAW; PAM sequence: GCAGAAA
tatgaagatattactgacca

SEQ ID NO: 12845 - DNA, 20 bp, Artificial Sequence
  Description of Artificial Sequence: Synthetic oligonucleotide
  Target: LAMA2; (+) strand; PAM type: NNAGAAW; PAM sequence: AGAGAAA
gttgacagtcgtggtatatg

SEQ ID NO: 12846 - DNA, 20 bp, Artificial Sequence
  Description of Artificial Sequence: Synthetic oligonucleotide
  Target: LAMA2; (+) strand; PAM type: NNAGAAW; PAM sequence: GAAGAAA
tactataattaatatatgca

SEQ ID NO: 12847 - DNA, 20 bp, Artificial Sequence
  Description of Artificial Sequence: Synthetic oligonucleotide
  Target: LAMA2; (+) strand; PAM type: NNAGAAW; PAM sequence: AGAGAAT
ttgtgtcaatgccatgaatc

SEQ ID NO: 12848 - DNA, 20 bp, Artificial Sequence
  Description of Artificial Sequence: Synthetic oligonucleotide
  Target: LAMA2; (+) strand; PAM type: NNAGAAW; PAM sequence: TGAGAAA
attacagacctgtagttttg

SEQ ID NO: 12849 - DNA, 20 bp, Artificial Sequence
  Description of Artificial Sequence: Synthetic oligonucleotide
  Target: LAMA2; (+) strand; PAM type: NNAGAAW; PAM sequence: AGAGAAT
tgtagttttgtgagaaaagc

SEQ ID NO: 12850 - DNA, 20 bp, Artificial Sequence
  Description of Artificial Sequence: Synthetic oligonucleotide
  Target: LAMA2; (+) strand; PAM type: NNAGAAW; PAM sequence: GAAGAAA
aggatcatggcaccagtcct

SEQ ID NO: 12851 - DNA, 20 bp, Artificial Sequence
  Description of Artificial Sequence: Synthetic oligonucleotide
  Target: LAMA2; (+) strand; PAM type: NNAGAAW; PAM sequence: ATAGAAT
tgtgtgggaatgctaatggg

SEQ ID NO: 12852 - DNA, 20 bp, Artificial Sequence
  Description of Artificial Sequence: Synthetic oligonucleotide
  Target: LAMA2; (+) strand; PAM type: NNAGAAW; PAM sequence: ATAGAAA
ctaatactatcctctactgt

SEQ ID NO: 12853 - DNA, 20 bp, Artificial Sequence
  Description of Artificial Sequence: Synthetic oligonucleotide
  Target: LAMA2; (+) strand; PAM type: NNAGAAW; PAM sequence: AGAGAAA
ctggatttggttttctgggc

SEQ ID NO: 12854 - DNA, 20 bp, Artificial Sequence
  Description of Artificial Sequence: Synthetic oligonucleotide
  Target: LAMA2; (+) strand; PAM type: NNAGAAW; PAM sequence: GTAGAAT
aaactttaagcaggtatcat

SEQ ID NO: 12855 - DNA, 20 bp, Artificial Sequence
  Description of Artificial Sequence: Synthetic oligonucleotide
  Target: LAMA2; (+) strand; PAM type: NNAGAAW; PAM sequence: AAAGAAA
ataaggaccagatatttagt

SEQ ID NO: 12856 - DNA, 20 bp, Artificial Sequence
  Description of Artificial Sequence: Synthetic oligonucleotide
  Target: LAMA2; (+) strand; PAM type: NNAGAAW; PAM sequence: CCAGAAT
tagttaatgctttgtgaatc

SEQ ID NO: 12857 - DNA, 20 bp, Artificial Sequence
  Description of Artificial Sequence: Synthetic oligonucleotide
  Target: LAMA2; (+) strand; PAM type: NNAGAAW; PAM sequence: TTAGAAT
ttattttatcaacttttatt

SEQ ID NO: 12858 - DNA, 20 bp, Artificial Sequence
  Description of Artificial Sequence: Synthetic oligonucleotide
  Target: LAMA2; (+) strand; PAM type: NNAGAAW; PAM sequence: TTAGAAT
aaaatcaatttttgcagaga

SEQ ID NO: 12859 - DNA, 20 bp, Artificial Sequence
  Description of Artificial Sequence: Synthetic oligonucleotide
  Target: LAMA2; (+) strand; PAM type: NNAGAAW; PAM sequence: ACAGAAA
gaattaaacaaggtgacaca

SEQ ID NO: 12860 - DNA, 20 bp, Artificial Sequence
  Description of Artificial Sequence: Synthetic oligonucleotide
  Target: LAMA2; (+) strand; PAM type: NNAGAAW; PAM sequence: GGAGAAT
gtgacatcttgccagagaca

SEQ ID NO: 12861 - DNA, 20 bp, Artificial Sequence
  Description of Artificial Sequence: Synthetic oligonucleotide
  Target: LAMA2; (+) strand; PAM type: NNAGAAW; PAM sequence: TGAGAAA
tcttgccagagacaggagaa

SEQ ID NO: 12862 - DNA, 20 bp, Artificial Sequence
  Description of Artificial Sequence: Synthetic oligonucleotide
  Target: LAMA2; (+) strand; PAM type: NNAGAAW; PAM sequence: AGAGAAA
tggggagtgtttgaggggtg

SEQ ID NO: 12863 - DNA, 20 bp, Artificial Sequence
  Description of Artificial Sequence: Synthetic oligonucleotide
  Target: LAMA2; (+) strand; PAM type: NNAGAAW; PAM sequence: ACAGAAT
atcagagtaacaggcaacct

SEQ ID NO: 12864 - DNA, 20 bp, Artificial Sequence
  Description of Artificial Sequence: Synthetic oligonucleotide
  Target: LAMA2; (+) strand; PAM type: NNAGAAW; PAM sequence: GGAGAAA
aacaggcaacctacagaatg

SEQ ID NO: 12865 - DNA, 20 bp, Artificial Sequence
  Description of Artificial Sequence: Synthetic oligonucleotide
  Target: LAMA2; (+) strand; PAM type: NNAGAAW; PAM sequence: CCAGAAT
atctgacaaagggctaatac

SEQ ID NO: 12866 - DNA, 20 bp, Artificial Sequence
  Description of Artificial Sequence: Synthetic oligonucleotide
  Target: LAMA2; (+) strand; PAM type: NNAGAAW; PAM sequence: CAAGAAA
aaggaacataaacaaattca

SEQ ID NO: 12867 - DNA, 20 bp, Artificial Sequence
  Description of Artificial Sequence: Synthetic oligonucleotide
  Target: LAMA2; (+) strand; PAM type: NNAGAAW; PAM sequence: AGAGAAA
gctcaccatcactggtaatt

SEQ ID NO: 12868 - DNA, 20 bp, Artificial Sequence
  Description of Artificial Sequence: Synthetic oligonucleotide
  Target: LAMA2; (+) strand; PAM type: NNAGAAW; PAM sequence: TTAGAAT
gagataccaactcatgccag

SEQ ID NO: 12869 - DNA, 20 bp, Artificial Sequence
  Description of Artificial Sequence: Synthetic oligonucleotide
  Target: LAMA2; (+) strand; PAM type: NNAGAAW; PAM sequence: GGAGAAA
acagatgctggagaggatgt

SEQ ID NO: 12870 - DNA, 20 bp, Artificial Sequence
  Description of Artificial Sequence: Synthetic oligonucleotide
  Target: LAMA2; (+) strand; PAM type: NNAGAAW; PAM sequence: AAAGAAA
ctatcaatgatagactggat

SEQ ID NO: 12871 - DNA, 20 bp, Artificial Sequence
  Description of Artificial Sequence: Synthetic oligonucleotide
  Target: LAMA2; (+) strand; PAM type: NNAGAAW; PAM sequence: ACAGAAA
ctcagcaaactaacagagga

SEQ ID NO: 12872 - DNA, 20 bp, Artificial Sequence
  Description of Artificial Sequence: Synthetic oligonucleotide
  Target: LAMA2; (+) strand; PAM type: NNAGAAW; PAM sequence: GGAGAAA
caaggggagggatagcatta

SEQ ID NO: 12873 - DNA, 20 bp, Artificial Sequence
  Description of Artificial Sequence: Synthetic oligonucleotide
  Target: LAMA2; (+) strand; PAM type: NNAGAAW; PAM sequence: GTAGAAA
catgtatcccagaacttaaa

SEQ ID NO: 12874 - DNA, 20 bp, Artificial Sequence
  Description of Artificial Sequence: Synthetic oligonucleotide
  Target: LAMA2; (+) strand; PAM type: NNAGAAW; PAM sequence: AAAGAAA
tatcccagaacttaaagtag

SEQ ID NO: 12875 - DNA, 20 bp, Artificial Sequence
  Description of Artificial Sequence: Synthetic oligonucleotide
  Target: LAMA2; (+) strand; PAM type: NNAGAAW; PAM sequence: AAAGAAA
ccagaacttaaagtagaaag

SEQ ID NO: 12876 - DNA, 20 bp, Artificial Sequence
  Description of Artificial Sequence: Synthetic oligonucleotide
  Target: LAMA2; (+) strand; PAM type: NNAGAAW; PAM sequence: AGAGAAA
cttaaagtagaaagaaagaa

SEQ ID NO: 12877 - DNA, 20 bp, Artificial Sequence
  Description of Artificial Sequence: Synthetic oligonucleotide
  Target: LAMA2; (+) strand; PAM type: NNAGAAW; PAM sequence: GAAGAAA
agaaagaaagaaagagaaaa

SEQ ID NO: 12878 - DNA, 20 bp, Artificial Sequence
  Description of Artificial Sequence: Synthetic oligonucleotide
  Target: LAMA2; (+) strand; PAM type: NNAGAAW; PAM sequence: AAAGAAA
agaaagaaagagaaaagaag

SEQ ID NO: 12879 - DNA, 20 bp, Artificial Sequence
  Description of Artificial Sequence: Synthetic oligonucleotide
  Target: LAMA2; (+) strand; PAM type: NNAGAAW; PAM sequence: AAAGAAA
agaaagagaaaagaagaaag

SEQ ID NO: 12880 - DNA, 20 bp, Artificial Sequence
  Description of Artificial Sequence: Synthetic oligonucleotide
  Target: LAMA2; (+) strand; PAM type: NNAGAAW; PAM sequence: AGAGAAA
agaaagaaacaaagagagag

SEQ ID NO: 12881 - DNA, 20 bp, Artificial Sequence
  Description of Artificial Sequence: Synthetic oligonucleotide
  Target: LAMA2; (+) strand; PAM type: NNAGAAW; PAM sequence: AAAGAAA
agaaacaaagagagagagag

SEQ ID NO: 12882 - DNA, 20 bp, Artificial Sequence
  Description of Artificial Sequence: Synthetic oligonucleotide
  Target: LAMA2; (+) strand; PAM type: NNAGAAW; PAM sequence: AGAGAAA
aaagagagagagagaaagaa

SEQ ID NO: 12883 - DNA, 20 bp, Artificial Sequence
  Description of Artificial Sequence: Synthetic oligonucleotide
  Target: LAMA2; (+) strand; PAM type: NNAGAAW; PAM sequence: AAAGAAA
agagagagagaaagaaagag

SEQ ID NO: 12884 - DNA, 20 bp, Artificial Sequence
  Description of Artificial Sequence: Synthetic oligonucleotide
  Target: LAMA2; (+) strand; PAM type: NNAGAAW; PAM sequence: AAAGAAA
agagagaaagaaagagaaag

SEQ ID NO: 12885 - DNA, 20 bp, Artificial Sequence
  Description of Artificial Sequence: Synthetic oligonucleotide
  Target: LAMA2; (+) strand; PAM type: NNAGAAW; PAM sequence: AAAGAAA
agaaagaaagagaaagaaag

SEQ ID NO: 12886 - DNA, 20 bp, Artificial Sequence
  Description of Artificial Sequence: Synthetic oligonucleotide
  Target: LAMA2; (+) strand; PAM type: NNAGAAW; PAM sequence: AAAGAAA
aaagaaagaaagaaagaacg

SEQ ID NO: 12887 - DNA, 20 bp, Artificial Sequence
  Description of Artificial Sequence: Synthetic oligonucleotide
  Target: LAMA2; (+) strand; PAM type: NNAGAAW; PAM sequence: AAAGAAA
aaagaaagaaagaacgaaag

SEQ ID NO: 12888 - DNA, 20 bp, Artificial Sequence
  Description of Artificial Sequence: Synthetic oligonucleotide
  Target: LAMA2; (+) strand; PAM type: NNAGAAW; PAM sequence: AGAGAAA
cgaaagaaagaaagagagag

SEQ ID NO: 12889 - DNA, 20 bp, Artificial Sequence
  Description of Artificial Sequence: Synthetic oligonucleotide
  Target: LAMA2; (+) strand; PAM type: NNAGAAW; PAM sequence: GAAGAAT
tagagtgaagtaagagaggg

SEQ ID NO: 12890 - DNA, 20 bp, Artificial Sequence
  Description of Artificial Sequence: Synthetic oligonucleotide
  Target: LAMA2; (+) strand; PAM type: NNAGAAW; PAM sequence: GGAGAAT
ctactcgggaggctgaggta

SEQ ID NO: 12891 - DNA, 20 bp, Artificial Sequence
  Description of Artificial Sequence: Synthetic oligonucleotide
  Target: LAMA2; (+) strand; PAM type: NNAGAAW; PAM sequence: AAAGAAA
cagagcgagactctgtctca

SEQ ID NO: 12892 - DNA, 20 bp, Artificial Sequence
  Description of Artificial Sequence: Synthetic oligonucleotide
  Target: LAMA2; (+) strand; PAM type: NNAGAAW; PAM sequence: ATAGAAT
ggtgattttaaggatggatc

SEQ ID NO: 12893 - DNA, 20 bp, Artificial Sequence
  Description of Artificial Sequence: Synthetic oligonucleotide
  Target: LAMA2; (+) strand; PAM type: NNAGAAW; PAM sequence: GGAGAAA
caaggagaaggtgatggata

SEQ ID NO: 12894 - DNA, 20 bp, Artificial Sequence
  Description of Artificial Sequence: Synthetic oligonucleotide
  Target: LAMA2; (+) strand; PAM type: NNAGAAW; PAM sequence: CCAGAAA
gtaggaaggaagatggcgaa

SEQ ID NO: 12895 - DNA, 20 bp, Artificial Sequence
  Description of Artificial Sequence: Synthetic oligonucleotide
  Target: LAMA2; (+) strand; PAM type: NNAGAAW; PAM sequence: AGAGAAA
tgagggatgtggattttcag

SEQ ID NO: 12896 - DNA, 20 bp, Artificial Sequence
  Description of Artificial Sequence: Synthetic oligonucleotide
  Target: LAMA2; (+) strand; PAM type: NNAGAAW; PAM sequence: AGAGAAA
atgtggattttcagagagaa

SEQ ID NO: 12897 - DNA, 20 bp, Artificial Sequence
  Description of Artificial Sequence: Synthetic oligonucleotide
  Target: LAMA2; (+) strand; PAM type: NNAGAAW; PAM sequence: ATAGAAT
ctctagatcttgaaggtctt

SEQ ID NO: 12898 - DNA, 20 bp, Artificial Sequence
  Description of Artificial Sequence: Synthetic oligonucleotide
  Target: LAMA2; (+) strand; PAM type: NNAGAAW; PAM sequence: AAAGAAA
gggagttccctttccgagtc

SEQ ID NO: 12899 - DNA, 20 bp, Artificial Sequence
  Description of Artificial Sequence: Synthetic oligonucleotide
  Target: LAMA2; (+) strand; PAM type: NNAGAAW; PAM sequence: TAAGAAA
ttgcgcttttcagaccggct

SEQ ID NO: 12900 - DNA, 20 bp, Artificial Sequence
  Description of Artificial Sequence: Synthetic oligonucleotide
  Target: LAMA2; (+) strand; PAM type: NNAGAAW; PAM sequence: TGAGAAT
ccagtacgcagctggagatc

SEQ ID NO: 12901 - DNA, 20 bp, Artificial Sequence
  Description of Artificial Sequence: Synthetic oligonucleotide
  Target: LAMA2; (+) strand; PAM type: NNAGAAW; PAM sequence: CCAGAAA
gttagaaggaaaactaacaa

SEQ ID NO: 12902 - DNA, 20 bp, Artificial Sequence
  Description of Artificial Sequence: Synthetic oligonucleotide
  Target: LAMA2; (+) strand; PAM type: NNAGAAW; PAM sequence: ACAGAAA
aaagatggggaaaaaacaga

SEQ ID NO: 12903 - DNA, 20 bp, Artificial Sequence
  Description of Artificial Sequence: Synthetic oligonucleotide
  Target: LAMA2; (+) strand; PAM type: NNAGAAW; PAM sequence: GGAGAAT
gcaacagaacaaagctggat

SEQ ID NO: 12904 - DNA, 20 bp, Artificial Sequence
  Description of Artificial Sequence: Synthetic oligonucleotide
  Target: LAMA2; (+) strand; PAM type: NNAGAAW; PAM sequence: GAAGAAT
aaaactttgaaaaaaattta

SEQ ID NO: 12905 - DNA, 20 bp, Artificial Sequence
  Description of Artificial Sequence: Synthetic oligonucleotide
  Target: LAMA2; (+) strand; PAM type: NNAGAAW; PAM sequence: CTAGAAT
aaatttagaagaatgtataa

SEQ ID NO: 12906 - DNA, 20 bp, Artificial Sequence
  Description of Artificial Sequence: Synthetic oligonucleotide
  Target: LAMA2; (+) strand; PAM type: NNAGAAW; PAM sequence: GAAGAAT
ccaaggctcgagaactacgt

SEQ ID NO: 12907 - DNA, 20 bp, Artificial Sequence
  Description of Artificial Sequence: Synthetic oligonucleotide
  Target: LAMA2; (+) strand; PAM type: NNAGAAW; PAM sequence: GAAGAAA
ggagccgatgcgatcaactg

SEQ ID NO: 12908 - DNA, 20 bp, Artificial Sequence
  Description of Artificial Sequence: Synthetic oligonucleotide
  Target: LAMA2; (+) strand; PAM type: NNAGAAW; PAM sequence: AGAGAAA
tgaagcgagaagggaagttt

SEQ ID NO: 12909 - DNA, 20 bp, Artificial Sequence
  Description of Artificial Sequence: Synthetic oligonucleotide
  Target: LAMA2; (+) strand; PAM type: NNAGAAW; PAM sequence: AAAGAAT
agaagggaagtttagagaaa

SEQ ID NO: 12910 - DNA, 20 bp, Artificial Sequence
  Description of Artificial Sequence: Synthetic oligonucleotide
  Target: LAMA2; (+) strand; PAM type: NNAGAAW; PAM sequence: AAAGAAA
gtttagagaaaaaagaataa

SEQ ID NO: 12911 - DNA, 20 bp, Artificial Sequence
  Description of Artificial Sequence: Synthetic oligonucleotide
  Target: LAMA2; (+) strand; PAM type: NNAGAAW; PAM sequence: CAAGAAA
aaagaaatgagcaaagcctc

SEQ ID NO: 12912 - DNA, 20 bp, Artificial Sequence
  Description of Artificial Sequence: Synthetic oligonucleotide
  Target: LAMA2; (+) strand; PAM type: NNAGAAW; PAM sequence: GGAGAAT
ggtgtacctgaaagtgatgt

SEQ ID NO: 12913 - DNA, 20 bp, Artificial Sequence
  Description of Artificial Sequence: Synthetic oligonucleotide
  Target: LAMA2; (+) strand; PAM type: NNAGAAW; PAM sequence: AGAGAAA
aaaatgttaagggcagccag

SEQ ID NO: 12914 - DNA, 20 bp, Artificial Sequence
  Description of Artificial Sequence: Synthetic oligonucleotide
  Target: LAMA2; (+) strand; PAM type: NNAGAAW; PAM sequence: GCAGAAA
gactaacagcggatctctcg

SEQ ID NO: 12915 - DNA, 20 bp, Artificial Sequence
  Description of Artificial Sequence: Synthetic oligonucleotide
  Target: LAMA2; (+) strand; PAM type: NNAGAAW; PAM sequence: AAAGAAA
ggccaatattcaacattctt

SEQ ID NO: 12916 - DNA, 20 bp, Artificial Sequence
  Description of Artificial Sequence: Synthetic oligonucleotide
  Target: LAMA2; (+) strand; PAM type: NNAGAAW; PAM sequence: AAAGAAT
atattcaacattcttaaaga

SEQ ID NO: 12917 - DNA, 20 bp, Artificial Sequence
  Description of Artificial Sequence: Synthetic oligonucleotide
  Target: LAMA2; (+) strand; PAM type: NNAGAAW; PAM sequence: CCAGAAT
taaagaaaagaattttcaac

SEQ ID NO: 12918 - DNA, 20 bp, Artificial Sequence
  Description of Artificial Sequence: Synthetic oligonucleotide
  Target: LAMA2; (+) strand; PAM type: NNAGAAW; PAM sequence: GGAGAAA
aactaagcttcataagtgaa

SEQ ID NO: 12919 - DNA, 20 bp, Artificial Sequence
  Description of Artificial Sequence: Synthetic oligonucleotide
  Target: LAMA2; (+) strand; PAM type: NNAGAAW; PAM sequence: GAAGAAA
gtaaagaccatcgagactag

SEQ ID NO: 12920 - DNA, 20 bp, Artificial Sequence
  Description of Artificial Sequence: Synthetic oligonucleotide
  Target: LAMA2; (+) strand; PAM type: NNAGAAW; PAM sequence: ACAGAAA
acattagacagatcaacgag

SEQ ID NO: 12921 - DNA, 20 bp, Artificial Sequence
  Description of Artificial Sequence: Synthetic oligonucleotide
  Target: LAMA2; (+) strand; PAM type: NNAGAAW; PAM sequence: ACAGAAT
gaactctccaccccaaatca

SEQ ID NO: 12922 - DNA, 20 bp, Artificial Sequence
  Description of Artificial Sequence: Synthetic oligonucleotide
  Target: LAMA2; (+) strand; PAM type: NNAGAAW; PAM sequence: ACAGAAA
tcctcagcaaatgtaaaaga

SEQ ID NO: 12923 - DNA, 20 bp, Artificial Sequence
  Description of Artificial Sequence: Synthetic oligonucleotide
  Target: LAMA2; (+) strand; PAM type: NNAGAAW; PAM sequence: TAAGAAT
atcaaactagaactcaggat

SEQ ID NO: 12924 - DNA, 20 bp, Artificial Sequence
  Description of Artificial Sequence: Synthetic oligonucleotide
  Target: LAMA2; (+) strand; PAM type: NNAGAAW; PAM sequence: GCAGAAA
gggtacataacgaaatgaag

SEQ ID NO: 12925 - DNA, 20 bp, Artificial Sequence
  Description of Artificial Sequence: Synthetic oligonucleotide
  Target: LAMA2; (+) strand; PAM type: NNAGAAW; PAM sequence: CCAGAAT
gagaacaaagacaccacata

SEQ ID NO: 12926 - DNA, 20 bp, Artificial Sequence
  Description of Artificial Sequence: Synthetic oligonucleotide
  Target: LAMA2; (+) strand; PAM type: NNAGAAW; PAM sequence: AGAGAAA
tatagcactaaatgcctaca

SEQ ID NO: 12927 - DNA, 20 bp, Artificial Sequence
  Description of Artificial Sequence: Synthetic oligonucleotide
  Target: LAMA2; (+) strand; PAM type: NNAGAAW; PAM sequence: CTAGAAA
taacatcacaattaaaagaa

SEQ ID NO: 12928 - DNA, 20 bp, Artificial Sequence
  Description of Artificial Sequence: Synthetic oligonucleotide
  Target: LAMA2; (+) strand; PAM type: NNAGAAW; PAM sequence: CAAGAAA
attcaaaagctagcagaagg

SEQ ID NO: 12929 - DNA, 20 bp, Artificial Sequence
  Description of Artificial Sequence: Synthetic oligonucleotide
  Target: LAMA2; (+) strand; PAM type: NNAGAAW; PAM sequence: AAAGAAA
agaccgctagcaagactaat

SEQ ID NO: 12930 - DNA, 20 bp, Artificial Sequence
  Description of Artificial Sequence: Synthetic oligonucleotide
  Target: LAMA2; (+) strand; PAM type: NNAGAAW; PAM sequence: GAAGAAT
ctaataaagaaaaaaagaga

SEQ ID NO: 12931 - DNA, 20 bp, Artificial Sequence
  Description of Artificial Sequence: Synthetic oligonucleotide
  Target: LAMA2; (+) strand; PAM type: NNAGAAW; PAM sequence: ACAGAAA
gggatatcaccaccgatccc

SEQ ID NO: 12932 - DNA, 20 bp, Artificial Sequence
  Description of Artificial Sequence: Synthetic oligonucleotide
  Target: LAMA2; (+) strand; PAM type: NNAGAAW; PAM sequence: AGAGAAT
cagaaatacaaactaccatc

SEQ ID NO: 12933 - DNA, 20 bp, Artificial Sequence
  Description of Artificial Sequence: Synthetic oligonucleotide
  Target: LAMA2; (+) strand; PAM type: NNAGAAW; PAM sequence: CTAGAAA
aacacctctacgcaaataaa

SEQ ID NO: 12934 - DNA, 20 bp, Artificial Sequence
  Description of Artificial Sequence: Synthetic oligonucleotide
  Target: LAMA2; (+) strand; PAM type: NNAGAAW; PAM sequence: GAAGAAA
caaataaactagaaaatcta

SEQ ID NO: 12935 - DNA, 20 bp, Artificial Sequence
  Description of Artificial Sequence: Synthetic oligonucleotide
  Target: LAMA2; (+) strand; PAM type: NNAGAAW; PAM sequence: ATAGAAA
ttctgaaactattccaatca

SEQ ID NO: 12936 - DNA, 20 bp, Artificial Sequence
  Description of Artificial Sequence: Synthetic oligonucleotide
  Target: LAMA2; (+) strand; PAM type: NNAGAAW; PAM sequence: AGAGAAT
ggcagagacacaaccaaaaa

SEQ ID NO: 12937 - DNA, 20 bp, Artificial Sequence
  Description of Artificial Sequence: Synthetic oligonucleotide
  Target: LAMA2; (+) strand; PAM type: NNAGAAW; PAM sequence: GCAGAAA
acatgattatctcaatagat

SEQ ID NO: 12938 - DNA, 20 bp, Artificial Sequence
  Description of Artificial Sequence: Synthetic oligonucleotide
  Target: LAMA2; (+) strand; PAM type: NNAGAAW; PAM sequence: CTAGAAA
cagacgacatgattgtttat

SEQ ID NO: 12939 - DNA, 20 bp, Artificial Sequence
  Description of Artificial Sequence: Synthetic oligonucleotide
  Target: LAMA2; (+) strand; PAM type: NNAGAAW; PAM sequence: AGAGAAT
cccattcacaattgcttcaa

SEQ ID NO: 12940 - DNA, 20 bp, Artificial Sequence
  Description of Artificial Sequence: Synthetic oligonucleotide
  Target: LAMA2; (+) strand; PAM type: NNAGAAW; PAM sequence: GAAGAAT
cattccatgctcatgggtag

SEQ ID NO: 12941 - DNA, 20 bp, Artificial Sequence
  Description of Artificial Sequence: Synthetic oligonucleotide
  Target: LAMA2; (+) strand; PAM type: NNAGAAW; PAM sequence: ACAGAAT
agctaccaatgactttcttc

SEQ ID NO: 12942 - DNA, 20 bp, Artificial Sequence
  Description of Artificial Sequence: Synthetic oligonucleotide
  Target: LAMA2; (+) strand; PAM type: NNAGAAW; PAM sequence: TCAGAAA
aatggaacagaacagagccc

SEQ ID NO: 12943 - DNA, 20 bp, Artificial Sequence
  Description of Artificial Sequence: Synthetic oligonucleotide
  Target: LAMA2; (+) strand; PAM type: NNAGAAW; PAM sequence: TGAGAAA
tatctgatctttgacaaacc

SEQ ID NO: 12944 - DNA, 20 bp, Artificial Sequence
  Description of Artificial Sequence: Synthetic oligonucleotide
  Target: LAMA2; (+) strand; PAM type: NNAGAAW; PAM sequence: GTAGAAA
ggaaaactggctagccatat

SEQ ID NO: 12945 - DNA, 20 bp, Artificial Sequence
  Description of Artificial Sequence: Synthetic oligonucleotide
  Target: LAMA2; (+) strand; PAM type: NNAGAAW; PAM sequence: GAAGAAA
ctaaaaccataaaaacccta

SEQ ID NO: 12946 - DNA, 20 bp, Artificial Sequence
  Description of Artificial Sequence: Synthetic oligonucleotide
  Target: LAMA2; (+) strand; PAM type: NNAGAAW; PAM sequence: AAAGAAA
taaagagcttctgcacagca

SEQ ID NO: 12947 - DNA, 20 bp, Artificial Sequence
  Description of Artificial Sequence: Synthetic oligonucleotide
  Target: LAMA2; (+) strand; PAM type: NNAGAAW; PAM sequence: GGAGAAA
aacaggcaacctacaacatg

SEQ ID NO: 12948 - DNA, 20 bp, Artificial Sequence
  Description of Artificial Sequence: Synthetic oligonucleotide
  Target: LAMA2; (+) strand; PAM type: NNAGAAW; PAM sequence: CCAGAAT
atctgacaaagggctaatat

SEQ ID NO: 12949 - DNA, 20 bp, Artificial Sequence
  Description of Artificial Sequence: Synthetic oligonucleotide
  Target: LAMA2; (+) strand; PAM type: NNAGAAW; PAM sequence: CAAGAAA
aatgaactcaaacaaattta

SEQ ID NO: 12950 - DNA, 20 bp, Artificial Sequence
  Description of Artificial Sequence: Synthetic oligonucleotide
  Target: LAMA2; (+) strand; PAM type: NNAGAAW; PAM sequence: GAAGAAA
tatgcagccaaaaaacacat

SEQ ID NO: 12951 - DNA, 20 bp, Artificial Sequence
  Description of Artificial Sequence: Synthetic oligonucleotide
  Target: LAMA2; (+) strand; PAM type: NNAGAAW; PAM sequence: AGAGAAA
gctcatcatcactggccatc

SEQ ID NO: 12952 - DNA, 20 bp, Artificial Sequence
  Description of Artificial Sequence: Synthetic oligonucleotide
  Target: LAMA2; (+) strand; PAM type: NNAGAAW; PAM sequence: TTAGAAT
gagatatcatctcacaccag

SEQ ID NO: 12953 - DNA, 20 bp, Artificial Sequence
  Description of Artificial Sequence: Synthetic oligonucleotide
  Target: LAMA2; (+) strand; PAM type: NNAGAAW; PAM sequence: GGAGAAA
acaggtgctggagaggatgt

SEQ ID NO: 12954 - DNA, 20 bp, Artificial Sequence
  Description of Artificial Sequence: Synthetic oligonucleotide
  Target: LAMA2; (+) strand; PAM type: NNAGAAW; PAM sequence: CTAGAAA
gattcctcagggatctagaa

SEQ ID NO: 12955 - DNA, 20 bp, Artificial Sequence
  Description of Artificial Sequence: Synthetic oligonucleotide
  Target: LAMA2; (+) strand; PAM type: NNAGAAW; PAM sequence: TAAGAAA
ccaacaatgatagactggat

SEQ ID NO: 12956 - DNA, 20 bp, Artificial Sequence
  Description of Artificial Sequence: Synthetic oligonucleotide
  Target: LAMA2; (+) strand; PAM type: NNAGAAW; PAM sequence: TAAGAAT
tttgactttagtttgcaaat

SEQ ID NO: 12957 - DNA, 20 bp, Artificial Sequence
  Description of Artificial Sequence: Synthetic oligonucleotide
  Target: LAMA2; (+) strand; PAM type: NNAGAAW; PAM sequence: AAAGAAA
ttttcagacattcattctgg

SEQ ID NO: 12958 - DNA, 20 bp, Artificial Sequence
  Description of Artificial Sequence: Synthetic oligonucleotide
  Target: LAMA2; (+) strand; PAM type: NNAGAAW; PAM sequence: AAAGAAA
ggaaagaaaaaacatgctgg

SEQ ID NO: 12959 - DNA, 20 bp, Artificial Sequence
  Description of Artificial Sequence: Synthetic oligonucleotide
  Target: LAMA2; (+) strand; PAM type: NNAGAAW; PAM sequence: GGAGAAA
tatgcatatctctttttata

SEQ ID NO: 12960 - DNA, 20 bp, Artificial Sequence
  Description of Artificial Sequence: Synthetic oligonucleotide
  Target: LAMA2; (+) strand; PAM type: NNAGAAW; PAM sequence: CTAGAAA
gaccactctaatatctcacc

SEQ ID NO: 12961 - DNA, 20 bp, Artificial Sequence
  Description of Artificial Sequence: Synthetic oligonucleotide
  Target: LAMA2; (+) strand; PAM type: NNAGAAW; PAM sequence: AAAGAAA
ttttattataaaataatatc

SEQ ID NO: 12962 - DNA, 20 bp, Artificial Sequence
  Description of Artificial Sequence: Synthetic oligonucleotide
  Target: LAMA2; (+) strand; PAM type: NNAGAAW; PAM sequence: CAAGAAA
tatttttcgctaaacaacaa

SEQ ID NO: 12963 - DNA, 20 bp, Artificial Sequence
  Description of Artificial Sequence: Synthetic oligonucleotide
  Target: LAMA2; (+) strand; PAM type: NNAGAAW; PAM sequence: TAAGAAA
atcacaggctaggatcagct

SEQ ID NO: 12964 - DNA, 20 bp, Artificial Sequence
  Description of Artificial Sequence: Synthetic oligonucleotide
  Target: LAMA2; (+) strand; PAM type: NNAGAAW; PAM sequence: CAAGAAA
gtgccaatagattgttttag

SEQ ID NO: 12965 - DNA, 20 bp, Artificial Sequence
  Description of Artificial Sequence: Synthetic oligonucleotide
  Target: LAMA2; (+) strand; PAM type: NNAGAAW; PAM sequence: GGAGAAT
ttgccttgatcttagaggct

SEQ ID NO: 12966 - DNA, 20 bp, Artificial Sequence
  Description of Artificial Sequence: Synthetic oligonucleotide
  Target: LAMA2; (+) strand; PAM type: NNAGAAW; PAM sequence: TCAGAAT
tttacagccactgccttcat

SEQ ID NO: 12967 - DNA, 20 bp, Artificial Sequence
  Description of Artificial Sequence: Synthetic oligonucleotide
  Target: LAMA2; (+) strand; PAM type: NNAGAAW; PAM sequence: TAAGAAT
ggtaacatgtcctcaccttt

SEQ ID NO: 12968 - DNA, 20 bp, Artificial Sequence
  Description of Artificial Sequence: Synthetic oligonucleotide
  Target: LAMA2; (+) strand; PAM type: NNAGAAW; PAM sequence: TCAGAAA
attttctgatgaaggaatag

SEQ ID NO: 12969 - DNA, 20 bp, Artificial Sequence
  Description of Artificial Sequence: Synthetic oligonucleotide
  Target: LAMA2; (+) strand; PAM type: NNAGAAW; PAM sequence: AAAGAAA
tttagtagctgtacaatttg

SEQ ID NO: 12970 - DNA, 20 bp, Artificial Sequence
  Description of Artificial Sequence: Synthetic oligonucleotide
  Target: LAMA2; (+) strand; PAM type: NNAGAAW; PAM sequence: GCAGAAA
taatctttgtgccaaacctt

SEQ ID NO: 12971 - DNA, 20 bp, Artificial Sequence
  Description of Artificial Sequence: Synthetic oligonucleotide
  Target: LAMA2; (+) strand; PAM type: NNAGAAW; PAM sequence: AGAGAAA
gacccacatgctattataca

SEQ ID NO: 12972 - DNA, 20 bp, Artificial Sequence
  Description of Artificial Sequence: Synthetic oligonucleotide
  Target: LAMA2; (+) strand; PAM type: NNAGAAW; PAM sequence: CAAGAAT
tgttaaccaaaattaatgtt

SEQ ID NO: 12973 - DNA, 20 bp, Artificial Sequence
  Description of Artificial Sequence: Synthetic oligonucleotide
  Target: LAMA2; (+) strand; PAM type: NNAGAAW; PAM sequence: CCAGAAA
tctctacctctttaaatatt

SEQ ID NO: 12974 - DNA, 20 bp, Artificial Sequence
  Description of Artificial Sequence: Synthetic oligonucleotide
  Target: LAMA2; (+) strand; PAM type: NNAGAAW; PAM sequence: ATAGAAT
gacgagagattactttttgg

SEQ ID NO: 12975 - DNA, 20 bp, Artificial Sequence
  Description of Artificial Sequence: Synthetic oligonucleotide
  Target: LAMA2; (+) strand; PAM type: NNAGAAW; PAM sequence: ATAGAAA
tgcataattcaaagacccag

SEQ ID NO: 12976 - DNA, 20 bp, Artificial Sequence
  Description of Artificial Sequence: Synthetic oligonucleotide
  Target: LAMA2; (+) strand; PAM type: NNAGAAW; PAM sequence: AGAGAAT
aaaacaaaagctcttctaca

SEQ ID NO: 12977 - DNA, 20 bp, Artificial Sequence
  Description of Artificial Sequence: Synthetic oligonucleotide
  Target: LAMA2; (+) strand; PAM type: NNAGAAW; PAM sequence: GTAGAAA
taaaatacttaagccatctt

SEQ ID NO: 12978 - DNA, 20 bp, Artificial Sequence
  Description of Artificial Sequence: Synthetic oligonucleotide
  Target: LAMA2; (+) strand; PAM type: NNAGAAW; PAM sequence: ATAGAAA
gccaaaaatccattgtgaaa

SEQ ID NO: 12979 - DNA, 20 bp, Artificial Sequence
  Description of Artificial Sequence: Synthetic oligonucleotide
  Target: LAMA2; (+) strand; PAM type: NNAGAAW; PAM sequence: TTAGAAA
atccattgtgaaaatagaaa

SEQ ID NO: 12980 - DNA, 20 bp, Artificial Sequence
  Description of Artificial Sequence: Synthetic oligonucleotide
  Target: LAMA2; (+) strand; PAM type: NNAGAAW; PAM sequence: TAAGAAA
gaaatgatctttcaaaaaat

SEQ ID NO: 12981 - DNA, 20 bp, Artificial Sequence
  Description of Artificial Sequence: Synthetic oligonucleotide
  Target: LAMA2; (+) strand; PAM type: NNAGAAW; PAM sequence: CCAGAAT
tgttaattctacctggtgaa

SEQ ID NO: 12982 - DNA, 20 bp, Artificial Sequence
  Description of Artificial Sequence: Synthetic oligonucleotide
  Target: LAMA2; (+) strand; PAM type: NNAGAAW; PAM sequence: CCAGAAA
gaaaagaagaccatcttctc

SEQ ID NO: 12983 - DNA, 20 bp, Artificial Sequence
  Description of Artificial Sequence: Synthetic oligonucleotide
  Target: LAMA2; (+) strand; PAM type: NNAGAAW; PAM sequence: TTAGAAT
agaggatacagctctgatca

SEQ ID NO: 12984 - DNA, 20 bp, Artificial Sequence
  Description of Artificial Sequence: Synthetic oligonucleotide
  Target: LAMA2; (+) strand; PAM type: NNAGAAW; PAM sequence: CTAGAAA
ggaaatcaattttcactaat

SEQ ID NO: 12985 - DNA, 20 bp, Artificial Sequence
  Description of Artificial Sequence: Synthetic oligonucleotide
  Target: LAMA2; (+) strand; PAM type: NNAGAAW; PAM sequence: AGAGAAA
tctagaaaattctctcctca

SEQ ID NO: 12986 - DNA, 20 bp, Artificial Sequence
  Description of Artificial Sequence: Synthetic oligonucleotide
  Target: LAMA2; (+) strand; PAM type: NNAGAAW; PAM sequence: ATAGAAT
ttgactttacccttcctggt

SEQ ID NO: 12987 - DNA, 20 bp, Artificial Sequence
  Description of Artificial Sequence: Synthetic oligonucleotide
  Target: LAMA2; (+) strand; PAM type: NNAGAAW; PAM sequence: TGAGAAA
tatagaatggcatttcacat

SEQ ID NO: 12988 - DNA, 20 bp, Artificial Sequence
  Description of Artificial Sequence: Synthetic oligonucleotide
  Target: LAMA2; (+) strand; PAM type: NNAGAAW; PAM sequence: GAAGAAT
aaaaactagggagaagcact

SEQ ID NO: 12989 - DNA, 20 bp, Artificial Sequence
  Description of Artificial Sequence: Synthetic oligonucleotide
  Target: LAMA2; (+) strand; PAM type: NNAGAAW; PAM sequence: AGAGAAA
agaattaatgggcagtgggg

SEQ ID NO: 12990 - DNA, 20 bp, Artificial Sequence
  Description of Artificial Sequence: Synthetic oligonucleotide
  Target: LAMA2; (+) strand; PAM type: NNAGAAW; PAM sequence: GGAGAAT
ttaatcccatttatccatgt

SEQ ID NO: 12991 - DNA, 20 bp, Artificial Sequence
  Description of Artificial Sequence: Synthetic oligonucleotide
  Target: LAMA2; (+) strand; PAM type: NNAGAAW; PAM sequence: TAAGAAA
gctctttgggtaacagtgga

SEQ ID NO: 12992 - DNA, 20 bp, Artificial Sequence
  Description of Artificial Sequence: Synthetic oligonucleotide
  Target: LAMA2; (+) strand; PAM type: NNAGAAW; PAM sequence: GGAGAAA
gctacacaagctccttatgt

SEQ ID NO: 12993 - DNA, 20 bp, Artificial Sequence
  Description of Artificial Sequence: Synthetic oligonucleotide
  Target: LAMA2; (+) strand; PAM type: NNAGAAW; PAM sequence: AAAGAAA
gcttagcctcaagactgagc

SEQ ID NO: 12994 - DNA, 20 bp, Artificial Sequence
  Description of Artificial Sequence: Synthetic oligonucleotide
  Target: LAMA2; (+) strand; PAM type: NNAGAAW; PAM sequence: GTAGAAT
gggatggagataaagggtag

SEQ ID NO: 12995 - DNA, 20 bp, Artificial Sequence
  Description of Artificial Sequence: Synthetic oligonucleotide
  Target: LAMA2; (+) strand; PAM type: NNAGAAW; PAM sequence: AAAGAAA
ggggtttaatgttgttaaat

SEQ ID NO: 12996 - DNA, 20 bp, Artificial Sequence
  Description of Artificial Sequence: Synthetic oligonucleotide
  Target: LAMA2; (+) strand; PAM type: NNAGAAW; PAM sequence: AGAGAAA
aataaagaaaatgtattaaa

SEQ ID NO: 12997 - DNA, 20 bp, Artificial Sequence
  Description of Artificial Sequence: Synthetic oligonucleotide
  Target: LAMA2; (+) strand; PAM type: NNAGAAW; PAM sequence: GCAGAAA
tatgcttctcttatttttct

SEQ ID NO: 12998 - DNA, 20 bp, Artificial Sequence
  Description of Artificial Sequence: Synthetic oligonucleotide
  Target: LAMA2; (+) strand; PAM type: NNAGAAW; PAM sequence: ATAGAAT
tacttacctgaattttaaaa

SEQ ID NO: 12999 - DNA, 20 bp, Artificial Sequence
  Description of Artificial Sequence: Synthetic oligonucleotide
  Target: LAMA2; (+) strand; PAM type: NNAGAAW; PAM sequence: TTAGAAT
tatacatttattttggatat

SEQ ID NO: 13000 - DNA, 20 bp, Artificial Sequence
  Description of Artificial Sequence: Synthetic oligonucleotide
  Target: LAMA2; (+) strand; PAM type: NNAGAAW; PAM sequence: CAAGAAT
aaagtttgctcactgaagga

SEQ ID NO: 13001 - DNA, 20 bp, Artificial Sequence
  Description of Artificial Sequence: Synthetic oligonucleotide
  Target: LAMA2; (+) strand; PAM type: NNAGAAW; PAM sequence: AAAGAAT
tcttcaaggtgatagttcat

SEQ ID NO: 13002 - DNA, 20 bp, Artificial Sequence
  Description of Artificial Sequence: Synthetic oligonucleotide
  Target: LAMA2; (+) strand; PAM type: NNAGAAW; PAM sequence: AGAGAAA
aactaatttaaggacaaaga

SEQ ID NO: 13003 - DNA, 20 bp, Artificial Sequence
  Description of Artificial Sequence: Synthetic oligonucleotide
  Target: LAMA2; (+) strand; PAM type: NNAGAAW; PAM sequence: GGAGAAT
ctactcgggaggctgaggca

SEQ ID NO: 13004 - DNA, 20 bp, Artificial Sequence
  Description of Artificial Sequence: Synthetic oligonucleotide
  Target: LAMA2; (+) strand; PAM type: NNAGAAW; PAM sequence: ATAGAAT
aaaaaattttttttgaataa

SEQ ID NO: 13005 - DNA, 20 bp, Artificial Sequence
  Description of Artificial Sequence: Synthetic oligonucleotide
  Target: LAMA2; (+) strand; PAM type: NNAGAAW; PAM sequence: AAAGAAA
tggtcaaggaaaacccacta

SEQ ID NO: 13006 - DNA, 20 bp, Artificial Sequence
  Description of Artificial Sequence: Synthetic oligonucleotide
  Target: LAMA2; (+) strand; PAM type: NNAGAAW; PAM sequence: AGAGAAA
gagcatagaaggtgtgggtt

SEQ ID NO: 13007 - DNA, 20 bp, Artificial Sequence
  Description of Artificial Sequence: Synthetic oligonucleotide
  Target: LAMA2; (+) strand; PAM type: NNAGAAW; PAM sequence: TTAGAAA
agaaatccaatgtctctatt

SEQ ID NO: 13008 - DNA, 20 bp, Artificial Sequence
  Description of Artificial Sequence: Synthetic oligonucleotide
  Target: LAMA2; (+) strand; PAM type: NNAGAAW; PAM sequence: AAAGAAA
atccaatgtctctattttag

SEQ ID NO: 13009 - DNA, 20 bp, Artificial Sequence
  Description of Artificial Sequence: Synthetic oligonucleotide
  Target: LAMA2; (+) strand; PAM type: NNAGAAW; PAM sequence: TTAGAAA
cagctttcttctcacatatt

SEQ ID NO: 13010 - DNA, 20 bp, Artificial Sequence
  Description of Artificial Sequence: Synthetic oligonucleotide
  Target: LAMA2; (+) strand; PAM type: NNAGAAW; PAM sequence: AGAGAAT
tatagagccagttctcatat

SEQ ID NO: 13011 - DNA, 20 bp, Artificial Sequence
  Description of Artificial Sequence: Synthetic oligonucleotide
  Target: LAMA2; (+) strand; PAM type: NNAGAAW; PAM sequence: TGAGAAT
tagagaatttattctctata

SEQ ID NO: 13012 - DNA, 20 bp, Artificial Sequence
  Description of Artificial Sequence: Synthetic oligonucleotide
  Target: LAMA2; (+) strand; PAM type: NNAGAAW; PAM sequence: AGAGAAT
tttattctctatatgagaat

SEQ ID NO: 13013 - DNA, 20 bp, Artificial Sequence
  Description of Artificial Sequence: Synthetic oligonucleotide
  Target: LAMA2; (+) strand; PAM type: NNAGAAW; PAM sequence: CAAGAAA
aatagagaataaatttggtg

SEQ ID NO: 13014 - DNA, 20 bp, Artificial Sequence
  Description of Artificial Sequence: Synthetic oligonucleotide
  Target: LAMA2; (+) strand; PAM type: NNAGAAW; PAM sequence: GGAGAAA
tctgggtagtaaaggaaaga

SEQ ID NO: 13015 - DNA, 20 bp, Artificial Sequence
  Description of Artificial Sequence: Synthetic oligonucleotide
  Target: LAMA2; (+) strand; PAM type: NNAGAAW; PAM sequence: GAAGAAA
ttcatggagggaaggccaga

SEQ ID NO: 13016 - DNA, 20 bp, Artificial Sequence
  Description of Artificial Sequence: Synthetic oligonucleotide
  Target: LAMA2; (+) strand; PAM type: NNAGAAW; PAM sequence: CCAGAAA
acacaagtatttgttgagta

SEQ ID NO: 13017 - DNA, 20 bp, Artificial Sequence
  Description of Artificial Sequence: Synthetic oligonucleotide
  Target: LAMA2; (+) strand; PAM type: NNAGAAW; PAM sequence: GAAGAAA
cattttctgtgtacaaagca

SEQ ID NO: 13018 - DNA, 20 bp, Artificial Sequence
  Description of Artificial Sequence: Synthetic oligonucleotide
  Target: LAMA2; (+) strand; PAM type: NNAGAAW; PAM sequence: AAAGAAA
attattaaagagcataatta

SEQ ID NO: 13019 - DNA, 20 bp, Artificial Sequence
  Description of Artificial Sequence: Synthetic oligonucleotide
  Target: LAMA2; (+) strand; PAM type: NNAGAAW; PAM sequence: TAAGAAA
ttagagctttgaaatataac

SEQ ID NO: 13020 - DNA, 20 bp, Artificial Sequence
  Description of Artificial Sequence: Synthetic oligonucleotide
  Target: LAMA2; (+) strand; PAM type: NNAGAAW; PAM sequence: ATAGAAT
aatctattaaaataaattaa

SEQ ID NO: 13021 - DNA, 20 bp, Artificial Sequence
  Description of Artificial Sequence: Synthetic oligonucleotide
  Target: LAMA2; (+) strand; PAM type: NNAGAAW; PAM sequence: TCAGAAT
taatgttttcccatattaac

SEQ ID NO: 13022 - DNA, 20 bp, Artificial Sequence
  Description of Artificial Sequence: Synthetic oligonucleotide
  Target: LAMA2; (+) strand; PAM type: NNAGAAW; PAM sequence: CAAGAAA
atatgatcacggtagaagag

SEQ ID NO: 13023 - DNA, 20 bp, Artificial Sequence
  Description of Artificial Sequence: Synthetic oligonucleotide
  Target: LAMA2; (+) strand; PAM type: NNAGAAW; PAM sequence: CTAGAAT
aactctaaggtactctaaca

SEQ ID NO: 13024 - DNA, 20 bp, Artificial Sequence
  Description of Artificial Sequence: Synthetic oligonucleotide
  Target: LAMA2; (+) strand; PAM type: NNAGAAW; PAM sequence: AAAGAAA
gttactttggtacgaatgtc

SEQ ID NO: 13025 - DNA, 20 bp, Artificial Sequence
  Description of Artificial Sequence: Synthetic oligonucleotide
  Target: LAMA2; (+) strand; PAM type: NNAGAAW; PAM sequence: AAAGAAT
attcctcattgttcctaaac

SEQ ID NO: 13026 - DNA, 20 bp, Artificial Sequence
  Description of Artificial Sequence: Synthetic oligonucleotide
  Target: LAMA2; (+) strand; PAM type: NNAGAAW; PAM sequence: CGAGAAA
tatataaacttgcatccaac

SEQ ID NO: 13027 - DNA, 20 bp, Artificial Sequence
  Description of Artificial Sequence: Synthetic oligonucleotide
  Target: LAMA2; (+) strand; PAM type: NNAGAAW; PAM sequence: TTAGAAA
gaggttctttttcagtttgt

SEQ ID NO: 13028 - DNA, 20 bp, Artificial Sequence
  Description of Artificial Sequence: Synthetic oligonucleotide
  Target: LAMA2; (+) strand; PAM type: NNAGAAW; PAM sequence: AAAGAAA
gcatggcatacaatctttac

SEQ ID NO: 13029 - DNA, 20 bp, Artificial Sequence
  Description of Artificial Sequence: Synthetic oligonucleotide
  Target: LAMA2; (+) strand; PAM type: NNAGAAW; PAM sequence: GCAGAAA
tgttttaactactgagtgct

SEQ ID NO: 13030 - DNA, 20 bp, Artificial Sequence
  Description of Artificial Sequence: Synthetic oligonucleotide
  Target: LAMA2; (+) strand; PAM type: NNAGAAW; PAM sequence: AGAGAAA
aacttgtaagcatatactca

SEQ ID NO: 13031 - DNA, 20 bp, Artificial Sequence
  Description of Artificial Sequence: Synthetic oligonucleotide
  Target: LAMA2; (+) strand; PAM type: NNAGAAW; PAM sequence: CAAGAAT
catgtgtacaaagacatatt

SEQ ID NO: 13032 - DNA, 20 bp, Artificial Sequence
  Description of Artificial Sequence: Synthetic oligonucleotide
  Target: LAMA2; (+) strand; PAM type: NNAGAAW; PAM sequence: AAAGAAA
cttaaacataatcttaagga

SEQ ID NO: 13033 - DNA, 20 bp, Artificial Sequence
  Description of Artificial Sequence: Synthetic oligonucleotide
  Target: LAMA2; (+) strand; PAM type: NNAGAAW; PAM sequence: AGAGAAA
ccaatttttaaaatgttcta

SEQ ID NO: 13034 - DNA, 20 bp, Artificial Sequence
  Description of Artificial Sequence: Synthetic oligonucleotide
  Target: LAMA2; (+) strand; PAM type: NNAGAAW; PAM sequence: AAAGAAA
tttttaaaatgttctaagag

SEQ ID NO: 13035 - DNA, 20 bp, Artificial Sequence
  Description of Artificial Sequence: Synthetic oligonucleotide
  Target: LAMA2; (+) strand; PAM type: NNAGAAW; PAM sequence: AAAGAAT
atgcattttatctcacactt

SEQ ID NO: 13036 - DNA, 20 bp, Artificial Sequence
  Description of Artificial Sequence: Synthetic oligonucleotide
  Target: LAMA2; (+) strand; PAM type: NNAGAAW; PAM sequence: TTAGAAA
ttactgatatggcctcctac

SEQ ID NO: 13037 - DNA, 20 bp, Artificial Sequence
  Description of Artificial Sequence: Synthetic oligonucleotide
  Target: LAMA2; (+) strand; PAM type: NNAGAAW; PAM sequence: AGAGAAT
ttcatgggatgcatcatcca

SEQ ID NO: 13038 - DNA, 20 bp, Artificial Sequence
  Description of Artificial Sequence: Synthetic oligonucleotide
  Target: LAMA2; (+) strand; PAM type: NNAGAAW; PAM sequence: TCAGAAA
caatatttaacatcctgaaa

SEQ ID NO: 13039 - DNA, 20 bp, Artificial Sequence
  Description of Artificial Sequence: Synthetic oligonucleotide
  Target: LAMA2; (+) strand; PAM type: NNAGAAW; PAM sequence: GAAGAAT
caaatctagttgccttggaa

SEQ ID NO: 13040 - DNA, 20 bp, Artificial Sequence
  Description of Artificial Sequence: Synthetic oligonucleotide
  Target: LAMA2; (+) strand; PAM type: NNAGAAW; PAM sequence: TTAGAAA
taggaaacaaaagaagtatt

SEQ ID NO: 13041 - DNA, 20 bp, Artificial Sequence
  Description of Artificial Sequence: Synthetic oligonucleotide
  Target: LAMA2; (+) strand; PAM type: NNAGAAW; PAM sequence: GTAGAAA
tatgtagtaactttaaggtg

SEQ ID NO: 13042 - DNA, 20 bp, Artificial Sequence
  Description of Artificial Sequence: Synthetic oligonucleotide
  Target: LAMA2; (+) strand; PAM type: NNAGAAW; PAM sequence: AAAGAAT
aggcaaatcttcacatatga

SEQ ID NO: 13043 - DNA, 20 bp, Artificial Sequence
  Description of Artificial Sequence: Synthetic oligonucleotide
  Target: LAMA2; (+) strand; PAM type: NNAGAAW; PAM sequence: TCAGAAA
atcttcacatatgaaaagaa

SEQ ID NO: 13044 - DNA, 20 bp, Artificial Sequence
  Description of Artificial Sequence: Synthetic oligonucleotide
  Target: LAMA2; (+) strand; PAM type: NNAGAAW; PAM sequence: GAAGAAT
ctcaggtcttaaataaaaag

SEQ ID NO: 13045 - DNA, 20 bp, Artificial Sequence
  Description of Artificial Sequence: Synthetic oligonucleotide
  Target: LAMA2; (+) strand; PAM type: NNAGAAW; PAM sequence: TAAGAAA
acaaaaaagttaaattgtat

SEQ ID NO: 13046 - DNA, 20 bp, Artificial Sequence
  Description of Artificial Sequence: Synthetic oligonucleotide
  Target: LAMA2; (+) strand; PAM type: NNAGAAW; PAM sequence: TTAGAAA
catcaattgacattcctttt

SEQ ID NO: 13047 - DNA, 20 bp, Artificial Sequence
  Description of Artificial Sequence: Synthetic oligonucleotide
  Target: LAMA2; (+) strand; PAM type: NNAGAAW; PAM sequence: TAAGAAA
cacatcctcaaatggcttct

SEQ ID NO: 13048 - DNA, 20 bp, Artificial Sequence
  Description of Artificial Sequence: Synthetic oligonucleotide
  Target: LAMA2; (+) strand; PAM type: NNAGAAW; PAM sequence: GGAGAAT
ctactcaggaggctgaggca

SEQ ID NO: 13049 - DNA, 20 bp, Artificial Sequence
  Description of Artificial Sequence: Synthetic oligonucleotide
  Target: LAMA2; (+) strand; PAM type: NNAGAAW; PAM sequence: AAAGAAA
agagcaagactccatctcaa

SEQ ID NO: 13050 - DNA, 20 bp, Artificial Sequence
  Description of Artificial Sequence: Synthetic oligonucleotide
  Target: LAMA2; (+) strand; PAM type: NNAGAAW; PAM sequence: AAAGAAA
tccatctcaaaaagaaaaaa

SEQ ID NO: 13051 - DNA, 20 bp, Artificial Sequence
  Description of Artificial Sequence: Synthetic oligonucleotide
  Target: LAMA2; (+) strand; PAM type: NNAGAAW; PAM sequence: GTAGAAA
gcaggacgaaaggtgatttg

SEQ ID NO: 13052 - DNA, 20 bp, Artificial Sequence
  Description of Artificial Sequence: Synthetic oligonucleotide
  Target: LAMA2; (+) strand; PAM type: NNAGAAW; PAM sequence: TAAGAAT
ttgccaggcagcattaaatg

SEQ ID NO: 13053 - DNA, 20 bp, Artificial Sequence
  Description of Artificial Sequence: Synthetic oligonucleotide
  Target: LAMA2; (+) strand; PAM type: NNAGAAW; PAM sequence: CCAGAAT
tctgggatcctgtcatttct

SEQ ID NO: 13054 - DNA, 20 bp, Artificial Sequence
  Description of Artificial Sequence: Synthetic oligonucleotide
  Target: LAMA2; (+) strand; PAM type: NNAGAAW; PAM sequence: TGAGAAA
gacagttagacagattaaca

SEQ ID NO: 13055 - DNA, 20 bp, Artificial Sequence
  Description of Artificial Sequence: Synthetic oligonucleotide
  Target: LAMA2; (+) strand; PAM type: NNAGAAW; PAM sequence: AGAGAAA
cttagataagggggaacttc

SEQ ID NO: 13056 - DNA, 20 bp, Artificial Sequence
  Description of Artificial Sequence: Synthetic oligonucleotide
  Target: LAMA2; (+) strand; PAM type: NNAGAAW; PAM sequence: ACAGAAA
tggaagaagtattcccctgt

SEQ ID NO: 13057 - DNA, 20 bp, Artificial Sequence
  Description of Artificial Sequence: Synthetic oligonucleotide
  Target: LAMA2; (+) strand; PAM type: NNAGAAW; PAM sequence: ACAGAAA
atacaaaagttaaaataatt

SEQ ID NO: 13058 - DNA, 20 bp, Artificial Sequence
  Description of Artificial Sequence: Synthetic oligonucleotide
  Target: LAMA2; (+) strand; PAM type: NNAGAAW; PAM sequence: ACAGAAA
agtttatttcttaaactgat

SEQ ID NO: 13059 - DNA, 20 bp, Artificial Sequence
  Description of Artificial Sequence: Synthetic oligonucleotide
  Target: LAMA2; (+) strand; PAM type: NNAGAAW; PAM sequence: TAAGAAT
gtgtagttattttctagcca

SEQ ID NO: 13060 - DNA, 20 bp, Artificial Sequence
  Description of Artificial Sequence: Synthetic oligonucleotide
  Target: LAMA2; (+) strand; PAM type: NNAGAAW; PAM sequence: AGAGAAA
agaattagcagaagctttgg

SEQ ID NO: 13061 - DNA, 20 bp, Artificial Sequence
  Description of Artificial Sequence: Synthetic oligonucleotide
  Target: LAMA2; (+) strand; PAM type: NNAGAAW; PAM sequence: GAAGAAA
gagtagtaaatagccaaagg

SEQ ID NO: 13062 - DNA, 20 bp, Artificial Sequence
  Description of Artificial Sequence: Synthetic oligonucleotide
  Target: LAMA2; (+) strand; PAM type: NNAGAAW; PAM sequence: TCAGAAA
aatagccaaagggaagaaag

SEQ ID NO: 13063 - DNA, 20 bp, Artificial Sequence
  Description of Artificial Sequence: Synthetic oligonucleotide
  Target: LAMA2; (+) strand; PAM type: NNAGAAW; PAM sequence: AAAGAAA
gctacttacctctgtttcca

SEQ ID NO: 13064 - DNA, 20 bp, Artificial Sequence
  Description of Artificial Sequence: Synthetic oligonucleotide
  Target: LAMA2; (+) strand; PAM type: NNAGAAW; PAM sequence: CCAGAAT
tccaaaagaaaaagactcct

SEQ ID NO: 13065 - DNA, 20 bp, Artificial Sequence
  Description of Artificial Sequence: Synthetic oligonucleotide
  Target: LAMA2; (+) strand; PAM type: NNAGAAW; PAM sequence: TTAGAAA
ctccagtgctttaaacaata

SEQ ID NO: 13066 - DNA, 20 bp, Artificial Sequence
  Description of Artificial Sequence: Synthetic oligonucleotide
  Target: LAMA2; (+) strand; PAM type: NNAGAAW; PAM sequence: AAAGAAA
agtgctttaaacaatattag

SEQ ID NO: 13067 - DNA, 20 bp, Artificial Sequence
  Description of Artificial Sequence: Synthetic oligonucleotide
  Target: LAMA2; (+) strand; PAM type: NNAGAAW; PAM sequence: AAAGAAA
taaaatttataagcccaaca

SEQ ID NO: 13068 - DNA, 20 bp, Artificial Sequence
  Description of Artificial Sequence: Synthetic oligonucleotide
  Target: LAMA2; (+) strand; PAM type: NNAGAAW; PAM sequence: AAAGAAA
tttataagcccaacaaaaga

SEQ ID NO: 13069 - DNA, 20 bp, Artificial Sequence
  Description of Artificial Sequence: Synthetic oligonucleotide
  Target: LAMA2; (+) strand; PAM type: NNAGAAW; PAM sequence: GGAGAAA
ttgcttattcatgaaactcg

SEQ ID NO: 13070 - DNA, 20 bp, Artificial Sequence
  Description of Artificial Sequence: Synthetic oligonucleotide
  Target: LAMA2; (+) strand; PAM type: NNAGAAW; PAM sequence: TAAGAAA
tgcaaaattttcttggtgct

SEQ ID NO: 13071 - DNA, 20 bp, Artificial Sequence
  Description of Artificial Sequence: Synthetic oligonucleotide
  Target: LAMA2; (+) strand; PAM type: NNAGAAW; PAM sequence: GCAGAAT
agaggacttctttgcaggag

SEQ ID NO: 13072 - DNA, 20 bp, Artificial Sequence
  Description of Artificial Sequence: Synthetic oligonucleotide
  Target: LAMA2; (+) strand; PAM type: NNAGAAW; PAM sequence: ATAGAAT
ataataactcaacaaaataa

SEQ ID NO: 13073 - DNA, 20 bp, Artificial Sequence
  Description of Artificial Sequence: Synthetic oligonucleotide
  Target: LAMA2; (+) strand; PAM type: NNAGAAW; PAM sequence: TCAGAAA
tgtattaaaagcagcatgac

SEQ ID NO: 13074 - DNA, 20 bp, Artificial Sequence
  Description of Artificial Sequence: Synthetic oligonucleotide
  Target: LAMA2; (+) strand; PAM type: NNAGAAW; PAM sequence: TTAGAAT
atataaaactcaaataaacc

SEQ ID NO: 13075 - DNA, 20 bp, Artificial Sequence
  Description of Artificial Sequence: Synthetic oligonucleotide
  Target: LAMA2; (+) strand; PAM type: NNAGAAW; PAM sequence: AGAGAAT
tatcgagtattgtgttatac

SEQ ID NO: 13076 - DNA, 20 bp, Artificial Sequence
  Description of Artificial Sequence: Synthetic oligonucleotide
  Target: LAMA2; (+) strand; PAM type: NNAGAAW; PAM sequence: GGAGAAT
ttgtgttatacagagaatat

SEQ ID NO: 13077 - DNA, 20 bp, Artificial Sequence
  Description of Artificial Sequence: Synthetic oligonucleotide
  Target: LAMA2; (+) strand; PAM type: NNAGAAW; PAM sequence: AAAGAAT
gcaagaccctatctctgaaa

SEQ ID NO: 13078 - DNA, 20 bp, Artificial Sequence
  Description of Artificial Sequence: Synthetic oligonucleotide
  Target: LAMA2; (+) strand; PAM type: NNAGAAW; PAM sequence: TAAGAAA
gaaaaaagaatcaaaggcct

SEQ ID NO: 13079 - DNA, 20 bp, Artificial Sequence
  Description of Artificial Sequence: Synthetic oligonucleotide
  Target: LAMA2; (+) strand; PAM type: NNAGAAW; PAM sequence: TCAGAAA
agaaatattttatttttacc

SEQ ID NO: 13080 - DNA, 20 bp, Artificial Sequence
  Description of Artificial Sequence: Synthetic oligonucleotide
  Target: LAMA2; (+) strand; PAM type: NNAGAAW; PAM sequence: GTAGAAA
tagtttgggtttcattatgt

SEQ ID NO: 13081 - DNA, 20 bp, Artificial Sequence
  Description of Artificial Sequence: Synthetic oligonucleotide
  Target: LAMA2; (+) strand; PAM type: NNAGAAW; PAM sequence: AAAGAAA
tatacattgttttgcattta

SEQ ID NO: 13082 - DNA, 20 bp, Artificial Sequence
  Description of Artificial Sequence: Synthetic oligonucleotide
  Target: LAMA2; (+) strand; PAM type: NNAGAAW; PAM sequence: TGAGAAT
gatttaaaaaaatagtggcg

SEQ ID NO: 13083 - DNA, 20 bp, Artificial Sequence
  Description of Artificial Sequence: Synthetic oligonucleotide
  Target: LAMA2; (+) strand; PAM type: NNAGAAW; PAM sequence: GGAGAAA
tagctttattagtaggtcaa

SEQ ID NO: 13084 - DNA, 20 bp, Artificial Sequence
  Description of Artificial Sequence: Synthetic oligonucleotide
  Target: LAMA2; (+) strand; PAM type: NNAGAAW; PAM sequence: GTAGAAA
caaggagaaatcatacctaa

SEQ ID NO: 13085 - DNA, 20 bp, Artificial Sequence
  Description of Artificial Sequence: Synthetic oligonucleotide
  Target: LAMA2; (+) strand; PAM type: NNAGAAW; PAM sequence: GGAGAAA
acctaagtagaaaggtccgt

SEQ ID NO: 13086 - DNA, 20 bp, Artificial Sequence
  Description of Artificial Sequence: Synthetic oligonucleotide
  Target: LAMA2; (+) strand; PAM type: NNAGAAW; PAM sequence: CAAGAAA
ctcaatacattatgtagcca

SEQ ID NO: 13087 - DNA, 20 bp, Artificial Sequence
  Description of Artificial Sequence: Synthetic oligonucleotide
  Target: LAMA2; (+) strand; PAM type: NNAGAAW; PAM sequence: ATAGAAT
catatttaatgtgatatgga

SEQ ID NO: 13088 - DNA, 20 bp, Artificial Sequence
  Description of Artificial Sequence: Synthetic oligonucleotide
  Target: LAMA2; (+) strand; PAM type: NNAGAAW; PAM sequence: GCAGAAT
atcaattatctttctgtcat

SEQ ID NO: 13089 - DNA, 20 bp, Artificial Sequence
  Description of Artificial Sequence: Synthetic oligonucleotide
  Target: LAMA2; (+) strand; PAM type: NNAGAAW; PAM sequence: GTAGAAT
atactgtatcagctaaattt

SEQ ID NO: 13090 - DNA, 20 bp, Artificial Sequence
  Description of Artificial Sequence: Synthetic oligonucleotide
  Target: LAMA2; (+) strand; PAM type: NNAGAAW; PAM sequence: TAAGAAT
agttgtgagcagcacagtgg

SEQ ID NO: 13091 - DNA, 20 bp, Artificial Sequence
  Description of Artificial Sequence: Synthetic oligonucleotide
  Target: LAMA2; (+) strand; PAM type: NNAGAAW; PAM sequence: TTAGAAA
tgaatgcagtagctacacat

SEQ ID NO: 13092 - DNA, 20 bp, Artificial Sequence
  Description of Artificial Sequence: Synthetic oligonucleotide
  Target: LAMA2; (+) strand; PAM type: NNAGAAW; PAM sequence: TAAGAAT
acacatttagaaagaagttc

SEQ ID NO: 13093 - DNA, 20 bp, Artificial Sequence
  Description of Artificial Sequence: Synthetic oligonucleotide
  Target: LAMA2; (+) strand; PAM type: NNAGAAW; PAM sequence: GAAGAAA
tacatgtatatgctttgtta

SEQ ID NO: 13094 - DNA, 20 bp, Artificial Sequence
  Description of Artificial Sequence: Synthetic oligonucleotide
  Target: LAMA2; (+) strand; PAM type: NNAGAAW; PAM sequence: AGAGAAT
tatatgctttgttagaagaa

SEQ ID NO: 13095 - DNA, 20 bp, Artificial Sequence
  Description of Artificial Sequence: Synthetic oligonucleotide
  Target: LAMA2; (+) strand; PAM type: NNAGAAW; PAM sequence: ATAGAAT
tcgtggaagacagggcaaat

SEQ ID NO: 13096 - DNA, 20 bp, Artificial Sequence
  Description of Artificial Sequence: Synthetic oligonucleotide
  Target: LAMA2; (+) strand; PAM type: NNAGAAW; PAM sequence: ACAGAAA
gtagtttcaattttaagata

SEQ ID NO: 13097 - DNA, 20 bp, Artificial Sequence
  Description of Artificial Sequence: Synthetic oligonucleotide
  Target: LAMA2; (+) strand; PAM type: NNAGAAW; PAM sequence: AAAGAAA
aactagtattcaatggttaa

SEQ ID NO: 13098 - DNA, 20 bp, Artificial Sequence
  Description of Artificial Sequence: Synthetic oligonucleotide
  Target: LAMA2; (+) strand; PAM type: NNAGAAW; PAM sequence: ATAGAAA
agctagacactgaggaagtt

SEQ ID NO: 13099 - DNA, 20 bp, Artificial Sequence
  Description of Artificial Sequence: Synthetic oligonucleotide
  Target: LAMA2; (+) strand; PAM type: NNAGAAW; PAM sequence: TTAGAAT
ttgctgaatgaatgcgtatg

SEQ ID NO: 13100 - DNA, 20 bp, Artificial Sequence
  Description of Artificial Sequence: Synthetic oligonucleotide
  Target: LAMA2; (+) strand; PAM type: NNAGAAW; PAM sequence: AAAGAAT
ttatgattacatctacagac

SEQ ID NO: 13101 - DNA, 20 bp, Artificial Sequence
  Description of Artificial Sequence: Synthetic oligonucleotide
  Target: LAMA2; (+) strand; PAM type: NNAGAAW; PAM sequence: AAAGAAA
tagattttgagctaatcttg

SEQ ID NO: 13102 - DNA, 20 bp, Artificial Sequence
  Description of Artificial Sequence: Synthetic oligonucleotide
  Target: LAMA2; (+) strand; PAM type: NNAGAAW; PAM sequence: GGAGAAT
aatactaaatttagacttat

SEQ ID NO: 13103 - DNA, 20 bp, Artificial Sequence
  Description of Artificial Sequence: Synthetic oligonucleotide
  Target: LAMA2; (+) strand; PAM type: NNAGAAW; PAM sequence: TGAGAAT
ccagagcatgggattttaat

SEQ ID NO: 13104 - DNA, 20 bp, Artificial Sequence
  Description of Artificial Sequence: Synthetic oligonucleotide
  Target: LAMA2; (+) strand; PAM type: NNAGAAW; PAM sequence: CAAGAAT
agagagattctggagtgaga

SEQ ID NO: 13105 - DNA, 20 bp, Artificial Sequence
  Description of Artificial Sequence: Synthetic oligonucleotide
  Target: LAMA2; (+) strand; PAM type: NNAGAAW; PAM sequence: GTAGAAA
tattataatctttgctttta

SEQ ID NO: 13106 - DNA, 20 bp, Artificial Sequence
  Description of Artificial Sequence: Synthetic oligonucleotide
  Target: LAMA2; (+) strand; PAM type: NNAGAAW; PAM sequence: TAAGAAT
catattttgaaaaacaagga

SEQ ID NO: 13107 - DNA, 20 bp, Artificial Sequence
  Description of Artificial Sequence: Synthetic oligonucleotide
  Target: LAMA2; (+) strand; PAM type: NNAGAAW; PAM sequence: GAAGAAT
agtgtttaaaagctaaaaga

SEQ ID NO: 13108 - DNA, 20 bp, Artificial Sequence
  Description of Artificial Sequence: Synthetic oligonucleotide
  Target: LAMA2; (+) strand; PAM type: NNAGAAW; PAM sequence: TTAGAAA
ataaatattattatgagtgt

SEQ ID NO: 13109 - DNA, 20 bp, Artificial Sequence
  Description of Artificial Sequence: Synthetic oligonucleotide
  Target: LAMA2; (+) strand; PAM type: NNAGAAW; PAM sequence: ATAGAAT
tgttgtagccaagcaaatat

SEQ ID NO: 13110 - DNA, 20 bp, Artificial Sequence
  Description of Artificial Sequence: Synthetic oligonucleotide
  Target: LAMA2; (+) strand; PAM type: NNAGAAW; PAM sequence: TAAGAAA
atcatcaaatttcatatttg

SEQ ID NO: 13111 - DNA, 20 bp, Artificial Sequence
  Description of Artificial Sequence: Synthetic oligonucleotide
  Target: LAMA2; (+) strand; PAM type: NNAGAAW; PAM sequence: GGAGAAA
aaatattattaaaaatacaa

SEQ ID NO: 13112 - DNA, 20 bp, Artificial Sequence
  Description of Artificial Sequence: Synthetic oligonucleotide
  Target: LAMA2; (+) strand; PAM type: NNAGAAW; PAM sequence: TTAGAAA
tacaaggagaaaggaatatg

SEQ ID NO: 13113 - DNA, 20 bp, Artificial Sequence
  Description of Artificial Sequence: Synthetic oligonucleotide
  Target: LAMA2; (+) strand; PAM type: NNAGAAW; PAM sequence: GAAGAAA
tgacgctaaaacaagatgat

SEQ ID NO: 13114 - DNA, 20 bp, Artificial Sequence
  Description of Artificial Sequence: Synthetic oligonucleotide
  Target: LAMA2; (+) strand; PAM type: NNAGAAW; PAM sequence: GGAGAAA
attactctgtgtgcaagtgt

SEQ ID NO: 13115 - DNA, 20 bp, Artificial Sequence
  Description of Artificial Sequence: Synthetic oligonucleotide
  Target: LAMA2; (+) strand; PAM type: NNAGAAW; PAM sequence: TAAGAAT
cttctgtaatattattcaag

SEQ ID NO: 13116 - DNA, 20 bp, Artificial Sequence
  Description of Artificial Sequence: Synthetic oligonucleotide
  Target: LAMA2; (+) strand; PAM type: NNAGAAW; PAM sequence: CTAGAAA
tcaaaacactttttaaatgt

SEQ ID NO: 13117 - DNA, 20 bp, Artificial Sequence
  Description of Artificial Sequence: Synthetic oligonucleotide
  Target: LAMA2; (+) strand; PAM type: NNAGAAW; PAM sequence: TGAGAAA
atttacaatggtatttatcc

SEQ ID NO: 13118 - DNA, 20 bp, Artificial Sequence
  Description of Artificial Sequence: Synthetic oligonucleotide
  Target: LAMA2; (+) strand; PAM type: NNAGAAW; PAM sequence: TTAGAAA
ctgagaaatgctaaaaaaaa

SEQ ID NO: 13119 - DNA, 20 bp, Artificial Sequence
  Description of Artificial Sequence: Synthetic oligonucleotide
  Target: LAMA2; (+) strand; PAM type: NNAGAAW; PAM sequence: CAAGAAA
taaactgcagtaaaagaccc

SEQ ID NO: 13120 - DNA, 20 bp, Artificial Sequence
  Description of Artificial Sequence: Synthetic oligonucleotide
  Target: LAMA2; (+) strand; PAM type: NNAGAAW; PAM sequence: TTAGAAA
ttgcattttgaaagcagttt

SEQ ID NO: 13121 - DNA, 20 bp, Artificial Sequence
  Description of Artificial Sequence: Synthetic oligonucleotide
  Target: LAMA2; (+) strand; PAM type: NNAGAAW; PAM sequence: TCAGAAT
tcccttttgaaacagttgac

SEQ ID NO: 13122 - DNA, 20 bp, Artificial Sequence
  Description of Artificial Sequence: Synthetic oligonucleotide
  Target: LAMA2; (+) strand; PAM type: NNAGAAW; PAM sequence: GTAGAAA
tttaatttaatgtttccaat

SEQ ID NO: 13123 - DNA, 20 bp, Artificial Sequence
  Description of Artificial Sequence: Synthetic oligonucleotide
  Target: LAMA2; (+) strand; PAM type: NNAGAAW; PAM sequence: TTAGAAA
aagaagaactgggactggaa

SEQ ID NO: 13124 - DNA, 20 bp, Artificial Sequence
  Description of Artificial Sequence: Synthetic oligonucleotide
  Target: LAMA2; (+) strand; PAM type: NNAGAAW; PAM sequence: AAAGAAA
aattgtacataacatgtgac

SEQ ID NO: 13125 - DNA, 20 bp, Artificial Sequence
  Description of Artificial Sequence: Synthetic oligonucleotide
  Target: LAMA2; (+) strand; PAM type: NNAGAAW; PAM sequence: ATAGAAT
gaacttagagtttagtggtt

SEQ ID NO: 13126 - DNA, 20 bp, Artificial Sequence
  Description of Artificial Sequence: Synthetic oligonucleotide
  Target: LAMA2; (+) strand; PAM type: NNAGAAW; PAM sequence: AAAGAAT
tatatgtgcttgctaaatga

SEQ ID NO: 13127 - DNA, 20 bp, Artificial Sequence
  Description of Artificial Sequence: Synthetic oligonucleotide
  Target: LAMA2; (+) strand; PAM type: NNAGAAW; PAM sequence: ACAGAAT
tgaaatatttacaagaggaa

SEQ ID NO: 13128 - DNA, 20 bp, Artificial Sequence
  Description of Artificial Sequence: Synthetic oligonucleotide
  Target: LAMA2; (+) strand; PAM type: NNAGAAW; PAM sequence: ATAGAAT
catagatatactaaagctgc

SEQ ID NO: 13129 - DNA, 20 bp, Artificial Sequence
  Description of Artificial Sequence: Synthetic oligonucleotide
  Target: LAMA2; (+) strand; PAM type: NNAGAAW; PAM sequence: ACAGAAT
atttgcttttatagcataaa

SEQ ID NO: 13130 - DNA, 20 bp, Artificial Sequence
  Description of Artificial Sequence: Synthetic oligonucleotide
  Target: LAMA2; (+) strand; PAM type: NNAGAAW; PAM sequence: AGAGAAA
tttgaaagtgataatgcaat

SEQ ID NO: 13131 - DNA, 20 bp, Artificial Sequence
  Description of Artificial Sequence: Synthetic oligonucleotide
  Target: LAMA2; (+) strand; PAM type: NNAGAAW; PAM sequence: AGAGAAT
ccaaaccaacctaatcccat

SEQ ID NO: 13132 - DNA, 20 bp, Artificial Sequence
  Description of Artificial Sequence: Synthetic oligonucleotide
  Target: LAMA2; (+) strand; PAM type: NNAGAAW; PAM sequence: GAAGAAA
tcacgaaaagacacacaaaa

SEQ ID NO: 13133 - DNA, 20 bp, Artificial Sequence
  Description of Artificial Sequence: Synthetic oligonucleotide
  Target: LAMA2; (+) strand; PAM type: NNAGAAW; PAM sequence: TTAGAAA
cagaggacagtggtatgggt

SEQ ID NO: 13134 - DNA, 20 bp, Artificial Sequence
  Description of Artificial Sequence: Synthetic oligonucleotide
  Target: LAMA2; (+) strand; PAM type: NNAGAAW; PAM sequence: AAAGAAA
agtctttttattttctgaca

SEQ ID NO: 13135 - DNA, 20 bp, Artificial Sequence
  Description of Artificial Sequence: Synthetic oligonucleotide
  Target: LAMA2; (+) strand; PAM type: NNAGAAW; PAM sequence: GGAGAAT
tctgatatgaatttcttatt

SEQ ID NO: 13136 - DNA, 20 bp, Artificial Sequence
  Description of Artificial Sequence: Synthetic oligonucleotide
  Target: LAMA2; (+) strand; PAM type: NNAGAAW; PAM sequence: TGAGAAT
tccagccctgtggtaggctc

SEQ ID NO: 13137 - DNA, 20 bp, Artificial Sequence
  Description of Artificial Sequence: Synthetic oligonucleotide
  Target: LAMA2; (+) strand; PAM type: NNAGAAW; PAM sequence: CAAGAAA
accttgtaatcagtgctatg

SEQ ID NO: 13138 - DNA, 20 bp, Artificial Sequence
  Description of Artificial Sequence: Synthetic oligonucleotide
  Target: LAMA2; (+) strand; PAM type: NNAGAAW; PAM sequence: GCAGAAT
tgctatgcaagaaaaataag

SEQ ID NO: 13139 - DNA, 20 bp, Artificial Sequence
  Description of Artificial Sequence: Synthetic oligonucleotide
  Target: LAMA2; (+) strand; PAM type: NNAGAAW; PAM sequence: GAAGAAA
catggaggaaataagacaag

SEQ ID NO: 13140 - DNA, 20 bp, Artificial Sequence
  Description of Artificial Sequence: Synthetic oligonucleotide
  Target: LAMA2; (+) strand; PAM type: NNAGAAW; PAM sequence: CTAGAAT
ggaaaaagcagagctttatt

SEQ ID NO: 13141 - DNA, 20 bp, Artificial Sequence
  Description of Artificial Sequence: Synthetic oligonucleotide
  Target: LAMA2; (+) strand; PAM type: NNAGAAW; PAM sequence: TAAGAAA
acttgatcagatttgaatct

SEQ ID NO: 13142 - DNA, 20 bp, Artificial Sequence
  Description of Artificial Sequence: Synthetic oligonucleotide
  Target: LAMA2; (+) strand; PAM type: NNAGAAW; PAM sequence: AAAGAAA
cattatgtaaaaaaagggct

SEQ ID NO: 13143 - DNA, 20 bp, Artificial Sequence
  Description of Artificial Sequence: Synthetic oligonucleotide
  Target: LAMA2; (+) strand; PAM type: NNAGAAW; PAM sequence: AGAGAAT
actaagatgtgttgagcttg

SEQ ID NO: 13144 - DNA, 20 bp, Artificial Sequence
  Description of Artificial Sequence: Synthetic oligonucleotide
  Target: LAMA2; (+) strand; PAM type: NNAGAAW; PAM sequence: TCAGAAA
ggatatatagctctatactt

SEQ ID NO: 13145 - DNA, 20 bp, Artificial Sequence
  Description of Artificial Sequence: Synthetic oligonucleotide
  Target: LAMA2; (+) strand; PAM type: NNAGAAW; PAM sequence: GAAGAAT
tgggtaagatttggggaaga

SEQ ID NO: 13146 - DNA, 20 bp, Artificial Sequence
  Description of Artificial Sequence: Synthetic oligonucleotide
  Target: LAMA2; (+) strand; PAM type: NNAGAAW; PAM sequence: TAAGAAA
tggggaagagaagaatgaaa

SEQ ID NO: 13147 - DNA, 20 bp, Artificial Sequence
  Description of Artificial Sequence: Synthetic oligonucleotide
  Target: LAMA2; (+) strand; PAM type: NNAGAAW; PAM sequence: AAAGAAA
agttactgataaaaaaaaaa

SEQ ID NO: 13148 - DNA, 20 bp, Artificial Sequence
  Description of Artificial Sequence: Synthetic oligonucleotide
  Target: LAMA2; (+) strand; PAM type: NNAGAAW; PAM sequence: AAAGAAT
ctgataaaaaaaaaaaaaga

SEQ ID NO: 13149 - DNA, 20 bp, Artificial Sequence
  Description of Artificial Sequence: Synthetic oligonucleotide
  Target: LAMA2; (+) strand; PAM type: NNAGAAW; PAM sequence: AGAGAAA
ttttctaagtcttttaagcc

SEQ ID NO: 13150 - DNA, 20 bp, Artificial Sequence
  Description of Artificial Sequence: Synthetic oligonucleotide
  Target: LAMA2; (+) strand; PAM type: NNAGAAW; PAM sequence: TAAGAAA
gtgtgttttatcactagaga

SEQ ID NO: 13151 - DNA, 20 bp, Artificial Sequence
  Description of Artificial Sequence: Synthetic oligonucleotide
  Target: LAMA2; (+) strand; PAM type: NNAGAAW; PAM sequence: GAAGAAA
agtttataggcttgattttg

SEQ ID NO: 13152 - DNA, 20 bp, Artificial Sequence
  Description of Artificial Sequence: Synthetic oligonucleotide
  Target: LAMA2; (+) strand; PAM type: NNAGAAW; PAM sequence: CAAGAAT
aaaatagacttgaagttaga

SEQ ID NO: 13153 - DNA, 20 bp, Artificial Sequence
  Description of Artificial Sequence: Synthetic oligonucleotide
  Target: LAMA2; (+) strand; PAM type: NNAGAAW; PAM sequence: CAAGAAA
tgtagccattagtgttccta

SEQ ID NO: 13154 - DNA, 20 bp, Artificial Sequence
  Description of Artificial Sequence: Synthetic oligonucleotide
  Target: LAMA2; (+) strand; PAM type: NNAGAAW; PAM sequence: CGAGAAT
ttctttacctaggccaatgt

SEQ ID NO: 13155 - DNA, 20 bp, Artificial Sequence
  Description of Artificial Sequence: Synthetic oligonucleotide
  Target: LAMA2; (+) strand; PAM type: NNAGAAW; PAM sequence: TTAGAAT
cccagcgttgatctttttgc

SEQ ID NO: 13156 - DNA, 20 bp, Artificial Sequence
  Description of Artificial Sequence: Synthetic oligonucleotide
  Target: LAMA2; (+) strand; PAM type: NNAGAAW; PAM sequence: TTAGAAT
tttttgtttccatattaatt

SEQ ID NO: 13157 - DNA, 20 bp, Artificial Sequence
  Description of Artificial Sequence: Synthetic oligonucleotide
  Target: LAMA2; (+) strand; PAM type: NNAGAAW; PAM sequence: GAAGAAA
atttctttcctcagtgtttt

SEQ ID NO: 13158 - DNA, 20 bp, Artificial Sequence
  Description of Artificial Sequence: Synthetic oligonucleotide
  Target: LAMA2; (+) strand; PAM type: NNAGAAW; PAM sequence: AGAGAAA
tatttgggtatctactatat

SEQ ID NO: 13159 - DNA, 20 bp, Artificial Sequence
  Description of Artificial Sequence: Synthetic oligonucleotide
  Target: LAMA2; (+) strand; PAM type: NNAGAAW; PAM sequence: AGAGAAA
attttaaaaattaattcaac

SEQ ID NO: 13160 - DNA, 20 bp, Artificial Sequence
  Description of Artificial Sequence: Synthetic oligonucleotide
  Target: LAMA2; (+) strand; PAM type: NNAGAAW; PAM sequence: GAAGAAA
attaaaaaaaaaaagaagaa

SEQ ID NO: 13161 - DNA, 20 bp, Artificial Sequence
  Description of Artificial Sequence: Synthetic oligonucleotide
  Target: LAMA2; (+) strand; PAM type: NNAGAAW; PAM sequence: ATAGAAT
tgaaagtcctataaacagga

SEQ ID NO: 13162 - DNA, 20 bp, Artificial Sequence
  Description of Artificial Sequence: Synthetic oligonucleotide
  Target: LAMA2; (+) strand; PAM type: NNAGAAW; PAM sequence: TTAGAAT
ctagaagctgaaatggaaag

SEQ ID NO: 13163 - DNA, 20 bp, Artificial Sequence
  Description of Artificial Sequence: Synthetic oligonucleotide
  Target: LAMA2; (+) strand; PAM type: NNAGAAW; PAM sequence: ACAGAAA
aggaagacagagagacagag

SEQ ID NO: 13164 - DNA, 20 bp, Artificial Sequence
  Description of Artificial Sequence: Synthetic oligonucleotide
  Target: LAMA2; (+) strand; PAM type: NNAGAAW; PAM sequence: ATAGAAA
attgactgaatggcttttcc

SEQ ID NO: 13165 - DNA, 20 bp, Artificial Sequence
  Description of Artificial Sequence: Synthetic oligonucleotide
  Target: LAMA2; (+) strand; PAM type: NNAGAAW; PAM sequence: CGAGAAA
ataaatgttgagacattttt

SEQ ID NO: 13166 - DNA, 20 bp, Artificial Sequence
  Description of Artificial Sequence: Synthetic oligonucleotide
  Target: LAMA2; (+) strand; PAM type: NNAGAAW; PAM sequence: CAAGAAA
taatatttaagctgataaaa

SEQ ID NO: 13167 - DNA, 20 bp, Artificial Sequence
  Description of Artificial Sequence: Synthetic oligonucleotide
  Target: LAMA2; (+) strand; PAM type: NNAGAAW; PAM sequence: TTAGAAA
aaaatttttgctagactaca

SEQ ID NO: 13168 - DNA, 20 bp, Artificial Sequence
  Description of Artificial Sequence: Synthetic oligonucleotide
  Target: LAMA2; (+) strand; PAM type: NNAGAAW; PAM sequence: ACAGAAT
atggaaattttcactgtgaa

SEQ ID NO: 13169 - DNA, 20 bp, Artificial Sequence
  Description of Artificial Sequence: Synthetic oligonucleotide
  Target: LAMA2; (+) strand; PAM type: NNAGAAW; PAM sequence: ACAGAAT
ccctaggttttgatacctgt

SEQ ID NO: 13170 - DNA, 20 bp, Artificial Sequence
  Description of Artificial Sequence: Synthetic oligonucleotide
  Target: LAMA2; (+) strand; PAM type: NNAGAAW; PAM sequence: GAAGAAA
taactgctatagggtaggga

SEQ ID NO: 13171 - DNA, 20 bp, Artificial Sequence
  Description of Artificial Sequence: Synthetic oligonucleotide
  Target: LAMA2; (+) strand; PAM type: NNAGAAW; PAM sequence: CAAGAAA
tagacacaatgccaattact

SEQ ID NO: 13172 - DNA, 20 bp, Artificial Sequence
  Description of Artificial Sequence: Synthetic oligonucleotide
  Target: LAMA2; (+) strand; PAM type: NNAGAAW; PAM sequence: AAAGAAA
acaatgccaattactcaaga

SEQ ID NO: 13173 - DNA, 20 bp, Artificial Sequence
  Description of Artificial Sequence: Synthetic oligonucleotide
  Target: LAMA2; (+) strand; PAM type: NNAGAAW; PAM sequence: CAAGAAA
gaggatgaatgttggacagc

SEQ ID NO: 13174 - DNA, 20 bp, Artificial Sequence
  Description of Artificial Sequence: Synthetic oligonucleotide
  Target: LAMA2; (+) strand; PAM type: NNAGAAW; PAM sequence: CAAGAAA
ttcatttgccatatttttct

SEQ ID NO: 13175 - DNA, 20 bp, Artificial Sequence
  Description of Artificial Sequence: Synthetic oligonucleotide
  Target: LAMA2; (+) strand; PAM type: NNAGAAW; PAM sequence: CAAGAAA
actaagtaatatacggacac

SEQ ID NO: 13176 - DNA, 20 bp, Artificial Sequence
  Description of Artificial Sequence: Synthetic oligonucleotide
  Target: LAMA2; (+) strand; PAM type: NNAGAAW; PAM sequence: AAAGAAA
agtaatatacggacaccaag

SEQ ID NO: 13177 - DNA, 20 bp, Artificial Sequence
  Description of Artificial Sequence: Synthetic oligonucleotide
  Target: LAMA2; (+) strand; PAM type: NNAGAAW; PAM sequence: ACAGAAA
atacggacaccaagaaagaa

SEQ ID NO: 13178 - DNA, 20 bp, Artificial Sequence
  Description of Artificial Sequence: Synthetic oligonucleotide
  Target: LAMA2; (+) strand; PAM type: NNAGAAW; PAM sequence: TCAGAAA
gaaaattctgtgtggcaaag

SEQ ID NO: 13179 - DNA, 20 bp, Artificial Sequence
  Description of Artificial Sequence: Synthetic oligonucleotide
  Target: LAMA2; (+) strand; PAM type: NNAGAAW; PAM sequence: GTAGAAA
caacagatgagttcagacag

SEQ ID NO: 13180 - DNA, 20 bp, Artificial Sequence
  Description of Artificial Sequence: Synthetic oligonucleotide
  Target: LAMA2; (+) strand; PAM type: NNAGAAW; PAM sequence: AAAGAAA
aactcacaaaagtctttaaa

SEQ ID NO: 13181 - DNA, 20 bp, Artificial Sequence
  Description of Artificial Sequence: Synthetic oligonucleotide
  Target: LAMA2; (+) strand; PAM type: NNAGAAW; PAM sequence: GCAGAAA
aaaaagtaattaaactggaa

SEQ ID NO: 13182 - DNA, 20 bp, Artificial Sequence
  Description of Artificial Sequence: Synthetic oligonucleotide
  Target: LAMA2; (+) strand; PAM type: NNAGAAW; PAM sequence: TTAGAAT
ttaaactggaagcagaaatc

SEQ ID NO: 13183 - DNA, 20 bp, Artificial Sequence
  Description of Artificial Sequence: Synthetic oligonucleotide
  Target: LAMA2; (+) strand; PAM type: NNAGAAW; PAM sequence: CTAGAAA
gctggttgacatttatctac

SEQ ID NO: 13184 - DNA, 20 bp, Artificial Sequence
  Description of Artificial Sequence: Synthetic oligonucleotide
  Target: LAMA2; (+) strand; PAM type: NNAGAAW; PAM sequence: ACAGAAA
tatctacctagaaaaaaatg

SEQ ID NO: 13185 - DNA, 20 bp, Artificial Sequence
  Description of Artificial Sequence: Synthetic oligonucleotide
  Target: LAMA2; (+) strand; PAM type: NNAGAAW; PAM sequence: ATAGAAA
ttacaataattaaaaaaaaa

SEQ ID NO: 13186 - DNA, 20 bp, Artificial Sequence
  Description of Artificial Sequence: Synthetic oligonucleotide
  Target: LAMA2; (+) strand; PAM type: NNAGAAW; PAM sequence: AAAGAAA
aaaaaaattaaacaaattaa

SEQ ID NO: 13187 - DNA, 20 bp, Artificial Sequence
  Description of Artificial Sequence: Synthetic oligonucleotide
  Target: LAMA2; (+) strand; PAM type: NNAGAAW; PAM sequence: AAAGAAA
gaagttattgagtgacagtt

SEQ ID NO: 13188 - DNA, 20 bp, Artificial Sequence
  Description of Artificial Sequence: Synthetic oligonucleotide
  Target: LAMA2; (+) strand; PAM type: NNAGAAW; PAM sequence: GGAGAAA
gcagaagtgttgtcactgct

SEQ ID NO: 13189 - DNA, 20 bp, Artificial Sequence
  Description of Artificial Sequence: Synthetic oligonucleotide
  Target: LAMA2; (+) strand; PAM type: NNAGAAW; PAM sequence: TGAGAAA
aaggagtactttcttaaaac

SEQ ID NO: 13190 - DNA, 20 bp, Artificial Sequence
  Description of Artificial Sequence: Synthetic oligonucleotide
  Target: LAMA2; (+) strand; PAM type: NNAGAAW; PAM sequence: AAAGAAA
ttgacttgtgtagtgcttca

SEQ ID NO: 13191 - DNA, 20 bp, Artificial Sequence
  Description of Artificial Sequence: Synthetic oligonucleotide
  Target: LAMA2; (+) strand; PAM type: NNAGAAW; PAM sequence: AGAGAAA
aagaactggaaaactgtaca

SEQ ID NO: 13192 - DNA, 20 bp, Artificial Sequence
  Description of Artificial Sequence: Synthetic oligonucleotide
  Target: LAMA2; (+) strand; PAM type: NNAGAAW; PAM sequence: TAAGAAA
atccttttctacatttgatt

SEQ ID NO: 13193 - DNA, 20 bp, Artificial Sequence
  Description of Artificial Sequence: Synthetic oligonucleotide
  Target: LAMA2; (+) strand; PAM type: NNAGAAW; PAM sequence: AAAGAAT
attgaaaatacataaaatcc

SEQ ID NO: 13194 - DNA, 20 bp, Artificial Sequence
  Description of Artificial Sequence: Synthetic oligonucleotide
  Target: LAMA2; (+) strand; PAM type: NNAGAAW; PAM sequence: AAAGAAT
tcatgcacttggtaaggttg

SEQ ID NO: 13195 - DNA, 20 bp, Artificial Sequence
  Description of Artificial Sequence: Synthetic oligonucleotide
  Target: LAMA2; (+) strand; PAM type: NNAGAAW; PAM sequence: ACAGAAT
attgcactccaacctgggca

SEQ ID NO: 13196 - DNA, 20 bp, Artificial Sequence
  Description of Artificial Sequence: Synthetic oligonucleotide
  Target: LAMA2; (+) strand; PAM type: NNAGAAW; PAM sequence: GGAGAAT
ctactcgggaggctgaggca

SEQ ID NO: 13197 - DNA, 20 bp, Artificial Sequence
  Description of Artificial Sequence: Synthetic oligonucleotide
  Target: LAMA2; (+) strand; PAM type: NNAGAAW; PAM sequence: CAAGAAT
attataatacaaactgctat

SEQ ID NO: 13198 - DNA, 20 bp, Artificial Sequence
  Description of Artificial Sequence: Synthetic oligonucleotide
  Target: LAMA2; (+) strand; PAM type: NNAGAAW; PAM sequence: CCAGAAA
tcaagaatattatcatcatc

SEQ ID NO: 13199 - DNA, 20 bp, Artificial Sequence
  Description of Artificial Sequence: Synthetic oligonucleotide
  Target: LAMA2; (+) strand; PAM type: NNAGAAW; PAM sequence: AAAGAAT
taaatattaatatgcattta

SEQ ID NO: 13200 - DNA, 20 bp, Artificial Sequence
  Description of Artificial Sequence: Synthetic oligonucleotide
  Target: LAMA2; (+) strand; PAM type: NNAGAAW; PAM sequence: ACAGAAT
ctgtgttacatttttcagtc

SEQ ID NO: 13201 - DNA, 20 bp, Artificial Sequence
  Description of Artificial Sequence: Synthetic oligonucleotide
  Target: LAMA2; (+) strand; PAM type: NNAGAAW; PAM sequence: CAAGAAT
ttaccatttcttttttgcta

SEQ ID NO: 13202 - DNA, 20 bp, Artificial Sequence
  Description of Artificial Sequence: Synthetic oligonucleotide
  Target: LAMA2; (+) strand; PAM type: NNAGAAW; PAM sequence: GTAGAAA
gtcatgaataatagcacatt

SEQ ID NO: 13203 - DNA, 20 bp, Artificial Sequence
  Description of Artificial Sequence: Synthetic oligonucleotide
  Target: LAMA2; (+) strand; PAM type: NNAGAAW; PAM sequence: ACAGAAT
tacacacaccaaatatatac

SEQ ID NO: 13204 - DNA, 20 bp, Artificial Sequence
  Description of Artificial Sequence: Synthetic oligonucleotide
  Target: LAMA2; (+) strand; PAM type: NNAGAAW; PAM sequence: TGAGAAT
gaaaccaaaaagtgggattt

SEQ ID NO: 13205 - DNA, 20 bp, Artificial Sequence
  Description of Artificial Sequence: Synthetic oligonucleotide
  Target: LAMA2; (+) strand; PAM type: NNAGAAW; PAM sequence: TGAGAAA
tgtgaacatactacattatt

SEQ ID NO: 13206 - DNA, 20 bp, Artificial Sequence
  Description of Artificial Sequence: Synthetic oligonucleotide
  Target: LAMA2; (+) strand; PAM type: NNAGAAW; PAM sequence: GCAGAAT
caaatgtttgccatattgta

SEQ ID NO: 13207 - DNA, 20 bp, Artificial Sequence
  Description of Artificial Sequence: Synthetic oligonucleotide
  Target: LAMA2; (+) strand; PAM type: NNAGAAW; PAM sequence: ACAGAAT
atatatatatacactataga

SEQ ID NO: 13208 - DNA, 20 bp, Artificial Sequence
  Description of Artificial Sequence: Synthetic oligonucleotide
  Target: LAMA2; (+) strand; PAM type: NNAGAAW; PAM sequence: ACAGAAT
taataaaatacatagtataa

SEQ ID NO: 13209 - DNA, 20 bp, Artificial Sequence
  Description of Artificial Sequence: Synthetic oligonucleotide
  Target: LAMA2; (+) strand; PAM type: NNAGAAW; PAM sequence: TCAGAAA
cttatttagtctagtgctat

SEQ ID NO: 13210 - DNA, 20 bp, Artificial Sequence
  Description of Artificial Sequence: Synthetic oligonucleotide
  Target: LAMA2; (+) strand; PAM type: NNAGAAW; PAM sequence: ATAGAAA
gcacataatcagtaactgta

SEQ ID NO: 13211 - DNA, 20 bp, Artificial Sequence
  Description of Artificial Sequence: Synthetic oligonucleotide
  Target: LAMA2; (+) strand; PAM type: NNAGAAW; PAM sequence: AAAGAAA
aactgtaatagaaacaaatc

SEQ ID NO: 13212 - DNA, 20 bp, Artificial Sequence
  Description of Artificial Sequence: Synthetic oligonucleotide
  Target: LAMA2; (+) strand; PAM type: NNAGAAW; PAM sequence: AAAGAAT
taatagaaacaaatcaaaga

SEQ ID NO: 13213 - DNA, 20 bp, Artificial Sequence
  Description of Artificial Sequence: Synthetic oligonucleotide
  Target: LAMA2; (+) strand; PAM type: NNAGAAW; PAM sequence: TTAGAAA
tagtgtctttagttttatgg

SEQ ID NO: 13214 - DNA, 20 bp, Artificial Sequence
  Description of Artificial Sequence: Synthetic oligonucleotide
  Target: LAMA2; (+) strand; PAM type: NNAGAAW; PAM sequence: AAAGAAT
ccttcatttttataaagtgg

SEQ ID NO: 13215 - DNA, 20 bp, Artificial Sequence
  Description of Artificial Sequence: Synthetic oligonucleotide
  Target: LAMA2; (+) strand; PAM type: NNAGAAW; PAM sequence: GAAGAAT
atatgggaattaaataatat

SEQ ID NO: 13216 - DNA, 20 bp, Artificial Sequence
  Description of Artificial Sequence: Synthetic oligonucleotide
  Target: LAMA2; (+) strand; PAM type: NNAGAAW; PAM sequence: ATAGAAT
aattaaataatatgaagaat

SEQ ID NO: 13217 - DNA, 20 bp, Artificial Sequence
  Description of Artificial Sequence: Synthetic oligonucleotide
  Target: LAMA2; (+) strand; PAM type: NNAGAAW; PAM sequence: TCAGAAT
atgaagaatatagaatagct

SEQ ID NO: 13218 - DNA, 20 bp, Artificial Sequence
  Description of Artificial Sequence: Synthetic oligonucleotide
  Target: LAMA2; (+) strand; PAM type: NNAGAAW; PAM sequence: AAAGAAA
attttctgaacatacaacat

SEQ ID NO: 13219 - DNA, 20 bp, Artificial Sequence
  Description of Artificial Sequence: Synthetic oligonucleotide
  Target: LAMA2; (+) strand; PAM type: NNAGAAW; PAM sequence: AGAGAAA
agggaggaggcaaaaatccg

SEQ ID NO: 13220 - DNA, 20 bp, Artificial Sequence
  Description of Artificial Sequence: Synthetic oligonucleotide
  Target: LAMA2; (+) strand; PAM type: NNAGAAW; PAM sequence: TTAGAAA
gacaatgccctggtgaagtt

SEQ ID NO: 13221 - DNA, 20 bp, Artificial Sequence
  Description of Artificial Sequence: Synthetic oligonucleotide
  Target: LAMA2; (+) strand; PAM type: NNAGAAW; PAM sequence: ACAGAAT
ataattttgctctcctttaa

SEQ ID NO: 13222 - DNA, 20 bp, Artificial Sequence
  Description of Artificial Sequence: Synthetic oligonucleotide
  Target: LAMA2; (+) strand; PAM type: NNAGAAW; PAM sequence: GGAGAAA
aattaaatttttaaagaact

SEQ ID NO: 13223 - DNA, 20 bp, Artificial Sequence
  Description of Artificial Sequence: Synthetic oligonucleotide
  Target: LAMA2; (+) strand; PAM type: NNAGAAW; PAM sequence: AGAGAAA
cccaagactggataatttat

SEQ ID NO: 13224 - DNA, 20 bp, Artificial Sequence
  Description of Artificial Sequence: Synthetic oligonucleotide
  Target: LAMA2; (+) strand; PAM type: NNAGAAW; PAM sequence: TGAGAAA
ttactatcacgagaacagca

SEQ ID NO: 13225 - DNA, 20 bp, Artificial Sequence
  Description of Artificial Sequence: Synthetic oligonucleotide
  Target: LAMA2; (+) strand; PAM type: NNAGAAW; PAM sequence: ATAGAAA
aaatggtgatgaatgacaaa

SEQ ID NO: 13226 - DNA, 20 bp, Artificial Sequence
  Description of Artificial Sequence: Synthetic oligonucleotide
  Target: LAMA2; (+) strand; PAM type: NNAGAAW; PAM sequence: CTAGAAA
atcgcatatcatttattaac

SEQ ID NO: 13227 - DNA, 20 bp, Artificial Sequence
  Description of Artificial Sequence: Synthetic oligonucleotide
  Target: LAMA2; (+) strand; PAM type: NNAGAAW; PAM sequence: ACAGAAT
gctttccttatgtcacactg

SEQ ID NO: 13228 - DNA, 20 bp, Artificial Sequence
  Description of Artificial Sequence: Synthetic oligonucleotide
  Target: LAMA2; (+) strand; PAM type: NNAGAAW; PAM sequence: GAAGAAA
gggaacctcaactttcagct

SEQ ID NO: 13229 - DNA, 20 bp, Artificial Sequence
  Description of Artificial Sequence: Synthetic oligonucleotide
  Target: LAMA2; (+) strand; PAM type: NNAGAAW; PAM sequence: GGAGAAA
aaagacatatgtataaggag

SEQ ID NO: 13230 - DNA, 20 bp, Artificial Sequence
  Description of Artificial Sequence: Synthetic oligonucleotide
  Target: LAMA2; (+) strand; PAM type: NNAGAAW; PAM sequence: AAAGAAA
catatgtataaggagggaga

SEQ ID NO: 13231 - DNA, 20 bp, Artificial Sequence
  Description of Artificial Sequence: Synthetic oligonucleotide
  Target: LAMA2; (+) strand; PAM type: NNAGAAW; PAM sequence: AAAGAAA
tgtataaggagggagaaaag

SEQ ID NO: 13232 - DNA, 20 bp, Artificial Sequence
  Description of Artificial Sequence: Synthetic oligonucleotide
  Target: LAMA2; (+) strand; PAM type: NNAGAAW; PAM sequence: TAAGAAT
ggcagctctttgggagatct

SEQ ID NO: 13233 - DNA, 20 bp, Artificial Sequence
  Description of Artificial Sequence: Synthetic oligonucleotide
  Target: LAMA2; (+) strand; PAM type: NNAGAAW; PAM sequence: ACAGAAA
tgtactattatcttttttta

SEQ ID NO: 13234 - DNA, 20 bp, Artificial Sequence
  Description of Artificial Sequence: Synthetic oligonucleotide
  Target: LAMA2; (+) strand; PAM type: NNAGAAW; PAM sequence: AAAGAAA
tattatctttttttaacaga

SEQ ID NO: 13235 - DNA, 20 bp, Artificial Sequence
  Description of Artificial Sequence: Synthetic oligonucleotide
  Target: LAMA2; (+) strand; PAM type: NNAGAAW; PAM sequence: GCAGAAA
tgccaagctttgaggataag

SEQ ID NO: 13236 - DNA, 20 bp, Artificial Sequence
  Description of Artificial Sequence: Synthetic oligonucleotide
  Target: LAMA2; (+) strand; PAM type: NNAGAAW; PAM sequence: GCAGAAA
tagagatcttggtaaaaaag

SEQ ID NO: 13237 - DNA, 20 bp, Artificial Sequence
  Description of Artificial Sequence: Synthetic oligonucleotide
  Target: LAMA2; (+) strand; PAM type: NNAGAAW; PAM sequence: GAAGAAA
caattgacattaacttacag

SEQ ID NO: 13238 - DNA, 20 bp, Artificial Sequence
  Description of Artificial Sequence: Synthetic oligonucleotide
  Target: LAMA2; (+) strand; PAM type: NNAGAAW; PAM sequence: GCAGAAA
aaatatatttgcatagttgt

SEQ ID NO: 13239 - DNA, 20 bp, Artificial Sequence
  Description of Artificial Sequence: Synthetic oligonucleotide
  Target: LAMA2; (+) strand; PAM type: NNAGAAW; PAM sequence: TTAGAAT
ttcaacagaagatttgtgtt

SEQ ID NO: 13240 - DNA, 20 bp, Artificial Sequence
  Description of Artificial Sequence: Synthetic oligonucleotide
  Target: LAMA2; (+) strand; PAM type: NNAGAAW; PAM sequence: CCAGAAA
ttaaagtccatacttaagac

SEQ ID NO: 13241 - DNA, 20 bp, Artificial Sequence
  Description of Artificial Sequence: Synthetic oligonucleotide
  Target: LAMA2; (+) strand; PAM type: NNAGAAW; PAM sequence: AAAGAAA
agtccatacttaagacccag

SEQ ID NO: 13242 - DNA, 20 bp, Artificial Sequence
  Description of Artificial Sequence: Synthetic oligonucleotide
  Target: LAMA2; (+) strand; PAM type: NNAGAAW; PAM sequence: GGAGAAA
tcacgaccaatgcaacatgt

SEQ ID NO: 13243 - DNA, 20 bp, Artificial Sequence
  Description of Artificial Sequence: Synthetic oligonucleotide
  Target: LAMA2; (+) strand; PAM type: NNAGAAW; PAM sequence: TAAGAAT
aattcaagggtttgtaatac

SEQ ID NO: 13244 - DNA, 20 bp, Artificial Sequence
  Description of Artificial Sequence: Synthetic oligonucleotide
  Target: LAMA2; (+) strand; PAM type: NNAGAAW; PAM sequence: CTAGAAT
gtttgtaatactaagaattc

SEQ ID NO: 13245 - DNA, 20 bp, Artificial Sequence
  Description of Artificial Sequence: Synthetic oligonucleotide
  Target: LAMA2; (+) strand; PAM type: NNAGAAW; PAM sequence: AAAGAAT
tagtgtggtaagtacaaagg

SEQ ID NO: 13246 - DNA, 20 bp, Artificial Sequence
  Description of Artificial Sequence: Synthetic oligonucleotide
  Target: LAMA2; (+) strand; PAM type: NNAGAAW; PAM sequence: AGAGAAA
gaggagaagtcatgccagga

SEQ ID NO: 13247 - DNA, 20 bp, Artificial Sequence
  Description of Artificial Sequence: Synthetic oligonucleotide
  Target: LAMA2; (+) strand; PAM type: NNAGAAW; PAM sequence: TCAGAAT
agtcatgccaggaagagaaa

SEQ ID NO: 13248 - DNA, 20 bp, Artificial Sequence
  Description of Artificial Sequence: Synthetic oligonucleotide
  Target: LAMA2; (+) strand; PAM type: NNAGAAW; PAM sequence: ACAGAAA
ggaagagaaatcagaattag

SEQ ID NO: 13249 - DNA, 20 bp, Artificial Sequence
  Description of Artificial Sequence: Synthetic oligonucleotide
  Target: LAMA2; (+) strand; PAM type: NNAGAAW; PAM sequence: AAAGAAA
ctagaggggaaatagaggca

SEQ ID NO: 13250 - DNA, 20 bp, Artificial Sequence
  Description of Artificial Sequence: Synthetic oligonucleotide
  Target: LAMA2; (+) strand; PAM type: NNAGAAW; PAM sequence: TAAGAAA
gtcatctaaagatttctggc

SEQ ID NO: 13251 - DNA, 20 bp, Artificial Sequence
  Description of Artificial Sequence: Synthetic oligonucleotide
  Target: LAMA2; (+) strand; PAM type: NNAGAAW; PAM sequence: GCAGAAT
atttttattttgtttttgag

SEQ ID NO: 13252 - DNA, 20 bp, Artificial Sequence
  Description of Artificial Sequence: Synthetic oligonucleotide
  Target: LAMA2; (+) strand; PAM type: NNAGAAW; PAM sequence: GTAGAAA
ggctattttttgtatttcaa

SEQ ID NO: 13253 - DNA, 20 bp, Artificial Sequence
  Description of Artificial Sequence: Synthetic oligonucleotide
  Target: LAMA2; (+) strand; PAM type: NNAGAAW; PAM sequence: CCAGAAA
tatagatagatatatagagg

SEQ ID NO: 13254 - DNA, 20 bp, Artificial Sequence
  Description of Artificial Sequence: Synthetic oligonucleotide
  Target: LAMA2; (+) strand; PAM type: NNAGAAW; PAM sequence: GAAGAAT
ggtggccttgaaaatttcat

SEQ ID NO: 13255 - DNA, 20 bp, Artificial Sequence
  Description of Artificial Sequence: Synthetic oligonucleotide
  Target: LAMA2; (+) strand; PAM type: NNAGAAW; PAM sequence: TGAGAAA
tgaaaatttcatgaagaata

SEQ ID NO: 13256 - DNA, 20 bp, Artificial Sequence
  Description of Artificial Sequence: Synthetic oligonucleotide
  Target: LAMA2; (+) strand; PAM type: NNAGAAW; PAM sequence: GGAGAAT
aggatgggctgtgcagacgg

SEQ ID NO: 13257 - DNA, 20 bp, Artificial Sequence
  Description of Artificial Sequence: Synthetic oligonucleotide
  Target: LAMA2; (+) strand; PAM type: NNAGAAW; PAM sequence: AGAGAAA
atatatatgtagagagagag

SEQ ID NO: 13258 - DNA, 20 bp, Artificial Sequence
  Description of Artificial Sequence: Synthetic oligonucleotide
  Target: LAMA2; (+) strand; PAM type: NNAGAAW; PAM sequence: ACAGAAA
agcaaaattaagaggaaagt

SEQ ID NO: 13259 - DNA, 20 bp, Artificial Sequence
  Description of Artificial Sequence: Synthetic oligonucleotide
  Target: LAMA2; (+) strand; PAM type: NNAGAAW; PAM sequence: AAAGAAA
atttacattttttatcccaa

SEQ ID NO: 13260 - DNA, 20 bp, Artificial Sequence
  Description of Artificial Sequence: Synthetic oligonucleotide
  Target: LAMA2; (+) strand; PAM type: NNAGAAW; PAM sequence: GCAGAAA
tcattatataatttaggaat

SEQ ID NO: 13261 - DNA, 20 bp, Artificial Sequence
  Description of Artificial Sequence: Synthetic oligonucleotide
  Target: LAMA2; (+) strand; PAM type: NNAGAAW; PAM sequence: ACAGAAT
aattagtggtcgtgtgtatc

SEQ ID NO: 13262 - DNA, 20 bp, Artificial Sequence
  Description of Artificial Sequence: Synthetic oligonucleotide
  Target: LAMA2; (+) strand; PAM type: NNAGAAW; PAM sequence: TCAGAAA
gtcgtgtgtatcacagaata

SEQ ID NO: 13263 - DNA, 20 bp, Artificial Sequence
  Description of Artificial Sequence: Synthetic oligonucleotide
  Target: LAMA2; (+) strand; PAM type: NNAGAAW; PAM sequence: CCAGAAA
gacaccaaagaaggcaacca

SEQ ID NO: 13264 - DNA, 20 bp, Artificial Sequence
  Description of Artificial Sequence: Synthetic oligonucleotide
  Target: LAMA2; (+) strand; PAM type: NNAGAAW; PAM sequence: ATAGAAT
atgtgtttgctagctcttgt

SEQ ID NO: 13265 - DNA, 20 bp, Artificial Sequence
  Description of Artificial Sequence: Synthetic oligonucleotide
  Target: LAMA2; (+) strand; PAM type: NNAGAAW; PAM sequence: AAAGAAT
cattaggtatgtgatgaagg

SEQ ID NO: 13266 - DNA, 20 bp, Artificial Sequence
  Description of Artificial Sequence: Synthetic oligonucleotide
  Target: LAMA2; (+) strand; PAM type: NNAGAAW; PAM sequence: GAAGAAA
atgaaggaaagaatttttag

SEQ ID NO: 13267 - DNA, 20 bp, Artificial Sequence
  Description of Artificial Sequence: Synthetic oligonucleotide
  Target: LAMA2; (+) strand; PAM type: NNAGAAW; PAM sequence: TAAGAAA
atgcttcgaagataattgag

SEQ ID NO: 13268 - DNA, 20 bp, Artificial Sequence
  Description of Artificial Sequence: Synthetic oligonucleotide
  Target: LAMA2; (+) strand; PAM type: NNAGAAW; PAM sequence: ATAGAAA
atgaagaagaagaggggact

SEQ ID NO: 13269 - DNA, 20 bp, Artificial Sequence
  Description of Artificial Sequence: Synthetic oligonucleotide
  Target: LAMA2; (+) strand; PAM type: NNAGAAW; PAM sequence: AGAGAAT
tcaagtatccttgatgtgaa

SEQ ID NO: 13270 - DNA, 20 bp, Artificial Sequence
  Description of Artificial Sequence: Synthetic oligonucleotide
  Target: LAMA2; (+) strand; PAM type: NNAGAAW; PAM sequence: TCAGAAA
catacttttaactcaccaaa

SEQ ID NO: 13271 - DNA, 20 bp, Artificial Sequence
  Description of Artificial Sequence: Synthetic oligonucleotide
  Target: LAMA2; (+) strand; PAM type: NNAGAAW; PAM sequence: GAAGAAA
ttaactcaccaaatcagaaa

SEQ ID NO: 13272 - DNA, 20 bp, Artificial Sequence
  Description of Artificial Sequence: Synthetic oligonucleotide
  Target: LAMA2; (+) strand; PAM type: NNAGAAW; PAM sequence: AAAGAAT
ctcaccaaatcagaaagaag

SEQ ID NO: 13273 - DNA, 20 bp, Artificial Sequence
  Description of Artificial Sequence: Synthetic oligonucleotide
  Target: LAMA2; (+) strand; PAM type: NNAGAAW; PAM sequence: GCAGAAA
agaatgaatagcagcagtca

SEQ ID NO: 13274 - DNA, 20 bp, Artificial Sequence
  Description of Artificial Sequence: Synthetic oligonucleotide
  Target: LAMA2; (+) strand; PAM type: NNAGAAW; PAM sequence: GGAGAAA
gcagtcagcagaaagtgttg

SEQ ID NO: 13275 - DNA, 20 bp, Artificial Sequence
  Description of Artificial Sequence: Synthetic oligonucleotide
  Target: LAMA2; (+) strand; PAM type: NNAGAAW; PAM sequence: TCAGAAT
aggggatcactgagccgtaa

SEQ ID NO: 13276 - DNA, 20 bp, Artificial Sequence
  Description of Artificial Sequence: Synthetic oligonucleotide
  Target: LAMA2; (+) strand; PAM type: NNAGAAW; PAM sequence: AAAGAAT
aattccatatggagtaaaat

SEQ ID NO: 13277 - DNA, 20 bp, Artificial Sequence
  Description of Artificial Sequence: Synthetic oligonucleotide
  Target: LAMA2; (+) strand; PAM type: NNAGAAW; PAM sequence: GTAGAAT
cttggagcattacagggaaa

SEQ ID NO: 13278 - DNA, 20 bp, Artificial Sequence
  Description of Artificial Sequence: Synthetic oligonucleotide
  Target: LAMA2; (+) strand; PAM type: NNAGAAW; PAM sequence: CAAGAAA
agaatggaaagagaagatgg

SEQ ID NO: 13279 - DNA, 20 bp, Artificial Sequence
  Description of Artificial Sequence: Synthetic oligonucleotide
  Target: LAMA2; (+) strand; PAM type: NNAGAAW; PAM sequence: GAAGAAA
gagaagatggcaagaaaatt

SEQ ID NO: 13280 - DNA, 20 bp, Artificial Sequence
  Description of Artificial Sequence: Synthetic oligonucleotide
  Target: LAMA2; (+) strand; PAM type: NNAGAAW; PAM sequence: TCAGAAA
caagaaaattgaagaaaagg

SEQ ID NO: 13281 - DNA, 20 bp, Artificial Sequence
  Description of Artificial Sequence: Synthetic oligonucleotide
  Target: LAMA2; (+) strand; PAM type: NNAGAAW; PAM sequence: AGAGAAT
ggtggccttgaaaatttcat

SEQ ID NO: 13282 - DNA, 20 bp, Artificial Sequence
  Description of Artificial Sequence: Synthetic oligonucleotide
  Target: LAMA2; (+) strand; PAM type: NNAGAAW; PAM sequence: TGAGAAA
tgaaaatttcatagagaatg

SEQ ID NO: 13283 - DNA, 20 bp, Artificial Sequence
  Description of Artificial Sequence: Synthetic oligonucleotide
  Target: LAMA2; (+) strand; PAM type: NNAGAAW; PAM sequence: GGAGAAT
aggatggactgtgcagacag

SEQ ID NO: 13284 - DNA, 20 bp, Artificial Sequence
  Description of Artificial Sequence: Synthetic oligonucleotide
  Target: LAMA2; (+) strand; PAM type: NNAGAAW; PAM sequence: CTAGAAA
atgtgtatataatatttaca

SEQ ID NO: 13285 - DNA, 20 bp, Artificial Sequence
  Description of Artificial Sequence: Synthetic oligonucleotide
  Target: LAMA2; (+) strand; PAM type: NNAGAAW; PAM sequence: CAAGAAA
taatatttacactagaaagg

SEQ ID NO: 13286 - DNA, 20 bp, Artificial Sequence
  Description of Artificial Sequence: Synthetic oligonucleotide
  Target: LAMA2; (+) strand; PAM type: NNAGAAW; PAM sequence: TAAGAAA
tacactagaaaggcaagaaa

SEQ ID NO: 13287 - DNA, 20 bp, Artificial Sequence
  Description of Artificial Sequence: Synthetic oligonucleotide
  Target: LAMA2; (+) strand; PAM type: NNAGAAW; PAM sequence: GTAGAAA
ggaatgatgcaaagattggg

SEQ ID NO: 13288 - DNA, 20 bp, Artificial Sequence
  Description of Artificial Sequence: Synthetic oligonucleotide
  Target: LAMA2; (+) strand; PAM type: NNAGAAW; PAM sequence: CTAGAAA
ttccagattatgctttgata

SEQ ID NO: 13289 - DNA, 20 bp, Artificial Sequence
  Description of Artificial Sequence: Synthetic oligonucleotide
  Target: LAMA2; (+) strand; PAM type: NNAGAAW; PAM sequence: TTAGAAA
tatgctttgatactagaaat

SEQ ID NO: 13290 - DNA, 20 bp, Artificial Sequence
  Description of Artificial Sequence: Synthetic oligonucleotide
  Target: LAMA2; (+) strand; PAM type: NNAGAAW; PAM sequence: AAAGAAT
ctttgatactagaaatttag

SEQ ID NO: 13291 - DNA, 20 bp, Artificial Sequence
  Description of Artificial Sequence: Synthetic oligonucleotide
  Target: LAMA2; (+) strand; PAM type: NNAGAAW; PAM sequence: CAAGAAT
ttagaaagaataaaacccca

SEQ ID NO: 13292 - DNA, 20 bp, Artificial Sequence
  Description of Artificial Sequence: Synthetic oligonucleotide
  Target: LAMA2; (+) strand; PAM type: NNAGAAW; PAM sequence: TGAGAAT
tccacaaattcagtgaactc

SEQ ID NO: 13293 - DNA, 20 bp, Artificial Sequence
  Description of Artificial Sequence: Synthetic oligonucleotide
  Target: LAMA2; (+) strand; PAM type: NNAGAAW; PAM sequence: AAAGAAA
tccgcagttaattatcctgc

SEQ ID NO: 13294 - DNA, 20 bp, Artificial Sequence
  Description of Artificial Sequence: Synthetic oligonucleotide
  Target: LAMA2; (+) strand; PAM type: NNAGAAW; PAM sequence: TTAGAAA
ctaagagccatgaatttgat

SEQ ID NO: 13295 - DNA, 20 bp, Artificial Sequence
  Description of Artificial Sequence: Synthetic oligonucleotide
  Target: LAMA2; (+) strand; PAM type: NNAGAAW; PAM sequence: TCAGAAA
atgctaacatttaaatatat

SEQ ID NO: 13296 - DNA, 20 bp, Artificial Sequence
  Description of Artificial Sequence: Synthetic oligonucleotide
  Target: LAMA2; (+) strand; PAM type: NNAGAAW; PAM sequence: TTAGAAT
atgtatatgcataataatgg

SEQ ID NO: 13297 - DNA, 20 bp, Artificial Sequence
  Description of Artificial Sequence: Synthetic oligonucleotide
  Target: LAMA2; (+) strand; PAM type: NNAGAAW; PAM sequence: TAAGAAA
ctcactggtccgtggcaaag

SEQ ID NO: 13298 - DNA, 20 bp, Artificial Sequence
  Description of Artificial Sequence: Synthetic oligonucleotide
  Target: LAMA2; (+) strand; PAM type: NNAGAAW; PAM sequence: ATAGAAA
tttccacatttttcataaaa

SEQ ID NO: 13299 - DNA, 20 bp, Artificial Sequence
  Description of Artificial Sequence: Synthetic oligonucleotide
  Target: LAMA2; (+) strand; PAM type: NNAGAAW; PAM sequence: ATAGAAA
taatgatgctttattaaatg

SEQ ID NO: 13300 - DNA, 20 bp, Artificial Sequence
  Description of Artificial Sequence: Synthetic oligonucleotide
  Target: LAMA2; (+) strand; PAM type: NNAGAAW; PAM sequence: TTAGAAT
ccctctcatcaccattatta

SEQ ID NO: 13301 - DNA, 20 bp, Artificial Sequence
  Description of Artificial Sequence: Synthetic oligonucleotide
  Target: LAMA2; (+) strand; PAM type: NNAGAAW; PAM sequence: ATAGAAA
cccttactgcagccttggga

SEQ ID NO: 13302 - DNA, 20 bp, Artificial Sequence
  Description of Artificial Sequence: Synthetic oligonucleotide
  Target: LAMA2; (+) strand; PAM type: NNAGAAW; PAM sequence: GGAGAAA
agcaaggcctgtttagagag

SEQ ID NO: 13303 - DNA, 20 bp, Artificial Sequence
  Description of Artificial Sequence: Synthetic oligonucleotide
  Target: LAMA2; (+) strand; PAM type: NNAGAAW; PAM sequence: AAAGAAA
aggcctgtttagagagggag

SEQ ID NO: 13304 - DNA, 20 bp, Artificial Sequence
  Description of Artificial Sequence: Synthetic oligonucleotide
  Target: LAMA2; (+) strand; PAM type: NNAGAAW; PAM sequence: TGAGAAA
tggagctaaaatgggagaga

SEQ ID NO: 13305 - DNA, 20 bp, Artificial Sequence
  Description of Artificial Sequence: Synthetic oligonucleotide
  Target: LAMA2; (+) strand; PAM type: NNAGAAW; PAM sequence: ATAGAAA
tctcatattattaaatagtg

SEQ ID NO: 13306 - DNA, 20 bp, Artificial Sequence
  Description of Artificial Sequence: Synthetic oligonucleotide
  Target: LAMA2; (+) strand; PAM type: NNAGAAW; PAM sequence: GAAGAAT
attttaacatgcatagcatg

SEQ ID NO: 13307 - DNA, 20 bp, Artificial Sequence
  Description of Artificial Sequence: Synthetic oligonucleotide
  Target: LAMA2; (+) strand; PAM type: NNAGAAW; PAM sequence: ATAGAAT
tttctgagcctcaatatctc

SEQ ID NO: 13308 - DNA, 20 bp, Artificial Sequence
  Description of Artificial Sequence: Synthetic oligonucleotide
  Target: LAMA2; (+) strand; PAM type: NNAGAAW; PAM sequence: GAAGAAA
gctatgagacagctgtcatt

SEQ ID NO: 13309 - DNA, 20 bp, Artificial Sequence
  Description of Artificial Sequence: Synthetic oligonucleotide
  Target: LAMA2; (+) strand; PAM type: NNAGAAW; PAM sequence: TGAGAAT
tgtcattgaagaaattctgt

SEQ ID NO: 13310 - DNA, 20 bp, Artificial Sequence
  Description of Artificial Sequence: Synthetic oligonucleotide
  Target: LAMA2; (+) strand; PAM type: NNAGAAW; PAM sequence: AAAGAAA
taaccatttttttttacttt

SEQ ID NO: 13311 - DNA, 20 bp, Artificial Sequence
  Description of Artificial Sequence: Synthetic oligonucleotide
  Target: LAMA2; (+) strand; PAM type: NNAGAAW; PAM sequence: TAAGAAT
tggtggcagagtcccagtat

SEQ ID NO: 13312 - DNA, 20 bp, Artificial Sequence
  Description of Artificial Sequence: Synthetic oligonucleotide
  Target: LAMA2; (+) strand; PAM type: NNAGAAW; PAM sequence: TTAGAAA
aatggaagcacgtgaagagc

SEQ ID NO: 13313 - DNA, 20 bp, Artificial Sequence
  Description of Artificial Sequence: Synthetic oligonucleotide
  Target: LAMA2; (+) strand; PAM type: NNAGAAW; PAM sequence: TGAGAAA
tgcctctcattactgagagc

SEQ ID NO: 13314 - DNA, 20 bp, Artificial Sequence
  Description of Artificial Sequence: Synthetic oligonucleotide
  Target: LAMA2; (+) strand; PAM type: NNAGAAW; PAM sequence: ACAGAAA
gctgcatatattcaagagcc

SEQ ID NO: 13315 - DNA, 20 bp, Artificial Sequence
  Description of Artificial Sequence: Synthetic oligonucleotide
  Target: LAMA2; (+) strand; PAM type: NNAGAAW; PAM sequence: AGAGAAT
ggaagtctcagagcactatc

SEQ ID NO: 13316 - DNA, 20 bp, Artificial Sequence
  Description of Artificial Sequence: Synthetic oligonucleotide
  Target: LAMA2; (+) strand; PAM type: NNAGAAW; PAM sequence: TAAGAAT
tccattcccacacagtatct

SEQ ID NO: 13317 - DNA, 20 bp, Artificial Sequence
  Description of Artificial Sequence: Synthetic oligonucleotide
  Target: LAMA2; (+) strand; PAM type: NNAGAAW; PAM sequence: CCAGAAT
tcattcatcataacaaagtg

SEQ ID NO: 13318 - DNA, 20 bp, Artificial Sequence
  Description of Artificial Sequence: Synthetic oligonucleotide
  Target: LAMA2; (+) strand; PAM type: NNAGAAW; PAM sequence: CAAGAAA
tcgtgatggaacttctcaga

SEQ ID NO: 13319 - DNA, 20 bp, Artificial Sequence
  Description of Artificial Sequence: Synthetic oligonucleotide
  Target: LAMA2; (+) strand; PAM type: NNAGAAW; PAM sequence: AGAGAAA
tattgtactgcactggcaac

SEQ ID NO: 13320 - DNA, 20 bp, Artificial Sequence
  Description of Artificial Sequence: Synthetic oligonucleotide
  Target: LAMA2; (+) strand; PAM type: NNAGAAW; PAM sequence: TTAGAAA
tagttgaagaacactgtgct

SEQ ID NO: 13321 - DNA, 20 bp, Artificial Sequence
  Description of Artificial Sequence: Synthetic oligonucleotide
  Target: LAMA2; (+) strand; PAM type: NNAGAAW; PAM sequence: CAAGAAA
ctccaaatgtagttcaggtt

SEQ ID NO: 13322 - DNA, 20 bp, Artificial Sequence
  Description of Artificial Sequence: Synthetic oligonucleotide
  Target: LAMA2; (+) strand; PAM type: NNAGAAW; PAM sequence: ACAGAAA
aaattagtatcttaaacata

SEQ ID NO: 13323 - DNA, 20 bp, Artificial Sequence
  Description of Artificial Sequence: Synthetic oligonucleotide
  Target: LAMA2; (+) strand; PAM type: NNAGAAW; PAM sequence: CTAGAAA
tttaacattcaagataagca

SEQ ID NO: 13324 - DNA, 20 bp, Artificial Sequence
  Description of Artificial Sequence: Synthetic oligonucleotide
  Target: LAMA2; (+) strand; PAM type: NNAGAAW; PAM sequence: GAAGAAA
aaaaaatagcaatttgtttg

SEQ ID NO: 13325 - DNA, 20 bp, Artificial Sequence
  Description of Artificial Sequence: Synthetic oligonucleotide
  Target: LAMA2; (+) strand; PAM type: NNAGAAW; PAM sequence: CAAGAAA
taaatattacaatatcttgg

SEQ ID NO: 13326 - DNA, 20 bp, Artificial Sequence
  Description of Artificial Sequence: Synthetic oligonucleotide
  Target: LAMA2; (+) strand; PAM type: NNAGAAW; PAM sequence: AAAGAAA
tctagagtcagcatgaactt

SEQ ID NO: 13327 - DNA, 20 bp, Artificial Sequence
  Description of Artificial Sequence: Synthetic oligonucleotide
  Target: LAMA2; (+) strand; PAM type: NNAGAAW; PAM sequence: CCAGAAT
ctttttcctaccagatttca

SEQ ID NO: 13328 - DNA, 20 bp, Artificial Sequence
  Description of Artificial Sequence: Synthetic oligonucleotide
  Target: LAMA2; (+) strand; PAM type: NNAGAAW; PAM sequence: GAAGAAA
atgccctttgatttgtttca

SEQ ID NO: 13329 - DNA, 20 bp, Artificial Sequence
  Description of Artificial Sequence: Synthetic oligonucleotide
  Target: LAMA2; (+) strand; PAM type: NNAGAAW; PAM sequence: TAAGAAT
cctggtctatccctcaaaac

SEQ ID NO: 13330 - DNA, 20 bp, Artificial Sequence
  Description of Artificial Sequence: Synthetic oligonucleotide
  Target: LAMA2; (+) strand; PAM type: NNAGAAW; PAM sequence: AGAGAAA
attttattcactgatcttgc

SEQ ID NO: 13331 - DNA, 20 bp, Artificial Sequence
  Description of Artificial Sequence: Synthetic oligonucleotide
  Target: LAMA2; (+) strand; PAM type: NNAGAAW; PAM sequence: TTAGAAT
atgcaaatattactatactt

SEQ ID NO: 13332 - DNA, 20 bp, Artificial Sequence
  Description of Artificial Sequence: Synthetic oligonucleotide
  Target: LAMA2; (+) strand; PAM type: NNAGAAW; PAM sequence: CTAGAAT
aaatgatttttctctaaagc

SEQ ID NO: 13333 - DNA, 20 bp, Artificial Sequence
  Description of Artificial Sequence: Synthetic oligonucleotide
  Target: LAMA2; (+) strand; PAM type: NNAGAAW; PAM sequence: AAAGAAA
ctcccaaacaaccaatggat

SEQ ID NO: 13334 - DNA, 20 bp, Artificial Sequence
  Description of Artificial Sequence: Synthetic oligonucleotide
  Target: LAMA2; (+) strand; PAM type: NNAGAAW; PAM sequence: AGAGAAA
tggataaagaaaaaattaaa

SEQ ID NO: 13335 - DNA, 20 bp, Artificial Sequence
  Description of Artificial Sequence: Synthetic oligonucleotide
  Target: LAMA2; (+) strand; PAM type: NNAGAAW; PAM sequence: TGAGAAT
taaaaataacttgagacaaa

SEQ ID NO: 13336 - DNA, 20 bp, Artificial Sequence
  Description of Artificial Sequence: Synthetic oligonucleotide
  Target: LAMA2; (+) strand; PAM type: NNAGAAW; PAM sequence: GAAGAAA
agaagcaaaagcagttctaa

SEQ ID NO: 13337 - DNA, 20 bp, Artificial Sequence
  Description of Artificial Sequence: Synthetic oligonucleotide
  Target: LAMA2; (+) strand; PAM type: NNAGAAW; PAM sequence: GAAGAAA
ataaatacctacgtcaaaaa

SEQ ID NO: 13338 - DNA, 20 bp, Artificial Sequence
  Description of Artificial Sequence: Synthetic oligonucleotide
  Target: LAMA2; (+) strand; PAM type: NNAGAAW; PAM sequence: CAAGAAA
aacaacctaaggttacattt

SEQ ID NO: 13339 - DNA, 20 bp, Artificial Sequence
  Description of Artificial Sequence: Synthetic oligonucleotide
  Target: LAMA2; (+) strand; PAM type: NNAGAAW; PAM sequence: GAAGAAA
aagcaaaaaaaaaaaaaaat

SEQ ID NO: 13340 - DNA, 20 bp, Artificial Sequence
  Description of Artificial Sequence: Synthetic oligonucleotide
  Target: LAMA2; (+) strand; PAM type: NNAGAAW; PAM sequence: AAAGAAA
aaaaaaatgaagaaaagata

SEQ ID NO: 13341 - DNA, 20 bp, Artificial Sequence
  Description of Artificial Sequence: Synthetic oligonucleotide
  Target: LAMA2; (+) strand; PAM type: NNAGAAW; PAM sequence: GCAGAAA
acaaactaggcctagaagta

SEQ ID NO: 13342 - DNA, 20 bp, Artificial Sequence
  Description of Artificial Sequence: Synthetic oligonucleotide
  Target: LAMA2; (+) strand; PAM type: NNAGAAW; PAM sequence: GTAGAAA
aggaaataataaaggtctgg

SEQ ID NO: 13343 - DNA, 20 bp, Artificial Sequence
  Description of Artificial Sequence: Synthetic oligonucleotide
  Target: LAMA2; (+) strand; PAM type: NNAGAAW; PAM sequence: TAAGAAA
aaaagtttagctaaactttc

SEQ ID NO: 13344 - DNA, 20 bp, Artificial Sequence
  Description of Artificial Sequence: Synthetic oligonucleotide
  Target: LAMA2; (+) strand; PAM type: NNAGAAW; PAM sequence: TCAGAAT
aaactttctaagaaaaaaga

SEQ ID NO: 13345 - DNA, 20 bp, Artificial Sequence
  Description of Artificial Sequence: Synthetic oligonucleotide
  Target: LAMA2; (+) strand; PAM type: NNAGAAW; PAM sequence: TCAGAAA
gagacattactactgatact

SEQ ID NO: 13346 - DNA, 20 bp, Artificial Sequence
  Description of Artificial Sequence: Synthetic oligonucleotide
  Target: LAMA2; (+) strand; PAM type: NNAGAAW; PAM sequence: CTAGAAA
atgccaacaaactggataac

SEQ ID NO: 13347 - DNA, 20 bp, Artificial Sequence
  Description of Artificial Sequence: Synthetic oligonucleotide
  Target: LAMA2; (+) strand; PAM type: NNAGAAW; PAM sequence: GAAGAAA
acctactaacactgaatcat

SEQ ID NO: 13348 - DNA, 20 bp, Artificial Sequence
  Description of Artificial Sequence: Synthetic oligonucleotide
  Target: LAMA2; (+) strand; PAM type: NNAGAAW; PAM sequence: TAAGAAA
taaggagattgaatcaggaa

SEQ ID NO: 13349 - DNA, 20 bp, Artificial Sequence
  Description of Artificial Sequence: Synthetic oligonucleotide
  Target: LAMA2; (+) strand; PAM type: NNAGAAW; PAM sequence: AAAGAAA
ggaataagaaataccctatc

SEQ ID NO: 13350 - DNA, 20 bp, Artificial Sequence
  Description of Artificial Sequence: Synthetic oligonucleotide
  Target: LAMA2; (+) strand; PAM type: NNAGAAW; PAM sequence: CAAGAAA
taccaaagccaaagacactg

SEQ ID NO: 13351 - DNA, 20 bp, Artificial Sequence
  Description of Artificial Sequence: Synthetic oligonucleotide
  Target: LAMA2; (+) strand; PAM type: NNAGAAW; PAM sequence: CAAGAAA
aacatagatgcaaaactcct

SEQ ID NO: 13352 - DNA, 20 bp, Artificial Sequence
  Description of Artificial Sequence: Synthetic oligonucleotide
  Target: LAMA2; (+) strand; PAM type: NNAGAAW; PAM sequence: GTAGAAT
aaatgtgataccttacatta

SEQ ID NO: 13353 - DNA, 20 bp, Artificial Sequence
  Description of Artificial Sequence: Synthetic oligonucleotide
  Target: LAMA2; (+) strand; PAM type: NNAGAAW; PAM sequence: GCAGAAA
atatgatcatctcaatagat

SEQ ID NO: 13354 - DNA, 20 bp, Artificial Sequence
  Description of Artificial Sequence: Synthetic oligonucleotide
  Target: LAMA2; (+) strand; PAM type: NNAGAAW; PAM sequence: AGAGAAA
taatactggaagacctagcc

SEQ ID NO: 13355 - DNA, 20 bp, Artificial Sequence
  Description of Artificial Sequence: Synthetic oligonucleotide
  Target: LAMA2; (+) strand; PAM type: NNAGAAW; PAM sequence: AAAGAAA
gccagagaaatcaggcaaaa

SEQ ID NO: 13356 - DNA, 20 bp, Artificial Sequence
  Description of Artificial Sequence: Synthetic oligonucleotide
  Target: LAMA2; (+) strand; PAM type: NNAGAAW; PAM sequence: AAAGAAA
aaattgtcatcaaaattgaa

SEQ ID NO: 13357 - DNA, 20 bp, Artificial Sequence
  Description of Artificial Sequence: Synthetic oligonucleotide
  Target: LAMA2; (+) strand; PAM type: NNAGAAW; PAM sequence: ATAGAAA
cagatgacataatcttacat

SEQ ID NO: 13358 - DNA, 20 bp, Artificial Sequence
  Description of Artificial Sequence: Synthetic oligonucleotide
  Target: LAMA2; (+) strand; PAM type: NNAGAAW; PAM sequence: AAAGAAA
aatcccattcaccatagcta

SEQ ID NO: 13359 - DNA, 20 bp, Artificial Sequence
  Description of Artificial Sequence: Synthetic oligonucleotide
  Target: LAMA2; (+) strand; PAM type: NNAGAAW; PAM sequence: ACAGAAA
aaattccaatgacgtttttc

SEQ ID NO: 13360 - DNA, 20 bp, Artificial Sequence
  Description of Artificial Sequence: Synthetic oligonucleotide
  Target: LAMA2; (+) strand; PAM type: NNAGAAW; PAM sequence: ACAGAAT
aaaaacagatacatagacca

SEQ ID NO: 13361 - DNA, 20 bp, Artificial Sequence
  Description of Artificial Sequence: Synthetic oligonucleotide
  Target: LAMA2; (+) strand; PAM type: NNAGAAW; PAM sequence: ATAGAAT
cagatacatagaccaacaga

SEQ ID NO: 13362 - DNA, 20 bp, Artificial Sequence
  Description of Artificial Sequence: Synthetic oligonucleotide
  Target: LAMA2; (+) strand; PAM type: NNAGAAW; PAM sequence: CCAGAAA
caacagaatagaataggagc

SEQ ID NO: 13363 - DNA, 20 bp, Artificial Sequence
  Description of Artificial Sequence: Synthetic oligonucleotide
  Target: LAMA2; (+) strand; PAM type: NNAGAAW; PAM sequence: GAAGAAT
gcagtagatgtccacatgca

SEQ ID NO: 13364 - DNA, 20 bp, Artificial Sequence
  Description of Artificial Sequence: Synthetic oligonucleotide
  Target: LAMA2; (+) strand; PAM type: NNAGAAW; PAM sequence: AAAGAAA
ctgaaactgtaaaactactg

SEQ ID NO: 13365 - DNA, 20 bp, Artificial Sequence
  Description of Artificial Sequence: Synthetic oligonucleotide
  Target: LAMA2; (+) strand; PAM type: NNAGAAW; PAM sequence: ACAGAAT
ctgagtataccttaagtaca

SEQ ID NO: 13366 - DNA, 20 bp, Artificial Sequence
  Description of Artificial Sequence: Synthetic oligonucleotide
  Target: LAMA2; (+) strand; PAM type: NNAGAAW; PAM sequence: GTAGAAT
tcatttgttcagtatcacaa

SEQ ID NO: 13367 - DNA, 20 bp, Artificial Sequence
  Description of Artificial Sequence: Synthetic oligonucleotide
  Target: LAMA2; (+) strand; PAM type: NNAGAAW; PAM sequence: TTAGAAA
caagtagaatctgtggttaa

SEQ ID NO: 13368 - DNA, 20 bp, Artificial Sequence
  Description of Artificial Sequence: Synthetic oligonucleotide
  Target: LAMA2; (+) strand; PAM type: NNAGAAW; PAM sequence: GAAGAAA
ctagctttggtgtctatatt

SEQ ID NO: 13369 - DNA, 20 bp, Artificial Sequence
  Description of Artificial Sequence: Synthetic oligonucleotide
  Target: LAMA2; (+) strand; PAM type: NNAGAAW; PAM sequence: CTAGAAT
gcacttgatatttcttatgt

SEQ ID NO: 13370 - DNA, 20 bp, Artificial Sequence
  Description of Artificial Sequence: Synthetic oligonucleotide
  Target: LAMA2; (+) strand; PAM type: NNAGAAW; PAM sequence: TTAGAAT
aatcattgctttctaagcac

SEQ ID NO: 13371 - DNA, 20 bp, Artificial Sequence
  Description of Artificial Sequence: Synthetic oligonucleotide
  Target: LAMA2; (+) strand; PAM type: NNAGAAW; PAM sequence: TAAGAAT
caaaccaccaatccataatt

SEQ ID NO: 13372 - DNA, 20 bp, Artificial Sequence
  Description of Artificial Sequence: Synthetic oligonucleotide
  Target: LAMA2; (+) strand; PAM type: NNAGAAW; PAM sequence: TGAGAAT
tttaagaatcttattgaatc

SEQ ID NO: 13373 - DNA, 20 bp, Artificial Sequence
  Description of Artificial Sequence: Synthetic oligonucleotide
  Target: LAMA2; (+) strand; PAM type: NNAGAAW; PAM sequence: ACAGAAA
aacatatgaattttagggga

SEQ ID NO: 13374 - DNA, 20 bp, Artificial Sequence
  Description of Artificial Sequence: Synthetic oligonucleotide
  Target: LAMA2; (+) strand; PAM type: NNAGAAW; PAM sequence: ATAGAAA
ggaacagaaacattcagtct

SEQ ID NO: 13375 - DNA, 20 bp, Artificial Sequence
  Description of Artificial Sequence: Synthetic oligonucleotide
  Target: LAMA2; (+) strand; PAM type: NNAGAAW; PAM sequence: AAAGAAA
atagaacaaaagttagtata

SEQ ID NO: 13376 - DNA, 20 bp, Artificial Sequence
  Description of Artificial Sequence: Synthetic oligonucleotide
  Target: LAMA2; (+) strand; PAM type: NNAGAAW; PAM sequence: CTAGAAA
atagagtcaagatgactgcc

SEQ ID NO: 13377 - DNA, 20 bp, Artificial Sequence
  Description of Artificial Sequence: Synthetic oligonucleotide
  Target: LAMA2; (+) strand; PAM type: NNAGAAW; PAM sequence: AGAGAAA
tgactaaaaaccccatgcac

SEQ ID NO: 13378 - DNA, 20 bp, Artificial Sequence
  Description of Artificial Sequence: Synthetic oligonucleotide
  Target: LAMA2; (+) strand; PAM type: NNAGAAW; PAM sequence: TTAGAAT
gcttcattgatgaatagaag

SEQ ID NO: 13379 - DNA, 20 bp, Artificial Sequence
  Description of Artificial Sequence: Synthetic oligonucleotide
  Target: LAMA2; (+) strand; PAM type: NNAGAAW; PAM sequence: CTAGAAA
acctatatataagacttttt

SEQ ID NO: 13380 - DNA, 20 bp, Artificial Sequence
  Description of Artificial Sequence: Synthetic oligonucleotide
  Target: LAMA2; (+) strand; PAM type: NNAGAAW; PAM sequence: GGAGAAA
aaaggctggagtgagactaa

SEQ ID NO: 13381 - DNA, 20 bp, Artificial Sequence
  Description of Artificial Sequence: Synthetic oligonucleotide
  Target: LAMA2; (+) strand; PAM type: NNAGAAW; PAM sequence: TCAGAAA
tgctgcactttaggtgatac

SEQ ID NO: 13382 - DNA, 20 bp, Artificial Sequence
  Description of Artificial Sequence: Synthetic oligonucleotide
  Target: LAMA2; (+) strand; PAM type: NNAGAAW; PAM sequence: GGAGAAT
cattgaaaataatggtgaat

SEQ ID NO: 13383 - DNA, 20 bp, Artificial Sequence
  Description of Artificial Sequence: Synthetic oligonucleotide
  Target: LAMA2; (+) strand; PAM type: NNAGAAW; PAM sequence: TAAGAAT
ggttcactttgtatatcacc

SEQ ID NO: 13384 - DNA, 20 bp, Artificial Sequence
  Description of Artificial Sequence: Synthetic oligonucleotide
  Target: LAMA2; (+) strand; PAM type: NNAGAAW; PAM sequence: GGAGAAA
atggacattaatatttctat

SEQ ID NO: 13385 - DNA, 20 bp, Artificial Sequence
  Description of Artificial Sequence: Synthetic oligonucleotide
  Target: LAMA2; (+) strand; PAM type: NNAGAAW; PAM sequence: ACAGAAA
tatctaagtgaagcatgtac

SEQ ID NO: 13386 - DNA, 20 bp, Artificial Sequence
  Description of Artificial Sequence: Synthetic oligonucleotide
  Target: LAMA2; (+) strand; PAM type: NNAGAAW; PAM sequence: AGAGAAT
aggtgacaaataaaagtctg

SEQ ID NO: 13387 - DNA, 20 bp, Artificial Sequence
  Description of Artificial Sequence: Synthetic oligonucleotide
  Target: LAMA2; (+) strand; PAM type: NNAGAAW; PAM sequence: CCAGAAA
agacaaaaataaccagcaac

SEQ ID NO: 13388 - DNA, 20 bp, Artificial Sequence
  Description of Artificial Sequence: Synthetic oligonucleotide
  Target: LAMA2; (+) strand; PAM type: NNAGAAW; PAM sequence: CAAGAAA
tttagttgagttgggctttt

SEQ ID NO: 13389 - DNA, 20 bp, Artificial Sequence
  Description of Artificial Sequence: Synthetic oligonucleotide
  Target: LAMA2; (+) strand; PAM type: NNAGAAW; PAM sequence: GGAGAAT
ctattctggagtctgaggtg

SEQ ID NO: 13390 - DNA, 20 bp, Artificial Sequence
  Description of Artificial Sequence: Synthetic oligonucleotide
  Target: LAMA2; (+) strand; PAM type: NNAGAAW; PAM sequence: AAAGAAA
gaccctgtctaaaaaaaagc

SEQ ID NO: 13391 - DNA, 20 bp, Artificial Sequence
  Description of Artificial Sequence: Synthetic oligonucleotide
  Target: LAMA2; (+) strand; PAM type: NNAGAAW; PAM sequence: AAAGAAT
tgtctaaaaaaaagcaaaga

SEQ ID NO: 13392 - DNA, 20 bp, Artificial Sequence
  Description of Artificial Sequence: Synthetic oligonucleotide
  Target: LAMA2; (+) strand; PAM type: NNAGAAW; PAM sequence: CAAGAAA
ttctgttagtaaacttccat

SEQ ID NO: 13393 - DNA, 20 bp, Artificial Sequence
  Description of Artificial Sequence: Synthetic oligonucleotide
  Target: LAMA2; (+) strand; PAM type: NNAGAAW; PAM sequence: GTAGAAT
tattttccaccaagtataaa

SEQ ID NO: 13394 - DNA, 20 bp, Artificial Sequence
  Description of Artificial Sequence: Synthetic oligonucleotide
  Target: LAMA2; (+) strand; PAM type: NNAGAAW; PAM sequence: TTAGAAT
tgtatttttattttttagtt

SEQ ID NO: 13395 - DNA, 20 bp, Artificial Sequence
  Description of Artificial Sequence: Synthetic oligonucleotide
  Target: LAMA2; (+) strand; PAM type: NNAGAAW; PAM sequence: TTAGAAA
tcttctggctccttcaccac

SEQ ID NO: 13396 - DNA, 20 bp, Artificial Sequence
  Description of Artificial Sequence: Synthetic oligonucleotide
  Target: LAMA2; (+) strand; PAM type: NNAGAAW; PAM sequence: GAAGAAT
ctcttgaaggcaaaagctgt

SEQ ID NO: 13397 - DNA, 20 bp, Artificial Sequence
  Description of Artificial Sequence: Synthetic oligonucleotide
  Target: LAMA2; (+) strand; PAM type: NNAGAAW; PAM sequence: AGAGAAA
ttttatggttgttgtctttg

SEQ ID NO: 13398 - DNA, 20 bp, Artificial Sequence
  Description of Artificial Sequence: Synthetic oligonucleotide
  Target: LAMA2; (+) strand; PAM type: NNAGAAW; PAM sequence: GAAGAAA
ggaacattttgatggattat

SEQ ID NO: 13399 - DNA, 20 bp, Artificial Sequence
  Description of Artificial Sequence: Synthetic oligonucleotide
  Target: LAMA2; (+) strand; PAM type: NNAGAAW; PAM sequence: AAAGAAT
cattttgatggattatgaag

SEQ ID NO: 13400 - DNA, 20 bp, Artificial Sequence
  Description of Artificial Sequence: Synthetic oligonucleotide
  Target: LAMA2; (+) strand; PAM type: NNAGAAW; PAM sequence: AAAGAAA
atctgccctgaataatacat

SEQ ID NO: 13401 - DNA, 20 bp, Artificial Sequence
  Description of Artificial Sequence: Synthetic oligonucleotide
  Target: LAMA2; (+) strand; PAM type: NNAGAAW; PAM sequence: TTAGAAT
agggttttcaagtaaacaat

SEQ ID NO: 13402 - DNA, 20 bp, Artificial Sequence
  Description of Artificial Sequence: Synthetic oligonucleotide
  Target: LAMA2; (+) strand; PAM type: NNAGAAW; PAM sequence: TGAGAAT
tcaggaagtgatatttgagc

SEQ ID NO: 13403 - DNA, 20 bp, Artificial Sequence
  Description of Artificial Sequence: Synthetic oligonucleotide
  Target: LAMA2; (+) strand; PAM type: NNAGAAW; PAM sequence: CCAGAAA
tttgagctgagaattaaaaa

SEQ ID NO: 13404 - DNA, 20 bp, Artificial Sequence
  Description of Artificial Sequence: Synthetic oligonucleotide
  Target: LAMA2; (+) strand; PAM type: NNAGAAW; PAM sequence: ATAGAAA
aaaaccagaaaataccagtc

SEQ ID NO: 13405 - DNA, 20 bp, Artificial Sequence
  Description of Artificial Sequence: Synthetic oligonucleotide
  Target: LAMA2; (+) strand; PAM type: NNAGAAW; PAM sequence: TGAGAAA
atattgaattctgggtataa

SEQ ID NO: 13406 - DNA, 20 bp, Artificial Sequence
  Description of Artificial Sequence: Synthetic oligonucleotide
  Target: LAMA2; (+) strand; PAM type: NNAGAAW; PAM sequence: GGAGAAT
gaagtaacattctgctaaat

SEQ ID NO: 13407 - DNA, 20 bp, Artificial Sequence
  Description of Artificial Sequence: Synthetic oligonucleotide
  Target: LAMA2; (+) strand; PAM type: NNAGAAW; PAM sequence: GAAGAAA
gactcctaggagtttggcct

SEQ ID NO: 13408 - DNA, 20 bp, Artificial Sequence
  Description of Artificial Sequence: Synthetic oligonucleotide
  Target: LAMA2; (+) strand; PAM type: NNAGAAW; PAM sequence: GCAGAAT
tagtatggattaaaggagga

SEQ ID NO: 13409 - DNA, 20 bp, Artificial Sequence
  Description of Artificial Sequence: Synthetic oligonucleotide
  Target: LAMA2; (+) strand; PAM type: NNAGAAW; PAM sequence: GGAGAAT
ctactcaggaggttgaggca

SEQ ID NO: 13410 - DNA, 20 bp, Artificial Sequence
  Description of Artificial Sequence: Synthetic oligonucleotide
  Target: LAMA2; (+) strand; PAM type: NNAGAAW; PAM sequence: TTAGAAA
aaaggcctgtttaagatcat

SEQ ID NO: 13411 - DNA, 20 bp, Artificial Sequence
  Description of Artificial Sequence: Synthetic oligonucleotide
  Target: LAMA2; (+) strand; PAM type: NNAGAAW; PAM sequence: CAAGAAA
ggtggtaagatcaaatacat

SEQ ID NO: 13412 - DNA, 20 bp, Artificial Sequence
  Description of Artificial Sequence: Synthetic oligonucleotide
  Target: LAMA2; (+) strand; PAM type: NNAGAAW; PAM sequence: AGAGAAT
tatataatatatataaaatt

SEQ ID NO: 13413 - DNA, 20 bp, Artificial Sequence
  Description of Artificial Sequence: Synthetic oligonucleotide
  Target: LAMA2; (+) strand; PAM type: NNAGAAW; PAM sequence: AAAGAAA
tgaaacaataaacacaatga

SEQ ID NO: 13414 - DNA, 20 bp, Artificial Sequence
  Description of Artificial Sequence: Synthetic oligonucleotide
  Target: LAMA2; (+) strand; PAM type: NNAGAAW; PAM sequence: TTAGAAA
tataataagttaggttcagg

SEQ ID NO: 13415 - DNA, 20 bp, Artificial Sequence
  Description of Artificial Sequence: Synthetic oligonucleotide
  Target: LAMA2; (+) strand; PAM type: NNAGAAW; PAM sequence: CTAGAAT
taaaagcttacagttgtggg

SEQ ID NO: 13416 - DNA, 20 bp, Artificial Sequence
  Description of Artificial Sequence: Synthetic oligonucleotide
  Target: LAMA2; (+) strand; PAM type: NNAGAAW; PAM sequence: GAAGAAT
gattttccatccatcattgt

SEQ ID NO: 13417 - DNA, 20 bp, Artificial Sequence
  Description of Artificial Sequence: Synthetic oligonucleotide
  Target: LAMA2; (+) strand; PAM type: NNAGAAW; PAM sequence: TAAGAAA
ataaaacgaaatacaaaaat

SEQ ID NO: 13418 - DNA, 20 bp, Artificial Sequence
  Description of Artificial Sequence: Synthetic oligonucleotide
  Target: LAMA2; (+) strand; PAM type: NNAGAAW; PAM sequence: TTAGAAT
aagacattttcccactgatt

SEQ ID NO: 13419 - DNA, 20 bp, Artificial Sequence
  Description of Artificial Sequence: Synthetic oligonucleotide
  Target: LAMA2; (+) strand; PAM type: NNAGAAW; PAM sequence: CAAGAAA
cactgattttagaatatact

SEQ ID NO: 13420 - DNA, 20 bp, Artificial Sequence
  Description of Artificial Sequence: Synthetic oligonucleotide
  Target: LAMA2; (+) strand; PAM type: NNAGAAW; PAM sequence: TCAGAAA
ttatattacctttcgatatg

SEQ ID NO: 13421 - DNA, 20 bp, Artificial Sequence
  Description of Artificial Sequence: Synthetic oligonucleotide
  Target: LAMA2; (+) strand; PAM type: NNAGAAW; PAM sequence: AAAGAAA
aaataaaatattaaaaaata

SEQ ID NO: 13422 - DNA, 20 bp, Artificial Sequence
  Description of Artificial Sequence: Synthetic oligonucleotide
  Target: LAMA2; (+) strand; PAM type: NNAGAAW; PAM sequence: ATAGAAA
ttcatcaaagatgtgtgtgt

SEQ ID NO: 13423 - DNA, 20 bp, Artificial Sequence
  Description of Artificial Sequence: Synthetic oligonucleotide
  Target: LAMA2; (+) strand; PAM type: NNAGAAW; PAM sequence: AAAGAAT
taaaataactttgatgttgg

SEQ ID NO: 13424 - DNA, 20 bp, Artificial Sequence
  Description of Artificial Sequence: Synthetic oligonucleotide
  Target: LAMA2; (+) strand; PAM type: NNAGAAW; PAM sequence: GAAGAAT
atgttggaaagaatagcagt

SEQ ID NO: 13425 - DNA, 20 bp, Artificial Sequence
  Description of Artificial Sequence: Synthetic oligonucleotide
  Target: LAMA2; (+) strand; PAM type: NNAGAAW; PAM sequence: TGAGAAT
aagaatgcccatgtaaaatt

SEQ ID NO: 13426 - DNA, 20 bp, Artificial Sequence
  Description of Artificial Sequence: Synthetic oligonucleotide
  Target: LAMA2; (+) strand; PAM type: NNAGAAW; PAM sequence: TGAGAAA
tggctatattgtcagatacc

SEQ ID NO: 13427 - DNA, 20 bp, Artificial Sequence
  Description of Artificial Sequence: Synthetic oligonucleotide
  Target: LAMA2; (+) strand; PAM type: NNAGAAW; PAM sequence: TAAGAAA
tatagaacttttcaactccg

SEQ ID NO: 13428 - DNA, 20 bp, Artificial Sequence
  Description of Artificial Sequence: Synthetic oligonucleotide
  Target: LAMA2; (+) strand; PAM type: NNAGAAW; PAM sequence: ACAGAAA
taattagtacattttgtatc

SEQ ID NO: 13429 - DNA, 20 bp, Artificial Sequence
  Description of Artificial Sequence: Synthetic oligonucleotide
  Target: LAMA2; (+) strand; PAM type: NNAGAAW; PAM sequence: TTAGAAA
acttcctcaaaatgacacag

SEQ ID NO: 13430 - DNA, 20 bp, Artificial Sequence
  Description of Artificial Sequence: Synthetic oligonucleotide
  Target: LAMA2; (+) strand; PAM type: NNAGAAW; PAM sequence: TGAGAAT
gcttctctgatatataattg

SEQ ID NO: 13431 - DNA, 20 bp, Artificial Sequence
  Description of Artificial Sequence: Synthetic oligonucleotide
  Target: LAMA2; (+) strand; PAM type: NNAGAAW; PAM sequence: TTAGAAT
taaattactacagaggagtc

SEQ ID NO: 13432 - DNA, 20 bp, Artificial Sequence
  Description of Artificial Sequence: Synthetic oligonucleotide
  Target: LAMA2; (+) strand; PAM type: NNAGAAW; PAM sequence: CCAGAAA
catatgaacttacaaattta

SEQ ID NO: 13433 - DNA, 20 bp, Artificial Sequence
  Description of Artificial Sequence: Synthetic oligonucleotide
  Target: LAMA2; (+) strand; PAM type: NNAGAAW; PAM sequence: AGAGAAA
gctcgtcatcactggccttc

SEQ ID NO: 13434 - DNA, 20 bp, Artificial Sequence
  Description of Artificial Sequence: Synthetic oligonucleotide
  Target: LAMA2; (+) strand; PAM type: NNAGAAW; PAM sequence: TTAGAAT
gagataccatcccacaccag

SEQ ID NO: 13435 - DNA, 20 bp, Artificial Sequence
  Description of Artificial Sequence: Synthetic oligonucleotide
  Target: LAMA2; (+) strand; PAM type: NNAGAAW; PAM sequence: GGAGAAA
acaggtgctggagaggatgt

SEQ ID NO: 13436 - DNA, 20 bp, Artificial Sequence
  Description of Artificial Sequence: Synthetic oligonucleotide
  Target: LAMA2; (+) strand; PAM type: NNAGAAW; PAM sequence: CTAGAAA
gattcctcaaggatctagaa

SEQ ID NO: 13437 - DNA, 20 bp, Artificial Sequence
  Description of Artificial Sequence: Synthetic oligonucleotide
  Target: LAMA2; (+) strand; PAM type: NNAGAAW; PAM sequence: TAAGAAA
ccatcaatgatagactggtt

SEQ ID NO: 13438 - DNA, 20 bp, Artificial Sequence
  Description of Artificial Sequence: Synthetic oligonucleotide
  Target: LAMA2; (+) strand; PAM type: NNAGAAW; PAM sequence: AAAGAAA
cttaaagcataataataaaa

SEQ ID NO: 13439 - DNA, 20 bp, Artificial Sequence
  Description of Artificial Sequence: Synthetic oligonucleotide
  Target: LAMA2; (+) strand; PAM type: NNAGAAW; PAM sequence: GAAGAAA
tgattttttccaaatgtttt

SEQ ID NO: 13440 - DNA, 20 bp, Artificial Sequence
  Description of Artificial Sequence: Synthetic oligonucleotide
  Target: LAMA2; (+) strand; PAM type: NNAGAAW; PAM sequence: TAAGAAA
caatttaagtaatcttcttt

SEQ ID NO: 13441 - DNA, 20 bp, Artificial Sequence
  Description of Artificial Sequence: Synthetic oligonucleotide
  Target: LAMA2; (+) strand; PAM type: NNAGAAW; PAM sequence: TCAGAAA
atcttcttttaagaaatcat

SEQ ID NO: 13442 - DNA, 20 bp, Artificial Sequence
  Description of Artificial Sequence: Synthetic oligonucleotide
  Target: LAMA2; (+) strand; PAM type: NNAGAAW; PAM sequence: TGAGAAA
aaacactgtgctggaagatt

SEQ ID NO: 13443 - DNA, 20 bp, Artificial Sequence
  Description of Artificial Sequence: Synthetic oligonucleotide
  Target: LAMA2; (+) strand; PAM type: NNAGAAW; PAM sequence: ATAGAAA
tagaagaagcatttctgaag

SEQ ID NO: 13444 - DNA, 20 bp, Artificial Sequence
  Description of Artificial Sequence: Synthetic oligonucleotide
  Target: LAMA2; (+) strand; PAM type: NNAGAAW; PAM sequence: CAAGAAA
ataaggataatttttaaaca

SEQ ID NO: 13445 - DNA, 20 bp, Artificial Sequence
  Description of Artificial Sequence: Synthetic oligonucleotide
  Target: LAMA2; (+) strand; PAM type: NNAGAAW; PAM sequence: TCAGAAA
ttgctattaaaaaccattta

SEQ ID NO: 13446 - DNA, 20 bp, Artificial Sequence
  Description of Artificial Sequence: Synthetic oligonucleotide
  Target: LAMA2; (+) strand; PAM type: NNAGAAW; PAM sequence: GTAGAAA
gatgattggattaaaagcca

SEQ ID NO: 13447 - DNA, 20 bp, Artificial Sequence
  Description of Artificial Sequence: Synthetic oligonucleotide
  Target: LAMA2; (+) strand; PAM type: NNAGAAW; PAM sequence: TAAGAAT
tacagatgttattccctgat

SEQ ID NO: 13448 - DNA, 20 bp, Artificial Sequence
  Description of Artificial Sequence: Synthetic oligonucleotide
  Target: LAMA2; (+) strand; PAM type: NNAGAAW; PAM sequence: TGAGAAT
ataatgtggagattctgttt

SEQ ID NO: 13449 - DNA, 20 bp, Artificial Sequence
  Description of Artificial Sequence: Synthetic oligonucleotide
  Target: LAMA2; (+) strand; PAM type: NNAGAAW; PAM sequence: TGAGAAA
tgtctgtatttttgttttcc

SEQ ID NO: 13450 - DNA, 20 bp, Artificial Sequence
  Description of Artificial Sequence: Synthetic oligonucleotide
  Target: LAMA2; (+) strand; PAM type: NNAGAAW; PAM sequence: TAAGAAT
gactgttgatgggggaatta

SEQ ID NO: 13451 - DNA, 20 bp, Artificial Sequence
  Description of Artificial Sequence: Synthetic oligonucleotide
  Target: LAMA2; (+) strand; PAM type: NNAGAAW; PAM sequence: TGAGAAA
ttatgaaggaagtatatgtg

SEQ ID NO: 13452 - DNA, 20 bp, Artificial Sequence
  Description of Artificial Sequence: Synthetic oligonucleotide
  Target: LAMA2; (+) strand; PAM type: NNAGAAW; PAM sequence: GCAGAAT
tttaaaatatatatggaaat

SEQ ID NO: 13453 - DNA, 20 bp, Artificial Sequence
  Description of Artificial Sequence: Synthetic oligonucleotide
  Target: LAMA2; (+) strand; PAM type: NNAGAAW; PAM sequence: TGAGAAT
caacctcctaaaaagattac

SEQ ID NO: 13454 - DNA, 20 bp, Artificial Sequence
  Description of Artificial Sequence: Synthetic oligonucleotide
  Target: LAMA2; (+) strand; PAM type: NNAGAAW; PAM sequence: CAAGAAT
ttctaaaatgttgttcatgt

SEQ ID NO: 13455 - DNA, 20 bp, Artificial Sequence
  Description of Artificial Sequence: Synthetic oligonucleotide
  Target: LAMA2; (+) strand; PAM type: NNAGAAW; PAM sequence: GAAGAAT
agacacaaaaatgattaact

SEQ ID NO: 13456 - DNA, 20 bp, Artificial Sequence
  Description of Artificial Sequence: Synthetic oligonucleotide
  Target: LAMA2; (+) strand; PAM type: NNAGAAW; PAM sequence: GTAGAAT
tgtttacacatatgttcata

SEQ ID NO: 13457 - DNA, 20 bp, Artificial Sequence
  Description of Artificial Sequence: Synthetic oligonucleotide
  Target: LAMA2; (+) strand; PAM type: NNAGAAW; PAM sequence: TAAGAAT
tgttttattggacagggatt

SEQ ID NO: 13458 - DNA, 20 bp, Artificial Sequence
  Description of Artificial Sequence: Synthetic oligonucleotide
  Target: LAMA2; (+) strand; PAM type: NNAGAAW; PAM sequence: TCAGAAT
attggacagggatttaagaa

SEQ ID NO: 13459 - DNA, 20 bp, Artificial Sequence
  Description of Artificial Sequence: Synthetic oligonucleotide
  Target: LAMA2; (+) strand; PAM type: NNAGAAW; PAM sequence: ACAGAAA
acagcaggacacatggcatt

SEQ ID NO: 13460 - DNA, 20 bp, Artificial Sequence
  Description of Artificial Sequence: Synthetic oligonucleotide
  Target: LAMA2; (+) strand; PAM type: NNAGAAW; PAM sequence: TTAGAAA
gaattggaaaaatattaatg

SEQ ID NO: 13461 - DNA, 20 bp, Artificial Sequence
  Description of Artificial Sequence: Synthetic oligonucleotide
  Target: LAMA2; (+) strand; PAM type: NNAGAAW; PAM sequence: TCAGAAA
tccacgggtccttttgagct

SEQ ID NO: 13462 - DNA, 20 bp, Artificial Sequence
  Description of Artificial Sequence: Synthetic oligonucleotide
  Target: LAMA2; (+) strand; PAM type: NNAGAAW; PAM sequence: TCAGAAA
ttatgtggttagtataaaat

SEQ ID NO: 13463 - DNA, 20 bp, Artificial Sequence
  Description of Artificial Sequence: Synthetic oligonucleotide
  Target: LAMA2; (+) strand; PAM type: NNAGAAW; PAM sequence: GGAGAAA
tataaaattcagaaaaattg

SEQ ID NO: 13464 - DNA, 20 bp, Artificial Sequence
  Description of Artificial Sequence: Synthetic oligonucleotide
  Target: LAMA2; (+) strand; PAM type: NNAGAAW; PAM sequence: GAAGAAT
attgggagaaaatacaagga

SEQ ID NO: 13465 - DNA, 20 bp, Artificial Sequence
  Description of Artificial Sequence: Synthetic oligonucleotide
  Target: LAMA2; (+) strand; PAM type: NNAGAAW; PAM sequence: TCAGAAA
ctcttaaaaatggtagcttt

SEQ ID NO: 13466 - DNA, 20 bp, Artificial Sequence
  Description of Artificial Sequence: Synthetic oligonucleotide
  Target: LAMA2; (+) strand; PAM type: NNAGAAW; PAM sequence: TGAGAAA
aactgctttgcattccatct

SEQ ID NO: 13467 - DNA, 20 bp, Artificial Sequence
  Description of Artificial Sequence: Synthetic oligonucleotide
  Target: LAMA2; (+) strand; PAM type: NNAGAAW; PAM sequence: GAAGAAA
cttttgcaagtcttcgtttt

SEQ ID NO: 13468 - DNA, 20 bp, Artificial Sequence
  Description of Artificial Sequence: Synthetic oligonucleotide
  Target: LAMA2; (+) strand; PAM type: NNAGAAW; PAM sequence: AAAGAAT
tgcaagtcttcgttttgaag

SEQ ID NO: 13469 - DNA, 20 bp, Artificial Sequence
  Description of Artificial Sequence: Synthetic oligonucleotide
  Target: LAMA2; (+) strand; PAM type: NNAGAAW; PAM sequence: TTAGAAA
ttgaagaaagaatgtgtgat

SEQ ID NO: 13470 - DNA, 20 bp, Artificial Sequence
  Description of Artificial Sequence: Synthetic oligonucleotide
  Target: LAMA2; (+) strand; PAM type: NNAGAAW; PAM sequence: AAAGAAA
aaacaaaattaaattatcaa

SEQ ID NO: 13471 - DNA, 20 bp, Artificial Sequence
  Description of Artificial Sequence: Synthetic oligonucleotide
  Target: LAMA2; (+) strand; PAM type: NNAGAAW; PAM sequence: TGAGAAT
ttaaaatataaaatgagaca

SEQ ID NO: 13472 - DNA, 20 bp, Artificial Sequence
  Description of Artificial Sequence: Synthetic oligonucleotide
  Target: LAMA2; (+) strand; PAM type: NNAGAAW; PAM sequence: TTAGAAA
gacatgagaataaccttagg

SEQ ID NO: 13473 - DNA, 20 bp, Artificial Sequence
  Description of Artificial Sequence: Synthetic oligonucleotide
  Target: LAMA2; (+) strand; PAM type: NNAGAAW; PAM sequence: GTAGAAA
cttaggttagaaattcagat

SEQ ID NO: 13474 - DNA, 20 bp, Artificial Sequence
  Description of Artificial Sequence: Synthetic oligonucleotide
  Target: LAMA2; (+) strand; PAM type: NNAGAAW; PAM sequence: GTAGAAT
ttctttctggaggctctaag

SEQ ID NO: 13475 - DNA, 20 bp, Artificial Sequence
  Description of Artificial Sequence: Synthetic oligonucleotide
  Target: LAMA2; (+) strand; PAM type: NNAGAAW; PAM sequence: AAAGAAT
ttcatttaggatagaagctg

SEQ ID NO: 13476 - DNA, 20 bp, Artificial Sequence
  Description of Artificial Sequence: Synthetic oligonucleotide
  Target: LAMA2; (+) strand; PAM type: NNAGAAW; PAM sequence: CAAGAAT
agggtcatattcacaggttc

SEQ ID NO: 13477 - DNA, 20 bp, Artificial Sequence
  Description of Artificial Sequence: Synthetic oligonucleotide
  Target: LAMA2; (+) strand; PAM type: NNAGAAW; PAM sequence: GCAGAAA
gtctcttagagttcttgtta

SEQ ID NO: 13478 - DNA, 20 bp, Artificial Sequence
  Description of Artificial Sequence: Synthetic oligonucleotide
  Target: LAMA2; (+) strand; PAM type: NNAGAAW; PAM sequence: AGAGAAA
ggcgcacatacaggggttgg

SEQ ID NO: 13479 - DNA, 20 bp, Artificial Sequence
  Description of Artificial Sequence: Synthetic oligonucleotide
  Target: LAMA2; (+) strand; PAM type: NNAGAAW; PAM sequence: AAAGAAA
aatgtggtttccttttatta

SEQ ID NO: 13480 - DNA, 20 bp, Artificial Sequence
  Description of Artificial Sequence: Synthetic oligonucleotide
  Target: LAMA2; (+) strand; PAM type: NNAGAAW; PAM sequence: AAAGAAA
ttaatagatattacttttcc

SEQ ID NO: 13481 - DNA, 20 bp, Artificial Sequence
  Description of Artificial Sequence: Synthetic oligonucleotide
  Target: LAMA2; (+) strand; PAM type: NNAGAAW; PAM sequence: TCAGAAA
ttacttttccaaagaaaatt

SEQ ID NO: 13482 - DNA, 20 bp, Artificial Sequence
  Description of Artificial Sequence: Synthetic oligonucleotide
  Target: LAMA2; (+) strand; PAM type: NNAGAAW; PAM sequence: GGAGAAA
actttaaagataaggatgat

SEQ ID NO: 13483 - DNA, 20 bp, Artificial Sequence
  Description of Artificial Sequence: Synthetic oligonucleotide
  Target: LAMA2; (+) strand; PAM type: NNAGAAW; PAM sequence: GTAGAAA
catggactacaagggatcaa

SEQ ID NO: 13484 - DNA, 20 bp, Artificial Sequence
  Description of Artificial Sequence: Synthetic oligonucleotide
  Target: LAMA2; (+) strand; PAM type: NNAGAAW; PAM sequence: TAAGAAA
cagagggtacaggctactct

SEQ ID NO: 13485 - DNA, 20 bp, Artificial Sequence
  Description of Artificial Sequence: Synthetic oligonucleotide
  Target: LAMA2; (+) strand; PAM type: NNAGAAW; PAM sequence: TAAGAAA
agaaagtccctagagaagga

SEQ ID NO: 13486 - DNA, 20 bp, Artificial Sequence
  Description of Artificial Sequence: Synthetic oligonucleotide
  Target: LAMA2; (+) strand; PAM type: NNAGAAW; PAM sequence: GAAGAAT
atcaacagcatcccaaggca

SEQ ID NO: 13487 - DNA, 20 bp, Artificial Sequence
  Description of Artificial Sequence: Synthetic oligonucleotide
  Target: LAMA2; (+) strand; PAM type: NNAGAAW; PAM sequence: AAAGAAT
taagtgactctgatctgttg

SEQ ID NO: 13488 - DNA, 20 bp, Artificial Sequence
  Description of Artificial Sequence: Synthetic oligonucleotide
  Target: LAMA2; (+) strand; PAM type: NNAGAAW; PAM sequence: TCAGAAA
aaagaattcatgaaccaaga

SEQ ID NO: 13489 - DNA, 20 bp, Artificial Sequence
  Description of Artificial Sequence: Synthetic oligonucleotide
  Target: LAMA2; (+) strand; PAM type: NNAGAAW; PAM sequence: GGAGAAT
tgtgtgtaatgtcataaatt

SEQ ID NO: 13490 - DNA, 20 bp, Artificial Sequence
  Description of Artificial Sequence: Synthetic oligonucleotide
  Target: LAMA2; (+) strand; PAM type: NNAGAAW; PAM sequence: AGAGAAA
accacagattgtttcaaatg

SEQ ID NO: 13491 - DNA, 20 bp, Artificial Sequence
  Description of Artificial Sequence: Synthetic oligonucleotide
  Target: LAMA2; (+) strand; PAM type: NNAGAAW; PAM sequence: AGAGAAT
tgagagaaaaatatgtgaga

SEQ ID NO: 13492 - DNA, 20 bp, Artificial Sequence
  Description of Artificial Sequence: Synthetic oligonucleotide
  Target: LAMA2; (+) strand; PAM type: NNAGAAW; PAM sequence: AAAGAAT
tagagctgataattaatttg

SEQ ID NO: 13493 - DNA, 20 bp, Artificial Sequence
  Description of Artificial Sequence: Synthetic oligonucleotide
  Target: LAMA2; (+) strand; PAM type: NNAGAAW; PAM sequence: TAAGAAT
ttaaagcatatttcttgagc

SEQ ID NO: 13494 - DNA, 20 bp, Artificial Sequence
  Description of Artificial Sequence: Synthetic oligonucleotide
  Target: LAMA2; (+) strand; PAM type: NNAGAAW; PAM sequence: TAAGAAA
taaccatttatcaagataat

SEQ ID NO: 13495 - DNA, 20 bp, Artificial Sequence
  Description of Artificial Sequence: Synthetic oligonucleotide
  Target: LAMA2; (+) strand; PAM type: NNAGAAW; PAM sequence: AGAGAAT
tcaaatatacacaaaagtat

SEQ ID NO: 13496 - DNA, 20 bp, Artificial Sequence
  Description of Artificial Sequence: Synthetic oligonucleotide
  Target: LAMA2; (+) strand; PAM type: NNAGAAW; PAM sequence: GAAGAAA
tccttgcaacttattttttt

SEQ ID NO: 13497 - DNA, 20 bp, Artificial Sequence
  Description of Artificial Sequence: Synthetic oligonucleotide
  Target: LAMA2; (+) strand; PAM type: NNAGAAW; PAM sequence: GCAGAAA
ctatgtgcttccatcacact

SEQ ID NO: 13498 - DNA, 20 bp, Artificial Sequence
  Description of Artificial Sequence: Synthetic oligonucleotide
  Target: LAMA2; (+) strand; PAM type: NNAGAAW; PAM sequence: ATAGAAA
tgaagtaaatttacctgaag

SEQ ID NO: 13499 - DNA, 20 bp, Artificial Sequence
  Description of Artificial Sequence: Synthetic oligonucleotide
  Target: LAMA2; (+) strand; PAM type: NNAGAAW; PAM sequence: ACAGAAA
taaggggacataaaactcac

SEQ ID NO: 13500 - DNA, 20 bp, Artificial Sequence
  Description of Artificial Sequence: Synthetic oligonucleotide
  Target: LAMA2; (+) strand; PAM type: NNAGAAW; PAM sequence: TCAGAAT
caagtccacttatagcattg

SEQ ID NO: 13501 - DNA, 20 bp, Artificial Sequence
  Description of Artificial Sequence: Synthetic oligonucleotide
  Target: LAMA2; (+) strand; PAM type: NNAGAAW; PAM sequence: CCAGAAA
agcaactcaccacagacctt

SEQ ID NO: 13502 - DNA, 20 bp, Artificial Sequence
  Description of Artificial Sequence: Synthetic oligonucleotide
  Target: LAMA2; (+) strand; PAM type: NNAGAAW; PAM sequence: AGAGAAT
cgttcctatttggataaata

SEQ ID NO: 13503 - DNA, 20 bp, Artificial Sequence
  Description of Artificial Sequence: Synthetic oligonucleotide
  Target: LAMA2; (+) strand; PAM type: NNAGAAW; PAM sequence: CTAGAAA
aacatgggcaagagcacata

SEQ ID NO: 13504 - DNA, 20 bp, Artificial Sequence
  Description of Artificial Sequence: Synthetic oligonucleotide
  Target: LAMA2; (+) strand; PAM type: NNAGAAW; PAM sequence: GCAGAAA
gaggcggagctcaacattga

SEQ ID NO: 13505 - DNA, 20 bp, Artificial Sequence
  Description of Artificial Sequence: Synthetic oligonucleotide
  Target: LAMA2; (+) strand; PAM type: NNAGAAW; PAM sequence: TAAGAAA
atgctgttctcttgagagat

SEQ ID NO: 13506 - DNA, 20 bp, Artificial Sequence
  Description of Artificial Sequence: Synthetic oligonucleotide
  Target: LAMA2; (+) strand; PAM type: NNAGAAW; PAM sequence: AAAGAAT
tgttctcttgagagattaag

SEQ ID NO: 13507 - DNA, 20 bp, Artificial Sequence
  Description of Artificial Sequence: Synthetic oligonucleotide
  Target: LAMA2; (+) strand; PAM type: NNAGAAW; PAM sequence: ACAGAAT
tatggccttattacatcatt

SEQ ID NO: 13508 - DNA, 20 bp, Artificial Sequence
  Description of Artificial Sequence: Synthetic oligonucleotide
  Target: LAMA2; (+) strand; PAM type: NNAGAAW; PAM sequence: CTAGAAA
aagacttagcaatgcatgtt

SEQ ID NO: 13509 - DNA, 20 bp, Artificial Sequence
  Description of Artificial Sequence: Synthetic oligonucleotide
  Target: LAMA2; (+) strand; PAM type: NNAGAAW; PAM sequence: TAAGAAA
ttttgagactaaaggattct

SEQ ID NO: 13510 - DNA, 20 bp, Artificial Sequence
  Description of Artificial Sequence: Synthetic oligonucleotide
  Target: LAMA2; (+) strand; PAM type: NNAGAAW; PAM sequence: ATAGAAA
agtaacaaatggaatatgaa

SEQ ID NO: 13511 - DNA, 20 bp, Artificial Sequence
  Description of Artificial Sequence: Synthetic oligonucleotide
  Target: LAMA2; (+) strand; PAM type: NNAGAAW; PAM sequence: ACAGAAA
tttgtaacaagtgcccttca

SEQ ID NO: 13512 - DNA, 20 bp, Artificial Sequence
  Description of Artificial Sequence: Synthetic oligonucleotide
  Target: LAMA2; (+) strand; PAM type: NNAGAAW; PAM sequence: ATAGAAA
acacagttaataaaagtagc

SEQ ID NO: 13513 - DNA, 20 bp, Artificial Sequence
  Description of Artificial Sequence: Synthetic oligonucleotide
  Target: LAMA2; (+) strand; PAM type: NNAGAAW; PAM sequence: TTAGAAA
aaatatttggagtacagtac

SEQ ID NO: 13514 - DNA, 20 bp, Artificial Sequence
  Description of Artificial Sequence: Synthetic oligonucleotide
  Target: LAMA2; (+) strand; PAM type: NNAGAAW; PAM sequence: TAAGAAT
agttactctctgaagcctgc

SEQ ID NO: 13515 - DNA, 20 bp, Artificial Sequence
  Description of Artificial Sequence: Synthetic oligonucleotide
  Target: LAMA2; (+) strand; PAM type: NNAGAAW; PAM sequence: AAAGAAA
caagtcatttaagaagtcca

SEQ ID NO: 13516 - DNA, 20 bp, Artificial Sequence
  Description of Artificial Sequence: Synthetic oligonucleotide
  Target: LAMA2; (+) strand; PAM type: NNAGAAW; PAM sequence: ATAGAAA
catggaatgtgaaagaaccc

SEQ ID NO: 13517 - DNA, 20 bp, Artificial Sequence
  Description of Artificial Sequence: Synthetic oligonucleotide
  Target: LAMA2; (+) strand; PAM type: NNAGAAW; PAM sequence: ATAGAAA
gctggcagttatgttgaatt

SEQ ID NO: 13518 - DNA, 20 bp, Artificial Sequence
  Description of Artificial Sequence: Synthetic oligonucleotide
  Target: LAMA2; (+) strand; PAM type: NNAGAAW; PAM sequence: TTAGAAA
tctcttccctggttgtgtct

SEQ ID NO: 13519 - DNA, 20 bp, Artificial Sequence
  Description of Artificial Sequence: Synthetic oligonucleotide
  Target: LAMA2; (+) strand; PAM type: NNAGAAW; PAM sequence: AAAGAAA
tccctggttgtgtctttaga

SEQ ID NO: 13520 - DNA, 20 bp, Artificial Sequence
  Description of Artificial Sequence: Synthetic oligonucleotide
  Target: LAMA2; (+) strand; PAM type: NNAGAAW; PAM sequence: GAAGAAT
atcaaatgcccaccatttca

SEQ ID NO: 13521 - DNA, 20 bp, Artificial Sequence
  Description of Artificial Sequence: Synthetic oligonucleotide
  Target: LAMA2; (+) strand; PAM type: NNAGAAW; PAM sequence: GAAGAAT
aacccatttctcatttgcct

SEQ ID NO: 13522 - DNA, 20 bp, Artificial Sequence
  Description of Artificial Sequence: Synthetic oligonucleotide
  Target: LAMA2; (+) strand; PAM type: NNAGAAW; PAM sequence: CTAGAAA
ttgattgctgaaatcaaatc

SEQ ID NO: 13523 - DNA, 20 bp, Artificial Sequence
  Description of Artificial Sequence: Synthetic oligonucleotide
  Target: LAMA2; (+) strand; PAM type: NNAGAAW; PAM sequence: TTAGAAA
ggattagagataagttttat

SEQ ID NO: 13524 - DNA, 20 bp, Artificial Sequence
  Description of Artificial Sequence: Synthetic oligonucleotide
  Target: LAMA2; (+) strand; PAM type: NNAGAAW; PAM sequence: TAAGAAA
gttttatttagaaataactc

SEQ ID NO: 13525 - DNA, 20 bp, Artificial Sequence
  Description of Artificial Sequence: Synthetic oligonucleotide
  Target: LAMA2; (+) strand; PAM type: NNAGAAW; PAM sequence: GGAGAAT
ctacttgggaggctgaggca

SEQ ID NO: 13526 - DNA, 20 bp, Artificial Sequence
  Description of Artificial Sequence: Synthetic oligonucleotide
  Target: LAMA2; (+) strand; PAM type: NNAGAAW; PAM sequence: GCAGAAT
atgttcatacaaaaaatata

SEQ ID NO: 13527 - DNA, 20 bp, Artificial Sequence
  Description of Artificial Sequence: Synthetic oligonucleotide
  Target: LAMA2; (+) strand; PAM type: NNAGAAW; PAM sequence: ACAGAAT
ctgcagtgatactcaataaa

SEQ ID NO: 13528 - DNA, 20 bp, Artificial Sequence
  Description of Artificial Sequence: Synthetic oligonucleotide
  Target: LAMA2; (+) strand; PAM type: NNAGAAW; PAM sequence: CTAGAAT
tatgcactaccacaaaacat

SEQ ID NO: 13529 - DNA, 20 bp, Artificial Sequence
  Description of Artificial Sequence: Synthetic oligonucleotide
  Target: LAMA2; (+) strand; PAM type: NNAGAAW; PAM sequence: ACAGAAA
accttttgtaaagagaaggt

SEQ ID NO: 13530 - DNA, 20 bp, Artificial Sequence
  Description of Artificial Sequence: Synthetic oligonucleotide
  Target: LAMA2; (+) strand; PAM type: NNAGAAW; PAM sequence: ATAGAAT
tcagagaacattataagatt

SEQ ID NO: 13531 - DNA, 20 bp, Artificial Sequence
  Description of Artificial Sequence: Synthetic oligonucleotide
  Target: LAMA2; (+) strand; PAM type: NNAGAAW; PAM sequence: TGAGAAT
ttatatttgacataaaatga

SEQ ID NO: 13532 - DNA, 20 bp, Artificial Sequence
  Description of Artificial Sequence: Synthetic oligonucleotide
  Target: LAMA2; (+) strand; PAM type: NNAGAAW; PAM sequence: TTAGAAA
tttactccaagatacacccc

SEQ ID NO: 13533 - DNA, 20 bp, Artificial Sequence
  Description of Artificial Sequence: Synthetic oligonucleotide
  Target: LAMA2; (+) strand; PAM type: NNAGAAW; PAM sequence: TGAGAAA
tagaaaatggagaggtaaga

SEQ ID NO: 13534 - DNA, 20 bp, Artificial Sequence
  Description of Artificial Sequence: Synthetic oligonucleotide
  Target: LAMA2; (+) strand; PAM type: NNAGAAW; PAM sequence: TCAGAAA
gatacggtgaaataggcctg

SEQ ID NO: 13535 - DNA, 20 bp, Artificial Sequence
  Description of Artificial Sequence: Synthetic oligonucleotide
  Target: LAMA2; (+) strand; PAM type: NNAGAAW; PAM sequence: AAAGAAA
taaatgagttattaaataaa

SEQ ID NO: 13536 - DNA, 20 bp, Artificial Sequence
  Description of Artificial Sequence: Synthetic oligonucleotide
  Target: LAMA2; (+) strand; PAM type: NNAGAAW; PAM sequence: TTAGAAT
aaaagaaaaacctgaggtga

SEQ ID NO: 13537 - DNA, 20 bp, Artificial Sequence
  Description of Artificial Sequence: Synthetic oligonucleotide
  Target: LAMA2; (+) strand; PAM type: NNAGAAW; PAM sequence: AAAGAAA
ttggtctgaagatggagaca

SEQ ID NO: 13538 - DNA, 20 bp, Artificial Sequence
  Description of Artificial Sequence: Synthetic oligonucleotide
  Target: LAMA2; (+) strand; PAM type: NNAGAAW; PAM sequence: GAAGAAA
gacaaaagaaatgaatttgt

SEQ ID NO: 13539 - DNA, 20 bp, Artificial Sequence
  Description of Artificial Sequence: Synthetic oligonucleotide
  Target: LAMA2; (+) strand; PAM type: NNAGAAW; PAM sequence: TCAGAAA
catcatttatatttacattt

SEQ ID NO: 13540 - DNA, 20 bp, Artificial Sequence
  Description of Artificial Sequence: Synthetic oligonucleotide
  Target: LAMA2; (+) strand; PAM type: NNAGAAW; PAM sequence: GCAGAAA
cattccaaatggtactctca

SEQ ID NO: 13541 - DNA, 20 bp, Artificial Sequence
  Description of Artificial Sequence: Synthetic oligonucleotide
  Target: LAMA2; (+) strand; PAM type: NNAGAAW; PAM sequence: GCAGAAA
aggatatgggagtagggagt

SEQ ID NO: 13542 - DNA, 20 bp, Artificial Sequence
  Description of Artificial Sequence: Synthetic oligonucleotide
  Target: LAMA2; (+) strand; PAM type: NNAGAAW; PAM sequence: TCAGAAA
acctttaaaaatgattcaat

SEQ ID NO: 13543 - DNA, 20 bp, Artificial Sequence
  Description of Artificial Sequence: Synthetic oligonucleotide
  Target: LAMA2; (+) strand; PAM type: NNAGAAW; PAM sequence: ACAGAAA
ggaagtgaatgaaataagga

SEQ ID NO: 13544 - DNA, 20 bp, Artificial Sequence
  Description of Artificial Sequence: Synthetic oligonucleotide
  Target: LAMA2; (+) strand; PAM type: NNAGAAW; PAM sequence: ATAGAAT
agtaattcaaaatatttgcc

SEQ ID NO: 13545 - DNA, 20 bp, Artificial Sequence
  Description of Artificial Sequence: Synthetic oligonucleotide
  Target: LAMA2; (+) strand; PAM type: NNAGAAW; PAM sequence: GAAGAAT
tgccatagaatgataagact

SEQ ID NO: 13546 - DNA, 20 bp, Artificial Sequence
  Description of Artificial Sequence: Synthetic oligonucleotide
  Target: LAMA2; (+) strand; PAM type: NNAGAAW; PAM sequence: TAAGAAT
agaatgataagactgaagaa

SEQ ID NO: 13547 - DNA, 20 bp, Artificial Sequence
  Description of Artificial Sequence: Synthetic oligonucleotide
  Target: LAMA2; (+) strand; PAM type: NNAGAAW; PAM sequence: GTAGAAA
tattgctggatctaatgtaa

SEQ ID NO: 13548 - DNA, 20 bp, Artificial Sequence
  Description of Artificial Sequence: Synthetic oligonucleotide
  Target: LAMA2; (+) strand; PAM type: NNAGAAW; PAM sequence: AAAGAAT
gctggatctaatgtaagtag

SEQ ID NO: 13549 - DNA, 20 bp, Artificial Sequence
  Description of Artificial Sequence: Synthetic oligonucleotide
  Target: LAMA2; (+) strand; PAM type: NNAGAAW; PAM sequence: ATAGAAA
taattctgatatatcatggc

SEQ ID NO: 13550 - DNA, 20 bp, Artificial Sequence
  Description of Artificial Sequence: Synthetic oligonucleotide
  Target: LAMA2; (+) strand; PAM type: NNAGAAW; PAM sequence: AGAGAAA
agagaagtgacagtcaaata

SEQ ID NO: 13551 - DNA, 20 bp, Artificial Sequence
  Description of Artificial Sequence: Synthetic oligonucleotide
  Target: LAMA2; (+) strand; PAM type: NNAGAAW; PAM sequence: TCAGAAT
cacattgagaagataacttc

SEQ ID NO: 13552 - DNA, 20 bp, Artificial Sequence
  Description of Artificial Sequence: Synthetic oligonucleotide
  Target: LAMA2; (+) strand; PAM type: NNAGAAW; PAM sequence: ACAGAAT
atgtgttaaactcggtacat

SEQ ID NO: 13553 - DNA, 20 bp, Artificial Sequence
  Description of Artificial Sequence: Synthetic oligonucleotide
  Target: LAMA2; (+) strand; PAM type: NNAGAAW; PAM sequence: GTAGAAT
gagggatattgttatcagat

SEQ ID NO: 13554 - DNA, 20 bp, Artificial Sequence
  Description of Artificial Sequence: Synthetic oligonucleotide
  Target: LAMA2; (+) strand; PAM type: NNAGAAW; PAM sequence: AGAGAAT
ctgatttccattgcttatgt

SEQ ID NO: 13555 - DNA, 20 bp, Artificial Sequence
  Description of Artificial Sequence: Synthetic oligonucleotide
  Target: LAMA2; (+) strand; PAM type: NNAGAAW; PAM sequence: GCAGAAA
cagccaccacactggattgg

SEQ ID NO: 13556 - DNA, 20 bp, Artificial Sequence
  Description of Artificial Sequence: Synthetic oligonucleotide
  Target: LAMA2; (+) strand; PAM type: NNAGAAW; PAM sequence: TCAGAAA
aagtgatgtctttcatcagt

SEQ ID NO: 13557 - DNA, 20 bp, Artificial Sequence
  Description of Artificial Sequence: Synthetic oligonucleotide
  Target: LAMA2; (+) strand; PAM type: NNAGAAW; PAM sequence: AGAGAAT
taacagaagttgtatttgaa

SEQ ID NO: 13558 - DNA, 20 bp, Artificial Sequence
  Description of Artificial Sequence: Synthetic oligonucleotide
  Target: LAMA2; (+) strand; PAM type: NNAGAAW; PAM sequence: GTAGAAA
ttgtatttgaaagagaatgt

SEQ ID NO: 13559 - DNA, 20 bp, Artificial Sequence
  Description of Artificial Sequence: Synthetic oligonucleotide
  Target: LAMA2; (+) strand; PAM type: NNAGAAW; PAM sequence: AGAGAAT
cacacatgtatgaagattat

SEQ ID NO: 13560 - DNA, 20 bp, Artificial Sequence
  Description of Artificial Sequence: Synthetic oligonucleotide
  Target: LAMA2; (+) strand; PAM type: NNAGAAW; PAM sequence: TAAGAAA
gacagttttaagagatattt

SEQ ID NO: 13561 - DNA, 20 bp, Artificial Sequence
  Description of Artificial Sequence: Synthetic oligonucleotide
  Target: LAMA2; (+) strand; PAM type: NNAGAAW; PAM sequence: TCAGAAA
caaaatattccttaaatatg

SEQ ID NO: 13562 - DNA, 20 bp, Artificial Sequence
  Description of Artificial Sequence: Synthetic oligonucleotide
  Target: LAMA2; (+) strand; PAM type: NNAGAAW; PAM sequence: TAAGAAA
ttccttaaatatgtcagaaa

SEQ ID NO: 13563 - DNA, 20 bp, Artificial Sequence
  Description of Artificial Sequence: Synthetic oligonucleotide
  Target: LAMA2; (+) strand; PAM type: NNAGAAW; PAM sequence: CAAGAAA
caggctcaaactcctaggct

SEQ ID NO: 13564 - DNA, 20 bp, Artificial Sequence
  Description of Artificial Sequence: Synthetic oligonucleotide
  Target: LAMA2; (+) strand; PAM type: NNAGAAW; PAM sequence: AAAGAAT
tattacatttccacttgtct

SEQ ID NO: 13565 - DNA, 20 bp, Artificial Sequence
  Description of Artificial Sequence: Synthetic oligonucleotide
  Target: LAMA2; (+) strand; PAM type: NNAGAAW; PAM sequence: CAAGAAA
gaactgggttcaactactac

SEQ ID NO: 13566 - DNA, 20 bp, Artificial Sequence
  Description of Artificial Sequence: Synthetic oligonucleotide
  Target: LAMA2; (+) strand; PAM type: NNAGAAW; PAM sequence: GCAGAAA
acagcccaagtgctgcctct

SEQ ID NO: 13567 - DNA, 20 bp, Artificial Sequence
  Description of Artificial Sequence: Synthetic oligonucleotide
  Target: LAMA2; (+) strand; PAM type: NNAGAAW; PAM sequence: AAAGAAT
agggcaccagttatttaggg

SEQ ID NO: 13568 - DNA, 20 bp, Artificial Sequence
  Description of Artificial Sequence: Synthetic oligonucleotide
  Target: LAMA2; (+) strand; PAM type: NNAGAAW; PAM sequence: GAAGAAA
cattctaactacttccaact

SEQ ID NO: 13569 - DNA, 20 bp, Artificial Sequence
  Description of Artificial Sequence: Synthetic oligonucleotide
  Target: LAMA2; (+) strand; PAM type: NNAGAAW; PAM sequence: GAAGAAT
ggtcaaaggggtatctgaga

SEQ ID NO: 13570 - DNA, 20 bp, Artificial Sequence
  Description of Artificial Sequence: Synthetic oligonucleotide
  Target: LAMA2; (+) strand; PAM type: NNAGAAW; PAM sequence: CTAGAAT
atggcactgctttagagatc

SEQ ID NO: 13571 - DNA, 20 bp, Artificial Sequence
  Description of Artificial Sequence: Synthetic oligonucleotide
  Target: LAMA2; (+) strand; PAM type: NNAGAAW; PAM sequence: GGAGAAA
aggcttgtataaaaatccct

SEQ ID NO: 13572 - DNA, 20 bp, Artificial Sequence
  Description of Artificial Sequence: Synthetic oligonucleotide
  Target: LAMA2; (+) strand; PAM type: NNAGAAW; PAM sequence: ACAGAAT
ttattttgatttcctatgtg

SEQ ID NO: 13573 - DNA, 20 bp, Artificial Sequence
  Description of Artificial Sequence: Synthetic oligonucleotide
  Target: LAMA2; (+) strand; PAM type: NNAGAAW; PAM sequence: ACAGAAT
acagaattttatatatacag

SEQ ID NO: 13574 - DNA, 20 bp, Artificial Sequence
  Description of Artificial Sequence: Synthetic oligonucleotide
  Target: LAMA2; (+) strand; PAM type: NNAGAAW; PAM sequence: TTAGAAT
atctgacattatggtggtcc

SEQ ID NO: 13575 - DNA, 20 bp, Artificial Sequence
  Description of Artificial Sequence: Synthetic oligonucleotide
  Target: LAMA2; (+) strand; PAM type: NNAGAAW; PAM sequence: TCAGAAA
agactgtattaaaaaatgtt

SEQ ID NO: 13576 - DNA, 20 bp, Artificial Sequence
  Description of Artificial Sequence: Synthetic oligonucleotide
  Target: LAMA2; (+) strand; PAM type: NNAGAAW; PAM sequence: GGAGAAA
ccttgcaattgttcctttag

SEQ ID NO: 13577 - DNA, 20 bp, Artificial Sequence
  Description of Artificial Sequence: Synthetic oligonucleotide
  Target: LAMA2; (+) strand; PAM type: NNAGAAW; PAM sequence: ATAGAAA
ctaatttgtattggttttca

SEQ ID NO: 13578 - DNA, 20 bp, Artificial Sequence
  Description of Artificial Sequence: Synthetic oligonucleotide
  Target: LAMA2; (+) strand; PAM type: NNAGAAW; PAM sequence: CCAGAAA
tatatatatatatacaatgc

SEQ ID NO: 13579 - DNA, 20 bp, Artificial Sequence
  Description of Artificial Sequence: Synthetic oligonucleotide
  Target: LAMA2; (+) strand; PAM type: NNAGAAW; PAM sequence: AGAGAAA
gttgaaaaacaaagatggcc

SEQ ID NO: 13580 - DNA, 20 bp, Artificial Sequence
  Description of Artificial Sequence: Synthetic oligonucleotide
  Target: LAMA2; (+) strand; PAM type: NNAGAAW; PAM sequence: TGAGAAT
agatggccagagaaactgaa

SEQ ID NO: 13581 - DNA, 20 bp, Artificial Sequence
  Description of Artificial Sequence: Synthetic oligonucleotide
  Target: LAMA2; (+) strand; PAM type: NNAGAAW; PAM sequence: GGAGAAA
gaatgagaatggaatcctga

SEQ ID NO: 13582 - DNA, 20 bp, Artificial Sequence
  Description of Artificial Sequence: Synthetic oligonucleotide
  Target: LAMA2; (+) strand; PAM type: NNAGAAW; PAM sequence: TCAGAAA
ccaaggattaacaatagggt

SEQ ID NO: 13583 - DNA, 20 bp, Artificial Sequence
  Description of Artificial Sequence: Synthetic oligonucleotide
  Target: LAMA2; (+) strand; PAM type: NNAGAAW; PAM sequence: TAAGAAA
ttttatggagggtgttaatc

SEQ ID NO: 13584 - DNA, 20 bp, Artificial Sequence
  Description of Artificial Sequence: Synthetic oligonucleotide
  Target: LAMA2; (+) strand; PAM type: NNAGAAW; PAM sequence: TGAGAAA
tacttgtcgcattttacagt

SEQ ID NO: 13585 - DNA, 20 bp, Artificial Sequence
  Description of Artificial Sequence: Synthetic oligonucleotide
  Target: LAMA2; (+) strand; PAM type: NNAGAAW; PAM sequence: CCAGAAA
ttcagtgtattctcagagca

SEQ ID NO: 13586 - DNA, 20 bp, Artificial Sequence
  Description of Artificial Sequence: Synthetic oligonucleotide
  Target: LAMA2; (+) strand; PAM type: NNAGAAW; PAM sequence: TTAGAAT
tcagttgtgcaatagacttg

SEQ ID NO: 13587 - DNA, 20 bp, Artificial Sequence
  Description of Artificial Sequence: Synthetic oligonucleotide
  Target: LAMA2; (+) strand; PAM type: NNAGAAW; PAM sequence: TTAGAAA
gaagctacttaaaaagtgtt

SEQ ID NO: 13588 - DNA, 20 bp, Artificial Sequence
  Description of Artificial Sequence: Synthetic oligonucleotide
  Target: LAMA2; (+) strand; PAM type: NNAGAAW; PAM sequence: GTAGAAT
aacttccttccaatatacct

SEQ ID NO: 13589 - DNA, 20 bp, Artificial Sequence
  Description of Artificial Sequence: Synthetic oligonucleotide
  Target: LAMA2; (+) strand; PAM type: NNAGAAW; PAM sequence: ACAGAAT
catcaggaacatttttaaac

SEQ ID NO: 13590 - DNA, 20 bp, Artificial Sequence
  Description of Artificial Sequence: Synthetic oligonucleotide
  Target: LAMA2; (+) strand; PAM type: NNAGAAW; PAM sequence: GGAGAAA
tgtgttgggggcagaggctg

SEQ ID NO: 13591 - DNA, 20 bp, Artificial Sequence
  Description of Artificial Sequence: Synthetic oligonucleotide
  Target: LAMA2; (+) strand; PAM type: NNAGAAW; PAM sequence: CAAGAAA
actacgactttaatggtcca

SEQ ID NO: 13592 - DNA, 20 bp, Artificial Sequence
  Description of Artificial Sequence: Synthetic oligonucleotide
  Target: LAMA2; (+) strand; PAM type: NNAGAAW; PAM sequence: TAAGAAT
tggtccacaagaaaggcctc

SEQ ID NO: 13593 - DNA, 20 bp, Artificial Sequence
  Description of Artificial Sequence: Synthetic oligonucleotide
  Target: LAMA2; (+) strand; PAM type: NNAGAAW; PAM sequence: GTAGAAA
ttgtgcacataagtgaggct

SEQ ID NO: 13594 - DNA, 20 bp, Artificial Sequence
  Description of Artificial Sequence: Synthetic oligonucleotide
  Target: LAMA2; (+) strand; PAM type: NNAGAAW; PAM sequence: TCAGAAA
tgacatcattgatcccattg

SEQ ID NO: 13595 - DNA, 20 bp, Artificial Sequence
  Description of Artificial Sequence: Synthetic oligonucleotide
  Target: LAMA2; (+) strand; PAM type: NNAGAAW; PAM sequence: ATAGAAA
tatattcattgcaatttatt

SEQ ID NO: 13596 - DNA, 20 bp, Artificial Sequence
  Description of Artificial Sequence: Synthetic oligonucleotide
  Target: LAMA2; (+) strand; PAM type: NNAGAAW; PAM sequence: AAAGAAA
acaatatttattctctacat

SEQ ID NO: 13597 - DNA, 20 bp, Artificial Sequence
  Description of Artificial Sequence: Synthetic oligonucleotide
  Target: LAMA2; (+) strand; PAM type: NNAGAAW; PAM sequence: AAAGAAA
tatttattctctacataaag

SEQ ID NO: 13598 - DNA, 20 bp, Artificial Sequence
  Description of Artificial Sequence: Synthetic oligonucleotide
  Target: LAMA2; (+) strand; PAM type: NNAGAAW; PAM sequence: GTAGAAT
ttttattttacgttacctaa

SEQ ID NO: 13599 - DNA, 20 bp, Artificial Sequence
  Description of Artificial Sequence: Synthetic oligonucleotide
  Target: LAMA2; (+) strand; PAM type: NNAGAAW; PAM sequence: GGAGAAA
cctgctatgaagtgaaaact

SEQ ID NO: 13600 - DNA, 20 bp, Artificial Sequence
  Description of Artificial Sequence: Synthetic oligonucleotide
  Target: LAMA2; (+) strand; PAM type: NNAGAAW; PAM sequence: TTAGAAA
agtcctggcaaggttataag

SEQ ID NO: 13601 - DNA, 20 bp, Artificial Sequence
  Description of Artificial Sequence: Synthetic oligonucleotide
  Target: LAMA2; (+) strand; PAM type: NNAGAAW; PAM sequence: TCAGAAT
tctttagcttcattcagtaa

SEQ ID NO: 13602 - DNA, 20 bp, Artificial Sequence
  Description of Artificial Sequence: Synthetic oligonucleotide
  Target: LAMA2; (+) strand; PAM type: NNAGAAW; PAM sequence: ATAGAAA
taatatgtgccaaagcatga

SEQ ID NO: 13603 - DNA, 20 bp, Artificial Sequence
  Description of Artificial Sequence: Synthetic oligonucleotide
  Target: LAMA2; (+) strand; PAM type: NNAGAAW; PAM sequence: ACAGAAT
gaactgtgttgttttggctc

SEQ ID NO: 13604 - DNA, 20 bp, Artificial Sequence
  Description of Artificial Sequence: Synthetic oligonucleotide
  Target: LAMA2; (+) strand; PAM type: NNAGAAW; PAM sequence: AAAGAAA
aaaatcctctattgcttttt

SEQ ID NO: 13605 - DNA, 20 bp, Artificial Sequence
  Description of Artificial Sequence: Synthetic oligonucleotide
  Target: LAMA2; (+) strand; PAM type: NNAGAAW; PAM sequence: TCAGAAT
gctttttaaagaaaaaatta

SEQ ID NO: 13606 - DNA, 20 bp, Artificial Sequence
  Description of Artificial Sequence: Synthetic oligonucleotide
  Target: LAMA2; (+) strand; PAM type: NNAGAAW; PAM sequence: ATAGAAA
acattgtatccatttatctc

SEQ ID NO: 13607 - DNA, 20 bp, Artificial Sequence
  Description of Artificial Sequence: Synthetic oligonucleotide
  Target: LAMA2; (+) strand; PAM type: NNAGAAW; PAM sequence: AGAGAAA
gataagagaggaaataagtc

SEQ ID NO: 13608 - DNA, 20 bp, Artificial Sequence
  Description of Artificial Sequence: Synthetic oligonucleotide
  Target: LAMA2; (+) strand; PAM type: NNAGAAW; PAM sequence: ACAGAAA
tcagagaaaagatctctagc

SEQ ID NO: 13609 - DNA, 20 bp, Artificial Sequence
  Description of Artificial Sequence: Synthetic oligonucleotide
  Target: LAMA2; (+) strand; PAM type: NNAGAAW; PAM sequence: AGAGAAA
ttacaagattacagagagag

SEQ ID NO: 13610 - DNA, 20 bp, Artificial Sequence
  Description of Artificial Sequence: Synthetic oligonucleotide
  Target: LAMA2; (+) strand; PAM type: NNAGAAW; PAM sequence: ATAGAAA
gggaactgtgtggttgccac

SEQ ID NO: 13611 - DNA, 20 bp, Artificial Sequence
  Description of Artificial Sequence: Synthetic oligonucleotide
  Target: LAMA2; (+) strand; PAM type: NNAGAAW; PAM sequence: TGAGAAA
actgtaaaacagtttcagga

SEQ ID NO: 13612 - DNA, 20 bp, Artificial Sequence
  Description of Artificial Sequence: Synthetic oligonucleotide
  Target: LAMA2; (+) strand; PAM type: NNAGAAW; PAM sequence: GCAGAAA
aaaaacaaaacacctgcctt

SEQ ID NO: 13613 - DNA, 20 bp, Artificial Sequence
  Description of Artificial Sequence: Synthetic oligonucleotide
  Target: LAMA2; (+) strand; PAM type: NNAGAAW; PAM sequence: ATAGAAA
ctgccttgcagaaacatgtc

SEQ ID NO: 13614 - DNA, 20 bp, Artificial Sequence
  Description of Artificial Sequence: Synthetic oligonucleotide
  Target: LAMA2; (+) strand; PAM type: NNAGAAW; PAM sequence: GCAGAAT
gtcatagaaacagattttag

SEQ ID NO: 13615 - DNA, 20 bp, Artificial Sequence
  Description of Artificial Sequence: Synthetic oligonucleotide
  Target: LAMA2; (+) strand; PAM type: NNAGAAW; PAM sequence: ATAGAAA
gatgtttagcagcataagga

SEQ ID NO: 13616 - DNA, 20 bp, Artificial Sequence
  Description of Artificial Sequence: Synthetic oligonucleotide
  Target: LAMA2; (+) strand; PAM type: NNAGAAW; PAM sequence: CTAGAAT
taacatgaggggctctgtca

SEQ ID NO: 13617 - DNA, 20 bp, Artificial Sequence
  Description of Artificial Sequence: Synthetic oligonucleotide
  Target: LAMA2; (+) strand; PAM type: NNAGAAW; PAM sequence: TAAGAAA
tttttgctggtgttccgtgc

SEQ ID NO: 13618 - DNA, 20 bp, Artificial Sequence
  Description of Artificial Sequence: Synthetic oligonucleotide
  Target: LAMA2; (+) strand; PAM type: NNAGAAW; PAM sequence: TGAGAAT
atggctagccgaaaagcatc

SEQ ID NO: 13619 - DNA, 20 bp, Artificial Sequence
  Description of Artificial Sequence: Synthetic oligonucleotide
  Target: LAMA2; (+) strand; PAM type: NNAGAAW; PAM sequence: ACAGAAA
ttgatggaatcctaaggcag

SEQ ID NO: 13620 - DNA, 20 bp, Artificial Sequence
  Description of Artificial Sequence: Synthetic oligonucleotide
  Target: LAMA2; (+) strand; PAM type: NNAGAAW; PAM sequence: ACAGAAA
caagtaaaaactctgtgacc

SEQ ID NO: 13621 - DNA, 20 bp, Artificial Sequence
  Description of Artificial Sequence: Synthetic oligonucleotide
  Target: LAMA2; (+) strand; PAM type: NNAGAAW; PAM sequence: CTAGAAA
ggcaccctagagaggggagg

SEQ ID NO: 13622 - DNA, 20 bp, Artificial Sequence
  Description of Artificial Sequence: Synthetic oligonucleotide
  Target: LAMA2; (+) strand; PAM type: NNAGAAW; PAM sequence: GCAGAAT
tatcaaaaaagcaagcaaag

SEQ ID NO: 13623 - DNA, 20 bp, Artificial Sequence
  Description of Artificial Sequence: Synthetic oligonucleotide
  Target: LAMA2; (+) strand; PAM type: NNAGAAW; PAM sequence: AAAGAAA
taaaatttgttttaaataat

SEQ ID NO: 13624 - DNA, 20 bp, Artificial Sequence
  Description of Artificial Sequence: Synthetic oligonucleotide
  Target: LAMA2; (+) strand; PAM type: NNAGAAW; PAM sequence: AGAGAAT
tttgatattctggtctggaa

SEQ ID NO: 13625 - DNA, 20 bp, Artificial Sequence
  Description of Artificial Sequence: Synthetic oligonucleotide
  Target: LAMA2; (+) strand; PAM type: NNAGAAW; PAM sequence: GCAGAAA
tctgtccagaacccacagct

SEQ ID NO: 13626 - DNA, 20 bp, Artificial Sequence
  Description of Artificial Sequence: Synthetic oligonucleotide
  Target: LAMA2; (+) strand; PAM type: NNAGAAW; PAM sequence: TAAGAAT
ttttgttttaaatccagtga

SEQ ID NO: 13627 - DNA, 20 bp, Artificial Sequence
  Description of Artificial Sequence: Synthetic oligonucleotide
  Target: LAMA2; (+) strand; PAM type: NNAGAAW; PAM sequence: TTAGAAT
tgattagtgaactagctagc

SEQ ID NO: 13628 - DNA, 20 bp, Artificial Sequence
  Description of Artificial Sequence: Synthetic oligonucleotide
  Target: LAMA2; (+) strand; PAM type: NNAGAAW; PAM sequence: CCAGAAA
actacagctacacctaaatc

SEQ ID NO: 13629 - DNA, 20 bp, Artificial Sequence
  Description of Artificial Sequence: Synthetic oligonucleotide
  Target: LAMA2; (+) strand; PAM type: NNAGAAW; PAM sequence: TAAGAAT
tttaaattttaaaatccaca

SEQ ID NO: 13630 - DNA, 20 bp, Artificial Sequence
  Description of Artificial Sequence: Synthetic oligonucleotide
  Target: LAMA2; (+) strand; PAM type: NNAGAAW; PAM sequence: CCAGAAT
agcaaaatgttacagagaca

SEQ ID NO: 13631 - DNA, 20 bp, Artificial Sequence
  Description of Artificial Sequence: Synthetic oligonucleotide
  Target: LAMA2; (+) strand; PAM type: NNAGAAW; PAM sequence: CCAGAAA
cagagacaccagaatgttgc

SEQ ID NO: 13632 - DNA, 20 bp, Artificial Sequence
  Description of Artificial Sequence: Synthetic oligonucleotide
  Target: LAMA2; (+) strand; PAM type: NNAGAAW; PAM sequence: AGAGAAA
tgtgtgttctaaaaaagaac

SEQ ID NO: 13633 - DNA, 20 bp, Artificial Sequence
  Description of Artificial Sequence: Synthetic oligonucleotide
  Target: LAMA2; (+) strand; PAM type: NNAGAAW; PAM sequence: ATAGAAT
tttttatttgtcggatgcat

SEQ ID NO: 13634 - DNA, 20 bp, Artificial Sequence
  Description of Artificial Sequence: Synthetic oligonucleotide
  Target: LAMA2; (+) strand; PAM type: NNAGAAW; PAM sequence: TAAGAAA
atgcatatagaatacttctg

SEQ ID NO: 13635 - DNA, 20 bp, Artificial Sequence
  Description of Artificial Sequence: Synthetic oligonucleotide
  Target: LAMA2; (+) strand; PAM type: NNAGAAW; PAM sequence: GCAGAAA
tcctaccagcttttcccatg

SEQ ID NO: 13636 - DNA, 20 bp, Artificial Sequence
  Description of Artificial Sequence: Synthetic oligonucleotide
  Target: LAMA2; (+) strand; PAM type: NNAGAAW; PAM sequence: TAAGAAT
tgaagtttagtttccgcatc

SEQ ID NO: 13637 - DNA, 20 bp, Artificial Sequence
  Description of Artificial Sequence: Synthetic oligonucleotide
  Target: LAMA2; (+) strand; PAM type: NNAGAAW; PAM sequence: GCAGAAA
atcatttatttcagcacgtt

SEQ ID NO: 13638 - DNA, 20 bp, Artificial Sequence
  Description of Artificial Sequence: Synthetic oligonucleotide
  Target: LAMA2; (+) strand; PAM type: NNAGAAW; PAM sequence: TTAGAAA
ctgtgactgaatcttattct

SEQ ID NO: 13639 - DNA, 20 bp, Artificial Sequence
  Description of Artificial Sequence: Synthetic oligonucleotide
  Target: LAMA2; (+) strand; PAM type: NNAGAAW; PAM sequence: GAAGAAA
ctctttgagtggaggaaaag

SEQ ID NO: 13640 - DNA, 20 bp, Artificial Sequence
  Description of Artificial Sequence: Synthetic oligonucleotide
  Target: LAMA2; (+) strand; PAM type: NNAGAAW; PAM sequence: AGAGAAT
atgacattataaaagcaggt

SEQ ID NO: 13641 - DNA, 20 bp, Artificial Sequence
  Description of Artificial Sequence: Synthetic oligonucleotide
  Target: LAMA2; (+) strand; PAM type: NNAGAAW; PAM sequence: TCAGAAA
atacaattttaagcaaagtt

SEQ ID NO: 13642 - DNA, 20 bp, Artificial Sequence
  Description of Artificial Sequence: Synthetic oligonucleotide
  Target: LAMA2; (+) strand; PAM type: NNAGAAW; PAM sequence: TTAGAAT
gaaagttgttcaaaatgttt

SEQ ID NO: 13643 - DNA, 20 bp, Artificial Sequence
  Description of Artificial Sequence: Synthetic oligonucleotide
  Target: LAMA2; (+) strand; PAM type: NNAGAAW; PAM sequence: AGAGAAA
ggagatgaattaacagtttc

SEQ ID NO: 13644 - DNA, 20 bp, Artificial Sequence
  Description of Artificial Sequence: Synthetic oligonucleotide
  Target: LAMA2; (+) strand; PAM type: NNAGAAW; PAM sequence: AAAGAAA
tattttcttataaccacttt

SEQ ID NO: 13645 - DNA, 20 bp, Artificial Sequence
  Description of Artificial Sequence: Synthetic oligonucleotide
  Target: LAMA2; (+) strand; PAM type: NNAGAAW; PAM sequence: TGAGAAA
tacttttttatgcttgtctt

SEQ ID NO: 13646 - DNA, 20 bp, Artificial Sequence
  Description of Artificial Sequence: Synthetic oligonucleotide
  Target: LAMA2; (+) strand; PAM type: NNAGAAW; PAM sequence: AAAGAAA
tcactgaacaaaataaaata

SEQ ID NO: 13647 - DNA, 20 bp, Artificial Sequence
  Description of Artificial Sequence: Synthetic oligonucleotide
  Target: LAMA2; (+) strand; PAM type: NNAGAAW; PAM sequence: GCAGAAT
aattcaacttgtaatttaat

SEQ ID NO: 13648 - DNA, 20 bp, Artificial Sequence
  Description of Artificial Sequence: Synthetic oligonucleotide
  Target: LAMA2; (+) strand; PAM type: NNAGAAW; PAM sequence: AAAGAAA
ttcagacaattagggccaaa

SEQ ID NO: 13649 - DNA, 20 bp, Artificial Sequence
  Description of Artificial Sequence: Synthetic oligonucleotide
  Target: LAMA2; (+) strand; PAM type: NNAGAAW; PAM sequence: GAAGAAA
attagctagtgtctgacaaa

SEQ ID NO: 13650 - DNA, 20 bp, Artificial Sequence
  Description of Artificial Sequence: Synthetic oligonucleotide
  Target: LAMA2; (+) strand; PAM type: NNAGAAW; PAM sequence: ATAGAAA
tccttatgtaaggatgtcag

SEQ ID NO: 13651 - DNA, 20 bp, Artificial Sequence
  Description of Artificial Sequence: Synthetic oligonucleotide
  Target: LAMA2; (+) strand; PAM type: NNAGAAW; PAM sequence: TGAGAAA
aatgatgattcatgtgtctc

SEQ ID NO: 13652 - DNA, 20 bp, Artificial Sequence
  Description of Artificial Sequence: Synthetic oligonucleotide
  Target: LAMA2; (+) strand; PAM type: NNAGAAW; PAM sequence: ACAGAAT
gtcttctgtgtggttaaagt

SEQ ID NO: 13653 - DNA, 20 bp, Artificial Sequence
  Description of Artificial Sequence: Synthetic oligonucleotide
  Target: LAMA2; (+) strand; PAM type: NNAGAAW; PAM sequence: TAAGAAA
tgttgttcccattttgcaaa

SEQ ID NO: 13654 - DNA, 20 bp, Artificial Sequence
  Description of Artificial Sequence: Synthetic oligonucleotide
  Target: LAMA2; (+) strand; PAM type: NNAGAAW; PAM sequence: AAAGAAA
tgccaaatatctgataatga

SEQ ID NO: 13655 - DNA, 20 bp, Artificial Sequence
  Description of Artificial Sequence: Synthetic oligonucleotide
  Target: LAMA2; (+) strand; PAM type: NNAGAAW; PAM sequence: GAAGAAA
tgtgatcagcaagataaaat

SEQ ID NO: 13656 - DNA, 20 bp, Artificial Sequence
  Description of Artificial Sequence: Synthetic oligonucleotide
  Target: LAMA2; (+) strand; PAM type: NNAGAAW; PAM sequence: GAAGAAT
ttttatagcattgtgctgga

SEQ ID NO: 13657 - DNA, 20 bp, Artificial Sequence
  Description of Artificial Sequence: Synthetic oligonucleotide
  Target: LAMA2; (+) strand; PAM type: NNAGAAW; PAM sequence: TCAGAAT
catatgccaagagtatacag

SEQ ID NO: 13658 - DNA, 20 bp, Artificial Sequence
  Description of Artificial Sequence: Synthetic oligonucleotide
  Target: LAMA2; (+) strand; PAM type: NNAGAAW; PAM sequence: TAAGAAT
gtatacagtcagaatctctc

SEQ ID NO: 13659 - DNA, 20 bp, Artificial Sequence
  Description of Artificial Sequence: Synthetic oligonucleotide
  Target: LAMA2; (+) strand; PAM type: NNAGAAW; PAM sequence: TGAGAAA
ctctaagaatcaaagactga

SEQ ID NO: 13660 - DNA, 20 bp, Artificial Sequence
  Description of Artificial Sequence: Synthetic oligonucleotide
  Target: LAMA2; (+) strand; PAM type: NNAGAAW; PAM sequence: AAAGAAT
ttgtttttaattgcttccct

SEQ ID NO: 13661 - DNA, 20 bp, Artificial Sequence
  Description of Artificial Sequence: Synthetic oligonucleotide
  Target: LAMA2; (+) strand; PAM type: NNAGAAW; PAM sequence: TGAGAAT
aattgtataacgcaattata

SEQ ID NO: 13662 - DNA, 20 bp, Artificial Sequence
  Description of Artificial Sequence: Synthetic oligonucleotide
  Target: LAMA2; (+) strand; PAM type: NNAGAAW; PAM sequence: AAAGAAA
gggatcagcggtccaaagac

SEQ ID NO: 13663 - DNA, 20 bp, Artificial Sequence
  Description of Artificial Sequence: Synthetic oligonucleotide
  Target: LAMA2; (+) strand; PAM type: NNAGAAW; PAM sequence: TAAGAAA
tacccatgatatgaccaatt

SEQ ID NO: 13664 - DNA, 20 bp, Artificial Sequence
  Description of Artificial Sequence: Synthetic oligonucleotide
  Target: LAMA2; (+) strand; PAM type: NNAGAAW; PAM sequence: CCAGAAA
tagagaagttttatttacaa

SEQ ID NO: 13665 - DNA, 20 bp, Artificial Sequence
  Description of Artificial Sequence: Synthetic oligonucleotide
  Target: LAMA2; (+) strand; PAM type: NNAGAAW; PAM sequence: AAAGAAA
cagaaattgttgggtccata

SEQ ID NO: 13666 - DNA, 20 bp, Artificial Sequence
  Description of Artificial Sequence: Synthetic oligonucleotide
  Target: LAMA2; (+) strand; PAM type: NNAGAAW; PAM sequence: AAAGAAA
tggtgattgtaaaaatatca

SEQ ID NO: 13667 - DNA, 20 bp, Artificial Sequence
  Description of Artificial Sequence: Synthetic oligonucleotide
  Target: LAMA2; (+) strand; PAM type: NNAGAAW; PAM sequence: GAAGAAT
atgtagaagtgggcattata

SEQ ID NO: 13668 - DNA, 20 bp, Artificial Sequence
  Description of Artificial Sequence: Synthetic oligonucleotide
  Target: LAMA2; (+) strand; PAM type: NNAGAAW; PAM sequence: TCAGAAA
ggtgggcttgggatgtattt

SEQ ID NO: 13669 - DNA, 20 bp, Artificial Sequence
  Description of Artificial Sequence: Synthetic oligonucleotide
  Target: LAMA2; (+) strand; PAM type: NNAGAAW; PAM sequence: TTAGAAA
gactttctaaattgggagat

SEQ ID NO: 13670 - DNA, 20 bp, Artificial Sequence
  Description of Artificial Sequence: Synthetic oligonucleotide
  Target: LAMA2; (+) strand; PAM type: NNAGAAW; PAM sequence: TAAGAAA
tgggagatttagaaattcag

SEQ ID NO: 13671 - DNA, 20 bp, Artificial Sequence
  Description of Artificial Sequence: Synthetic oligonucleotide
  Target: LAMA2; (+) strand; PAM type: NNAGAAW; PAM sequence: TTAGAAA
aaatctggaaattgtaggct

SEQ ID NO: 13672 - DNA, 20 bp, Artificial Sequence
  Description of Artificial Sequence: Synthetic oligonucleotide
  Target: LAMA2; (+) strand; PAM type: NNAGAAW; PAM sequence: TCAGAAA
aataccttataaacaggttt

SEQ ID NO: 13673 - DNA, 20 bp, Artificial Sequence
  Description of Artificial Sequence: Synthetic oligonucleotide
  Target: LAMA2; (+) strand; PAM type: NNAGAAW; PAM sequence: CGAGAAA
attaattatatttatagcct

SEQ ID NO: 13674 - DNA, 20 bp, Artificial Sequence
  Description of Artificial Sequence: Synthetic oligonucleotide
  Target: LAMA2; (+) strand; PAM type: NNAGAAW; PAM sequence: CCAGAAT
cattgctttataaattatta

SEQ ID NO: 13675 - DNA, 20 bp, Artificial Sequence
  Description of Artificial Sequence: Synthetic oligonucleotide
  Target: LAMA2; (+) strand; PAM type: NNAGAAW; PAM sequence: TGAGAAA
aatatttattaggtagtttt

SEQ ID NO: 13676 - DNA, 20 bp, Artificial Sequence
  Description of Artificial Sequence: Synthetic oligonucleotide
  Target: LAMA2; (+) strand; PAM type: NNAGAAW; PAM sequence: ACAGAAT
gggagaccctgtatcactag

SEQ ID NO: 13677 - DNA, 20 bp, Artificial Sequence
  Description of Artificial Sequence: Synthetic oligonucleotide
  Target: LAMA2; (+) strand; PAM type: NNAGAAW; PAM sequence: GAAGAAT
ctacttgggaggctgaggca

SEQ ID NO: 13678 - DNA, 20 bp, Artificial Sequence
  Description of Artificial Sequence: Synthetic oligonucleotide
  Target: LAMA2; (+) strand; PAM type: NNAGAAW; PAM sequence: TTAGAAA
caataggatattacttagcc

SEQ ID NO: 13679 - DNA, 20 bp, Artificial Sequence
  Description of Artificial Sequence: Synthetic oligonucleotide
  Target: LAMA2; (+) strand; PAM type: NNAGAAW; PAM sequence: TCAGAAA
gaaactaaaatagtcaaaac

SEQ ID NO: 13680 - DNA, 20 bp, Artificial Sequence
  Description of Artificial Sequence: Synthetic oligonucleotide
  Target: LAMA2; (+) strand; PAM type: NNAGAAW; PAM sequence: GTAGAAT
caaaactcagaaacatgaga

SEQ ID NO: 13681 - DNA, 20 bp, Artificial Sequence
  Description of Artificial Sequence: Synthetic oligonucleotide
  Target: LAMA2; (+) strand; PAM type: NNAGAAW; PAM sequence: AGAGAAA
taataataataaagagagtg

SEQ ID NO: 13682 - DNA, 20 bp, Artificial Sequence
  Description of Artificial Sequence: Synthetic oligonucleotide
  Target: LAMA2; (+) strand; PAM type: NNAGAAW; PAM sequence: ATAGAAA
catgttttttttaaagcagt

SEQ ID NO: 13683 - DNA, 20 bp, Artificial Sequence
  Description of Artificial Sequence: Synthetic oligonucleotide
  Target: LAMA2; (+) strand; PAM type: NNAGAAW; PAM sequence: ATAGAAA
aagcttaggcctaaattcag

SEQ ID NO: 13684 - DNA, 20 bp, Artificial Sequence
  Description of Artificial Sequence: Synthetic oligonucleotide
  Target: LAMA2; (+) strand; PAM type: NNAGAAW; PAM sequence: TAAGAAA
gggaatatatttaccaccca

SEQ ID NO: 13685 - DNA, 20 bp, Artificial Sequence
  Description of Artificial Sequence: Synthetic oligonucleotide
  Target: LAMA2; (+) strand; PAM type: NNAGAAW; PAM sequence: GTAGAAT
gctaaattgctgtcttgcaa

SEQ ID NO: 13686 - DNA, 20 bp, Artificial Sequence
  Description of Artificial Sequence: Synthetic oligonucleotide
  Target: LAMA2; (+) strand; PAM type: NNAGAAW; PAM sequence: TCAGAAT
atatatttaccgcatacagt

SEQ ID NO: 13687 - DNA, 20 bp, Artificial Sequence
  Description of Artificial Sequence: Synthetic oligonucleotide
  Target: LAMA2; (+) strand; PAM type: NNAGAAW; PAM sequence: AAAGAAA
agatcatttcaacaactcaa

SEQ ID NO: 13688 - DNA, 20 bp, Artificial Sequence
  Description of Artificial Sequence: Synthetic oligonucleotide
  Target: LAMA2; (+) strand; PAM type: NNAGAAW; PAM sequence: TGAGAAT
gatcaattttccgtgaggtg

SEQ ID NO: 13689 - DNA, 20 bp, Artificial Sequence
  Description of Artificial Sequence: Synthetic oligonucleotide
  Target: LAMA2; (+) strand; PAM type: NNAGAAW; PAM sequence: GAAGAAT
gcatagcaggttttgacaga

SEQ ID NO: 13690 - DNA, 20 bp, Artificial Sequence
  Description of Artificial Sequence: Synthetic oligonucleotide
  Target: LAMA2; (+) strand; PAM type: NNAGAAW; PAM sequence: TGAGAAA
atagtattctggaattcaga

SEQ ID NO: 13691 - DNA, 20 bp, Artificial Sequence
  Description of Artificial Sequence: Synthetic oligonucleotide
  Target: LAMA2; (+) strand; PAM type: NNAGAAW; PAM sequence: AGAGAAT
gctgcttaaagatacgaatt

SEQ ID NO: 13692 - DNA, 20 bp, Artificial Sequence
  Description of Artificial Sequence: Synthetic oligonucleotide
  Target: LAMA2; (+) strand; PAM type: NNAGAAW; PAM sequence: CTAGAAA
cccaggaagtacaagaagac

SEQ ID NO: 13693 - DNA, 20 bp, Artificial Sequence
  Description of Artificial Sequence: Synthetic oligonucleotide
  Target: LAMA2; (+) strand; PAM type: NNAGAAW; PAM sequence: TAAGAAA
ttctaattctatttgcttcc

SEQ ID NO: 13694 - DNA, 20 bp, Artificial Sequence
  Description of Artificial Sequence: Synthetic oligonucleotide
  Target: LAMA2; (+) strand; PAM type: NNAGAAW; PAM sequence: AAAGAAA
ggcaaggagtccaggtccat

SEQ ID NO: 13695 - DNA, 20 bp, Artificial Sequence
  Description of Artificial Sequence: Synthetic oligonucleotide
  Target: LAMA2; (+) strand; PAM type: NNAGAAW; PAM sequence: TTAGAAA
taccccataaatttacataa

SEQ ID NO: 13696 - DNA, 20 bp, Artificial Sequence
  Description of Artificial Sequence: Synthetic oligonucleotide
  Target: LAMA2; (+) strand; PAM type: NNAGAAW; PAM sequence: TAAGAAA
ttttcagtaattaatatcat

SEQ ID NO: 13697 - DNA, 20 bp, Artificial Sequence
  Description of Artificial Sequence: Synthetic oligonucleotide
  Target: LAMA2; (+) strand; PAM type: NNAGAAW; PAM sequence: CCAGAAA
tttgtttctttttttgagaa

SEQ ID NO: 13698 - DNA, 20 bp, Artificial Sequence
  Description of Artificial Sequence: Synthetic oligonucleotide
  Target: LAMA2; (+) strand; PAM type: NNAGAAW; PAM sequence: GCAGAAT
aggaaactaatatgaatgaa

SEQ ID NO: 13699 - DNA, 20 bp, Artificial Sequence
  Description of Artificial Sequence: Synthetic oligonucleotide
  Target: LAMA2; (+) strand; PAM type: NNAGAAW; PAM sequence: AAAGAAA
tttcaaacttttacaaatac

SEQ ID NO: 13700 - DNA, 20 bp, Artificial Sequence
  Description of Artificial Sequence: Synthetic oligonucleotide
  Target: LAMA2; (+) strand; PAM type: NNAGAAW; PAM sequence: CCAGAAT
ttttacaaatacaaagaaag

SEQ ID NO: 13701 - DNA, 20 bp, Artificial Sequence
  Description of Artificial Sequence: Synthetic oligonucleotide
  Target: LAMA2; (+) strand; PAM type: NNAGAAW; PAM sequence: TCAGAAA
tcaagtgttaaatatgaata

SEQ ID NO: 13702 - DNA, 20 bp, Artificial Sequence
  Description of Artificial Sequence: Synthetic oligonucleotide
  Target: LAMA2; (+) strand; PAM type: NNAGAAW; PAM sequence: CCAGAAT
ttgagctcaggagtttgaga

SEQ ID NO: 13703 - DNA, 20 bp, Artificial Sequence
  Description of Artificial Sequence: Synthetic oligonucleotide
  Target: LAMA2; (+) strand; PAM type: NNAGAAW; PAM sequence: CCAGAAA
ggcaacatggtgaaacgcca

SEQ ID NO: 13704 - DNA, 20 bp, Artificial Sequence
  Description of Artificial Sequence: Synthetic oligonucleotide
  Target: LAMA2; (+) strand; PAM type: NNAGAAW; PAM sequence: AAAGAAA
cacaggcagaccctgtctca

SEQ ID NO: 13705 - DNA, 20 bp, Artificial Sequence
  Description of Artificial Sequence: Synthetic oligonucleotide
  Target: LAMA2; (+) strand; PAM type: NNAGAAW; PAM sequence: AAAGAAA
gaccctgtctcaaaagaaaa

SEQ ID NO: 13706 - DNA, 20 bp, Artificial Sequence
  Description of Artificial Sequence: Synthetic oligonucleotide
  Target: LAMA2; (+) strand; PAM type: NNAGAAW; PAM sequence: TTAGAAT
gaaaaatctgatatgataat

SEQ ID NO: 13707 - DNA, 20 bp, Artificial Sequence
  Description of Artificial Sequence: Synthetic oligonucleotide
  Target: LAMA2; (+) strand; PAM type: NNAGAAW; PAM sequence: TAAGAAT
tctatttcactcactccttc

SEQ ID NO: 13708 - DNA, 20 bp, Artificial Sequence
  Description of Artificial Sequence: Synthetic oligonucleotide
  Target: LAMA2; (+) strand; PAM type: NNAGAAW; PAM sequence: ACAGAAT
acatgtaatctttccaaatg

SEQ ID NO: 13709 - DNA, 20 bp, Artificial Sequence
  Description of Artificial Sequence: Synthetic oligonucleotide
  Target: LAMA2; (+) strand; PAM type: NNAGAAW; PAM sequence: AAAGAAA
tagtcttcctcatgccattt

SEQ ID NO: 13710 - DNA, 20 bp, Artificial Sequence
  Description of Artificial Sequence: Synthetic oligonucleotide
  Target: LAMA2; (+) strand; PAM type: NNAGAAW; PAM sequence: GGAGAAA
aaacacaggagtattaaaat

SEQ ID NO: 13711 - DNA, 20 bp, Artificial Sequence
  Description of Artificial Sequence: Synthetic oligonucleotide
  Target: LAMA2; (+) strand; PAM type: NNAGAAW; PAM sequence: AGAGAAT
aggatgatgtttatgccata

SEQ ID NO: 13712 - DNA, 20 bp, Artificial Sequence
  Description of Artificial Sequence: Synthetic oligonucleotide
  Target: LAMA2; (+) strand; PAM type: NNAGAAW; PAM sequence: TGAGAAT
gtggtgcatatcctacaaat

SEQ ID NO: 13713 - DNA, 20 bp, Artificial Sequence
  Description of Artificial Sequence: Synthetic oligonucleotide
  Target: LAMA2; (+) strand; PAM type: NNAGAAW; PAM sequence: GGAGAAT
ctacttgggaggctgaggca

SEQ ID NO: 13714 - DNA, 20 bp, Artificial Sequence
  Description of Artificial Sequence: Synthetic oligonucleotide
  Target: LAMA2; (+) strand; PAM type: NNAGAAW; PAM sequence: GCAGAAA
aagagcttaattataataga

SEQ ID NO: 13715 - DNA, 20 bp, Artificial Sequence
  Description of Artificial Sequence: Synthetic oligonucleotide
  Target: LAMA2; (+) strand; PAM type: NNAGAAW; PAM sequence: TTAGAAA
ttataatagagcagaaagga

SEQ ID NO: 13716 - DNA, 20 bp, Artificial Sequence
  Description of Artificial Sequence: Synthetic oligonucleotide
  Target: LAMA2; (+) strand; PAM type: NNAGAAW; PAM sequence: ACAGAAA
tagagcagaaaggattagaa

SEQ ID NO: 13717 - DNA, 20 bp, Artificial Sequence
  Description of Artificial Sequence: Synthetic oligonucleotide
  Target: LAMA2; (+) strand; PAM type: NNAGAAW; PAM sequence: TCAGAAA
actgaatattgatcagattt

SEQ ID NO: 13718 - DNA, 20 bp, Artificial Sequence
  Description of Artificial Sequence: Synthetic oligonucleotide
  Target: LAMA2; (+) strand; PAM type: NNAGAAW; PAM sequence: AGAGAAA
acaaagaagcctgagatagg

SEQ ID NO: 13719 - DNA, 20 bp, Artificial Sequence
  Description of Artificial Sequence: Synthetic oligonucleotide
  Target: LAMA2; (+) strand; PAM type: NNAGAAW; PAM sequence: TTAGAAA
atctctcattgtgagccagt

SEQ ID NO: 13720 - DNA, 20 bp, Artificial Sequence
  Description of Artificial Sequence: Synthetic oligonucleotide
  Target: LAMA2; (+) strand; PAM type: NNAGAAW; PAM sequence: TAAGAAA
acactcccttttctttttgc

SEQ ID NO: 13721 - DNA, 20 bp, Artificial Sequence
  Description of Artificial Sequence: Synthetic oligonucleotide
  Target: LAMA2; (+) strand; PAM type: NNAGAAW; PAM sequence: ATAGAAA
cggttgtatttttgtcctta

SEQ ID NO: 13722 - DNA, 20 bp, Artificial Sequence
  Description of Artificial Sequence: Synthetic oligonucleotide
  Target: LAMA2; (+) strand; PAM type: NNAGAAW; PAM sequence: AAAGAAA
aacttggcagcaaatgtata

SEQ ID NO: 13723 - DNA, 20 bp, Artificial Sequence
  Description of Artificial Sequence: Synthetic oligonucleotide
  Target: LAMA2; (+) strand; PAM type: NNAGAAW; PAM sequence: AGAGAAA
gctgtgtttgtcaagaggaa

SEQ ID NO: 13724 - DNA, 20 bp, Artificial Sequence
  Description of Artificial Sequence: Synthetic oligonucleotide
  Target: LAMA2; (+) strand; PAM type: NNAGAAW; PAM sequence: ACAGAAA
agctatcctgcatggacccg

SEQ ID NO: 13725 - DNA, 20 bp, Artificial Sequence
  Description of Artificial Sequence: Synthetic oligonucleotide
  Target: LAMA2; (+) strand; PAM type: NNAGAAW; PAM sequence: ACAGAAA
actgtgtgcttgctaaatct

SEQ ID NO: 13726 - DNA, 20 bp, Artificial Sequence
  Description of Artificial Sequence: Synthetic oligonucleotide
  Target: LAMA2; (+) strand; PAM type: NNAGAAW; PAM sequence: ACAGAAT
tgattaggatccaactctgt

SEQ ID NO: 13727 - DNA, 20 bp, Artificial Sequence
  Description of Artificial Sequence: Synthetic oligonucleotide
  Target: LAMA2; (+) strand; PAM type: NNAGAAW; PAM sequence: CTAGAAA
agatctggaggggatttgag

SEQ ID NO: 13728 - DNA, 20 bp, Artificial Sequence
  Description of Artificial Sequence: Synthetic oligonucleotide
  Target: LAMA2; (+) strand; PAM type: NNAGAAW; PAM sequence: TAAGAAT
gcatgaaaattggatatgga

SEQ ID NO: 13729 - DNA, 20 bp, Artificial Sequence
  Description of Artificial Sequence: Synthetic oligonucleotide
  Target: LAMA2; (+) strand; PAM type: NNAGAAW; PAM sequence: AGAGAAA
tatttttatttacctttgtt

SEQ ID NO: 13730 - DNA, 20 bp, Artificial Sequence
  Description of Artificial Sequence: Synthetic oligonucleotide
  Target: LAMA2; (+) strand; PAM type: NNAGAAW; PAM sequence: CCAGAAT
acagatagtaagtggaggag

SEQ ID NO: 13731 - DNA, 20 bp, Artificial Sequence
  Description of Artificial Sequence: Synthetic oligonucleotide
  Target: LAMA2; (+) strand; PAM type: NNAGAAW; PAM sequence: TTAGAAA
gcacatggggatagacaata

SEQ ID NO: 13732 - DNA, 20 bp, Artificial Sequence
  Description of Artificial Sequence: Synthetic oligonucleotide
  Target: LAMA2; (+) strand; PAM type: NNAGAAW; PAM sequence: TGAGAAA
ttttaaaattccttgtgcaa

SEQ ID NO: 13733 - DNA, 20 bp, Artificial Sequence
  Description of Artificial Sequence: Synthetic oligonucleotide
  Target: LAMA2; (+) strand; PAM type: NNAGAAW; PAM sequence: GGAGAAA
acatgattttacttgaatgc

SEQ ID NO: 13734 - DNA, 20 bp, Artificial Sequence
  Description of Artificial Sequence: Synthetic oligonucleotide
  Target: LAMA2; (+) strand; PAM type: NNAGAAW; PAM sequence: GAAGAAT
ttaaacggggcaaaagtaaa

SEQ ID NO: 13735 - DNA, 20 bp, Artificial Sequence
  Description of Artificial Sequence: Synthetic oligonucleotide
  Target: LAMA2; (+) strand; PAM type: NNAGAAW; PAM sequence: AGAGAAT
ggcaaaagaagggaacattc

SEQ ID NO: 13736 - DNA, 20 bp, Artificial Sequence
  Description of Artificial Sequence: Synthetic oligonucleotide
  Target: LAMA2; (+) strand; PAM type: NNAGAAW; PAM sequence: TGAGAAT
aatgttgatatattgagagg

SEQ ID NO: 13737 - DNA, 20 bp, Artificial Sequence
  Description of Artificial Sequence: Synthetic oligonucleotide
  Target: LAMA2; (+) strand; PAM type: NNAGAAW; PAM sequence: TTAGAAA
tacacacaatgttaagaaca

SEQ ID NO: 13738 - DNA, 20 bp, Artificial Sequence
  Description of Artificial Sequence: Synthetic oligonucleotide
  Target: LAMA2; (+) strand; PAM type: NNAGAAW; PAM sequence: AGAGAAT
ctctgaagaacctttgagtc

SEQ ID NO: 13739 - DNA, 20 bp, Artificial Sequence
  Description of Artificial Sequence: Synthetic oligonucleotide
  Target: LAMA2; (+) strand; PAM type: NNAGAAW; PAM sequence: TGAGAAT
agaacctttgagtcagagaa

SEQ ID NO: 13740 - DNA, 20 bp, Artificial Sequence
  Description of Artificial Sequence: Synthetic oligonucleotide
  Target: LAMA2; (+) strand; PAM type: NNAGAAW; PAM sequence: GTAGAAT
gttttagcactttcttcttt

SEQ ID NO: 13741 - DNA, 20 bp, Artificial Sequence
  Description of Artificial Sequence: Synthetic oligonucleotide
  Target: LAMA2; (+) strand; PAM type: NNAGAAW; PAM sequence: GGAGAAT
ggagttgttggttcttttcc

SEQ ID NO: 13742 - DNA, 20 bp, Artificial Sequence
  Description of Artificial Sequence: Synthetic oligonucleotide
  Target: LAMA2; (+) strand; PAM type: NNAGAAW; PAM sequence: CTAGAAT
aaaagtctaccccaggaagc

SEQ ID NO: 13743 - DNA, 20 bp, Artificial Sequence
  Description of Artificial Sequence: Synthetic oligonucleotide
  Target: LAMA2; (+) strand; PAM type: NNAGAAW; PAM sequence: ATAGAAT
ccccaggaagcctagaatgg

SEQ ID NO: 13744 - DNA, 20 bp, Artificial Sequence
  Description of Artificial Sequence: Synthetic oligonucleotide
  Target: LAMA2; (+) strand; PAM type: NNAGAAW; PAM sequence: GAAGAAA
ttcatccaacacaaattcat

SEQ ID NO: 13745 - DNA, 20 bp, Artificial Sequence
  Description of Artificial Sequence: Synthetic oligonucleotide
  Target: LAMA2; (+) strand; PAM type: NNAGAAW; PAM sequence: GCAGAAA
atgaagaaaagccaagatct

SEQ ID NO: 13746 - DNA, 20 bp, Artificial Sequence
  Description of Artificial Sequence: Synthetic oligonucleotide
  Target: LAMA2; (+) strand; PAM type: NNAGAAW; PAM sequence: ATAGAAT
atggaatcccaaatcagatg

SEQ ID NO: 13747 - DNA, 20 bp, Artificial Sequence
  Description of Artificial Sequence: Synthetic oligonucleotide
  Target: LAMA2; (+) strand; PAM type: NNAGAAW; PAM sequence: CAAGAAT
tctcatatccagtaagtttg

SEQ ID NO: 13748 - DNA, 20 bp, Artificial Sequence
  Description of Artificial Sequence: Synthetic oligonucleotide
  Target: LAMA2; (+) strand; PAM type: NNAGAAW; PAM sequence: GAAGAAA
aattattatatactttaact

SEQ ID NO: 13749 - DNA, 20 bp, Artificial Sequence
  Description of Artificial Sequence: Synthetic oligonucleotide
  Target: LAMA2; (+) strand; PAM type: NNAGAAW; PAM sequence: AAAGAAA
attatatactttaactgaag

SEQ ID NO: 13750 - DNA, 20 bp, Artificial Sequence
  Description of Artificial Sequence: Synthetic oligonucleotide
  Target: LAMA2; (+) strand; PAM type: NNAGAAW; PAM sequence: AGAGAAA
ctgtatgtcaaattcctttc

SEQ ID NO: 13751 - DNA, 20 bp, Artificial Sequence
  Description of Artificial Sequence: Synthetic oligonucleotide
  Target: LAMA2; (+) strand; PAM type: NNAGAAW; PAM sequence: TAAGAAA
gacgaccaccagaggctttc

SEQ ID NO: 13752 - DNA, 20 bp, Artificial Sequence
  Description of Artificial Sequence: Synthetic oligonucleotide
  Target: LAMA2; (+) strand; PAM type: NNAGAAW; PAM sequence: AAAGAAT
caccagaggctttctaagaa

SEQ ID NO: 13753 - DNA, 20 bp, Artificial Sequence
  Description of Artificial Sequence: Synthetic oligonucleotide
  Target: LAMA2; (+) strand; PAM type: NNAGAAW; PAM sequence: TTAGAAA
gtttggtagttccatagtag

SEQ ID NO: 13754 - DNA, 20 bp, Artificial Sequence
  Description of Artificial Sequence: Synthetic oligonucleotide
  Target: LAMA2; (+) strand; PAM type: NNAGAAW; PAM sequence: GTAGAAA
ccacatgaaatctgctattg

SEQ ID NO: 13755 - DNA, 20 bp, Artificial Sequence
  Description of Artificial Sequence: Synthetic oligonucleotide
  Target: LAMA2; (+) strand; PAM type: NNAGAAW; PAM sequence: AAAGAAA
gaaatctgctattggtagaa

SEQ ID NO: 13756 - DNA, 20 bp, Artificial Sequence
  Description of Artificial Sequence: Synthetic oligonucleotide
  Target: LAMA2; (+) strand; PAM type: NNAGAAW; PAM sequence: GCAGAAA
ccttttaactagtttcacta

SEQ ID NO: 13757 - DNA, 20 bp, Artificial Sequence
  Description of Artificial Sequence: Synthetic oligonucleotide
  Target: LAMA2; (+) strand; PAM type: NNAGAAW; PAM sequence: AAAGAAA
taactagtttcactagcaga

SEQ ID NO: 13758 - DNA, 20 bp, Artificial Sequence
  Description of Artificial Sequence: Synthetic oligonucleotide
  Target: LAMA2; (+) strand; PAM type: NNAGAAW; PAM sequence: AAAGAAA
taaaatagcaaataatcttt

SEQ ID NO: 13759 - DNA, 20 bp, Artificial Sequence
  Description of Artificial Sequence: Synthetic oligonucleotide
  Target: LAMA2; (+) strand; PAM type: NNAGAAW; PAM sequence: GAAGAAT
taaagactgttgtgttgact

SEQ ID NO: 13760 - DNA, 20 bp, Artificial Sequence
  Description of Artificial Sequence: Synthetic oligonucleotide
  Target: LAMA2; (+) strand; PAM type: NNAGAAW; PAM sequence: AAAGAAA
agtgcaaggactgtaattct

SEQ ID NO: 13761 - DNA, 20 bp, Artificial Sequence
  Description of Artificial Sequence: Synthetic oligonucleotide
  Target: LAMA2; (+) strand; PAM type: NNAGAAW; PAM sequence: AAAGAAA
actgtaattctaaagaaatt

SEQ ID NO: 13762 - DNA, 20 bp, Artificial Sequence
  Description of Artificial Sequence: Synthetic oligonucleotide
  Target: LAMA2; (+) strand; PAM type: NNAGAAW; PAM sequence: GAAGAAT
tctaaagaaattaaagaaaa

SEQ ID NO: 13763 - DNA, 20 bp, Artificial Sequence
  Description of Artificial Sequence: Synthetic oligonucleotide
  Target: LAMA2; (+) strand; PAM type: NNAGAAW; PAM sequence: CTAGAAT
ctctaaaataatttattaga

SEQ ID NO: 13764 - DNA, 20 bp, Artificial Sequence
  Description of Artificial Sequence: Synthetic oligonucleotide
  Target: LAMA2; (+) strand; PAM type: NNAGAAW; PAM sequence: CTAGAAT
ctagaataaataaatttata

SEQ ID NO: 13765 - DNA, 20 bp, Artificial Sequence
  Description of Artificial Sequence: Synthetic oligonucleotide
  Target: LAMA2; (+) strand; PAM type: NNAGAAW; PAM sequence: TAAGAAA
cactgagggtttacaataaa

SEQ ID NO: 13766 - DNA, 20 bp, Artificial Sequence
  Description of Artificial Sequence: Synthetic oligonucleotide
  Target: LAMA2; (+) strand; PAM type: NNAGAAW; PAM sequence: ACAGAAA
aaatggcaagcagtgagaac

SEQ ID NO: 13767 - DNA, 20 bp, Artificial Sequence
  Description of Artificial Sequence: Synthetic oligonucleotide
  Target: LAMA2; (+) strand; PAM type: NNAGAAW; PAM sequence: ACAGAAA
aagataagatagaccatgac

SEQ ID NO: 13768 - DNA, 20 bp, Artificial Sequence
  Description of Artificial Sequence: Synthetic oligonucleotide
  Target: LAMA2; (+) strand; PAM type: NNAGAAW; PAM sequence: TTAGAAT
gaatatgcaaatgagcagta

SEQ ID NO: 13769 - DNA, 20 bp, Artificial Sequence
  Description of Artificial Sequence: Synthetic oligonucleotide
  Target: LAMA2; (+) strand; PAM type: NNAGAAW; PAM sequence: GGAGAAA
aaaaatgagaactcttggtt

SEQ ID NO: 13770 - DNA, 20 bp, Artificial Sequence
  Description of Artificial Sequence: Synthetic oligonucleotide
  Target: LAMA2; (+) strand; PAM type: NNAGAAW; PAM sequence: ACAGAAT
tatgaagtaaaggaaaattg

SEQ ID NO: 13771 - DNA, 20 bp, Artificial Sequence
  Description of Artificial Sequence: Synthetic oligonucleotide
  Target: LAMA2; (+) strand; PAM type: NNAGAAW; PAM sequence: TGAGAAA
agcactgtggtgctctatta

SEQ ID NO: 13772 - DNA, 20 bp, Artificial Sequence
  Description of Artificial Sequence: Synthetic oligonucleotide
  Target: LAMA2; (+) strand; PAM type: NNAGAAW; PAM sequence: CTAGAAA
ctcagagcctttactctgtg

SEQ ID NO: 13773 - DNA, 20 bp, Artificial Sequence
  Description of Artificial Sequence: Synthetic oligonucleotide
  Target: LAMA2; (+) strand; PAM type: NNAGAAW; PAM sequence: GAAGAAA
catggattcaactgactgca

SEQ ID NO: 13774 - DNA, 20 bp, Artificial Sequence
  Description of Artificial Sequence: Synthetic oligonucleotide
  Target: LAMA2; (+) strand; PAM type: NNAGAAW; PAM sequence: TTAGAAA
ctgactgcagaagaaaaatg

SEQ ID NO: 13775 - DNA, 20 bp, Artificial Sequence
  Description of Artificial Sequence: Synthetic oligonucleotide
  Target: LAMA2; (+) strand; PAM type: NNAGAAW; PAM sequence: CAAGAAA
ctcccatccatccattcact

SEQ ID NO: 13776 - DNA, 20 bp, Artificial Sequence
  Description of Artificial Sequence: Synthetic oligonucleotide
  Target: LAMA2; (+) strand; PAM type: NNAGAAW; PAM sequence: TTAGAAT
ttgtattgttagggaatgta

SEQ ID NO: 13777 - DNA, 20 bp, Artificial Sequence
  Description of Artificial Sequence: Synthetic oligonucleotide
  Target: LAMA2; (+) strand; PAM type: NNAGAAW; PAM sequence: CGAGAAA
ataatggaaaatcgtctata

SEQ ID NO: 13778 - DNA, 20 bp, Artificial Sequence
  Description of Artificial Sequence: Synthetic oligonucleotide
  Target: LAMA2; (+) strand; PAM type: NNAGAAW; PAM sequence: ATAGAAA
cacccaccaacatgtctgta

SEQ ID NO: 13779 - DNA, 20 bp, Artificial Sequence
  Description of Artificial Sequence: Synthetic oligonucleotide
  Target: LAMA2; (+) strand; PAM type: NNAGAAW; PAM sequence: GGAGAAA
acattatgatttattttgaa

SEQ ID NO: 13780 - DNA, 20 bp, Artificial Sequence
  Description of Artificial Sequence: Synthetic oligonucleotide
  Target: LAMA2; (+) strand; PAM type: NNAGAAW; PAM sequence: CCAGAAA
cagctggcttgttttatatc

SEQ ID NO: 13781 - DNA, 20 bp, Artificial Sequence
  Description of Artificial Sequence: Synthetic oligonucleotide
  Target: LAMA2; (+) strand; PAM type: NNAGAAW; PAM sequence: TGAGAAT
acacggtttattaacctaaa

SEQ ID NO: 13782 - DNA, 20 bp, Artificial Sequence
  Description of Artificial Sequence: Synthetic oligonucleotide
  Target: LAMA2; (+) strand; PAM type: NNAGAAW; PAM sequence: TGAGAAA
aggtcctttgtatgtttaag

SEQ ID NO: 13783 - DNA, 20 bp, Artificial Sequence
  Description of Artificial Sequence: Synthetic oligonucleotide
  Target: LAMA2; (+) strand; PAM type: NNAGAAW; PAM sequence: TCAGAAA
caaataaactctaataatgt

SEQ ID NO: 13784 - DNA, 20 bp, Artificial Sequence
  Description of Artificial Sequence: Synthetic oligonucleotide
  Target: LAMA2; (+) strand; PAM type: NNAGAAW; PAM sequence: AGAGAAT
tatttttggggacagtcaag

SEQ ID NO: 13785 - DNA, 20 bp, Artificial Sequence
  Description of Artificial Sequence: Synthetic oligonucleotide
  Target: LAMA2; (+) strand; PAM type: NNAGAAW; PAM sequence: ATAGAAA
gacagtcaagagagaatttg

SEQ ID NO: 13786 - DNA, 20 bp, Artificial Sequence
  Description of Artificial Sequence: Synthetic oligonucleotide
  Target: LAMA2; (+) strand; PAM type: NNAGAAW; PAM sequence: CCAGAAA
tctggctcacctgctaggtg

SEQ ID NO: 13787 - DNA, 20 bp, Artificial Sequence
  Description of Artificial Sequence: Synthetic oligonucleotide
  Target: LAMA2; (+) strand; PAM type: NNAGAAW; PAM sequence: TTAGAAT
acaagatctgcttcactctt

SEQ ID NO: 13788 - DNA, 20 bp, Artificial Sequence
  Description of Artificial Sequence: Synthetic oligonucleotide
  Target: LAMA2; (+) strand; PAM type: NNAGAAW; PAM sequence: CCAGAAT
tgagtctattctttgtgaca

SEQ ID NO: 13789 - DNA, 20 bp, Artificial Sequence
  Description of Artificial Sequence: Synthetic oligonucleotide
  Target: LAMA2; (+) strand; PAM type: NNAGAAW; PAM sequence: ACAGAAT
taggtaataataatccattt

SEQ ID NO: 13790 - DNA, 20 bp, Artificial Sequence
  Description of Artificial Sequence: Synthetic oligonucleotide
  Target: LAMA2; (+) strand; PAM type: NNAGAAW; PAM sequence: AAAGAAT
gattataataaaaaatgctg

SEQ ID NO: 13791 - DNA, 20 bp, Artificial Sequence
  Description of Artificial Sequence: Synthetic oligonucleotide
  Target: LAMA2; (+) strand; PAM type: NNAGAAW; PAM sequence: TAAGAAA
tttgtcagtttgggcggcca

SEQ ID NO: 13792 - DNA, 20 bp, Artificial Sequence
  Description of Artificial Sequence: Synthetic oligonucleotide
  Target: LAMA2; (+) strand; PAM type: NNAGAAW; PAM sequence: AGAGAAA
gactaggtgggttgtaaaca

SEQ ID NO: 13793 - DNA, 20 bp, Artificial Sequence
  Description of Artificial Sequence: Synthetic oligonucleotide
  Target: LAMA2; (+) strand; PAM type: NNAGAAW; PAM sequence: GTAGAAT
atctgtattattttatgtct

SEQ ID NO: 13794 - DNA, 20 bp, Artificial Sequence
  Description of Artificial Sequence: Synthetic oligonucleotide
  Target: LAMA2; (+) strand; PAM type: NNAGAAW; PAM sequence: TCAGAAT
ctagaagtggaattgctagc

SEQ ID NO: 13795 - DNA, 20 bp, Artificial Sequence
  Description of Artificial Sequence: Synthetic oligonucleotide
  Target: LAMA2; (+) strand; PAM type: NNAGAAW; PAM sequence: TCAGAAT
gtcacacagtttattcttca

SEQ ID NO: 13796 - DNA, 20 bp, Artificial Sequence
  Description of Artificial Sequence: Synthetic oligonucleotide
  Target: LAMA2; (+) strand; PAM type: NNAGAAW; PAM sequence: ATAGAAA
tttctcaatttttctttcac

SEQ ID NO: 13797 - DNA, 20 bp, Artificial Sequence
  Description of Artificial Sequence: Synthetic oligonucleotide
  Target: LAMA2; (+) strand; PAM type: NNAGAAW; PAM sequence: ACAGAAT
ataatgtgatgttttcaagt

SEQ ID NO: 13798 - DNA, 20 bp, Artificial Sequence
  Description of Artificial Sequence: Synthetic oligonucleotide
  Target: LAMA2; (+) strand; PAM type: NNAGAAW; PAM sequence: AGAGAAA
tttagggcacaataattttc

SEQ ID NO: 13799 - DNA, 20 bp, Artificial Sequence
  Description of Artificial Sequence: Synthetic oligonucleotide
  Target: LAMA2; (+) strand; PAM type: NNAGAAW; PAM sequence: AAAGAAT
gggcacaataattttcagag

SEQ ID NO: 13800 - DNA, 20 bp, Artificial Sequence
  Description of Artificial Sequence: Synthetic oligonucleotide
  Target: LAMA2; (+) strand; PAM type: NNAGAAW; PAM sequence: TAAGAAT
attttcagagaaagaatgat

SEQ ID NO: 13801 - DNA, 20 bp, Artificial Sequence
  Description of Artificial Sequence: Synthetic oligonucleotide
  Target: LAMA2; (+) strand; PAM type: NNAGAAW; PAM sequence: AGAGAAA
ttgacgcagtgccttggaag

SEQ ID NO: 13802 - DNA, 20 bp, Artificial Sequence
  Description of Artificial Sequence: Synthetic oligonucleotide
  Target: LAMA2; (+) strand; PAM type: NNAGAAW; PAM sequence: GGAGAAA
tataggtagttgaagtataa

SEQ ID NO: 13803 - DNA, 20 bp, Artificial Sequence
  Description of Artificial Sequence: Synthetic oligonucleotide
  Target: LAMA2; (+) strand; PAM type: NNAGAAW; PAM sequence: GGAGAAT
tgaatctgcgtaactaattg

SEQ ID NO: 13804 - DNA, 20 bp, Artificial Sequence
  Description of Artificial Sequence: Synthetic oligonucleotide
  Target: LAMA2; (+) strand; PAM type: NNAGAAW; PAM sequence: CAAGAAA
ggaagttaactttatttttc

SEQ ID NO: 13805 - DNA, 20 bp, Artificial Sequence
  Description of Artificial Sequence: Synthetic oligonucleotide
  Target: LAMA2; (+) strand; PAM type: NNAGAAW; PAM sequence: AAAGAAA
taactttatttttccaagaa

SEQ ID NO: 13806 - DNA, 20 bp, Artificial Sequence
  Description of Artificial Sequence: Synthetic oligonucleotide
  Target: LAMA2; (+) strand; PAM type: NNAGAAW; PAM sequence: CTAGAAT
atgatccttctccagaactg

SEQ ID NO: 13807 - DNA, 20 bp, Artificial Sequence
  Description of Artificial Sequence: Synthetic oligonucleotide
  Target: LAMA2; (+) strand; PAM type: NNAGAAW; PAM sequence: AGAGAAA
tgtttgctcacaaagaccca

SEQ ID NO: 13808 - DNA, 20 bp, Artificial Sequence
  Description of Artificial Sequence: Synthetic oligonucleotide
  Target: LAMA2; (+) strand; PAM type: NNAGAAW; PAM sequence: TTAGAAT
gttattatcaaatttttatt

SEQ ID NO: 13809 - DNA, 20 bp, Artificial Sequence
  Description of Artificial Sequence: Synthetic oligonucleotide
  Target: LAMA2; (+) strand; PAM type: NNAGAAW; PAM sequence: TGAGAAT
taatttcttcttttgtaaaa

SEQ ID NO: 13810 - DNA, 20 bp, Artificial Sequence
  Description of Artificial Sequence: Synthetic oligonucleotide
  Target: LAMA2; (+) strand; PAM type: NNAGAAW; PAM sequence: TCAGAAT
ctacttaataatcttatttt

SEQ ID NO: 13811 - DNA, 20 bp, Artificial Sequence
  Description of Artificial Sequence: Synthetic oligonucleotide
  Target: LAMA2; (+) strand; PAM type: NNAGAAW; PAM sequence: GGAGAAA
tttaaaaatgcagtgctata

SEQ ID NO: 13812 - DNA, 20 bp, Artificial Sequence
  Description of Artificial Sequence: Synthetic oligonucleotide
  Target: LAMA2; (+) strand; PAM type: NNAGAAW; PAM sequence: TAAGAAA
tgtatgactagaggtatagc

SEQ ID NO: 13813 - DNA, 20 bp, Artificial Sequence
  Description of Artificial Sequence: Synthetic oligonucleotide
  Target: LAMA2; (+) strand; PAM type: NNAGAAW; PAM sequence: GGAGAAA
gctaagaaaaaagactatag

SEQ ID NO: 13814 - DNA, 20 bp, Artificial Sequence
  Description of Artificial Sequence: Synthetic oligonucleotide
  Target: LAMA2; (+) strand; PAM type: NNAGAAW; PAM sequence: CTAGAAT
gtaggacaaagcatttaatt

SEQ ID NO: 13815 - DNA, 20 bp, Artificial Sequence
  Description of Artificial Sequence: Synthetic oligonucleotide
  Target: LAMA2; (+) strand; PAM type: NNAGAAW; PAM sequence: TAAGAAA
gtttggatttttcacttgtt

SEQ ID NO: 13816 - DNA, 20 bp, Artificial Sequence
  Description of Artificial Sequence: Synthetic oligonucleotide
  Target: LAMA2; (+) strand; PAM type: NNAGAAW; PAM sequence: AGAGAAA
ttcttgacagtatgtctatc

SEQ ID NO: 13817 - DNA, 20 bp, Artificial Sequence
  Description of Artificial Sequence: Synthetic oligonucleotide
  Target: LAMA2; (+) strand; PAM type: NNAGAAW; PAM sequence: AAAGAAA
acaaaaacaaatagaaggaa

SEQ ID NO: 13818 - DNA, 20 bp, Artificial Sequence
  Description of Artificial Sequence: Synthetic oligonucleotide
  Target: LAMA2; (+) strand; PAM type: NNAGAAW; PAM sequence: CAAGAAA
caataaaagagggtttcttg

SEQ ID NO: 13819 - DNA, 20 bp, Artificial Sequence
  Description of Artificial Sequence: Synthetic oligonucleotide
  Target: LAMA2; (+) strand; PAM type: NNAGAAW; PAM sequence: GAAGAAT
ctatgtaaaacaacttttat

SEQ ID NO: 13820 - DNA, 20 bp, Artificial Sequence
  Description of Artificial Sequence: Synthetic oligonucleotide
  Target: LAMA2; (+) strand; PAM type: NNAGAAW; PAM sequence: CAAGAAA
tgtgagtcctcacttgtcct

SEQ ID NO: 13821 - DNA, 20 bp, Artificial Sequence
  Description of Artificial Sequence: Synthetic oligonucleotide
  Target: LAMA2; (+) strand; PAM type: NNAGAAW; PAM sequence: GCAGAAA
ccttcaaactaaggataaaa

SEQ ID NO: 13822 - DNA, 20 bp, Artificial Sequence
  Description of Artificial Sequence: Synthetic oligonucleotide
  Target: LAMA2; (+) strand; PAM type: NNAGAAW; PAM sequence: ACAGAAA
gtccccacttagacagtgta

SEQ ID NO: 13823 - DNA, 20 bp, Artificial Sequence
  Description of Artificial Sequence: Synthetic oligonucleotide
  Target: LAMA2; (+) strand; PAM type: NNAGAAW; PAM sequence: TAAGAAA
tgaaatcagccatcacagta

SEQ ID NO: 13824 - DNA, 20 bp, Artificial Sequence
  Description of Artificial Sequence: Synthetic oligonucleotide
  Target: LAMA2; (+) strand; PAM type: NNAGAAW; PAM sequence: CCAGAAT
tagtggcaagccggaaaatg

SEQ ID NO: 13825 - DNA, 20 bp, Artificial Sequence
  Description of Artificial Sequence: Synthetic oligonucleotide
  Target: LAMA2; (+) strand; PAM type: NNAGAAW; PAM sequence: ATAGAAT
aaatgccagaatgctttttg

SEQ ID NO: 13826 - DNA, 20 bp, Artificial Sequence
  Description of Artificial Sequence: Synthetic oligonucleotide
  Target: LAMA2; (+) strand; PAM type: NNAGAAW; PAM sequence: ATAGAAT
gaaaaaatgcatatgccacc

SEQ ID NO: 13827 - DNA, 20 bp, Artificial Sequence
  Description of Artificial Sequence: Synthetic oligonucleotide
  Target: LAMA2; (+) strand; PAM type: NNAGAAW; PAM sequence: ACAGAAA
ctcaggaaactaacacagga

SEQ ID NO: 13828 - DNA, 20 bp, Artificial Sequence
  Description of Artificial Sequence: Synthetic oligonucleotide
  Target: LAMA2; (+) strand; PAM type: NNAGAAW; PAM sequence: GGAGAAT
agatcccaggcatcagagaa

SEQ ID NO: 13829 - DNA, 20 bp, Artificial Sequence
  Description of Artificial Sequence: Synthetic oligonucleotide
  Target: LAMA2; (+) strand; PAM type: NNAGAAW; PAM sequence: CTAGAAA
tgcttcctccctctttttga

SEQ ID NO: 13830 - DNA, 20 bp, Artificial Sequence
  Description of Artificial Sequence: Synthetic oligonucleotide
  Target: LAMA2; (+) strand; PAM type: NNAGAAW; PAM sequence: TCAGAAA
cagtgctgtccaggattcca

SEQ ID NO: 13831 - DNA, 20 bp, Artificial Sequence
  Description of Artificial Sequence: Synthetic oligonucleotide
  Target: LAMA2; (+) strand; PAM type: NNAGAAW; PAM sequence: CAAGAAA
aatatgtcattcttcctttc

SEQ ID NO: 13832 - DNA, 20 bp, Artificial Sequence
  Description of Artificial Sequence: Synthetic oligonucleotide
  Target: LAMA2; (+) strand; PAM type: NNAGAAW; PAM sequence: TAAGAAA
ttttcctaaagggaaatatc

SEQ ID NO: 13833 - DNA, 20 bp, Artificial Sequence
  Description of Artificial Sequence: Synthetic oligonucleotide
  Target: LAMA2; (+) strand; PAM type: NNAGAAW; PAM sequence: GGAGAAA
ttttaggtgacaggtatcat

SEQ ID NO: 13834 - DNA, 20 bp, Artificial Sequence
  Description of Artificial Sequence: Synthetic oligonucleotide
  Target: LAMA2; (+) strand; PAM type: NNAGAAW; PAM sequence: CAAGAAA
ttctggagattttctcaacc

SEQ ID NO: 13835 - DNA, 20 bp, Artificial Sequence
  Description of Artificial Sequence: Synthetic oligonucleotide
  Target: LAMA2; (+) strand; PAM type: NNAGAAW; PAM sequence: TTAGAAA
gtttataaagatattatgga

SEQ ID NO: 13836 - DNA, 20 bp, Artificial Sequence
  Description of Artificial Sequence: Synthetic oligonucleotide
  Target: LAMA2; (+) strand; PAM type: NNAGAAW; PAM sequence: GTAGAAT
attaaatttctcttctgttt

SEQ ID NO: 13837 - DNA, 20 bp, Artificial Sequence
  Description of Artificial Sequence: Synthetic oligonucleotide
  Target: LAMA2; (+) strand; PAM type: NNAGAAW; PAM sequence: GCAGAAA
aaaacaaacattttaaaaac

SEQ ID NO: 13838 - DNA, 20 bp, Artificial Sequence
  Description of Artificial Sequence: Synthetic oligonucleotide
  Target: LAMA2; (+) strand; PAM type: NNAGAAW; PAM sequence: TTAGAAA
tattccaatcaccttaatat

SEQ ID NO: 13839 - DNA, 20 bp, Artificial Sequence
  Description of Artificial Sequence: Synthetic oligonucleotide
  Target: LAMA2; (+) strand; PAM type: NNAGAAW; PAM sequence: ATAGAAT
agataatatctctaaaaagc

SEQ ID NO: 13840 - DNA, 20 bp, Artificial Sequence
  Description of Artificial Sequence: Synthetic oligonucleotide
  Target: LAMA2; (+) strand; PAM type: NNAGAAW; PAM sequence: AGAGAAA
aatagtaagttgctgatgat

SEQ ID NO: 13841 - DNA, 20 bp, Artificial Sequence
  Description of Artificial Sequence: Synthetic oligonucleotide
  Target: LAMA2; (+) strand; PAM type: NNAGAAW; PAM sequence: ACAGAAA
gggtaggctgcagcctacag

SEQ ID NO: 13842 - DNA, 20 bp, Artificial Sequence
  Description of Artificial Sequence: Synthetic oligonucleotide
  Target: LAMA2; (+) strand; PAM type: NNAGAAW; PAM sequence: TGAGAAT
aacacgaattctaaatagtg

SEQ ID NO: 13843 - DNA, 20 bp, Artificial Sequence
  Description of Artificial Sequence: Synthetic oligonucleotide
  Target: LAMA2; (+) strand; PAM type: NNAGAAW; PAM sequence: TAAGAAT
cactattacaacaaagcttt

SEQ ID NO: 13844 - DNA, 20 bp, Artificial Sequence
  Description of Artificial Sequence: Synthetic oligonucleotide
  Target: LAMA2; (+) strand; PAM type: NNAGAAW; PAM sequence: GGAGAAA
tacatggtacaggagagaga

SEQ ID NO: 13845 - DNA, 20 bp, Artificial Sequence
  Description of Artificial Sequence: Synthetic oligonucleotide
  Target: LAMA2; (+) strand; PAM type: NNAGAAW; PAM sequence: GAAGAAA
aaccatatcactgtctttct

SEQ ID NO: 13846 - DNA, 20 bp, Artificial Sequence
  Description of Artificial Sequence: Synthetic oligonucleotide
  Target: LAMA2; (+) strand; PAM type: NNAGAAW; PAM sequence: TAAGAAA
taagagatcttacatatcaa

SEQ ID NO: 13847 - DNA, 20 bp, Artificial Sequence
  Description of Artificial Sequence: Synthetic oligonucleotide
  Target: LAMA2; (+) strand; PAM type: NNAGAAW; PAM sequence: TTAGAAA
ataagaaaaaagttaacctg

SEQ ID NO: 13848 - DNA, 20 bp, Artificial Sequence
  Description of Artificial Sequence: Synthetic oligonucleotide
  Target: LAMA2; (+) strand; PAM type: NNAGAAW; PAM sequence: TCAGAAA
aagatcaaaacaggtattcc

SEQ ID NO: 13849 - DNA, 20 bp, Artificial Sequence
  Description of Artificial Sequence: Synthetic oligonucleotide
  Target: LAMA2; (+) strand; PAM type: NNAGAAW; PAM sequence: GGAGAAA
cacacaaggttggtggctat

SEQ ID NO: 13850 - DNA, 20 bp, Artificial Sequence
  Description of Artificial Sequence: Synthetic oligonucleotide
  Target: LAMA2; (+) strand; PAM type: NNAGAAW; PAM sequence: CTAGAAA
aaattttacatatcctttga

SEQ ID NO: 13851 - DNA, 20 bp, Artificial Sequence
  Description of Artificial Sequence: Synthetic oligonucleotide
  Target: LAMA2; (+) strand; PAM type: NNAGAAW; PAM sequence: GGAGAAA
gtgtggtgttatttgtaaag

SEQ ID NO: 13852 - DNA, 20 bp, Artificial Sequence
  Description of Artificial Sequence: Synthetic oligonucleotide
  Target: LAMA2; (+) strand; PAM type: NNAGAAW; PAM sequence: GTAGAAT
acaaatgccccttccctttt

SEQ ID NO: 13853 - DNA, 20 bp, Artificial Sequence
  Description of Artificial Sequence: Synthetic oligonucleotide
  Target: LAMA2; (+) strand; PAM type: NNAGAAW; PAM sequence: TAAGAAA
gaaataaatgtaagtactcc

SEQ ID NO: 13854 - DNA, 20 bp, Artificial Sequence
  Description of Artificial Sequence: Synthetic oligonucleotide
  Target: LAMA2; (+) strand; PAM type: NNAGAAW; PAM sequence: GGAGAAA
agtcttacccaatcctttct

SEQ ID NO: 13855 - DNA, 20 bp, Artificial Sequence
  Description of Artificial Sequence: Synthetic oligonucleotide
  Target: LAMA2; (+) strand; PAM type: NNAGAAW; PAM sequence: GAAGAAA
aacatgaaaaagacaaggag

SEQ ID NO: 13856 - DNA, 20 bp, Artificial Sequence
  Description of Artificial Sequence: Synthetic oligonucleotide
  Target: LAMA2; (+) strand; PAM type: NNAGAAW; PAM sequence: GAAGAAA
aaagacaaggaggaagaaaa

SEQ ID NO: 13857 - DNA, 20 bp, Artificial Sequence
  Description of Artificial Sequence: Synthetic oligonucleotide
  Target: LAMA2; (+) strand; PAM type: NNAGAAW; PAM sequence: TTAGAAT
aggttggtttccaatactga

SEQ ID NO: 13858 - DNA, 20 bp, Artificial Sequence
  Description of Artificial Sequence: Synthetic oligonucleotide
  Target: LAMA2; (+) strand; PAM type: NNAGAAW; PAM sequence: TGAGAAA
tttagaacagtgtctggcat

SEQ ID NO: 13859 - DNA, 20 bp, Artificial Sequence
  Description of Artificial Sequence: Synthetic oligonucleotide
  Target: LAMA2; (+) strand; PAM type: NNAGAAW; PAM sequence: AAAGAAA
tttagttgttattagtatta

SEQ ID NO: 13860 - DNA, 20 bp, Artificial Sequence
  Description of Artificial Sequence: Synthetic oligonucleotide
  Target: LAMA2; (+) strand; PAM type: NNAGAAW; PAM sequence: ACAGAAA
ctttacccacaggctctaat

SEQ ID NO: 13861 - DNA, 20 bp, Artificial Sequence
  Description of Artificial Sequence: Synthetic oligonucleotide
  Target: LAMA2; (+) strand; PAM type: NNAGAAW; PAM sequence: ACAGAAA
gccccatctctactaaaaat

SEQ ID NO: 13862 - DNA, 20 bp, Artificial Sequence
  Description of Artificial Sequence: Synthetic oligonucleotide
  Target: LAMA2; (+) strand; PAM type: NNAGAAW; PAM sequence: ACAGAAA
aaaaaaatctattatgtata

SEQ ID NO: 13863 - DNA, 20 bp, Artificial Sequence
  Description of Artificial Sequence: Synthetic oligonucleotide
  Target: LAMA2; (+) strand; PAM type: NNAGAAW; PAM sequence: GAAGAAT
gcaattgtcatggaaaagct

SEQ ID NO: 13864 - DNA, 20 bp, Artificial Sequence
  Description of Artificial Sequence: Synthetic oligonucleotide
  Target: LAMA2; (+) strand; PAM type: NNAGAAW; PAM sequence: GAAGAAA
ttatgatgaaaatgttgcca

SEQ ID NO: 13865 - DNA, 20 bp, Artificial Sequence
  Description of Artificial Sequence: Synthetic oligonucleotide
  Target: LAMA2; (+) strand; PAM type: NNAGAAW; PAM sequence: CCAGAAA
gataaaacttttccatcact

SEQ ID NO: 13866 - DNA, 20 bp, Artificial Sequence
  Description of Artificial Sequence: Synthetic oligonucleotide
  Target: LAMA2; (+) strand; PAM type: NNAGAAW; PAM sequence: AGAGAAT
gtaaattagttgtgcctctt

SEQ ID NO: 13867 - DNA, 20 bp, Artificial Sequence
  Description of Artificial Sequence: Synthetic oligonucleotide
  Target: LAMA2; (+) strand; PAM type: NNAGAAW; PAM sequence: AAAGAAA
cagtagttctttttcttttg

SEQ ID NO: 13868 - DNA, 20 bp, Artificial Sequence
  Description of Artificial Sequence: Synthetic oligonucleotide
  Target: LAMA2; (+) strand; PAM type: NNAGAAW; PAM sequence: ATAGAAA
ttaaatccattctcctgttg

SEQ ID NO: 13869 - DNA, 20 bp, Artificial Sequence
  Description of Artificial Sequence: Synthetic oligonucleotide
  Target: LAMA2; (+) strand; PAM type: NNAGAAW; PAM sequence: ATAGAAA
ccttgtgtaaatacttagga

SEQ ID NO: 13870 - DNA, 20 bp, Artificial Sequence
  Description of Artificial Sequence: Synthetic oligonucleotide
  Target: LAMA2; (+) strand; PAM type: NNAGAAW; PAM sequence: TAAGAAA
taggtagatgcttaacttta

SEQ ID NO: 13871 - DNA, 20 bp, Artificial Sequence
  Description of Artificial Sequence: Synthetic oligonucleotide
  Target: LAMA2; (+) strand; PAM type: NNAGAAW; PAM sequence: CTAGAAT
tcttcattgctttagtaagt

SEQ ID NO: 13872 - DNA, 20 bp, Artificial Sequence
  Description of Artificial Sequence: Synthetic oligonucleotide
  Target: LAMA2; (+) strand; PAM type: NNAGAAW; PAM sequence: TTAGAAT
gtgtgtgtttctatacaatt

SEQ ID NO: 13873 - DNA, 20 bp, Artificial Sequence
  Description of Artificial Sequence: Synthetic oligonucleotide
  Target: LAMA2; (+) strand; PAM type: NNAGAAW; PAM sequence: ACAGAAA
ttagaatcaacttgtcaatt

SEQ ID NO: 13874 - DNA, 20 bp, Artificial Sequence
  Description of Artificial Sequence: Synthetic oligonucleotide
  Target: LAMA2; (+) strand; PAM type: NNAGAAW; PAM sequence: AAAGAAT
agcttgaggagatgttggtc

SEQ ID NO: 13875 - DNA, 20 bp, Artificial Sequence
  Description of Artificial Sequence: Synthetic oligonucleotide
  Target: LAMA2; (+) strand; PAM type: NNAGAAW; PAM sequence: TTAGAAT
gtcttttgttaaattaatct

SEQ ID NO: 13876 - DNA, 20 bp, Artificial Sequence
  Description of Artificial Sequence: Synthetic oligonucleotide
  Target: LAMA2; (+) strand; PAM type: NNAGAAW; PAM sequence: AAAGAAT
aattatttaatgtaattgtt

SEQ ID NO: 13877 - DNA, 20 bp, Artificial Sequence
  Description of Artificial Sequence: Synthetic oligonucleotide
  Target: LAMA2; (+) strand; PAM type: NNAGAAW; PAM sequence: TGAGAAT
acttcccttttaaaagttac

SEQ ID NO: 13878 - DNA, 20 bp, Artificial Sequence
  Description of Artificial Sequence: Synthetic oligonucleotide
  Target: LAMA2; (+) strand; PAM type: NNAGAAW; PAM sequence: AAAGAAT
ttttaaaagttactgagaat

SEQ ID NO: 13879 - DNA, 20 bp, Artificial Sequence
  Description of Artificial Sequence: Synthetic oligonucleotide
  Target: LAMA2; (+) strand; PAM type: NNAGAAW; PAM sequence: ACAGAAA
tttatcttcttaaggctttc

SEQ ID NO: 13880 - DNA, 20 bp, Artificial Sequence
  Description of Artificial Sequence: Synthetic oligonucleotide
  Target: LAMA2; (+) strand; PAM type: NNAGAAW; PAM sequence: AAAGAAT
aaataaagttgtccatatat

SEQ ID NO: 13881 - DNA, 20 bp, Artificial Sequence
  Description of Artificial Sequence: Synthetic oligonucleotide
  Target: LAMA2; (+) strand; PAM type: NNAGAAW; PAM sequence: GAAGAAA
gcagcctgtgaacacgtagt

SEQ ID NO: 13882 - DNA, 20 bp, Artificial Sequence
  Description of Artificial Sequence: Synthetic oligonucleotide
  Target: LAMA2; (+) strand; PAM type: NNAGAAW; PAM sequence: AAAGAAT
cagctggcttcttcagtggt

SEQ ID NO: 13883 - DNA, 20 bp, Artificial Sequence
  Description of Artificial Sequence: Synthetic oligonucleotide
  Target: LAMA2; (+) strand; PAM type: NNAGAAW; PAM sequence: ATAGAAA
tagcaattatgcagacagcc

SEQ ID NO: 13884 - DNA, 20 bp, Artificial Sequence
  Description of Artificial Sequence: Synthetic oligonucleotide
  Target: LAMA2; (+) strand; PAM type: NNAGAAW; PAM sequence: GGAGAAT
tccggcgtagctgggctttt

SEQ ID NO: 13885 - DNA, 20 bp, Artificial Sequence
  Description of Artificial Sequence: Synthetic oligonucleotide
  Target: LAMA2; (+) strand; PAM type: NNAGAAW; PAM sequence: CGAGAAA
ccagattctgtccttgaaca

SEQ ID NO: 13886 - DNA, 20 bp, Artificial Sequence
  Description of Artificial Sequence: Synthetic oligonucleotide
  Target: LAMA2; (+) strand; PAM type: NNAGAAW; PAM sequence: TTAGAAA
gtagttttaaactacatgct

SEQ ID NO: 13887 - DNA, 20 bp, Artificial Sequence
  Description of Artificial Sequence: Synthetic oligonucleotide
  Target: LAMA2; (+) strand; PAM type: NNAGAAW; PAM sequence: TAAGAAT
tcaattgactaatgtttggt

SEQ ID NO: 13888 - DNA, 20 bp, Artificial Sequence
  Description of Artificial Sequence: Synthetic oligonucleotide
  Target: LAMA2; (+) strand; PAM type: NNAGAAW; PAM sequence: TTAGAAT
gttatgaggcacatacatat

SEQ ID NO: 13889 - DNA, 20 bp, Artificial Sequence
  Description of Artificial Sequence: Synthetic oligonucleotide
  Target: LAMA2; (+) strand; PAM type: NNAGAAW; PAM sequence: ATAGAAT
ggcatgcatgtggctttatg

SEQ ID NO: 13890 - DNA, 20 bp, Artificial Sequence
  Description of Artificial Sequence: Synthetic oligonucleotide
  Target: LAMA2; (+) strand; PAM type: NNAGAAW; PAM sequence: TGAGAAA
tagttctgttttaagttttt

SEQ ID NO: 13891 - DNA, 20 bp, Artificial Sequence
  Description of Artificial Sequence: Synthetic oligonucleotide
  Target: LAMA2; (+) strand; PAM type: NNAGAAW; PAM sequence: AAAGAAA
aaaactatgaaaacaatctt

SEQ ID NO: 13892 - DNA, 20 bp, Artificial Sequence
  Description of Artificial Sequence: Synthetic oligonucleotide
  Target: LAMA2; (+) strand; PAM type: NNAGAAW; PAM sequence: GGAGAAT
aaaggagaagtagaagaagg

SEQ ID NO: 13893 - DNA, 20 bp, Artificial Sequence
  Description of Artificial Sequence: Synthetic oligonucleotide
  Target: LAMA2; (+) strand; PAM type: NNAGAAW; PAM sequence: GAAGAAT
aggggggggaagaagaggag

SEQ ID NO: 13894 - DNA, 20 bp, Artificial Sequence
  Description of Artificial Sequence: Synthetic oligonucleotide
  Target: LAMA2; (+) strand; PAM type: NNAGAAW; PAM sequence: ACAGAAA
attttactatctggcccttt

SEQ ID NO: 13895 - DNA, 20 bp, Artificial Sequence
  Description of Artificial Sequence: Synthetic oligonucleotide
  Target: LAMA2; (+) strand; PAM type: NNAGAAW; PAM sequence: GGAGAAT
ctactcaggagactgaggca

SEQ ID NO: 13896 - DNA, 20 bp, Artificial Sequence
  Description of Artificial Sequence: Synthetic oligonucleotide
  Target: LAMA2; (+) strand; PAM type: NNAGAAW; PAM sequence: TGAGAAA
tttaacaatagtatcatgtt

SEQ ID NO: 13897 - DNA, 20 bp, Artificial Sequence
  Description of Artificial Sequence: Synthetic oligonucleotide
  Target: LAMA2; (+) strand; PAM type: NNAGAAW; PAM sequence: GGAGAAT
tcatctctacaggacatttc

SEQ ID NO: 13898 - DNA, 20 bp, Artificial Sequence
  Description of Artificial Sequence: Synthetic oligonucleotide
  Target: LAMA2; (+) strand; PAM type: NNAGAAW; PAM sequence: CTAGAAT
gttgctttccactgaatttc

SEQ ID NO: 13899 - DNA, 20 bp, Artificial Sequence
  Description of Artificial Sequence: Synthetic oligonucleotide
  Target: LAMA2; (+) strand; PAM type: NNAGAAW; PAM sequence: AAAGAAT
tgaattgcagtttaacagct

SEQ ID NO: 13900 - DNA, 20 bp, Artificial Sequence
  Description of Artificial Sequence: Synthetic oligonucleotide
  Target: LAMA2; (+) strand; PAM type: NNAGAAW; PAM sequence: TTAGAAA
gcatgtaaaagaactggatt

SEQ ID NO: 13901 - DNA, 20 bp, Artificial Sequence
  Description of Artificial Sequence: Synthetic oligonucleotide
  Target: LAMA2; (+) strand; PAM type: NNAGAAW; PAM sequence: TGAGAAA
aatgaagtctgtgtcaagga

SEQ ID NO: 13902 - DNA, 20 bp, Artificial Sequence
  Description of Artificial Sequence: Synthetic oligonucleotide
  Target: LAMA2; (+) strand; PAM type: NNAGAAW; PAM sequence: GCAGAAT
tcgacgaggtgagagctgca

SEQ ID NO: 13903 - DNA, 20 bp, Artificial Sequence
  Description of Artificial Sequence: Synthetic oligonucleotide
  Target: LAMA2; (+) strand; PAM type: NNAGAAW; PAM sequence: GAAGAAT
gccaaatatgattattttca

SEQ ID NO: 13904 - DNA, 20 bp, Artificial Sequence
  Description of Artificial Sequence: Synthetic oligonucleotide
  Target: LAMA2; (+) strand; PAM type: NNAGAAW; PAM sequence: AAAGAAA
acacacacatacacagagat

SEQ ID NO: 13905 - DNA, 20 bp, Artificial Sequence
  Description of Artificial Sequence: Synthetic oligonucleotide
  Target: LAMA2; (+) strand; PAM type: NNAGAAW; PAM sequence: ATAGAAA
actgagatgtaggcaataat

SEQ ID NO: 13906 - DNA, 20 bp, Artificial Sequence
  Description of Artificial Sequence: Synthetic oligonucleotide
  Target: LAMA2; (+) strand; PAM type: NNAGAAW; PAM sequence: ACAGAAA
tagtagtcatgaattaatga

SEQ ID NO: 13907 - DNA, 20 bp, Artificial Sequence
  Description of Artificial Sequence: Synthetic oligonucleotide
  Target: LAMA2; (+) strand; PAM type: NNAGAAW; PAM sequence: TAAGAAA
aattcatgaactccaaacat

SEQ ID NO: 13908 - DNA, 20 bp, Artificial Sequence
  Description of Artificial Sequence: Synthetic oligonucleotide
  Target: LAMA2; (+) strand; PAM type: NNAGAAW; PAM sequence: ATAGAAT
caagtttaagtaggaaattc

SEQ ID NO: 13909 - DNA, 20 bp, Artificial Sequence
  Description of Artificial Sequence: Synthetic oligonucleotide
  Target: LAMA2; (+) strand; PAM type: NNAGAAW; PAM sequence: CTAGAAA
tgcactgggacgcttcttct

SEQ ID NO: 13910 - DNA, 20 bp, Artificial Sequence
  Description of Artificial Sequence: Synthetic oligonucleotide
  Target: LAMA2; (+) strand; PAM type: NNAGAAW; PAM sequence: ACAGAAT
tgagtaatgagtatatgatc

SEQ ID NO: 13911 - DNA, 20 bp, Artificial Sequence
  Description of Artificial Sequence: Synthetic oligonucleotide
  Target: LAMA2; (+) strand; PAM type: NNAGAAW; PAM sequence: GTAGAAA
cacagaataaaaatggaaaa

SEQ ID NO: 13912 - DNA, 20 bp, Artificial Sequence
  Description of Artificial Sequence: Synthetic oligonucleotide
  Target: LAMA2; (+) strand; PAM type: NNAGAAW; PAM sequence: AAAGAAA
taaaataaattcttaatagt

SEQ ID NO: 13913 - DNA, 20 bp, Artificial Sequence
  Description of Artificial Sequence: Synthetic oligonucleotide
  Target: LAMA2; (+) strand; PAM type: NNAGAAW; PAM sequence: TGAGAAT
gttcaattcccacctatgag

SEQ ID NO: 13914 - DNA, 20 bp, Artificial Sequence
  Description of Artificial Sequence: Synthetic oligonucleotide
  Target: LAMA2; (+) strand; PAM type: NNAGAAW; PAM sequence: TGAGAAT
ttgttcttgcaatcgtttac

SEQ ID NO: 13915 - DNA, 20 bp, Artificial Sequence
  Description of Artificial Sequence: Synthetic oligonucleotide
  Target: LAMA2; (+) strand; PAM type: NNAGAAW; PAM sequence: GAAGAAA
gtagttttttccaattctgt

SEQ ID NO: 13916 - DNA, 20 bp, Artificial Sequence
  Description of Artificial Sequence: Synthetic oligonucleotide
  Target: LAMA2; (+) strand; PAM type: NNAGAAW; PAM sequence: TAAGAAT
ctctgtttgttgttgttgta

SEQ ID NO: 13917 - DNA, 20 bp, Artificial Sequence
  Description of Artificial Sequence: Synthetic oligonucleotide
  Target: LAMA2; (+) strand; PAM type: NNAGAAW; PAM sequence: TCAGAAT
gtctctgcctggctttggta

SEQ ID NO: 13918 - DNA, 20 bp, Artificial Sequence
  Description of Artificial Sequence: Synthetic oligonucleotide
  Target: LAMA2; (+) strand; PAM type: NNAGAAW; PAM sequence: GTAGAAT
agttcctccttgtacctctg

SEQ ID NO: 13919 - DNA, 20 bp, Artificial Sequence
  Description of Artificial Sequence: Synthetic oligonucleotide
  Target: LAMA2; (+) strand; PAM type: NNAGAAW; PAM sequence: TAAGAAT
gggttgaaaattcttttctt

SEQ ID NO: 13920 - DNA, 20 bp, Artificial Sequence
  Description of Artificial Sequence: Synthetic oligonucleotide
  Target: LAMA2; (+) strand; PAM type: NNAGAAW; PAM sequence: GCAGAAA
ccggtacctcagatggaaat

SEQ ID NO: 13921 - DNA, 20 bp, Artificial Sequence
  Description of Artificial Sequence: Synthetic oligonucleotide
  Target: LAMA2; (+) strand; PAM type: NNAGAAW; PAM sequence: GAAGAAA
gactctccgtcttgaaaggt

SEQ ID NO: 13922 - DNA, 20 bp, Artificial Sequence
  Description of Artificial Sequence: Synthetic oligonucleotide
  Target: LAMA2; (+) strand; PAM type: NNAGAAW; PAM sequence: ATAGAAA
ttaatgcttataattcaaaa

SEQ ID NO: 13923 - DNA, 20 bp, Artificial Sequence
  Description of Artificial Sequence: Synthetic oligonucleotide
  Target: LAMA2; (+) strand; PAM type: NNAGAAW; PAM sequence: GTAGAAA
tcagattacataaccagata

SEQ ID NO: 13924 - DNA, 20 bp, Artificial Sequence
  Description of Artificial Sequence: Synthetic oligonucleotide
  Target: LAMA2; (+) strand; PAM type: NNAGAAW; PAM sequence: TTAGAAA
aactctcatctatcccaaga

SEQ ID NO: 13925 - DNA, 20 bp, Artificial Sequence
  Description of Artificial Sequence: Synthetic oligonucleotide
  Target: LAMA2; (+) strand; PAM type: NNAGAAW; PAM sequence: CTAGAAT
tacttaattttttattccat

SEQ ID NO: 13926 - DNA, 20 bp, Artificial Sequence
  Description of Artificial Sequence: Synthetic oligonucleotide
  Target: LAMA2; (+) strand; PAM type: NNAGAAW; PAM sequence: CTAGAAT
tgacctaccttatataggac

SEQ ID NO: 13927 - DNA, 20 bp, Artificial Sequence
  Description of Artificial Sequence: Synthetic oligonucleotide
  Target: LAMA2; (+) strand; PAM type: NNAGAAW; PAM sequence: TCAGAAT
cctgaactgtagtctagtca

SEQ ID NO: 13928 - DNA, 20 bp, Artificial Sequence
  Description of Artificial Sequence: Synthetic oligonucleotide
  Target: LAMA2; (+) strand; PAM type: NNAGAAW; PAM sequence: AAAGAAT
tccaggaaagacattgtttt

SEQ ID NO: 13929 - DNA, 20 bp, Artificial Sequence
  Description of Artificial Sequence: Synthetic oligonucleotide
  Target: LAMA2; (+) strand; PAM type: NNAGAAW; PAM sequence: CCAGAAA
acatctagtctacaatactt

SEQ ID NO: 13930 - DNA, 20 bp, Artificial Sequence
  Description of Artificial Sequence: Synthetic oligonucleotide
  Target: LAMA2; (+) strand; PAM type: NNAGAAW; PAM sequence: TCAGAAA
aatttctggaaattttaaca

SEQ ID NO: 13931 - DNA, 20 bp, Artificial Sequence
  Description of Artificial Sequence: Synthetic oligonucleotide
  Target: LAMA2; (+) strand; PAM type: NNAGAAW; PAM sequence: TTAGAAA
ttggtctattgggtaatcta

SEQ ID NO: 13932 - DNA, 20 bp, Artificial Sequence
  Description of Artificial Sequence: Synthetic oligonucleotide
  Target: LAMA2; (+) strand; PAM type: NNAGAAW; PAM sequence: TTAGAAT
atttgcatttgggtatcaag

SEQ ID NO: 13933 - DNA, 20 bp, Artificial Sequence
  Description of Artificial Sequence: Synthetic oligonucleotide
  Target: LAMA2; (+) strand; PAM type: NNAGAAW; PAM sequence: ACAGAAA
tgtaaaaattaactagcatt

SEQ ID NO: 13934 - DNA, 20 bp, Artificial Sequence
  Description of Artificial Sequence: Synthetic oligonucleotide
  Target: LAMA2; (+) strand; PAM type: NNAGAAW; PAM sequence: GGAGAAA
ctaggggaggaacagcatta

SEQ ID NO: 13935 - DNA, 20 bp, Artificial Sequence
  Description of Artificial Sequence: Synthetic oligonucleotide
  Target: LAMA2; (+) strand; PAM type: NNAGAAW; PAM sequence: AGAGAAA
tttaacccaagagttattaa

SEQ ID NO: 13936 - DNA, 20 bp, Artificial Sequence
  Description of Artificial Sequence: Synthetic oligonucleotide
  Target: LAMA2; (+) strand; PAM type: NNAGAAW; PAM sequence: TAAGAAA
ctaaaagtagtaatttatgt

SEQ ID NO: 13937 - DNA, 20 bp, Artificial Sequence
  Description of Artificial Sequence: Synthetic oligonucleotide
  Target: LAMA2; (+) strand; PAM type: NNAGAAW; PAM sequence: ATAGAAA
gatgctatgttcacgtaatc

SEQ ID NO: 13938 - DNA, 20 bp, Artificial Sequence
  Description of Artificial Sequence: Synthetic oligonucleotide
  Target: LAMA2; (+) strand; PAM type: NNAGAAW; PAM sequence: TTAGAAA
aactaaattatgtacttgtt

SEQ ID NO: 13939 - DNA, 20 bp, Artificial Sequence
  Description of Artificial Sequence: Synthetic oligonucleotide
  Target: LAMA2; (+) strand; PAM type: NNAGAAW; PAM sequence: CTAGAAA
taatttaaaaatatacggca

SEQ ID NO: 13940 - DNA, 20 bp, Artificial Sequence
  Description of Artificial Sequence: Synthetic oligonucleotide
  Target: LAMA2; (+) strand; PAM type: NNAGAAW; PAM sequence: TTAGAAA
attttcttccaagattactt

SEQ ID NO: 13941 - DNA, 20 bp, Artificial Sequence
  Description of Artificial Sequence: Synthetic oligonucleotide
  Target: LAMA2; (+) strand; PAM type: NNAGAAW; PAM sequence: AGAGAAT
gtgtataactacattagctg

SEQ ID NO: 13942 - DNA, 20 bp, Artificial Sequence
  Description of Artificial Sequence: Synthetic oligonucleotide
  Target: LAMA2; (+) strand; PAM type: NNAGAAW; PAM sequence: CAAGAAT
gaagtgtttatgaattggga

SEQ ID NO: 13943 - DNA, 20 bp, Artificial Sequence
  Description of Artificial Sequence: Synthetic oligonucleotide
  Target: LAMA2; (+) strand; PAM type: NNAGAAW; PAM sequence: GCAGAAA
aactcctgtggacacagtaa

SEQ ID NO: 13944 - DNA, 20 bp, Artificial Sequence
  Description of Artificial Sequence: Synthetic oligonucleotide
  Target: LAMA2; (+) strand; PAM type: NNAGAAW; PAM sequence: ACAGAAA
tattctcttttcaaaactcc

SEQ ID NO: 13945 - DNA, 20 bp, Artificial Sequence
  Description of Artificial Sequence: Synthetic oligonucleotide
  Target: LAMA2; (+) strand; PAM type: NNAGAAW; PAM sequence: AAAGAAA
aaaactaagcttaaaatgga

SEQ ID NO: 13946 - DNA, 20 bp, Artificial Sequence
  Description of Artificial Sequence: Synthetic oligonucleotide
  Target: LAMA2; (+) strand; PAM type: NNAGAAW; PAM sequence: CTAGAAT
aaaagaaacctcctgagttt

SEQ ID NO: 13947 - DNA, 20 bp, Artificial Sequence
  Description of Artificial Sequence: Synthetic oligonucleotide
  Target: LAMA2; (+) strand; PAM type: NNAGAAW; PAM sequence: GAAGAAA
aatatataaaatcaaacagg

SEQ ID NO: 13948 - DNA, 20 bp, Artificial Sequence
  Description of Artificial Sequence: Synthetic oligonucleotide
  Target: LAMA2; (+) strand; PAM type: NNAGAAW; PAM sequence: CGAGAAA
attttctttggtaaatatag

SEQ ID NO: 13949 - DNA, 20 bp, Artificial Sequence
  Description of Artificial Sequence: Synthetic oligonucleotide
  Target: LAMA2; (+) strand; PAM type: NNAGAAW; PAM sequence: TGAGAAT
agccgaactcaatattgtac

SEQ ID NO: 13950 - DNA, 20 bp, Artificial Sequence
  Description of Artificial Sequence: Synthetic oligonucleotide
  Target: LAMA2; (+) strand; PAM type: NNAGAAW; PAM sequence: TAAGAAA
gagaattattataatcctaa

SEQ ID NO: 13951 - DNA, 20 bp, Artificial Sequence
  Description of Artificial Sequence: Synthetic oligonucleotide
  Target: LAMA2; (+) strand; PAM type: NNAGAAW; PAM sequence: TAAGAAA
atgcaacaataaacagcaat

SEQ ID NO: 13952 - DNA, 20 bp, Artificial Sequence
  Description of Artificial Sequence: Synthetic oligonucleotide
  Target: LAMA2; (+) strand; PAM type: NNAGAAW; PAM sequence: AGAGAAT
agcaattaagaaatcataaa

SEQ ID NO: 13953 - DNA, 20 bp, Artificial Sequence
  Description of Artificial Sequence: Synthetic oligonucleotide
  Target: LAMA2; (+) strand; PAM type: NNAGAAW; PAM sequence: ATAGAAA
tctaccatgtgatatcttaa

SEQ ID NO: 13954 - DNA, 20 bp, Artificial Sequence
  Description of Artificial Sequence: Synthetic oligonucleotide
  Target: LAMA2; (+) strand; PAM type: NNAGAAW; PAM sequence: GCAGAAA
tgtttcaggattaaaaactt

SEQ ID NO: 13955 - DNA, 20 bp, Artificial Sequence
  Description of Artificial Sequence: Synthetic oligonucleotide
  Target: LAMA2; (+) strand; PAM type: NNAGAAW; PAM sequence: ACAGAAT
catataacatgaattacatc

SEQ ID NO: 13956 - DNA, 20 bp, Artificial Sequence
  Description of Artificial Sequence: Synthetic oligonucleotide
  Target: LAMA2; (+) strand; PAM type: NNAGAAW; PAM sequence: GAAGAAT
acaggtttttagcagaaggg

SEQ ID NO: 13957 - DNA, 20 bp, Artificial Sequence
  Description of Artificial Sequence: Synthetic oligonucleotide
  Target: LAMA2; (+) strand; PAM type: NNAGAAW; PAM sequence: ATAGAAA
aaataagtatttatctgtaa

SEQ ID NO: 13958 - DNA, 20 bp, Artificial Sequence
  Description of Artificial Sequence: Synthetic oligonucleotide
  Target: LAMA2; (+) strand; PAM type: NNAGAAW; PAM sequence: TCAGAAA
ttttaaatagttttttttta

SEQ ID NO: 13959 - DNA, 20 bp, Artificial Sequence
  Description of Artificial Sequence: Synthetic oligonucleotide
  Target: LAMA2; (+) strand; PAM type: NNAGAAW; PAM sequence: AAAGAAA
aaatagtttttttttatcag

SEQ ID NO: 13960 - DNA, 20 bp, Artificial Sequence
  Description of Artificial Sequence: Synthetic oligonucleotide
  Target: LAMA2; (+) strand; PAM type: NNAGAAW; PAM sequence: CAAGAAA
gatttataaacatttagatt

SEQ ID NO: 13961 - DNA, 20 bp, Artificial Sequence
  Description of Artificial Sequence: Synthetic oligonucleotide
  Target: LAMA2; (+) strand; PAM type: NNAGAAW; PAM sequence: AAAGAAA
tataaacatttagattcaag

SEQ ID NO: 13962 - DNA, 20 bp, Artificial Sequence
  Description of Artificial Sequence: Synthetic oligonucleotide
  Target: LAMA2; (+) strand; PAM type: NNAGAAW; PAM sequence: CTAGAAA
aactccctgaagcagggaca

SEQ ID NO: 13963 - DNA, 20 bp, Artificial Sequence
  Description of Artificial Sequence: Synthetic oligonucleotide
  Target: LAMA2; (+) strand; PAM type: NNAGAAW; PAM sequence: CTAGAAA
ttcagacagtgaaatggggg

SEQ ID NO: 13964 - DNA, 20 bp, Artificial Sequence
  Description of Artificial Sequence: Synthetic oligonucleotide
  Target: LAMA2; (+) strand; PAM type: NNAGAAW; PAM sequence: CTAGAAA
ctgcaagcctacagaggcag

SEQ ID NO: 13965 - DNA, 20 bp, Artificial Sequence
  Description of Artificial Sequence: Synthetic oligonucleotide
  Target: LAMA2; (+) strand; PAM type: NNAGAAW; PAM sequence: CTAGAAA
ggatatttgtacacaaagaa

SEQ ID NO: 13966 - DNA, 20 bp, Artificial Sequence
  Description of Artificial Sequence: Synthetic oligonucleotide
  Target: LAMA2; (+) strand; PAM type: NNAGAAW; PAM sequence: GAAGAAT
aaaagcatgattagaagatt

SEQ ID NO: 13967 - DNA, 20 bp, Artificial Sequence
  Description of Artificial Sequence: Synthetic oligonucleotide
  Target: LAMA2; (+) strand; PAM type: NNAGAAW; PAM sequence: ATAGAAA
gaagaataaacaaagaagga

SEQ ID NO: 13968 - DNA, 20 bp, Artificial Sequence
  Description of Artificial Sequence: Synthetic oligonucleotide
  Target: LAMA2; (+) strand; PAM type: NNAGAAW; PAM sequence: AAAGAAA
caaaagtaaccaggtttgga

SEQ ID NO: 13969 - DNA, 20 bp, Artificial Sequence
  Description of Artificial Sequence: Synthetic oligonucleotide
  Target: LAMA2; (+) strand; PAM type: NNAGAAW; PAM sequence: CCAGAAA
gaaacatgtataatttactt

SEQ ID NO: 13970 - DNA, 20 bp, Artificial Sequence
  Description of Artificial Sequence: Synthetic oligonucleotide
  Target: LAMA2; (+) strand; PAM type: NNAGAAW; PAM sequence: TGAGAAA
tgattgggttaaacaagaga

SEQ ID NO: 13971 - DNA, 20 bp, Artificial Sequence
  Description of Artificial Sequence: Synthetic oligonucleotide
  Target: LAMA2; (+) strand; PAM type: NNAGAAW; PAM sequence: ATAGAAA
aagagatgagaaactgcagg

SEQ ID NO: 13972 - DNA, 20 bp, Artificial Sequence
  Description of Artificial Sequence: Synthetic oligonucleotide
  Target: LAMA2; (+) strand; PAM type: NNAGAAW; PAM sequence: TCAGAAA
agaaactgcaggatagaaaa

SEQ ID NO: 13973 - DNA, 20 bp, Artificial Sequence
  Description of Artificial Sequence: Synthetic oligonucleotide
  Target: LAMA2; (+) strand; PAM type: NNAGAAW; PAM sequence: ACAGAAT
aatatgatgctaactgactc

SEQ ID NO: 13974 - DNA, 20 bp, Artificial Sequence
  Description of Artificial Sequence: Synthetic oligonucleotide
  Target: LAMA2; (+) strand; PAM type: NNAGAAW; PAM sequence: GAAGAAT
caaaaaaataatgaaggaga

SEQ ID NO: 13975 - DNA, 20 bp, Artificial Sequence
  Description of Artificial Sequence: Synthetic oligonucleotide
  Target: LAMA2; (+) strand; PAM type: NNAGAAW; PAM sequence: GTAGAAA
aaaaaataagtctaccccta

SEQ ID NO: 13976 - DNA, 20 bp, Artificial Sequence
  Description of Artificial Sequence: Synthetic oligonucleotide
  Target: LAMA2; (+) strand; PAM type: NNAGAAW; PAM sequence: AGAGAAA
cctgtcaaccagcaagacaa

SEQ ID NO: 13977 - DNA, 20 bp, Artificial Sequence
  Description of Artificial Sequence: Synthetic oligonucleotide
  Target: LAMA2; (+) strand; PAM type: NNAGAAW; PAM sequence: AAAGAAT
ctcacagtccaacttcatgg

SEQ ID NO: 13978 - DNA, 20 bp, Artificial Sequence
  Description of Artificial Sequence: Synthetic oligonucleotide
  Target: LAMA2; (+) strand; PAM type: NNAGAAW; PAM sequence: TAAGAAT
aaataatatatgtcctttag

SEQ ID NO: 13979 - DNA, 20 bp, Artificial Sequence
  Description of Artificial Sequence: Synthetic oligonucleotide
  Target: LAMA2; (+) strand; PAM type: NNAGAAW; PAM sequence: GAAGAAT
tttcactagattatagtcca

SEQ ID NO: 13980 - DNA, 20 bp, Artificial Sequence
  Description of Artificial Sequence: Synthetic oligonucleotide
  Target: LAMA2; (+) strand; PAM type: NNAGAAW; PAM sequence: TTAGAAT
aaaaaatgtaataaaaatac

SEQ ID NO: 13981 - DNA, 20 bp, Artificial Sequence
  Description of Artificial Sequence: Synthetic oligonucleotide
  Target: LAMA2; (+) strand; PAM type: NNAGAAW; PAM sequence: CAAGAAA
aataaaaatacttagaatag

SEQ ID NO: 13982 - DNA, 20 bp, Artificial Sequence
  Description of Artificial Sequence: Synthetic oligonucleotide
  Target: LAMA2; (+) strand; PAM type: NNAGAAW; PAM sequence: AGAGAAA
aaaaaactcttacaatgtat

SEQ ID NO: 13983 - DNA, 20 bp, Artificial Sequence
  Description of Artificial Sequence: Synthetic oligonucleotide
  Target: LAMA2; (+) strand; PAM type: NNAGAAW; PAM sequence: TGAGAAA
tgtacttactatgatgaaaa

SEQ ID NO: 13984 - DNA, 20 bp, Artificial Sequence
  Description of Artificial Sequence: Synthetic oligonucleotide
  Target: LAMA2; (+) strand; PAM type: NNAGAAW; PAM sequence: AAAGAAA
gtgtttcctttaatctgata

SEQ ID NO: 13985 - DNA, 20 bp, Artificial Sequence
  Description of Artificial Sequence: Synthetic oligonucleotide
  Target: LAMA2; (+) strand; PAM type: NNAGAAW; PAM sequence: TCAGAAA
tgtataaaccatgataaatt

SEQ ID NO: 13986 - DNA, 20 bp, Artificial Sequence
  Description of Artificial Sequence: Synthetic oligonucleotide
  Target: LAMA2; (+) strand; PAM type: NNAGAAW; PAM sequence: TCAGAAT
ttgtagggtaagtactaatt

SEQ ID NO: 13987 - DNA, 20 bp, Artificial Sequence
  Description of Artificial Sequence: Synthetic oligonucleotide
  Target: LAMA2; (+) strand; PAM type: NNAGAAW; PAM sequence: AGAGAAA
tcagaatagtagttacctct

SEQ ID NO: 13988 - DNA, 20 bp, Artificial Sequence
  Description of Artificial Sequence: Synthetic oligonucleotide
  Target: LAMA2; (+) strand; PAM type: NNAGAAW; PAM sequence: AAAGAAT
tttctttaattgaatgtaaa

SEQ ID NO: 13989 - DNA, 20 bp, Artificial Sequence
  Description of Artificial Sequence: Synthetic oligonucleotide
  Target: LAMA2; (+) strand; PAM type: NNAGAAW; PAM sequence: GGAGAAT
gaattccagatttaaaaaga

SEQ ID NO: 13990 - DNA, 20 bp, Artificial Sequence
  Description of Artificial Sequence: Synthetic oligonucleotide
  Target: LAMA2; (+) strand; PAM type: NNAGAAW; PAM sequence: CTAGAAA
tttatttcaagtaccatatg

SEQ ID NO: 13991 - DNA, 20 bp, Artificial Sequence
  Description of Artificial Sequence: Synthetic oligonucleotide
  Target: LAMA2; (+) strand; PAM type: NNAGAAW; PAM sequence: GTAGAAT
tatgcaaaatcagttggtat

SEQ ID NO: 13992 - DNA, 20 bp, Artificial Sequence
  Description of Artificial Sequence: Synthetic oligonucleotide
  Target: LAMA2; (+) strand; PAM type: NNAGAAW; PAM sequence: ATAGAAA
atttttatcaaagtcttata

SEQ ID NO: 13993 - DNA, 20 bp, Artificial Sequence
  Description of Artificial Sequence: Synthetic oligonucleotide
  Target: LAMA2; (+) strand; PAM type: NNAGAAW; PAM sequence: CTAGAAA
ataaatagtgaagtagaaga

SEQ ID NO: 13994 - DNA, 20 bp, Artificial Sequence
  Description of Artificial Sequence: Synthetic oligonucleotide
  Target: LAMA2; (+) strand; PAM type: NNAGAAW; PAM sequence: CCAGAAT
tctggccttggcttacctct

SEQ ID NO: 13995 - DNA, 20 bp, Artificial Sequence
  Description of Artificial Sequence: Synthetic oligonucleotide
  Target: LAMA2; (+) strand; PAM type: NNAGAAW; PAM sequence: AAAGAAA
ataacacaatgactcataca

SEQ ID NO: 13996 - DNA, 20 bp, Artificial Sequence
  Description of Artificial Sequence: Synthetic oligonucleotide
  Target: LAMA2; (+) strand; PAM type: NNAGAAW; PAM sequence: GTAGAAT
cctgaatctaaattacagat

SEQ ID NO: 13997 - DNA, 20 bp, Artificial Sequence
  Description of Artificial Sequence: Synthetic oligonucleotide
  Target: LAMA2; (+) strand; PAM type: NNAGAAW; PAM sequence: CAAGAAT
caaacctagcttggttaaag

SEQ ID NO: 13998 - DNA, 20 bp, Artificial Sequence
  Description of Artificial Sequence: Synthetic oligonucleotide
  Target: LAMA2; (+) strand; PAM type: NNAGAAW; PAM sequence: CAAGAAT
tccctctggcctgtcttcaa

SEQ ID NO: 13999 - DNA, 20 bp, Artificial Sequence
  Description of Artificial Sequence: Synthetic oligonucleotide
  Target: LAMA2; (+) strand; PAM type: NNAGAAW; PAM sequence: CAAGAAT
atcctgttaatttggtttag

SEQ ID NO: 14000 - DNA, 20 bp, Artificial Sequence
  Description of Artificial Sequence: Synthetic oligonucleotide
  Target: LAMA2; (+) strand; PAM type: NNAGAAW; PAM sequence: GAAGAAA
ttagtctaaaggtcataaca

SEQ ID NO: 14001 - DNA, 20 bp, Artificial Sequence
  Description of Artificial Sequence: Synthetic oligonucleotide
  Target: LAMA2; (+) strand; PAM type: NNAGAAW; PAM sequence: TGAGAAA
accaaaaaaccaagcatgac

SEQ ID NO: 14002 - DNA, 20 bp, Artificial Sequence
  Description of Artificial Sequence: Synthetic oligonucleotide
  Target: LAMA2; (+) strand; PAM type: NNAGAAW; PAM sequence: TGAGAAA
ttataaagcagtagcttcta

SEQ ID NO: 14003 - DNA, 20 bp, Artificial Sequence
  Description of Artificial Sequence: Synthetic oligonucleotide
  Target: LAMA2; (+) strand; PAM type: NNAGAAW; PAM sequence: AAAGAAT
aaagcagtagcttctatgag

SEQ ID NO: 14004 - DNA, 20 bp, Artificial Sequence
  Description of Artificial Sequence: Synthetic oligonucleotide
  Target: LAMA2; (+) strand; PAM type: NNAGAAW; PAM sequence: CAAGAAA
agcttctatgagaaagaata

SEQ ID NO: 14005 - DNA, 20 bp, Artificial Sequence
  Description of Artificial Sequence: Synthetic oligonucleotide
  Target: LAMA2; (+) strand; PAM type: NNAGAAW; PAM sequence: AGAGAAA
actacggtgactatttctcc

SEQ ID NO: 14006 - DNA, 20 bp, Artificial Sequence
  Description of Artificial Sequence: Synthetic oligonucleotide
  Target: LAMA2; (+) strand; PAM type: NNAGAAW; PAM sequence: AAAGAAA
tactgaggaaactatagcaa

SEQ ID NO: 14007 - DNA, 20 bp, Artificial Sequence
  Description of Artificial Sequence: Synthetic oligonucleotide
  Target: LAMA2; (+) strand; PAM type: NNAGAAW; PAM sequence: CAAGAAA
aacacaatagtatctcactt

SEQ ID NO: 14008 - DNA, 20 bp, Artificial Sequence
  Description of Artificial Sequence: Synthetic oligonucleotide
  Target: LAMA2; (+) strand; PAM type: NNAGAAW; PAM sequence: AAAGAAA
tttaaagggaaaagagaact

SEQ ID NO: 14009 - DNA, 20 bp, Artificial Sequence
  Description of Artificial Sequence: Synthetic oligonucleotide
  Target: LAMA2; (+) strand; PAM type: NNAGAAW; PAM sequence: AAAGAAT
aaagcacacatttcttccta

SEQ ID NO: 14010 - DNA, 20 bp, Artificial Sequence
  Description of Artificial Sequence: Synthetic oligonucleotide
  Target: LAMA2; (+) strand; PAM type: NNAGAAW; PAM sequence: TGAGAAT
tgttttaatatcataatatg

SEQ ID NO: 14011 - DNA, 20 bp, Artificial Sequence
  Description of Artificial Sequence: Synthetic oligonucleotide
  Target: LAMA2; (+) strand; PAM type: NNAGAAW; PAM sequence: TTAGAAT
cattttattaatgtaattga

SEQ ID NO: 14012 - DNA, 20 bp, Artificial Sequence
  Description of Artificial Sequence: Synthetic oligonucleotide
  Target: LAMA2; (+) strand; PAM type: NNAGAAW; PAM sequence: ATAGAAA
taattgattagaataatggt

SEQ ID NO: 14013 - DNA, 20 bp, Artificial Sequence
  Description of Artificial Sequence: Synthetic oligonucleotide
  Target: LAMA2; (+) strand; PAM type: NNAGAAW; PAM sequence: GCAGAAT
atggtatagaaatagcaaaa

SEQ ID NO: 14014 - DNA, 20 bp, Artificial Sequence
  Description of Artificial Sequence: Synthetic oligonucleotide
  Target: LAMA2; (+) strand; PAM type: NNAGAAW; PAM sequence: TAAGAAA
aaaagcagaatatttggttt

SEQ ID NO: 14015 - DNA, 20 bp, Artificial Sequence
  Description of Artificial Sequence: Synthetic oligonucleotide
  Target: LAMA2; (+) strand; PAM type: NNAGAAW; PAM sequence: CTAGAAA
gagtggaagtctgtagcgtt

SEQ ID NO: 14016 - DNA, 20 bp, Artificial Sequence
  Description of Artificial Sequence: Synthetic oligonucleotide
  Target: LAMA2; (+) strand; PAM type: NNAGAAW; PAM sequence: AAAGAAT
tcattaaatacgcaaattga

SEQ ID NO: 14017 - DNA, 20 bp, Artificial Sequence
  Description of Artificial Sequence: Synthetic oligonucleotide
  Target: LAMA2; (+) strand; PAM type: NNAGAAW; PAM sequence: AAAGAAA
tgaagtatagataaacaaaa

SEQ ID NO: 14018 - DNA, 20 bp, Artificial Sequence
  Description of Artificial Sequence: Synthetic oligonucleotide
  Target: LAMA2; (+) strand; PAM type: NNAGAAW; PAM sequence: ATAGAAT
ttcatcagtacaaataaatt

SEQ ID NO: 14019 - DNA, 20 bp, Artificial Sequence
  Description of Artificial Sequence: Synthetic oligonucleotide
  Target: LAMA2; (+) strand; PAM type: NNAGAAW; PAM sequence: ATAGAAA
ttatagaatcataaaggaaa

SEQ ID NO: 14020 - DNA, 20 bp, Artificial Sequence
  Description of Artificial Sequence: Synthetic oligonucleotide
  Target: LAMA2; (+) strand; PAM type: NNAGAAW; PAM sequence: CAAGAAA
tgtgccaatcttatggatgg

SEQ ID NO: 14021 - DNA, 20 bp, Artificial Sequence
  Description of Artificial Sequence: Synthetic oligonucleotide
  Target: LAMA2; (+) strand; PAM type: NNAGAAW; PAM sequence: TCAGAAA
attatctgaagtccgcctca

SEQ ID NO: 14022 - DNA, 20 bp, Artificial Sequence
  Description of Artificial Sequence: Synthetic oligonucleotide
  Target: LAMA2; (+) strand; PAM type: NNAGAAW; PAM sequence: GTAGAAA
tcgtgactctatttctccaa

SEQ ID NO: 14023 - DNA, 20 bp, Artificial Sequence
  Description of Artificial Sequence: Synthetic oligonucleotide
  Target: LAMA2; (+) strand; PAM type: NNAGAAW; PAM sequence: AAAGAAA
gctaagggaactaaagcaaa

SEQ ID NO: 14024 - DNA, 20 bp, Artificial Sequence
  Description of Artificial Sequence: Synthetic oligonucleotide
  Target: LAMA2; (+) strand; PAM type: NNAGAAW; PAM sequence: AAAGAAT
agttgatgaacgaataatat

SEQ ID NO: 14025 - DNA, 20 bp, Artificial Sequence
  Description of Artificial Sequence: Synthetic oligonucleotide
  Target: LAMA2; (+) strand; PAM type: NNAGAAW; PAM sequence: TAAGAAA
tataaagaataaagcaacga

SEQ ID NO: 14026 - DNA, 20 bp, Artificial Sequence
  Description of Artificial Sequence: Synthetic oligonucleotide
  Target: LAMA2; (+) strand; PAM type: NNAGAAW; PAM sequence: CTAGAAT
gaatcaaaaaactttaagtg

SEQ ID NO: 14027 - DNA, 20 bp, Artificial Sequence
  Description of Artificial Sequence: Synthetic oligonucleotide
  Target: LAMA2; (+) strand; PAM type: NNAGAAW; PAM sequence: CAAGAAT
ttcatgtcaagaggatcttc

SEQ ID NO: 14028 - DNA, 20 bp, Artificial Sequence
  Description of Artificial Sequence: Synthetic oligonucleotide
  Target: LAMA2; (+) strand; PAM type: NNAGAAW; PAM sequence: AAAGAAA
gacaatggtcgatgagtcac

SEQ ID NO: 14029 - DNA, 20 bp, Artificial Sequence
  Description of Artificial Sequence: Synthetic oligonucleotide
  Target: LAMA2; (+) strand; PAM type: NNAGAAW; PAM sequence: ATAGAAA
aatgatgtccctggggacac

SEQ ID NO: 14030 - DNA, 20 bp, Artificial Sequence
  Description of Artificial Sequence: Synthetic oligonucleotide
  Target: LAMA2; (+) strand; PAM type: NNAGAAW; PAM sequence: AAAGAAT
atgtccctggggacacatag

SEQ ID NO: 14031 - DNA, 20 bp, Artificial Sequence
  Description of Artificial Sequence: Synthetic oligonucleotide
  Target: LAMA2; (+) strand; PAM type: NNAGAAW; PAM sequence: AAAGAAA
aatatactctataatgtagt

SEQ ID NO: 14032 - DNA, 20 bp, Artificial Sequence
  Description of Artificial Sequence: Synthetic oligonucleotide
  Target: LAMA2; (+) strand; PAM type: NNAGAAW; PAM sequence: CCAGAAA
cttatccaaaatgcttgaga

SEQ ID NO: 14033 - DNA, 20 bp, Artificial Sequence
  Description of Artificial Sequence: Synthetic oligonucleotide
  Target: LAMA2; (+) strand; PAM type: NNAGAAW; PAM sequence: GCAGAAT
tttcggattttggaatattt

SEQ ID NO: 14034 - DNA, 20 bp, Artificial Sequence
  Description of Artificial Sequence: Synthetic oligonucleotide
  Target: LAMA2; (+) strand; PAM type: NNAGAAW; PAM sequence: TCAGAAA
tactggctgatcattcctaa

SEQ ID NO: 14035 - DNA, 20 bp, Artificial Sequence
  Description of Artificial Sequence: Synthetic oligonucleotide
  Target: LAMA2; (+) strand; PAM type: NNAGAAW; PAM sequence: CTAGAAT
cttatttatcttcatagtgc

SEQ ID NO: 14036 - DNA, 20 bp, Artificial Sequence
  Description of Artificial Sequence: Synthetic oligonucleotide
  Target: LAMA2; (+) strand; PAM type: NNAGAAW; PAM sequence: TCAGAAT
tgttgaacttagtctgaatc

SEQ ID NO: 14037 - DNA, 20 bp, Artificial Sequence
  Description of Artificial Sequence: Synthetic oligonucleotide
  Target: LAMA2; (+) strand; PAM type: NNAGAAW; PAM sequence: ATAGAAA
gctgagtttgtaaatgagtc

SEQ ID NO: 14038 - DNA, 20 bp, Artificial Sequence
  Description of Artificial Sequence: Synthetic oligonucleotide
  Target: LAMA2; (+) strand; PAM type: NNAGAAW; PAM sequence: ACAGAAT
cagactataaagttagtaag

SEQ ID NO: 14039 - DNA, 20 bp, Artificial Sequence
  Description of Artificial Sequence: Synthetic oligonucleotide
  Target: LAMA2; (+) strand; PAM type: NNAGAAW; PAM sequence: AGAGAAA
tcaaggaagaggggaaatgt

SEQ ID NO: 14040 - DNA, 20 bp, Artificial Sequence
  Description of Artificial Sequence: Synthetic oligonucleotide
  Target: LAMA2; (+) strand; PAM type: NNAGAAW; PAM sequence: TTAGAAT
ggaaagcaggatgccttcct

SEQ ID NO: 14041 - DNA, 20 bp, Artificial Sequence
  Description of Artificial Sequence: Synthetic oligonucleotide
  Target: LAMA2; (+) strand; PAM type: NNAGAAW; PAM sequence: ACAGAAT
aaccagtctggagagcagtc

SEQ ID NO: 14042 - DNA, 20 bp, Artificial Sequence
  Description of Artificial Sequence: Synthetic oligonucleotide
  Target: LAMA2; (+) strand; PAM type: NNAGAAW; PAM sequence: TGAGAAT
tctggagagcagtcacagaa

SEQ ID NO: 14043 - DNA, 20 bp, Artificial Sequence
  Description of Artificial Sequence: Synthetic oligonucleotide
  Target: LAMA2; (+) strand; PAM type: NNAGAAW; PAM sequence: ACAGAAA
actgattgtactgatgtgtt

SEQ ID NO: 14044 - DNA, 20 bp, Artificial Sequence
  Description of Artificial Sequence: Synthetic oligonucleotide
  Target: LAMA2; (+) strand; PAM type: NNAGAAW; PAM sequence: TTAGAAA
aatctttctcaccagtgtaa

SEQ ID NO: 14045 - DNA, 20 bp, Artificial Sequence
  Description of Artificial Sequence: Synthetic oligonucleotide
  Target: LAMA2; (+) strand; PAM type: NNAGAAW; PAM sequence: GAAGAAT
tatagttgagagggtaaaat

SEQ ID NO: 14046 - DNA, 20 bp, Artificial Sequence
  Description of Artificial Sequence: Synthetic oligonucleotide
  Target: LAMA2; (+) strand; PAM type: NNAGAAW; PAM sequence: TTAGAAT
attgtgtagactggaatttc

SEQ ID NO: 14047 - DNA, 20 bp, Artificial Sequence
  Description of Artificial Sequence: Synthetic oligonucleotide
  Target: LAMA2; (+) strand; PAM type: NNAGAAW; PAM sequence: AGAGAAA
ccaagggtgcatgatttaag

SEQ ID NO: 14048 - DNA, 20 bp, Artificial Sequence
  Description of Artificial Sequence: Synthetic oligonucleotide
  Target: LAMA2; (+) strand; PAM type: NNAGAAW; PAM sequence: TGAGAAA
tagtatgttcgtatgcaagt

SEQ ID NO: 14049 - DNA, 20 bp, Artificial Sequence
  Description of Artificial Sequence: Synthetic oligonucleotide
  Target: LAMA2; (+) strand; PAM type: NNAGAAW; PAM sequence: ACAGAAA
agagcatgttgtctccctat

SEQ ID NO: 14050 - DNA, 20 bp, Artificial Sequence
  Description of Artificial Sequence: Synthetic oligonucleotide
  Target: LAMA2; (+) strand; PAM type: NNAGAAW; PAM sequence: GCAGAAT
gtgtggctggacttaagagt

SEQ ID NO: 14051 - DNA, 20 bp, Artificial Sequence
  Description of Artificial Sequence: Synthetic oligonucleotide
  Target: LAMA2; (+) strand; PAM type: NNAGAAW; PAM sequence: AGAGAAA
tggtaggaaatgggctggag

SEQ ID NO: 14052 - DNA, 20 bp, Artificial Sequence
  Description of Artificial Sequence: Synthetic oligonucleotide
  Target: LAMA2; (+) strand; PAM type: NNAGAAW; PAM sequence: TGAGAAT
aagaagtctagacgggggaa

SEQ ID NO: 14053 - DNA, 20 bp, Artificial Sequence
  Description of Artificial Sequence: Synthetic oligonucleotide
  Target: LAMA2; (+) strand; PAM type: NNAGAAW; PAM sequence: TAAGAAT
acttatagggttgaatatac

SEQ ID NO: 14054 - DNA, 20 bp, Artificial Sequence
  Description of Artificial Sequence: Synthetic oligonucleotide
  Target: LAMA2; (+) strand; PAM type: NNAGAAW; PAM sequence: GAAGAAA
attttacttggagtgtcatt

SEQ ID NO: 14055 - DNA, 20 bp, Artificial Sequence
  Description of Artificial Sequence: Synthetic oligonucleotide
  Target: LAMA2; (+) strand; PAM type: NNAGAAW; PAM sequence: AAAGAAT
ttgctttcagagcagacttc

SEQ ID NO: 14056 - DNA, 20 bp, Artificial Sequence
  Description of Artificial Sequence: Synthetic oligonucleotide
  Target: LAMA2; (+) strand; PAM type: NNAGAAW; PAM sequence: ACAGAAT
gatcatcagatgctagagac

SEQ ID NO: 14057 - DNA, 20 bp, Artificial Sequence
  Description of Artificial Sequence: Synthetic oligonucleotide
  Target: LAMA2; (+) strand; PAM type: NNAGAAW; PAM sequence: TTAGAAA
acaatgcctcaagggtgacg

SEQ ID NO: 14058 - DNA, 20 bp, Artificial Sequence
  Description of Artificial Sequence: Synthetic oligonucleotide
  Target: LAMA2; (+) strand; PAM type: NNAGAAW; PAM sequence: GAAGAAA
caagggtgacgttagaaagg

SEQ ID NO: 14059 - DNA, 20 bp, Artificial Sequence
  Description of Artificial Sequence: Synthetic oligonucleotide
  Target: LAMA2; (+) strand; PAM type: NNAGAAW; PAM sequence: CCAGAAA
aggaatatattacttgttgt

SEQ ID NO: 14060 - DNA, 20 bp, Artificial Sequence
  Description of Artificial Sequence: Synthetic oligonucleotide
  Target: LAMA2; (+) strand; PAM type: NNAGAAW; PAM sequence: GAAGAAA
agcagagtcaaatagtctat

SEQ ID NO: 14061 - DNA, 20 bp, Artificial Sequence
  Description of Artificial Sequence: Synthetic oligonucleotide
  Target: LAMA2; (+) strand; PAM type: NNAGAAW; PAM sequence: GTAGAAA
aaatatccttaagcctcaaa

SEQ ID NO: 14062 - DNA, 20 bp, Artificial Sequence
  Description of Artificial Sequence: Synthetic oligonucleotide
  Target: LAMA2; (+) strand; PAM type: NNAGAAW; PAM sequence: TAAGAAA
tttgagtgaatttctatttt

SEQ ID NO: 14063 - DNA, 20 bp, Artificial Sequence
  Description of Artificial Sequence: Synthetic oligonucleotide
  Target: LAMA2; (+) strand; PAM type: NNAGAAW; PAM sequence: ATAGAAT
ttcaatgaaaacagattatt

SEQ ID NO: 14064 - DNA, 20 bp, Artificial Sequence
  Description of Artificial Sequence: Synthetic oligonucleotide
  Target: LAMA2; (+) strand; PAM type: NNAGAAW; PAM sequence: CTAGAAA
atagaataccttggaaactc

SEQ ID NO: 14065 - DNA, 20 bp, Artificial Sequence
  Description of Artificial Sequence: Synthetic oligonucleotide
  Target: LAMA2; (+) strand; PAM type: NNAGAAW; PAM sequence: AGAGAAA
gacacgaccaggaacatgaa

SEQ ID NO: 14066 - DNA, 20 bp, Artificial Sequence
  Description of Artificial Sequence: Synthetic oligonucleotide
  Target: LAMA2; (+) strand; PAM type: NNAGAAW; PAM sequence: TGAGAAT
ctgctttaactgactgatcg

SEQ ID NO: 14067 - DNA, 20 bp, Artificial Sequence
  Description of Artificial Sequence: Synthetic oligonucleotide
  Target: LAMA2; (+) strand; PAM type: NNAGAAW; PAM sequence: AAAGAAA
ttttagttggtaattctttt

SEQ ID NO: 14068 - DNA, 20 bp, Artificial Sequence
  Description of Artificial Sequence: Synthetic oligonucleotide
  Target: LAMA2; (+) strand; PAM type: NNAGAAW; PAM sequence: GAAGAAA
aaagcaaattataggtattg

SEQ ID NO: 14069 - DNA, 20 bp, Artificial Sequence
  Description of Artificial Sequence: Synthetic oligonucleotide
  Target: LAMA2; (+) strand; PAM type: NNAGAAW; PAM sequence: AAAGAAA
tgatatgaatgttaattgga

SEQ ID NO: 14070 - DNA, 20 bp, Artificial Sequence
  Description of Artificial Sequence: Synthetic oligonucleotide
  Target: LAMA2; (+) strand; PAM type: NNAGAAW; PAM sequence: GCAGAAA
acatatttgctggagctcag

SEQ ID NO: 14071 - DNA, 20 bp, Artificial Sequence
  Description of Artificial Sequence: Synthetic oligonucleotide
  Target: LAMA2; (+) strand; PAM type: NNAGAAW; PAM sequence: TCAGAAA
gataaacaaatgtagcagcc

SEQ ID NO: 14072 - DNA, 20 bp, Artificial Sequence
  Description of Artificial Sequence: Synthetic oligonucleotide
  Target: LAMA2; (+) strand; PAM type: NNAGAAW; PAM sequence: TTAGAAT
ctagatagatatcctggggt

SEQ ID NO: 14073 - DNA, 20 bp, Artificial Sequence
  Description of Artificial Sequence: Synthetic oligonucleotide
  Target: LAMA2; (+) strand; PAM type: NNAGAAW; PAM sequence: GAAGAAA
caaaatatagcattatttat

SEQ ID NO: 14074 - DNA, 20 bp, Artificial Sequence
  Description of Artificial Sequence: Synthetic oligonucleotide
  Target: LAMA2; (+) strand; PAM type: NNAGAAW; PAM sequence: ATAGAAA
catgacatgtgagtattgaa

SEQ ID NO: 14075 - DNA, 20 bp, Artificial Sequence
  Description of Artificial Sequence: Synthetic oligonucleotide
  Target: LAMA2; (+) strand; PAM type: NNAGAAW; PAM sequence: ATAGAAA
cttaattaaagtagcttata

SEQ ID NO: 14076 - DNA, 20 bp, Artificial Sequence
  Description of Artificial Sequence: Synthetic oligonucleotide
  Target: LAMA2; (+) strand; PAM type: NNAGAAW; PAM sequence: GTAGAAT
gcaagcaaatggaatattcg

SEQ ID NO: 14077 - DNA, 20 bp, Artificial Sequence
  Description of Artificial Sequence: Synthetic oligonucleotide
  Target: LAMA2; (+) strand; PAM type: NNAGAAW; PAM sequence: AAAGAAT
atattcggtagaatcagaac

SEQ ID NO: 14078 - DNA, 20 bp, Artificial Sequence
  Description of Artificial Sequence: Synthetic oligonucleotide
  Target: LAMA2; (+) strand; PAM type: NNAGAAW; PAM sequence: TCAGAAA
tacaataatactgcaagctc

SEQ ID NO: 14079 - DNA, 20 bp, Artificial Sequence
  Description of Artificial Sequence: Synthetic oligonucleotide
  Target: LAMA2; (+) strand; PAM type: NNAGAAW; PAM sequence: CCAGAAT
tgttcgaatcagaaccattg

SEQ ID NO: 14080 - DNA, 20 bp, Artificial Sequence
  Description of Artificial Sequence: Synthetic oligonucleotide
  Target: LAMA2; (+) strand; PAM type: NNAGAAW; PAM sequence: ACAGAAA
agaaccattgccagaatctg

SEQ ID NO: 14081 - DNA, 20 bp, Artificial Sequence
  Description of Artificial Sequence: Synthetic oligonucleotide
  Target: LAMA2; (+) strand; PAM type: NNAGAAW; PAM sequence: CAAGAAT
tgcctggttgtaataaaact

SEQ ID NO: 14082 - DNA, 20 bp, Artificial Sequence
  Description of Artificial Sequence: Synthetic oligonucleotide
  Target: LAMA2; (+) strand; PAM type: NNAGAAW; PAM sequence: GCAGAAT
gtgaatatttggcacaactg

SEQ ID NO: 14083 - DNA, 20 bp, Artificial Sequence
  Description of Artificial Sequence: Synthetic oligonucleotide
  Target: LAMA2; (+) strand; PAM type: NNAGAAW; PAM sequence: AGAGAAT
gcctcgttcttgatagtcaa

SEQ ID NO: 14084 - DNA, 20 bp, Artificial Sequence
  Description of Artificial Sequence: Synthetic oligonucleotide
  Target: LAMA2; (+) strand; PAM type: NNAGAAW; PAM sequence: AAAGAAT
agtggaaagagctagaggac

SEQ ID NO: 14085 - DNA, 20 bp, Artificial Sequence
  Description of Artificial Sequence: Synthetic oligonucleotide
  Target: LAMA2; (+) strand; PAM type: NNAGAAW; PAM sequence: TCAGAAA
ttgctgcaggctacagctat

SEQ ID NO: 14086 - DNA, 20 bp, Artificial Sequence
  Description of Artificial Sequence: Synthetic oligonucleotide
  Target: LAMA2; (+) strand; PAM type: NNAGAAW; PAM sequence: CAAGAAT
aaatttgttcatatagttgc

SEQ ID NO: 14087 - DNA, 20 bp, Artificial Sequence
  Description of Artificial Sequence: Synthetic oligonucleotide
  Target: LAMA2; (+) strand; PAM type: NNAGAAW; PAM sequence: TAAGAAA
aacacaaacaaacaaaactc

SEQ ID NO: 14088 - DNA, 20 bp, Artificial Sequence
  Description of Artificial Sequence: Synthetic oligonucleotide
  Target: LAMA2; (+) strand; PAM type: NNAGAAW; PAM sequence: TCAGAAA
aattgttttttttaggttgc

SEQ ID NO: 14089 - DNA, 20 bp, Artificial Sequence
  Description of Artificial Sequence: Synthetic oligonucleotide
  Target: LAMA2; (+) strand; PAM type: NNAGAAW; PAM sequence: GAAGAAT
aagaagatcattatgcaagt

SEQ ID NO: 14090 - DNA, 20 bp, Artificial Sequence
  Description of Artificial Sequence: Synthetic oligonucleotide
  Target: LAMA2; (+) strand; PAM type: NNAGAAW; PAM sequence: CTAGAAT
ccaggaagaaggtttgctgc

SEQ ID NO: 14091 - DNA, 20 bp, Artificial Sequence
  Description of Artificial Sequence: Synthetic oligonucleotide
  Target: LAMA2; (+) strand; PAM type: NNAGAAW; PAM sequence: AAAGAAA
ttcttggccaagggaatccc

SEQ ID NO: 14092 - DNA, 20 bp, Artificial Sequence
  Description of Artificial Sequence: Synthetic oligonucleotide
  Target: LAMA2; (+) strand; PAM type: NNAGAAW; PAM sequence: AAAGAAA
agggaatcccaaagaaacct

SEQ ID NO: 14093 - DNA, 20 bp, Artificial Sequence
  Description of Artificial Sequence: Synthetic oligonucleotide
  Target: LAMA2; (+) strand; PAM type: NNAGAAW; PAM sequence: AAAGAAA
ataacagatagcaggcccta

SEQ ID NO: 14094 - DNA, 20 bp, Artificial Sequence
  Description of Artificial Sequence: Synthetic oligonucleotide
  Target: LAMA2; (+) strand; PAM type: NNAGAAW; PAM sequence: AGAGAAT
tggggaaatttgcattctat

SEQ ID NO: 14095 - DNA, 20 bp, Artificial Sequence
  Description of Artificial Sequence: Synthetic oligonucleotide
  Target: LAMA2; (+) strand; PAM type: NNAGAAW; PAM sequence: GCAGAAT
agctgacttcaactgttcag

SEQ ID NO: 14096 - DNA, 20 bp, Artificial Sequence
  Description of Artificial Sequence: Synthetic oligonucleotide
  Target: LAMA2; (+) strand; PAM type: NNAGAAW; PAM sequence: TCAGAAA
ctctttcgaccaattgccag

SEQ ID NO: 14097 - DNA, 20 bp, Artificial Sequence
  Description of Artificial Sequence: Synthetic oligonucleotide
  Target: LAMA2; (+) strand; PAM type: NNAGAAW; PAM sequence: TGAGAAA
tacaaattgttaaggataaa

SEQ ID NO: 14098 - DNA, 20 bp, Artificial Sequence
  Description of Artificial Sequence: Synthetic oligonucleotide
  Target: LAMA2; (+) strand; PAM type: NNAGAAW; PAM sequence: ATAGAAT
atttatttcccatagctatg

SEQ ID NO: 14099 - DNA, 20 bp, Artificial Sequence
  Description of Artificial Sequence: Synthetic oligonucleotide
  Target: LAMA2; (+) strand; PAM type: NNAGAAW; PAM sequence: ATAGAAA
gcaggagctcaaggtcaaac

SEQ ID NO: 14100 - DNA, 20 bp, Artificial Sequence
  Description of Artificial Sequence: Synthetic oligonucleotide
  Target: LAMA2; (+) strand; PAM type: NNAGAAW; PAM sequence: GGAGAAT
aactgaatgaatactagata

SEQ ID NO: 14101 - DNA, 20 bp, Artificial Sequence
  Description of Artificial Sequence: Synthetic oligonucleotide
  Target: LAMA2; (+) strand; PAM type: NNAGAAW; PAM sequence: TGAGAAA
ttccatttaataaaaactct

SEQ ID NO: 14102 - DNA, 20 bp, Artificial Sequence
  Description of Artificial Sequence: Synthetic oligonucleotide
  Target: LAMA2; (+) strand; PAM type: NNAGAAW; PAM sequence: CAAGAAA
caagtcatcagctaataaac

SEQ ID NO: 14103 - DNA, 20 bp, Artificial Sequence
  Description of Artificial Sequence: Synthetic oligonucleotide
  Target: LAMA2; (+) strand; PAM type: NNAGAAW; PAM sequence: GAAGAAA
aaccaagaaatccaaattag

SEQ ID NO: 14104 - DNA, 20 bp, Artificial Sequence
  Description of Artificial Sequence: Synthetic oligonucleotide
  Target: LAMA2; (+) strand; PAM type: NNAGAAW; PAM sequence: AAAGAAA
atgctgaagcagcttattca

SEQ ID NO: 14105 - DNA, 20 bp, Artificial Sequence
  Description of Artificial Sequence: Synthetic oligonucleotide
  Target: LAMA2; (+) strand; PAM type: NNAGAAW; PAM sequence: TTAGAAA
taaaacacaaataaacaatt

SEQ ID NO: 14106 - DNA, 20 bp, Artificial Sequence
  Description of Artificial Sequence: Synthetic oligonucleotide
  Target: LAMA2; (+) strand; PAM type: NNAGAAW; PAM sequence: TCAGAAA
aataaacaaataaggaagta

SEQ ID NO: 14107 - DNA, 20 bp, Artificial Sequence
  Description of Artificial Sequence: Synthetic oligonucleotide
  Target: LAMA2; (+) strand; PAM type: NNAGAAW; PAM sequence: TAAGAAT
ttatgaaaatttacacacaa

SEQ ID NO: 14108 - DNA, 20 bp, Artificial Sequence
  Description of Artificial Sequence: Synthetic oligonucleotide
  Target: LAMA2; (+) strand; PAM type: NNAGAAW; PAM sequence: TTAGAAA
acacacaataagaatacaat

SEQ ID NO: 14109 - DNA, 20 bp, Artificial Sequence
  Description of Artificial Sequence: Synthetic oligonucleotide
  Target: LAMA2; (+) strand; PAM type: NNAGAAW; PAM sequence: AAAGAAA
caacttaaaaaaactgactc

SEQ ID NO: 14110 - DNA, 20 bp, Artificial Sequence
  Description of Artificial Sequence: Synthetic oligonucleotide
  Target: LAMA2; (+) strand; PAM type: NNAGAAW; PAM sequence: AGAGAAT
caaaattatacaaactttcc

SEQ ID NO: 14111 - DNA, 20 bp, Artificial Sequence
  Description of Artificial Sequence: Synthetic oligonucleotide
  Target: LAMA2; (+) strand; PAM type: NNAGAAW; PAM sequence: GAAGAAA
cttgacaagaggactatgaa

SEQ ID NO: 14112 - DNA, 20 bp, Artificial Sequence
  Description of Artificial Sequence: Synthetic oligonucleotide
  Target: LAMA2; (+) strand; PAM type: NNAGAAW; PAM sequence: TTAGAAA
tgtttgaggttactttaaaa

SEQ ID NO: 14113 - DNA, 20 bp, Artificial Sequence
  Description of Artificial Sequence: Synthetic oligonucleotide
  Target: LAMA2; (+) strand; PAM type: NNAGAAW; PAM sequence: AGAGAAA
gaccatattgactgattaaa

SEQ ID NO: 14114 - DNA, 20 bp, Artificial Sequence
  Description of Artificial Sequence: Synthetic oligonucleotide
  Target: LAMA2; (+) strand; PAM type: NNAGAAW; PAM sequence: ACAGAAA
aatcaattatctcaatagac

SEQ ID NO: 14115 - DNA, 20 bp, Artificial Sequence
  Description of Artificial Sequence: Synthetic oligonucleotide
  Target: LAMA2; (+) strand; PAM type: NNAGAAW; PAM sequence: AAAGAAA
ttatctcaatagacacagaa

SEQ ID NO: 14116 - DNA, 20 bp, Artificial Sequence
  Description of Artificial Sequence: Synthetic oligonucleotide
  Target: LAMA2; (+) strand; PAM type: NNAGAAW; PAM sequence: CTAGAAT
tgtctgaaaaattttgaaaa

SEQ ID NO: 14117 - DNA, 20 bp, Artificial Sequence
  Description of Artificial Sequence: Synthetic oligonucleotide
  Target: LAMA2; (+) strand; PAM type: NNAGAAW; PAM sequence: TCAGAAA
ggaaataaaatatataggga

SEQ ID NO: 14118 - DNA, 20 bp, Artificial Sequence
  Description of Artificial Sequence: Synthetic oligonucleotide
  Target: LAMA2; (+) strand; PAM type: NNAGAAW; PAM sequence: GAAGAAA
aatatatagggatcagaaag

SEQ ID NO: 14119 - DNA, 20 bp, Artificial Sequence
  Description of Artificial Sequence: Synthetic oligonucleotide
  Target: LAMA2; (+) strand; PAM type: NNAGAAW; PAM sequence: AGAGAAT
cttatctgcttgtaaaatca

SEQ ID NO: 14120 - DNA, 20 bp, Artificial Sequence
  Description of Artificial Sequence: Synthetic oligonucleotide
  Target: LAMA2; (+) strand; PAM type: NNAGAAW; PAM sequence: CAAGAAT
tgtagggaaaagccaatggc

SEQ ID NO: 14121 - DNA, 20 bp, Artificial Sequence
  Description of Artificial Sequence: Synthetic oligonucleotide
  Target: LAMA2; (+) strand; PAM type: NNAGAAW; PAM sequence: AAAGAAA
ccaatggccaagaataatca

SEQ ID NO: 14122 - DNA, 20 bp, Artificial Sequence
  Description of Artificial Sequence: Synthetic oligonucleotide
  Target: LAMA2; (+) strand; PAM type: NNAGAAW; PAM sequence: AGAGAAT
ctactcgggaggctgatgca

SEQ ID NO: 14123 - DNA, 20 bp, Artificial Sequence
  Description of Artificial Sequence: Synthetic oligonucleotide
  Target: LAMA2; (+) strand; PAM type: NNAGAAW; PAM sequence: TTAGAAA
gtgtgtgtatatatatatat

SEQ ID NO: 14124 - DNA, 20 bp, Artificial Sequence
  Description of Artificial Sequence: Synthetic oligonucleotide
  Target: LAMA2; (+) strand; PAM type: NNAGAAW; PAM sequence: AGAGAAA
tctggtaccactgattatct

SEQ ID NO: 14125 - DNA, 20 bp, Artificial Sequence
  Description of Artificial Sequence: Synthetic oligonucleotide
  Target: LAMA2; (+) strand; PAM type: NNAGAAW; PAM sequence: AGAGAAA
aaaactgtgatctctgaaaa

SEQ ID NO: 14126 - DNA, 20 bp, Artificial Sequence
  Description of Artificial Sequence: Synthetic oligonucleotide
  Target: LAMA2; (+) strand; PAM type: NNAGAAW; PAM sequence: TGAGAAA
ggtgaagtgcattggtatat

SEQ ID NO: 14127 - DNA, 20 bp, Artificial Sequence
  Description of Artificial Sequence: Synthetic oligonucleotide
  Target: LAMA2; (+) strand; PAM type: NNAGAAW; PAM sequence: AGAGAAA
agagctgcagctatctgcaa

SEQ ID NO: 14128 - DNA, 20 bp, Artificial Sequence
  Description of Artificial Sequence: Synthetic oligonucleotide
  Target: LAMA2; (+) strand; PAM type: NNAGAAW; PAM sequence: AAAGAAA
tactgagttgcaaatatgtg

SEQ ID NO: 14129 - DNA, 20 bp, Artificial Sequence
  Description of Artificial Sequence: Synthetic oligonucleotide
  Target: LAMA2; (+) strand; PAM type: NNAGAAW; PAM sequence: AAAGAAT
aaaactacctaaggctaatg

SEQ ID NO: 14130 - DNA, 20 bp, Artificial Sequence
  Description of Artificial Sequence: Synthetic oligonucleotide
  Target: LAMA2; (+) strand; PAM type: NNAGAAW; PAM sequence: AGAGAAA
agaatcactaaaaagtagta

SEQ ID NO: 14131 - DNA, 20 bp, Artificial Sequence
  Description of Artificial Sequence: Synthetic oligonucleotide
  Target: LAMA2; (+) strand; PAM type: NNAGAAW; PAM sequence: CAAGAAA
ggaaacagaaccccaaatgg

SEQ ID NO: 14132 - DNA, 20 bp, Artificial Sequence
  Description of Artificial Sequence: Synthetic oligonucleotide
  Target: LAMA2; (+) strand; PAM type: NNAGAAW; PAM sequence: TCAGAAT
gaaaatcatgtcaagatata

SEQ ID NO: 14133 - DNA, 20 bp, Artificial Sequence
  Description of Artificial Sequence: Synthetic oligonucleotide
  Target: LAMA2; (+) strand; PAM type: NNAGAAW; PAM sequence: TCAGAAA
ctggaaaattgtaaaagcaa

SEQ ID NO: 14134 - DNA, 20 bp, Artificial Sequence
  Description of Artificial Sequence: Synthetic oligonucleotide
  Target: LAMA2; (+) strand; PAM type: NNAGAAW; PAM sequence: GGAGAAT
ctgctcaggaggctgaggca

SEQ ID NO: 14135 - DNA, 20 bp, Artificial Sequence
  Description of Artificial Sequence: Synthetic oligonucleotide
  Target: LAMA2; (+) strand; PAM type: NNAGAAW; PAM sequence: AAAGAAA
caaaaaaaaaaaaaaaaaaa

SEQ ID NO: 14136 - DNA, 20 bp, Artificial Sequence
  Description of Artificial Sequence: Synthetic oligonucleotide
  Target: LAMA2; (+) strand; PAM type: NNAGAAW; PAM sequence: AAAGAAA
aaaaaaaaaaaaaaaaaaga

SEQ ID NO: 14137 - DNA, 20 bp, Artificial Sequence
  Description of Artificial Sequence: Synthetic oligonucleotide
  Target: LAMA2; (+) strand; PAM type: NNAGAAW; PAM sequence: AAAGAAA
aaaaaaaaaaaaagaaaaga

SEQ ID NO: 14138 - DNA, 20 bp, Artificial Sequence
  Description of Artificial Sequence: Synthetic oligonucleotide
  Target: LAMA2; (+) strand; PAM type: NNAGAAW; PAM sequence: GAAGAAT
tgcagaggaacaaagataag

SEQ ID NO: 14139 - DNA, 20 bp, Artificial Sequence
  Description of Artificial Sequence: Synthetic oligonucleotide
  Target: LAMA2; (+) strand; PAM type: NNAGAAW; PAM sequence: CCAGAAT
gcatcagtacactttgcaag

SEQ ID NO: 14140 - DNA, 20 bp, Artificial Sequence
  Description of Artificial Sequence: Synthetic oligonucleotide
  Target: LAMA2; (+) strand; PAM type: NNAGAAW; PAM sequence: GAAGAAA
caaaaatgtcttccaaaact

SEQ ID NO: 14141 - DNA, 20 bp, Artificial Sequence
  Description of Artificial Sequence: Synthetic oligonucleotide
  Target: LAMA2; (+) strand; PAM type: NNAGAAW; PAM sequence: AGAGAAA
gaaaaaacaaagattgtttc

SEQ ID NO: 14142 - DNA, 20 bp, Artificial Sequence
  Description of Artificial Sequence: Synthetic oligonucleotide
  Target: LAMA2; (+) strand; PAM type: NNAGAAW; PAM sequence: AAAGAAT
tttcagagaaatagaagttg

SEQ ID NO: 14143 - DNA, 20 bp, Artificial Sequence
  Description of Artificial Sequence: Synthetic oligonucleotide
  Target: LAMA2; (+) strand; PAM type: NNAGAAW; PAM sequence: GAAGAAA
tcacagactgatgtacacaa

SEQ ID NO: 14144 - DNA, 20 bp, Artificial Sequence
  Description of Artificial Sequence: Synthetic oligonucleotide
  Target: LAMA2; (+) strand; PAM type: NNAGAAW; PAM sequence: GTAGAAA
tgatgtacacaagaagaaat

SEQ ID NO: 14145 - DNA, 20 bp, Artificial Sequence
  Description of Artificial Sequence: Synthetic oligonucleotide
  Target: LAMA2; (+) strand; PAM type: NNAGAAW; PAM sequence: AAAGAAA
tgtagaaagttcttcaggca

SEQ ID NO: 14146 - DNA, 20 bp, Artificial Sequence
  Description of Artificial Sequence: Synthetic oligonucleotide
  Target: LAMA2; (+) strand; PAM type: NNAGAAW; PAM sequence: ATAGAAA
atggaaatttactcctacaa

SEQ ID NO: 14147 - DNA, 20 bp, Artificial Sequence
  Description of Artificial Sequence: Synthetic oligonucleotide
  Target: LAMA2; (+) strand; PAM type: NNAGAAW; PAM sequence: AAAGAAA
ttttccctctgaagttttaa

SEQ ID NO: 14148 - DNA, 20 bp, Artificial Sequence
  Description of Artificial Sequence: Synthetic oligonucleotide
  Target: LAMA2; (+) strand; PAM type: NNAGAAW; PAM sequence: AAAGAAA
tcatttctcatttcaaactt

SEQ ID NO: 14149 - DNA, 20 bp, Artificial Sequence
  Description of Artificial Sequence: Synthetic oligonucleotide
  Target: LAMA2; (+) strand; PAM type: NNAGAAW; PAM sequence: AAAGAAA
ttctcatttcaaacttaaag

SEQ ID NO: 14150 - DNA, 20 bp, Artificial Sequence
  Description of Artificial Sequence: Synthetic oligonucleotide
  Target: LAMA2; (+) strand; PAM type: NNAGAAW; PAM sequence: GAAGAAA
gagtgttgttggtagtggga

SEQ ID NO: 14151 - DNA, 20 bp, Artificial Sequence
  Description of Artificial Sequence: Synthetic oligonucleotide
  Target: LAMA2; (+) strand; PAM type: NNAGAAW; PAM sequence: TGAGAAT
tttttcctccttgatttcca

SEQ ID NO: 14152 - DNA, 20 bp, Artificial Sequence
  Description of Artificial Sequence: Synthetic oligonucleotide
  Target: LAMA2; (+) strand; PAM type: NNAGAAW; PAM sequence: TCAGAAT
aatgaggcttctagcacccc

SEQ ID NO: 14153 - DNA, 20 bp, Artificial Sequence
  Description of Artificial Sequence: Synthetic oligonucleotide
  Target: LAMA2; (+) strand; PAM type: NNAGAAW; PAM sequence: CAAGAAA
tgcatcgcttcatgtcttcc

SEQ ID NO: 14154 - DNA, 20 bp, Artificial Sequence
  Description of Artificial Sequence: Synthetic oligonucleotide
  Target: LAMA2; (+) strand; PAM type: NNAGAAW; PAM sequence: AAAGAAA
ctctaatgtataaagaagtt

SEQ ID NO: 14155 - DNA, 20 bp, Artificial Sequence
  Description of Artificial Sequence: Synthetic oligonucleotide
  Target: LAMA2; (+) strand; PAM type: NNAGAAW; PAM sequence: ACAGAAA
agaagttaaagaaattgata

SEQ ID NO: 14156 - DNA, 20 bp, Artificial Sequence
  Description of Artificial Sequence: Synthetic oligonucleotide
  Target: LAMA2; (+) strand; PAM type: NNAGAAW; PAM sequence: ACAGAAA
acagaaaggccagcagtcca

SEQ ID NO: 14157 - DNA, 20 bp, Artificial Sequence
  Description of Artificial Sequence: Synthetic oligonucleotide
  Target: LAMA2; (+) strand; PAM type: NNAGAAW; PAM sequence: TGAGAAA
tcatagtatgctaactacac

SEQ ID NO: 14158 - DNA, 20 bp, Artificial Sequence
  Description of Artificial Sequence: Synthetic oligonucleotide
  Target: LAMA2; (+) strand; PAM type: NNAGAAW; PAM sequence: GGAGAAT
ctacttgagaggctgaggca

SEQ ID NO: 14159 - DNA, 20 bp, Artificial Sequence
  Description of Artificial Sequence: Synthetic oligonucleotide
  Target: LAMA2; (+) strand; PAM type: NNAGAAW; PAM sequence: AAAGAAA
gggattccatctcaaaaaaa

SEQ ID NO: 14160 - DNA, 20 bp, Artificial Sequence
  Description of Artificial Sequence: Synthetic oligonucleotide
  Target: LAMA2; (+) strand; PAM type: NNAGAAW; PAM sequence: AAAGAAA
catctcaaaaaaaaaagaaa

SEQ ID NO: 14161 - DNA, 20 bp, Artificial Sequence
  Description of Artificial Sequence: Synthetic oligonucleotide
  Target: LAMA2; (+) strand; PAM type: NNAGAAW; PAM sequence: CCAGAAA
tatatgcaaagtgattcatt

SEQ ID NO: 14162 - DNA, 20 bp, Artificial Sequence
  Description of Artificial Sequence: Synthetic oligonucleotide
  Target: LAMA2; (+) strand; PAM type: NNAGAAW; PAM sequence: TGAGAAT
ctaccagggaggctgaggca

SEQ ID NO: 14163 - DNA, 20 bp, Artificial Sequence
  Description of Artificial Sequence: Synthetic oligonucleotide
  Target: LAMA2; (+) strand; PAM type: NNAGAAW; PAM sequence: AAAGAAA
gagactccatctcaaaaaaa

SEQ ID NO: 14164 - DNA, 20 bp, Artificial Sequence
  Description of Artificial Sequence: Synthetic oligonucleotide
  Target: LAMA2; (+) strand; PAM type: NNAGAAW; PAM sequence: AAAGAAA
ctcaaaaaaaaaagaaagga

SEQ ID NO: 14165 - DNA, 20 bp, Artificial Sequence
  Description of Artificial Sequence: Synthetic oligonucleotide
  Target: LAMA2; (+) strand; PAM type: NNAGAAW; PAM sequence: GGAGAAA
tactatttgtcttttaaagt

SEQ ID NO: 14166 - DNA, 20 bp, Artificial Sequence
  Description of Artificial Sequence: Synthetic oligonucleotide
  Target: LAMA2; (+) strand; PAM type: NNAGAAW; PAM sequence: CAAGAAA
cttatcttttcaagtatctt

SEQ ID NO: 14167 - DNA, 20 bp, Artificial Sequence
  Description of Artificial Sequence: Synthetic oligonucleotide
  Target: LAMA2; (+) strand; PAM type: NNAGAAW; PAM sequence: AAAGAAA
atatatttacagctatttcc

SEQ ID NO: 14168 - DNA, 20 bp, Artificial Sequence
  Description of Artificial Sequence: Synthetic oligonucleotide
  Target: LAMA2; (+) strand; PAM type: NNAGAAW; PAM sequence: TCAGAAT
actcctggttaagtaaaatt

SEQ ID NO: 14169 - DNA, 20 bp, Artificial Sequence
  Description of Artificial Sequence: Synthetic oligonucleotide
  Target: LAMA2; (+) strand; PAM type: NNAGAAW; PAM sequence: TAAGAAT
ttttgtagagatcaatagtg

SEQ ID NO: 14170 - DNA, 20 bp, Artificial Sequence
  Description of Artificial Sequence: Synthetic oligonucleotide
  Target: LAMA2; (+) strand; PAM type: NNAGAAW; PAM sequence: GAAGAAT
tattgatacattttgtttta

SEQ ID NO: 14171 - DNA, 20 bp, Artificial Sequence
  Description of Artificial Sequence: Synthetic oligonucleotide
  Target: LAMA2; (+) strand; PAM type: NNAGAAW; PAM sequence: TGAGAAA
caacttcccaaaaatacccc

SEQ ID NO: 14172 - DNA, 20 bp, Artificial Sequence
  Description of Artificial Sequence: Synthetic oligonucleotide
  Target: LAMA2; (+) strand; PAM type: NNAGAAW; PAM sequence: CAAGAAA
aaaaaaaaaaacctgttggt

SEQ ID NO: 14173 - DNA, 20 bp, Artificial Sequence
  Description of Artificial Sequence: Synthetic oligonucleotide
  Target: LAMA2; (+) strand; PAM type: NNAGAAW; PAM sequence: GAAGAAA
aggaaattgtgttagcgtta

SEQ ID NO: 14174 - DNA, 20 bp, Artificial Sequence
  Description of Artificial Sequence: Synthetic oligonucleotide
  Target: LAMA2; (+) strand; PAM type: NNAGAAW; PAM sequence: TTAGAAA
ggcattattttgttgaaatt

SEQ ID NO: 14175 - DNA, 20 bp, Artificial Sequence
  Description of Artificial Sequence: Synthetic oligonucleotide
  Target: LAMA2; (+) strand; PAM type: NNAGAAW; PAM sequence: ACAGAAA
ctcccctcacacataaacag

SEQ ID NO: 14176 - DNA, 20 bp, Artificial Sequence
  Description of Artificial Sequence: Synthetic oligonucleotide
  Target: LAMA2; (+) strand; PAM type: NNAGAAW; PAM sequence: GAAGAAA
acagacagaaagagagagag

SEQ ID NO: 14177 - DNA, 20 bp, Artificial Sequence
  Description of Artificial Sequence: Synthetic oligonucleotide
  Target: LAMA2; (+) strand; PAM type: NNAGAAW; PAM sequence: GAAGAAA
gaaagagagagaggaagaaa

SEQ ID NO: 14178 - DNA, 20 bp, Artificial Sequence
  Description of Artificial Sequence: Synthetic oligonucleotide
  Target: LAMA2; (+) strand; PAM type: NNAGAAW; PAM sequence: GCAGAAA
aaagagagagatagagagag

SEQ ID NO: 14179 - DNA, 20 bp, Artificial Sequence
  Description of Artificial Sequence: Synthetic oligonucleotide
  Target: LAMA2; (+) strand; PAM type: NNAGAAW; PAM sequence: AGAGAAA
agagatagagagaggcagaa

SEQ ID NO: 14180 - DNA, 20 bp, Artificial Sequence
  Description of Artificial Sequence: Synthetic oligonucleotide
  Target: LAMA2; (+) strand; PAM type: NNAGAAW; PAM sequence: AAAGAAA
agagagaggcagaaagagaa

SEQ ID NO: 14181 - DNA, 20 bp, Artificial Sequence
  Description of Artificial Sequence: Synthetic oligonucleotide
  Target: LAMA2; (+) strand; PAM type: NNAGAAW; PAM sequence: AAAGAAA
agaggcagaaagagaaaaag

SEQ ID NO: 14182 - DNA, 20 bp, Artificial Sequence
  Description of Artificial Sequence: Synthetic oligonucleotide
  Target: LAMA2; (+) strand; PAM type: NNAGAAW; PAM sequence: AGAGAAA
aaagagaaaaagaaagaaag

SEQ ID NO: 14183 - DNA, 20 bp, Artificial Sequence
  Description of Artificial Sequence: Synthetic oligonucleotide
  Target: LAMA2; (+) strand; PAM type: NNAGAAW; PAM sequence: AAAGAAA
agaaaaagaaagaaagagag

SEQ ID NO: 14184 - DNA, 20 bp, Artificial Sequence
  Description of Artificial Sequence: Synthetic oligonucleotide
  Target: LAMA2; (+) strand; PAM type: NNAGAAW; PAM sequence: AGAGAAA
gaaagagagaaagaaaagga

SEQ ID NO: 14185 - DNA, 20 bp, Artificial Sequence
  Description of Artificial Sequence: Synthetic oligonucleotide
  Target: LAMA2; (+) strand; PAM type: NNAGAAW; PAM sequence: AAAGAAA
gagagaaagaaaaggaagag

SEQ ID NO: 14186 - DNA, 20 bp, Artificial Sequence
  Description of Artificial Sequence: Synthetic oligonucleotide
  Target: LAMA2; (+) strand; PAM type: NNAGAAW; PAM sequence: AAAGAAA
gaaagaaaaggaagagaaag

SEQ ID NO: 14187 - DNA, 20 bp, Artificial Sequence
  Description of Artificial Sequence: Synthetic oligonucleotide
  Target: LAMA2; (+) strand; PAM type: NNAGAAW; PAM sequence: AGAGAAA
aaaggaagagaaagaaagaa

SEQ ID NO: 14188 - DNA, 20 bp, Artificial Sequence
  Description of Artificial Sequence: Synthetic oligonucleotide
  Target: LAMA2; (+) strand; PAM type: NNAGAAW; PAM sequence: AAAGAAA
gaagagaaagaaagaaagag

SEQ ID NO: 14189 - DNA, 20 bp, Artificial Sequence
  Description of Artificial Sequence: Synthetic oligonucleotide
  Target: LAMA2; (+) strand; PAM type: NNAGAAW; PAM sequence: AGAGAAA
aaagaaagaaagagaaagaa

SEQ ID NO: 14190 - DNA, 20 bp, Artificial Sequence
  Description of Artificial Sequence: Synthetic oligonucleotide
  Target: LAMA2; (+) strand; PAM type: NNAGAAW; PAM sequence: AAAGAAA
aaagaaagagaaagaaagag

SEQ ID NO: 14191 - DNA, 20 bp, Artificial Sequence
  Description of Artificial Sequence: Synthetic oligonucleotide
  Target: LAMA2; (+) strand; PAM type: NNAGAAW; PAM sequence: GGAGAAA
ggaggaaggaaagaagagag

SEQ ID NO: 14192 - DNA, 20 bp, Artificial Sequence
  Description of Artificial Sequence: Synthetic oligonucleotide
  Target: LAMA2; (+) strand; PAM type: NNAGAAW; PAM sequence: AAAGAAT
gaaggaaagaagagagggag

SEQ ID NO: 14193 - DNA, 20 bp, Artificial Sequence
  Description of Artificial Sequence: Synthetic oligonucleotide
  Target: LAMA2; (+) strand; PAM type: NNAGAAW; PAM sequence: GAAGAAA
gaagagagggagaaagaatg

SEQ ID NO: 14194 - DNA, 20 bp, Artificial Sequence
  Description of Artificial Sequence: Synthetic oligonucleotide
  Target: LAMA2; (+) strand; PAM type: NNAGAAW; PAM sequence: AAAGAAA
agagggagaaagaatggaag

SEQ ID NO: 14195 - DNA, 20 bp, Artificial Sequence
  Description of Artificial Sequence: Synthetic oligonucleotide
  Target: LAMA2; (+) strand; PAM type: NNAGAAW; PAM sequence: AAAGAAA
ggagaaagaatggaagaaag

SEQ ID NO: 14196 - DNA, 20 bp, Artificial Sequence
  Description of Artificial Sequence: Synthetic oligonucleotide
  Target: LAMA2; (+) strand; PAM type: NNAGAAW; PAM sequence: GAAGAAA
gaatggaagaaagaaagaaa

SEQ ID NO: 14197 - DNA, 20 bp, Artificial Sequence
  Description of Artificial Sequence: Synthetic oligonucleotide
  Target: LAMA2; (+) strand; PAM type: NNAGAAW; PAM sequence: AAAGAAA
ggaagaaagaaagaaagaag

SEQ ID NO: 14198 - DNA, 20 bp, Artificial Sequence
  Description of Artificial Sequence: Synthetic oligonucleotide
  Target: LAMA2; (+) strand; PAM type: NNAGAAW; PAM sequence: GGAGAAA
gaaagaaggaaggaagagag

SEQ ID NO: 14199 - DNA, 20 bp, Artificial Sequence
  Description of Artificial Sequence: Synthetic oligonucleotide
  Target: LAMA2; (+) strand; PAM type: NNAGAAW; PAM sequence: AAAGAAA
gaaggaaggaagagagggag

SEQ ID NO: 14200 - DNA, 20 bp, Artificial Sequence
  Description of Artificial Sequence: Synthetic oligonucleotide
  Target: LAMA2; (+) strand; PAM type: NNAGAAW; PAM sequence: AGAGAAA
aggaagagagggagaaagaa

SEQ ID NO: 14201 - DNA, 20 bp, Artificial Sequence
  Description of Artificial Sequence: Synthetic oligonucleotide
  Target: LAMA2; (+) strand; PAM type: NNAGAAW; PAM sequence: AAAGAAA
aaagaaagagaaagagaagg

SEQ ID NO: 14202 - DNA, 20 bp, Artificial Sequence
  Description of Artificial Sequence: Synthetic oligonucleotide
  Target: LAMA2; (+) strand; PAM type: NNAGAAW; PAM sequence: AAAGAAA
aaagagaaagagaaggaaag

SEQ ID NO: 14203 - DNA, 20 bp, Artificial Sequence
  Description of Artificial Sequence: Synthetic oligonucleotide
  Target: LAMA2; (+) strand; PAM type: NNAGAAW; PAM sequence: AAAGAAT
caaggaaaggaaaacaatgg

SEQ ID NO: 14204 - DNA, 20 bp, Artificial Sequence
  Description of Artificial Sequence: Synthetic oligonucleotide
  Target: LAMA2; (+) strand; PAM type: NNAGAAW; PAM sequence: AAAGAAA
aggaaaacaatggaaagaat

SEQ ID NO: 14205 - DNA, 20 bp, Artificial Sequence
  Description of Artificial Sequence: Synthetic oligonucleotide
  Target: LAMA2; (+) strand; PAM type: NNAGAAW; PAM sequence: AAAGAAT
taaatgcagcaggaaaggaa

SEQ ID NO: 14206 - DNA, 20 bp, Artificial Sequence
  Description of Artificial Sequence: Synthetic oligonucleotide
  Target: LAMA2; (+) strand; PAM type: NNAGAAW; PAM sequence: GAAGAAT
caggaaaggaaaaagaatag

SEQ ID NO: 14207 - DNA, 20 bp, Artificial Sequence
  Description of Artificial Sequence: Synthetic oligonucleotide
  Target: LAMA2; (+) strand; PAM type: NNAGAAW; PAM sequence: CTAGAAA
aaactcttttgaaactttac

SEQ ID NO: 14208 - DNA, 20 bp, Artificial Sequence
  Description of Artificial Sequence: Synthetic oligonucleotide
  Target: LAMA2; (+) strand; PAM type: NNAGAAW; PAM sequence: ATAGAAT
agagatttggagggtgatgg

SEQ ID NO: 14209 - DNA, 20 bp, Artificial Sequence
  Description of Artificial Sequence: Synthetic oligonucleotide
  Target: LAMA2; (+) strand; PAM type: NNAGAAW; PAM sequence: CAAGAAA
gatagaataagggcttaaca

SEQ ID NO: 14210 - DNA, 20 bp, Artificial Sequence
  Description of Artificial Sequence: Synthetic oligonucleotide
  Target: LAMA2; (+) strand; PAM type: NNAGAAW; PAM sequence: AAAGAAA
tggtgaaagatatttaggct

SEQ ID NO: 14211 - DNA, 20 bp, Artificial Sequence
  Description of Artificial Sequence: Synthetic oligonucleotide
  Target: LAMA2; (+) strand; PAM type: NNAGAAW; PAM sequence: GGAGAAT
ctactcgggaggctgaggca

SEQ ID NO: 14212 - DNA, 20 bp, Artificial Sequence
  Description of Artificial Sequence: Synthetic oligonucleotide
  Target: LAMA2; (+) strand; PAM type: NNAGAAW; PAM sequence: TAAGAAT
cccaagtgattatttaccca

SEQ ID NO: 14213 - DNA, 20 bp, Artificial Sequence
  Description of Artificial Sequence: Synthetic oligonucleotide
  Target: LAMA2; (+) strand; PAM type: NNAGAAW; PAM sequence: TTAGAAA
aaatttatttatcaatctca

SEQ ID NO: 14214 - DNA, 20 bp, Artificial Sequence
  Description of Artificial Sequence: Synthetic oligonucleotide
  Target: LAMA2; (+) strand; PAM type: NNAGAAW; PAM sequence: TTAGAAA
acattggaataaaatgaatc

SEQ ID NO: 14215 - DNA, 20 bp, Artificial Sequence
  Description of Artificial Sequence: Synthetic oligonucleotide
  Target: LAMA2; (+) strand; PAM type: NNAGAAW; PAM sequence: AAAGAAA
cttagaaagcagctattttt

SEQ ID NO: 14216 - DNA, 20 bp, Artificial Sequence
  Description of Artificial Sequence: Synthetic oligonucleotide
  Target: LAMA2; (+) strand; PAM type: NNAGAAW; PAM sequence: AGAGAAA
tgccattaatttggaatggg

SEQ ID NO: 14217 - DNA, 20 bp, Artificial Sequence
  Description of Artificial Sequence: Synthetic oligonucleotide
  Target: LAMA2; (+) strand; PAM type: NNAGAAW; PAM sequence: CCAGAAT
agaaaggagacttggcagaa

SEQ ID NO: 14218 - DNA, 20 bp, Artificial Sequence
  Description of Artificial Sequence: Synthetic oligonucleotide
  Target: LAMA2; (+) strand; PAM type: NNAGAAW; PAM sequence: TAAGAAA
cctcatctgtggtttcccca

SEQ ID NO: 14219 - DNA, 20 bp, Artificial Sequence
  Description of Artificial Sequence: Synthetic oligonucleotide
  Target: LAMA2; (+) strand; PAM type: NNAGAAW; PAM sequence: AAAGAAA
gactccatgacaacaattga

SEQ ID NO: 14220 - DNA, 20 bp, Artificial Sequence
  Description of Artificial Sequence: Synthetic oligonucleotide
  Target: LAMA2; (+) strand; PAM type: NNAGAAW; PAM sequence: ACAGAAA
gatgatacacaaacccagcc

SEQ ID NO: 14221 - DNA, 20 bp, Artificial Sequence
  Description of Artificial Sequence: Synthetic oligonucleotide
  Target: LAMA2; (+) strand; PAM type: NNAGAAW; PAM sequence: CTAGAAT
catgtgtcagagcaaagcaa

SEQ ID NO: 14222 - DNA, 20 bp, Artificial Sequence
  Description of Artificial Sequence: Synthetic oligonucleotide
  Target: LAMA2; (+) strand; PAM type: NNAGAAW; PAM sequence: GAAGAAT
ttattcacatacctggtgga

SEQ ID NO: 14223 - DNA, 20 bp, Artificial Sequence
  Description of Artificial Sequence: Synthetic oligonucleotide
  Target: LAMA2; (+) strand; PAM type: NNAGAAW; PAM sequence: GCAGAAA
aagcacctaccacccagcag

SEQ ID NO: 14224 - DNA, 20 bp, Artificial Sequence
  Description of Artificial Sequence: Synthetic oligonucleotide
  Target: LAMA2; (+) strand; PAM type: NNAGAAW; PAM sequence: AGAGAAA
ttctgtttacacaaaagata

SEQ ID NO: 14225 - DNA, 20 bp, Artificial Sequence
  Description of Artificial Sequence: Synthetic oligonucleotide
  Target: LAMA2; (+) strand; PAM type: NNAGAAW; PAM sequence: ATAGAAA
tagatgttttggatatttac

SEQ ID NO: 14226 - DNA, 20 bp, Artificial Sequence
  Description of Artificial Sequence: Synthetic oligonucleotide
  Target: LAMA2; (+) strand; PAM type: NNAGAAW; PAM sequence: AAAGAAT
ttggatatttacatagaaac

SEQ ID NO: 14227 - DNA, 20 bp, Artificial Sequence
  Description of Artificial Sequence: Synthetic oligonucleotide
  Target: LAMA2; (+) strand; PAM type: NNAGAAW; PAM sequence: AAAGAAT
tttctatgagagtcataaaa

SEQ ID NO: 14228 - DNA, 20 bp, Artificial Sequence
  Description of Artificial Sequence: Synthetic oligonucleotide
  Target: LAMA2; (+) strand; PAM type: NNAGAAW; PAM sequence: TTAGAAT
ttttccaagatgtcatgtag

SEQ ID NO: 14229 - DNA, 20 bp, Artificial Sequence
  Description of Artificial Sequence: Synthetic oligonucleotide
  Target: LAMA2; (+) strand; PAM type: NNAGAAW; PAM sequence: ACAGAAT
gtcaattttctgttgctata

SEQ ID NO: 14230 - DNA, 20 bp, Artificial Sequence
  Description of Artificial Sequence: Synthetic oligonucleotide
  Target: LAMA2; (+) strand; PAM type: NNAGAAW; PAM sequence: GAAGAAA
cttaacatggtggagaagtg

SEQ ID NO: 14231 - DNA, 20 bp, Artificial Sequence
  Description of Artificial Sequence: Synthetic oligonucleotide
  Target: LAMA2; (+) strand; PAM type: NNAGAAW; PAM sequence: TAAGAAA
acaagagcaagaactcactc

SEQ ID NO: 14232 - DNA, 20 bp, Artificial Sequence
  Description of Artificial Sequence: Synthetic oligonucleotide
  Target: LAMA2; (+) strand; PAM type: NNAGAAW; PAM sequence: TTAGAAT
ctttcctctccatataaatt

SEQ ID NO: 14233 - DNA, 20 bp, Artificial Sequence
  Description of Artificial Sequence: Synthetic oligonucleotide
  Target: LAMA2; (+) strand; PAM type: NNAGAAW; PAM sequence: TTAGAAA
gacagatggaatcaagtgac

SEQ ID NO: 14234 - DNA, 20 bp, Artificial Sequence
  Description of Artificial Sequence: Synthetic oligonucleotide
  Target: LAMA2; (+) strand; PAM type: NNAGAAW; PAM sequence: ATAGAAT
tctcaaggctgtgtgatatc

SEQ ID NO: 14235 - DNA, 20 bp, Artificial Sequence
  Description of Artificial Sequence: Synthetic oligonucleotide
  Target: LAMA2; (+) strand; PAM type: NNAGAAW; PAM sequence: CCAGAAA
cttgctttcccttgacattt

SEQ ID NO: 14236 - DNA, 20 bp, Artificial Sequence
  Description of Artificial Sequence: Synthetic oligonucleotide
  Target: LAMA2; (+) strand; PAM type: NNAGAAW; PAM sequence: TTAGAAA
ttggtttttaaaaagtatca

SEQ ID NO: 14237 - DNA, 20 bp, Artificial Sequence
  Description of Artificial Sequence: Synthetic oligonucleotide
  Target: LAMA2; (+) strand; PAM type: NNAGAAW; PAM sequence: ATAGAAT
tttaaaaagtatcattagaa

SEQ ID NO: 14238 - DNA, 20 bp, Artificial Sequence
  Description of Artificial Sequence: Synthetic oligonucleotide
  Target: LAMA2; (+) strand; PAM type: NNAGAAW; PAM sequence: AGAGAAA
tgtactgatccagtattaac

SEQ ID NO: 14239 - DNA, 20 bp, Artificial Sequence
  Description of Artificial Sequence: Synthetic oligonucleotide
  Target: LAMA2; (+) strand; PAM type: NNAGAAW; PAM sequence: TCAGAAA
gatattatcaaagtcatgaa

SEQ ID NO: 14240 - DNA, 20 bp, Artificial Sequence
  Description of Artificial Sequence: Synthetic oligonucleotide
  Target: LAMA2; (+) strand; PAM type: NNAGAAW; PAM sequence: AGAGAAT
atcaaagtcatgaatcagaa

SEQ ID NO: 14241 - DNA, 20 bp, Artificial Sequence
  Description of Artificial Sequence: Synthetic oligonucleotide
  Target: LAMA2; (+) strand; PAM type: NNAGAAW; PAM sequence: GAAGAAT
tttatgtcagtttgagagta

SEQ ID NO: 14242 - DNA, 20 bp, Artificial Sequence
  Description of Artificial Sequence: Synthetic oligonucleotide
  Target: LAMA2; (+) strand; PAM type: NNAGAAW; PAM sequence: CTAGAAT
ataagtagatttttactatt

SEQ ID NO: 14243 - DNA, 20 bp, Artificial Sequence
  Description of Artificial Sequence: Synthetic oligonucleotide
  Target: LAMA2; (+) strand; PAM type: NNAGAAW; PAM sequence: AAAGAAA
tgagatccattttcattctt

SEQ ID NO: 14244 - DNA, 20 bp, Artificial Sequence
  Description of Artificial Sequence: Synthetic oligonucleotide
  Target: LAMA2; (+) strand; PAM type: NNAGAAW; PAM sequence: AAAGAAA
atatttactcagtaaataat

SEQ ID NO: 14245 - DNA, 20 bp, Artificial Sequence
  Description of Artificial Sequence: Synthetic oligonucleotide
  Target: LAMA2; (+) strand; PAM type: NNAGAAW; PAM sequence: TTAGAAA
gcatgatttttgttgcacaa

SEQ ID NO: 14246 - DNA, 20 bp, Artificial Sequence
  Description of Artificial Sequence: Synthetic oligonucleotide
  Target: LAMA2; (+) strand; PAM type: NNAGAAW; PAM sequence: TGAGAAT
ttagaaaatacttaagttct

SEQ ID NO: 14247 - DNA, 20 bp, Artificial Sequence
  Description of Artificial Sequence: Synthetic oligonucleotide
  Target: LAMA2; (+) strand; PAM type: NNAGAAW; PAM sequence: TCAGAAA
gttggaaagggttgtaatga

SEQ ID NO: 14248 - DNA, 20 bp, Artificial Sequence
  Description of Artificial Sequence: Synthetic oligonucleotide
  Target: LAMA2; (+) strand; PAM type: NNAGAAW; PAM sequence: TTAGAAT
taagctgtatcattacgttc

SEQ ID NO: 14249 - DNA, 20 bp, Artificial Sequence
  Description of Artificial Sequence: Synthetic oligonucleotide
  Target: LAMA2; (+) strand; PAM type: NNAGAAW; PAM sequence: GGAGAAT
ctacttgggaggctgaggca

SEQ ID NO: 14250 - DNA, 20 bp, Artificial Sequence
  Description of Artificial Sequence: Synthetic oligonucleotide
  Target: LAMA2; (+) strand; PAM type: NNAGAAW; PAM sequence: TTAGAAT
tgaatacaaaatatctattt

SEQ ID NO: 14251 - DNA, 20 bp, Artificial Sequence
  Description of Artificial Sequence: Synthetic oligonucleotide
  Target: LAMA2; (+) strand; PAM type: NNAGAAW; PAM sequence: AGAGAAA
ttgagctttcccttcaactc

SEQ ID NO: 14252 - DNA, 20 bp, Artificial Sequence
  Description of Artificial Sequence: Synthetic oligonucleotide
  Target: LAMA2; (+) strand; PAM type: NNAGAAW; PAM sequence: AGAGAAA
ctataaatagtgctttcaat

SEQ ID NO: 14253 - DNA, 20 bp, Artificial Sequence
  Description of Artificial Sequence: Synthetic oligonucleotide
  Target: LAMA2; (+) strand; PAM type: NNAGAAW; PAM sequence: ACAGAAA
cctttttgaatacttcacat

SEQ ID NO: 14254 - DNA, 20 bp, Artificial Sequence
  Description of Artificial Sequence: Synthetic oligonucleotide
  Target: LAMA2; (+) strand; PAM type: NNAGAAW; PAM sequence: TGAGAAA
aaatgtttctcaaagtcctt

SEQ ID NO: 14255 - DNA, 20 bp, Artificial Sequence
  Description of Artificial Sequence: Synthetic oligonucleotide
  Target: LAMA2; (+) strand; PAM type: NNAGAAW; PAM sequence: ACAGAAA
cttttaaaaaaaattcaaat

SEQ ID NO: 14256 - DNA, 20 bp, Artificial Sequence
  Description of Artificial Sequence: Synthetic oligonucleotide
  Target: LAMA2; (+) strand; PAM type: NNAGAAW; PAM sequence: GCAGAAA
tgacatcttttaacataagt

SEQ ID NO: 14257 - DNA, 20 bp, Artificial Sequence
  Description of Artificial Sequence: Synthetic oligonucleotide
  Target: LAMA2; (+) strand; PAM type: NNAGAAW; PAM sequence: TGAGAAT
gcaaattataaagctgttcc

SEQ ID NO: 14258 - DNA, 20 bp, Artificial Sequence
  Description of Artificial Sequence: Synthetic oligonucleotide
  Target: LAMA2; (+) strand; PAM type: NNAGAAW; PAM sequence: AAAGAAA
ttctgaaaattgactataat

SEQ ID NO: 14259 - DNA, 20 bp, Artificial Sequence
  Description of Artificial Sequence: Synthetic oligonucleotide
  Target: LAMA2; (+) strand; PAM type: NNAGAAW; PAM sequence: GTAGAAT
aaattgtcatccactcatag

SEQ ID NO: 14260 - DNA, 20 bp, Artificial Sequence
  Description of Artificial Sequence: Synthetic oligonucleotide
  Target: LAMA2; (+) strand; PAM type: NNAGAAW; PAM sequence: AGAGAAT
actcataggtagaataaatg

SEQ ID NO: 14261 - DNA, 20 bp, Artificial Sequence
  Description of Artificial Sequence: Synthetic oligonucleotide
  Target: LAMA2; (+) strand; PAM type: NNAGAAW; PAM sequence: ATAGAAA
agaattatggtgatctaaat

SEQ ID NO: 14262 - DNA, 20 bp, Artificial Sequence
  Description of Artificial Sequence: Synthetic oligonucleotide
  Target: LAMA2; (+) strand; PAM type: NNAGAAW; PAM sequence: AAAGAAT
gccaattctttttattcctt

SEQ ID NO: 14263 - DNA, 20 bp, Artificial Sequence
  Description of Artificial Sequence: Synthetic oligonucleotide
  Target: LAMA2; (+) strand; PAM type: NNAGAAW; PAM sequence: AGAGAAA
gctcaccatcactggccatc

SEQ ID NO: 14264 - DNA, 20 bp, Artificial Sequence
  Description of Artificial Sequence: Synthetic oligonucleotide
  Target: LAMA2; (+) strand; PAM type: NNAGAAW; PAM sequence: TTAGAAT
gagataccatctcacaccaa

SEQ ID NO: 14265 - DNA, 20 bp, Artificial Sequence
  Description of Artificial Sequence: Synthetic oligonucleotide
  Target: LAMA2; (+) strand; PAM type: NNAGAAW; PAM sequence: GGAGAAA
acagatgctggagaggatgt

SEQ ID NO: 14266 - DNA, 20 bp, Artificial Sequence
  Description of Artificial Sequence: Synthetic oligonucleotide
  Target: LAMA2; (+) strand; PAM type: NNAGAAW; PAM sequence: TAAGAAA
ccaacaatgatagactggat

SEQ ID NO: 14267 - DNA, 20 bp, Artificial Sequence
  Description of Artificial Sequence: Synthetic oligonucleotide
  Target: LAMA2; (+) strand; PAM type: NNAGAAW; PAM sequence: ACAGAAA
gcaaaagcagtttttattat

SEQ ID NO: 14268 - DNA, 20 bp, Artificial Sequence
  Description of Artificial Sequence: Synthetic oligonucleotide
  Target: LAMA2; (+) strand; PAM type: NNAGAAW; PAM sequence: TCAGAAA
accattttgaaagcagttat

SEQ ID NO: 14269 - DNA, 20 bp, Artificial Sequence
  Description of Artificial Sequence: Synthetic oligonucleotide
  Target: LAMA2; (+) strand; PAM type: NNAGAAW; PAM sequence: CTAGAAA
ctattttctgcataatatag

SEQ ID NO: 14270 - DNA, 20 bp, Artificial Sequence
  Description of Artificial Sequence: Synthetic oligonucleotide
  Target: LAMA2; (+) strand; PAM type: NNAGAAW; PAM sequence: TCAGAAA
ccaattataaccaattagca

SEQ ID NO: 14271 - DNA, 20 bp, Artificial Sequence
  Description of Artificial Sequence: Synthetic oligonucleotide
  Target: LAMA2; (+) strand; PAM type: NNAGAAW; PAM sequence: AGAGAAT
caccaagaacctaatttgtg

SEQ ID NO: 14272 - DNA, 20 bp, Artificial Sequence
  Description of Artificial Sequence: Synthetic oligonucleotide
  Target: LAMA2; (+) strand; PAM type: NNAGAAW; PAM sequence: GGAGAAT
ctactcgtgaggctgaggca

SEQ ID NO: 14273 - DNA, 20 bp, Artificial Sequence
  Description of Artificial Sequence: Synthetic oligonucleotide
  Target: LAMA2; (+) strand; PAM type: NNAGAAW; PAM sequence: CTAGAAA
attaaaaaaaaagcctgaac

SEQ ID NO: 14274 - DNA, 20 bp, Artificial Sequence
  Description of Artificial Sequence: Synthetic oligonucleotide
  Target: LAMA2; (+) strand; PAM type: NNAGAAW; PAM sequence: TAAGAAA
taagccaagatttccaaaaa

SEQ ID NO: 14275 - DNA, 20 bp, Artificial Sequence
  Description of Artificial Sequence: Synthetic oligonucleotide
  Target: LAMA2; (+) strand; PAM type: NNAGAAW; PAM sequence: TGAGAAA
tttcatttggaacatataat

SEQ ID NO: 14276 - DNA, 20 bp, Artificial Sequence
  Description of Artificial Sequence: Synthetic oligonucleotide
  Target: LAMA2; (+) strand; PAM type: NNAGAAW; PAM sequence: GGAGAAA
aacaataaacattttacaga

SEQ ID NO: 14277 - DNA, 20 bp, Artificial Sequence
  Description of Artificial Sequence: Synthetic oligonucleotide
  Target: LAMA2; (+) strand; PAM type: NNAGAAW; PAM sequence: AGAGAAA
acattttacagaggagaaac

SEQ ID NO: 14278 - DNA, 20 bp, Artificial Sequence
  Description of Artificial Sequence: Synthetic oligonucleotide
  Target: LAMA2; (+) strand; PAM type: NNAGAAW; PAM sequence: GTAGAAT
attgatgagcaaatcaatat

SEQ ID NO: 14279 - DNA, 20 bp, Artificial Sequence
  Description of Artificial Sequence: Synthetic oligonucleotide
  Target: LAMA2; (+) strand; PAM type: NNAGAAW; PAM sequence: TAAGAAT
ctcaatttattggcaataat

SEQ ID NO: 14280 - DNA, 20 bp, Artificial Sequence
  Description of Artificial Sequence: Synthetic oligonucleotide
  Target: LAMA2; (+) strand; PAM type: NNAGAAW; PAM sequence: ACAGAAA
aataattaagaatttaaact

SEQ ID NO: 14281 - DNA, 20 bp, Artificial Sequence
  Description of Artificial Sequence: Synthetic oligonucleotide
  Target: LAMA2; (+) strand; PAM type: NNAGAAW; PAM sequence: TAAGAAA
aaattatctttttaaaaatg

SEQ ID NO: 14282 - DNA, 20 bp, Artificial Sequence
  Description of Artificial Sequence: Synthetic oligonucleotide
  Target: LAMA2; (+) strand; PAM type: NNAGAAW; PAM sequence: TTAGAAT
tgttatgaaggttgaaattc

SEQ ID NO: 14283 - DNA, 20 bp, Artificial Sequence
  Description of Artificial Sequence: Synthetic oligonucleotide
  Target: LAMA2; (+) strand; PAM type: NNAGAAW; PAM sequence: TGAGAAT
gttcagttcccacctatgag

SEQ ID NO: 14284 - DNA, 20 bp, Artificial Sequence
  Description of Artificial Sequence: Synthetic oligonucleotide
  Target: LAMA2; (+) strand; PAM type: NNAGAAW; PAM sequence: TGAGAAT
ttgtccttgtgatagtttgc

SEQ ID NO: 14285 - DNA, 20 bp, Artificial Sequence
  Description of Artificial Sequence: Synthetic oligonucleotide
  Target: LAMA2; (+) strand; PAM type: NNAGAAW; PAM sequence: GAAGAAA
agttttttttccaattctgt

SEQ ID NO: 14286 - DNA, 20 bp, Artificial Sequence
  Description of Artificial Sequence: Synthetic oligonucleotide
  Target: LAMA2; (+) strand; PAM type: NNAGAAW; PAM sequence: TAAGAAT
gattgtctgttgttagtgta

SEQ ID NO: 14287 - DNA, 20 bp, Artificial Sequence
  Description of Artificial Sequence: Synthetic oligonucleotide
  Target: LAMA2; (+) strand; PAM type: NNAGAAW; PAM sequence: GTAGAAT
acctcctccttgtacctctg

SEQ ID NO: 14288 - DNA, 20 bp, Artificial Sequence
  Description of Artificial Sequence: Synthetic oligonucleotide
  Target: LAMA2; (+) strand; PAM type: NNAGAAW; PAM sequence: GCAGAAT
taagtgtgatgtggtgctga

SEQ ID NO: 14289 - DNA, 20 bp, Artificial Sequence
  Description of Artificial Sequence: Synthetic oligonucleotide
  Target: LAMA2; (+) strand; PAM type: NNAGAAW; PAM sequence: TAAGAAT
gggttgaaaattcttttctt

SEQ ID NO: 14290 - DNA, 20 bp, Artificial Sequence
  Description of Artificial Sequence: Synthetic oligonucleotide
  Target: LAMA2; (+) strand; PAM type: NNAGAAW; PAM sequence: GCAGAAT
gttctcctggataatatcct

SEQ ID NO: 14291 - DNA, 20 bp, Artificial Sequence
  Description of Artificial Sequence: Synthetic oligonucleotide
  Target: LAMA2; (+) strand; PAM type: NNAGAAW; PAM sequence: CTAGAAA
aacacatgtgtataatacag

SEQ ID NO: 14292 - DNA, 20 bp, Artificial Sequence
  Description of Artificial Sequence: Synthetic oligonucleotide
  Target: LAMA2; (+) strand; PAM type: NNAGAAW; PAM sequence: TAAGAAA
tagtccagtaaatgtaggca

SEQ ID NO: 14293 - DNA, 20 bp, Artificial Sequence
  Description of Artificial Sequence: Synthetic oligonucleotide
  Target: LAMA2; (+) strand; PAM type: NNAGAAW; PAM sequence: CCAGAAA
attccagttatattaacttg

SEQ ID NO: 14294 - DNA, 20 bp, Artificial Sequence
  Description of Artificial Sequence: Synthetic oligonucleotide
  Target: LAMA2; (+) strand; PAM type: NNAGAAW; PAM sequence: AGAGAAT
gcttacattctagttagaag

SEQ ID NO: 14295 - DNA, 20 bp, Artificial Sequence
  Description of Artificial Sequence: Synthetic oligonucleotide
  Target: LAMA2; (+) strand; PAM type: NNAGAAW; PAM sequence: CAAGAAA
tgttagatagtgataaatga

SEQ ID NO: 14296 - DNA, 20 bp, Artificial Sequence
  Description of Artificial Sequence: Synthetic oligonucleotide
  Target: LAMA2; (+) strand; PAM type: NNAGAAW; PAM sequence: ATAGAAT
tgaatagactttaattttat

SEQ ID NO: 14297 - DNA, 20 bp, Artificial Sequence
  Description of Artificial Sequence: Synthetic oligonucleotide
  Target: LAMA2; (+) strand; PAM type: NNAGAAW; PAM sequence: AGAGAAA
gcaagagcatcttaggacaa

SEQ ID NO: 14298 - DNA, 20 bp, Artificial Sequence
  Description of Artificial Sequence: Synthetic oligonucleotide
  Target: LAMA2; (+) strand; PAM type: NNAGAAW; PAM sequence: TGAGAAA
acatttttcttgcaatgcaa

SEQ ID NO: 14299 - DNA, 20 bp, Artificial Sequence
  Description of Artificial Sequence: Synthetic oligonucleotide
  Target: LAMA2; (+) strand; PAM type: NNAGAAW; PAM sequence: AAAGAAA
tagtttggctgtggaacatg

SEQ ID NO: 14300 - DNA, 20 bp, Artificial Sequence
  Description of Artificial Sequence: Synthetic oligonucleotide
  Target: LAMA2; (+) strand; PAM type: NNAGAAW; PAM sequence: CAAGAAA
agaagactagatgtgataac

SEQ ID NO: 14301 - DNA, 20 bp, Artificial Sequence
  Description of Artificial Sequence: Synthetic oligonucleotide
  Target: LAMA2; (+) strand; PAM type: NNAGAAW; PAM sequence: CTAGAAA
gttaggaaactgaggacgaa

SEQ ID NO: 14302 - DNA, 20 bp, Artificial Sequence
  Description of Artificial Sequence: Synthetic oligonucleotide
  Target: LAMA2; (+) strand; PAM type: NNAGAAW; PAM sequence: TAAGAAT
ggacgaactagaaaggagac

SEQ ID NO: 14303 - DNA, 20 bp, Artificial Sequence
  Description of Artificial Sequence: Synthetic oligonucleotide
  Target: LAMA2; (+) strand; PAM type: NNAGAAW; PAM sequence: TAAGAAA
tgttgatgggccaaataagg

SEQ ID NO: 14304 - DNA, 20 bp, Artificial Sequence
  Description of Artificial Sequence: Synthetic oligonucleotide
  Target: LAMA2; (+) strand; PAM type: NNAGAAW; PAM sequence: TGAGAAT
gggccaaataaggtaagaaa

SEQ ID NO: 14305 - DNA, 20 bp, Artificial Sequence
  Description of Artificial Sequence: Synthetic oligonucleotide
  Target: LAMA2; (+) strand; PAM type: NNAGAAW; PAM sequence: AGAGAAT
gaaactagagtggatttaag

SEQ ID NO: 14306 - DNA, 20 bp, Artificial Sequence
  Description of Artificial Sequence: Synthetic oligonucleotide
  Target: LAMA2; (+) strand; PAM type: NNAGAAW; PAM sequence: GAAGAAA
gtggatttaagagagaataa

SEQ ID NO: 14307 - DNA, 20 bp, Artificial Sequence
  Description of Artificial Sequence: Synthetic oligonucleotide
  Target: LAMA2; (+) strand; PAM type: NNAGAAW; PAM sequence: AAAGAAT
atttaagagagaataagaag

SEQ ID NO: 14308 - DNA, 20 bp, Artificial Sequence
  Description of Artificial Sequence: Synthetic oligonucleotide
  Target: LAMA2; (+) strand; PAM type: NNAGAAW; PAM sequence: CTAGAAA
aagtgtagacttgtcttttt

SEQ ID NO: 14309 - DNA, 20 bp, Artificial Sequence
  Description of Artificial Sequence: Synthetic oligonucleotide
  Target: LAMA2; (+) strand; PAM type: NNAGAAW; PAM sequence: AAAGAAA
gtagacttgtctttttctag

SEQ ID NO: 14310 - DNA, 20 bp, Artificial Sequence
  Description of Artificial Sequence: Synthetic oligonucleotide
  Target: LAMA2; (+) strand; PAM type: NNAGAAW; PAM sequence: TTAGAAA
ttctattggtctgtatattc

SEQ ID NO: 14311 - DNA, 20 bp, Artificial Sequence
  Description of Artificial Sequence: Synthetic oligonucleotide
  Target: LAMA2; (+) strand; PAM type: NNAGAAW; PAM sequence: ATAGAAA
ggtctgtatattcttagaaa

SEQ ID NO: 14312 - DNA, 20 bp, Artificial Sequence
  Description of Artificial Sequence: Synthetic oligonucleotide
  Target: LAMA2; (+) strand; PAM type: NNAGAAW; PAM sequence: GGAGAAA
ggaaaatgctgaagattcaa

SEQ ID NO: 14313 - DNA, 20 bp, Artificial Sequence
  Description of Artificial Sequence: Synthetic oligonucleotide
  Target: LAMA2; (+) strand; PAM type: NNAGAAW; PAM sequence: AGAGAAA
gctgaagattcaaggagaaa

SEQ ID NO: 14314 - DNA, 20 bp, Artificial Sequence
  Description of Artificial Sequence: Synthetic oligonucleotide
  Target: LAMA2; (+) strand; PAM type: NNAGAAW; PAM sequence: TGAGAAA
catggaatctaagacagtga

SEQ ID NO: 14315 - DNA, 20 bp, Artificial Sequence
  Description of Artificial Sequence: Synthetic oligonucleotide
  Target: LAMA2; (+) strand; PAM type: NNAGAAW; PAM sequence: TTAGAAT
ccattgcatttccttctttt

SEQ ID NO: 14316 - DNA, 20 bp, Artificial Sequence
  Description of Artificial Sequence: Synthetic oligonucleotide
  Target: LAMA2; (+) strand; PAM type: NNAGAAW; PAM sequence: ATAGAAA
tattatatctagcacaaaac

SEQ ID NO: 14317 - DNA, 20 bp, Artificial Sequence
  Description of Artificial Sequence: Synthetic oligonucleotide
  Target: LAMA2; (+) strand; PAM type: NNAGAAW; PAM sequence: GGAGAAT
taaaaatgtgtctatgactt

SEQ ID NO: 14318 - DNA, 20 bp, Artificial Sequence
  Description of Artificial Sequence: Synthetic oligonucleotide
  Target: LAMA2; (+) strand; PAM type: NNAGAAW; PAM sequence: GAAGAAA
ataaaacaatttaactgctt

SEQ ID NO: 14319 - DNA, 20 bp, Artificial Sequence
  Description of Artificial Sequence: Synthetic oligonucleotide
  Target: LAMA2; (+) strand; PAM type: NNAGAAW; PAM sequence: GCAGAAT
agaagacattttcttgtttg

SEQ ID NO: 14320 - DNA, 20 bp, Artificial Sequence
  Description of Artificial Sequence: Synthetic oligonucleotide
  Target: LAMA2; (+) strand; PAM type: NNAGAAW; PAM sequence: TTAGAAA
tgtgtcgatatgtgctaggc

SEQ ID NO: 14321 - DNA, 20 bp, Artificial Sequence
  Description of Artificial Sequence: Synthetic oligonucleotide
  Target: LAMA2; (+) strand; PAM type: NNAGAAW; PAM sequence: ATAGAAA
gcttaaatgacattacatag

SEQ ID NO: 14322 - DNA, 20 bp, Artificial Sequence
  Description of Artificial Sequence: Synthetic oligonucleotide
  Target: LAMA2; (+) strand; PAM type: NNAGAAW; PAM sequence: TCAGAAT
gtcctgttgttagaaggctg

SEQ ID NO: 14323 - DNA, 20 bp, Artificial Sequence
  Description of Artificial Sequence: Synthetic oligonucleotide
  Target: LAMA2; (+) strand; PAM type: NNAGAAW; PAM sequence: CAAGAAA
gaacctcagttccacaacca

SEQ ID NO: 14324 - DNA, 20 bp, Artificial Sequence
  Description of Artificial Sequence: Synthetic oligonucleotide
  Target: LAMA2; (+) strand; PAM type: NNAGAAW; PAM sequence: CCAGAAA
tagattctcctctagagcca

SEQ ID NO: 14325 - DNA, 20 bp, Artificial Sequence
  Description of Artificial Sequence: Synthetic oligonucleotide
  Target: LAMA2; (+) strand; PAM type: NNAGAAW; PAM sequence: AGAGAAA
cttataataaagtgtgttag

SEQ ID NO: 14326 - DNA, 20 bp, Artificial Sequence
  Description of Artificial Sequence: Synthetic oligonucleotide
  Target: LAMA2; (+) strand; PAM type: NNAGAAW; PAM sequence: AAAGAAA
aataaagtgtgttagagaga

SEQ ID NO: 14327 - DNA, 20 bp, Artificial Sequence
  Description of Artificial Sequence: Synthetic oligonucleotide
  Target: LAMA2; (+) strand; PAM type: NNAGAAW; PAM sequence: TAAGAAA
ttagagagaaaagaaaatac

SEQ ID NO: 14328 - DNA, 20 bp, Artificial Sequence
  Description of Artificial Sequence: Synthetic oligonucleotide
  Target: LAMA2; (+) strand; PAM type: NNAGAAW; PAM sequence: GAAGAAA
tctcaggggaggcagagaca

SEQ ID NO: 14329 - DNA, 20 bp, Artificial Sequence
  Description of Artificial Sequence: Synthetic oligonucleotide
  Target: LAMA2; (+) strand; PAM type: NNAGAAW; PAM sequence: ACAGAAA
atgaaggctttcttctttaa

SEQ ID NO: 14330 - DNA, 20 bp, Artificial Sequence
  Description of Artificial Sequence: Synthetic oligonucleotide
  Target: LAMA2; (+) strand; PAM type: NNAGAAW; PAM sequence: GGAGAAA
gtattttgtgcccaagattt

SEQ ID NO: 14331 - DNA, 20 bp, Artificial Sequence
  Description of Artificial Sequence: Synthetic oligonucleotide
  Target: LAMA2; (+) strand; PAM type: NNAGAAW; PAM sequence: TTAGAAA
taaaaagactgtatttgtaa

SEQ ID NO: 14332 - DNA, 20 bp, Artificial Sequence
  Description of Artificial Sequence: Synthetic oligonucleotide
  Target: LAMA2; (+) strand; PAM type: NNAGAAW; PAM sequence: ACAGAAT
ttgagttttttacttatatc

SEQ ID NO: 14333 - DNA, 20 bp, Artificial Sequence
  Description of Artificial Sequence: Synthetic oligonucleotide
  Target: LAMA2; (+) strand; PAM type: NNAGAAW; PAM sequence: AAAGAAT
agatgagaagtaagttgaaa

SEQ ID NO: 14334 - DNA, 20 bp, Artificial Sequence
  Description of Artificial Sequence: Synthetic oligonucleotide
  Target: LAMA2; (+) strand; PAM type: NNAGAAW; PAM sequence: TAAGAAA
gaattggaattttttcataa

SEQ ID NO: 14335 - DNA, 20 bp, Artificial Sequence
  Description of Artificial Sequence: Synthetic oligonucleotide
  Target: LAMA2; (+) strand; PAM type: NNAGAAW; PAM sequence: TTAGAAA
tgtatgtacttttatgttat

SEQ ID NO: 14336 - DNA, 20 bp, Artificial Sequence
  Description of Artificial Sequence: Synthetic oligonucleotide
  Target: LAMA2; (+) strand; PAM type: NNAGAAW; PAM sequence: AAAGAAA
tttatgaaactagataaagc

SEQ ID NO: 14337 - DNA, 20 bp, Artificial Sequence
  Description of Artificial Sequence: Synthetic oligonucleotide
  Target: LAMA2; (+) strand; PAM type: NNAGAAW; PAM sequence: AAAGAAT
tacgtagagtttgtggacaa

SEQ ID NO: 14338 - DNA, 20 bp, Artificial Sequence
  Description of Artificial Sequence: Synthetic oligonucleotide
  Target: LAMA2; (+) strand; PAM type: NNAGAAW; PAM sequence: CTAGAAT
tcttaccaattactatgcta

SEQ ID NO: 14339 - DNA, 20 bp, Artificial Sequence
  Description of Artificial Sequence: Synthetic oligonucleotide
  Target: LAMA2; (+) strand; PAM type: NNAGAAW; PAM sequence: GAAGAAA
cctctgatgtgaaagcatat

SEQ ID NO: 14340 - DNA, 20 bp, Artificial Sequence
  Description of Artificial Sequence: Synthetic oligonucleotide
  Target: LAMA2; (+) strand; PAM type: NNAGAAW; PAM sequence: TGAGAAA
tttgcacccctttgagagta

SEQ ID NO: 14341 - DNA, 20 bp, Artificial Sequence
  Description of Artificial Sequence: Synthetic oligonucleotide
  Target: LAMA2; (+) strand; PAM type: NNAGAAW; PAM sequence: TTAGAAA
atggcaggaactctgttttc

SEQ ID NO: 14342 - DNA, 20 bp, Artificial Sequence
  Description of Artificial Sequence: Synthetic oligonucleotide
  Target: LAMA2; (+) strand; PAM type: NNAGAAW; PAM sequence: GTAGAAA
tatgggaattggggaactta

SEQ ID NO: 14343 - DNA, 20 bp, Artificial Sequence
  Description of Artificial Sequence: Synthetic oligonucleotide
  Target: LAMA2; (+) strand; PAM type: NNAGAAW; PAM sequence: AAAGAAA
gatttatctactcaagataa

SEQ ID NO: 14344 - DNA, 20 bp, Artificial Sequence
  Description of Artificial Sequence: Synthetic oligonucleotide
  Target: LAMA2; (+) strand; PAM type: NNAGAAW; PAM sequence: TTAGAAA
gaaagcagtaagttctcatg

SEQ ID NO: 14345 - DNA, 20 bp, Artificial Sequence
  Description of Artificial Sequence: Synthetic oligonucleotide
  Target: LAMA2; (+) strand; PAM type: NNAGAAW; PAM sequence: CAAGAAA
tagaaaatttccctattaag

SEQ ID NO: 14346 - DNA, 20 bp, Artificial Sequence
  Description of Artificial Sequence: Synthetic oligonucleotide
  Target: LAMA2; (+) strand; PAM type: NNAGAAW; PAM sequence: CAAGAAA
ctgtaacacagtaaaatgag

SEQ ID NO: 14347 - DNA, 20 bp, Artificial Sequence
  Description of Artificial Sequence: Synthetic oligonucleotide
  Target: LAMA2; (+) strand; PAM type: NNAGAAW; PAM sequence: TAAGAAA
tttggttttcattttgttct

SEQ ID NO: 14348 - DNA, 20 bp, Artificial Sequence
  Description of Artificial Sequence: Synthetic oligonucleotide
  Target: LAMA2; (+) strand; PAM type: NNAGAAW; PAM sequence: TAAGAAT
ttcatctgacaaaattaatt

SEQ ID NO: 14349 - DNA, 20 bp, Artificial Sequence
  Description of Artificial Sequence: Synthetic oligonucleotide
  Target: LAMA2; (+) strand; PAM type: NNAGAAW; PAM sequence: TGAGAAT
taaggttgtgtgtggtgttt

SEQ ID NO: 14350 - DNA, 20 bp, Artificial Sequence
  Description of Artificial Sequence: Synthetic oligonucleotide
  Target: LAMA2; (+) strand; PAM type: NNAGAAW; PAM sequence: TGAGAAT
ctacttgggaggctgaggca

SEQ ID NO: 14351 - DNA, 20 bp, Artificial Sequence
  Description of Artificial Sequence: Synthetic oligonucleotide
  Target: LAMA2; (+) strand; PAM type: NNAGAAW; PAM sequence: CAAGAAT
attctgaacttactgaatcc

SEQ ID NO: 14352 - DNA, 20 bp, Artificial Sequence
  Description of Artificial Sequence: Synthetic oligonucleotide
  Target: LAMA2; (+) strand; PAM type: NNAGAAW; PAM sequence: AAAGAAA
caagaataattaggagagga

SEQ ID NO: 14353 - DNA, 20 bp, Artificial Sequence
  Description of Artificial Sequence: Synthetic oligonucleotide
  Target: LAMA2; (+) strand; PAM type: NNAGAAW; PAM sequence: GAAGAAT
tgcctgttactatagaacat

SEQ ID NO: 14354 - DNA, 20 bp, Artificial Sequence
  Description of Artificial Sequence: Synthetic oligonucleotide
  Target: LAMA2; (+) strand; PAM type: NNAGAAW; PAM sequence: TTAGAAA
agcaaatatatagactacaa

SEQ ID NO: 14355 - DNA, 20 bp, Artificial Sequence
  Description of Artificial Sequence: Synthetic oligonucleotide
  Target: LAMA2; (+) strand; PAM type: NNAGAAW; PAM sequence: AGAGAAA
agagagagagagagagagag

SEQ ID NO: 14356 - DNA, 20 bp, Artificial Sequence
  Description of Artificial Sequence: Synthetic oligonucleotide
  Target: LAMA2; (+) strand; PAM type: NNAGAAW; PAM sequence: ATAGAAT
acgattgctccatctataca

SEQ ID NO: 14357 - DNA, 20 bp, Artificial Sequence
  Description of Artificial Sequence: Synthetic oligonucleotide
  Target: LAMA2; (+) strand; PAM type: NNAGAAW; PAM sequence: AGAGAAT
gttgccatggtatagtagtc

SEQ ID NO: 14358 - DNA, 20 bp, Artificial Sequence
  Description of Artificial Sequence: Synthetic oligonucleotide
  Target: LAMA2; (+) strand; PAM type: NNAGAAW; PAM sequence: CAAGAAA
tcttcctaatactatctgta

SEQ ID NO: 14359 - DNA, 20 bp, Artificial Sequence
  Description of Artificial Sequence: Synthetic oligonucleotide
  Target: LAMA2; (+) strand; PAM type: NNAGAAW; PAM sequence: ATAGAAA
tgctattctattaccctaca

SEQ ID NO: 14360 - DNA, 20 bp, Artificial Sequence
  Description of Artificial Sequence: Synthetic oligonucleotide
  Target: LAMA2; (+) strand; PAM type: NNAGAAW; PAM sequence: AGAGAAA
atctctactcatgtatcttc

SEQ ID NO: 14361 - DNA, 20 bp, Artificial Sequence
  Description of Artificial Sequence: Synthetic oligonucleotide
  Target: LAMA2; (+) strand; PAM type: NNAGAAW; PAM sequence: GGAGAAT
atatgaaggggagtttgtta

SEQ ID NO: 14362 - DNA, 20 bp, Artificial Sequence
  Description of Artificial Sequence: Synthetic oligonucleotide
  Target: LAMA2; (+) strand; PAM type: NNAGAAW; PAM sequence: CAAGAAA
gccatctgcaagctgagtag

SEQ ID NO: 14363 - DNA, 20 bp, Artificial Sequence
  Description of Artificial Sequence: Synthetic oligonucleotide
  Target: LAMA2; (+) strand; PAM type: NNAGAAW; PAM sequence: GGAGAAA
ggcaggaagcatccggcata

SEQ ID NO: 14364 - DNA, 20 bp, Artificial Sequence
  Description of Artificial Sequence: Synthetic oligonucleotide
  Target: LAMA2; (+) strand; PAM type: NNAGAAW; PAM sequence: CCAGAAT
gctgattaaatggtgcctac

SEQ ID NO: 14365 - DNA, 20 bp, Artificial Sequence
  Description of Artificial Sequence: Synthetic oligonucleotide
  Target: LAMA2; (+) strand; PAM type: NNAGAAW; PAM sequence: CAAGAAA
tgataggccttcaaatgttc

SEQ ID NO: 14366 - DNA, 20 bp, Artificial Sequence
  Description of Artificial Sequence: Synthetic oligonucleotide
  Target: LAMA2; (+) strand; PAM type: NNAGAAW; PAM sequence: CTAGAAT
aaagtatatattactaggtg

SEQ ID NO: 14367 - DNA, 20 bp, Artificial Sequence
  Description of Artificial Sequence: Synthetic oligonucleotide
  Target: LAMA2; (+) strand; PAM type: NNAGAAW; PAM sequence: ACAGAAA
tttataggtaagctcaaatc

SEQ ID NO: 14368 - DNA, 20 bp, Artificial Sequence
  Description of Artificial Sequence: Synthetic oligonucleotide
  Target: LAMA2; (+) strand; PAM type: NNAGAAW; PAM sequence: AGAGAAA
ggactgataaagctaagaac

SEQ ID NO: 14369 - DNA, 20 bp, Artificial Sequence
  Description of Artificial Sequence: Synthetic oligonucleotide
  Target: LAMA2; (+) strand; PAM type: NNAGAAW; PAM sequence: TTAGAAT
cgtgggattttcaagtgcat

SEQ ID NO: 14370 - DNA, 20 bp, Artificial Sequence
  Description of Artificial Sequence: Synthetic oligonucleotide
  Target: LAMA2; (+) strand; PAM type: NNAGAAW; PAM sequence: GCAGAAT
gggccttgtagtgcttaaag

SEQ ID NO: 14371 - DNA, 20 bp, Artificial Sequence
  Description of Artificial Sequence: Synthetic oligonucleotide
  Target: LAMA2; (+) strand; PAM type: NNAGAAW; PAM sequence: CCAGAAA
caaccagctctggaaaatct

SEQ ID NO: 14372 - DNA, 20 bp, Artificial Sequence
  Description of Artificial Sequence: Synthetic oligonucleotide
  Target: LAMA2; (+) strand; PAM type: NNAGAAW; PAM sequence: TAAGAAA
acaaccactttctactgctg

SEQ ID NO: 14373 - DNA, 20 bp, Artificial Sequence
  Description of Artificial Sequence: Synthetic oligonucleotide
  Target: LAMA2; (+) strand; PAM type: NNAGAAW; PAM sequence: AAAGAAT
ccactttctactgctgtaag

SEQ ID NO: 14374 - DNA, 20 bp, Artificial Sequence
  Description of Artificial Sequence: Synthetic oligonucleotide
  Target: LAMA2; (+) strand; PAM type: NNAGAAW; PAM sequence: GTAGAAA
ttcctccctttgcaacagaa

SEQ ID NO: 14375 - DNA, 20 bp, Artificial Sequence
  Description of Artificial Sequence: Synthetic oligonucleotide
  Target: LAMA2; (+) strand; PAM type: NNAGAAW; PAM sequence: AAAGAAA
taactacaattctcatttaa

SEQ ID NO: 14376 - DNA, 20 bp, Artificial Sequence
  Description of Artificial Sequence: Synthetic oligonucleotide
  Target: LAMA2; (+) strand; PAM type: NNAGAAW; PAM sequence: TAAGAAA
aaattttgaaccctagtcaa

SEQ ID NO: 14377 - DNA, 20 bp, Artificial Sequence
  Description of Artificial Sequence: Synthetic oligonucleotide
  Target: LAMA2; (+) strand; PAM type: NNAGAAW; PAM sequence: AGAGAAT
ctaacagcacgaagcacttc

SEQ ID NO: 14378 - DNA, 20 bp, Artificial Sequence
  Description of Artificial Sequence: Synthetic oligonucleotide
  Target: LAMA2; (+) strand; PAM type: NNAGAAW; PAM sequence: TCAGAAA
gtaacaagtagtacgctaag

SEQ ID NO: 14379 - DNA, 20 bp, Artificial Sequence
  Description of Artificial Sequence: Synthetic oligonucleotide
  Target: LAMA2; (+) strand; PAM type: NNAGAAW; PAM sequence: TAAGAAA
ttggggaaagatacgtgaaa

SEQ ID NO: 14380 - DNA, 20 bp, Artificial Sequence
  Description of Artificial Sequence: Synthetic oligonucleotide
  Target: LAMA2; (+) strand; PAM type: NNAGAAW; PAM sequence: TGAGAAA
cattttaacaaaaatttgta

SEQ ID NO: 14381 - DNA, 20 bp, Artificial Sequence
  Description of Artificial Sequence: Synthetic oligonucleotide
  Target: LAMA2; (+) strand; PAM type: NNAGAAW; PAM sequence: TAAGAAA
atatctcttggccttaacga

SEQ ID NO: 14382 - DNA, 20 bp, Artificial Sequence
  Description of Artificial Sequence: Synthetic oligonucleotide
  Target: LAMA2; (+) strand; PAM type: NNAGAAW; PAM sequence: TGAGAAT
attgtctaggctgtatttta

SEQ ID NO: 14383 - DNA, 20 bp, Artificial Sequence
  Description of Artificial Sequence: Synthetic oligonucleotide
  Target: LAMA2; (+) strand; PAM type: NNAGAAW; PAM sequence: GAAGAAA
tggagttatatgaaatgtag

SEQ ID NO: 14384 - DNA, 20 bp, Artificial Sequence
  Description of Artificial Sequence: Synthetic oligonucleotide
  Target: LAMA2; (+) strand; PAM type: NNAGAAW; PAM sequence: AAAGAAA
attgtagtggtcacattgaa

SEQ ID NO: 14385 - DNA, 20 bp, Artificial Sequence
  Description of Artificial Sequence: Synthetic oligonucleotide
  Target: LAMA2; (+) strand; PAM type: NNAGAAW; PAM sequence: AAAGAAA
aaaggacatagttattgtga

SEQ ID NO: 14386 - DNA, 20 bp, Artificial Sequence
  Description of Artificial Sequence: Synthetic oligonucleotide
  Target: LAMA2; (+) strand; PAM type: NNAGAAW; PAM sequence: GAAGAAA
aaacagtctaatggctacaa

SEQ ID NO: 14387 - DNA, 20 bp, Artificial Sequence
  Description of Artificial Sequence: Synthetic oligonucleotide
  Target: LAMA2; (+) strand; PAM type: NNAGAAW; PAM sequence: AAAGAAA
tctaatggctacaagaagaa

SEQ ID NO: 14388 - DNA, 20 bp, Artificial Sequence
  Description of Artificial Sequence: Synthetic oligonucleotide
  Target: LAMA2; (+) strand; PAM type: NNAGAAW; PAM sequence: GAAGAAA
gaagaggagaaggagatgaa

SEQ ID NO: 14389 - DNA, 20 bp, Artificial Sequence
  Description of Artificial Sequence: Synthetic oligonucleotide
  Target: LAMA2; (+) strand; PAM type: NNAGAAW; PAM sequence: AGAGAAA
aaggaaaaaaaaggtggaag

SEQ ID NO: 14390 - DNA, 20 bp, Artificial Sequence
  Description of Artificial Sequence: Synthetic oligonucleotide
  Target: LAMA2; (+) strand; PAM type: NNAGAAW; PAM sequence: CTAGAAT
tcccttctaaaccaactttt

SEQ ID NO: 14391 - DNA, 20 bp, Artificial Sequence
  Description of Artificial Sequence: Synthetic oligonucleotide
  Target: LAMA2; (+) strand; PAM type: NNAGAAW; PAM sequence: AGAGAAA
aattatcgagcttttaaaga

SEQ ID NO: 14392 - DNA, 20 bp, Artificial Sequence
  Description of Artificial Sequence: Synthetic oligonucleotide
  Target: LAMA2; (+) strand; PAM type: NNAGAAW; PAM sequence: CCAGAAA
tcatgaaaaggatttcctct

SEQ ID NO: 14393 - DNA, 20 bp, Artificial Sequence
  Description of Artificial Sequence: Synthetic oligonucleotide
  Target: LAMA2; (+) strand; PAM type: NNAGAAW; PAM sequence: GTAGAAT
gctggtttttccccctgaag

SEQ ID NO: 14394 - DNA, 20 bp, Artificial Sequence
  Description of Artificial Sequence: Synthetic oligonucleotide
  Target: LAMA2; (+) strand; PAM type: NNAGAAW; PAM sequence: AGAGAAT
tgatatctgaatctccctga

SEQ ID NO: 14395 - DNA, 20 bp, Artificial Sequence
  Description of Artificial Sequence: Synthetic oligonucleotide
  Target: LAMA2; (+) strand; PAM type: NNAGAAW; PAM sequence: GGAGAAA
gaatttgccttagtagatat

SEQ ID NO: 14396 - DNA, 20 bp, Artificial Sequence
  Description of Artificial Sequence: Synthetic oligonucleotide
  Target: LAMA2; (+) strand; PAM type: NNAGAAW; PAM sequence: TAAGAAT
gtcgaatccatccagtaata

SEQ ID NO: 14397 - DNA, 20 bp, Artificial Sequence
  Description of Artificial Sequence: Synthetic oligonucleotide
  Target: LAMA2; (+) strand; PAM type: NNAGAAW; PAM sequence: GGAGAAA
agattagttcctaaatagca

SEQ ID NO: 14398 - DNA, 20 bp, Artificial Sequence
  Description of Artificial Sequence: Synthetic oligonucleotide
  Target: LAMA2; (+) strand; PAM type: NNAGAAW; PAM sequence: AGAGAAA
acacagtgctctgtaaaatc

SEQ ID NO: 14399 - DNA, 20 bp, Artificial Sequence
  Description of Artificial Sequence: Synthetic oligonucleotide
  Target: LAMA2; (+) strand; PAM type: NNAGAAW; PAM sequence: TTAGAAT
ccaagaccacttatattttg

SEQ ID NO: 14400 - DNA, 20 bp, Artificial Sequence
  Description of Artificial Sequence: Synthetic oligonucleotide
  Target: LAMA2; (+) strand; PAM type: NNAGAAW; PAM sequence: AAAGAAA
caaatatcagctaaacaaac

SEQ ID NO: 14401 - DNA, 20 bp, Artificial Sequence
  Description of Artificial Sequence: Synthetic oligonucleotide
  Target: LAMA2; (+) strand; PAM type: NNAGAAW; PAM sequence: TAAGAAT
tttgaatggtcagagaacta

SEQ ID NO: 14402 - DNA, 20 bp, Artificial Sequence
  Description of Artificial Sequence: Synthetic oligonucleotide
  Target: LAMA2; (+) strand; PAM type: NNAGAAW; PAM sequence: TGAGAAT
tggtcagagaactataagaa

SEQ ID NO: 14403 - DNA, 20 bp, Artificial Sequence
  Description of Artificial Sequence: Synthetic oligonucleotide
  Target: LAMA2; (+) strand; PAM type: NNAGAAW; PAM sequence: ACAGAAT
catttttaaaaatccaagta

SEQ ID NO: 14404 - DNA, 20 bp, Artificial Sequence
  Description of Artificial Sequence: Synthetic oligonucleotide
  Target: LAMA2; (+) strand; PAM type: NNAGAAW; PAM sequence: TCAGAAT
catacccagacattctcagt

SEQ ID NO: 14405 - DNA, 20 bp, Artificial Sequence
  Description of Artificial Sequence: Synthetic oligonucleotide
  Target: LAMA2; (+) strand; PAM type: NNAGAAW; PAM sequence: ACAGAAA
tcatagtgcctccttgacca

SEQ ID NO: 14406 - DNA, 20 bp, Artificial Sequence
  Description of Artificial Sequence: Synthetic oligonucleotide
  Target: LAMA2; (+) strand; PAM type: NNAGAAW; PAM sequence: AAAGAAA
acaacctagcaattgtttaa

SEQ ID NO: 14407 - DNA, 20 bp, Artificial Sequence
  Description of Artificial Sequence: Synthetic oligonucleotide
  Target: LAMA2; (+) strand; PAM type: NNAGAAW; PAM sequence: ACAGAAA
attgtttaaaaagaaaatgg

SEQ ID NO: 14408 - DNA, 20 bp, Artificial Sequence
  Description of Artificial Sequence: Synthetic oligonucleotide
  Target: LAMA2; (+) strand; PAM type: NNAGAAW; PAM sequence: CCAGAAT
ataatttttttcataaataa

SEQ ID NO: 14409 - DNA, 20 bp, Artificial Sequence
  Description of Artificial Sequence: Synthetic oligonucleotide
  Target: LAMA2; (+) strand; PAM type: NNAGAAW; PAM sequence: GCAGAAA
gtggcctaaagtacaagtaa

SEQ ID NO: 14410 - DNA, 20 bp, Artificial Sequence
  Description of Artificial Sequence: Synthetic oligonucleotide
  Target: LAMA2; (+) strand; PAM type: NNAGAAW; PAM sequence: AGAGAAT
tggacagatggagaagaggc

SEQ ID NO: 14411 - DNA, 20 bp, Artificial Sequence
  Description of Artificial Sequence: Synthetic oligonucleotide
  Target: LAMA2; (+) strand; PAM type: NNAGAAW; PAM sequence: TCAGAAT
gaggaaagggcaacgtatac

SEQ ID NO: 14412 - DNA, 20 bp, Artificial Sequence
  Description of Artificial Sequence: Synthetic oligonucleotide
  Target: LAMA2; (+) strand; PAM type: NNAGAAW; PAM sequence: TCAGAAA
tccctgaataatagcatcct

SEQ ID NO: 14413 - DNA, 20 bp, Artificial Sequence
  Description of Artificial Sequence: Synthetic oligonucleotide
  Target: LAMA2; (+) strand; PAM type: NNAGAAW; PAM sequence: AAAGAAA
gttgaaggaaaaatagaagg

SEQ ID NO: 14414 - DNA, 20 bp, Artificial Sequence
  Description of Artificial Sequence: Synthetic oligonucleotide
  Target: LAMA2; (+) strand; PAM type: NNAGAAW; PAM sequence: AAAGAAT
tagaaggaaagaaattttaa

SEQ ID NO: 14415 - DNA, 20 bp, Artificial Sequence
  Description of Artificial Sequence: Synthetic oligonucleotide
  Target: LAMA2; (+) strand; PAM type: NNAGAAW; PAM sequence: TAAGAAT
gatatcttaagcaatccttt

SEQ ID NO: 14416 - DNA, 20 bp, Artificial Sequence
  Description of Artificial Sequence: Synthetic oligonucleotide
  Target: LAMA2; (+) strand; PAM type: NNAGAAW; PAM sequence: AAAGAAA
aagactctaggtcaaaaaat

SEQ ID NO: 14417 - DNA, 20 bp, Artificial Sequence
  Description of Artificial Sequence: Synthetic oligonucleotide
  Target: LAMA2; (+) strand; PAM type: NNAGAAW; PAM sequence: ACAGAAT
aggtcaaaaaataaagaaag

SEQ ID NO: 14418 - DNA, 20 bp, Artificial Sequence
  Description of Artificial Sequence: Synthetic oligonucleotide
  Target: LAMA2; (+) strand; PAM type: NNAGAAW; PAM sequence: TTAGAAA
tcagagatacacaaaagagt

SEQ ID NO: 14419 - DNA, 20 bp, Artificial Sequence
  Description of Artificial Sequence: Synthetic oligonucleotide
  Target: LAMA2; (+) strand; PAM type: NNAGAAW; PAM sequence: GCAGAAT
gctattattattagccctca

SEQ ID NO: 14420 - DNA, 20 bp, Artificial Sequence
  Description of Artificial Sequence: Synthetic oligonucleotide
  Target: LAMA2; (+) strand; PAM type: NNAGAAW; PAM sequence: TAAGAAT
tatacaggtctgtggcctgt

SEQ ID NO: 14421 - DNA, 20 bp, Artificial Sequence
  Description of Artificial Sequence: Synthetic oligonucleotide
  Target: LAMA2; (+) strand; PAM type: NNAGAAW; PAM sequence: TGAGAAT
tctaggctgcacgctcctta

SEQ ID NO: 14422 - DNA, 20 bp, Artificial Sequence
  Description of Artificial Sequence: Synthetic oligonucleotide
  Target: LAMA2; (+) strand; PAM type: NNAGAAW; PAM sequence: CAAGAAA
ctttttagagaagccatatt

SEQ ID NO: 14423 - DNA, 20 bp, Artificial Sequence
  Description of Artificial Sequence: Synthetic oligonucleotide
  Target: LAMA2; (+) strand; PAM type: NNAGAAW; PAM sequence: TTAGAAA
tttcaaacgtatttattaat

SEQ ID NO: 14424 - DNA, 20 bp, Artificial Sequence
  Description of Artificial Sequence: Synthetic oligonucleotide
  Target: LAMA2; (+) strand; PAM type: NNAGAAW; PAM sequence: CTAGAAT
cttttttttctcctgccttt

SEQ ID NO: 14425 - DNA, 20 bp, Artificial Sequence
  Description of Artificial Sequence: Synthetic oligonucleotide
  Target: LAMA2; (+) strand; PAM type: NNAGAAW; PAM sequence: TGAGAAA
cctttctagaatccttttat

SEQ ID NO: 14426 - DNA, 20 bp, Artificial Sequence
  Description of Artificial Sequence: Synthetic oligonucleotide
  Target: LAMA2; (+) strand; PAM type: NNAGAAW; PAM sequence: GCAGAAT
atgtcagcacagagcaagca

SEQ ID NO: 14427 - DNA, 20 bp, Artificial Sequence
  Description of Artificial Sequence: Synthetic oligonucleotide
  Target: LAMA2; (+) strand; PAM type: NNAGAAW; PAM sequence: TCAGAAA
ctacaaggtgactgtcaatg

SEQ ID NO: 14428 - DNA, 20 bp, Artificial Sequence
  Description of Artificial Sequence: Synthetic oligonucleotide
  Target: LAMA2; (+) strand; PAM type: NNAGAAW; PAM sequence: TTAGAAA
catggggcttggcatgtata

SEQ ID NO: 14429 - DNA, 20 bp, Artificial Sequence
  Description of Artificial Sequence: Synthetic oligonucleotide
  Target: LAMA2; (+) strand; PAM type: NNAGAAW; PAM sequence: AAAGAAA
gggcttggcatgtatattag

SEQ ID NO: 14430 - DNA, 20 bp, Artificial Sequence
  Description of Artificial Sequence: Synthetic oligonucleotide
  Target: LAMA2; (+) strand; PAM type: NNAGAAW; PAM sequence: AAAGAAT
atggagggatgtctttgttg

SEQ ID NO: 14431 - DNA, 20 bp, Artificial Sequence
  Description of Artificial Sequence: Synthetic oligonucleotide
  Target: LAMA2; (+) strand; PAM type: NNAGAAW; PAM sequence: ACAGAAA
tgttgaaagaatccagactc

SEQ ID NO: 14432 - DNA, 20 bp, Artificial Sequence
  Description of Artificial Sequence: Synthetic oligonucleotide
  Target: LAMA2; (+) strand; PAM type: NNAGAAW; PAM sequence: TCAGAAT
gctatagttaaatcttgact

SEQ ID NO: 14433 - DNA, 20 bp, Artificial Sequence
  Description of Artificial Sequence: Synthetic oligonucleotide
  Target: LAMA2; (+) strand; PAM type: NNAGAAW; PAM sequence: TAAGAAA
cttcagaatcctgttttagg

SEQ ID NO: 14434 - DNA, 20 bp, Artificial Sequence
  Description of Artificial Sequence: Synthetic oligonucleotide
  Target: LAMA2; (+) strand; PAM type: NNAGAAW; PAM sequence: GGAGAAA
ttttaggtaagaaaggtaca

SEQ ID NO: 14435 - DNA, 20 bp, Artificial Sequence
  Description of Artificial Sequence: Synthetic oligonucleotide
  Target: LAMA2; (+) strand; PAM type: NNAGAAW; PAM sequence: TGAGAAT
tagatgccattgtcctattt

SEQ ID NO: 14436 - DNA, 20 bp, Artificial Sequence
  Description of Artificial Sequence: Synthetic oligonucleotide
  Target: LAMA2; (+) strand; PAM type: NNAGAAW; PAM sequence: TGAGAAT
ctattatggaggctgaggca

SEQ ID NO: 14437 - DNA, 20 bp, Artificial Sequence
  Description of Artificial Sequence: Synthetic oligonucleotide
  Target: LAMA2; (+) strand; PAM type: NNAGAAW; PAM sequence: GAAGAAT
ctaatgtattgttacttaaa

SEQ ID NO: 14438 - DNA, 20 bp, Artificial Sequence
  Description of Artificial Sequence: Synthetic oligonucleotide
  Target: LAMA2; (+) strand; PAM type: NNAGAAW; PAM sequence: GTAGAAA
tggcacacattttccagtcc

SEQ ID NO: 14439 - DNA, 20 bp, Artificial Sequence
  Description of Artificial Sequence: Synthetic oligonucleotide
  Target: LAMA2; (+) strand; PAM type: NNAGAAW; PAM sequence: GCAGAAT
acctttacagttttaaatat

SEQ ID NO: 14440 - DNA, 20 bp, Artificial Sequence
  Description of Artificial Sequence: Synthetic oligonucleotide
  Target: LAMA2; (+) strand; PAM type: NNAGAAW; PAM sequence: TGAGAAA
atcaataacgattcctatat

SEQ ID NO: 14441 - DNA, 20 bp, Artificial Sequence
  Description of Artificial Sequence: Synthetic oligonucleotide
  Target: LAMA2; (+) strand; PAM type: NNAGAAW; PAM sequence: TAAGAAA
taatagtatatagattgtaa

SEQ ID NO: 14442 - DNA, 20 bp, Artificial Sequence
  Description of Artificial Sequence: Synthetic oligonucleotide
  Target: LAMA2; (+) strand; PAM type: NNAGAAW; PAM sequence: AAAGAAT
acagccatatggtataaagg

SEQ ID NO: 14443 - DNA, 20 bp, Artificial Sequence
  Description of Artificial Sequence: Synthetic oligonucleotide
  Target: LAMA2; (+) strand; PAM type: NNAGAAW; PAM sequence: ATAGAAA
gaactttggagccaaactga

SEQ ID NO: 14444 - DNA, 20 bp, Artificial Sequence
  Description of Artificial Sequence: Synthetic oligonucleotide
  Target: LAMA2; (+) strand; PAM type: NNAGAAW; PAM sequence: ACAGAAT
aacaatgacatttttatctg

SEQ ID NO: 14445 - DNA, 20 bp, Artificial Sequence
  Description of Artificial Sequence: Synthetic oligonucleotide
  Target: LAMA2; (+) strand; PAM type: NNAGAAW; PAM sequence: GCAGAAT
atttcccaaaggagagaact

SEQ ID NO: 14446 - DNA, 20 bp, Artificial Sequence
  Description of Artificial Sequence: Synthetic oligonucleotide
  Target: LAMA2; (+) strand; PAM type: NNAGAAW; PAM sequence: AAAGAAA
tcatgatgtttaaacagtac

SEQ ID NO: 14447 - DNA, 20 bp, Artificial Sequence
  Description of Artificial Sequence: Synthetic oligonucleotide
  Target: LAMA2; (+) strand; PAM type: NNAGAAW; PAM sequence: CAAGAAT
aggagaactggactgcgggt

SEQ ID NO: 14448 - DNA, 20 bp, Artificial Sequence
  Description of Artificial Sequence: Synthetic oligonucleotide
  Target: LAMA2; (+) strand; PAM type: NNAGAAW; PAM sequence: CAAGAAT
ccagcttcaaaaagtcaccg

SEQ ID NO: 14449 - DNA, 20 bp, Artificial Sequence
  Description of Artificial Sequence: Synthetic oligonucleotide
  Target: LAMA2; (+) strand; PAM type: NNAGAAW; PAM sequence: AAAGAAA
attaagacttagagacctct

SEQ ID NO: 14450 - DNA, 20 bp, Artificial Sequence
  Description of Artificial Sequence: Synthetic oligonucleotide
  Target: LAMA2; (+) strand; PAM type: NNAGAAW; PAM sequence: CCAGAAT
gttcttactatcatttttat

SEQ ID NO: 14451 - DNA, 20 bp, Artificial Sequence
  Description of Artificial Sequence: Synthetic oligonucleotide
  Target: LAMA2; (+) strand; PAM type: NNAGAAW; PAM sequence: GTAGAAA
ctaggaagatgaaggcacaa

SEQ ID NO: 14452 - DNA, 20 bp, Artificial Sequence
  Description of Artificial Sequence: Synthetic oligonucleotide
  Target: LAMA2; (+) strand; PAM type: NNAGAAW; PAM sequence: TAAGAAT
aaaactcttcattcttcttt

SEQ ID NO: 14453 - DNA, 20 bp, Artificial Sequence
  Description of Artificial Sequence: Synthetic oligonucleotide
  Target: LAMA2; (+) strand; PAM type: NNAGAAW; PAM sequence: AGAGAAA
attcttcttttaagaatata

SEQ ID NO: 14454 - DNA, 20 bp, Artificial Sequence
  Description of Artificial Sequence: Synthetic oligonucleotide
  Target: LAMA2; (+) strand; PAM type: NNAGAAW; PAM sequence: CAAGAAA
aacatccttggtctttaaat

SEQ ID NO: 14455 - DNA, 20 bp, Artificial Sequence
  Description of Artificial Sequence: Synthetic oligonucleotide
  Target: LAMA2; (+) strand; PAM type: NNAGAAW; PAM sequence: GTAGAAA
ggtttagccaatgaaatgtg

SEQ ID NO: 14456 - DNA, 20 bp, Artificial Sequence
  Description of Artificial Sequence: Synthetic oligonucleotide
  Target: LAMA2; (+) strand; PAM type: NNAGAAW; PAM sequence: GTAGAAT
ctactcaggaggctgaggca

SEQ ID NO: 14457 - DNA, 20 bp, Artificial Sequence
  Description of Artificial Sequence: Synthetic oligonucleotide
  Target: LAMA2; (+) strand; PAM type: NNAGAAW; PAM sequence: ACAGAAT
agtattgcttgaaaataaat

SEQ ID NO: 14458 - DNA, 20 bp, Artificial Sequence
  Description of Artificial Sequence: Synthetic oligonucleotide
  Target: LAMA2; (+) strand; PAM type: NNAGAAW; PAM sequence: ACAGAAT
ttgggatcaaaaaagattat

SEQ ID NO: 14459 - DNA, 20 bp, Artificial Sequence
  Description of Artificial Sequence: Synthetic oligonucleotide
  Target: LAMA2; (+) strand; PAM type: NNAGAAW; PAM sequence: CTAGAAA
gaatttatataataaataat

SEQ ID NO: 14460 - DNA, 20 bp, Artificial Sequence
  Description of Artificial Sequence: Synthetic oligonucleotide
  Target: LAMA2; (+) strand; PAM type: NNAGAAW; PAM sequence: ATAGAAA
caaaggagtctttgataatc

SEQ ID NO: 14461 - DNA, 20 bp, Artificial Sequence
  Description of Artificial Sequence: Synthetic oligonucleotide
  Target: LAMA2; (+) strand; PAM type: NNAGAAW; PAM sequence: GCAGAAA
agttcctcttgtatacaatg

SEQ ID NO: 14462 - DNA, 20 bp, Artificial Sequence
  Description of Artificial Sequence: Synthetic oligonucleotide
  Target: LAMA2; (+) strand; PAM type: NNAGAAW; PAM sequence: ACAGAAA
tccagcctgtatcatagtac

SEQ ID NO: 14463 - DNA, 20 bp, Artificial Sequence
  Description of Artificial Sequence: Synthetic oligonucleotide
  Target: LAMA2; (+) strand; PAM type: NNAGAAW; PAM sequence: AAAGAAA
atgtgggattgaaaatgttt

SEQ ID NO: 14464 - DNA, 20 bp, Artificial Sequence
  Description of Artificial Sequence: Synthetic oligonucleotide
  Target: LAMA2; (+) strand; PAM type: NNAGAAW; PAM sequence: GTAGAAA
tatatatatatatatagtgg

SEQ ID NO: 14465 - DNA, 20 bp, Artificial Sequence
  Description of Artificial Sequence: Synthetic oligonucleotide
  Target: LAMA2; (+) strand; PAM type: NNAGAAW; PAM sequence: AGAGAAT
atgaatgcagcttgatatca

SEQ ID NO: 14466 - DNA, 20 bp, Artificial Sequence
  Description of Artificial Sequence: Synthetic oligonucleotide
  Target: LAMA2; (+) strand; PAM type: NNAGAAW; PAM sequence: TCAGAAT
gtgttgaagtttctcatagc

SEQ ID NO: 14467 - DNA, 20 bp, Artificial Sequence
  Description of Artificial Sequence: Synthetic oligonucleotide
  Target: LAMA2; (+) strand; PAM type: NNAGAAW; PAM sequence: TGAGAAA
ttttgcatgtcaattttata

SEQ ID NO: 14468 - DNA, 20 bp, Artificial Sequence
  Description of Artificial Sequence: Synthetic oligonucleotide
  Target: LAMA2; (+) strand; PAM type: NNAGAAW; PAM sequence: TCAGAAT
taattctgaaattaaaagga

SEQ ID NO: 14469 - DNA, 20 bp, Artificial Sequence
  Description of Artificial Sequence: Synthetic oligonucleotide
  Target: LAMA2; (+) strand; PAM type: NNAGAAW; PAM sequence: CCAGAAA
gttaaggagacttatcaggc

SEQ ID NO: 14470 - DNA, 20 bp, Artificial Sequence
  Description of Artificial Sequence: Synthetic oligonucleotide
  Target: LAMA2; (+) strand; PAM type: NNAGAAW; PAM sequence: GTAGAAA
ttatttatgatagctcgaag

SEQ ID NO: 14471 - DNA, 20 bp, Artificial Sequence
  Description of Artificial Sequence: Synthetic oligonucleotide
  Target: LAMA2; (+) strand; PAM type: NNAGAAW; PAM sequence: CTAGAAT
acatgctgcaatgaagttat

SEQ ID NO: 14472 - DNA, 20 bp, Artificial Sequence
  Description of Artificial Sequence: Synthetic oligonucleotide
  Target: LAMA2; (+) strand; PAM type: NNAGAAW; PAM sequence: AGAGAAT
ggttagaggaagaggggaaa

SEQ ID NO: 14473 - DNA, 20 bp, Artificial Sequence
  Description of Artificial Sequence: Synthetic oligonucleotide
  Target: LAMA2; (+) strand; PAM type: NNAGAAW; PAM sequence: TTAGAAT
ttttgggctgataaaatgtc

SEQ ID NO: 14474 - DNA, 20 bp, Artificial Sequence
  Description of Artificial Sequence: Synthetic oligonucleotide
  Target: LAMA2; (+) strand; PAM type: NNAGAAW; PAM sequence: ACAGAAT
cattgtaaatgtactaaatc

SEQ ID NO: 14475 - DNA, 20 bp, Artificial Sequence
  Description of Artificial Sequence: Synthetic oligonucleotide
  Target: LAMA2; (+) strand; PAM type: NNAGAAW; PAM sequence: CAAGAAA
aatttcatctaaactaatga

SEQ ID NO: 14476 - DNA, 20 bp, Artificial Sequence
  Description of Artificial Sequence: Synthetic oligonucleotide
  Target: LAMA2; (+) strand; PAM type: NNAGAAW; PAM sequence: AGAGAAT
gttgtccaagatgtgcccct

SEQ ID NO: 14477 - DNA, 20 bp, Artificial Sequence
  Description of Artificial Sequence: Synthetic oligonucleotide
  Target: LAMA2; (+) strand; PAM type: NNAGAAW; PAM sequence: TTAGAAA
gggtaaaagcaatgaaaatt

SEQ ID NO: 14478 - DNA, 20 bp, Artificial Sequence
  Description of Artificial Sequence: Synthetic oligonucleotide
  Target: LAMA2; (+) strand; PAM type: NNAGAAW; PAM sequence: TGAGAAA
caaaaatctaccatcactcc

SEQ ID NO: 14479 - DNA, 20 bp, Artificial Sequence
  Description of Artificial Sequence: Synthetic oligonucleotide
  Target: LAMA2; (+) strand; PAM type: NNAGAAW; PAM sequence: CGAGAAT
ctgaaaaatgcaggccatag

SEQ ID NO: 14480 - DNA, 20 bp, Artificial Sequence
  Description of Artificial Sequence: Synthetic oligonucleotide
  Target: LAMA2; (+) strand; PAM type: NNAGAAW; PAM sequence: GAAGAAA
tatattatctccattgtata

SEQ ID NO: 14481 - DNA, 20 bp, Artificial Sequence
  Description of Artificial Sequence: Synthetic oligonucleotide
  Target: LAMA2; (+) strand; PAM type: NNAGAAW; PAM sequence: CTAGAAA
atagaagaaaaaattgaggc

SEQ ID NO: 14482 - DNA, 20 bp, Artificial Sequence
  Description of Artificial Sequence: Synthetic oligonucleotide
  Target: LAMA2; (+) strand; PAM type: NNAGAAW; PAM sequence: AAAGAAT
aagaaaaaattgaggcctag

SEQ ID NO: 14483 - DNA, 20 bp, Artificial Sequence
  Description of Artificial Sequence: Synthetic oligonucleotide
  Target: LAMA2; (+) strand; PAM type: NNAGAAW; PAM sequence: TAAGAAA
tttaaaatgtgaatgcatag

SEQ ID NO: 14484 - DNA, 20 bp, Artificial Sequence
  Description of Artificial Sequence: Synthetic oligonucleotide
  Target: LAMA2; (+) strand; PAM type: NNAGAAW; PAM sequence: AAAGAAA
aatgtgaatgcatagtaaga

SEQ ID NO: 14485 - DNA, 20 bp, Artificial Sequence
  Description of Artificial Sequence: Synthetic oligonucleotide
  Target: LAMA2; (+) strand; PAM type: NNAGAAW; PAM sequence: TGAGAAA
agtcagtcaactgagcactt

SEQ ID NO: 14486 - DNA, 20 bp, Artificial Sequence
  Description of Artificial Sequence: Synthetic oligonucleotide
  Target: LAMA2; (+) strand; PAM type: NNAGAAW; PAM sequence: TAAGAAA
caaacaagcagatttatctc

SEQ ID NO: 14487 - DNA, 20 bp, Artificial Sequence
  Description of Artificial Sequence: Synthetic oligonucleotide
  Target: LAMA2; (+) strand; PAM type: NNAGAAW; PAM sequence: AAAGAAA
agcagatttatctctaagaa

SEQ ID NO: 14488 - DNA, 20 bp, Artificial Sequence
  Description of Artificial Sequence: Synthetic oligonucleotide
  Target: LAMA2; (+) strand; PAM type: NNAGAAW; PAM sequence: AAAGAAA
ctttccttgtttaagcacta

SEQ ID NO: 14489 - DNA, 20 bp, Artificial Sequence
  Description of Artificial Sequence: Synthetic oligonucleotide
  Target: LAMA2; (+) strand; PAM type: NNAGAAW; PAM sequence: CAAGAAT
cctcttgtgaagtaagcttg

SEQ ID NO: 14490 - DNA, 20 bp, Artificial Sequence
  Description of Artificial Sequence: Synthetic oligonucleotide
  Target: LAMA2; (+) strand; PAM type: NNAGAAW; PAM sequence: GCAGAAT
ctattgtatgctggatggta

SEQ ID NO: 14491 - DNA, 20 bp, Artificial Sequence
  Description of Artificial Sequence: Synthetic oligonucleotide
  Target: LAMA2; (+) strand; PAM type: NNAGAAW; PAM sequence: TAAGAAT
cttttcctctacttcatttc

SEQ ID NO: 14492 - DNA, 20 bp, Artificial Sequence
  Description of Artificial Sequence: Synthetic oligonucleotide
  Target: LAMA2; (+) strand; PAM type: NNAGAAW; PAM sequence: TCAGAAT
tcatctgaagcatataatct

SEQ ID NO: 14493 - DNA, 20 bp, Artificial Sequence
  Description of Artificial Sequence: Synthetic oligonucleotide
  Target: LAMA2; (+) strand; PAM type: NNAGAAW; PAM sequence: CAAGAAT
gcatataatcttcagaatgt

SEQ ID NO: 14494 - DNA, 20 bp, Artificial Sequence
  Description of Artificial Sequence: Synthetic oligonucleotide
  Target: LAMA2; (+) strand; PAM type: NNAGAAW; PAM sequence: ATAGAAA
tatggaaaaaataccttgat

SEQ ID NO: 14495 - DNA, 20 bp, Artificial Sequence
  Description of Artificial Sequence: Synthetic oligonucleotide
  Target: LAMA2; (+) strand; PAM type: NNAGAAW; PAM sequence: ACAGAAA
ttctgtgtattttcttttac

SEQ ID NO: 14496 - DNA, 20 bp, Artificial Sequence
  Description of Artificial Sequence: Synthetic oligonucleotide
  Target: LAMA2; (+) strand; PAM type: NNAGAAW; PAM sequence: ATAGAAA
actacctcattatgccattt

SEQ ID NO: 14497 - DNA, 20 bp, Artificial Sequence
  Description of Artificial Sequence: Synthetic oligonucleotide
  Target: LAMA2; (+) strand; PAM type: NNAGAAW; PAM sequence: CTAGAAA
ctgagctcagattcaccttt

SEQ ID NO: 14498 - DNA, 20 bp, Artificial Sequence
  Description of Artificial Sequence: Synthetic oligonucleotide
  Target: LAMA2; (+) strand; PAM type: NNAGAAW; PAM sequence: AGAGAAA
ttccaaaattcatgtagatg

SEQ ID NO: 14499 - DNA, 20 bp, Artificial Sequence
  Description of Artificial Sequence: Synthetic oligonucleotide
  Target: LAMA2; (+) strand; PAM type: NNAGAAW; PAM sequence: GGAGAAA
gatgcaaagtgtcctggagt

SEQ ID NO: 14500 - DNA, 20 bp, Artificial Sequence
  Description of Artificial Sequence: Synthetic oligonucleotide
  Target: LAMA2; (+) strand; PAM type: NNAGAAW; PAM sequence: ATAGAAT
aaaataatattaaccacctc

SEQ ID NO: 14501 - DNA, 20 bp, Artificial Sequence
  Description of Artificial Sequence: Synthetic oligonucleotide
  Target: LAMA2; (+) strand; PAM type: NNAGAAW; PAM sequence: CCAGAAA
gtggtggcattaacgatatg

SEQ ID NO: 14502 - DNA, 20 bp, Artificial Sequence
  Description of Artificial Sequence: Synthetic oligonucleotide
  Target: LAMA2; (+) strand; PAM type: NNAGAAW; PAM sequence: ATAGAAA
aacgatatgccagaaagcaa

SEQ ID NO: 14503 - DNA, 20 bp, Artificial Sequence
  Description of Artificial Sequence: Synthetic oligonucleotide
  Target: LAMA2; (+) strand; PAM type: NNAGAAW; PAM sequence: TTAGAAA
tgcaagtggttgtatgaagg

SEQ ID NO: 14504 - DNA, 20 bp, Artificial Sequence
  Description of Artificial Sequence: Synthetic oligonucleotide
  Target: LAMA2; (+) strand; PAM type: NNAGAAW; PAM sequence: GAAGAAT
tgacagctaaatcgagtgtt

SEQ ID NO: 14505 - DNA, 20 bp, Artificial Sequence
  Description of Artificial Sequence: Synthetic oligonucleotide
  Target: LAMA2; (+) strand; PAM type: NNAGAAW; PAM sequence: TAAGAAA
gaggagatttgcacatatga

SEQ ID NO: 14506 - DNA, 20 bp, Artificial Sequence
  Description of Artificial Sequence: Synthetic oligonucleotide
  Target: LAMA2; (+) strand; PAM type: NNAGAAW; PAM sequence: GAAGAAT
aggcattatggctacagtag

SEQ ID NO: 14507 - DNA, 20 bp, Artificial Sequence
  Description of Artificial Sequence: Synthetic oligonucleotide
  Target: LAMA2; (+) strand; PAM type: NNAGAAW; PAM sequence: AAAGAAA
tgtatgtcaggggagagatt

SEQ ID NO: 14508 - DNA, 20 bp, Artificial Sequence
  Description of Artificial Sequence: Synthetic oligonucleotide
  Target: LAMA2; (+) strand; PAM type: NNAGAAW; PAM sequence: TAAGAAT
gattaaagaaataaagagtt

SEQ ID NO: 14509 - DNA, 20 bp, Artificial Sequence
  Description of Artificial Sequence: Synthetic oligonucleotide
  Target: LAMA2; (+) strand; PAM type: NNAGAAW; PAM sequence: TTAGAAA
catggaatccatagtccagt

SEQ ID NO: 14510 - DNA, 20 bp, Artificial Sequence
  Description of Artificial Sequence: Synthetic oligonucleotide
  Target: LAMA2; (+) strand; PAM type: NNAGAAW; PAM sequence: GGAGAAA
gaactgaataaaattaccca

SEQ ID NO: 14511 - DNA, 20 bp, Artificial Sequence
  Description of Artificial Sequence: Synthetic oligonucleotide
  Target: LAMA2; (+) strand; PAM type: NNAGAAW; PAM sequence: AGAGAAA
gtgcaattgatttaaaaaag

SEQ ID NO: 14512 - DNA, 20 bp, Artificial Sequence
  Description of Artificial Sequence: Synthetic oligonucleotide
  Target: LAMA2; (+) strand; PAM type: NNAGAAW; PAM sequence: AAAGAAA
gtcaaagcagaggagacagc

SEQ ID NO: 14513 - DNA, 20 bp, Artificial Sequence
  Description of Artificial Sequence: Synthetic oligonucleotide
  Target: LAMA2; (+) strand; PAM type: NNAGAAW; PAM sequence: CTAGAAA
ggagacagcaaagaaatatg

SEQ ID NO: 14514 - DNA, 20 bp, Artificial Sequence
  Description of Artificial Sequence: Synthetic oligonucleotide
  Target: LAMA2; (+) strand; PAM type: NNAGAAW; PAM sequence: TGAGAAA
gaagtgtgatgtcatgaagt

SEQ ID NO: 14515 - DNA, 20 bp, Artificial Sequence
  Description of Artificial Sequence: Synthetic oligonucleotide
  Target: LAMA2; (+) strand; PAM type: NNAGAAW; PAM sequence: AAAGAAA
gtgatgtcatgaagttgaga

SEQ ID NO: 14516 - DNA, 20 bp, Artificial Sequence
  Description of Artificial Sequence: Synthetic oligonucleotide
  Target: LAMA2; (+) strand; PAM type: NNAGAAW; PAM sequence: GCAGAAT
aggttggataaaatgcaatt

SEQ ID NO: 14517 - DNA, 20 bp, Artificial Sequence
  Description of Artificial Sequence: Synthetic oligonucleotide
  Target: LAMA2; (+) strand; PAM type: NNAGAAW; PAM sequence: TTAGAAT
aggtggtgacacaaaacaga

SEQ ID NO: 14518 - DNA, 20 bp, Artificial Sequence
  Description of Artificial Sequence: Synthetic oligonucleotide
  Target: LAMA2; (+) strand; PAM type: NNAGAAW; PAM sequence: AAAGAAA
gttaagagtagtgttactga

SEQ ID NO: 14519 - DNA, 20 bp, Artificial Sequence
  Description of Artificial Sequence: Synthetic oligonucleotide
  Target: LAMA2; (+) strand; PAM type: NNAGAAW; PAM sequence: CTAGAAA
gaaaagaaaaacatagatga

SEQ ID NO: 14520 - DNA, 20 bp, Artificial Sequence
  Description of Artificial Sequence: Synthetic oligonucleotide
  Target: LAMA2; (+) strand; PAM type: NNAGAAW; PAM sequence: GAAGAAA
tgtaaggagttgggaagttt

SEQ ID NO: 14521 - DNA, 20 bp, Artificial Sequence
  Description of Artificial Sequence: Synthetic oligonucleotide
  Target: LAMA2; (+) strand; PAM type: NNAGAAW; PAM sequence: GGAGAAA
ggaggcaaaaaatgtaatgg

SEQ ID NO: 14522 - DNA, 20 bp, Artificial Sequence
  Description of Artificial Sequence: Synthetic oligonucleotide
  Target: LAMA2; (+) strand; PAM type: NNAGAAW; PAM sequence: GGAGAAA
aatgggaagggatttaattg

SEQ ID NO: 14523 - DNA, 20 bp, Artificial Sequence
  Description of Artificial Sequence: Synthetic oligonucleotide
  Target: LAMA2; (+) strand; PAM type: NNAGAAW; PAM sequence: ATAGAAA
agaaatggaaacggaacagg

SEQ ID NO: 14524 - DNA, 20 bp, Artificial Sequence
  Description of Artificial Sequence: Synthetic oligonucleotide
  Target: LAMA2; (+) strand; PAM type: NNAGAAW; PAM sequence: GGAGAAA
ctaggggaaggatagcatta

SEQ ID NO: 14525 - DNA, 20 bp, Artificial Sequence
  Description of Artificial Sequence: Synthetic oligonucleotide
  Target: LAMA2; (+) strand; PAM type: NNAGAAW; PAM sequence: CCAGAAA
atgatgttgtactcgaccat

SEQ ID NO: 14526 - DNA, 20 bp, Artificial Sequence
  Description of Artificial Sequence: Synthetic oligonucleotide
  Target: LAMA2; (+) strand; PAM type: NNAGAAW; PAM sequence: TCAGAAT
actaaaataccctgttttaa

SEQ ID NO: 14527 - DNA, 20 bp, Artificial Sequence
  Description of Artificial Sequence: Synthetic oligonucleotide
  Target: LAMA2; (+) strand; PAM type: NNAGAAW; PAM sequence: GAAGAAT
aaaatacaagcaaagttaca

SEQ ID NO: 14528 - DNA, 20 bp, Artificial Sequence
  Description of Artificial Sequence: Synthetic oligonucleotide
  Target: LAMA2; (+) strand; PAM type: NNAGAAW; PAM sequence: CAAGAAT
aatgccataaaataagctat

SEQ ID NO: 14529 - DNA, 20 bp, Artificial Sequence
  Description of Artificial Sequence: Synthetic oligonucleotide
  Target: LAMA2; (+) strand; PAM type: NNAGAAW; PAM sequence: TGAGAAA
aaaataagctatcaagaatg

SEQ ID NO: 14530 - DNA, 20 bp, Artificial Sequence
  Description of Artificial Sequence: Synthetic oligonucleotide
  Target: LAMA2; (+) strand; PAM type: NNAGAAW; PAM sequence: TGAGAAA
ataaactttttgtgtaaatt

SEQ ID NO: 14531 - DNA, 20 bp, Artificial Sequence
  Description of Artificial Sequence: Synthetic oligonucleotide
  Target: LAMA2; (+) strand; PAM type: NNAGAAW; PAM sequence: GTAGAAA
aatacatgaattatatatgt

SEQ ID NO: 14532 - DNA, 20 bp, Artificial Sequence
  Description of Artificial Sequence: Synthetic oligonucleotide
  Target: LAMA2; (+) strand; PAM type: NNAGAAW; PAM sequence: AGAGAAT
tgggcaagtgaacacattcc

SEQ ID NO: 14533 - DNA, 20 bp, Artificial Sequence
  Description of Artificial Sequence: Synthetic oligonucleotide
  Target: LAMA2; (+) strand; PAM type: NNAGAAW; PAM sequence: GAAGAAA
tgctttattttaccatttca

SEQ ID NO: 14534 - DNA, 20 bp, Artificial Sequence
  Description of Artificial Sequence: Synthetic oligonucleotide
  Target: LAMA2; (+) strand; PAM type: NNAGAAW; PAM sequence: TCAGAAA
ctacctgttattttctgtta

SEQ ID NO: 14535 - DNA, 20 bp, Artificial Sequence
  Description of Artificial Sequence: Synthetic oligonucleotide
  Target: LAMA2; (+) strand; PAM type: NNAGAAW; PAM sequence: GGAGAAT
agtcctgtgatgacgtcact

SEQ ID NO: 14536 - DNA, 20 bp, Artificial Sequence
  Description of Artificial Sequence: Synthetic oligonucleotide
  Target: LAMA2; (+) strand; PAM type: NNAGAAW; PAM sequence: TGAGAAT
gtattgaactgaattggaac

SEQ ID NO: 14537 - DNA, 20 bp, Artificial Sequence
  Description of Artificial Sequence: Synthetic oligonucleotide
  Target: LAMA2; (+) strand; PAM type: NNAGAAW; PAM sequence: CAAGAAT
agtgtttattcatattaaat

SEQ ID NO: 14538 - DNA, 20 bp, Artificial Sequence
  Description of Artificial Sequence: Synthetic oligonucleotide
  Target: LAMA2; (+) strand; PAM type: NNAGAAW; PAM sequence: TTAGAAT
atattaaatcaagaattaaa

SEQ ID NO: 14539 - DNA, 20 bp, Artificial Sequence
  Description of Artificial Sequence: Synthetic oligonucleotide
  Target: LAMA2; (+) strand; PAM type: NNAGAAW; PAM sequence: ATAGAAA
aagtacagtgtacttttaaa

SEQ ID NO: 14540 - DNA, 20 bp, Artificial Sequence
  Description of Artificial Sequence: Synthetic oligonucleotide
  Target: LAMA2; (+) strand; PAM type: NNAGAAW; PAM sequence: CCAGAAA
caattaagtctaagctttaa

SEQ ID NO: 14541 - DNA, 20 bp, Artificial Sequence
  Description of Artificial Sequence: Synthetic oligonucleotide
  Target: LAMA2; (+) strand; PAM type: NNAGAAW; PAM sequence: TAAGAAA
caaagcactttccatcctgc

SEQ ID NO: 14542 - DNA, 20 bp, Artificial Sequence
  Description of Artificial Sequence: Synthetic oligonucleotide
  Target: LAMA2; (+) strand; PAM type: NNAGAAW; PAM sequence: GGAGAAT
tgctaagaaaccttaggatt

SEQ ID NO: 14543 - DNA, 20 bp, Artificial Sequence
  Description of Artificial Sequence: Synthetic oligonucleotide
  Target: LAMA2; (+) strand; PAM type: NNAGAAW; PAM sequence: GCAGAAA
cttctcctttcattagtctt

SEQ ID NO: 14544 - DNA, 20 bp, Artificial Sequence
  Description of Artificial Sequence: Synthetic oligonucleotide
  Target: LAMA2; (+) strand; PAM type: NNAGAAW; PAM sequence: GAAGAAT
tattatactctcatttccct

SEQ ID NO: 14545 - DNA, 20 bp, Artificial Sequence
  Description of Artificial Sequence: Synthetic oligonucleotide
  Target: LAMA2; (+) strand; PAM type: NNAGAAW; PAM sequence: ATAGAAA
ttgaaatgacatttttatga

SEQ ID NO: 14546 - DNA, 20 bp, Artificial Sequence
  Description of Artificial Sequence: Synthetic oligonucleotide
  Target: LAMA2; (+) strand; PAM type: NNAGAAW; PAM sequence: ACAGAAT
tggacatcttgatgataaag

SEQ ID NO: 14547 - DNA, 20 bp, Artificial Sequence
  Description of Artificial Sequence: Synthetic oligonucleotide
  Target: LAMA2; (+) strand; PAM type: NNAGAAW; PAM sequence: GGAGAAT
tctgatacaatacacaaaga

SEQ ID NO: 14548 - DNA, 20 bp, Artificial Sequence
  Description of Artificial Sequence: Synthetic oligonucleotide
  Target: LAMA2; (+) strand; PAM type: NNAGAAW; PAM sequence: TTAGAAA
ttatttgatgaaacgtgaca

SEQ ID NO: 14549 - DNA, 20 bp, Artificial Sequence
  Description of Artificial Sequence: Synthetic oligonucleotide
  Target: LAMA2; (+) strand; PAM type: NNAGAAW; PAM sequence: TTAGAAA
gcaagattttcagttgaatg

SEQ ID NO: 14550 - DNA, 20 bp, Artificial Sequence
  Description of Artificial Sequence: Synthetic oligonucleotide
  Target: LAMA2; (+) strand; PAM type: NNAGAAW; PAM sequence: TGAGAAA
agttttgttaaaaataaatt

SEQ ID NO: 14551 - DNA, 20 bp, Artificial Sequence
  Description of Artificial Sequence: Synthetic oligonucleotide
  Target: LAMA2; (+) strand; PAM type: NNAGAAW; PAM sequence: AAAGAAT
ttgttaaaaataaatttgag

SEQ ID NO: 14552 - DNA, 20 bp, Artificial Sequence
  Description of Artificial Sequence: Synthetic oligonucleotide
  Target: LAMA2; (+) strand; PAM type: NNAGAAW; PAM sequence: AGAGAAA
gaaagaattttaaataactt

SEQ ID NO: 14553 - DNA, 20 bp, Artificial Sequence
  Description of Artificial Sequence: Synthetic oligonucleotide
  Target: LAMA2; (+) strand; PAM type: NNAGAAW; PAM sequence: ACAGAAA
ttcaaatatcaccagttact

SEQ ID NO: 14554 - DNA, 20 bp, Artificial Sequence
  Description of Artificial Sequence: Synthetic oligonucleotide
  Target: LAMA2; (+) strand; PAM type: NNAGAAW; PAM sequence: CTAGAAT
gctgaacaattgatttttac

SEQ ID NO: 14555 - DNA, 20 bp, Artificial Sequence
  Description of Artificial Sequence: Synthetic oligonucleotide
  Target: LAMA2; (+) strand; PAM type: NNAGAAW; PAM sequence: AAAGAAA
tgtattttcttaaggaaaat

SEQ ID NO: 14556 - DNA, 20 bp, Artificial Sequence
  Description of Artificial Sequence: Synthetic oligonucleotide
  Target: LAMA2; (+) strand; PAM type: NNAGAAW; PAM sequence: TAAGAAT
tttaaaactatgaggatttc

SEQ ID NO: 14557 - DNA, 20 bp, Artificial Sequence
  Description of Artificial Sequence: Synthetic oligonucleotide
  Target: LAMA2; (+) strand; PAM type: NNAGAAW; PAM sequence: ATAGAAT
tttctaagagtagaactcaa

SEQ ID NO: 14558 - DNA, 20 bp, Artificial Sequence
  Description of Artificial Sequence: Synthetic oligonucleotide
  Target: LAMA2; (+) strand; PAM type: NNAGAAW; PAM sequence: TTAGAAA
acccattctatcccttcttt

SEQ ID NO: 14559 - DNA, 20 bp, Artificial Sequence
  Description of Artificial Sequence: Synthetic oligonucleotide
  Target: LAMA2; (+) strand; PAM type: NNAGAAW; PAM sequence: CAAGAAA
tttaaaaaaacaaacaacaa

SEQ ID NO: 14560 - DNA, 20 bp, Artificial Sequence
  Description of Artificial Sequence: Synthetic oligonucleotide
  Target: LAMA2; (+) strand; PAM type: NNAGAAW; PAM sequence: CCAGAAT
gtcatacttcaaactcttac

SEQ ID NO: 14561 - DNA, 20 bp, Artificial Sequence
  Description of Artificial Sequence: Synthetic oligonucleotide
  Target: LAMA2; (+) strand; PAM type: NNAGAAW; PAM sequence: TCAGAAT
ctcccaatgaccttctttac

SEQ ID NO: 14562 - DNA, 20 bp, Artificial Sequence
  Description of Artificial Sequence: Synthetic oligonucleotide
  Target: LAMA2; (+) strand; PAM type: NNAGAAW; PAM sequence: AGAGAAA
tactcattgtttggaaaaga

SEQ ID NO: 14563 - DNA, 20 bp, Artificial Sequence
  Description of Artificial Sequence: Synthetic oligonucleotide
  Target: LAMA2; (+) strand; PAM type: NNAGAAW; PAM sequence: TAAGAAA
attatcctcattgtatagat

SEQ ID NO: 14564 - DNA, 20 bp, Artificial Sequence
  Description of Artificial Sequence: Synthetic oligonucleotide
  Target: LAMA2; (+) strand; PAM type: NNAGAAW; PAM sequence: GTAGAAA
ttaagaaatgaaggccatta

SEQ ID NO: 14565 - DNA, 20 bp, Artificial Sequence
  Description of Artificial Sequence: Synthetic oligonucleotide
  Target: LAMA2; (+) strand; PAM type: NNAGAAW; PAM sequence: TGAGAAA
caatttatctagcaaggttt

SEQ ID NO: 14566 - DNA, 20 bp, Artificial Sequence
  Description of Artificial Sequence: Synthetic oligonucleotide
  Target: LAMA2; (+) strand; PAM type: NNAGAAW; PAM sequence: AGAGAAA
gagaagaggaagaaggcaag

SEQ ID NO: 14567 - DNA, 20 bp, Artificial Sequence
  Description of Artificial Sequence: Synthetic oligonucleotide
  Target: LAMA2; (+) strand; PAM type: NNAGAAW; PAM sequence: TTAGAAT
gaattccagctgaatacata

SEQ ID NO: 14568 - DNA, 20 bp, Artificial Sequence
  Description of Artificial Sequence: Synthetic oligonucleotide
  Target: LAMA2; (+) strand; PAM type: NNAGAAW; PAM sequence: AAAGAAA
ttctaattgttgttcctgaa

SEQ ID NO: 14569 - DNA, 20 bp, Artificial Sequence
  Description of Artificial Sequence: Synthetic oligonucleotide
  Target: LAMA2; (+) strand; PAM type: NNAGAAW; PAM sequence: AAAGAAA
aattgttgttcctgaaaaag

SEQ ID NO: 14570 - DNA, 20 bp, Artificial Sequence
  Description of Artificial Sequence: Synthetic oligonucleotide
  Target: LAMA2; (+) strand; PAM type: NNAGAAW; PAM sequence: GTAGAAT
taataattttacttctagca

SEQ ID NO: 14571 - DNA, 20 bp, Artificial Sequence
  Description of Artificial Sequence: Synthetic oligonucleotide
  Target: LAMA2; (+) strand; PAM type: NNAGAAW; PAM sequence: CTAGAAT
ttctagcagtagaattggga

SEQ ID NO: 14572 - DNA, 20 bp, Artificial Sequence
  Description of Artificial Sequence: Synthetic oligonucleotide
  Target: LAMA2; (+) strand; PAM type: NNAGAAW; PAM sequence: GTAGAAA
tcaatgtggtattttaacaa

SEQ ID NO: 14573 - DNA, 20 bp, Artificial Sequence
  Description of Artificial Sequence: Synthetic oligonucleotide
  Target: LAMA2; (+) strand; PAM type: NNAGAAW; PAM sequence: CTAGAAA
caattttacatttaaaacaa

SEQ ID NO: 14574 - DNA, 20 bp, Artificial Sequence
  Description of Artificial Sequence: Synthetic oligonucleotide
  Target: LAMA2; (+) strand; PAM type: NNAGAAW; PAM sequence: TGAGAAA
gtttagttgcacaactgtga

SEQ ID NO: 14575 - DNA, 20 bp, Artificial Sequence
  Description of Artificial Sequence: Synthetic oligonucleotide
  Target: LAMA2; (+) strand; PAM type: NNAGAAW; PAM sequence: CTAGAAA
cattactgttataatgtgag

SEQ ID NO: 14576 - DNA, 20 bp, Artificial Sequence
  Description of Artificial Sequence: Synthetic oligonucleotide
  Target: LAMA2; (+) strand; PAM type: NNAGAAW; PAM sequence: AGAGAAA
ttaatttccacaggttattc

SEQ ID NO: 14577 - DNA, 20 bp, Artificial Sequence
  Description of Artificial Sequence: Synthetic oligonucleotide
  Target: LAMA2; (+) strand; PAM type: NNAGAAW; PAM sequence: AAAGAAT
tgctgaaatttaagtttttg

SEQ ID NO: 14578 - DNA, 20 bp, Artificial Sequence
  Description of Artificial Sequence: Synthetic oligonucleotide
  Target: LAMA2; (+) strand; PAM type: NNAGAAW; PAM sequence: AGAGAAA
cacgttgttaaaattaatat

SEQ ID NO: 14579 - DNA, 20 bp, Artificial Sequence
  Description of Artificial Sequence: Synthetic oligonucleotide
  Target: LAMA2; (+) strand; PAM type: NNAGAAW; PAM sequence: CTAGAAA
aatcaattcagccatattct

SEQ ID NO: 14580 - DNA, 20 bp, Artificial Sequence
  Description of Artificial Sequence: Synthetic oligonucleotide
  Target: LAMA2; (+) strand; PAM type: NNAGAAW; PAM sequence: TGAGAAT
agccatattctctagaaaat

SEQ ID NO: 14581 - DNA, 20 bp, Artificial Sequence
  Description of Artificial Sequence: Synthetic oligonucleotide
  Target: LAMA2; (+) strand; PAM type: NNAGAAW; PAM sequence: AGAGAAA
aaaggaaaaaactaaagttc

SEQ ID NO: 14582 - DNA, 20 bp, Artificial Sequence
  Description of Artificial Sequence: Synthetic oligonucleotide
  Target: LAMA2; (+) strand; PAM type: NNAGAAW; PAM sequence: ATAGAAA
cttccaatggggctacagta

SEQ ID NO: 14583 - DNA, 20 bp, Artificial Sequence
  Description of Artificial Sequence: Synthetic oligonucleotide
  Target: LAMA2; (+) strand; PAM type: NNAGAAW; PAM sequence: ACAGAAA
ctacagtaatagaaacaatt

SEQ ID NO: 14584 - DNA, 20 bp, Artificial Sequence
  Description of Artificial Sequence: Synthetic oligonucleotide
  Target: LAMA2; (+) strand; PAM type: NNAGAAW; PAM sequence: ATAGAAT
aaagaagcaaaaaaaaatca

SEQ ID NO: 14585 - DNA, 20 bp, Artificial Sequence
  Description of Artificial Sequence: Synthetic oligonucleotide
  Target: LAMA2; (+) strand; PAM type: NNAGAAW; PAM sequence: TGAGAAA
tataagggactagagcagga

SEQ ID NO: 14586 - DNA, 20 bp, Artificial Sequence
  Description of Artificial Sequence: Synthetic oligonucleotide
  Target: LAMA2; (+) strand; PAM type: NNAGAAW; PAM sequence: GCAGAAT
caatcatattattccatttt

SEQ ID NO: 14587 - DNA, 20 bp, Artificial Sequence
  Description of Artificial Sequence: Synthetic oligonucleotide
  Target: LAMA2; (+) strand; PAM type: NNAGAAW; PAM sequence: AGAGAAA
gcagaatgggaaacaggttt

SEQ ID NO: 14588 - DNA, 20 bp, Artificial Sequence
  Description of Artificial Sequence: Synthetic oligonucleotide
  Target: LAMA2; (+) strand; PAM type: NNAGAAW; PAM sequence: TTAGAAA
tatatcgttcaaagacatac

SEQ ID NO: 14589 - DNA, 20 bp, Artificial Sequence
  Description of Artificial Sequence: Synthetic oligonucleotide
  Target: LAMA2; (+) strand; PAM type: NNAGAAW; PAM sequence: TAAGAAA
gaaaataaatcaagtctaat

SEQ ID NO: 14590 - DNA, 20 bp, Artificial Sequence
  Description of Artificial Sequence: Synthetic oligonucleotide
  Target: LAMA2; (+) strand; PAM type: NNAGAAW; PAM sequence: AAAGAAA
catagtacttaaaggtaatt

SEQ ID NO: 14591 - DNA, 20 bp, Artificial Sequence
  Description of Artificial Sequence: Synthetic oligonucleotide
  Target: LAMA2; (+) strand; PAM type: NNAGAAW; PAM sequence: TGAGAAT
tgtttgcttaatgattctcc

SEQ ID NO: 14592 - DNA, 20 bp, Artificial Sequence
  Description of Artificial Sequence: Synthetic oligonucleotide
  Target: LAMA2; (+) strand; PAM type: NNAGAAW; PAM sequence: GAAGAAA
ggagagatcattgaactgaa

SEQ ID NO: 14593 - DNA, 20 bp, Artificial Sequence
  Description of Artificial Sequence: Synthetic oligonucleotide
  Target: LAMA2; (+) strand; PAM type: NNAGAAW; PAM sequence: TTAGAAA
tgaactgaagaagaaaatac

SEQ ID NO: 14594 - DNA, 20 bp, Artificial Sequence
  Description of Artificial Sequence: Synthetic oligonucleotide
  Target: LAMA2; (+) strand; PAM type: NNAGAAW; PAM sequence: TCAGAAA
gaagaaaatacttagaaact

SEQ ID NO: 14595 - DNA, 20 bp, Artificial Sequence
  Description of Artificial Sequence: Synthetic oligonucleotide
  Target: LAMA2; (+) strand; PAM type: NNAGAAW; PAM sequence: ATAGAAT
taatgcacatattttgacag

SEQ ID NO: 14596 - DNA, 20 bp, Artificial Sequence
  Description of Artificial Sequence: Synthetic oligonucleotide
  Target: LAMA2; (+) strand; PAM type: NNAGAAW; PAM sequence: AAAGAAT
atcttcagtttatgttgttg

SEQ ID NO: 14597 - DNA, 20 bp, Artificial Sequence
  Description of Artificial Sequence: Synthetic oligonucleotide
  Target: LAMA2; (+) strand; PAM type: NNAGAAW; PAM sequence: TGAGAAA
acaaatacagatatatttta

SEQ ID NO: 14598 - DNA, 20 bp, Artificial Sequence
  Description of Artificial Sequence: Synthetic oligonucleotide
  Target: LAMA2; (+) strand; PAM type: NNAGAAW; PAM sequence: CTAGAAA
tatgtcgagtatctatatta

SEQ ID NO: 14599 - DNA, 20 bp, Artificial Sequence
  Description of Artificial Sequence: Synthetic oligonucleotide
  Target: LAMA2; (+) strand; PAM type: NNAGAAW; PAM sequence: AGAGAAT
gacaattggttataggaaga

SEQ ID NO: 14600 - DNA, 20 bp, Artificial Sequence
  Description of Artificial Sequence: Synthetic oligonucleotide
  Target: LAMA2; (+) strand; PAM type: NNAGAAW; PAM sequence: TAAGAAT
ggaagaagagaatatcacat

SEQ ID NO: 14601 - DNA, 20 bp, Artificial Sequence
  Description of Artificial Sequence: Synthetic oligonucleotide
  Target: LAMA2; (+) strand; PAM type: NNAGAAW; PAM sequence: TAAGAAA
attttgtatatgaccttggt

SEQ ID NO: 14602 - DNA, 20 bp, Artificial Sequence
  Description of Artificial Sequence: Synthetic oligonucleotide
  Target: LAMA2; (+) strand; PAM type: NNAGAAW; PAM sequence: TAAGAAT
aactgacatgtgagtgtatt

SEQ ID NO: 14603 - DNA, 20 bp, Artificial Sequence
  Description of Artificial Sequence: Synthetic oligonucleotide
  Target: LAMA2; (+) strand; PAM type: NNAGAAW; PAM sequence: CTAGAAT
ctactcaggaggctgagaca

SEQ ID NO: 14604 - DNA, 20 bp, Artificial Sequence
  Description of Artificial Sequence: Synthetic oligonucleotide
  Target: LAMA2; (+) strand; PAM type: NNAGAAW; PAM sequence: ACAGAAT
cagtagatgatgagatagtt

SEQ ID NO: 14605 - DNA, 20 bp, Artificial Sequence
  Description of Artificial Sequence: Synthetic oligonucleotide
  Target: LAMA2; (+) strand; PAM type: NNAGAAW; PAM sequence: CAAGAAA
cagtgcaatcacaatcccgt

SEQ ID NO: 14606 - DNA, 20 bp, Artificial Sequence
  Description of Artificial Sequence: Synthetic oligonucleotide
  Target: LAMA2; (+) strand; PAM type: NNAGAAW; PAM sequence: AGAGAAA
gaactaccctgagttaagcc

SEQ ID NO: 14607 - DNA, 20 bp, Artificial Sequence
  Description of Artificial Sequence: Synthetic oligonucleotide
  Target: LAMA2; (+) strand; PAM type: NNAGAAW; PAM sequence: TCAGAAA
ttaagccagagaaatactat

SEQ ID NO: 14608 - DNA, 20 bp, Artificial Sequence
  Description of Artificial Sequence: Synthetic oligonucleotide
  Target: LAMA2; (+) strand; PAM type: NNAGAAW; PAM sequence: TAAGAAA
gatctgatctgcaccaaagt

SEQ ID NO: 14609 - DNA, 20 bp, Artificial Sequence
  Description of Artificial Sequence: Synthetic oligonucleotide
  Target: LAMA2; (+) strand; PAM type: NNAGAAW; PAM sequence: ATAGAAA
gaattgccctgtcatatata

SEQ ID NO: 14610 - DNA, 20 bp, Artificial Sequence
  Description of Artificial Sequence: Synthetic oligonucleotide
  Target: LAMA2; (+) strand; PAM type: NNAGAAW; PAM sequence: AGAGAAA
tacttagggaaaacataata

SEQ ID NO: 14611 - DNA, 20 bp, Artificial Sequence
  Description of Artificial Sequence: Synthetic oligonucleotide
  Target: LAMA2; (+) strand; PAM type: NNAGAAW; PAM sequence: ACAGAAT
acggtagcgcaacagacctt

SEQ ID NO: 14612 - DNA, 20 bp, Artificial Sequence
  Description of Artificial Sequence: Synthetic oligonucleotide
  Target: LAMA2; (+) strand; PAM type: NNAGAAW; PAM sequence: TTAGAAA
tctattgcttcagacccaaa

SEQ ID NO: 14613 - DNA, 20 bp, Artificial Sequence
  Description of Artificial Sequence: Synthetic oligonucleotide
  Target: LAMA2; (+) strand; PAM type: NNAGAAW; PAM sequence: GTAGAAT
taggtttatgataagtttag

SEQ ID NO: 14614 - DNA, 20 bp, Artificial Sequence
  Description of Artificial Sequence: Synthetic oligonucleotide
  Target: LAMA2; (+) strand; PAM type: NNAGAAW; PAM sequence: GAAGAAA
ttcagagggatttggctaca

SEQ ID NO: 14615 - DNA, 20 bp, Artificial Sequence
  Description of Artificial Sequence: Synthetic oligonucleotide
  Target: LAMA2; (+) strand; PAM type: NNAGAAW; PAM sequence: GCAGAAA
actgggctatattcacgtct

SEQ ID NO: 14616 - DNA, 20 bp, Artificial Sequence
  Description of Artificial Sequence: Synthetic oligonucleotide
  Target: LAMA2; (+) strand; PAM type: NNAGAAW; PAM sequence: TGAGAAT
cctaatctctgtctctgggg

SEQ ID NO: 14617 - DNA, 20 bp, Artificial Sequence
  Description of Artificial Sequence: Synthetic oligonucleotide
  Target: LAMA2; (+) strand; PAM type: NNAGAAW; PAM sequence: AGAGAAA
gtcagagcagtagtggagag

SEQ ID NO: 14618 - DNA, 20 bp, Artificial Sequence
  Description of Artificial Sequence: Synthetic oligonucleotide
  Target: LAMA2; (+) strand; PAM type: NNAGAAW; PAM sequence: TGAGAAA
cagtagtggagagagagaaa

SEQ ID NO: 14619 - DNA, 20 bp, Artificial Sequence
  Description of Artificial Sequence: Synthetic oligonucleotide
  Target: LAMA2; (+) strand; PAM type: NNAGAAW; PAM sequence: GGAGAAA
catcctttgcatcatccttt

SEQ ID NO: 14620 - DNA, 20 bp, Artificial Sequence
  Description of Artificial Sequence: Synthetic oligonucleotide
  Target: LAMA2; (+) strand; PAM type: NNAGAAW; PAM sequence: TCAGAAA
ttttgtaatttatttatttt

SEQ ID NO: 14621 - DNA, 20 bp, Artificial Sequence
  Description of Artificial Sequence: Synthetic oligonucleotide
  Target: LAMA2; (+) strand; PAM type: NNAGAAW; PAM sequence: AGAGAAT
tcataaatcttcattcactc

SEQ ID NO: 14622 - DNA, 20 bp, Artificial Sequence
  Description of Artificial Sequence: Synthetic oligonucleotide
  Target: LAMA2; (+) strand; PAM type: NNAGAAW; PAM sequence: GTAGAAA
agtattaacctacaatcttt

SEQ ID NO: 14623 - DNA, 20 bp, Artificial Sequence
  Description of Artificial Sequence: Synthetic oligonucleotide
  Target: LAMA2; (+) strand; PAM type: NNAGAAW; PAM sequence: ATAGAAA
tactttaaatatacttgaaa

SEQ ID NO: 14624 - DNA, 20 bp, Artificial Sequence
  Description of Artificial Sequence: Synthetic oligonucleotide
  Target: LAMA2; (+) strand; PAM type: NNAGAAW; PAM sequence: GCAGAAA
ttttactgggttgctttgca

SEQ ID NO: 14625 - DNA, 20 bp, Artificial Sequence
  Description of Artificial Sequence: Synthetic oligonucleotide
  Target: LAMA2; (+) strand; PAM type: NNAGAAW; PAM sequence: GAAGAAA
tttccttctgaaatgttttt

SEQ ID NO: 14626 - DNA, 20 bp, Artificial Sequence
  Description of Artificial Sequence: Synthetic oligonucleotide
  Target: LAMA2; (+) strand; PAM type: NNAGAAW; PAM sequence: AGAGAAT
agcaggagcctatcacccag

SEQ ID NO: 14627 - DNA, 20 bp, Artificial Sequence
  Description of Artificial Sequence: Synthetic oligonucleotide
  Target: LAMA2; (+) strand; PAM type: NNAGAAW; PAM sequence: AAAGAAA
gcatctgtaaattaggaatg

SEQ ID NO: 14628 - DNA, 20 bp, Artificial Sequence
  Description of Artificial Sequence: Synthetic oligonucleotide
  Target: LAMA2; (+) strand; PAM type: NNAGAAW; PAM sequence: CAAGAAA
aagcagcatttatttgcaat

SEQ ID NO: 14629 - DNA, 20 bp, Artificial Sequence
  Description of Artificial Sequence: Synthetic oligonucleotide
  Target: LAMA2; (+) strand; PAM type: NNAGAAW; PAM sequence: AAAGAAA
gtgtgtctgtgtgtgtgttt

SEQ ID NO: 14630 - DNA, 20 bp, Artificial Sequence
  Description of Artificial Sequence: Synthetic oligonucleotide
  Target: LAMA2; (+) strand; PAM type: NNAGAAW; PAM sequence: GGAGAAT
gatggttgcttgtattcttg

SEQ ID NO: 14631 - DNA, 20 bp, Artificial Sequence
  Description of Artificial Sequence: Synthetic oligonucleotide
  Target: LAMA2; (+) strand; PAM type: NNAGAAW; PAM sequence: AGAGAAA
aatagtaaaaatcaccaagg

SEQ ID NO: 14632 - DNA, 20 bp, Artificial Sequence
  Description of Artificial Sequence: Synthetic oligonucleotide
  Target: LAMA2; (+) strand; PAM type: NNAGAAW; PAM sequence: ACAGAAA
accaaggagagaaatacctg

SEQ ID NO: 14633 - DNA, 20 bp, Artificial Sequence
  Description of Artificial Sequence: Synthetic oligonucleotide
  Target: LAMA2; (+) strand; PAM type: NNAGAAW; PAM sequence: CCAGAAT
ttgataccatatttttctag

SEQ ID NO: 14634 - DNA, 20 bp, Artificial Sequence
  Description of Artificial Sequence: Synthetic oligonucleotide
  Target: LAMA2; (+) strand; PAM type: NNAGAAW; PAM sequence: CCAGAAT
tgcacatcatctaaataaga

SEQ ID NO: 14635 - DNA, 20 bp, Artificial Sequence
  Description of Artificial Sequence: Synthetic oligonucleotide
  Target: LAMA2; (+) strand; PAM type: NNAGAAW; PAM sequence: AAAGAAT
attgtagatgttcctggaat

SEQ ID NO: 14636 - DNA, 20 bp, Artificial Sequence
  Description of Artificial Sequence: Synthetic oligonucleotide
  Target: LAMA2; (+) strand; PAM type: NNAGAAW; PAM sequence: TAAGAAA
catgtcctacagtgtgtaat

SEQ ID NO: 14637 - DNA, 20 bp, Artificial Sequence
  Description of Artificial Sequence: Synthetic oligonucleotide
  Target: LAMA2; (+) strand; PAM type: NNAGAAW; PAM sequence: CAAGAAT
cctctgctttaactatatag

SEQ ID NO: 14638 - DNA, 20 bp, Artificial Sequence
  Description of Artificial Sequence: Synthetic oligonucleotide
  Target: LAMA2; (+) strand; PAM type: NNAGAAW; PAM sequence: TTAGAAA
tatgtgggaactgtgaggtc

SEQ ID NO: 14639 - DNA, 20 bp, Artificial Sequence
  Description of Artificial Sequence: Synthetic oligonucleotide
  Target: LAMA2; (+) strand; PAM type: NNAGAAW; PAM sequence: CTAGAAT
tttcttctcctctctcccag

SEQ ID NO: 14640 - DNA, 20 bp, Artificial Sequence
  Description of Artificial Sequence: Synthetic oligonucleotide
  Target: LAMA2; (+) strand; PAM type: NNAGAAW; PAM sequence: CTAGAAA
aattacctttcctttcaggt

SEQ ID NO: 14641 - DNA, 20 bp, Artificial Sequence
  Description of Artificial Sequence: Synthetic oligonucleotide
  Target: LAMA2; (+) strand; PAM type: NNAGAAW; PAM sequence: AGAGAAA
ttcttgaatcgagggggtga

SEQ ID NO: 14642 - DNA, 20 bp, Artificial Sequence
  Description of Artificial Sequence: Synthetic oligonucleotide
  Target: LAMA2; (+) strand; PAM type: NNAGAAW; PAM sequence: ACAGAAT
agaacaaaaataacaaagag

SEQ ID NO: 14643 - DNA, 20 bp, Artificial Sequence
  Description of Artificial Sequence: Synthetic oligonucleotide
  Target: LAMA2; (+) strand; PAM type: NNAGAAW; PAM sequence: TCAGAAT
gatcggacactaagttactt

SEQ ID NO: 14644 - DNA, 20 bp, Artificial Sequence
  Description of Artificial Sequence: Synthetic oligonucleotide
  Target: LAMA2; (+) strand; PAM type: NNAGAAW; PAM sequence: AAAGAAA
caagattcatactagatatc

SEQ ID NO: 14645 - DNA, 20 bp, Artificial Sequence
  Description of Artificial Sequence: Synthetic oligonucleotide
  Target: LAMA2; (+) strand; PAM type: NNAGAAW; PAM sequence: TCAGAAT
ccatttagattttgtctgct

SEQ ID NO: 14646 - DNA, 20 bp, Artificial Sequence
  Description of Artificial Sequence: Synthetic oligonucleotide
  Target: LAMA2; (+) strand; PAM type: NNAGAAW; PAM sequence: ACAGAAA
ctgaatgcagagcatgggct

SEQ ID NO: 14647 - DNA, 20 bp, Artificial Sequence
  Description of Artificial Sequence: Synthetic oligonucleotide
  Target: LAMA2; (+) strand; PAM type: NNAGAAW; PAM sequence: CTAGAAA
tttactttttctgcatatgt

SEQ ID NO: 14648 - DNA, 20 bp, Artificial Sequence
  Description of Artificial Sequence: Synthetic oligonucleotide
  Target: LAMA2; (+) strand; PAM type: NNAGAAW; PAM sequence: GGAGAAA
tgattttttttaatgggttg

SEQ ID NO: 14649 - DNA, 20 bp, Artificial Sequence
  Description of Artificial Sequence: Synthetic oligonucleotide
  Target: LAMA2; (+) strand; PAM type: NNAGAAW; PAM sequence: ATAGAAA
ttgttttcagtgtatagata

SEQ ID NO: 14650 - DNA, 20 bp, Artificial Sequence
  Description of Artificial Sequence: Synthetic oligonucleotide
  Target: LAMA2; (+) strand; PAM type: NNAGAAW; PAM sequence: GCAGAAT
gttgctgaaaaaatgatggg

SEQ ID NO: 14651 - DNA, 20 bp, Artificial Sequence
  Description of Artificial Sequence: Synthetic oligonucleotide
  Target: LAMA2; (+) strand; PAM type: NNAGAAW; PAM sequence: TCAGAAA
taattcctaacggaacacct

SEQ ID NO: 14652 - DNA, 20 bp, Artificial Sequence
  Description of Artificial Sequence: Synthetic oligonucleotide
  Target: LAMA2; (+) strand; PAM type: NNAGAAW; PAM sequence: ATAGAAA
tctctaatactgttctctgt

SEQ ID NO: 14653 - DNA, 20 bp, Artificial Sequence
  Description of Artificial Sequence: Synthetic oligonucleotide
  Target: LAMA2; (+) strand; PAM type: NNAGAAW; PAM sequence: GCAGAAA
cagtaatgtgctgaagtgtt

SEQ ID NO: 14654 - DNA, 20 bp, Artificial Sequence
  Description of Artificial Sequence: Synthetic oligonucleotide
  Target: LAMA2; (+) strand; PAM type: NNAGAAW; PAM sequence: CAAGAAA
aattttccttacacgtcctg

SEQ ID NO: 14655 - DNA, 20 bp, Artificial Sequence
  Description of Artificial Sequence: Synthetic oligonucleotide
  Target: LAMA2; (+) strand; PAM type: NNAGAAW; PAM sequence: GGAGAAT
gaaatgagtttttttattat

SEQ ID NO: 14656 - DNA, 20 bp, Artificial Sequence
  Description of Artificial Sequence: Synthetic oligonucleotide
  Target: LAMA2; (+) strand; PAM type: NNAGAAW; PAM sequence: TAAGAAA
ttattaattgctatctaagt

SEQ ID NO: 14657 - DNA, 20 bp, Artificial Sequence
  Description of Artificial Sequence: Synthetic oligonucleotide
  Target: LAMA2; (+) strand; PAM type: NNAGAAW; PAM sequence: GAAGAAT
ctgaatattaaataagacaa

SEQ ID NO: 14658 - DNA, 20 bp, Artificial Sequence
  Description of Artificial Sequence: Synthetic oligonucleotide
  Target: LAMA2; (+) strand; PAM type: NNAGAAW; PAM sequence: AAAGAAT
aagaatcaggttaaaattca

SEQ ID NO: 14659 - DNA, 20 bp, Artificial Sequence
  Description of Artificial Sequence: Synthetic oligonucleotide
  Target: LAMA2; (+) strand; PAM type: NNAGAAW; PAM sequence: ACAGAAT
tttattgcatattttataat

SEQ ID NO: 14660 - DNA, 20 bp, Artificial Sequence
  Description of Artificial Sequence: Synthetic oligonucleotide
  Target: LAMA2; (+) strand; PAM type: NNAGAAW; PAM sequence: CTAGAAA
cctaagtacctatacatttt

SEQ ID NO: 14661 - DNA, 20 bp, Artificial Sequence
  Description of Artificial Sequence: Synthetic oligonucleotide
  Target: LAMA2; (+) strand; PAM type: NNAGAAW; PAM sequence: TTAGAAT
ctatacattttctagaaaac

SEQ ID NO: 14662 - DNA, 20 bp, Artificial Sequence
  Description of Artificial Sequence: Synthetic oligonucleotide
  Target: LAMA2; (+) strand; PAM type: NNAGAAW; PAM sequence: CCAGAAT
accaaattaatggctctgcc

SEQ ID NO: 14663 - DNA, 20 bp, Artificial Sequence
  Description of Artificial Sequence: Synthetic oligonucleotide
  Target: LAMA2; (+) strand; PAM type: NNAGAAW; PAM sequence: GCAGAAT
tcattgaaagagaagacaga

SEQ ID NO: 14664 - DNA, 20 bp, Artificial Sequence
  Description of Artificial Sequence: Synthetic oligonucleotide
  Target: LAMA2; (+) strand; PAM type: NNAGAAW; PAM sequence: AGAGAAA
taaaacataacatttaggtc

SEQ ID NO: 14665 - DNA, 20 bp, Artificial Sequence
  Description of Artificial Sequence: Synthetic oligonucleotide
  Target: LAMA2; (+) strand; PAM type: NNAGAAW; PAM sequence: TAAGAAA
ataatataaatagtttttgg

SEQ ID NO: 14666 - DNA, 20 bp, Artificial Sequence
  Description of Artificial Sequence: Synthetic oligonucleotide
  Target: LAMA2; (+) strand; PAM type: NNAGAAW; PAM sequence: AAAGAAA
tataaatagtttttggtaag

SEQ ID NO: 14667 - DNA, 20 bp, Artificial Sequence
  Description of Artificial Sequence: Synthetic oligonucleotide
  Target: LAMA2; (+) strand; PAM type: NNAGAAW; PAM sequence: AAAGAAA
agaaagaaagagcaggagac

SEQ ID NO: 14668 - DNA, 20 bp, Artificial Sequence
  Description of Artificial Sequence: Synthetic oligonucleotide
  Target: LAMA2; (+) strand; PAM type: NNAGAAW; PAM sequence: AAAGAAA
agaaagagcaggagacaaag

SEQ ID NO: 14669 - DNA, 20 bp, Artificial Sequence
  Description of Artificial Sequence: Synthetic oligonucleotide
  Target: LAMA2; (+) strand; PAM type: NNAGAAW; PAM sequence: AAAGAAA
agagcaggagacaaagaaag

SEQ ID NO: 14670 - DNA, 20 bp, Artificial Sequence
  Description of Artificial Sequence: Synthetic oligonucleotide
  Target: LAMA2; (+) strand; PAM type: NNAGAAW; PAM sequence: AGAGAAA
aggaaggaaggaagagagag

SEQ ID NO: 14671 - DNA, 20 bp, Artificial Sequence
  Description of Artificial Sequence: Synthetic oligonucleotide
  Target: LAMA2; (+) strand; PAM type: NNAGAAW; PAM sequence: AAAGAAA
aggaaggaagagagagagag

SEQ ID NO: 14672 - DNA, 20 bp, Artificial Sequence
  Description of Artificial Sequence: Synthetic oligonucleotide
  Target: LAMA2; (+) strand; PAM type: NNAGAAW; PAM sequence: GAAGAAA
agagagagagagaaagaaag

SEQ ID NO: 14673 - DNA, 20 bp, Artificial Sequence
  Description of Artificial Sequence: Synthetic oligonucleotide
  Target: LAMA2; (+) strand; PAM type: NNAGAAW; PAM sequence: GGAGAAA
agagaaagaaaggaagaaag

SEQ ID NO: 14674 - DNA, 20 bp, Artificial Sequence
  Description of Artificial Sequence: Synthetic oligonucleotide
  Target: LAMA2; (+) strand; PAM type: NNAGAAW; PAM sequence: TAAGAAT
cacagctcccatccaattaa

SEQ ID NO: 14675 - DNA, 20 bp, Artificial Sequence
  Description of Artificial Sequence: Synthetic oligonucleotide
  Target: LAMA2; (+) strand; PAM type: NNAGAAW; PAM sequence: AGAGAAA
tgtgaaccttacatatttgt

SEQ ID NO: 14676 - DNA, 20 bp, Artificial Sequence
  Description of Artificial Sequence: Synthetic oligonucleotide
  Target: LAMA2; (+) strand; PAM type: NNAGAAW; PAM sequence: GTAGAAA
cttgtatctacactgcagtt

SEQ ID NO: 14677 - DNA, 20 bp, Artificial Sequence
  Description of Artificial Sequence: Synthetic oligonucleotide
  Target: LAMA2; (+) strand; PAM type: NNAGAAW; PAM sequence: TGAGAAA
ttttttaatcacgttgcgtt

SEQ ID NO: 14678 - DNA, 20 bp, Artificial Sequence
  Description of Artificial Sequence: Synthetic oligonucleotide
  Target: LAMA2; (+) strand; PAM type: NNAGAAW; PAM sequence: GGAGAAT
tccatcatcctgggagaagg

SEQ ID NO: 14679 - DNA, 20 bp, Artificial Sequence
  Description of Artificial Sequence: Synthetic oligonucleotide
  Target: LAMA2; (+) strand; PAM type: NNAGAAW; PAM sequence: ACAGAAT
ctgaactattgatgcccctg

SEQ ID NO: 14680 - DNA, 20 bp, Artificial Sequence
  Description of Artificial Sequence: Synthetic oligonucleotide
  Target: LAMA2; (+) strand; PAM type: NNAGAAW; PAM sequence: ATAGAAT
aatacatggttgatagatgc

SEQ ID NO: 14681 - DNA, 20 bp, Artificial Sequence
  Description of Artificial Sequence: Synthetic oligonucleotide
  Target: LAMA2; (+) strand; PAM type: NNAGAAW; PAM sequence: GAAGAAT
cttatgtccacagcaggaaa

SEQ ID NO: 14682 - DNA, 20 bp, Artificial Sequence
  Description of Artificial Sequence: Synthetic oligonucleotide
  Target: LAMA2; (+) strand; PAM type: NNAGAAW; PAM sequence: CTAGAAT
tagtcatttaaggactattt

SEQ ID NO: 14683 - DNA, 20 bp, Artificial Sequence
  Description of Artificial Sequence: Synthetic oligonucleotide
  Target: LAMA2; (+) strand; PAM type: NNAGAAW; PAM sequence: ATAGAAT
ttttgctgtattaatactac

SEQ ID NO: 14684 - DNA, 20 bp, Artificial Sequence
  Description of Artificial Sequence: Synthetic oligonucleotide
  Target: LAMA2; (+) strand; PAM type: NNAGAAW; PAM sequence: TTAGAAT
aatccttaatgtcagtggga

SEQ ID NO: 14685 - DNA, 20 bp, Artificial Sequence
  Description of Artificial Sequence: Synthetic oligonucleotide
  Target: LAMA2; (+) strand; PAM type: NNAGAAW; PAM sequence: GCAGAAT
tcaggtgggtcccaggacat

SEQ ID NO: 14686 - DNA, 20 bp, Artificial Sequence
  Description of Artificial Sequence: Synthetic oligonucleotide
  Target: LAMA2; (+) strand; PAM type: NNAGAAW; PAM sequence: ATAGAAA
gtcccaggacatgcagaatt

SEQ ID NO: 14687 - DNA, 20 bp, Artificial Sequence
  Description of Artificial Sequence: Synthetic oligonucleotide
  Target: LAMA2; (+) strand; PAM type: NNAGAAW; PAM sequence: TAAGAAA
agtagggtaccctatttcat

SEQ ID NO: 14688 - DNA, 20 bp, Artificial Sequence
  Description of Artificial Sequence: Synthetic oligonucleotide
  Target: LAMA2; (+) strand; PAM type: NNAGAAW; PAM sequence: ATAGAAA
cctgacaaatgtataaaatc

SEQ ID NO: 14689 - DNA, 20 bp, Artificial Sequence
  Description of Artificial Sequence: Synthetic oligonucleotide
  Target: LAMA2; (+) strand; PAM type: NNAGAAW; PAM sequence: TAAGAAA
gtataaaatcatagaaagcc

SEQ ID NO: 14690 - DNA, 20 bp, Artificial Sequence
  Description of Artificial Sequence: Synthetic oligonucleotide
  Target: LAMA2; (+) strand; PAM type: NNAGAAW; PAM sequence: GTAGAAA
tattatggtaattaattatt

SEQ ID NO: 14691 - DNA, 20 bp, Artificial Sequence
  Description of Artificial Sequence: Synthetic oligonucleotide
  Target: LAMA2; (+) strand; PAM type: NNAGAAW; PAM sequence: AAAGAAT
tgaagtcttaagaacataaa

SEQ ID NO: 14692 - DNA, 20 bp, Artificial Sequence
  Description of Artificial Sequence: Synthetic oligonucleotide
  Target: LAMA2; (+) strand; PAM type: NNAGAAW; PAM sequence: TGAGAAT
taagaacataaaaaagaatg

SEQ ID NO: 14693 - DNA, 20 bp, Artificial Sequence
  Description of Artificial Sequence: Synthetic oligonucleotide
  Target: LAMA2; (+) strand; PAM type: NNAGAAW; PAM sequence: AAAGAAA
taagtggtaaaacctcaagg

SEQ ID NO: 14694 - DNA, 20 bp, Artificial Sequence
  Description of Artificial Sequence: Synthetic oligonucleotide
  Target: LAMA2; (+) strand; PAM type: NNAGAAW; PAM sequence: CAAGAAA
tggttacctatagatttgtt

SEQ ID NO: 14695 - DNA, 20 bp, Artificial Sequence
  Description of Artificial Sequence: Synthetic oligonucleotide
  Target: LAMA2; (+) strand; PAM type: NNAGAAW; PAM sequence: AAAGAAA
caagaaaagtacaccactac

SEQ ID NO: 14696 - DNA, 20 bp, Artificial Sequence
  Description of Artificial Sequence: Synthetic oligonucleotide
  Target: LAMA2; (+) strand; PAM type: NNAGAAW; PAM sequence: CAAGAAA
taattttgtagtttacactc

SEQ ID NO: 14697 - DNA, 20 bp, Artificial Sequence
  Description of Artificial Sequence: Synthetic oligonucleotide
  Target: LAMA2; (+) strand; PAM type: NNAGAAW; PAM sequence: TAAGAAA
ttaaaaatgtatgatatgca

SEQ ID NO: 14698 - DNA, 20 bp, Artificial Sequence
  Description of Artificial Sequence: Synthetic oligonucleotide
  Target: LAMA2; (+) strand; PAM type: NNAGAAW; PAM sequence: TTAGAAA
gaagataaattaagcagttt

SEQ ID NO: 14699 - DNA, 20 bp, Artificial Sequence
  Description of Artificial Sequence: Synthetic oligonucleotide
  Target: LAMA2; (+) strand; PAM type: NNAGAAW; PAM sequence: GGAGAAT
aaaaggagaacctagagcca

SEQ ID NO: 14700 - DNA, 20 bp, Artificial Sequence
  Description of Artificial Sequence: Synthetic oligonucleotide
  Target: LAMA2; (+) strand; PAM type: NNAGAAW; PAM sequence: TCAGAAA
ttgtgttcaaatcaaaatat

SEQ ID NO: 14701 - DNA, 20 bp, Artificial Sequence
  Description of Artificial Sequence: Synthetic oligonucleotide
  Target: LAMA2; (+) strand; PAM type: NNAGAAW; PAM sequence: TTAGAAT
agactgatttactctacgtt

SEQ ID NO: 14702 - DNA, 20 bp, Artificial Sequence
  Description of Artificial Sequence: Synthetic oligonucleotide
  Target: LAMA2; (+) strand; PAM type: NNAGAAW; PAM sequence: ATAGAAT
gttgttatagggattaaatg

SEQ ID NO: 14703 - DNA, 20 bp, Artificial Sequence
  Description of Artificial Sequence: Synthetic oligonucleotide
  Target: LAMA2; (+) strand; PAM type: NNAGAAW; PAM sequence: TCAGAAA
ctaacagggcacttaacaaa

SEQ ID NO: 14704 - DNA, 20 bp, Artificial Sequence
  Description of Artificial Sequence: Synthetic oligonucleotide
  Target: LAMA2; (+) strand; PAM type: NNAGAAW; PAM sequence: TTAGAAA
taacaagcctattaagacta

SEQ ID NO: 14705 - DNA, 20 bp, Artificial Sequence
  Description of Artificial Sequence: Synthetic oligonucleotide
  Target: LAMA2; (+) strand; PAM type: NNAGAAW; PAM sequence: GCAGAAT
cctttgcctttacatttttg

SEQ ID NO: 14706 - DNA, 20 bp, Artificial Sequence
  Description of Artificial Sequence: Synthetic oligonucleotide
  Target: LAMA2; (+) strand; PAM type: NNAGAAW; PAM sequence: GGAGAAT
ctactcaggaggctgaggcg

SEQ ID NO: 14707 - DNA, 20 bp, Artificial Sequence
  Description of Artificial Sequence: Synthetic oligonucleotide
  Target: LAMA2; (+) strand; PAM type: NNAGAAW; PAM sequence: TTAGAAA
acttgagagaacctataatc

SEQ ID NO: 14708 - DNA, 20 bp, Artificial Sequence
  Description of Artificial Sequence: Synthetic oligonucleotide
  Target: LAMA2; (+) strand; PAM type: NNAGAAW; PAM sequence: AGAGAAA
caaatgaaggaaaatctagc

SEQ ID NO: 14709 - DNA, 20 bp, Artificial Sequence
  Description of Artificial Sequence: Synthetic oligonucleotide
  Target: LAMA2; (+) strand; PAM type: NNAGAAW; PAM sequence: CAAGAAA
agcagagaaattgatttgtc

SEQ ID NO: 14710 - DNA, 20 bp, Artificial Sequence
  Description of Artificial Sequence: Synthetic oligonucleotide
  Target: LAMA2; (+) strand; PAM type: NNAGAAW; PAM sequence: TAAGAAT
atcaggcatttcatcataat

SEQ ID NO: 14711 - DNA, 20 bp, Artificial Sequence
  Description of Artificial Sequence: Synthetic oligonucleotide
  Target: LAMA2; (+) strand; PAM type: NNAGAAW; PAM sequence: CAAGAAA
gcttatgtgtacaacaaatg

SEQ ID NO: 14712 - DNA, 20 bp, Artificial Sequence
  Description of Artificial Sequence: Synthetic oligonucleotide
  Target: LAMA2; (+) strand; PAM type: NNAGAAW; PAM sequence: AGAGAAT
agtatagagtcaggacctgt

SEQ ID NO: 14713 - DNA, 20 bp, Artificial Sequence
  Description of Artificial Sequence: Synthetic oligonucleotide
  Target: LAMA2; (+) strand; PAM type: NNAGAAW; PAM sequence: ACAGAAA
gttctgactcccgggaaaac

SEQ ID NO: 14714 - DNA, 20 bp, Artificial Sequence
  Description of Artificial Sequence: Synthetic oligonucleotide
  Target: LAMA2; (+) strand; PAM type: NNAGAAW; PAM sequence: AAAGAAA
tgactcccgggaaaacacag

SEQ ID NO: 14715 - DNA, 20 bp, Artificial Sequence
  Description of Artificial Sequence: Synthetic oligonucleotide
  Target: LAMA2; (+) strand; PAM type: NNAGAAW; PAM sequence: CAAGAAA
cctctgatgggtccaaaaga

SEQ ID NO: 14716 - DNA, 20 bp, Artificial Sequence
  Description of Artificial Sequence: Synthetic oligonucleotide
  Target: LAMA2; (+) strand; PAM type: NNAGAAW; PAM sequence: GAAGAAA
tattaccaatgttgttaaat

SEQ ID NO: 14717 - DNA, 20 bp, Artificial Sequence
  Description of Artificial Sequence: Synthetic oligonucleotide
  Target: LAMA2; (+) strand; PAM type: NNAGAAW; PAM sequence: AAAGAAA
aaatgcatacatttacaata

SEQ ID NO: 14718 - DNA, 20 bp, Artificial Sequence
  Description of Artificial Sequence: Synthetic oligonucleotide
  Target: LAMA2; (+) strand; PAM type: NNAGAAW; PAM sequence: GCAGAAA
gtctcctaaatataaattta

SEQ ID NO: 14719 - DNA, 20 bp, Artificial Sequence
  Description of Artificial Sequence: Synthetic oligonucleotide
  Target: LAMA2; (+) strand; PAM type: NNAGAAW; PAM sequence: TGAGAAT
accactcaataaaaaagtgg

SEQ ID NO: 14720 - DNA, 20 bp, Artificial Sequence
  Description of Artificial Sequence: Synthetic oligonucleotide
  Target: LAMA2; (+) strand; PAM type: NNAGAAW; PAM sequence: TTAGAAT
agtttagatttgtaaagggt

SEQ ID NO: 14721 - DNA, 20 bp, Artificial Sequence
  Description of Artificial Sequence: Synthetic oligonucleotide
  Target: LAMA2; (+) strand; PAM type: NNAGAAW; PAM sequence: CTAGAAA
taccacaatctgaattagaa

SEQ ID NO: 14722 - DNA, 20 bp, Artificial Sequence
  Description of Artificial Sequence: Synthetic oligonucleotide
  Target: LAMA2; (+) strand; PAM type: NNAGAAW; PAM sequence: TGAGAAT
accaacagtaaatgtaaaga

SEQ ID NO: 14723 - DNA, 20 bp, Artificial Sequence
  Description of Artificial Sequence: Synthetic oligonucleotide
  Target: LAMA2; (+) strand; PAM type: NNAGAAW; PAM sequence: TAAGAAT
ttaagtctaattttccaaaa

SEQ ID NO: 14724 - DNA, 20 bp, Artificial Sequence
  Description of Artificial Sequence: Synthetic oligonucleotide
  Target: LAMA2; (+) strand; PAM type: NNAGAAW; PAM sequence: CGAGAAT
ttttacaaagaagtaattac

SEQ ID NO: 14725 - DNA, 20 bp, Artificial Sequence
  Description of Artificial Sequence: Synthetic oligonucleotide
  Target: LAMA2; (+) strand; PAM type: NNAGAAW; PAM sequence: CAAGAAA
aagcctgataacatgcattt

SEQ ID NO: 14726 - DNA, 20 bp, Artificial Sequence
  Description of Artificial Sequence: Synthetic oligonucleotide
  Target: LAMA2; (+) strand; PAM type: NNAGAAW; PAM sequence: AGAGAAT
atgcatatgaataactcatc

SEQ ID NO: 14727 - DNA, 20 bp, Artificial Sequence
  Description of Artificial Sequence: Synthetic oligonucleotide
  Target: LAMA2; (+) strand; PAM type: NNAGAAW; PAM sequence: TTAGAAT
tcactaatcaatttcaattg

SEQ ID NO: 14728 - DNA, 20 bp, Artificial Sequence
  Description of Artificial Sequence: Synthetic oligonucleotide
  Target: LAMA2; (+) strand; PAM type: NNAGAAW; PAM sequence: TAAGAAA
tcaattgttagaatgaaacc

SEQ ID NO: 14729 - DNA, 20 bp, Artificial Sequence
  Description of Artificial Sequence: Synthetic oligonucleotide
  Target: LAMA2; (+) strand; PAM type: NNAGAAW; PAM sequence: CTAGAAA
agtaaaattttaaattaaga

SEQ ID NO: 14730 - DNA, 20 bp, Artificial Sequence
  Description of Artificial Sequence: Synthetic oligonucleotide
  Target: LAMA2; (+) strand; PAM type: NNAGAAW; PAM sequence: TCAGAAT
cagttaattttgataaaatt

SEQ ID NO: 14731 - DNA, 20 bp, Artificial Sequence
  Description of Artificial Sequence: Synthetic oligonucleotide
  Target: LAMA2; (+) strand; PAM type: NNAGAAW; PAM sequence: ATAGAAA
aacttttctctttggatatc

SEQ ID NO: 14732 - DNA, 20 bp, Artificial Sequence
  Description of Artificial Sequence: Synthetic oligonucleotide
  Target: LAMA2; (+) strand; PAM type: NNAGAAW; PAM sequence: GAAGAAA
tgccaacctggagtcacagg

SEQ ID NO: 14733 - DNA, 20 bp, Artificial Sequence
  Description of Artificial Sequence: Synthetic oligonucleotide
  Target: LAMA2; (+) strand; PAM type: NNAGAAW; PAM sequence: CAAGAAA
tgcaaaattggtatccggat

SEQ ID NO: 14734 - DNA, 20 bp, Artificial Sequence
  Description of Artificial Sequence: Synthetic oligonucleotide
  Target: LAMA2; (+) strand; PAM type: NNAGAAW; PAM sequence: AGAGAAA
gaaaactatgatgttctaag

SEQ ID NO: 14735 - DNA, 20 bp, Artificial Sequence
  Description of Artificial Sequence: Synthetic oligonucleotide
  Target: LAMA2; (+) strand; PAM type: NNAGAAW; PAM sequence: TAAGAAA
ccttcacccaaatcatgagc

SEQ ID NO: 14736 - DNA, 20 bp, Artificial Sequence
  Description of Artificial Sequence: Synthetic oligonucleotide
  Target: LAMA2; (+) strand; PAM type: NNAGAAW; PAM sequence: TAAGAAT
gtttataattgtagatcctc

SEQ ID NO: 14737 - DNA, 20 bp, Artificial Sequence
  Description of Artificial Sequence: Synthetic oligonucleotide
  Target: LAMA2; (+) strand; PAM type: NNAGAAW; PAM sequence: CAAGAAT
taacaaattataaatgagac

SEQ ID NO: 14738 - DNA, 20 bp, Artificial Sequence
  Description of Artificial Sequence: Synthetic oligonucleotide
  Target: LAMA2; (+) strand; PAM type: NNAGAAW; PAM sequence: ATAGAAA
caagaatattattttaaatt

SEQ ID NO: 14739 - DNA, 20 bp, Artificial Sequence
  Description of Artificial Sequence: Synthetic oligonucleotide
  Target: LAMA2; (+) strand; PAM type: NNAGAAW; PAM sequence: AAAGAAA
acctactagcattctggccc

SEQ ID NO: 14740 - DNA, 20 bp, Artificial Sequence
  Description of Artificial Sequence: Synthetic oligonucleotide
  Target: LAMA2; (+) strand; PAM type: NNAGAAW; PAM sequence: ATAGAAA
ttctggcccaaagaaacacc

SEQ ID NO: 14741 - DNA, 20 bp, Artificial Sequence
  Description of Artificial Sequence: Synthetic oligonucleotide
  Target: LAMA2; (+) strand; PAM type: NNAGAAW; PAM sequence: GAAGAAT
aaaaaaaaagcacaaaacag

SEQ ID NO: 14742 - DNA, 20 bp, Artificial Sequence
  Description of Artificial Sequence: Synthetic oligonucleotide
  Target: LAMA2; (+) strand; PAM type: NNAGAAW; PAM sequence: CTAGAAA
ctttgacatgaaacgctgca

SEQ ID NO: 14743 - DNA, 20 bp, Artificial Sequence
  Description of Artificial Sequence: Synthetic oligonucleotide
  Target: LAMA2; (+) strand; PAM type: NNAGAAW; PAM sequence: ATAGAAA
gcaacaaaaatgaaaaatct

SEQ ID NO: 14744 - DNA, 20 bp, Artificial Sequence
  Description of Artificial Sequence: Synthetic oligonucleotide
  Target: LAMA2; (+) strand; PAM type: NNAGAAW; PAM sequence: TTAGAAA
atccgtacagcataaacaaa

SEQ ID NO: 14745 - DNA, 20 bp, Artificial Sequence
  Description of Artificial Sequence: Synthetic oligonucleotide
  Target: LAMA2; (+) strand; PAM type: NNAGAAW; PAM sequence: AAAGAAA
atccttaagtgtagaactga

SEQ ID NO: 14746 - DNA, 20 bp, Artificial Sequence
  Description of Artificial Sequence: Synthetic oligonucleotide
  Target: LAMA2; (+) strand; PAM type: NNAGAAW; PAM sequence: AGAGAAA
tgccctcccaataccattgg

SEQ ID NO: 14747 - DNA, 20 bp, Artificial Sequence
  Description of Artificial Sequence: Synthetic oligonucleotide
  Target: LAMA2; (+) strand; PAM type: NNAGAAW; PAM sequence: CCAGAAA
acaaaaattctgtaataata

SEQ ID NO: 14748 - DNA, 20 bp, Artificial Sequence
  Description of Artificial Sequence: Synthetic oligonucleotide
  Target: LAMA2; (+) strand; PAM type: NNAGAAW; PAM sequence: ATAGAAA
aattaattttccaaaaatct

SEQ ID NO: 14749 - DNA, 20 bp, Artificial Sequence
  Description of Artificial Sequence: Synthetic oligonucleotide
  Target: LAMA2; (+) strand; PAM type: NNAGAAW; PAM sequence: ATAGAAA
ttttttcccattggtagacc

SEQ ID NO: 14750 - DNA, 20 bp, Artificial Sequence
  Description of Artificial Sequence: Synthetic oligonucleotide
  Target: LAMA2; (+) strand; PAM type: NNAGAAW; PAM sequence: GAAGAAA
taacaatttataaggctgtt

SEQ ID NO: 14751 - DNA, 20 bp, Artificial Sequence
  Description of Artificial Sequence: Synthetic oligonucleotide
  Target: LAMA2; (+) strand; PAM type: NNAGAAW; PAM sequence: TAAGAAA
gaattcattgatttggggaa

SEQ ID NO: 14752 - DNA, 20 bp, Artificial Sequence
  Description of Artificial Sequence: Synthetic oligonucleotide
  Target: LAMA2; (+) strand; PAM type: NNAGAAW; PAM sequence: ATAGAAT
atttctacaacttctgaaaa

SEQ ID NO: 14753 - DNA, 20 bp, Artificial Sequence
  Description of Artificial Sequence: Synthetic oligonucleotide
  Target: LAMA2; (+) strand; PAM type: NNAGAAW; PAM sequence: TAAGAAT
ttttaacccttttttaattt

SEQ ID NO: 14754 - DNA, 20 bp, Artificial Sequence
  Description of Artificial Sequence: Synthetic oligonucleotide
  Target: LAMA2; (+) strand; PAM type: NNAGAAW; PAM sequence: CAAGAAA
catactttttatgttctacc

SEQ ID NO: 14755 - DNA, 20 bp, Artificial Sequence
  Description of Artificial Sequence: Synthetic oligonucleotide
  Target: LAMA2; (+) strand; PAM type: NNAGAAW; PAM sequence: GAAGAAT
gaattgatagatcaatttgg

SEQ ID NO: 14756 - DNA, 20 bp, Artificial Sequence
  Description of Artificial Sequence: Synthetic oligonucleotide
  Target: LAMA2; (+) strand; PAM type: NNAGAAW; PAM sequence: TCAGAAA
taggttgttataattttttc

SEQ ID NO: 14757 - DNA, 20 bp, Artificial Sequence
  Description of Artificial Sequence: Synthetic oligonucleotide
  Target: LAMA2; (+) strand; PAM type: NNAGAAW; PAM sequence: CTAGAAT
cagttttaaattgcttgtta

SEQ ID NO: 14758 - DNA, 20 bp, Artificial Sequence
  Description of Artificial Sequence: Synthetic oligonucleotide
  Target: LAMA2; (+) strand; PAM type: NNAGAAW; PAM sequence: ATAGAAA
ttaaattgcttgttactaga

SEQ ID NO: 14759 - DNA, 20 bp, Artificial Sequence
  Description of Artificial Sequence: Synthetic oligonucleotide
  Target: LAMA2; (+) strand; PAM type: NNAGAAW; PAM sequence: CAAGAAT
agtttgctaagagcttttat

SEQ ID NO: 14760 - DNA, 20 bp, Artificial Sequence
  Description of Artificial Sequence: Synthetic oligonucleotide
  Target: LAMA2; (+) strand; PAM type: NNAGAAW; PAM sequence: TAAGAAA
tgattttggatctacgttta

SEQ ID NO: 14761 - DNA, 20 bp, Artificial Sequence
  Description of Artificial Sequence: Synthetic oligonucleotide
  Target: LAMA2; (+) strand; PAM type: NNAGAAW; PAM sequence: GTAGAAA
gcgttttcacaatcaatgag

SEQ ID NO: 14762 - DNA, 20 bp, Artificial Sequence
  Description of Artificial Sequence: Synthetic oligonucleotide
  Target: LAMA2; (+) strand; PAM type: NNAGAAW; PAM sequence: ACAGAAA
cacaatcaatgaggtagaaa

SEQ ID NO: 14763 - DNA, 20 bp, Artificial Sequence
  Description of Artificial Sequence: Synthetic oligonucleotide
  Target: LAMA2; (+) strand; PAM type: NNAGAAW; PAM sequence: CTAGAAA
tcagtaaagttggtaatatt

SEQ ID NO: 14764 - DNA, 20 bp, Artificial Sequence
  Description of Artificial Sequence: Synthetic oligonucleotide
  Target: LAMA2; (+) strand; PAM type: NNAGAAW; PAM sequence: CAAGAAA
aatattctagaaaggttaat

SEQ ID NO: 14765 - DNA, 20 bp, Artificial Sequence
  Description of Artificial Sequence: Synthetic oligonucleotide
  Target: LAMA2; (+) strand; PAM type: NNAGAAW; PAM sequence: GAAGAAA
gttaatcaagaaaaaagaga

SEQ ID NO: 14766 - DNA, 20 bp, Artificial Sequence
  Description of Artificial Sequence: Synthetic oligonucleotide
  Target: LAMA2; (+) strand; PAM type: NNAGAAW; PAM sequence: CCAGAAA
ggcatttgatacattttttt

SEQ ID NO: 14767 - DNA, 20 bp, Artificial Sequence
  Description of Artificial Sequence: Synthetic oligonucleotide
  Target: LAMA2; (+) strand; PAM type: NNAGAAW; PAM sequence: CAAGAAA
caccctccaccttctgggct

SEQ ID NO: 14768 - DNA, 20 bp, Artificial Sequence
  Description of Artificial Sequence: Synthetic oligonucleotide
  Target: LAMA2; (+) strand; PAM type: NNAGAAW; PAM sequence: GTAGAAA
ggctaatttttaagtttttt

SEQ ID NO: 14769 - DNA, 20 bp, Artificial Sequence
  Description of Artificial Sequence: Synthetic oligonucleotide
  Target: LAMA2; (+) strand; PAM type: NNAGAAW; PAM sequence: CCAGAAT
gaatatacatctttaacttt

SEQ ID NO: 14770 - DNA, 20 bp, Artificial Sequence
  Description of Artificial Sequence: Synthetic oligonucleotide
  Target: LAMA2; (+) strand; PAM type: NNAGAAW; PAM sequence: CAAGAAA
tagtcaattatctttttaaa

SEQ ID NO: 14771 - DNA, 20 bp, Artificial Sequence
  Description of Artificial Sequence: Synthetic oligonucleotide
  Target: LAMA2; (+) strand; PAM type: NNAGAAW; PAM sequence: CCAGAAA
tttttttttttttttttgtt

SEQ ID NO: 14772 - DNA, 20 bp, Artificial Sequence
  Description of Artificial Sequence: Synthetic oligonucleotide
  Target: LAMA2; (+) strand; PAM type: NNAGAAW; PAM sequence: AAAGAAT
ggattttattgtatttcttt

SEQ ID NO: 14773 - DNA, 20 bp, Artificial Sequence
  Description of Artificial Sequence: Synthetic oligonucleotide
  Target: LAMA2; (+) strand; PAM type: NNAGAAW; PAM sequence: TGAGAAT
ctactaagctgtgaaacttc

SEQ ID NO: 14774 - DNA, 20 bp, Artificial Sequence
  Description of Artificial Sequence: Synthetic oligonucleotide
  Target: LAMA2; (+) strand; PAM type: NNAGAAW; PAM sequence: TAAGAAT
tccaagctttctctgggctg

SEQ ID NO: 14775 - DNA, 20 bp, Artificial Sequence
  Description of Artificial Sequence: Synthetic oligonucleotide
  Target: LAMA2; (+) strand; PAM type: NNAGAAW; PAM sequence: CTAGAAA
taccctctctgtgttgcagc

SEQ ID NO: 14776 - DNA, 20 bp, Artificial Sequence
  Description of Artificial Sequence: Synthetic oligonucleotide
  Target: LAMA2; (+) strand; PAM type: NNAGAAW; PAM sequence: TCAGAAA
ttcatgtttttttccttctc

SEQ ID NO: 14777 - DNA, 20 bp, Artificial Sequence
  Description of Artificial Sequence: Synthetic oligonucleotide
  Target: LAMA2; (+) strand; PAM type: NNAGAAW; PAM sequence: GAAGAAT
tactttaacagcttaacaaa

SEQ ID NO: 14778 - DNA, 20 bp, Artificial Sequence
  Description of Artificial Sequence: Synthetic oligonucleotide
  Target: LAMA2; (+) strand; PAM type: NNAGAAW; PAM sequence: GAAGAAT
taagaagaggctgttcaaaa

SEQ ID NO: 14779 - DNA, 20 bp, Artificial Sequence
  Description of Artificial Sequence: Synthetic oligonucleotide
  Target: LAMA2; (+) strand; PAM type: NNAGAAW; PAM sequence: CTAGAAT
ataaaacatttgaacctggt

SEQ ID NO: 14780 - DNA, 20 bp, Artificial Sequence
  Description of Artificial Sequence: Synthetic oligonucleotide
  Target: LAMA2; (+) strand; PAM type: NNAGAAW; PAM sequence: TTAGAAA
gacttcaattagacatgtga

SEQ ID NO: 14781 - DNA, 20 bp, Artificial Sequence
  Description of Artificial Sequence: Synthetic oligonucleotide
  Target: LAMA2; (+) strand; PAM type: NNAGAAW; PAM sequence: TTAGAAA
aatgcaagagagctacattt

SEQ ID NO: 14782 - DNA, 20 bp, Artificial Sequence
  Description of Artificial Sequence: Synthetic oligonucleotide
  Target: LAMA2; (+) strand; PAM type: NNAGAAW; PAM sequence: AAAGAAA
caagagagctacatttttag

SEQ ID NO: 14783 - DNA, 20 bp, Artificial Sequence
  Description of Artificial Sequence: Synthetic oligonucleotide
  Target: LAMA2; (+) strand; PAM type: NNAGAAW; PAM sequence: TCAGAAT
agaaagaaatcaaaaactcc

SEQ ID NO: 14784 - DNA, 20 bp, Artificial Sequence
  Description of Artificial Sequence: Synthetic oligonucleotide
  Target: LAMA2; (+) strand; PAM type: NNAGAAW; PAM sequence: ACAGAAT
acaagagttccgttttatcc

SEQ ID NO: 14785 - DNA, 20 bp, Artificial Sequence
  Description of Artificial Sequence: Synthetic oligonucleotide
  Target: LAMA2; (+) strand; PAM type: NNAGAAW; PAM sequence: CGAGAAA
aaaagtctagacttctgaat

SEQ ID NO: 14786 - DNA, 20 bp, Artificial Sequence
  Description of Artificial Sequence: Synthetic oligonucleotide
  Target: LAMA2; (+) strand; PAM type: NNAGAAW; PAM sequence: GAAGAAT
gagaaatacttcaccattat

SEQ ID NO: 14787 - DNA, 20 bp, Artificial Sequence
  Description of Artificial Sequence: Synthetic oligonucleotide
  Target: LAMA2; (+) strand; PAM type: NNAGAAW; PAM sequence: AAAGAAA
gacaattcttgcattgctat

SEQ ID NO: 14788 - DNA, 20 bp, Artificial Sequence
  Description of Artificial Sequence: Synthetic oligonucleotide
  Target: LAMA2; (+) strand; PAM type: NNAGAAW; PAM sequence: TAAGAAA
gaaatacctgagactgatta

SEQ ID NO: 14789 - DNA, 20 bp, Artificial Sequence
  Description of Artificial Sequence: Synthetic oligonucleotide
  Target: LAMA2; (+) strand; PAM type: NNAGAAW; PAM sequence: GGAGAAA
acttccacatggcaggatca

SEQ ID NO: 14790 - DNA, 20 bp, Artificial Sequence
  Description of Artificial Sequence: Synthetic oligonucleotide
  Target: LAMA2; (+) strand; PAM type: NNAGAAW; PAM sequence: CGAGAAT
ctggggattatattttaaca

SEQ ID NO: 14791 - DNA, 20 bp, Artificial Sequence
  Description of Artificial Sequence: Synthetic oligonucleotide
  Target: LAMA2; (+) strand; PAM type: NNAGAAW; PAM sequence: GTAGAAT
tcatttgggctgttattgaa

SEQ ID NO: 14792 - DNA, 20 bp, Artificial Sequence
  Description of Artificial Sequence: Synthetic oligonucleotide
  Target: LAMA2; (+) strand; PAM type: NNAGAAW; PAM sequence: AAAGAAA
acatactcaaagcagttggc

SEQ ID NO: 14793 - DNA, 20 bp, Artificial Sequence
  Description of Artificial Sequence: Synthetic oligonucleotide
  Target: LAMA2; (+) strand; PAM type: NNAGAAW; PAM sequence: ATAGAAA
tactgattagcaataattag

SEQ ID NO: 14794 - DNA, 20 bp, Artificial Sequence
  Description of Artificial Sequence: Synthetic oligonucleotide
  Target: LAMA2; (+) strand; PAM type: NNAGAAW; PAM sequence: CAAGAAA
aaaatacttacctataaaga

SEQ ID NO: 14795 - DNA, 20 bp, Artificial Sequence
  Description of Artificial Sequence: Synthetic oligonucleotide
  Target: LAMA2; (+) strand; PAM type: NNAGAAW; PAM sequence: ACAGAAT
ggccgataatcattttaata

SEQ ID NO: 14796 - DNA, 20 bp, Artificial Sequence
  Description of Artificial Sequence: Synthetic oligonucleotide
  Target: LAMA2; (+) strand; PAM type: NNAGAAW; PAM sequence: ACAGAAA
gcaaactactgttagcagga

SEQ ID NO: 14797 - DNA, 20 bp, Artificial Sequence
  Description of Artificial Sequence: Synthetic oligonucleotide
  Target: LAMA2; (+) strand; PAM type: NNAGAAW; PAM sequence: TAAGAAT
actcctggtaatggtggata

SEQ ID NO: 14798 - DNA, 20 bp, Artificial Sequence
  Description of Artificial Sequence: Synthetic oligonucleotide
  Target: LAMA2; (+) strand; PAM type: NNAGAAW; PAM sequence: ACAGAAA
agtcatgctctgcttgggag

SEQ ID NO: 14799 - DNA, 20 bp, Artificial Sequence
  Description of Artificial Sequence: Synthetic oligonucleotide
  Target: LAMA2; (+) strand; PAM type: NNAGAAW; PAM sequence: AAAGAAA
ttggttactaaaaaaggata

SEQ ID NO: 14800 - DNA, 20 bp, Artificial Sequence
  Description of Artificial Sequence: Synthetic oligonucleotide
  Target: LAMA2; (+) strand; PAM type: NNAGAAW; PAM sequence: TCAGAAA
acttgcagcaaagctgaggt

SEQ ID NO: 14801 - DNA, 20 bp, Artificial Sequence
  Description of Artificial Sequence: Synthetic oligonucleotide
  Target: LAMA2; (+) strand; PAM type: NNAGAAW; PAM sequence: GGAGAAA
atcattctgccaccggatac

SEQ ID NO: 14802 - DNA, 20 bp, Artificial Sequence
  Description of Artificial Sequence: Synthetic oligonucleotide
  Target: LAMA2; (+) strand; PAM type: NNAGAAW; PAM sequence: TCAGAAA
aagcagggtgaatttggagc

SEQ ID NO: 14803 - DNA, 20 bp, Artificial Sequence
  Description of Artificial Sequence: Synthetic oligonucleotide
  Target: LAMA2; (+) strand; PAM type: NNAGAAW; PAM sequence: TTAGAAA
ccaagatcctaaatgacatt

SEQ ID NO: 14804 - DNA, 20 bp, Artificial Sequence
  Description of Artificial Sequence: Synthetic oligonucleotide
  Target: LAMA2; (+) strand; PAM type: NNAGAAW; PAM sequence: GCAGAAA
atgagctctgtaaatcaaga

SEQ ID NO: 14805 - DNA, 20 bp, Artificial Sequence
  Description of Artificial Sequence: Synthetic oligonucleotide
  Target: LAMA2; (+) strand; PAM type: NNAGAAW; PAM sequence: GCAGAAA
acaaaaagacaaatggataa

SEQ ID NO: 14806 - DNA, 20 bp, Artificial Sequence
  Description of Artificial Sequence: Synthetic oligonucleotide
  Target: LAMA2; (+) strand; PAM type: NNAGAAW; PAM sequence: AGAGAAA
ataagcagaaattaaagatg

SEQ ID NO: 14807 - DNA, 20 bp, Artificial Sequence
  Description of Artificial Sequence: Synthetic oligonucleotide
  Target: LAMA2; (+) strand; PAM type: NNAGAAW; PAM sequence: CAAGAAA
aatttgagaggtaaatacag

SEQ ID NO: 14808 - DNA, 20 bp, Artificial Sequence
  Description of Artificial Sequence: Synthetic oligonucleotide
  Target: LAMA2; (+) strand; PAM type: NNAGAAW; PAM sequence: TAAGAAT
gagaacagagtgatgtactt

SEQ ID NO: 14809 - DNA, 20 bp, Artificial Sequence
  Description of Artificial Sequence: Synthetic oligonucleotide
  Target: LAMA2; (+) strand; PAM type: NNAGAAW; PAM sequence: AAAGAAA
gaattatagatgatcctgaa

SEQ ID NO: 14810 - DNA, 20 bp, Artificial Sequence
  Description of Artificial Sequence: Synthetic oligonucleotide
  Target: LAMA2; (+) strand; PAM type: NNAGAAW; PAM sequence: GAAGAAA
aaatcaaaaacaaatctgaa

SEQ ID NO: 14811 - DNA, 20 bp, Artificial Sequence
  Description of Artificial Sequence: Synthetic oligonucleotide
  Target: LAMA2; (+) strand; PAM type: NNAGAAW; PAM sequence: TCAGAAA
aaaaaaaacaaacccaagct

SEQ ID NO: 14812 - DNA, 20 bp, Artificial Sequence
  Description of Artificial Sequence: Synthetic oligonucleotide
  Target: LAMA2; (+) strand; PAM type: NNAGAAW; PAM sequence: AGAGAAA
aatatgaattatgtaaataa

SEQ ID NO: 14813 - DNA, 20 bp, Artificial Sequence
  Description of Artificial Sequence: Synthetic oligonucleotide
  Target: LAMA2; (+) strand; PAM type: NNAGAAW; PAM sequence: GAAGAAA
atcgtgtatacatcttgggc

SEQ ID NO: 14814 - DNA, 20 bp, Artificial Sequence
  Description of Artificial Sequence: Synthetic oligonucleotide
  Target: LAMA2; (+) strand; PAM type: NNAGAAW; PAM sequence: TCAGAAT
ttactaacagagacctcaaa

SEQ ID NO: 14815 - DNA, 20 bp, Artificial Sequence
  Description of Artificial Sequence: Synthetic oligonucleotide
  Target: LAMA2; (+) strand; PAM type: NNAGAAW; PAM sequence: CAAGAAT
cctcaaatcagaattgtatg

SEQ ID NO: 14816 - DNA, 20 bp, Artificial Sequence
  Description of Artificial Sequence: Synthetic oligonucleotide
  Target: LAMA2; (+) strand; PAM type: NNAGAAW; PAM sequence: TCAGAAA
atacccagcccctctctacc

SEQ ID NO: 14817 - DNA, 20 bp, Artificial Sequence
  Description of Artificial Sequence: Synthetic oligonucleotide
  Target: LAMA2; (+) strand; PAM type: NNAGAAW; PAM sequence: CTAGAAT
atgtttcccaagtgactaaa

SEQ ID NO: 14818 - DNA, 20 bp, Artificial Sequence
  Description of Artificial Sequence: Synthetic oligonucleotide
  Target: LAMA2; (+) strand; PAM type: NNAGAAW; PAM sequence: ATAGAAA
aatatgtgtttaatggaagc

SEQ ID NO: 14819 - DNA, 20 bp, Artificial Sequence
  Description of Artificial Sequence: Synthetic oligonucleotide
  Target: LAMA2; (+) strand; PAM type: NNAGAAW; PAM sequence: TTAGAAT
ttaatggaagcatagaaaca

SEQ ID NO: 14820 - DNA, 20 bp, Artificial Sequence
  Description of Artificial Sequence: Synthetic oligonucleotide
  Target: LAMA2; (+) strand; PAM type: NNAGAAW; PAM sequence: AGAGAAA
cagttcttttaagcatcatc

SEQ ID NO: 14821 - DNA, 20 bp, Artificial Sequence
  Description of Artificial Sequence: Synthetic oligonucleotide
  Target: LAMA2; (+) strand; PAM type: NNAGAAW; PAM sequence: CTAGAAA
taatctgcaatcgctgtata

SEQ ID NO: 14822 - DNA, 20 bp, Artificial Sequence
  Description of Artificial Sequence: Synthetic oligonucleotide
  Target: LAMA2; (+) strand; PAM type: NNAGAAW; PAM sequence: GTAGAAA
cattaatatggttaaatgat

SEQ ID NO: 14823 - DNA, 20 bp, Artificial Sequence
  Description of Artificial Sequence: Synthetic oligonucleotide
  Target: LAMA2; (+) strand; PAM type: NNAGAAW; PAM sequence: TGAGAAT
agtggttgttaaaatggcct

SEQ ID NO: 14824 - DNA, 20 bp, Artificial Sequence
  Description of Artificial Sequence: Synthetic oligonucleotide
  Target: LAMA2; (+) strand; PAM type: NNAGAAW; PAM sequence: GTAGAAA
atattgctcagagcagaact

SEQ ID NO: 14825 - DNA, 20 bp, Artificial Sequence
  Description of Artificial Sequence: Synthetic oligonucleotide
  Target: LAMA2; (+) strand; PAM type: NNAGAAW; PAM sequence: TAAGAAA
gaaaatgtaccacttacatt

SEQ ID NO: 14826 - DNA, 20 bp, Artificial Sequence
  Description of Artificial Sequence: Synthetic oligonucleotide
  Target: LAMA2; (+) strand; PAM type: NNAGAAW; PAM sequence: GGAGAAT
ctactcggaaggctgaggcc

SEQ ID NO: 14827 - DNA, 20 bp, Artificial Sequence
  Description of Artificial Sequence: Synthetic oligonucleotide
  Target: LAMA2; (+) strand; PAM type: NNAGAAW; PAM sequence: CAAGAAT
ggcaaattcggactcgatgc

SEQ ID NO: 14828 - DNA, 20 bp, Artificial Sequence
  Description of Artificial Sequence: Synthetic oligonucleotide
  Target: LAMA2; (+) strand; PAM type: NNAGAAW; PAM sequence: GTAGAAA
tagtcaggcactgaggggta

SEQ ID NO: 14829 - DNA, 20 bp, Artificial Sequence
  Description of Artificial Sequence: Synthetic oligonucleotide
  Target: LAMA2; (+) strand; PAM type: NNAGAAW; PAM sequence: TCAGAAT
tgttgcttgtgagaacatca

SEQ ID NO: 14830 - DNA, 20 bp, Artificial Sequence
  Description of Artificial Sequence: Synthetic oligonucleotide
  Target: LAMA2; (+) strand; PAM type: NNAGAAW; PAM sequence: AAAGAAA
gcagttcgtaacttagtttt

SEQ ID NO: 14831 - DNA, 20 bp, Artificial Sequence
  Description of Artificial Sequence: Synthetic oligonucleotide
  Target: LAMA2; (+) strand; PAM type: NNAGAAW; PAM sequence: TTAGAAT
gagaacaagataaaatcttt

SEQ ID NO: 14832 - DNA, 20 bp, Artificial Sequence
  Description of Artificial Sequence: Synthetic oligonucleotide
  Target: LAMA2; (+) strand; PAM type: NNAGAAW; PAM sequence: GAAGAAA
caatctatttcgaggctcgg

SEQ ID NO: 14833 - DNA, 20 bp, Artificial Sequence
  Description of Artificial Sequence: Synthetic oligonucleotide
  Target: LAMA2; (+) strand; PAM type: NNAGAAW; PAM sequence: CTAGAAT
aggtgggacacctactcatg

SEQ ID NO: 14834 - DNA, 20 bp, Artificial Sequence
  Description of Artificial Sequence: Synthetic oligonucleotide
  Target: LAMA2; (+) strand; PAM type: NNAGAAW; PAM sequence: ACAGAAA
agtgatttctcttcttgtta

SEQ ID NO: 14835 - DNA, 20 bp, Artificial Sequence
  Description of Artificial Sequence: Synthetic oligonucleotide
  Target: LAMA2; (+) strand; PAM type: NNAGAAW; PAM sequence: AAAGAAT
atttctcttcttgttaacag

SEQ ID NO: 14836 - DNA, 20 bp, Artificial Sequence
  Description of Artificial Sequence: Synthetic oligonucleotide
  Target: LAMA2; (+) strand; PAM type: NNAGAAW; PAM sequence: ATAGAAA
gacaaagcaggtaaactcta

SEQ ID NO: 14837 - DNA, 20 bp, Artificial Sequence
  Description of Artificial Sequence: Synthetic oligonucleotide
  Target: LAMA2; (+) strand; PAM type: NNAGAAW; PAM sequence: TAAGAAA
attgacctacagatatcaga

SEQ ID NO: 14838 - DNA, 20 bp, Artificial Sequence
  Description of Artificial Sequence: Synthetic oligonucleotide
  Target: LAMA2; (+) strand; PAM type: NNAGAAW; PAM sequence: TCAGAAA
gaagaagctactaccattca

SEQ ID NO: 14839 - DNA, 20 bp, Artificial Sequence
  Description of Artificial Sequence: Synthetic oligonucleotide
  Target: LAMA2; (+) strand; PAM type: NNAGAAW; PAM sequence: AAAGAAA
agctactaccattcatcaga

SEQ ID NO: 14840 - DNA, 20 bp, Artificial Sequence
  Description of Artificial Sequence: Synthetic oligonucleotide
  Target: LAMA2; (+) strand; PAM type: NNAGAAW; PAM sequence: TGAGAAA
atcagaaaagaaaaatagca

SEQ ID NO: 14841 - DNA, 20 bp, Artificial Sequence
  Description of Artificial Sequence: Synthetic oligonucleotide
  Target: LAMA2; (+) strand; PAM type: NNAGAAW; PAM sequence: TGAGAAA
taaatggattataaaagtgc

SEQ ID NO: 14842 - DNA, 20 bp, Artificial Sequence
  Description of Artificial Sequence: Synthetic oligonucleotide
  Target: LAMA2; (+) strand; PAM type: NNAGAAW; PAM sequence: TGAGAAA
attttccctatgcatcatgt

SEQ ID NO: 14843 - DNA, 20 bp, Artificial Sequence
  Description of Artificial Sequence: Synthetic oligonucleotide
  Target: LAMA2; (+) strand; PAM type: NNAGAAW; PAM sequence: CAAGAAT
aaaaaaatcacacagaacag

SEQ ID NO: 14844 - DNA, 20 bp, Artificial Sequence
  Description of Artificial Sequence: Synthetic oligonucleotide
  Target: LAMA2; (+) strand; PAM type: NNAGAAW; PAM sequence: GCAGAAT
accggtctcagtgtcctggg

SEQ ID NO: 14845 - DNA, 20 bp, Artificial Sequence
  Description of Artificial Sequence: Synthetic oligonucleotide
  Target: LAMA2; (+) strand; PAM type: NNAGAAW; PAM sequence: AAAGAAA
agaattaatctcaagctttt

SEQ ID NO: 14846 - DNA, 20 bp, Artificial Sequence
  Description of Artificial Sequence: Synthetic oligonucleotide
  Target: LAMA2; (+) strand; PAM type: NNAGAAW; PAM sequence: AAAGAAT
ttaatctcaagcttttaaag

SEQ ID NO: 14847 - DNA, 20 bp, Artificial Sequence
  Description of Artificial Sequence: Synthetic oligonucleotide
  Target: LAMA2; (+) strand; PAM type: NNAGAAW; PAM sequence: AGAGAAT
tattgaaatataaaataaag

SEQ ID NO: 14848 - DNA, 20 bp, Artificial Sequence
  Description of Artificial Sequence: Synthetic oligonucleotide
  Target: LAMA2; (+) strand; PAM type: NNAGAAW; PAM sequence: TGAGAAA
ccttatccaatgggataaaa

SEQ ID NO: 14849 - DNA, 20 bp, Artificial Sequence
  Description of Artificial Sequence: Synthetic oligonucleotide
  Target: LAMA2; (+) strand; PAM type: NNAGAAW; PAM sequence: GCAGAAA
gtaagtttcataccatggag

SEQ ID NO: 14850 - DNA, 20 bp, Artificial Sequence
  Description of Artificial Sequence: Synthetic oligonucleotide
  Target: LAMA2; (+) strand; PAM type: NNAGAAW; PAM sequence: TGAGAAT
tcagtctctgttacattcta

SEQ ID NO: 14851 - DNA, 20 bp, Artificial Sequence
  Description of Artificial Sequence: Synthetic oligonucleotide
  Target: LAMA2; (+) strand; PAM type: NNAGAAW; PAM sequence: ATAGAAT
ctgttacattctatgagaat

SEQ ID NO: 14852 - DNA, 20 bp, Artificial Sequence
  Description of Artificial Sequence: Synthetic oligonucleotide
  Target: LAMA2; (+) strand; PAM type: NNAGAAW; PAM sequence: ACAGAAA
gacctgcctaggaaagcaaa

SEQ ID NO: 14853 - DNA, 20 bp, Artificial Sequence
  Description of Artificial Sequence: Synthetic oligonucleotide
  Target: LAMA2; (+) strand; PAM type: NNAGAAW; PAM sequence: GCAGAAA
tggaataagcacacaagaca

SEQ ID NO: 14854 - DNA, 20 bp, Artificial Sequence
  Description of Artificial Sequence: Synthetic oligonucleotide
  Target: LAMA2; (+) strand; PAM type: NNAGAAW; PAM sequence: TTAGAAT
tatctatactgttaattatt

SEQ ID NO: 14855 - DNA, 20 bp, Artificial Sequence
  Description of Artificial Sequence: Synthetic oligonucleotide
  Target: LAMA2; (+) strand; PAM type: NNAGAAW; PAM sequence: TTAGAAA
ccatagcagatttgcatgtc

SEQ ID NO: 14856 - DNA, 20 bp, Artificial Sequence
  Description of Artificial Sequence: Synthetic oligonucleotide
  Target: LAMA2; (+) strand; PAM type: NNAGAAW; PAM sequence: ATAGAAA
acatcttgttagtggaactg

SEQ ID NO: 14857 - DNA, 20 bp, Artificial Sequence
  Description of Artificial Sequence: Synthetic oligonucleotide
  Target: LAMA2; (+) strand; PAM type: NNAGAAW; PAM sequence: TTAGAAT
gtgaccgtttttttgaaact

SEQ ID NO: 14858 - DNA, 20 bp, Artificial Sequence
  Description of Artificial Sequence: Synthetic oligonucleotide
  Target: LAMA2; (+) strand; PAM type: NNAGAAW; PAM sequence: GCAGAAA
gaaaaaaaaaatggtgtatt

SEQ ID NO: 14859 - DNA, 20 bp, Artificial Sequence
  Description of Artificial Sequence: Synthetic oligonucleotide
  Target: LAMA2; (+) strand; PAM type: NNAGAAW; PAM sequence: AGAGAAA
gttatgtgcattcatgtgca

SEQ ID NO: 14860 - DNA, 20 bp, Artificial Sequence
  Description of Artificial Sequence: Synthetic oligonucleotide
  Target: LAMA2; (+) strand; PAM type: NNAGAAW; PAM sequence: GGAGAAT
gcattcatgtgcaagagaaa

SEQ ID NO: 14861 - DNA, 20 bp, Artificial Sequence
  Description of Artificial Sequence: Synthetic oligonucleotide
  Target: LAMA2; (+) strand; PAM type: NNAGAAW; PAM sequence: TCAGAAA
ttataatgactatttcacca

SEQ ID NO: 14862 - DNA, 20 bp, Artificial Sequence
  Description of Artificial Sequence: Synthetic oligonucleotide
  Target: LAMA2; (+) strand; PAM type: NNAGAAW; PAM sequence: TAAGAAA
aaggaattatttaataaagt

SEQ ID NO: 14863 - DNA, 20 bp, Artificial Sequence
  Description of Artificial Sequence: Synthetic oligonucleotide
  Target: LAMA2; (+) strand; PAM type: NNAGAAW; PAM sequence: TCAGAAA
attattttgaaacattatcc

SEQ ID NO: 14864 - DNA, 20 bp, Artificial Sequence
  Description of Artificial Sequence: Synthetic oligonucleotide
  Target: LAMA2; (+) strand; PAM type: NNAGAAW; PAM sequence: AAAGAAA
ttttgaaacattatcctcag

SEQ ID NO: 14865 - DNA, 20 bp, Artificial Sequence
  Description of Artificial Sequence: Synthetic oligonucleotide
  Target: LAMA2; (+) strand; PAM type: NNAGAAW; PAM sequence: GAAGAAA
gtcattcagagcattgggaa

SEQ ID NO: 14866 - DNA, 20 bp, Artificial Sequence
  Description of Artificial Sequence: Synthetic oligonucleotide
  Target: LAMA2; (+) strand; PAM type: NNAGAAW; PAM sequence: CAAGAAT
gaccttgggttgtctgtttg

SEQ ID NO: 14867 - DNA, 20 bp, Artificial Sequence
  Description of Artificial Sequence: Synthetic oligonucleotide
  Target: LAMA2; (+) strand; PAM type: NNAGAAW; PAM sequence: CCAGAAA
taggatttggtacatgagcc

SEQ ID NO: 14868 - DNA, 20 bp, Artificial Sequence
  Description of Artificial Sequence: Synthetic oligonucleotide
  Target: LAMA2; (+) strand; PAM type: NNAGAAW; PAM sequence: TCAGAAA
atcaaccccacctcatgcag

SEQ ID NO: 14869 - DNA, 20 bp, Artificial Sequence
  Description of Artificial Sequence: Synthetic oligonucleotide
  Target: LAMA2; (+) strand; PAM type: NNAGAAW; PAM sequence: AGAGAAA
ttcttataataaagtgagct

SEQ ID NO: 14870 - DNA, 20 bp, Artificial Sequence
  Description of Artificial Sequence: Synthetic oligonucleotide
  Target: LAMA2; (+) strand; PAM type: NNAGAAW; PAM sequence: AAAGAAA
ataataaagtgagctagaga

SEQ ID NO: 14871 - DNA, 20 bp, Artificial Sequence
  Description of Artificial Sequence: Synthetic oligonucleotide
  Target: LAMA2; (+) strand; PAM type: NNAGAAW; PAM sequence: TAAGAAA
tagagaaaagaaaatgttat

SEQ ID NO: 14872 - DNA, 20 bp, Artificial Sequence
  Description of Artificial Sequence: Synthetic oligonucleotide
  Target: LAMA2; (+) strand; PAM type: NNAGAAW; PAM sequence: GGAGAAT
ctactcaggaggctgaggca

SEQ ID NO: 14873 - DNA, 20 bp, Artificial Sequence
  Description of Artificial Sequence: Synthetic oligonucleotide
  Target: LAMA2; (+) strand; PAM type: NNAGAAW; PAM sequence: AAAGAAA
ataaataaataaataaataa

SEQ ID NO: 14874 - DNA, 20 bp, Artificial Sequence
  Description of Artificial Sequence: Synthetic oligonucleotide
  Target: LAMA2; (+) strand; PAM type: NNAGAAW; PAM sequence: AAAGAAA
ataaataaaaagaaaaaaaa

SEQ ID NO: 14875 - DNA, 20 bp, Artificial Sequence
  Description of Artificial Sequence: Synthetic oligonucleotide
  Target: LAMA2; (+) strand; PAM type: NNAGAAW; PAM sequence: AAAGAAT
taaaaagaaaaaaaaaaaga

SEQ ID NO: 14876 - DNA, 20 bp, Artificial Sequence
  Description of Artificial Sequence: Synthetic oligonucleotide
  Target: LAMA2; (+) strand; PAM type: NNAGAAW; PAM sequence: GAAGAAA
atctctgggtagcagacgtg

SEQ ID NO: 14877 - DNA, 20 bp, Artificial Sequence
  Description of Artificial Sequence: Synthetic oligonucleotide
  Target: LAMA2; (+) strand; PAM type: NNAGAAW; PAM sequence: TAAGAAT
aatatttaacaatcaggaat

SEQ ID NO: 14878 - DNA, 20 bp, Artificial Sequence
  Description of Artificial Sequence: Synthetic oligonucleotide
  Target: LAMA2; (+) strand; PAM type: NNAGAAW; PAM sequence: TGAGAAA
agggaggtggaatgaataga

SEQ ID NO: 14879 - DNA, 20 bp, Artificial Sequence
  Description of Artificial Sequence: Synthetic oligonucleotide
  Target: LAMA2; (+) strand; PAM type: NNAGAAW; PAM sequence: AAAGAAA
agagggacatggcatcatga

SEQ ID NO: 14880 - DNA, 20 bp, Artificial Sequence
  Description of Artificial Sequence: Synthetic oligonucleotide
  Target: LAMA2; (+) strand; PAM type: NNAGAAW; PAM sequence: ACAGAAA
tgaagattttaaaatggagg

SEQ ID NO: 14881 - DNA, 20 bp, Artificial Sequence
  Description of Artificial Sequence: Synthetic oligonucleotide
  Target: LAMA2; (+) strand; PAM type: NNAGAAW; PAM sequence: AAAGAAT
gattttaaaatggaggacag

SEQ ID NO: 14882 - DNA, 20 bp, Artificial Sequence
  Description of Artificial Sequence: Synthetic oligonucleotide
  Target: LAMA2; (+) strand; PAM type: NNAGAAW; PAM sequence: ATAGAAA
ttctgcaatattattttgct

SEQ ID NO: 14883 - DNA, 20 bp, Artificial Sequence
  Description of Artificial Sequence: Synthetic oligonucleotide
  Target: LAMA2; (+) strand; PAM type: NNAGAAW; PAM sequence: GTAGAAT
acttgtgaacaaaaatgtta

SEQ ID NO: 14884 - DNA, 20 bp, Artificial Sequence
  Description of Artificial Sequence: Synthetic oligonucleotide
  Target: LAMA2; (+) strand; PAM type: NNAGAAW; PAM sequence: CAAGAAA
aacaaatgataaatgaaaat

SEQ ID NO: 14885 - DNA, 20 bp, Artificial Sequence
  Description of Artificial Sequence: Synthetic oligonucleotide
  Target: LAMA2; (+) strand; PAM type: NNAGAAW; PAM sequence: TAAGAAT
aaatgaaaatcaagaaaaac

SEQ ID NO: 14886 - DNA, 20 bp, Artificial Sequence
  Description of Artificial Sequence: Synthetic oligonucleotide
  Target: LAMA2; (+) strand; PAM type: NNAGAAW; PAM sequence: TTAGAAA
ggtcattaaaaatgttagtt

SEQ ID NO: 14887 - DNA, 20 bp, Artificial Sequence
  Description of Artificial Sequence: Synthetic oligonucleotide
  Target: LAMA2; (+) strand; PAM type: NNAGAAW; PAM sequence: TCAGAAA
tctctgcagtaatacggaaa

SEQ ID NO: 14888 - DNA, 20 bp, Artificial Sequence
  Description of Artificial Sequence: Synthetic oligonucleotide
  Target: LAMA2; (+) strand; PAM type: NNAGAAW; PAM sequence: ATAGAAA
ttagtttatttccagcaaac

SEQ ID NO: 14889 - DNA, 20 bp, Artificial Sequence
  Description of Artificial Sequence: Synthetic oligonucleotide
  Target: LAMA2; (+) strand; PAM type: NNAGAAW; PAM sequence: AGAGAAA
tagaaaaaactatttgagat

SEQ ID NO: 14890 - DNA, 20 bp, Artificial Sequence
  Description of Artificial Sequence: Synthetic oligonucleotide
  Target: LAMA2; (+) strand; PAM type: NNAGAAW; PAM sequence: AGAGAAT
tgatccccattttacgggtg

SEQ ID NO: 14891 - DNA, 20 bp, Artificial Sequence
  Description of Artificial Sequence: Synthetic oligonucleotide
  Target: LAMA2; (+) strand; PAM type: NNAGAAW; PAM sequence: TGAGAAA
ttaacgacagggatacgttc

SEQ ID NO: 14892 - DNA, 20 bp, Artificial Sequence
  Description of Artificial Sequence: Synthetic oligonucleotide
  Target: LAMA2; (+) strand; PAM type: NNAGAAW; PAM sequence: GAAGAAA
tatttttattactaaactct

SEQ ID NO: 14893 - DNA, 20 bp, Artificial Sequence
  Description of Artificial Sequence: Synthetic oligonucleotide
  Target: LAMA2; (+) strand; PAM type: NNAGAAW; PAM sequence: AAAGAAA
tttattactaaactctgaag

SEQ ID NO: 14894 - DNA, 20 bp, Artificial Sequence
  Description of Artificial Sequence: Synthetic oligonucleotide
  Target: LAMA2; (+) strand; PAM type: NNAGAAW; PAM sequence: GAAGAAA
attaaagatagacgagagca

SEQ ID NO: 14895 - DNA, 20 bp, Artificial Sequence
  Description of Artificial Sequence: Synthetic oligonucleotide
  Target: LAMA2; (+) strand; PAM type: NNAGAAW; PAM sequence: GTAGAAA
ttggaaaagtttaaattaga

SEQ ID NO: 14896 - DNA, 20 bp, Artificial Sequence
  Description of Artificial Sequence: Synthetic oligonucleotide
  Target: LAMA2; (+) strand; PAM type: NNAGAAW; PAM sequence: CCAGAAA
ctttaattccccattgtgtt

SEQ ID NO: 14897 - DNA, 20 bp, Artificial Sequence
  Description of Artificial Sequence: Synthetic oligonucleotide
  Target: LAMA2; (+) strand; PAM type: NNAGAAW; PAM sequence: AAAGAAT
cctaaaaattatttaaattg

SEQ ID NO: 14898 - DNA, 20 bp, Artificial Sequence
  Description of Artificial Sequence: Synthetic oligonucleotide
  Target: LAMA2; (+) strand; PAM type: NNAGAAW; PAM sequence: AGAGAAT
gcaaaataatcaaggaaaag

SEQ ID NO: 14899 - DNA, 20 bp, Artificial Sequence
  Description of Artificial Sequence: Synthetic oligonucleotide
  Target: LAMA2; (+) strand; PAM type: NNAGAAW; PAM sequence: ATAGAAA
tctctctcttttgctacctc

SEQ ID NO: 14900 - DNA, 20 bp, Artificial Sequence
  Description of Artificial Sequence: Synthetic oligonucleotide
  Target: LAMA2; (+) strand; PAM type: NNAGAAW; PAM sequence: AGAGAAT
taaatgcacacatacacaac

SEQ ID NO: 14901 - DNA, 20 bp, Artificial Sequence
  Description of Artificial Sequence: Synthetic oligonucleotide
  Target: LAMA2; (+) strand; PAM type: NNAGAAW; PAM sequence: ACAGAAA
ttcaaggatgaaatccatgc

SEQ ID NO: 14902 - DNA, 20 bp, Artificial Sequence
  Description of Artificial Sequence: Synthetic oligonucleotide
  Target: LAMA2; (+) strand; PAM type: NNAGAAW; PAM sequence: AAAGAAT
tattcagtggtcagcttgct

SEQ ID NO: 14903 - DNA, 20 bp, Artificial Sequence
  Description of Artificial Sequence: Synthetic oligonucleotide
  Target: LAMA2; (+) strand; PAM type: NNAGAAW; PAM sequence: TTAGAAT
tgggacattattaaatctca

SEQ ID NO: 14904 - DNA, 20 bp, Artificial Sequence
  Description of Artificial Sequence: Synthetic oligonucleotide
  Target: LAMA2; (+) strand; PAM type: NNAGAAW; PAM sequence: CTAGAAA
accaaagggatgtggaggta

SEQ ID NO: 14905 - DNA, 20 bp, Artificial Sequence
  Description of Artificial Sequence: Synthetic oligonucleotide
  Target: LAMA2; (+) strand; PAM type: NNAGAAW; PAM sequence: CCAGAAA
ccagagctgtggactacctt

SEQ ID NO: 14906 - DNA, 20 bp, Artificial Sequence
  Description of Artificial Sequence: Synthetic oligonucleotide
  Target: LAMA2; (+) strand; PAM type: NNAGAAW; PAM sequence: AAAGAAA
ctttcagatttttattgcaa

SEQ ID NO: 14907 - DNA, 20 bp, Artificial Sequence
  Description of Artificial Sequence: Synthetic oligonucleotide
  Target: LAMA2; (+) strand; PAM type: NNAGAAW; PAM sequence: CAAGAAA
ttaaaaacaaacatcttttt

SEQ ID NO: 14908 - DNA, 20 bp, Artificial Sequence
  Description of Artificial Sequence: Synthetic oligonucleotide
  Target: LAMA2; (+) strand; PAM type: NNAGAAW; PAM sequence: GAAGAAA
ccgaacaccttggagaccag

SEQ ID NO: 14909 - DNA, 20 bp, Artificial Sequence
  Description of Artificial Sequence: Synthetic oligonucleotide
  Target: LAMA2; (+) strand; PAM type: NNAGAAW; PAM sequence: CAAGAAA
gggagaaccactgagcatgt

SEQ ID NO: 14910 - DNA, 20 bp, Artificial Sequence
  Description of Artificial Sequence: Synthetic oligonucleotide
  Target: LAMA2; (+) strand; PAM type: NNAGAAW; PAM sequence: ATAGAAT
accactgagcatgtcaagaa

SEQ ID NO: 14911 - DNA, 20 bp, Artificial Sequence
  Description of Artificial Sequence: Synthetic oligonucleotide
  Target: LAMA2; (+) strand; PAM type: NNAGAAW; PAM sequence: ACAGAAA
ttctataaaatttggaaatt

SEQ ID NO: 14912 - DNA, 20 bp, Artificial Sequence
  Description of Artificial Sequence: Synthetic oligonucleotide
  Target: LAMA2; (+) strand; PAM type: NNAGAAW; PAM sequence: AAAGAAT
taaaatttggaaattacaga

SEQ ID NO: 14913 - DNA, 20 bp, Artificial Sequence
  Description of Artificial Sequence: Synthetic oligonucleotide
  Target: LAMA2; (+) strand; PAM type: NNAGAAW; PAM sequence: GAAGAAA
aaattacagaaaagaattaa

SEQ ID NO: 14914 - DNA, 20 bp, Artificial Sequence
  Description of Artificial Sequence: Synthetic oligonucleotide
  Target: LAMA2; (+) strand; PAM type: NNAGAAW; PAM sequence: TTAGAAT
ccataatttacccatttccc

SEQ ID NO: 14915 - DNA, 20 bp, Artificial Sequence
  Description of Artificial Sequence: Synthetic oligonucleotide
  Target: LAMA2; (+) strand; PAM type: NNAGAAW; PAM sequence: TAAGAAA
cctttttatcgtagtcactg

SEQ ID NO: 14916 - DNA, 20 bp, Artificial Sequence
  Description of Artificial Sequence: Synthetic oligonucleotide
  Target: LAMA2; (+) strand; PAM type: NNAGAAW; PAM sequence: GCAGAAT
caaaacaggcaaaatacccc

SEQ ID NO: 14917 - DNA, 20 bp, Artificial Sequence
  Description of Artificial Sequence: Synthetic oligonucleotide
  Target: LAMA2; (+) strand; PAM type: NNAGAAW; PAM sequence: TTAGAAA
ggatattggtccgtggcctt

SEQ ID NO: 14918 - DNA, 20 bp, Artificial Sequence
  Description of Artificial Sequence: Synthetic oligonucleotide
  Target: LAMA2; (+) strand; PAM type: NNAGAAW; PAM sequence: TGAGAAT
ggatctaggttgtgcgctcc

SEQ ID NO: 14919 - DNA, 20 bp, Artificial Sequence
  Description of Artificial Sequence: Synthetic oligonucleotide
  Target: LAMA2; (+) strand; PAM type: NNAGAAW; PAM sequence: TGAGAAT
tcaagtgaactccaacactg

SEQ ID NO: 14920 - DNA, 20 bp, Artificial Sequence
  Description of Artificial Sequence: Synthetic oligonucleotide
  Target: LAMA2; (+) strand; PAM type: NNAGAAW; PAM sequence: GTAGAAA
cttctaagctgaacgtggct

SEQ ID NO: 14921 - DNA, 20 bp, Artificial Sequence
  Description of Artificial Sequence: Synthetic oligonucleotide
  Target: LAMA2; (+) strand; PAM type: NNAGAAW; PAM sequence: TGAGAAT
ggtgttgcctcttatttcat

SEQ ID NO: 14922 - DNA, 20 bp, Artificial Sequence
  Description of Artificial Sequence: Synthetic oligonucleotide
  Target: LAMA2; (+) strand; PAM type: NNAGAAW; PAM sequence: CCAGAAA
tggatgaattattcttgttt

SEQ ID NO: 14923 - DNA, 20 bp, Artificial Sequence
  Description of Artificial Sequence: Synthetic oligonucleotide
  Target: LAMA2; (+) strand; PAM type: NNAGAAW; PAM sequence: AAAGAAA
cagatatgtattaccactgt

SEQ ID NO: 14924 - DNA, 20 bp, Artificial Sequence
  Description of Artificial Sequence: Synthetic oligonucleotide
  Target: LAMA2; (+) strand; PAM type: NNAGAAW; PAM sequence: AAAGAAT
aattaaattagcctatttgt

SEQ ID NO: 14925 - DNA, 20 bp, Artificial Sequence
  Description of Artificial Sequence: Synthetic oligonucleotide
  Target: LAMA2; (+) strand; PAM type: NNAGAAW; PAM sequence: TTAGAAT
ttattggtaaaccttaacta

SEQ ID NO: 14926 - DNA, 20 bp, Artificial Sequence
  Description of Artificial Sequence: Synthetic oligonucleotide
  Target: LAMA2; (+) strand; PAM type: NNAGAAW; PAM sequence: TAAGAAA
tatgatgctgatggttagta

SEQ ID NO: 14927 - DNA, 20 bp, Artificial Sequence
  Description of Artificial Sequence: Synthetic oligonucleotide
  Target: LAMA2; (+) strand; PAM type: NNAGAAW; PAM sequence: CCAGAAA
atattagccatccatgaatt

SEQ ID NO: 14928 - DNA, 20 bp, Artificial Sequence
  Description of Artificial Sequence: Synthetic oligonucleotide
  Target: LAMA2; (+) strand; PAM type: NNAGAAW; PAM sequence: CAAGAAT
aatctatacacattcttaag

SEQ ID NO: 14929 - DNA, 20 bp, Artificial Sequence
  Description of Artificial Sequence: Synthetic oligonucleotide
  Target: LAMA2; (+) strand; PAM type: NNAGAAW; PAM sequence: TAAGAAT
ttatgactatttttgttctc

SEQ ID NO: 14930 - DNA, 20 bp, Artificial Sequence
  Description of Artificial Sequence: Synthetic oligonucleotide
  Target: LAMA2; (+) strand; PAM type: NNAGAAW; PAM sequence: TAAGAAA
aaatggcctcatgaggcaaa

SEQ ID NO: 14931 - DNA, 20 bp, Artificial Sequence
  Description of Artificial Sequence: Synthetic oligonucleotide
  Target: LAMA2; (+) strand; PAM type: NNAGAAW; PAM sequence: ACAGAAA
aactgggtagcttataaata

SEQ ID NO: 14932 - DNA, 20 bp, Artificial Sequence
  Description of Artificial Sequence: Synthetic oligonucleotide
  Target: LAMA2; (+) strand; PAM type: NNAGAAW; PAM sequence: AAAGAAA
gaaaatataaagtgcatagg

SEQ ID NO: 14933 - DNA, 20 bp, Artificial Sequence
  Description of Artificial Sequence: Synthetic oligonucleotide
  Target: LAMA2; (+) strand; PAM type: NNAGAAW; PAM sequence: GTAGAAA
agtgcataggaaagaaaact

SEQ ID NO: 14934 - DNA, 20 bp, Artificial Sequence
  Description of Artificial Sequence: Synthetic oligonucleotide
  Target: LAMA2; (+) strand; PAM type: NNAGAAW; PAM sequence: AAAGAAA
ctttatagactaaatatttt

SEQ ID NO: 14935 - DNA, 20 bp, Artificial Sequence
  Description of Artificial Sequence: Synthetic oligonucleotide
  Target: LAMA2; (+) strand; PAM type: NNAGAAW; PAM sequence: TAAGAAA
agctcagtgacattgctcct

SEQ ID NO: 14936 - DNA, 20 bp, Artificial Sequence
  Description of Artificial Sequence: Synthetic oligonucleotide
  Target: LAMA2; (+) strand; PAM type: NNAGAAW; PAM sequence: AAAGAAA
tatcataattcttattttaa

SEQ ID NO: 14937 - DNA, 20 bp, Artificial Sequence
  Description of Artificial Sequence: Synthetic oligonucleotide
  Target: LAMA2; (+) strand; PAM type: NNAGAAW; PAM sequence: CTAGAAT
gtaaatagacagatttgtaa

SEQ ID NO: 14938 - DNA, 20 bp, Artificial Sequence
  Description of Artificial Sequence: Synthetic oligonucleotide
  Target: LAMA2; (+) strand; PAM type: NNAGAAW; PAM sequence: CCAGAAT
taatctacctaacaaccttg

SEQ ID NO: 14939 - DNA, 20 bp, Artificial Sequence
  Description of Artificial Sequence: Synthetic oligonucleotide
  Target: LAMA2; (+) strand; PAM type: NNAGAAW; PAM sequence: TAAGAAA
taagttctggaaattaatgc

SEQ ID NO: 14940 - DNA, 20 bp, Artificial Sequence
  Description of Artificial Sequence: Synthetic oligonucleotide
  Target: LAMA2; (+) strand; PAM type: NNAGAAW; PAM sequence: ACAGAAT
aattatatcttagagtcggg

SEQ ID NO: 14941 - DNA, 20 bp, Artificial Sequence
  Description of Artificial Sequence: Synthetic oligonucleotide
  Target: LAMA2; (+) strand; PAM type: NNAGAAW; PAM sequence: TGAGAAA
ggtcatgtatggaaaacact

SEQ ID NO: 14942 - DNA, 20 bp, Artificial Sequence
  Description of Artificial Sequence: Synthetic oligonucleotide
  Target: LAMA2; (+) strand; PAM type: NNAGAAW; PAM sequence: TCAGAAT
taaacagtgctcattaggaa

SEQ ID NO: 14943 - DNA, 20 bp, Artificial Sequence
  Description of Artificial Sequence: Synthetic oligonucleotide
  Target: LAMA2; (+) strand; PAM type: NNAGAAW; PAM sequence: AAAGAAT
aaaaaattaaaaattaaaaa

SEQ ID NO: 14944 - DNA, 20 bp, Artificial Sequence
  Description of Artificial Sequence: Synthetic oligonucleotide
  Target: LAMA2; (+) strand; PAM type: NNAGAAW; PAM sequence: AGAGAAA
attgttgatgaactgatgct

SEQ ID NO: 14945 - DNA, 20 bp, Artificial Sequence
  Description of Artificial Sequence: Synthetic oligonucleotide
  Target: LAMA2; (+) strand; PAM type: NNAGAAW; PAM sequence: ATAGAAA
cagttaacaagatgagatta

SEQ ID NO: 14946 - DNA, 20 bp, Artificial Sequence
  Description of Artificial Sequence: Synthetic oligonucleotide
  Target: LAMA2; (+) strand; PAM type: NNAGAAW; PAM sequence: TAAGAAT
ctatggcctatggtagatag

SEQ ID NO: 14947 - DNA, 20 bp, Artificial Sequence
  Description of Artificial Sequence: Synthetic oligonucleotide
  Target: LAMA2; (+) strand; PAM type: NNAGAAW; PAM sequence: AAAGAAA
ttataatctactatattttg

SEQ ID NO: 14948 - DNA, 20 bp, Artificial Sequence
  Description of Artificial Sequence: Synthetic oligonucleotide
  Target: LAMA2; (+) strand; PAM type: NNAGAAW; PAM sequence: TTAGAAT
cttggatcactcactgaaaa

SEQ ID NO: 14949 - DNA, 20 bp, Artificial Sequence
  Description of Artificial Sequence: Synthetic oligonucleotide
  Target: LAMA2; (+) strand; PAM type: NNAGAAW; PAM sequence: TAAGAAT
agacgaaaaaagctgtctta

SEQ ID NO: 14950 - DNA, 20 bp, Artificial Sequence
  Description of Artificial Sequence: Synthetic oligonucleotide
  Target: LAMA2; (+) strand; PAM type: NNAGAAW; PAM sequence: TGAGAAT
atactagcacataccactct

SEQ ID NO: 14951 - DNA, 20 bp, Artificial Sequence
  Description of Artificial Sequence: Synthetic oligonucleotide
  Target: LAMA2; (+) strand; PAM type: NNAGAAW; PAM sequence: TAAGAAA
cctaatggctaatttttata

SEQ ID NO: 14952 - DNA, 20 bp, Artificial Sequence
  Description of Artificial Sequence: Synthetic oligonucleotide
  Target: LAMA2; (+) strand; PAM type: NNAGAAW; PAM sequence: ACAGAAA
tgtacactatttcaaagcag

SEQ ID NO: 14953 - DNA, 20 bp, Artificial Sequence
  Description of Artificial Sequence: Synthetic oligonucleotide
  Target: LAMA2; (+) strand; PAM type: NNAGAAW; PAM sequence: AGAGAAT
attgagaagattgactgtcc

SEQ ID NO: 14954 - DNA, 20 bp, Artificial Sequence
  Description of Artificial Sequence: Synthetic oligonucleotide
  Target: LAMA2; (+) strand; PAM type: NNAGAAW; PAM sequence: GAAGAAA
caatatttgctttctctgtt

SEQ ID NO: 14955 - DNA, 20 bp, Artificial Sequence
  Description of Artificial Sequence: Synthetic oligonucleotide
  Target: LAMA2; (+) strand; PAM type: NNAGAAW; PAM sequence: AGAGAAA
tatgtagacttacaggtata

SEQ ID NO: 14956 - DNA, 20 bp, Artificial Sequence
  Description of Artificial Sequence: Synthetic oligonucleotide
  Target: LAMA2; (+) strand; PAM type: NNAGAAW; PAM sequence: AGAGAAA
gtcatcggggaatgtttctc

SEQ ID NO: 14957 - DNA, 20 bp, Artificial Sequence
  Description of Artificial Sequence: Synthetic oligonucleotide
  Target: LAMA2; (+) strand; PAM type: NNAGAAW; PAM sequence: TGAGAAT
taaagagtatccgcataatt

SEQ ID NO: 14958 - DNA, 20 bp, Artificial Sequence
  Description of Artificial Sequence: Synthetic oligonucleotide
  Target: LAMA2; (+) strand; PAM type: NNAGAAW; PAM sequence: AAAGAAA
gtggctacggcattatatgc

SEQ ID NO: 14959 - DNA, 20 bp, Artificial Sequence
  Description of Artificial Sequence: Synthetic oligonucleotide
  Target: LAMA2; (+) strand; PAM type: NNAGAAW; PAM sequence: GGAGAAA
ggatgatcactctgcagtgt

SEQ ID NO: 14960 - DNA, 20 bp, Artificial Sequence
  Description of Artificial Sequence: Synthetic oligonucleotide
  Target: LAMA2; (+) strand; PAM type: NNAGAAW; PAM sequence: TAAGAAA
agtgtggagaaatcaccaga

SEQ ID NO: 14961 - DNA, 20 bp, Artificial Sequence
  Description of Artificial Sequence: Synthetic oligonucleotide
  Target: LAMA2; (+) strand; PAM type: NNAGAAW; PAM sequence: CAAGAAA
ccagatgaaaatagtagcaa

SEQ ID NO: 14962 - DNA, 20 bp, Artificial Sequence
  Description of Artificial Sequence: Synthetic oligonucleotide
  Target: LAMA2; (+) strand; PAM type: NNAGAAW; PAM sequence: CAAGAAA
aatagtagcaacaagaaagt

SEQ ID NO: 14963 - DNA, 20 bp, Artificial Sequence
  Description of Artificial Sequence: Synthetic oligonucleotide
  Target: LAMA2; (+) strand; PAM type: NNAGAAW; PAM sequence: CGAGAAA
gacagtgacctcagatgaaa

SEQ ID NO: 14964 - DNA, 20 bp, Artificial Sequence
  Description of Artificial Sequence: Synthetic oligonucleotide
  Target: LAMA2; (+) strand; PAM type: NNAGAAW; PAM sequence: GGAGAAA
atcaccaaggtaaatgtgga

SEQ ID NO: 14965 - DNA, 20 bp, Artificial Sequence
  Description of Artificial Sequence: Synthetic oligonucleotide
  Target: LAMA2; (+) strand; PAM type: NNAGAAW; PAM sequence: TTAGAAT
aaaagagatgaggaccaaag

SEQ ID NO: 14966 - DNA, 20 bp, Artificial Sequence
  Description of Artificial Sequence: Synthetic oligonucleotide
  Target: LAMA2; (+) strand; PAM type: NNAGAAW; PAM sequence: ACAGAAA
aagggcgtcaattatattga

SEQ ID NO: 14967 - DNA, 20 bp, Artificial Sequence
  Description of Artificial Sequence: Synthetic oligonucleotide
  Target: LAMA2; (+) strand; PAM type: NNAGAAW; PAM sequence: GGAGAAT
gggaaggaagagtcgataaa

SEQ ID NO: 14968 - DNA, 20 bp, Artificial Sequence
  Description of Artificial Sequence: Synthetic oligonucleotide
  Target: LAMA2; (+) strand; PAM type: NNAGAAW; PAM sequence: GGAGAAA
ttcgagtagccgcagaagta

SEQ ID NO: 14969 - DNA, 20 bp, Artificial Sequence
  Description of Artificial Sequence: Synthetic oligonucleotide
  Target: LAMA2; (+) strand; PAM type: NNAGAAW; PAM sequence: GGAGAAT
ctactcaggaggctgaggca

SEQ ID NO: 14970 - DNA, 20 bp, Artificial Sequence
  Description of Artificial Sequence: Synthetic oligonucleotide
  Target: LAMA2; (+) strand; PAM type: NNAGAAW; PAM sequence: AAAGAAA
gactgtctcaaaaaaaaaaa

SEQ ID NO: 14971 - DNA, 20 bp, Artificial Sequence
  Description of Artificial Sequence: Synthetic oligonucleotide
  Target: LAMA2; (+) strand; PAM type: NNAGAAW; PAM sequence: AAAGAAA
gtctcaaaaaaaaaaaaaag

SEQ ID NO: 14972 - DNA, 20 bp, Artificial Sequence
  Description of Artificial Sequence: Synthetic oligonucleotide
  Target: LAMA2; (+) strand; PAM type: NNAGAAW; PAM sequence: AAAGAAA
caaaaaaaaaaaaaagaaag

SEQ ID NO: 14973 - DNA, 20 bp, Artificial Sequence
  Description of Artificial Sequence: Synthetic oligonucleotide
  Target: LAMA2; (+) strand; PAM type: NNAGAAW; PAM sequence: AAAGAAA
aaaaaaaaagaaagaaagaa

SEQ ID NO: 14974 - DNA, 20 bp, Artificial Sequence
  Description of Artificial Sequence: Synthetic oligonucleotide
  Target: LAMA2; (+) strand; PAM type: NNAGAAW; PAM sequence: AAAGAAA
aaaaagaaagaaagaaaaag

SEQ ID NO: 14975 - DNA, 20 bp, Artificial Sequence
  Description of Artificial Sequence: Synthetic oligonucleotide
  Target: LAMA2; (+) strand; PAM type: NNAGAAW; PAM sequence: AAAGAAA
agaaagaaagaaaaagaaag

SEQ ID NO: 14976 - DNA, 20 bp, Artificial Sequence
  Description of Artificial Sequence: Synthetic oligonucleotide
  Target: LAMA2; (+) strand; PAM type: NNAGAAW; PAM sequence: CCAGAAA
aaaccatgggaagagagtat

SEQ ID NO: 14977 - DNA, 20 bp, Artificial Sequence
  Description of Artificial Sequence: Synthetic oligonucleotide
  Target: LAMA2; (+) strand; PAM type: NNAGAAW; PAM sequence: ACAGAAA
agaaatatctatcaatggct

SEQ ID NO: 14978 - DNA, 20 bp, Artificial Sequence
  Description of Artificial Sequence: Synthetic oligonucleotide
  Target: LAMA2; (+) strand; PAM type: NNAGAAW; PAM sequence: GGAGAAT
aaccagaagcctgtttaaag

SEQ ID NO: 14979 - DNA, 20 bp, Artificial Sequence
  Description of Artificial Sequence: Synthetic oligonucleotide
  Target: LAMA2; (+) strand; PAM type: NNAGAAW; PAM sequence: ATAGAAA
aaaagcttatcgaaaatagg

SEQ ID NO: 14980 - DNA, 20 bp, Artificial Sequence
  Description of Artificial Sequence: Synthetic oligonucleotide
  Target: LAMA2; (+) strand; PAM type: NNAGAAW; PAM sequence: TGAGAAT
tgaccaatttcaaatattaa

SEQ ID NO: 14981 - DNA, 20 bp, Artificial Sequence
  Description of Artificial Sequence: Synthetic oligonucleotide
  Target: LAMA2; (+) strand; PAM type: NNAGAAW; PAM sequence: GGAGAAA
aaggagggaataaagatggt

SEQ ID NO: 14982 - DNA, 20 bp, Artificial Sequence
  Description of Artificial Sequence: Synthetic oligonucleotide
  Target: LAMA2; (+) strand; PAM type: NNAGAAW; PAM sequence: GGAGAAT
ctactcgggaaggtgaggca

SEQ ID NO: 14983 - DNA, 20 bp, Artificial Sequence
  Description of Artificial Sequence: Synthetic oligonucleotide
  Target: LAMA2; (+) strand; PAM type: NNAGAAW; PAM sequence: AGAGAAA
aaaaaaaaaaaaaaaaaaaa

SEQ ID NO: 14984 - DNA, 20 bp, Artificial Sequence
  Description of Artificial Sequence: Synthetic oligonucleotide
  Target: LAMA2; (+) strand; PAM type: NNAGAAW; PAM sequence: AAAGAAA
aaaaaaaaaaaaaaagagaa

SEQ ID NO: 14985 - DNA, 20 bp, Artificial Sequence
  Description of Artificial Sequence: Synthetic oligonucleotide
  Target: LAMA2; (+) strand; PAM type: NNAGAAW; PAM sequence: AAAGAAA
aaaaaaaaaagagaaaaaga

SEQ ID NO: 14986 - DNA, 20 bp, Artificial Sequence
  Description of Artificial Sequence: Synthetic oligonucleotide
  Target: LAMA2; (+) strand; PAM type: NNAGAAW; PAM sequence: AAAGAAA
aaaaagagaaaaagaaaaga

SEQ ID NO: 14987 - DNA, 20 bp, Artificial Sequence
  Description of Artificial Sequence: Synthetic oligonucleotide
  Target: LAMA2; (+) strand; PAM type: NNAGAAW; PAM sequence: AAAGAAA
gagaaaaagaaaagaaaaga

SEQ ID NO: 14988 - DNA, 20 bp, Artificial Sequence
  Description of Artificial Sequence: Synthetic oligonucleotide
  Target: LAMA2; (+) strand; PAM type: NNAGAAW; PAM sequence: CAAGAAA
gcaatgtcatagtttcactg

SEQ ID NO: 14989 - DNA, 20 bp, Artificial Sequence
  Description of Artificial Sequence: Synthetic oligonucleotide
  Target: LAMA2; (+) strand; PAM type: NNAGAAW; PAM sequence: TAAGAAA
tgtctcttattatgcaagca

SEQ ID NO: 14990 - DNA, 20 bp, Artificial Sequence
  Description of Artificial Sequence: Synthetic oligonucleotide
  Target: LAMA2; (+) strand; PAM type: NNAGAAW; PAM sequence: TCAGAAA
ctttccaccttgaggtggtt

SEQ ID NO: 14991 - DNA, 20 bp, Artificial Sequence
  Description of Artificial Sequence: Synthetic oligonucleotide
  Target: LAMA2; (+) strand; PAM type: NNAGAAW; PAM sequence: GAAGAAA
agagctaaaacctgggatat

SEQ ID NO: 14992 - DNA, 20 bp, Artificial Sequence
  Description of Artificial Sequence: Synthetic oligonucleotide
  Target: LAMA2; (+) strand; PAM type: NNAGAAW; PAM sequence: GAAGAAA
tgaagaaacataaatgccta

SEQ ID NO: 14993 - DNA, 20 bp, Artificial Sequence
  Description of Artificial Sequence: Synthetic oligonucleotide
  Target: LAMA2; (+) strand; PAM type: NNAGAAW; PAM sequence: GGAGAAA
ctattccccaatttagagta

SEQ ID NO: 14994 - DNA, 20 bp, Artificial Sequence
  Description of Artificial Sequence: Synthetic oligonucleotide
  Target: LAMA2; (+) strand; PAM type: NNAGAAW; PAM sequence: AGAGAAT
tagagattgattcagggaaa

SEQ ID NO: 14995 - DNA, 20 bp, Artificial Sequence
  Description of Artificial Sequence: Synthetic oligonucleotide
  Target: LAMA2; (+) strand; PAM type: NNAGAAW; PAM sequence: TAAGAAA
tgtgtgtgagtgtgtgtgtg

SEQ ID NO: 14996 - DNA, 20 bp, Artificial Sequence
  Description of Artificial Sequence: Synthetic oligonucleotide
  Target: LAMA2; (+) strand; PAM type: NNAGAAW; PAM sequence: ACAGAAT
cttcttctcccttttccttt

SEQ ID NO: 14997 - DNA, 20 bp, Artificial Sequence
  Description of Artificial Sequence: Synthetic oligonucleotide
  Target: LAMA2; (+) strand; PAM type: NNAGAAW; PAM sequence: TGAGAAA
cttccagtaacaagtaagat

SEQ ID NO: 14998 - DNA, 20 bp, Artificial Sequence
  Description of Artificial Sequence: Synthetic oligonucleotide
  Target: LAMA2; (+) strand; PAM type: NNAGAAW; PAM sequence: TCAGAAA
aatataaccatatttcccaa

SEQ ID NO: 14999 - DNA, 20 bp, Artificial Sequence
  Description of Artificial Sequence: Synthetic oligonucleotide
  Target: LAMA2; (+) strand; PAM type: NNAGAAW; PAM sequence: ATAGAAA
atagagatatttttaataat

SEQ ID NO: 15000 - DNA, 20 bp, Artificial Sequence
  Description of Artificial Sequence: Synthetic oligonucleotide
  Target: LAMA2; (+) strand; PAM type: NNAGAAW; PAM sequence: CAAGAAA
caagattgggaaataattat

SEQ ID NO: 15001 - DNA, 20 bp, Artificial Sequence
  Description of Artificial Sequence: Synthetic oligonucleotide
  Target: LAMA2; (+) strand; PAM type: NNAGAAW; PAM sequence: GAAGAAA
ccatggaaacacagccctaa

SEQ ID NO: 15002 - DNA, 20 bp, Artificial Sequence
  Description of Artificial Sequence: Synthetic oligonucleotide
  Target: LAMA2; (+) strand; PAM type: NNAGAAW; PAM sequence: TAAGAAT
aaggcagggtagttttactc

SEQ ID NO: 15003 - DNA, 20 bp, Artificial Sequence
  Description of Artificial Sequence: Synthetic oligonucleotide
  Target: LAMA2; (+) strand; PAM type: NNAGAAW; PAM sequence: TCAGAAT
aataatgtatggcagtttgt

SEQ ID NO: 15004 - DNA, 20 bp, Artificial Sequence
  Description of Artificial Sequence: Synthetic oligonucleotide
  Target: LAMA2; (+) strand; PAM type: NNAGAAW; PAM sequence: TTAGAAT
gtatggcagtttgttcagaa

SEQ ID NO: 15005 - DNA, 20 bp, Artificial Sequence
  Description of Artificial Sequence: Synthetic oligonucleotide
  Target: LAMA2; (+) strand; PAM type: NNAGAAW; PAM sequence: TTAGAAA
taaaaagtaagccatttgga

SEQ ID NO: 15006 - DNA, 20 bp, Artificial Sequence
  Description of Artificial Sequence: Synthetic oligonucleotide
  Target: LAMA2; (+) strand; PAM type: NNAGAAW; PAM sequence: AAAGAAA
aggggtatcaacttaaatgt

SEQ ID NO: 15007 - DNA, 20 bp, Artificial Sequence
  Description of Artificial Sequence: Synthetic oligonucleotide
  Target: LAMA2; (+) strand; PAM type: NNAGAAW; PAM sequence: AAAGAAA
gaagcttcaagaacatatga

SEQ ID NO: 15008 - DNA, 20 bp, Artificial Sequence
  Description of Artificial Sequence: Synthetic oligonucleotide
  Target: LAMA2; (+) strand; PAM type: NNAGAAW; PAM sequence: ACAGAAT
tgtgcaaaacctaataagta

SEQ ID NO: 15009 - DNA, 20 bp, Artificial Sequence
  Description of Artificial Sequence: Synthetic oligonucleotide
  Target: LAMA2; (+) strand; PAM type: NNAGAAW; PAM sequence: GGAGAAT
atcacagatgaaaatgaatg

SEQ ID NO: 15010 - DNA, 20 bp, Artificial Sequence
  Description of Artificial Sequence: Synthetic oligonucleotide
  Target: LAMA2; (+) strand; PAM type: NNAGAAW; PAM sequence: GTAGAAA
gggagaataaagaccatatt

SEQ ID NO: 15011 - DNA, 20 bp, Artificial Sequence
  Description of Artificial Sequence: Synthetic oligonucleotide
  Target: LAMA2; (+) strand; PAM type: NNAGAAW; PAM sequence: TAAGAAA
gaaatccttaaataccagtc

SEQ ID NO: 15012 - DNA, 20 bp, Artificial Sequence
  Description of Artificial Sequence: Synthetic oligonucleotide
  Target: LAMA2; (+) strand; PAM type: NNAGAAW; PAM sequence: ATAGAAT
attttaggaaaactattatc

SEQ ID NO: 15013 - DNA, 20 bp, Artificial Sequence
  Description of Artificial Sequence: Synthetic oligonucleotide
  Target: LAMA2; (+) strand; PAM type: NNAGAAW; PAM sequence: TGAGAAA
aatgaattgaaacaggcaaa

SEQ ID NO: 15014 - DNA, 20 bp, Artificial Sequence
  Description of Artificial Sequence: Synthetic oligonucleotide
  Target: LAMA2; (+) strand; PAM type: NNAGAAW; PAM sequence: TAAGAAT
ccagaagtaggtaatagtaa

SEQ ID NO: 15015 - DNA, 20 bp, Artificial Sequence
  Description of Artificial Sequence: Synthetic oligonucleotide
  Target: LAMA2; (+) strand; PAM type: NNAGAAW; PAM sequence: TGAGAAA
tggagacaaaggaatgaatg

SEQ ID NO: 15016 - DNA, 20 bp, Artificial Sequence
  Description of Artificial Sequence: Synthetic oligonucleotide
  Target: LAMA2; (+) strand; PAM type: NNAGAAW; PAM sequence: GGAGAAA
gtggtgctattaactgaaat

SEQ ID NO: 15017 - DNA, 20 bp, Artificial Sequence
  Description of Artificial Sequence: Synthetic oligonucleotide
  Target: LAMA2; (+) strand; PAM type: NNAGAAW; PAM sequence: GAAGAAA
accaggagagagccgttaga

SEQ ID NO: 15018 - DNA, 20 bp, Artificial Sequence
  Description of Artificial Sequence: Synthetic oligonucleotide
  Target: LAMA2; (+) strand; PAM type: NNAGAAW; PAM sequence: ATAGAAA
atgttatccaaggcgagtat

SEQ ID NO: 15019 - DNA, 20 bp, Artificial Sequence
  Description of Artificial Sequence: Synthetic oligonucleotide
  Target: LAMA2; (+) strand; PAM type: NNAGAAW; PAM sequence: AAAGAAT
tatccaaggcgagtatatag

SEQ ID NO: 15020 - DNA, 20 bp, Artificial Sequence
  Description of Artificial Sequence: Synthetic oligonucleotide
  Target: LAMA2; (+) strand; PAM type: NNAGAAW; PAM sequence: GGAGAAA
caggactttatgttgggaaa

SEQ ID NO: 15021 - DNA, 20 bp, Artificial Sequence
  Description of Artificial Sequence: Synthetic oligonucleotide
  Target: LAMA2; (+) strand; PAM type: NNAGAAW; PAM sequence: GGAGAAA
ataacgttggcactggcttc

SEQ ID NO: 15022 - DNA, 20 bp, Artificial Sequence
  Description of Artificial Sequence: Synthetic oligonucleotide
  Target: LAMA2; (+) strand; PAM type: NNAGAAW; PAM sequence: AAAGAAA
gttggcactggcttcggaga

SEQ ID NO: 15023 - DNA, 20 bp, Artificial Sequence
  Description of Artificial Sequence: Synthetic oligonucleotide
  Target: LAMA2; (+) strand; PAM type: NNAGAAW; PAM sequence: TTAGAAA
cagaaggcaaggcaaaggat

SEQ ID NO: 15024 - DNA, 20 bp, Artificial Sequence
  Description of Artificial Sequence: Synthetic oligonucleotide
  Target: LAMA2; (+) strand; PAM type: NNAGAAW; PAM sequence: GCAGAAT
tttgaccatcaataatgaaa

SEQ ID NO: 15025 - DNA, 20 bp, Artificial Sequence
  Description of Artificial Sequence: Synthetic oligonucleotide
  Target: LAMA2; (+) strand; PAM type: NNAGAAW; PAM sequence: TAAGAAA
agaatttgaatttacagttt

SEQ ID NO: 15026 - DNA, 20 bp, Artificial Sequence
  Description of Artificial Sequence: Synthetic oligonucleotide
  Target: LAMA2; (+) strand; PAM type: NNAGAAW; PAM sequence: CAAGAAT
tttacagttttaagaaattt

SEQ ID NO: 15027 - DNA, 20 bp, Artificial Sequence
  Description of Artificial Sequence: Synthetic oligonucleotide
  Target: LAMA2; (+) strand; PAM type: NNAGAAW; PAM sequence: ATAGAAT
gaaatttcaagaataaaatg

SEQ ID NO: 15028 - DNA, 20 bp, Artificial Sequence
  Description of Artificial Sequence: Synthetic oligonucleotide
  Target: LAMA2; (+) strand; PAM type: NNAGAAW; PAM sequence: AAAGAAT
tttttatgcaaaagaccctg

SEQ ID NO: 15029 - DNA, 20 bp, Artificial Sequence
  Description of Artificial Sequence: Synthetic oligonucleotide
  Target: LAMA2; (+) strand; PAM type: NNAGAAW; PAM sequence: CCAGAAA
acacttttttatatcataag

SEQ ID NO: 15030 - DNA, 20 bp, Artificial Sequence
  Description of Artificial Sequence: Synthetic oligonucleotide
  Target: LAMA2; (+) strand; PAM type: NNAGAAW; PAM sequence: TTAGAAA
aattttgttattttacattt

SEQ ID NO: 15031 - DNA, 20 bp, Artificial Sequence
  Description of Artificial Sequence: Synthetic oligonucleotide
  Target: LAMA2; (+) strand; PAM type: NNAGAAW; PAM sequence: GAAGAAT
acctataaattgtgagaaga

SEQ ID NO: 15032 - DNA, 20 bp, Artificial Sequence
  Description of Artificial Sequence: Synthetic oligonucleotide
  Target: LAMA2; (+) strand; PAM type: NNAGAAW; PAM sequence: AAAGAAA
gaagaattaaaatgtgaagc

SEQ ID NO: 15033 - DNA, 20 bp, Artificial Sequence
  Description of Artificial Sequence: Synthetic oligonucleotide
  Target: LAMA2; (+) strand; PAM type: NNAGAAW; PAM sequence: AAAGAAA
gcaaagaaaccagccagggc

SEQ ID NO: 15034 - DNA, 20 bp, Artificial Sequence
  Description of Artificial Sequence: Synthetic oligonucleotide
  Target: LAMA2; (+) strand; PAM type: NNAGAAW; PAM sequence: TGAGAAA
acttcaatctgtgcagtcag

SEQ ID NO: 15035 - DNA, 20 bp, Artificial Sequence
  Description of Artificial Sequence: Synthetic oligonucleotide
  Target: LAMA2; (+) strand; PAM type: NNAGAAW; PAM sequence: GTAGAAA
ctcttaccaaaacaaatatg

SEQ ID NO: 15036 - DNA, 20 bp, Artificial Sequence
  Description of Artificial Sequence: Synthetic oligonucleotide
  Target: LAMA2; (+) strand; PAM type: NNAGAAW; PAM sequence: TTAGAAA
aagatcagactctttgagca

SEQ ID NO: 15037 - DNA, 20 bp, Artificial Sequence
  Description of Artificial Sequence: Synthetic oligonucleotide
  Target: LAMA2; (+) strand; PAM type: NNAGAAW; PAM sequence: ACAGAAT
ccacaaaacctatccatagc

SEQ ID NO: 15038 - DNA, 20 bp, Artificial Sequence
  Description of Artificial Sequence: Synthetic oligonucleotide
  Target: LAMA2; (+) strand; PAM type: NNAGAAW; PAM sequence: ACAGAAT
caacgaacacattttactat

SEQ ID NO: 15039 - DNA, 20 bp, Artificial Sequence
  Description of Artificial Sequence: Synthetic oligonucleotide
  Target: LAMA2; (+) strand; PAM type: NNAGAAW; PAM sequence: ACAGAAT
tgtacatatctgtgtctcac

SEQ ID NO: 15040 - DNA, 20 bp, Artificial Sequence
  Description of Artificial Sequence: Synthetic oligonucleotide
  Target: LAMA2; (+) strand; PAM type: NNAGAAW; PAM sequence: CAAGAAA
gtcttatttctttctttatt

SEQ ID NO: 15041 - DNA, 20 bp, Artificial Sequence
  Description of Artificial Sequence: Synthetic oligonucleotide
  Target: LAMA2; (+) strand; PAM type: NNAGAAW; PAM sequence: AAAGAAA
tttttataagagagtaagat

SEQ ID NO: 15042 - DNA, 20 bp, Artificial Sequence
  Description of Artificial Sequence: Synthetic oligonucleotide
  Target: LAMA2; (+) strand; PAM type: NNAGAAW; PAM sequence: GGAGAAA
ggtaatgacaagtactacca

SEQ ID NO: 15043 - DNA, 20 bp, Artificial Sequence
  Description of Artificial Sequence: Synthetic oligonucleotide
  Target: LAMA2; (+) strand; PAM type: NNAGAAW; PAM sequence: GCAGAAA
cacaaacagatgagacttgt

SEQ ID NO: 15044 - DNA, 20 bp, Artificial Sequence
  Description of Artificial Sequence: Synthetic oligonucleotide
  Target: LAMA2; (+) strand; PAM type: NNAGAAW; PAM sequence: AGAGAAA
gcaggaagaacagtcccctc

SEQ ID NO: 15045 - DNA, 20 bp, Artificial Sequence
  Description of Artificial Sequence: Synthetic oligonucleotide
  Target: LAMA2; (+) strand; PAM type: NNAGAAW; PAM sequence: GGAGAAA
tctggtgtatttttggaggg

SEQ ID NO: 15046 - DNA, 20 bp, Artificial Sequence
  Description of Artificial Sequence: Synthetic oligonucleotide
  Target: LAMA2; (+) strand; PAM type: NNAGAAW; PAM sequence: ACAGAAA
agaggagagaggagaaggga

SEQ ID NO: 15047 - DNA, 20 bp, Artificial Sequence
  Description of Artificial Sequence: Synthetic oligonucleotide
  Target: LAMA2; (+) strand; PAM type: NNAGAAW; PAM sequence: TCAGAAA
agaggagaagggaacagaaa

SEQ ID NO: 15048 - DNA, 20 bp, Artificial Sequence
  Description of Artificial Sequence: Synthetic oligonucleotide
  Target: LAMA2; (+) strand; PAM type: NNAGAAW; PAM sequence: TGAGAAA
aatgtaaaagatggtcacca

SEQ ID NO: 15049 - DNA, 20 bp, Artificial Sequence
  Description of Artificial Sequence: Synthetic oligonucleotide
  Target: LAMA2; (+) strand; PAM type: NNAGAAW; PAM sequence: ACAGAAA
agaagattagggagttgtga

SEQ ID NO: 15050 - DNA, 20 bp, Artificial Sequence
  Description of Artificial Sequence: Synthetic oligonucleotide
  Target: LAMA2; (+) strand; PAM type: NNAGAAW; PAM sequence: AAAGAAT
gattagggagttgtgaacag

SEQ ID NO: 15051 - DNA, 20 bp, Artificial Sequence
  Description of Artificial Sequence: Synthetic oligonucleotide
  Target: LAMA2; (+) strand; PAM type: NNAGAAW; PAM sequence: CAAGAAT
aaaaaattgtatcaactatt

SEQ ID NO: 15052 - DNA, 20 bp, Artificial Sequence
  Description of Artificial Sequence: Synthetic oligonucleotide
  Target: LAMA2; (+) strand; PAM type: NNAGAAW; PAM sequence: AAAGAAA
ctgatttagtgaagcagcaa

SEQ ID NO: 15053 - DNA, 20 bp, Artificial Sequence
  Description of Artificial Sequence: Synthetic oligonucleotide
  Target: LAMA2; (+) strand; PAM type: NNAGAAW; PAM sequence: TCAGAAA
tttttaatggaataagatca

SEQ ID NO: 15054 - DNA, 20 bp, Artificial Sequence
  Description of Artificial Sequence: Synthetic oligonucleotide
  Target: LAMA2; (+) strand; PAM type: NNAGAAW; PAM sequence: TTAGAAA
agttttataagacctaatta

SEQ ID NO: 15055 - DNA, 20 bp, Artificial Sequence
  Description of Artificial Sequence: Synthetic oligonucleotide
  Target: LAMA2; (+) strand; PAM type: NNAGAAW; PAM sequence: ATAGAAA
accataaaatagtcattttc

SEQ ID NO: 15056 - DNA, 20 bp, Artificial Sequence
  Description of Artificial Sequence: Synthetic oligonucleotide
  Target: LAMA2; (+) strand; PAM type: NNAGAAW; PAM sequence: TTAGAAA
gtttgaaatctggatgtaaa

SEQ ID NO: 15057 - DNA, 20 bp, Artificial Sequence
  Description of Artificial Sequence: Synthetic oligonucleotide
  Target: LAMA2; (+) strand; PAM type: NNAGAAW; PAM sequence: CAAGAAA
ggccatttgggctgagtttt

SEQ ID NO: 15058 - DNA, 20 bp, Artificial Sequence
  Description of Artificial Sequence: Synthetic oligonucleotide
  Target: LAMA2; (+) strand; PAM type: NNAGAAW; PAM sequence: CCAGAAT
tgtcacatcattattaaatt

SEQ ID NO: 15059 - DNA, 20 bp, Artificial Sequence
  Description of Artificial Sequence: Synthetic oligonucleotide
  Target: LAMA2; (+) strand; PAM type: NNAGAAW; PAM sequence: TTAGAAT
ttcaaaaccacttgtgtatc

SEQ ID NO: 15060 - DNA, 20 bp, Artificial Sequence
  Description of Artificial Sequence: Synthetic oligonucleotide
  Target: LAMA2; (+) strand; PAM type: NNAGAAW; PAM sequence: AAAGAAA
gtgtatcttagaatttgtcc

SEQ ID NO: 15061 - DNA, 20 bp, Artificial Sequence
  Description of Artificial Sequence: Synthetic oligonucleotide
  Target: LAMA2; (+) strand; PAM type: NNAGAAW; PAM sequence: TAAGAAT
tatgtaaatataacatttca

SEQ ID NO: 15062 - DNA, 20 bp, Artificial Sequence
  Description of Artificial Sequence: Synthetic oligonucleotide
  Target: LAMA2; (+) strand; PAM type: NNAGAAW; PAM sequence: TAAGAAA
ttagcagtagttactactaa

SEQ ID NO: 15063 - DNA, 20 bp, Artificial Sequence
  Description of Artificial Sequence: Synthetic oligonucleotide
  Target: LAMA2; (+) strand; PAM type: NNAGAAW; PAM sequence: CAAGAAT
actcaaaatataaatagtat

SEQ ID NO: 15064 - DNA, 20 bp, Artificial Sequence
  Description of Artificial Sequence: Synthetic oligonucleotide
  Target: LAMA2; (+) strand; PAM type: NNAGAAW; PAM sequence: CTAGAAA
tacagttccaaactgattgt

SEQ ID NO: 15065 - DNA, 20 bp, Artificial Sequence
  Description of Artificial Sequence: Synthetic oligonucleotide
  Target: LAMA2; (+) strand; PAM type: NNAGAAW; PAM sequence: TTAGAAA
ttgatagcagtataaaagtt

SEQ ID NO: 15066 - DNA, 20 bp, Artificial Sequence
  Description of Artificial Sequence: Synthetic oligonucleotide
  Target: LAMA2; (+) strand; PAM type: NNAGAAW; PAM sequence: GCAGAAA
ccttctctccaacagaagag

SEQ ID NO: 15067 - DNA, 20 bp, Artificial Sequence
  Description of Artificial Sequence: Synthetic oligonucleotide
  Target: LAMA2; (+) strand; PAM type: NNAGAAW; PAM sequence: ACAGAAA
gattcacaatttccatacca

SEQ ID NO: 15068 - DNA, 20 bp, Artificial Sequence
  Description of Artificial Sequence: Synthetic oligonucleotide
  Target: LAMA2; (+) strand; PAM type: NNAGAAW; PAM sequence: ATAGAAT
ttttctacaaaagcatgtgt

SEQ ID NO: 15069 - DNA, 20 bp, Artificial Sequence
  Description of Artificial Sequence: Synthetic oligonucleotide
  Target: LAMA2; (+) strand; PAM type: NNAGAAW; PAM sequence: GCAGAAT
ataacaattattgtgttaaa

SEQ ID NO: 15070 - DNA, 20 bp, Artificial Sequence
  Description of Artificial Sequence: Synthetic oligonucleotide
  Target: LAMA2; (+) strand; PAM type: NNAGAAW; PAM sequence: ACAGAAA
tgtgttaaagcagaatgatt

SEQ ID NO: 15071 - DNA, 20 bp, Artificial Sequence
  Description of Artificial Sequence: Synthetic oligonucleotide
  Target: LAMA2; (+) strand; PAM type: NNAGAAW; PAM sequence: ATAGAAA
ttcttgagtatccctgtaat

SEQ ID NO: 15072 - DNA, 20 bp, Artificial Sequence
  Description of Artificial Sequence: Synthetic oligonucleotide
  Target: LAMA2; (+) strand; PAM type: NNAGAAW; PAM sequence: TTAGAAT
tttaatcaatctgaatctgc

SEQ ID NO: 15073 - DNA, 20 bp, Artificial Sequence
  Description of Artificial Sequence: Synthetic oligonucleotide
  Target: LAMA2; (+) strand; PAM type: NNAGAAW; PAM sequence: CCAGAAT
aggaaattgtcctgggcaaa

SEQ ID NO: 15074 - DNA, 20 bp, Artificial Sequence
  Description of Artificial Sequence: Synthetic oligonucleotide
  Target: LAMA2; (+) strand; PAM type: NNAGAAW; PAM sequence: AAAGAAA
tcttgaggaagatatggcaa

SEQ ID NO: 15075 - DNA, 20 bp, Artificial Sequence
  Description of Artificial Sequence: Synthetic oligonucleotide
  Target: LAMA2; (+) strand; PAM type: NNAGAAW; PAM sequence: ACAGAAA
gaaaagatgaataaaagtaa

SEQ ID NO: 15076 - DNA, 20 bp, Artificial Sequence
  Description of Artificial Sequence: Synthetic oligonucleotide
  Target: LAMA2; (+) strand; PAM type: NNAGAAW; PAM sequence: ATAGAAT
agggaagcccagaagtcaat

SEQ ID NO: 15077 - DNA, 20 bp, Artificial Sequence
  Description of Artificial Sequence: Synthetic oligonucleotide
  Target: LAMA2; (+) strand; PAM type: NNAGAAW; PAM sequence: GAAGAAT
aggataatttcaaacctcag

SEQ ID NO: 15078 - DNA, 20 bp, Artificial Sequence
  Description of Artificial Sequence: Synthetic oligonucleotide
  Target: LAMA2; (+) strand; PAM type: NNAGAAW; PAM sequence: GCAGAAT
tttcaattccatcaacaaca

SEQ ID NO: 15079 - DNA, 20 bp, Artificial Sequence
  Description of Artificial Sequence: Synthetic oligonucleotide
  Target: LAMA2; (+) strand; PAM type: NNAGAAW; PAM sequence: TTAGAAT
atcaacaacagcagaatgct

SEQ ID NO: 15080 - DNA, 20 bp, Artificial Sequence
  Description of Artificial Sequence: Synthetic oligonucleotide
  Target: LAMA2; (+) strand; PAM type: NNAGAAW; PAM sequence: CAAGAAT
gcaaccctggaggctcctgc

SEQ ID NO: 15081 - DNA, 20 bp, Artificial Sequence
  Description of Artificial Sequence: Synthetic oligonucleotide
  Target: LAMA2; (+) strand; PAM type: NNAGAAW; PAM sequence: TGAGAAA
cagttctgtctcatttccaa

SEQ ID NO: 15082 - DNA, 20 bp, Artificial Sequence
  Description of Artificial Sequence: Synthetic oligonucleotide
  Target: LAMA2; (+) strand; PAM type: NNAGAAW; PAM sequence: TGAGAAA
cctgctgagccaagaacagc

SEQ ID NO: 15083 - DNA, 20 bp, Artificial Sequence
  Description of Artificial Sequence: Synthetic oligonucleotide
  Target: LAMA2; (+) strand; PAM type: NNAGAAW; PAM sequence: TTAGAAT
atgtgagtgtattaaaaaat

SEQ ID NO: 15084 - DNA, 20 bp, Artificial Sequence
  Description of Artificial Sequence: Synthetic oligonucleotide
  Target: LAMA2; (+) strand; PAM type: NNAGAAW; PAM sequence: GAAGAAT
tcttaatagtatcttaaata

SEQ ID NO: 15085 - DNA, 20 bp, Artificial Sequence
  Description of Artificial Sequence: Synthetic oligonucleotide
  Target: LAMA2; (+) strand; PAM type: NNAGAAW; PAM sequence: AGAGAAT
ttggggaacatttcttttaa

SEQ ID NO: 15086 - DNA, 20 bp, Artificial Sequence
  Description of Artificial Sequence: Synthetic oligonucleotide
  Target: LAMA2; (+) strand; PAM type: NNAGAAW; PAM sequence: TTAGAAA
cattttgaatacatttatca

SEQ ID NO: 15087 - DNA, 20 bp, Artificial Sequence
  Description of Artificial Sequence: Synthetic oligonucleotide
  Target: LAMA2; (+) strand; PAM type: NNAGAAW; PAM sequence: TAAGAAA
ccacttgtcccatgtgatat

SEQ ID NO: 15088 - DNA, 20 bp, Artificial Sequence
  Description of Artificial Sequence: Synthetic oligonucleotide
  Target: LAMA2; (+) strand; PAM type: NNAGAAW; PAM sequence: AAAGAAT
aagtgtttatattcttttta

SEQ ID NO: 15089 - DNA, 20 bp, Artificial Sequence
  Description of Artificial Sequence: Synthetic oligonucleotide
  Target: LAMA2; (+) strand; PAM type: NNAGAAW; PAM sequence: CCAGAAA
aaagaatagcagtttttatt

SEQ ID NO: 15090 - DNA, 20 bp, Artificial Sequence
  Description of Artificial Sequence: Synthetic oligonucleotide
  Target: LAMA2; (+) strand; PAM type: NNAGAAW; PAM sequence: TAAGAAT
acctttcactaaactaactc

SEQ ID NO: 15091 - DNA, 20 bp, Artificial Sequence
  Description of Artificial Sequence: Synthetic oligonucleotide
  Target: LAMA2; (+) strand; PAM type: NNAGAAW; PAM sequence: AGAGAAT
gaggtagcttggctctagca

SEQ ID NO: 15092 - DNA, 20 bp, Artificial Sequence
  Description of Artificial Sequence: Synthetic oligonucleotide
  Target: LAMA2; (+) strand; PAM type: NNAGAAW; PAM sequence: AGAGAAA
aagagaatttagatgtagta

SEQ ID NO: 15093 - DNA, 20 bp, Artificial Sequence
  Description of Artificial Sequence: Synthetic oligonucleotide
  Target: LAMA2; (+) strand; PAM type: NNAGAAW; PAM sequence: TTAGAAT
aataaactttctcctattgc

SEQ ID NO: 15094 - DNA, 20 bp, Artificial Sequence
  Description of Artificial Sequence: Synthetic oligonucleotide
  Target: LAMA2; (+) strand; PAM type: NNAGAAW; PAM sequence: ACAGAAA
tggatttgtgtatttcaaaa

SEQ ID NO: 15095 - DNA, 20 bp, Artificial Sequence
  Description of Artificial Sequence: Synthetic oligonucleotide
  Target: LAMA2; (+) strand; PAM type: NNAGAAW; PAM sequence: AAAGAAA
ttgtgtatttcaaaaacaga

SEQ ID NO: 15096 - DNA, 20 bp, Artificial Sequence
  Description of Artificial Sequence: Synthetic oligonucleotide
  Target: LAMA2; (+) strand; PAM type: NNAGAAW; PAM sequence: AAAGAAA
tatttcaaaaacagaaaaga

SEQ ID NO: 15097 - DNA, 20 bp, Artificial Sequence
  Description of Artificial Sequence: Synthetic oligonucleotide
  Target: LAMA2; (+) strand; PAM type: NNAGAAW; PAM sequence: ACAGAAA
agaaaagaaaagaaagagag

SEQ ID NO: 15098 - DNA, 20 bp, Artificial Sequence
  Description of Artificial Sequence: Synthetic oligonucleotide
  Target: LAMA2; (+) strand; PAM type: NNAGAAW; PAM sequence: GAAGAAT
tggattttcactactatcat

SEQ ID NO: 15099 - DNA, 20 bp, Artificial Sequence
  Description of Artificial Sequence: Synthetic oligonucleotide
  Target: LAMA2; (+) strand; PAM type: NNAGAAW; PAM sequence: AGAGAAA
tatgctggctactgataaac

SEQ ID NO: 15100 - DNA, 20 bp, Artificial Sequence
  Description of Artificial Sequence: Synthetic oligonucleotide
  Target: LAMA2; (+) strand; PAM type: NNAGAAW; PAM sequence: TGAGAAA
aacgagctaaaattacaaaa

SEQ ID NO: 15101 - DNA, 20 bp, Artificial Sequence
  Description of Artificial Sequence: Synthetic oligonucleotide
  Target: LAMA2; (+) strand; PAM type: NNAGAAW; PAM sequence: GAAGAAA
tagagactgtcttctatgca

SEQ ID NO: 15102 - DNA, 20 bp, Artificial Sequence
  Description of Artificial Sequence: Synthetic oligonucleotide
  Target: LAMA2; (+) strand; PAM type: NNAGAAW; PAM sequence: CAAGAAA
gagaacaactaacctgcctt

SEQ ID NO: 15103 - DNA, 20 bp, Artificial Sequence
  Description of Artificial Sequence: Synthetic oligonucleotide
  Target: LAMA2; (+) strand; PAM type: NNAGAAW; PAM sequence: ACAGAAT
tgtaaactcatatcattaac

SEQ ID NO: 15104 - DNA, 20 bp, Artificial Sequence
  Description of Artificial Sequence: Synthetic oligonucleotide
  Target: LAMA2; (+) strand; PAM type: NNAGAAW; PAM sequence: ACAGAAA
atgtattactctcctagaga

SEQ ID NO: 15105 - DNA, 20 bp, Artificial Sequence
  Description of Artificial Sequence: Synthetic oligonucleotide
  Target: LAMA2; (+) strand; PAM type: NNAGAAW; PAM sequence: GCAGAAA
attgccccctatatatggga

SEQ ID NO: 15106 - DNA, 20 bp, Artificial Sequence
  Description of Artificial Sequence: Synthetic oligonucleotide
  Target: LAMA2; (+) strand; PAM type: NNAGAAW; PAM sequence: ATAGAAT
tatatgggagcagaaacaaa

SEQ ID NO: 15107 - DNA, 20 bp, Artificial Sequence
  Description of Artificial Sequence: Synthetic oligonucleotide
  Target: LAMA2; (+) strand; PAM type: NNAGAAW; PAM sequence: GAAGAAA
atcacataatcttaaagttg

SEQ ID NO: 15108 - DNA, 20 bp, Artificial Sequence
  Description of Artificial Sequence: Synthetic oligonucleotide
  Target: LAMA2; (+) strand; PAM type: NNAGAAW; PAM sequence: ATAGAAT
atatgaatggtacttacctc

SEQ ID NO: 15109 - DNA, 20 bp, Artificial Sequence
  Description of Artificial Sequence: Synthetic oligonucleotide
  Target: LAMA2; (+) strand; PAM type: NNAGAAW; PAM sequence: ATAGAAT
tgttttcccatgtattatat

SEQ ID NO: 15110 - DNA, 20 bp, Artificial Sequence
  Description of Artificial Sequence: Synthetic oligonucleotide
  Target: LAMA2; (+) strand; PAM type: NNAGAAW; PAM sequence: AAAGAAA
tacagctttcctctctattc

SEQ ID NO: 15111 - DNA, 20 bp, Artificial Sequence
  Description of Artificial Sequence: Synthetic oligonucleotide
  Target: LAMA2; (+) strand; PAM type: NNAGAAW; PAM sequence: ATAGAAT
gagaagatatttattttaaa

SEQ ID NO: 15112 - DNA, 20 bp, Artificial Sequence
  Description of Artificial Sequence: Synthetic oligonucleotide
  Target: LAMA2; (+) strand; PAM type: NNAGAAW; PAM sequence: TGAGAAA
ttgaaggggaaaaagggaag

SEQ ID NO: 15113 - DNA, 20 bp, Artificial Sequence
  Description of Artificial Sequence: Synthetic oligonucleotide
  Target: LAMA2; (+) strand; PAM type: NNAGAAW; PAM sequence: ATAGAAA
gggaaaaagggaagtgagaa

SEQ ID NO: 15114 - DNA, 20 bp, Artificial Sequence
  Description of Artificial Sequence: Synthetic oligonucleotide
  Target: LAMA2; (+) strand; PAM type: NNAGAAW; PAM sequence: AGAGAAT
tattcctatttgattagagc

SEQ ID NO: 15115 - DNA, 20 bp, Artificial Sequence
  Description of Artificial Sequence: Synthetic oligonucleotide
  Target: LAMA2; (+) strand; PAM type: NNAGAAW; PAM sequence: GTAGAAA
attatgcatggggaatcctg

SEQ ID NO: 15116 - DNA, 20 bp, Artificial Sequence
  Description of Artificial Sequence: Synthetic oligonucleotide
  Target: LAMA2; (+) strand; PAM type: NNAGAAW; PAM sequence: ACAGAAA
gtattttgtgctaattgcta

SEQ ID NO: 15117 - DNA, 20 bp, Artificial Sequence
  Description of Artificial Sequence: Synthetic oligonucleotide
  Target: LAMA2; (+) strand; PAM type: NNAGAAW; PAM sequence: GGAGAAT
ttattagtattgctgaattt

SEQ ID NO: 15118 - DNA, 20 bp, Artificial Sequence
  Description of Artificial Sequence: Synthetic oligonucleotide
  Target: LAMA2; (+) strand; PAM type: NNAGAAW; PAM sequence: ACAGAAT
ttatcaaagaacagttgttt

SEQ ID NO: 15119 - DNA, 20 bp, Artificial Sequence
  Description of Artificial Sequence: Synthetic oligonucleotide
  Target: LAMA2; (+) strand; PAM type: NNAGAAW; PAM sequence: TCAGAAT
tgtaagtgaaatattttgtg

SEQ ID NO: 15120 - DNA, 20 bp, Artificial Sequence
  Description of Artificial Sequence: Synthetic oligonucleotide
  Target: LAMA2; (+) strand; PAM type: NNAGAAW; PAM sequence: ACAGAAA
ataataataaacctttggac

SEQ ID NO: 15121 - DNA, 20 bp, Artificial Sequence
  Description of Artificial Sequence: Synthetic oligonucleotide
  Target: LAMA2; (+) strand; PAM type: NNAGAAW; PAM sequence: ATAGAAT
ccaaaacagatgggcagggg

SEQ ID NO: 15122 - DNA, 20 bp, Artificial Sequence
  Description of Artificial Sequence: Synthetic oligonucleotide
  Target: LAMA2; (+) strand; PAM type: NNAGAAW; PAM sequence: AGAGAAA
ggcaggggatagaataaatg

SEQ ID NO: 15123 - DNA, 20 bp, Artificial Sequence
  Description of Artificial Sequence: Synthetic oligonucleotide
  Target: LAMA2; (+) strand; PAM type: NNAGAAW; PAM sequence: TGAGAAA
ttcttgtatgaagtaaaaac

SEQ ID NO: 15124 - DNA, 20 bp, Artificial Sequence
  Description of Artificial Sequence: Synthetic oligonucleotide
  Target: LAMA2; (+) strand; PAM type: NNAGAAW; PAM sequence: AAAGAAT
tatatattattaaataaatt

SEQ ID NO: 15125 - DNA, 20 bp, Artificial Sequence
  Description of Artificial Sequence: Synthetic oligonucleotide
  Target: LAMA2; (+) strand; PAM type: NNAGAAW; PAM sequence: GCAGAAA
aggggtccaagagtgtgaaa

SEQ ID NO: 15126 - DNA, 20 bp, Artificial Sequence
  Description of Artificial Sequence: Synthetic oligonucleotide
  Target: LAMA2; (+) strand; PAM type: NNAGAAW; PAM sequence: CCAGAAA
gtaaccatttttaattgtcc

SEQ ID NO: 15127 - DNA, 20 bp, Artificial Sequence
  Description of Artificial Sequence: Synthetic oligonucleotide
  Target: LAMA2; (+) strand; PAM type: NNAGAAW; PAM sequence: GAAGAAA
aaggtcccttctttaacgag

SEQ ID NO: 15128 - DNA, 20 bp, Artificial Sequence
  Description of Artificial Sequence: Synthetic oligonucleotide
  Target: LAMA2; (+) strand; PAM type: NNAGAAW; PAM sequence: AAAGAAT
tcccttctttaacgaggaag

SEQ ID NO: 15129 - DNA, 20 bp, Artificial Sequence
  Description of Artificial Sequence: Synthetic oligonucleotide
  Target: LAMA2; (+) strand; PAM type: NNAGAAW; PAM sequence: TAAGAAA
gcccaaacaggcataagtgt

SEQ ID NO: 15130 - DNA, 20 bp, Artificial Sequence
  Description of Artificial Sequence: Synthetic oligonucleotide
  Target: LAMA2; (+) strand; PAM type: NNAGAAW; PAM sequence: TTAGAAT
agtttcaggtaacagtaatt

SEQ ID NO: 15131 - DNA, 20 bp, Artificial Sequence
  Description of Artificial Sequence: Synthetic oligonucleotide
  Target: LAMA2; (+) strand; PAM type: NNAGAAW; PAM sequence: GAAGAAT
ggtgggagaagaccaaggga

SEQ ID NO: 15132 - DNA, 20 bp, Artificial Sequence
  Description of Artificial Sequence: Synthetic oligonucleotide
  Target: LAMA2; (+) strand; PAM type: NNAGAAW; PAM sequence: TCAGAAA
tggcagagcaagaccctgtc

SEQ ID NO: 15133 - DNA, 20 bp, Artificial Sequence
  Description of Artificial Sequence: Synthetic oligonucleotide
  Target: LAMA2; (+) strand; PAM type: NNAGAAW; PAM sequence: ATAGAAA
tgtctcagaaaaaaataaaa

SEQ ID NO: 15134 - DNA, 20 bp, Artificial Sequence
  Description of Artificial Sequence: Synthetic oligonucleotide
  Target: LAMA2; (+) strand; PAM type: NNAGAAW; PAM sequence: TTAGAAA
caatatcacctgggagcttg

SEQ ID NO: 15135 - DNA, 20 bp, Artificial Sequence
  Description of Artificial Sequence: Synthetic oligonucleotide
  Target: LAMA2; (+) strand; PAM type: NNAGAAW; PAM sequence: AGAGAAA
acattctcagtcagagacta

SEQ ID NO: 15136 - DNA, 20 bp, Artificial Sequence
  Description of Artificial Sequence: Synthetic oligonucleotide
  Target: LAMA2; (+) strand; PAM type: NNAGAAW; PAM sequence: TCAGAAA
tgatcaaatcacctcctgat

SEQ ID NO: 15137 - DNA, 20 bp, Artificial Sequence
  Description of Artificial Sequence: Synthetic oligonucleotide
  Target: LAMA2; (+) strand; PAM type: NNAGAAW; PAM sequence: GCAGAAT
tagcattgatacctctatct

SEQ ID NO: 15138 - DNA, 20 bp, Artificial Sequence
  Description of Artificial Sequence: Synthetic oligonucleotide
  Target: LAMA2; (+) strand; PAM type: NNAGAAW; PAM sequence: TAAGAAA
atacctctatctgcagaatg

SEQ ID NO: 15139 - DNA, 20 bp, Artificial Sequence
  Description of Artificial Sequence: Synthetic oligonucleotide
  Target: LAMA2; (+) strand; PAM type: NNAGAAW; PAM sequence: AAAGAAA
gtccattttcgtattgctat

SEQ ID NO: 15140 - DNA, 20 bp, Artificial Sequence
  Description of Artificial Sequence: Synthetic oligonucleotide
  Target: LAMA2; (+) strand; PAM type: NNAGAAW; PAM sequence: AAAGAAA
cctgaagctcggcaatttgt

SEQ ID NO: 15141 - DNA, 20 bp, Artificial Sequence
  Description of Artificial Sequence: Synthetic oligonucleotide
  Target: LAMA2; (+) strand; PAM type: NNAGAAW; PAM sequence: GTAGAAT
acagatccaaaccatatctg

SEQ ID NO: 15142 - DNA, 20 bp, Artificial Sequence
  Description of Artificial Sequence: Synthetic oligonucleotide
  Target: LAMA2; (+) strand; PAM type: NNAGAAW; PAM sequence: AAAGAAT
attagcattcttggctactt

SEQ ID NO: 15143 - DNA, 20 bp, Artificial Sequence
  Description of Artificial Sequence: Synthetic oligonucleotide
  Target: LAMA2; (+) strand; PAM type: NNAGAAW; PAM sequence: TAAGAAA
taagtcaataaatattatca

SEQ ID NO: 15144 - DNA, 20 bp, Artificial Sequence
  Description of Artificial Sequence: Synthetic oligonucleotide
  Target: LAMA2; (+) strand; PAM type: NNAGAAW; PAM sequence: ATAGAAA
tattatcataagaaaacact

SEQ ID NO: 15145 - DNA, 20 bp, Artificial Sequence
  Description of Artificial Sequence: Synthetic oligonucleotide
  Target: LAMA2; (+) strand; PAM type: NNAGAAW; PAM sequence: AAAGAAA
atcataagaaaacactatag

SEQ ID NO: 15146 - DNA, 20 bp, Artificial Sequence
  Description of Artificial Sequence: Synthetic oligonucleotide
  Target: LAMA2; (+) strand; PAM type: NNAGAAW; PAM sequence: CAAGAAT
atggaaattgctgcttgcaa

SEQ ID NO: 15147 - DNA, 20 bp, Artificial Sequence
  Description of Artificial Sequence: Synthetic oligonucleotide
  Target: LAMA2; (+) strand; PAM type: NNAGAAW; PAM sequence: CCAGAAA
tcaggtgcctagcctgggat

SEQ ID NO: 15148 - DNA, 20 bp, Artificial Sequence
  Description of Artificial Sequence: Synthetic oligonucleotide
  Target: LAMA2; (+) strand; PAM type: NNAGAAW; PAM sequence: TTAGAAT
atcaaaatgaaaacacatga

SEQ ID NO: 15149 - DNA, 20 bp, Artificial Sequence
  Description of Artificial Sequence: Synthetic oligonucleotide
  Target: LAMA2; (+) strand; PAM type: NNAGAAW; PAM sequence: GGAGAAA
ttttggtagttaacgaggta

SEQ ID NO: 15150 - DNA, 20 bp, Artificial Sequence
  Description of Artificial Sequence: Synthetic oligonucleotide
  Target: LAMA2; (+) strand; PAM type: NNAGAAW; PAM sequence: AAAGAAA
acgaggtaggagaaaacatt

SEQ ID NO: 15151 - DNA, 20 bp, Artificial Sequence
  Description of Artificial Sequence: Synthetic oligonucleotide
  Target: LAMA2; (+) strand; PAM type: NNAGAAW; PAM sequence: TAAGAAA
gtcaattatcagatatttat

SEQ ID NO: 15152 - DNA, 20 bp, Artificial Sequence
  Description of Artificial Sequence: Synthetic oligonucleotide
  Target: LAMA2; (+) strand; PAM type: NNAGAAW; PAM sequence: ATAGAAT
cagatatttattaagaaatt

SEQ ID NO: 15153 - DNA, 20 bp, Artificial Sequence
  Description of Artificial Sequence: Synthetic oligonucleotide
  Target: LAMA2; (+) strand; PAM type: NNAGAAW; PAM sequence: CAAGAAT
aacaataatcaagcaattag

SEQ ID NO: 15154 - DNA, 20 bp, Artificial Sequence
  Description of Artificial Sequence: Synthetic oligonucleotide
  Target: LAMA2; (+) strand; PAM type: NNAGAAW; PAM sequence: GGAGAAA
tacattagcgcacagagact

SEQ ID NO: 15155 - DNA, 20 bp, Artificial Sequence
  Description of Artificial Sequence: Synthetic oligonucleotide
  Target: LAMA2; (+) strand; PAM type: NNAGAAW; PAM sequence: AGAGAAT
cagtaagattcagggtaacc

SEQ ID NO: 15156 - DNA, 20 bp, Artificial Sequence
  Description of Artificial Sequence: Synthetic oligonucleotide
  Target: LAMA2; (+) strand; PAM type: NNAGAAW; PAM sequence: GAAGAAA
attatccctattttccagaa

SEQ ID NO: 15157 - DNA, 20 bp, Artificial Sequence
  Description of Artificial Sequence: Synthetic oligonucleotide
  Target: LAMA2; (+) strand; PAM type: NNAGAAW; PAM sequence: CAAGAAT
gaaaccaataatgatgataa

SEQ ID NO: 15158 - DNA, 20 bp, Artificial Sequence
  Description of Artificial Sequence: Synthetic oligonucleotide
  Target: LAMA2; (+) strand; PAM type: NNAGAAW; PAM sequence: ACAGAAA
gattaccatacatagctttt
